United States Patent Application Publication US 2004/0029129 A1 - sequence listing, part 17

SEQ ID NO: 44717 - protein, 821 aa, Acinetobacter baumannii
MYLYIAPTLPEMSSLKKAPLLKPLQVYTADNQLIAEYGGKLSIPVEYKQIPPNFIHAFLAAEDSSFFEHSGISFKGLGRALSESVTGSDVQTGGSTITMQVAKNYYLSPERTLKRKITEIFLARKIEQNLSKEDILSLYVNKIFLGKNAYGIAAAAKIYYNKSINELSIAQMAMIAGLPKAPSKYNPVVNPERALERRNWILGRMLQLGYISQAEYQKAVAEPINLNMPNRDLNNIHPYAGEMVRSELVKHFGEQAIDSGYKVYTTINAKRQAIAEKAVQDGLEAYDRRHGWRGAEAHDKPLSEFRAYANTYPAQVTKVNSSSFEALMQDGSTVTVQWSGMSWARPYRNANSVGAAPSRASQIVKVKDIVRLRPNEAKTAWSLVQVPKVQGQLIAINPNDGSIEAIVGGYNFYQSKFNRALQGWRQPGSTIKPFLYALALERGMTPYSMVNDSPITIGKWTPKNSDGRYLGMIPLRRALYLSRNTVSVRLLQTVGIERTRQLFMDFGLQEDQIPRNYTIALGTPQVLPIQMATGYATFANGGYRVQPHFIQRIEDAYGKVIYEAKPEYACIPCINAPETTDDAQVTTPDDQVVEVTNKELEQKEKTTKQLNLKQTDKNNSQYRQAQRILKSSSAYDMANILRDVIEHGTGRAALKIGRSDLGGKTGTTNDAKDAWFAGFNGKLVTVTWVGFDQPTTLGRREYGGIAALPIWINFMGQALQGTPAAWVRLEKDAQAPISRDKQEVTTEVGDKKTYRAAPPLARPLYRPAPPQPKTTNNDFDDLPGEEIVIPSKTTPPAMKPSQGAAPKREKDELENLINQIE

SEQ ID NO: 44718 - protein, 473 aa, Acinetobacter baumannii
MAERLNNDFQFLDVPRQDPEKKDITVRKAEFVEIYKPFTSETVTNQTHRCLGCGNPYCEWKCPVHNYIPNWLKLIAEGQIFQAAELCHQTNTLPEVCGRVCPQDRLCEGACTLNDGFGAVTIGNAEKYINDTAFALGWRPDMSHVKWTGKKVAIIGAGPAGLGCADILARGGVKPVVFDKRPEIGGLLTFGIPEFKMEKDVMKRRREIFTGMGIEFRLNTEIGKDVTIDELLAEYDAVFMGMGTYTYMKGGFPGEDLDGVYDALDFLISNVNRCQGWEKDPSEYISMDGKKVIVLGGGDTAMDCNRTSLRQGAHDVTCAYRRDESNMPGSAREVKNAYEEGVKFLFNRQPIEIVGENGKVTGVKVVTTQMGEPDSRGRRSPEPIPGSEEVLPADAVLLAFGFRPSPADWFGSVNINLDGSGRVVAPEQQEFKFQTSNPKIFAGGDMVRGSDLVVTAIWEGRQAAEGILDYLGV

SEQ ID NO: 44719 - protein, 209 aa, Acinetobacter baumannii
  MISC_FEATURE (208)..(208): X=any amino acid
LTLALSKGRILKETLPLLATAGINLLEDPEKSRKLIFPTTHKQVRILILRASDVPTYVENGAADLGVAGKDVLMEHGAQHVYELLDLQIAKCKLMTAGKVGMERPKGRLKIATKYVNLTRQYYASLGEQVDVIKLYGSMELAPLVGLGDYIVDVVDTGNTLRANGLEPLEEICKVSSRLIVNKASFKRKQVLLNPIISQLEQAVQSRXK

SEQ ID NO: 44720 - protein, 410 aa, Acinetobacter baumannii
MCLGFVMSNFLPAEEQLALIQRGTHEIISEEDLLKKLKENRPLKIKAGFDPTAPDLHLGHTVLINKLKTFQDLGHEVTFLIGDYTAMIGDPTGKSATRPPLSREQVEANAKTYQEQVFKILDPNKTKVRFNSEWFNQKSAADLIQLASQQTVSRMLERDDFTKRYNNHQPIAIHEFLYPLVQGYDSIALEADVELGGTDQTFNLLMGRTLQSRYGQESQVCITVPILEGLDGVNKMSKSLGNYIGVFDAPGAMYQKVLSMPDSLIERYFDLLSFKSLDEIKALLDEIAAGRNPQEVKRILALELVERFHDAEAAANAHKSAGNRITEGEVPADTPEVTISRGEFGGEIFIATILRVAGLNPNAAAAKDAVARGAVKVDWNVVDASFSVKENGTFIIQSGKKAIARVTFTD

SEQ ID NO: 44721 - protein, 382 aa, Acinetobacter baumannii
MRLKIAKESLLNVLSHVVGAVERRHTLNILSNVKIQTNAQALTITGSDLEVELVASTALSEGACLEAGETTVPARKLMEICKSLPTAALIDLQITEDQRCILKSGNSRFVLGTLPAEDYPLLTTENSQGTQVQVTQRELKRLFEKTAFAMAVQDVRFYLTGTLLEIDENQLRAVTTDGHRLALCEILASSTSSQLVQAIVPRKAVGELQRLLSIEDEQLTLLIGRELLNVTINTPSRDKEQGDITVRFTTKLIDGKFPDYRRVIPRGGDKHVLIGHDVFKQSLQRVAILSNEKLRGVFLNFNQDSLQLRANNPEQDEAIEDLAIQYQSAPLEMSFNAQYLLDVLGVLDGDDVNMSMTEANQSVLVQDPAHPDQTYVVMPMRV

SEQ ID NO: 44722 - protein, 643 aa, Acinetobacter baumannii
MIQFDQVSLRRGGRVLFQKASMQLHPGWKIGLTGVNGAGKSTLFAALLGSLGADEGSLTRPSVWTVAHMAQEVKALDMPAIDFVLSGDEEYWDIQNKLAQPEQLTDSDLAKLHGRFDEIHGYSAPSKAAQLMAGLGFLEHQLRLNVASFSGGWRMRLNLARTLMSRSDLLLLDEPTNHLDLDAILWLEDWLKAYEGTLILISHDRDFLDAITDHILHIENQELTLYTGNYSIFETTRSERLAQQQQAFEKQQEARAHLQKFIDRFKAKATKARQAQSRIKQLERMQQLAPAHVDTPFTFSFREPTKMSSPLLTLENASIGYGDKKIAEKIKLQITPNSRIGLLGMNGAGKSTLIKSLVGDLPLLAGERKASELLNIGYFAQHQMDALDGQASPMLQLARIADKQISEATLRSFLGSFGFSGERMDTPCESFSGGERARLALALIVWQRPNVLILDEPTNHLDLDMRHALSMALQDFEGAVVLVSHERQLIASVCDELLLVHGGKCTEFEGDLQDYAKWLREARQQQINAQTAVAQNNSSSAAPAPAKVDKEAQRKEAARRREQTRPIRKNIEKVESQIEKLQPRLAQIEEALADTSLYEANRKDDLLKLMNEQTELKAKLEQYEEQLLELMMELEEMEASFEN

SEQ ID NO: 44723 - protein, 464 aa, Acinetobacter baumannii
  MISC_FEATURE (54)..(54): X=any amino acid
LWTDCLTRLRQELSDNVFAMWIRPLVAEEVEGILRLYAPNPYWTRYIQENHLSXFLYWLNKLSEGRVRQVEILGDSRPGSILSSSEQPATTTAALQTAPIPQPAKVKREPEPVANTAVSSKSSKKKLLNPQFTFSLFVEGRSNQMAAETCRKVLTQLGASQHNPLFLYGPTGLGKTHLMQAVGNALLQAKPNARVMYMTSESFVQDFVSSLQKGKVEEFKKNCRSLDLLLVDDIHLLAGKEASLVEFFYTFNALLDESKQIILTSDRYPKELTELDPRLVSRFSWGLSVGVEPPDIETRIEILLKKAENSGVDLPRNCALFIAQQVVANVRELEGALNKVVAISRFKGAPIDLDVVRESLKDVLAIRARTISVENIQRVVSEYFRIPLKELVGPKRTRIYARPRQLAMGLARELTGDSFPEIGMAFGGRDHSTVMHACEKVVSLREEDPIFDEDYKNLLRLLQS

SEQ ID NO: 44724 - protein, 44 aa, Acinetobacter baumannii
MKRTFQPSELKRKRVHGFRARMATKAGRQVLARRRAKGRHSLTV

SEQ ID NO: 44725 - protein, 133 aa, Acinetobacter baumannii
MGVMALYSFSTDLRIRCAADYKSVFDGALFKVHQPHFLFLAKLTEQPNSRLGIVVAKKKVRRAHERNRIKRLARESFRLHQPKFGSDIDVVVMPKVGIETITNAELYQQLDFAWQKLQRLAKKHSKVVPTSQN

SEQ ID NO: 44726 - protein, 822 aa, Acinetobacter baumannii
MSSESQSASQTEQTNEKAYDSSSIKVLRGLDAVRKRPGMYIGDTDDGTGLHHMVFEVVDNAIDEALAGHCDEIIVTIHEDESVSVSDNGRGIPTDIHPEEGVSAAEVILTILHAGGKFDDNSYKVSGGLHGVGVSVVNALSSKLHLTIYRAGQIHEQEYHHGDPQYPLRVIGETDNTGTTVRFWPSAETFSQTIFNVEILARRLRELSFLNAGVRIVLRDERINLEHVYDYEGGLSEFVKYINEGKNHLNEIFHFTADADNGIAVEVALQWNDSYQENVRCFTNNIPQKDGGTHLAGFRAALTRGLNQYLENENILKKEKVNVTGDDAREGLTAIISVKVPDPKFSSQTKEKLVSSEVKPAVEQAMNKEFSAYLLENPQAAKSIAGKIIDAARARDAARKAREMTRRKSALDIAGLPGKLADCQEKDPALSELYLVEGDSAGGSAKQGRNRKMQAILPLKGKILNVERARFDKMISSQEVGTLITALGCGIGREEYNPDKLRYHKIIIMTDADVDGSHIRTLLLTFFFRQMPELVERGHIYIAQPPLYKLKKGKQEQYIKDNDALETYLISNAIDELALYISADAPAITGEALAKVIQDYQVSQKSLQRLTLRYPASLLDALLEVDAFKADQNHDQAYVQQWADQVREAVQRLQPSLRPEITLETFERENAQGEKSAHYWPRVTVYVHNLPHAYLLDAGLLNSAEYARLLKNSKSWFKLIEDGAYLQKGDRRIQVANFHQVWQHILQDSRRGMMIQRYKGLGEMNAEQLWETTMDPENRNMLQVTIDDAIEADRMFSCLMGDDVEPRRAFIEENALNADIDA

SEQ ID NO: 44727 - protein, 586 aa, Acinetobacter baumannii
MQQWARFAILGAMFVTAYLLILAWQKDYGNAATAPQQQAAAVSSHEVSADLPNAKTATVASDVPQANIAQSQTTDATAPVNQQLISVQTDLYHLWINPKGGDIVRIELLSHDKSKDSNQPFVMLENDAKRTYVAQSGLIGLNGPDSSRGGRPLYAVEKTSYTLADAKGVQDQSGHSEKVLTVPMVFKTPEGVEIIKTFTFTQGQYPIVVKHQVVNRSQQNWQGQMFGQLKRDNSEDPGKSSQGIFTLGTFLGGAWGTPDAHYNKLKFANFSEEKLNTEAKGGWVAMVQHYFVSAWIPGNLKLTQANGQPYVAKLESRQSADHMNIIGFTSPVINVPAGTSMEVDAKLYSGPKVQSELKDLAVGLNQTVDYGWLWPIAKLLFLGLQFFHSIVGNWGWSIILLTIMVKMILWPLSSKSYRSMAKMRVIAPEMQRMKEEFGEDRMRFSQEMMALYKREQVNPLSGCLPLLLQMPIFLALYWVLMESVELRHAPWLGWIQDLSAMDPWFILPLIMGATMFAQQMLNPQPADPMQAKVFRIMPIMFTVFMLFFPAGLVLYWIVNNSITILQQWFINKSVEKSRISKAESAS

SEQ ID NO: 44728 - protein, 451 aa, Acinetobacter baumannii
MHSQTTIAAIATPPGRGGVGVIRLSGPKAYDIAQKLTQKNLPEARMAGFRKFYDADGSIMDEGIVLCFPNPHSFTGEDVVELQGHGGPVIQNALLGRLFELGAIAAKAGEFSMRAFENGKMDLVQAEAIADLIDATSQAAARSAVRSLQGAFSTKINTVLEKLIHLRLHVEAAIDFPEEEIDFLADGKILALLEDVQQSVHAVQTSARQGQLLREGLQVVIAGKPNAGKSSLLNALAGVERAIVTDIAGTTRDVLHEKISLNGLPITLTDTAGLRETGDVVEKEGIRRAIKEIEQADLLLLVYDLNQGDDPLKLAQEYFAEHIEPRRLMLIGNKCDLTGQPAEISDYQGFRHITVSAKQEMGVQGLVDAITAHAGFHPEEDTFIARTRHLDAMKRTQLYLAEAREQLVVFNAGELVAESLRLAQNALGEITGDFSADDLLGKIFGSFCIGK

SEQ ID NO: 44729 - protein, 303 aa, Acinetobacter baumannii
MIVRDKSNVFKLLFAWKGTILPKVLPALSFVVLISACVVWLSYYHWIQIPTVPAIGFTIFGVILSICTGFRNNACYDRWWEGRKLWGALIANARHIVRDSHVLSNEQREHLIHQVLIFSNLLRDRLRQQTVEPTKFLEHAYLNNSSLNYLNEHINAPQFVLENIQKDLVKALKDGEISDIIYGTLTRHIVELGNIQAGCDRIAGTPLPYSYSVLLHRAVYCFCFILPFSLEAALGIWTPLIVGLIAYMFLGLDALSAQIEEPFGLQENDLPLDSIVRLIERESLSSLGQPLPPIIEAQNNNLL

SEQ ID NO: 44730 - protein, 352 aa, Acinetobacter baumannii
MKAARFYDRGDIRIEDIPEPEVTPGTVGIKVAWCGICGTDLHEFMEGPIFIPPCGHPHPISGESAPITMGHEFSGVVYAVGEGVDDIEIGQHVVVEPYIVADDVPTGPGDNYHLSKNMNFIGLGGRGGGLSEKIAVKRRWVHPISNKIPLDQAALIEPLSVGHHAFVRSGAKAGDIALVGGAGPIGLLLSAILKAKGLKVIITELSAKRKEKAKESGVADYILDPSEVDVVSEVMKITNGDGVDVAFECSSVNKVLDTLVAAVKPTGVIVIVSIWSHPASINVHSVVMKELDVRGTIAYVNDHQETIKLVEEGKINLEPFITQRIQLDDLISQGFETLIHNNESAVKIIVHP

SEQ ID NO: 44731 - protein, 339 aa, Acinetobacter baumannii
MPNKSFRNAIKEAIESEMRRDPTVFVVGEDVRGGHGGKNTEENQLEGFGGVLGVTKGLWTEFGSERVIDTPITESAIIGMAAGAAATGLRPVADLMFMDFYGVCHDMLYNQAAKFRYMFGGKAKAPMVVRGMIGAGFSAAAQHSQSPYNVFAAVPGLKVVVPSSPYDVKGLLIQAIRDDDPVVFCEHKMLYDIKGEVPDDAYTIPFGVANYTREGTDVTIIALGLMVHRANEVADKLAKDGISVEVVDPRTISPLDEEGILESVASTGRVVIVDESAARCGFGHDVAALVAQKGFHYLKAPVELVTPPHTPVPFSPVLEKEWIPSVERIEQAVRKTLEA

SEQ ID NO: 44732 - protein, 320 aa, Acinetobacter baumannii
MQLTEEQLLAAYKRMRDIREFEDRLHEENTNGDIPGFIHLYSGEEAVAVGICENLTDKDYITSTHRGHGHCIAKGCDIHAMMLEIFGKDDGLCRGKGGSMHIADLDKGMLGANGIVGGGPPLAIGAALTAKTLKTGGVGLSFTGDGGSNQGLTFEAMNMAVVLKLPVIFVFENNGFGEGTGHDYAVGSKDIAGRAAGFGLPAVKVDGTDFFAVYEAAQTAIERARRGEGPSVIETITNRFYGHFEGDPGLIRSKEEVEFIKENKDPLKIFREKVKGKIDEAKLDEIDAASKANVDDAVAKARAAAYPKPEQLLTDVYVSY

SEQ ID NO: 44733 - protein, 328 aa, Acinetobacter baumannii
MDLKRQIETGIKLRGIDKVSRIPIKILPTEELPKKPEWIRAKITDFEEIQRIKNLLRQQKLHSVCEEAACPNLPECFGGGTATFMIMGDICTRRCPFCDVAHGRPMPLDENEPKHLAETVANLNLKYVVITSVDRDDLHDGGAAHFVKCIEEIRNRCPDTLIEILVPDFRGRLETALSTLSLSPPDVFNHNIETVPRLYKAMRPGSDYQHSLNLLKRFKKYCPDIKTKCGLMVGLGEIEAEVIALLNDLKDHDVDLVTIGQYLQPSKSHAPIHRFVNLQEFERYTQHGQRLGFKNIWSAPMVRSSYFADRQYFGESAPKPFSREDVLS

SEQ ID NO: 44734 - protein, 390 aa, Acinetobacter baumannii
MSSIVIVSGSRTAMGGFQGSLSSLTAPELGAAVIRESIQRAGVKPEQVDEVIFGCVLSAGIGQGPARQAMRKAGVPDHVGAVTINKLCGSAMKAVLMASDTLKAGSANIIVAGGMESMTNAPYILPKARGGYRMGHGEIKDHMFLDGLEDAETGRLMGSFAQDMANTKGFTREQMDDFAISSLKKAQTAITEGYFKEEIVPVEVKTRKGVEVVDQDEQPLKANLEKIPTLRPAFSKDGTITAANSSSISDGAAALVLTTEEYAQSHGLNTLAKIVATSTHSQHPSEFTIAPISAIQKVLERAGWSVDEVDAWEINEAFAMVAMAPIHELGIDEAKVNVHGGACALGHPIGATGSRIILSLIYALKRLGKKKGVAALCIGGGEATAVAIEI

SEQ ID NO: 44735 - protein, 358 aa, Acinetobacter baumannii
MISYEKTDMNHGTFPVFDGHNDVLTRLWLSDYNNPAQAFIQEGLAGHLDLKRCQQAGFVGGMFAIFLPPFHYVKQHHPNKLFDQDASDFTQQQIEHICLAQLDLAKQLAEYSNDIQICTTVQDIQHCLTQQKLAIVLHMEGAEALQHNPDLLDVFYDAGLRSIGPLWNRPSRFGHGLNAKFPHSPDTGAGLTNEGKAFIKRCADKKMVIDVSHMNERAFWDTANILQQPIVATHSNVHALCPQARNLTDNQLKAIKDSKGIVGLNFDVAFLRKDGQRDANTSIEVILEHLEYLIDQMGENHVGFGSDFDGALISHEIEDVRGLHLLIEAMQKRHYSNEIIEKICFSNWLTVLNRILSK

SEQ ID NO: 44736 - protein, 303 aa, Acinetobacter baumannii
MHIYILGSAAGGGFPQWNCNCPNCHGVRTGTINAKVRTQSSIAISENGVDWILLNASPDIRQQLFDFKAAQPARKLRDTGITNVILMDSQLDHTTGLLTLREGCPMNVWCTEMVYQDLTTGFPVFNMLKHWNGGLQYHQIDPKQAFKINGFENLEFLPLIIQSAAPPYSPHRHDPHEGDNIALIIKDHKTQKQLFYAPGLGKIDDQIMQIMQDSDCVMIDGTLWTDDEMQQTGVGKKTGREMGHLYISGEGGSLSYLNQLSTPKKVLIHINNTNPILNENSAQFAELKANGVEVAFDGMQIEL

SEQ ID NO: 44737 - protein, 261 aa, Acinetobacter baumannii
MVSDTKIKNLAFACSVLSIGLVFNVPAKAESVTVYAAASLTNAINDLEKIYEKQNKVEVKTSYAGSSTLAKQIEAGAPADIFISADTQWMDYLQNKKLVATNDRINLLGNRLVLITPKGQSLNIKLDKTTDPNRVFTGKICTGDTKSVPVGKYAKQAFTNLGWWSRIEPKLVETEDVRAALNFVARGECQVGIVYATDAAISKDVKVAGIFPENTHSPIIYPLGLIKKNPNSTKFYQFLQSNQAKAVFKKYGFSVLAPVKP

SEQ ID NO: 44738 - protein, 593 aa, Acinetobacter baumannii
MTTLNILFKTTSLCLAMALLVGCNDNDDNDSSTPAPRSNQTVNILAFNDFHGNLEPPKRYVEAANPNDASQTVRIPVGGVSYFADAIKKLKAQNPNNAVVSAGDLISASPLTSSLFLDEPTIEVMNDIQIDFNAVGNHEFDRGTDELRRLQNGGCQQYTSTAPCQINKNFSGAKFNFLAANVAMKNDTSKTIFPAYKVKTYGGIPVAFIGLTLKATPSIVSAVGIKDVEFRDEADTVNALIPELQKQGIEAIVVVVHEGAAPSTKLNQKTCDGLSGPILGILDRLNPAVDIVVSGHTHQSYICDYATKNPAKPFLLTSAGQYGTLITDIKVELDGKTGDIIKKDAKQIPVQSEAYTSGTTTVSLTDLYQKFSKTPSIEAILDKYRQAVTTISGRVVGTSTAVVSRTQVESGESPLGDMIADAQQAAALQASNQGSDFTLMNPGGVRADLLINSNNQITFGDIFAVQPFGNSIVTLSLTGKQIRDVLEQQWSGANANSPRILQPSKELSYQYAANTSVSPRASNIMVAGSPLVDTKVYRVTVNSFLADGGDNFTVLKEGQNRVGGGQDIDALESYVAKNSPLIIPATTRIKVIK

SEQ ID NO: 44739 - protein, 342 aa, Acinetobacter baumannii
MGHSVALNFADGKTFFISVNNDELLLDAAVRQGINLPLDCREGVCGTCQGQCETGIYEQEYVDEDALSERDLAERKMLACQTRVKSDAAFYFDHDSAICNAGDTLKIETKVTAVELVSETTAILHLDASSHAEQLQFLPGQYARLQIPDTEDWRSYSFANRPNATNQLQFLIRLLPDGVMSNYLRDRCQVGQSLLIEAPLGSFYLREVERPLVFVAGGTGLSAFLGMLDNLVEQPNSPAVQLYYGVNSETDLCEQQRLQAYAEQLPNFSYHPIVTKATETWQGKAGYIHEHLNKDQLAEQAFDMYLCGPPPMIEAVKNWLDEQALQNYRIYSEKFLQSNTSR

SEQ ID NO: 44740 - protein, 149 aa, Acinetobacter baumannii
MSQTLQAAYAAKRKARRFAVQGIYEWQMSHNPVHEIEARTRAENAMHKVDLNYYHELLTQVIAQHEDLDALLIPVLDREIDALDGVELATLRLGAYELRDHLEIPYRVVLDEAIELAKHFGGADSHKYINGVLDRLSSTLRSAEKQQAK

SEQ ID NO: 44741 - protein, 454 aa, Acinetobacter baumannii
MSTTVIILAAGKGTRMRSQLPKVLQPLAGRPLLGHVIKTAKQLLAENIITIYGHGGDHVKKTFAQENIQWVEQAEQLGTGHAVQMTLPVLPKDGISLILYGDVPLVRQTTLEQLIEVSNKTGIGMITLHVDNPTGYGRIVRQDGKIQAIVEHKDATEAQRQIQEINTGIYCVSNAKLHEWLPKLSNENAQGEYYLTDIVAMAVADGLEIASIQPELAFEVEGVNDRLQLAALEREFQKQQAKELMQQGVTFADPARFDLRGTVKVGHDVRIDVNVIIEGDCELGDFVEIGAGCILKNTTIAAGTKVQAYSVFDGAVVGENTQIGPFARLRPGAKLANEVHIGNFVEVKNTTIGLGSKANHFTYLGDAEIGAESNIGAGTITCNYDGANKHKTTIGDAVFIGSNSSLVAPVTIGNGATVGAGSVITKDVAEQSLSFERAQQISKANYQRPQKLKK

SEQ ID NO: 44742 - protein, 390 aa, Acinetobacter baumannii
MATLNPRDVVIVDGVRSAMGKSKNGMFRNVRADSLSAELVRALVARNQFDVNEVEDLIWGCVNQTLEQGMNIGRNIGLLAGLPKTVAGQTVNRLCGSSMQAIHTAAAQIATNQGDIFIIGGVEHMGHVGMMHGIDLNPEASKHYAKASNMMGLTAEMLGRMNGITREEQDAFGVESHRRAWAATQEGRFKNEIIGVEGHDANGFKILCDIDEVIRPDANLEAFKALKPVFDPKGGSVTAATSSALSDGASAMLLMSAERAQALGLKPRAVIRSMAVAGCDAAIMGYGPVPATQKALKRAGLSIADIQTVELNEAFAAQGLSVLKGLGLYDKQDIVNLNGGAIALGHPLGCSGARITTTLLNVMEQQDTQIGLATMCIGLGQGIATVIERV

SEQ ID NO: 44743 - protein, 177 aa, Acinetobacter baumannii
MKRWYIIHAYSGYEKQVMRSLKERIQRSAVADSFGDVLVPTEEVVEMKDGKKRKSERKFFPGYVLVEMEMNDDTWHIVKECPKVLGFIGGTPEKPAPITQREADAILARVRNTGEAPRPKTMFEPGEELLVIDGPFTDFKGVVEEVQYDKSRLTLTINVFNRPTQVELEFRQVEKTI

SEQ ID NO: 44744 - protein, 595 aa, Acinetobacter baumannii
MAGARGLWRATGMKDEDFGKPIIAVVNSFTQFVPGHVHLKDLGQLVAAEIQAAGGVAKEFNTIAVDDGIAMGHDGMLYSLPSRDLIADSVEYMVNAHCADAMVCISNCDKITPGMLMAAMRLNIPVVFVSGGPMEAGKVKFRGDEKAIDLVDAMVVAADDSYTDEEVAEFERSACPTCGSCSGMFTANSMNCLTEALGLSLPGNGSIVATHANRKKLFLKAGQLIVELAKRYYEQNDASILPRSIATKAAFKNAMTLDIAMGGSTNTVLHLLAAANEAEVDFTMDDIDELSRRVPVLSKVAPAKQDVHMEDVHRAGGIMAILGELDRANLLDVSVPTVHEKTLKDALDKWDIIRTEDPEVYEFYRSSPGGVPTQVAFSQNRYYSTLDGDREKGVIRNAEHAFSKDGGLAVLYGNIALDGCIVKTAGVDESILKFTGTARVFESQDAAVEAILGNEIKAGDVVVIRYEGPRGGPGMQEMLYPTSYLKSKGLGKDCALVTDGRFSGGSSGLSIGHVSPEAAEGGAIGLVEDGDTIEIDIPNRTIHLNIDDATMAHRRTVQEAKGWHPKEERKRKVSKALKVYAMHTTSAAKGAVRVL

SEQ ID NO: 44745 - protein, 592 aa, Acinetobacter baumannii
MMRTHYCGSLTEAQIDQTVTLCGWVHRRRDHGGVIFLDMRDRDGLVQVVIDPDTPEAFATADKARSEYVLKITGRVRRRYEGTENPNMVSGQIEVLGKEIEVLAASETPPFPLNDDTINVSEEHRLKYRFLDIRRPEMLERLRFRSKVTNLIRNYLDDHGFLDVETPILTRATPEGARDYLVPSRVQNGSFYALPQSPQLFKQLLMVGGIDRYYQIAKCFRDEDLRADRQPEFTQIDIETSFLNDDDIMDLMEGMTVKLFNDLLGVKFEKFRRMPYSEAMRDYASDKPDLRIPLKLVDVADLMQEVEFKVFAGPAKDPKGRIAALRVPGAGSLTRSQIDEYTKFVGIYGAKGLAYIKVNEIEKGIEGLQSPIVKFIEPIVMQLLERVGAENGDIVFFGADKAKIVNDAMGALRVKIGHDLNLATCEWAPLWVVDFPMFEETDDGKWTSVHHPFTLPKSSVEDVKSNPGEALSVAYDMVLNGTEVGGGSLRIYTLEMQKAIFEALGISDEEAEEKFSFLLNALRYGAPPHGGLAFGLDRLVMLMTGATSIRDVIAFPKTKTAECPLTQAPAPVEANQLRDLGIRLREQQKKEA

SEQ ID NO: 44746 - protein, 615 aa, Acinetobacter baumannii
MSKTFAEFSLHETLQQALEGLGFTNPTPVQEQSIPAALEGKDLLVSSQTGSGKTAAFLLPTLHNLAGQDTFVPFKERMKAVTQPSILVLCPTRELAQQVSQDAIAFVRHMKGVRIAAIMGGMPFGKQIQQLKGAQVVVATPGRLLDLVNRRQLKLDKVDALIVDEADRMLDLGFSEDLEAISDLAANRGQTLMFSATFADRIIRLAERMMNEPERIAIETGHSTNTDITQTLHWTDGFEHKKKLLTHWLADETLDQAVVFASTQEDTDMLAEELAEAGHSVVALHGAMPQTVRNRRLRSIREGRAKILVATDVAARGLDVPTISHVINFGLPMKHEDYVHRIGRTGRAGRTGQAITLATYRERGKIRALEDYLEARLNVSEIEGLEPSPPPARPRREGGRGGNGGRDGRRGGGFGGGRRFEGEGNFKRREGGRDDRPRRSFDDKPRGERPAFGGEDRPRREFNSDRPRREGGFEDRPRRSFGGEDRPRREFNSDRPRREGGFEDRPKRSFGGEDRPRREFNSDRPRREGGFNDKPRFDSNDDNRGNRVDYKPRRENGFGDRPQRSFGGEDRPRREGGFGDRPKRSFGGEERPRRAVREEHFNQESRGERRRKFDR

SEQ ID NO: 44747 - protein, 692 aa, Acinetobacter baumannii
MPYFLGHQLATIPLTLGVVAAGLSDIDDRFSVRIMNLIYTYIGFFITAASVQLLFPYPMLFALGLIASCIGWILLGSLGRRYATISYGCLVVSVYTMLGVHLFDQWYIQPALLVAGAAWYGLIATISFLLFPVRQLQDKLAASYASLGDFLFAKSNLFDVDMTPASYQQSMIDLSLENGKLITIFNDLKTALLTRLKGDRGQKGTRRSLHYYFVAQDIHERADSAHIDYQKLAKIFQHSDILFRFQRILAIQGKACQELNECILQRKPYIHNKRFKQSFENLRLSLVKLRNDQQYDLLWVNALFALYRNLKSIDSQLLNLETEQHIQSDKVKQAENQLKDDDLKGWNDIVVRIKQNLTPESVLFRHAIRVSIVLFIGYVFIQMTHIEYGYWIMLTALFVSQPNFNATKRRLRLRIVGTLVGIIVGLSIVFLVPSVEGQLVMLILSGVLFFELRSKQYAQATAFITILALINFNLDGSAVAAAIPRFVDTLIGCALAWFGVTFIWPDWKFRRLPRSIRRSLQAQCNYLAEVVKQYHEGHNHALNYRIVRRAAHNTDAEVASLISTLATEPDFDPTRKSDIFEFLCLNHTFLSYIAALGAHREKIQDQAVLNVLDQALDDIQGALLRDEMPDLTAQNMLQTIRQRLSQNDEDDQKSLIILQQLSLMLSVLNRFSMLKQRLSHDLDNDASELASL

SEQ ID NO: 44748 - protein, 404 aa, Acinetobacter baumannii
MSEQTAQRQYSIGWIMLLALLTALGPLSIDMYLPALPQMAHDFGVSTQMVANTLPAYFFGLAIGQLVYGPLSDRIGRKKPLYFGLALYAVASLFCVLATNEWSLIAARILQALGGCVGVVMARAAIRDRLDVQGSAQAFSSMMIVMGLAPILAPMIGAWILIWFPWQAIFIALSIVGAICWLCVHFFFKETLAVDKRLKLSLYQVATLYGAIFKDASFRLPMFAGCLTGAALFCYISSAPAVFMDQYGLNQQEFAYVFGLNAFGIMLMSSLNKHLTTRVEITKRLKAGSMVQVTGASIVLIAGLISAAPLWLVMLGLFLAISGIGLTGPNAMALAMSKQGARAGTASAIMGSMQFACGLLGGVLLNFLIWSASLNMGVMMVLFTLSGFIVVLKAIRQAKSQSLS

SEQ ID NO: 44749 - protein, 489 aa, Acinetobacter baumannii
MAEAQKLKLIDGWEVVIGIEIHTQLATNSKIFSGSSTEFGQDPNTQASLVDLAMPGVLPVLNEKVVELAIRFGLGIDAYIDQASVFARKNYFYPDSPKGYQISQMDNPIVGLGHIDIQLEDGTTKRIGVTRAHLEEDAGKSVHDQFEGMSGIDLNRAGTPLLEIVSEPDMRSVEEAVAYIKAIHTLVRWLGISDGNMAEGSFRADCNVSLRRPGQPFGTRCELKNLNSFRFIEQAINVEIERQMEILEWGGEIDQETRLFDPNKMETRSMRSKEEANDYRYFPDPDLLPVIIPDEQIEAIKATMPELPAARRARFIADFGVTEYDAHVLTLSREMADFYEAVVAAAGGAKQGKIAANWVMGEFSGALNKAGLELTDSPVSAEQLGGMIARIIDNTISGKIAKQVFGFMWESEGKSADDIIAEKGLKQETDTGAIEAIIKEVLAANEKMVEEYKSGKEKAFNGLVGQVMKASKGKANPAQVNELMKKLIG

SEQ ID NO: 44750 - protein, 492 aa, Acinetobacter baumannii
MTDLHRLSIRELAEGLSQAKFSSRELTEHYLKRIAKIDPQVKSYVTVTPEQALREADAADAALKAGNATALTGIPLAHKDIFCTKGIKTTAGSKMLDNFISPYDATVVEKTKAAGLVTLGKVNMDEFAMGSTSESSYVGATSNPWALDHVPGGSSGGSAAAVAADLAPFATGTDTGGSIRQPASFCGLTGLKPTYGRVSRFGIIAYASSLDQAGPMARSAEDCAYLMNVIAGHDAKDSTSVKKEVDDYVANLNNTSVKGLRIGIPKQYFNVAGLDADVKARVEESLKKLEEMGAALVEIDLNMTEAYVPTYYLIAPAEASSNLSRYDGVRYGYRCENPADLMDLYKRSRSEGFGPEVQRRILIGTYALSAGYYDAYYVKAQKVRRLIQQDFLKAFENVDVIAAPAAPTTAYKIGASLDPVEMYLGDIYTIAVNLAGLPAINAPVGFDKDNLPVGLQLIGNYWSESQLLSIVHQYQQNTDWHTKRAAIAEENA

SEQ ID NO: 44751 - protein, 104 aa, Acinetobacter baumannii
MSTSDAQHSADLNAQTVSAIANLARLSLNDTQSAEYAQSLNKILGMMETLKGIDTEGVEPLKSPFDNPQPLRADVVTESNHRDEYQAVAPATQDGLYLVPRVIE

SEQ ID NO: 44752 - protein, 346 aa, Acinetobacter baumannii
MILKRLIGLFSPDLAIDLGTANTLIYAPGRGIILNEPTVVAIRHSGSQKIVAAVGLDAKQMLGRTPANISAIRPMKDGVIADFEVTETMLNQFIGKVHEKRLFPPAPRVVVCVPCKSTLVERRAIREAVFNAGARDVRLIEEPMAAAIGAGMPVEQACGSMVVDVGGGTTEIAIISLQGCVYADSLRIGGDVFDEQIINYVRKAHGCVIGETTAEIIKKEVGMAVSDGTTLEIEVRGRNLAEGVPRAITVTSDEITQAISDPLQSIVSAVKSALEQTPPELSSDIAERGIVLTGGGALLRNLDKLLAQETGLPVVVAEDPLTCVTRGGGKVLEFFDNPNHDMLFVG

SEQ ID NO: 44753 - protein, 303 aa, Acinetobacter baumannii
MSSLSQVNADVLKQAQQRIQQDLLTTLAAFSIPEPLKSAVHHAVMLGGKRVRPALCYATASLQDNPNFAAARRAAVAVELIHCYSLAHDDLPCMDNDLLRRGQPTCHVAFGEDTALLAGDILQSMAFEVLGSRLFDEQGQGTDAAIVLKQIQILATASSKMVCGQVLDLQAEAKQISQDELENIHRNKTGALIQAAIMMGAVTIFSGTDQAIPKLRQYGQAIGLAFQVQDDILDITSSTETLGKTAGKDEQVQKSTYPALMGLEQAQIYAKELHDQAFDALAHFGENAKELVEISQFLLARTN

SEQ ID NO: 44754 - protein, 344 aa, Acinetobacter baumannii
MTPELPGTYINLLVEIVKRRGISCEQFLEGSGVTPEQLKKPYWYVEFNILNNLLEHAIQLTHEPALAGYLALEMKASCYGSVGMAAMVSANLEEALKILEQFIGSRCDAFKPELKQEQDDVYWSIHQPLKSFQLSSDATIFLLLGFVYIAKHLTGVSSLGTVQLNMPEPLGFSKIKDKLGVSCLFEQKHNIWIIPKEYLMQPVLTADPMLAPLLKAQCKKDIDKLKLRSGWKAEISQVIKKLLINSQGEILKVKQVAQMMNMSERSLQRYLAIENTSFSALVDLTRKQYAQDLLQNSSMSIEAVALSLGYADTPHFTRAFKRWMGVTPKYYQTQLKLKNLEIRE

SEQ ID NO: 44755 - protein, 291 aa, Acinetobacter baumannii
MNTPASNDKNPTPDLAEDNAFFPSPYSLSQYTSPKTDYDGTTYPTPYAGNKKVLMIATDERYIQMQNGKFFSTGNHPVEMLLPMFHLDNAGFEIDVATLSGNPAKLEMWAMPKQEQVVLDTFQKYADKLKNPLKLADILENVVGENSPYAAVFIPGGHGVLAKIPHSLEVKKVLKWAVEQDKFIITLCHGPASLLAAAVDEQPENYIFKDYQICVFPDSLDKGANIDIGYMPGALPWLVGENLEKLGVKILNTGITGQCHRDRKLLTGDSPLASNNLGKLAAETLLAEVKD

SEQ ID NO: 44756 - protein, 337 aa, Acinetobacter baumannii
MIPKHNDGSAYDHWARGGGSVKARFSNTTVRYGTQVLDLPVLASNTGRMVPEYFTGTLLTSHEIKNLEVVAGKFTKDQMSDQINTDADASGRGLDRAIVWGAKYKFNDNLNASYYGLDSKNALERHYANVNFKQPLANDSSLTYDFSGYHTKFDANAHTYSATGTVAPNYAADGIAGEEKTNNIWAISGTYATGPHSVMLAYQQNTGNVGYDYGQNADGFQSIYLPNSYMSDFIGNHEKSAQIQYNVDFGKLGVLPGLNWTTAFVYGWDIKVRNVTDDAQEREFFNQVKYTVQSGFAKDASLRIRNSYYRASDAYQGAYIGDTNEWRIFLDIPVKLF

SEQ ID NO: 44757 - protein, 237 aa, Acinetobacter baumannii
MRIIGHRGARREAPENTLGGFQHIKNLGIRGVEFDIRQLQDQELVVIHDDNFLRTAGVDQIVEQSTLAQALSFDHRQNWPNWPTSEPTPTLTGVLNLLDNFDHIEVEVKAVRDMALAEKLIQKLETELQGFEKVVTITSFDLQILTALRDINSQFKRGLLVELPVGATAIELAHQYGCCHIGWHDQLATDEMIQLSHQAGLNISVWTVNDVERAERLRDLDIQGLITDIPTTMLEAL

SEQ ID NO: 44758 - protein, 298 aa, Acinetobacter baumannii
MNQEVKSGKVLSPSTPWTQRPVPGIEVADEQQTLKATFTEPTIECPECHALVTRTAISFNAYVCPQCDEHLRMKARDRLNWFFDNVVAELGQEFSAKDPLKFVDSKPYPDRMREAQTKTGETEALIAMQGNLNGVDMIACAFEFDFMGGSMGTVVGDRFVKAAELAIEKRQPLICFAASGGARMQEGMLSLMQMARTSAAIQKLKDAGLPYIVVLTHPVYGGVTASLAMLGDIHIAEPKAMIGFAGKRVIEQTVRETLEEPFQRAEYLLDHGVVDQIVHRHALRDTVSRLVSKLMNLP

SEQ ID NO: 44759 - protein, 409 aa, Acinetobacter baumannii
MDQQNNVIDYTQFPDANGHFGIHGGRFVSETLMAALEDLENLYSRMKNDEQFLAEFDRDLAYYVGRPSPLYYAERWSKELGGAQIYLKREDLNHTGSHKVNNTIGQALLAKLSGKKRIIAETGAGQHGVATATIAARLGLECVVYMGAEDVKRQAMNVYRMRLLGATVVPVQSGSKTLKDAMNEAMRDWVTNVDTTYYVIGTVAGPHPYPQLVRDFQSIIGREARKQILEQAGRLPDALVACVGGGSNAMGLFYPFLNDASVKMYGVEAAGFGIETGKHSAPLNAGHVGVLHGNRTYLMSDEQGQIIETHSISAGLDYPGVGPEHSFLKDMKRVEYVPINDTEALQGFRDLTKIEGIIPALESSHAMAYVSKLAPTMSKDQIIIATVSGRGDKDLMTVARIDGVEMVEM

SEQ ID NO: 44760 - protein, 385 aa, Acinetobacter baumannii
MSCSAIYLDHFGNLTCKKCFYTVVNRQFIFLDGHLGQFKVNIKETEGFNMSRDTISIHFVNAALTGVKRLGMDVETLLSHVGIEAELLRQPKARISPEQYTRFIKMLWMVTQDEHVGFDVQPRRLGTFAIMCQLIIHAKTLGQALELSSQFYKLFGDEWSVTLERDKHEARLVPLIPKTLDPDHFITESMLMIWHGLASWLIERRLPLERVHFSYPRPAHADEYDALFFAPVMQFDAPRTEITFAADYLDLPIRQDEKTLEEFLKAAPAQLLVKFKNTNSLTSRIREVLKSQIGEEMPTLNDVASMLYLSPQTLRRRLAAEGKSYQGVKDALRRDAAIHLLLNPELTLEDVAQQVGFSETSTFHRAFKKWTGVTPGLYRQLHGYH

SEQ ID NO: 44761 - protein, 823 aa, Acinetobacter baumannii
  MISC_FEATURE (688)..(688): X=any amino acid
  MISC_FEATURE (706)..(706): X=any amino acid
ELKRMRKIVEQINALEPTISALSDADLSAKTPEFKQRYNNGESLDKLLPEAFAVCREAAKRVMGMRHYDVQLIGGITLHEGKIAEMRTGEGKTLMGTLACYLNALSGEGVHVITVNDYLAQRDAELNRPLFEFLGLSIGTIYSMQEPAEKAAAYLADITYGTNNEFGFDYLRDNMVFSLAEKKQRGLHYAIIDEVDSILIDEARTPLIISGQSEDSSHLYTAINTIPPKLRPQKEEKVADGGHFWIDEKQRSVEMTEIGYETVEQELIQMGLLAEGESLYSATNLNLVHHVSAAIRAHFLFQRDVHYIIHDGEVVIVDEHTGRTMPGRRWSEGLHQAVEAKEGLAIQPENQTLATTTFQNYFRLYKKLSGMTGTADTEAAEMKEIYGLDVVIIPTHRPMIRNDQNDLIYLNRNGKYNAIIQEIMNIRQQGVAPILIGTATIEASEILSSKLKQAGIHHEVLNAKQHEREADIIAQAGSPNAVTIATNMAGRGTDIILGGNWKAKLAKLENPTPEDEARLKAQWEQDHEDVLQAGGLHIIGSERHESRRIDNQLRGRAGRQGDPGVSRFYLSLEDDLMRIFAGDRVVAMMRAMGLKEDEAIEHKMVSRSIENAQRKVEARNFDIRKNLLKYDDVNNEQRKIIYSQRDEILAENTLQEYVEEMHREVMQAMIATLFHQSQSMTNGMWKAXKMLYVLIWVLSYQFKNGXNKIDVLDEEGLVERISDEVIARYRQRRAQMGDESAAMLERHFVLNSLDRHWKDHLAAMDYLRQGIHLRGYAQKNPEQEYKKEAFNLFVNMLGVIKTDVVTDLSRVHIPTPEELAEME

SEQ ID NO: 44762 - protein, 213 aa, Acinetobacter baumannii
MSKSVLETYDPKEELFNAYSHGAGVVMAVIASVFLIIKGSYLSTAQWIGLWVYAFSLILVFTSSTLYHFAQTQNLRYWYKKLDHTAIYYLIAGTYTPFLSIAIPTQKAHILLIALWSIAAIGTLFKLVFIHRFQKISLLAYVLMGWLAVFVMDDMRTYLSKDTLMLLITGGLAYTVGALFYALKKVRYTHAIWHIFVLLGAGAHFLAIYWYVV

SEQ ID NO: 44763 - protein, 611 aa, Acinetobacter baumannii
MSDIKNLRNIAIIAHVDHGKTTLVDKLLQQSGALGDRAGEIERVMDSNALESERGITILAKNTAITWLDKRTDTTYRINIVDTPGHADFGGEVERVMSMVDCVLLLVDSQEGPMPQTRFVTQKAFARGLKPIVIINKVDKPSARPDWVIDQVFDLFDNLGATDEQLDFPIVYASGLRGVAGPAPEELAEDMTPLFETIVDIVEPPAVDVDGPFQMQISSLDYNSFVGVIGVGRIQRGSVKLNTPVTVIDKEGNTRNGRILKIMGYHGLERIDVDSASAGDIVCITGIDALNISDTICDPKNVEALPPLSVDEPTVSMTFQVNNSPFAGKEGKFVTSRNIRERLDRELIHNVALRVEDTDSPDRFKVSGRGELHLSVLIENMRREGFELGVSRPQVIIKEIDGEKQEPYENVTFDVEEQHQGAVMEQMGHRKGEMTNMEVDGKGRIRIEATVPSRGLIGFRSEFLTMTSGTGIMTSSFSHYGPLKQGTVAKRQNGVLISMVQGTCLGYALFSLQDRGRLFAKPQLEVYEGMIVGINSRSDDMVVNPTKAKQLTNVRASGTDDALTLTPAIEFTLEQALEFIEDDELVEVTPKSIRIRKRYLTENERKRNRDK

SEQ ID NO: 44764 - protein, 848 aa, Acinetobacter baumannii
MKLVMIGHGMVGHKFIEAILEKADDELEITILAEEPRIAYDRVHLTEYFSGKSAKDLSLARFDFADAYGIDLRLNTKAEAIDTAAQTVTTNHGDVISYDKLVLATGSYAFVPPIPGNDRENCFVYRTIEDLDAIRAASLKAKTGVVIGGGLLGLEAAKALRDLDLETHVVEFAPRLMAVQIDDLGGKVLRRKIEDLGVKVHTQKATQSIESGVNTTHVMKFADGSELETDVILFSAGIRPRDELARNSGLAIGERGGIVINDYCQTSDQNIYAIGECALWQNKIYGLVAPGYDMARIAAKHILDEECHCFAGADMSTKLKLMGVDVASVGDAHAMTPGALSYFYADEHALVYKKIVVNADKTKLLGAVLVGDAKEYNDLLQMMLNGLALPEVPESLIMPGFEQSAAKSGGSGVDLLPDSATICSCNNVSKADICQAISDGSTSLGALKKCTKAATACGGCAPLVTQVLKSELQRQGVTVNNHICEHFPYSRQELYHLVRVNEIKTFDDLIHQHGHGLGCDICKPAAANILASCWNDFVLKPSHAGLQDSNDYYLGNIQKDGSYSIVPRMAGGEVTPDGLIAIGQIAKKYNLYTKITGGQRVDMFGAQVHELPFIWEELNAAGFESGHAYGKSLRTVKSCVGSTWCRYGVDNSVGLAIELENRYKGLRSPHKLKMAVSGCTRECAEAQGKDVGVIATEKGWNLYVCGNGGMKPRHAELLASDLDKETLIRYIDRFFMFYIQTADRLQRTSVWRDNMEGGLDYLKSVIVDDSLGLAAELERRMEHIIGTYQDEWRTAVENPEVRKRFQTYINAGANEQADPHIQFTTERGQIRPLTEAERSEDRIPMVEA

SEQ ID NO: 44765 - protein, 160 aa, Acinetobacter baumannii
MVAQIRIGQGMDVHAFEEGNFVTLAGVQIPHTHGLKAHSDGDVVLHALCDALLGALALGDIGQHFPDTDPEFKGADSRVLLKHVYQLILDRGYHLNNADITVACERPKLAKYNLEMRQSIADVLNVDLNQISIKATTTEKLGFTGRQEGILATATVLISH

SEQ ID NO: 44766 - protein, 342 aa, Acinetobacter baumannii
QQYRLDELAHLVKGELIGEGSLQFSNLASLENAEVNHLTFVNGEKHLDQAKVSRAGAYIVTAALKEHLPEKDNFIIVDNPYLAFAILTHVFDKKISSTGIESTPQIHPSAVISKTAYIGHYVVIGENCVVGDNTVIQSHTKLDDNVEVGKDCFIDSHVTITGGSKLRDRVRIHSSTVIGGEGFGFAPYQGKWHRIAQLGSVLIGNDVRIGSNCSIDRGALDNTILEDGVIIDNLVQIAHNVHIGSNTAIAAKCGIAGSTKIGKNCILAGACGVAGHLSIADNVTLTGMSMVTKNISEAGTYSSGTGLFENNHWKKTIVRLRQLADVPLTQITKRLDHIQAQI

SEQ ID NO: 44767 - protein, 146 aa, Acinetobacter baumannii
MSKLREDDAVETMRVDKWLWAARFFKTRSIAKAAIEGGKVHHNNERVKVSKEIRVGMELVVQQGFDKKTVVVKALSNTRGPAPVAQQLYEETEVSIARRELIASQRKLHNLARPDHRPSKKDRRQINRFKQDNDQHYEDHWSYNDE

SEQ ID NO: 44768 - protein, 349 aa, Acinetobacter baumannii
MDENKSKALQAALSQIEKQFGKNTVMRLGDNTVQAVEAVSTGSLTLDIALGIGGLPKGRIIEIYGPESSGKTTMTLQAIAQCQKSGGTCAFIDAEHALDPQYARKLGVDIDNLLVSQPDNGEQALEIADMLVRSGAIDLIVVDSVAALTPKAEIEGEMGDSHMGLQARLMSQALRKITGNAKRSNCMVIFINQIRMKIGVMFGSPETTTGGNALKFYASVRLDIRRIGQVKEGDEIVGSETKVKVVKNKMAPPFKEAIFQILYGKGTNQLGELVDLAVQQDIVQKAGAWYSYQGNKIGQGKNNVIRYFEENTQIAEEIERNIREQLLTTGTNGAVQIEDEEEPDLLLES

SEQ ID NO: 44769 - protein, 160 aa, Acinetobacter baumannii
MFKRNDEQSQQRLPLTGQRLRSYAFALLTRRDYSKAELIEKLARYAQNIEEVKQLVEELSEQNYQSDQRVAEQMLASQIRKGKGPKRIQQALKTKQIENDLIADEIQEIDWVEQAYQLKVKKFGEAVEKDPKLKAKQIRFLQYRGFDLDVILKAIQRKLD

SEQ ID NO: 44770 - protein, 274 aa, Acinetobacter baumannii
MLERIVTALVLVAVVLGCMFATQSHYPMLVLMIVAAGVAGYEWYKLMPREVGAVVKPKAWGYGLLVAFVSGVALFFHDIALLLWSASILTWLVSVYWVKSFPEFDGWYNATLYVIGLILICAAVTAIFVVWQSSPWWLMYLFLLVWGADSGAYFVGRKFGKRKLAPTVSPNKSVEGLYGGILTTIIVMLVVQYQYLNLTWVQQLLFLILSLITVFGSVLGDLFESMIKRRAGIKDSGRVLPGHGGVLDRIDSLLAAAPIFATGMYILKLIGVDL

SEQ ID NO: 44771 - protein, 250 aa, Acinetobacter baumannii
MTDSEEYHLPQHVAIIMDGNNRFAKKNQMQKGDGHREGKNVLDPIVEHCVKTGVRALTVFAFSSENWNRPQYEVDLLMKLLEETIHEQIPRMKKFNIALRFIGDRSRLPSHLVALMEDAEQQTAHHDAMTLTIAVSYGGMWDIANAAKQVAQAVSRGEIDADQINVDLFEKYVSLNDLPAVDLLIRTGGDFRISNFLLWQAAYAELYFTDTLWPEFTVEEFDHALNVFSGRERRFGKTSEQIQQEKIEKL

SEQ ID NO: 44772 - protein, 142 aa, Acinetobacter baumannii
MQIQTIRQYLPHRYPFLLVDRVTEVTDNSIVGYKNVSINEEFLQGHFPEYPIMPGVLIVEALAQVSGVLGFIMNNETPKPGSLFLFAGAERVRFKKQVVAGDQLVLKSELVMQKRGIYKYNCTASVDGIVAATAEIMISHQK

SEQ ID NO: 44773 - protein, 184 aa, Acinetobacter baumannii
MINDLKKDSEQRMLKTLESLEQGFAKVRTGRAHPSILNGVMVPYYGSDVPLNQVANVGVEDSRTLIVQPFERTMVAAIDKAIRESDLGLNPITADSIRVPLPALTEETRRDMQKIARSEAENAKVAIRNIRRDVLGDIKALLKEKEISEDDERRAGDDIQKITDKYVAEVDKRLAAKEAELMKV

SEQ ID NO: 44774 - protein, 240 aa, Acinetobacter baumannii
MAETISPRYSRILLKLSGEALSGNKDMGIDAQVLDQMSLSIAHLVGLGVQVGIVVGGGNLYRGSQLQKDGLVGRVTGDQMGMLATVMNGLAMRDALVRRNIRTRLMSALPIGTVVESYSSRDAIRHLSQGEVCVFVAGTGNPFFTTDTAACLRGIEIEANLILKATKVDGVYNKDPSKYEDAVKYDHLTFDQVLDEKLGVMDLTAICLCRDHNVPLQVFDMNKSGALLSVVMGEKEGTRV

SEQ ID NO: 44775 - protein, 447 aa, Acinetobacter baumannii
MKTPKVGFVSLGCPKALVDSERILTQLKTEGYQVASDYDGADLVVVNTCGFIESAVQESLDAIGEAMSENGRVIVTGCLGKDEDKIRQMHPNVLKVTGAAAYQDVMEAVHEYVPAPPKHNPFIDLVPEQGIRLTPKHYAYLKISEGCNHRCTFCIIPSMRGDLVSRPVGSVLEEAAALKRAGVKEILVISQDTSAYGVDTKYKLDFWNGQPVKTKFFDMCEALGQLGIWVRLHYVYPYPHVDAVIDLMAQGKILPYLDIPFQHASPRVLKLMKRPAHSENTLEKIKLWREKCPDLVIRSTFVVGFPGETEEDFQILLDWLVEAQLDRVGCFTYSPVEGATANDLPDHVPEEIKQERYERFMQVQQQISAAKLQKRIGQTMTVLVDSLEDEYPVAVARSYADAPEIDGNVFVEDIDKSTIQPGDMLEVEITDADEYDLFAKLIKIKSV

SEQ ID NO: 44776 - protein, 369 aa, Acinetobacter baumannii
MDQHTPIDYRLLVDNLTTAILLIDSNFNIFYLNSACEALFDISLLRASGQPVLNLLHAPDDTFNTHEALLNTLKTGQPYTRREAIINVNFKDLHVDYTVSQLNAGKSYHPLLLIELNPIDRMLKISKEENLIQQHQVARQLVRGVAHEIKNPLAGIRGATQLLARSLNDESYAEFTDIIINEVDRLTNLADTMLGSRQLPSYENVNVHEPLERVRSLIANQTKKKIKITRDYDLSLPDVKADRDQLIQVMLNISVNAIQAITENKSFFTDQEPELILRTRIQRLVTINGVLNRSAVRVDIEDNGPGIPESILESVFYPLVTGRAKGTGLGLSIAQNIMHQHNGMIECQSVPGKTMFSLYLPWESDRVAK

SEQ ID NO: 44777 - protein, 884 aa, Acinetobacter baumannii
MQSNRENQAEALLNHVNRYQAGRLTVFLGAAPGVGKTYAMLARAKELFQQGTDVVVGIVETHGRIETLKILEGLPQIARKEMQYQGHILEEMDLDAILLRHPQIVLVDELAHRNVPNSRHERRWQDVNELLDAGIDVFTAINIQHLESLNDVVYQITGIRVNETVPDRVFDRIRDIRLIDLPVSELIERLHQGKVYVPEQANLALQGFFSISNLTALRELAMQCVAEHVDSDLKESYASKGLKSISLQNELMIAIDGQGSSEYLVRAGCRLAERYGATWTVVNVAKSLDFGQSSGNSYKKEYIEIDRAFELARQLGGRTEILYGHRVASVLMDAAVDRGISNLVIGKSISPWWLKLFKKNLAQQLLNQENSIALTILHPEQGTKKINQLEKPSFLSLKESVFVLAVTCASIFIAHFAEVLFGIEDFSVIFIISVLIVATKTRMLAAVVAALICFLAYNFFFIAPRYTFQISAHQGVVTVVAFFAAALIAGRLASQLRQQVLSLKAANAYTTVMQDLARKLSSAVNLEEVMQTGRMTLETQLQTKVWISIRDKIISSDIELNDKEKVAAEWCLKHQQPCGRFTDTLSQSNWWFLPLLEQKNSLGIVGIYFKDEVVSLNFEQKKLTESVIEYIAQAALRTQLVNELEQAKVTSETERLRSALLSSVSHDLRSPLASIIGAADTLANFKAEMTEQDQQDLLETIHLEGERLDRYIQNLLDMTRLGHEGLTLKRDWIGVDELIGSATRRLKRYKPDTQVVVQLPEQSISLYVHPALVEQAIFNVLENAANFSPPDESVMIRAQLSSEDEVKIEIEDKGAGIPEDERHRIFDMFYTIERGDRGKFGTGLGLTIVKAIIGAHMGTIEAFSGRQNKGTLIQIKLPIHPVKE

SEQ ID NO: 44778 - protein, 201 aa, Acinetobacter baumannii
MKTYAQNSEANLGQTLRASFGLLIFTLVGCGAVYSAIATGAGQVLFNNQANGSLIEIDHKVLGSKLVAQPFVGEAYFHPRPSAVAYDPMAMAGTNLARTNPELQQQIDAQILAVKKQDHTGNNPIPSDLVTKSGSGIDPHISPESAQLQVARVAQARHLDPKIVEELLQKYVEPKQFDVLGQARVNVLQLNIALDQLQSTH

SEQ ID NO: 44779 - protein, 677 aa, Acinetobacter baumannii
MNTQTHVNSHKQTMAVPNFEVWKNAFVKLLPQHAIKNPVMAIVWLGTVVTGISTILGYTTLIFGLVVTAILFITILFANYAEAVAEARGRGQASSLRAARENLTARRLNSLTDRQATQVAATELHLNDFIEVHAGELVPADGEIVEGFATINESAVTGESAPVLREAGTDRSGVIGGTKVLTDRIVVQVTAESGQSFLDRMIALVEGSNRQKTPNEIALGFLLMVMTITFLIVVISLPFIAKYLHIELDSVVLVALLVCLIPTTIGGLLPAIGIAGMNRALKANVLAKSGKAVEVAGDIDVLLLDKTGTITYGDRQATSFYPLTSVTESELRAAAWVSSLADPTPEGKSIVKLAKEQGLKQQEPEQAEFISFSASTRISGVNLPNGEQIRKGALDAILKFVDEDYSQDLELKARVEQVAKKGATPLVVANQHHVLGVIELSDVIKHGIKERFARLREMGIKTVMVTGDNPLTAAAIAAEAGVDDYIAEAKPEDKLACIRTEQQRGRLVAMVGDGTNDAPALAQADIGLAMNSGTQAAKEAGNMVDLDSDPTKLLAVVEIGKQQLITRGALTTFSLANDVSKYFAILPALFAAAIPQMQVLNVMHLASPNSAILSALIFNAIIIPLLIPIALRGVKFKPSTATQLLRRNMLIYGVGGVVLPFIAIKAIDVVIVQLFGL

SEQ ID NO: 44780 - protein, 202 aa, Acinetobacter baumannii
MKPNPIKKSEAKRLHILNTSSDLILHKGFTGVGLQEILQNCEIPKGSFYHYFQSKEAFGCELVQHYVDNYQVRLNDVWRSDKSPYQKLIEYFNLWIEDPVTQCGWADSCLIVKLAAEVADLSEDMRSIMSAGVDDVIERIAGLIDLGKQDQSIQADTEASTLAQVLYQMWLGAALLSKLQKDKTPLHQALRATKFLLKSEDS

SEQ ID NO: 44781 - protein, 139 aa, Acinetobacter baumannii
MLKTIYLSLDPYMCGRMSDAPSYAAPVEIGEVMVGGRVSQVVASKNPKFKEGEWVLSGNGWQGYAISNGTVCQSLGMQPEHPSWALDILGMPGFTAYMGLLDIGQPKAGETLVVSGFVAQRFKRQHSAHLNRIQVTTWV

SEQ ID NO: 44782 - protein, 309 aa, Acinetobacter baumannii
MAISPMKHTWAKGILDRMENNTWFPHVVNMADDVASYNRLNAADRFMFDKALAFLSNLDGIQFNNINQNIAKHVTSPEVSMCLSRQAWEEALHVKSYATIIETVSLDPMSVYMTFERDGLLAQKNQFILKQSRLLGEKFSAEGFALSCVSNVLLEGVYFFSGFLSFYLLADKGEMLGSADMIRYIQRDEEGTHLDLFAHMLDTLRHENKDVFTQSFWNKALEVFLTSSEMEISWGKYITKGVTNPKAIEDYIKHLANLRAEQIQAPFVPYPGVKNPFPWVEQFSKPNTSEKNFFETRVTDYKVGGALVW

SEQ ID NO: 44783 - protein, 375 aa, Acinetobacter baumannii
MKDSILFQNLSLGPYVLRNRIVLPPLTRSRSTQPGNIPNELMATYYQQRAGAGFMVTEGTQIEPRGQGYAWTPGIYSPEQIAGWRKVTEAVHAKGGIIFAQLWHVGRVSHTSLQPNHASPVAPSAIRADSNVKVFIETGPNAGTLADPSMPRALSNAEVKELVQLYAQAARNALAAGFDGVEIHCANGYLVNQFISAHSNHREDEYGGSLNNRLRFLREVVEAVAEVVGADRLGVRFAPLFESTEEDRVYIGLVEDDPHVTYIEAIKILEEVGIAYLSIAEADWDNAPELPHDFRRDVRDTFSGRIIYAGRYTAERGTRILEAGLADLIAFGRPFIANPDLPDRIANGWPLNPVDASTMYGGTEKGYIDYPAYAD

SEQ ID NO: 44784 - protein, 791 aa, Acinetobacter baumannii
MNVTKRNGATEPFSPSKIEKAVNWAVDGTSIESQEVIDKAILLIYDGIKTSDIQQALIKGAAKLVSATKADASLVSARLLLLDLYKTVCGVNGKVSGGGFQYPHIKDYLEKGVSLKLLDPELLNYDLERINAAIKPERDLSFHYLGLDTLADRYFIRANRDIRLEKETGNMSGNIIELPQHFWMRVAMGVALKEKPEIRTSVALAYYELYSKLEYVSSTPTLFNAGTLHPQLSSCYLNQVSDTIAADEGDNRFASIFGAIEETALLSKFAGGIGTDWTPVRGENELIFGTNGISSGVVPYIKVQNNTAVAVNQGGKRKGYGCPYLEAWLSRRLWRFVSLKENLMTDRRRAHDVFPAAWVPDLLIERKEDPNAMWSFFSPKRFPELHELYGEDFVKRYEELEAAGEYDFQLPAIQVWRHLLTNLFETGHPWITYKDECNRRNPQQHAGVIHHSNLCTEITLNTSKDETAVCNLGSINLSQVMSAPNPLERLREVIRLAIRNLDSVIDVNYYPSDRASNSNFKHRPIGLGVMGYYEWLVKQGVDFESEEHLKQADALFEAISYFAIEASADLAQERGSYPSFEGSNWSKGILPIDNAKLMEDGKPFFDQPRRFDWEALREKVKKGMRNSNVMAIAPTATISNIAGTTQCTEPPFLLEYFKSNLGGTYQVVDPAIAHVGDKYHLLKESYYVDQLYIIKAAAVRQKWIDQSQSTNLFAKQGTTGRDLDLWYTTAKKLGLKTTYYLRNQSDAEKSASMRTKVIAELANAALGKLSEPTESAPKMCSILDPDCESCQ

SEQ ID NO: 44785 - protein, 408 aa, Acinetobacter baumannii
MKHLIKFVSTETQLLGNCLMNSSLSLLHPYPFEKLNQLFKDITPANLPLIPLSIGEPKHPAPEFVKQAIIDNFNHLSTYPNSKGLPELRQSIADWLTKRFKLNSISAENHILPVSGTREGIFSFVQALINREDAPYVVMPNPFYQIYEGAALLAGAKPYFINCTEENGYLGDFDAVPAEVWEKTALLFVCTPGNPTGTVLSKEQFKKLIALSDQYNFVIASDECYSELWFDQAPTGLLEVCAELGRDDYKNCIVFHSLSKRSNLPGMRSGFVAGDAALLKPYLQYRTYHGAAMPVQHQLASIAAWNDESHVEENRKQYRAKFDLFQSELGHLLPLQKPDAGFYYWLKVDNDETFAKMLMEKAHIKVLPGRYLSRDTEQGNPGANHVRMALVADLAQCEEVVKRLKAIL

SEQ ID NO: 44786 - protein, 1187 aa, Acinetobacter baumannii
MQFVHLGIYTEFSITESIVRIPDLVKTAVKDEMPALALTDLSNLHAAVKFYNSCLKKGIKPILGSTIRLNDAQHRATLLAMSDIGWKGLTEIVSRGFIEGQQLSIPCVQKEWVLEQHQDIIVLLGQHSDVGQMLCSSNPQKAEPLLEEWIEKFGNRVYLALTRTDRPGEEDFIQEAAKLAAKYNVGVVAHNDVHFIEKEDFEAHEARVCIADGYVLADDRRPRLYSPEQYFKTSDEMIELFSDIPSAIENTYQIAKRCNVTLKLGTYFLPEYPIPDGFTIDTYFEHLSKEGLEERLNYLYPVEKRGEDWPEIRKPYDERIDYEVGIILKMGFPGYFLIVMDFIQWAKNNGVPVGPGRGSGAGSLVAYSLKITDLDPLRYDLLFERFLNPERVSMPDFDVDFCIAGRDRVIDYVSRTYGREAVSQIATFGTMAAKGAIRDVARVLGKSYGLADRISKMVPTKPLGVDLATAIEMEPQLKDIVTNPSNPDNDDASEIWEMALKLEGITRNTGKHAGGVVIAPGKITDFSAVLCDADGTNRVAQYDKDDVEAAGLVKFDFLGLRNLTVIEDAIQNINKNRDSNDPLNISHVPLDDPKAYSVFADANTTAVFQFESVGMKRMLKEARPSKFEEIIAFVSLYRPGPMDLIPDFIHRMHGGEFEYLHPLLEGVLEPTYGIMVYQEQVMQTAQICAGYTLGGADLLRRAMGKKKPEEMVKQRQIFLEGAGQKGIDESTANHIFDYMEKFAGYGFNKSHAAAYALVAYHTAWLKAHYPAEFMAAVMSSEMQNTDSVVFLIDDCRNNGLEVLPPSVNMSTYHFHASDDKTIVYGLGAIKGVGEQAMQSVIDSRRQQGPYTDLFDFCHRIDLKKINKRTLEALIRAGALDCLGIERSSLMAQLPEAVQAAEQARSNRESGIMDLFGEVEEVQRKPAKPVKPWSDEVRLKGEKDTLGLYLTGHPIDVYRQELKAFIPAKLNEITATRRGVTTVYAGLVLDVANFPNRVVIVLDDGTARIEVSCNHERFQRFKDIIQVERVVVFEGEIYEREGFDRPMGRLNKAFSLNEIRQKRANSIQIKLTHDLLQPSLAKDLQNILLPYCNVDMHQHIAIQLQIDQPYAQAELQLGPQWKVAPLDELLAKLRDYFGKDNIHIEYQVKSKAAKAAEPVRPQPVASPPVDMTIDDALDSYQSEVSQYS

SEQ ID NO: 44787 - protein, 237 aa, Acinetobacter baumannii
MLKQLKEDIQAVFARDPAARNTLEVLTTYPGIHALLLHRLAHELWKKDCKGTARFVSSFSRFATGIEIHPGAKIGKRFFIDHGMGVVIGETAEIGDDVTLYHGVTLGGTTWNKGKRHPTLEDGVVVGAGAKILGPFTVGKGAKVGSNAVVTKAVPAGVTAVGNPARYIYKDADKTKDKDEERRRDYAQSIGFAPYATTADQSDPILEGMRVLLDRIQHNETRHENLCQRLSELDPTF

SEQ ID NO: 44788 - protein, 241 aa, Acinetobacter baumannii
MYLTIGIRPTYAEHITKRSNEVEKQGVHVKLVEFSDWRAPTVAVQNGDIDANFFQQSVFLRNAVKETGYDLHAFGVGSGSHVGLYSKKYKSFEDLPLNARVAIPNDPVNLARALILLHRAGLIQLKDINNELSTTQDIIANPKQLSFVEVEGPQTAHAYNDVDLIFGFPHYLKMAKVTDPHSALFLDPIDKKYAILFVTRRDYQDKNQKLATFVKAFQNSKQAQDILDKDFGKGMWFQGWK

SEQ ID NO: 44789 - protein, 297 aa, Acinetobacter baumannii
MKRSATSLIVSTVMLCTVGATSQIQAADTLAKIKSTGKIVIGHRESSDPISYVVAGKPVGYAVDICNQFANDIKKELKMPGLKVEYKAVTSSTRIPELLAGNIDMECGTTTNSKQRQQQVGFSTNYYATEVRMAVKANSGIKSLADLNGKAVVTTQGTTSDKYIKMNEKGQAINVQNIYGKDHADSFAMMASGRAAAFVMDDNILAGLIAKSSTPKAFAIVGPVLSSEPYGIMIAKDDPKFKAIADRTVNNLWKTGQMDALYKKWFLSPIPPKNTNLNMQQSSSYKKLKAHPTDAGI

SEQ ID NO: 44790 - protein, 219 aa, Acinetobacter baumannii
MQDQLIDLLITGTIDTLLMVGASAFIAFLIGLPIAVILVSTSEHGIHPSQKINQALGWVINITRSVPFLILMVALIPLTRWIVGTSYGVWAAVVPLTIAAIPFFARIAEVSLREVDQGLIEAAQAMGCNRKQIIWHVLLPEALPGIVAGFTVTIVTMINSSAIAGAIGAGGLGDIAYRYGYQRFDMQIMLAVILVLIVLVMLVQATGDALAQQLDKRKV

SEQ ID NO: 44791 - protein, 363 aa, Acinetobacter baumannii
MGFNCGIVGLPNVGKSTLFNALTKAAIAAENFPFCTIEPNTGIVPVPDPRLDKLAAIVNPQRVLPTTMEFVDIAGLVAGASKGEGLGNQFLANIRETDAIAHVVRCFEDENVIHVNGKIDPLDDIATINTELALADLETVAKAILRLTKVAKGGDKEAVATKAVLEKIQPLLDEGKPARAADLSDDERKLIRGFGLMTLKPTMYIANVAEDGFENNPHLEAVKKLAAEENAIVVPLCNQIEAEISLLEDEDRAEFLEAMGMEEPGLNVVIRAGYKLLGLQTYFTAGVQEVRAWTVKVGATAPQAAGVIHTDFEKGFIRAEVVAYDDFVQYNGENGAKEAGKWRLEGKTYVVQDGDVMHFRFNV

SEQ ID NO: 44792 - protein, 276 aa, Acinetobacter baumannii
MAQTASKKWLGIGLVVVVLFVALFLWNKHRQSGSNELVIGISPPFAKPLQAAADEAKKQGLNVKLVEFSDWNTPNITLNHGDIDANFFQHQPFLDNAIKETGFKLKAFAVGAASHVGLYSKKYKSLDELPQNARVVIPNDPVNQGRALLLLQQAKLITLKDSNNHLSALKDVVSNPKNLQFIEVEGPQTARAIDDVDLAFGYPHYLRLAKTADPNSALLLDDNTNKRYAILFVVRDDYEDKGDKLKKFVEIYQNSPKVKAVLDAEIGPKLWFPGWK

SEQ ID NO: 44793 - protein, 109 aa, Acinetobacter baumannii
MINQVDFFKCLSDQTRLNILKLVLNKQNICVCELTEQLELSQPKISRHLALLRTHGVLLDERKGQWVYYSLNPDLPVWALDILKVIENDESGTKVKQQDQSFITTTCCD

SEQ ID NO: 44794 - protein, 624 aa, Acinetobacter baumannii
MTDINLILKNGKITTLDPQNPEVQAIAIADGKVVRTGTTDEVMKLATPTSKVVDLNGRRVIPGLNDSHLHIIRGGLNYNMELRWEGVPSVADALRLLKEQADNTLAPQWVRVVGGWTEFQFAEKRLPTLEEINKAAPDTPVFVLHLYASAMLNRAALDVLGFNKDTPDPPGGKIVRNEKGEPTGLLLATPSAMILYSTLGKAPKLPVEDQVNSTRHFMRELNRLGITSAIDAGGGGQNYPEDYDVIKQLHDQNQMTVRIAYNLFAQKAGQELDDYRRWTEMTFPGDGDELFRMNGAGENLTWSAGDFEDFYEPRPDLPEKMEGELEAIVEHLAEKKWPFRIHATYDESISRLLNVFERVNSKQPFATRFIIDHAETVSERNIERIGALGGGIAIQHRMAYQGEIFVKRYGAEAAQATPPVKKMLELGVPVGAGTDATRVASYNPWVCLYWLTTGKTVGGLPLYDEKNLLDRQTALKLWTKGSAWFSGEKDVKGSLTAGELADLVVLSDDYFKVEAEDIQWIESVLTVLGGKVVYAGAEFKQDDPPLPPASPTWSPVKRFGGQWRLSENRNAPSNQSLQSQSALCACASSCGMHGHSHAWMLDVPVNDKDKKSFWGALGCSCFAF

SEQ ID NO: 44795 - protein, 283 aa, Acinetobacter baumannii
MPLWMQLLMNGGLLRQEANGEGSDLGGGSGGEGGEGDEKKEPTEPTKKDSEADDESKNKPTDKEAELLKEVMKKKAEAQKVKQELEELKARYIDIDPEIARKAINEQKEKETKELEAKGDFERLKARMAEEHAKEVNALKAKIAELEGANASKSQMINDLTVGAQFNQSQYIKQDLIYTPTKLRALYGNHFEIEDGKVVGYDKPRGAAERTKIVDSHGNPVNFDKALEKIVSMDPDANYMIKAKSKQGAGSQPNPKQGAPKPEAKLSSTAKISNGLSELFANQ

SEQ ID NO: 44796 - protein, 437 aa, Acinetobacter baumannii
MSEHPQGQKHCSFCGKTQSEVGKLIAGEDAYICNECVDVCLDLVQTSQQVEAGDWASKALPKPHEIRAALDQYVIGQDLAKKTLSVAVYNHYKRLKVGQSGHVSKDVEIAKSNILLIGPTGSGKTLLAQTLARLLDVPFAMADATTLTEAGYVGEDVENIVQKLLQKADYDVEKAQKGIIYIDEIDKITRKSENPSITRDVSGEGVQQALLKMIEGTVASIPPQGGRKHPQQEFIQIDTSNILFICGGAFAGLEKIVQQRQEKGGIGFTADVKNKDETKKLAELFRQVEPTDLVKFGLIPEFIGRLPVIATLEELDEEALMQILTEPKNALTRQYQYLFNMENVDLVFEDSALRAVAKRALERNTGARGLRSILENVLLETMYDLPSRTDVGTVFINEAVINGEAEPVYKSERQPKEAVTHESVAKADLKVIDSKSA

SEQ ID NO: 44797 - protein, 371 aa, Acinetobacter baumannii
MIENPIKRRPTRKIRVGSVYVGGDAPISVQSMTNTETCDVDATVAQIERCVDAGADIMRVSVPSMEAAEAFGAIRKRVSVPLVADIHFDHRIALAVADYGADCLRINPGNIGSDQKVREVVAAARHHGISMRIGVNAGSLEKDLQKKYGEPTGQALLESALRHIDILDRLDFHEFKVSVKASNVFLTMDAYRLLSQQIDNPLHLGVTEAGIYRTGTVKSAIALGGLLMEGIGDTMRISLAAEPEDEIKIGFDILKSLGLRSNGINFIACPSCSRQEFNVIQVMQALEERLEDIRTPMDVSVIGCKVNGPGEAKEADIGVVGAAPRSLVYRNGEKSHLIDTNQLVDEIETMVRQRVQELEEAKSKEIIRSSS

SEQ ID NO: 44798 - protein, 508 aa, Acinetobacter baumannii
MTTIIKQDDLITSIKDALQFISYYHPQDFIQAMSRAYDREENKAAKDAIAQILINSRMCAEGHRPICQDTGIVNVFLEVGLDVKFDLTMSLDDAVNEGVRQGYLENSNVLRASVLADPAFGRKNTKDNTPAVIHYKLVPGNKVDITVAAKGGGSENKSKLAMLNPSDSIVDWVLKTVPTMGAGWCPPGMLGIGIGGTAEKAMMLAKEALMEEINMDELLRRGPENKIEELRIEIFKKVNALGIGAQGLGGLTTVLDIKIKDYPCHAAGKPVGMIPNCAATRHAHFQLDGSGVAHIQAPKLEDYPSVTWDASQSKRVNLDTITQEEMDSWKPGDTLLLSGTMYTGRDAAHKRMVEMIDNGEELPVDLKGKFIYYVGPVDPVRDEVVGPAGPTTATRMDKFTRKVLEHTGLFGMIGKADRGPTAIEAIKDNKATYLMAVGGAAYLVSKAVREAEVVAFADLGMEAIYKFVVEDMPVSVAVDVNGTSIHAVAPKIWQAKIGKIPVIDAAAG

SEQ ID NO: 44799 - protein, 80 aa, Acinetobacter baumannii
MSSIVAIKGFNDVLPTQTAAWRRLEQHLASLMDAYGYQQIRLPIVEQTGLFKRAIGDATDIVEKEMYTLELQLLEFYSVT

SEQ ID NO: 44800 - protein, 208 aa, Acinetobacter baumannii
MSTPHWFDQGSLVLASNNKGKVAEFEKLFEQLKLPVEIIPQGHLNIPDAIEDGLSFIENAIIKARHASKISGKPAMADDSGICVPVLGGAPGIYSARYAGEHGDDAANNAKLLNDLLPFRKNGEAIEGMFVCVLALVTHAEDPLPQIFQGIWHGEILEAPRGENGFGYDPLFWLPELQVSSAELSKEEKNKISHRGQAMQLFRESLQK

SEQ ID NO: 44801 - protein, 421 aa, Acinetobacter baumannii
MQDSIEQYMQKVGQQARDASRVLTSASTSLKNHALSAIYTALENNQAAILAANQIDMEKGRSNQLDSALLDRLELTPARFKGMLQGLKDVIALVDPIGEITDLAYRPTGIQIGKMRVPLGVVGMIYESRPNVTLEAASLAIKSGNAIILRGGSEALESNKAIAEAVKHGLKVAGLPEHSVQVIETSDRAAVGHLITMAEYVDVIVPRGGKSLIERVTNEARIPVIKHLDGNCHVFVEAQADLQKALPITLNAKTHRYGVCNAMETLLVDEKIAEVFLPHIAELYAEKQVELRGCPETRRILGTTVKPATEEDWYTEYLGPILAVKVVSGIDEAIDHINKYGSHHTDAIVTENYTLARQFLARVDSSSVVVNASTRFADGFEYGLGAEIGISTDKIHARGPVGLEGLTSQKWIVLGDGQIRQ

SEQ ID NO: 44802 - protein, 219 aa, Acinetobacter baumannii
MFTGIIESLGKVESLQSVGGDVRLRIQTDLDMSDVHLGDSIATNGICLTVIEWGDNWYAADVSRESLNRTTLGNWKVGQRVNVEKAMLPTTRFGGHIVSGHVDGVGEITLVREDARSIYFEVTAPVELAKYLAEKGSVTVDGISLTINHLRGNILSLNLIPHTAERTNIGTWQVGSKVNLEVDVLARYIERLLLGDKAAEQKTESNISMAFLAENGFLK

SEQ ID NO: 44803 - protein, 190 aa, Acinetobacter baumannii
  MISC_FEATURE (65)..(65): X=any amino acid
  MISC_FEATURE (67)..(67): X=any amino acid
  MISC_FEATURE (93)..(93): X=any amino acid
  MISC_FEATURE (97)..(97): X=any amino acid
MQIGIPTETVVGENRVAATPETVKKLISAGHSVVIERGAGVKAAYIDSAYEQVGATITDDAYIGXSXLTMLKCFDAPPRGEIQKLRSKYNLLXQLSXSLTRNTRARRNLRSQQVSASCSWKLLPRTLSRAQKQWMSLSSQSKTSDWLMKSVLLAVAEYQRMFPMLMTAAGTVKPARVVIMGVGVAGLQAI

SEQ ID NO: 44804 - protein, 482 aa, Acinetobacter baumannii
MKFTTYTTFPEQTSNESLWILVDSEQLQSNLNTYQINNLESILTATQFKANFNETLPLFGQLSTQPHSQLLGLGKAAELQAAKLAKLAQTIIKSAQNKFKHIAIDIAALPVEYHYLFALSLTQAAYGYDEFKSKKNEFVLQQVDLISSQTSLDENQLALVHAVQSGQSYARDLGNRPGNICFPEYLAEQALALAAEFPDLLKVTVLNEQQMADLGMYAFLAVSKGSERPGRIVTLEYQAQLEQAPVVLVGKGVTFDTGGISLKPGLGMDEMKFDMCGAASVLGTIRALCEARLPIHVVGAIAAAENMPSGKATRPGDIVTTMSGQTVEILNTDAEGRLVLCDTLTYIKRFNPAVVIDIATLTGACVVALGKVLSGLFSPDDTLAAELQQAGEQSFDRVWRMPVIDDYQELLDSPFADIANIGGPHGGAITAACFLERFTRDYRWAHLDVAGTAWLSGSAKGATGRPVPLLMQFLANRVSTNG

SEQ ID NO: 44805 - protein, 642 aa, Acinetobacter baumannii
WDSIPTEPIVLVTMVFMALGAIAVLGGITYFKKWGYLWKEWFTTVDHKKIGIMYIIVSVVMLLRGFADAIMMRLQLFLAKGGGEGYLHPDHYDQIFTAHGVIMIFFVAMGLVVGMMNISVPLQIGARDVAFPLLNSLSFWLFAGAAGLMMLSLVLGEFAATGWMAYPPLSGIQYSPGVGVDYYIWALQVSGLGTLLSGVNFFVTIIKMRAPGMKLMDMPIFTWTSLCTAVLIIASFPVLTGTLAMLTLDRYFGFHFFTNELGGSPMLYVNLIWTWGHPEVYILVLPAFGLYSEIVATFSRKALFGYKSMVYATIAITVLAFVVWLHHFFTMGAGANVNAFFGIMTMVIAIPTGVKIFSWLFTMYKGRITFTTPMLWTLGFLVTFGIGGLTGVLMAVPPADFLVHNSLFLIAHFHNVIIGGVVFGMFAGIIYYWPKMFGWKLNEAWGKAAFWFWFFGFYFAFMPLYILGFMGMTRRLNTYDNPEWDPYLAIALFGAVLVAIGIACFLMQIIVGFLQRHQNMDYTGDPWDARTLEWATSSPAPFYNFAHEPDASGIDRFWTDKENGVAYARNTKYEDIHMPTDRAAGFVIAMFITLLGFALIWHIWWLVVVSFVAAVVSLIVSSFTKNVDYYVPAAEVERIENE

SEQ ID NO: 44806 - protein, 302 aa, Acinetobacter baumannii
MSTPTEAKFSLTYYTGFLSVLFAAFLWGTAGTAASFAKGISPLVIATISVGFGGLIHTFLSLKAIKKDYRKLFDYKTKVLIAVIVSILCPFAFYSSVSLAGVSIGTVISIGCAPLFSVMLEWLLDKRKLSLKWLISFILGFLGVVLLSYAGEHSHQHQGVQSERLLGVFFGLLSSLSYATYSWIMKNLIHKGINSRAAMGVIFGISAVLLLPTLLITATHLFNYPNNIWVALYIPIVPMFLGYLFFSFGLKRIPASQAMTLALVEIPVAALLAVVVVGESLTMNSYLGLVLIFLCVIVLTKK

SEQ ID NO: 44807 - protein, 246 aa, Acinetobacter baumannii
MTKIIILLFVSYFEVKRIFVTLPSFNVSNLGAMPSVSEVIVKYIREAIIAGHIAEGEPIRQDEIAKLFNVSKIPVREALKQLEAEGLVEFIKNRGAIVTRISEEELAQIFEVRVMLETKLIQLAVPNMTEETYKKADEICNAFIDNMDIGSWTTLNWQLHACLYEPAQRPYMLGLIRSIYDKIERYLRLQMNVSEGKSRANDEHKEIVKACKAKDVDLAVKLIEEHINGVCQSLYEHLPHHKNVKK

SEQ ID NO: 44808 - protein, 310 aa, Acinetobacter baumannii
MKTVKILDSHTGGEPTRLVLEGFPDLGTGDMESRRKILSEQYDHFRRATMLEPRGNDVLVGALLCKPVNPKASAGVIFFNNTGYLGMCGHGTIGLVASLAHLGKIQVGTHLIETPVGDVEATLHEDHSVSVRNVPAYRYKKAVEVNVEKYGKVTGDIAWGGNWFFLINDHGQRVASDNLDQLTEYAWTVRQALTAQGITGKDGQEIDHIELFASDTEADSKNFVLCPGKAYDRSPCGTGTSAKIACLAADGKLEPGKLWKQASIIGSQFIASYEQAGEYVIPTIRGEAYMSAEATLFMDENDPFAWGIQL

SEQ ID NO: 44809 - protein, 231 aa, Acinetobacter baumannii
MRDLIVQWLTELTQPFWHSSLSIDQFVTALQETFHMVFFALLFGGIWGFIQGIILLVTRPEGILPNKFIYHLLNPIVNALRSLPFIILLIAVIPLTKLLVGTSIGTWAAIVPLTIYVGPYMGRLIETSLLEVNEGIIESAQAMGATPWQIISRFILPEARSSLILNLTTATISLIGATAMAGAVGAGGIGDLAISYGYQRFDTSVVILTVIVLLLLVQIVQMLGNWLAKMR

SEQ ID NO: 44810 - protein, 481 aa, Acinetobacter baumannii
MSQANATSLTLSSPTENKTSESGQLKEFRTPPHNLAIEQAVLAALMTVAESFEQVSDLLKENDFYATRHKYIYRAIEKLAQENSPYDAVLVNDWLLKQNLLDAIGGEEYLMQLMADSPSSFYNLETYATKIKEFSTLRSMIKVSTEILQNAYDTKGRGVSEILDLAETSIFSLAEQHNNNKKDSGPKAISSVTADVISKLDELSKLDGNITGLTTGFLELDNKTSGMQPGDLIIVAARPSMGKTTFAMNLVESVLQYNKLPALVFSMEMPADSIAMRLISAMGKVHQGHLRSGNLDADEWTKVTGTILQLQQMHLYIDDSSALPPTEVRARARRIAKMHDGKIGCIMVDYLQLMKVPGMGDNRVGEISEISRSLKALAKEMNCPVIALSQLNRSLENRPNKRPVMSDLRESGAIEQDADLIMFIYRDEVYNKESKEAGTAEIIIGKQRNGPIGTVRLAFEGQYTRFSNLSPEYYSQYDDEE

SEQ ID NO: 44811 - protein, 626 aa, Acinetobacter baumannii
MHYPKVYDVIVIGGGHAGTEAALAAARMGRQTLLLTHNIETLGQMSCNPAIGGIGKSHLVREIDALGGAMALAADKGGIQFRILNSRKGAAVRATRAQADRVRYKAAIRETLENQANLDIFQQAADDLIVEGDTVKGVVTQMGIRFDAKTVVLTTGTFLGGVIHVGLEKSSGGRAGDPPSIALAQRLRELKLPVGRLKTGTPPRIDARSVDFSVMTPQPGDFPSPVMSFMGDVSMHPEQVNCYITHTNEKTHDIIRGGLDRSPMYTGVIEGVGPRYCPSIEDKIHRFSDKDSHQVFLEPEGLDTHELYPNGISTSLPFDVQFELVRSIRGMENAHILRPGYAIEYDYFNPQALKFTLETKAINGLYFAGQINGTTGYEEAGAQGLLAGLNAARRAWEQEEWTPKRDQAYMGVLVDDLITLGTKEPYRMFTSRAEYRLMLREDNADQRLTTIGRELGLVDDVRWAAYCEKMEAVERETSRLQHLWAAPNNPMGKKFVEMTGADLSKECSAIDLLKRPNINFGQIAELTGSEVSQQVGEQIEIAVKYEGYINRQHEDVAQLKRLEETKIPADFDYDVVSGLSREITQKLKTVRPETLAQASRIPGVTPAAVQLVMITIRKNNMTKKTA

SEQ ID NO: 44812 - protein, 148 aa, Acinetobacter baumannii
MDVILLQRIKNLGKLGDKVSVKAGYGRNFLIPQGKAVAATEANTAAFEARRAELEKQEAEVLAAAQARAEQLNEVNIVITAKAGDEGKLFGSIGTRDIADALTNAGLTVDRAEVRLPNGALRHTGEFNIAIQLHHDVVAEVLVTIVSE

SEQ ID NO: 44813 - protein, 127 aa, Acinetobacter baumannii
MRHYEIVLLVHPDQSDQVVGMVERYISQIKEADGQIHRLEDWGRRQLAYPINKIHKAHYILMNVECGQSTLDELEELFRYNDAIIRNLIIRREHAITEESLLAKSAEEKRARKAQREEAQQVAQEAE

SEQ ID NO: 44814 - protein, 1153 aa, Acinetobacter baumannii
MFQQEISQLNLQQLKAGEKRWVGSLLGSSAALLLKEIATQHSSLLVLVARNNQHVAQLESELEFYGVKPTIFPDWEILPYDRLSPHQDIVSERLAILSNMPQQGVLLISASTLAQRVAPYSWVLGEHFDIKVGQKFDLEQQKLRLVQAGYHLVDTVYDHGEFAVRGSIMDIFASGQESPIRIDLFDDEIDSLKFFDPETQRTTTTLKSFTVLPAKEFPLKEGRSVFRDRYSEFFPTANPKKNPIYQDVLDGIASPGIEFYLPLFFNKEQMQSQSMFTTYLPKNCIVITTNDIDTDLTSFWKEVMRRYEDRRHNMDQPILAPEELFISPNHLLSALNQFPRMLVSAETIEEKAGALNLKTEQPPKLPVDPKKEKPFSAVKKYIDEANHPVLLVAESAGRRESLKDALRSSLGEIPNVENFEQFQISQFAIAITNAPLDRGLLLTDQLTVISENQLYEHRVVQRRRKRQQEVSEEFLIRSLTELSIGAPVVHIDHGVGRYAGLITLAIEGQDYEFLQLDYAEDAKVYVPVTNLHLISRYSGGDPDLAPLHKIGTDAWSKAKRKALEQIHDVAAELLHIQARRQSKPGFAFELDQSLYMQFASGFAYEETLDQANAIEATLYDMQQAKPMDRLVCGDVGFGKTEVAMRAAFVAVQNGKQVAVLVPTTLLAQQHYESFKDRFADWPVRIEVLSRFGSNKTHLKNIEDLANGKVDIVVGTHKLLQENVQFKDLGLMVVDEEHRFGVRDKERIKALRADVDMLTLTATPIPRTLNMAFSGMRDLSIIATPPARRLAVKTFVQEHTDASIKEAILRELLRGGQVYFLHNEVETIERAAENIRVLVPEARVAVAHGQMRERELEQVMQQFYHKEYNVLVCSTIIETGIDVPNANTILIERADKLGLAQLHQLRGRVGRSHHQAYAYLLVPSIKHLKGDAEKRLDAIQRASTLGAGFMLATEDLEIRGAGELLGEQQSGSMQAIGYSLYMEMLEKATKAIQQGKTPNFDAPLSLTAEINLHIPALIPDDYLGDVHQRLLFYKRISNTDTQEKLDNIRMELIDRFGIPPQSVKHLFSVHQIRLKAEHLGITKIDINTQGGNIEFSPDTPVQAISIIQLMQKNPTYYRMEGGQRLKVMVQLEEYEKRIQFINDLLQKLMSELHA

SEQ ID NO: 44815 - protein, 333 aa, Acinetobacter baumannii
WKRIKHPSEVVEVGQEVTVKVLKFDRERNRVSLGLKQLGEDPWLAIMSRYPKGSIVKARVTNLTDYGCFAEIAEGVEGLVHVSEMDHTNKNIHPSKVVQIGDEVDVMVLEVDEERRRISLGIKQTRANPWEEFAKSHEKGEKVSGTIKSITDFGIFIGLNGGIDGLVHLSDISWNEQGEEAIRRYKKGDTVEAVILSVDAEGNRISLGIKQLNSDPFNDFLAANERGALVKGTVTAVDARGATVKLADEVEATLKASEINRDRVEDATKFLEVGQEVEAKIINVDRKSRSINLSIKAKDEAEEKEAVANLRTASASQDNGPKTIGDLIKAQMK

SEQ ID NO: 44816 - protein, 303 aa, Acinetobacter baumannii
MQSISLIIQIFLVLAFGYFLGPKLSLNIRHFIFKILPYFSYILLTSVALELTLALDQIDNPSTILPPALLIALTTSLGSFFTCLFAYTIFDKESVKGKISLQLFMNALKNIAKAFLALTIGVILGILLTQLHTHIPFNSWYLLLLFIFLIGIELAFTHFNRTWLSWKILIVPLAAFIGSCLAGLLNYSLLGHEFTLNEILALGQGYGWYSMSGILFTQLHSAELGGIALLTDLFREIVAILLMYTMGWRFPRPAISSAGATSMDVTLAMVKQSCGTHYVPHAMMSGLLLSLLAPLLITVFLNF

SEQ ID NO: 44817 - protein, 124 aa, Acinetobacter baumannii
MDSYSPYKGKSGLKRILNATSYSISGFKAAYQNEAAFRQIVLINLVLIPVSFFLDVTRGEHALMIIVCLFAIIVELFNSAIEAVVDRVSLEKHQLSKNAKDMGSAAQFVALSIIVATWLIILFG

SEQ ID NO: 44818 - protein, 544 aa, Acinetobacter baumannii
MSAKDVKFGDSARSKMIAGVNVLADAVKVTLGPKGRNVVIDRSFGAPHITKDGVTVAKEISLKDKFENMGAQLVREVSSKTNDIAGDGTTTATVLAQAILNEGIKSVTAGMNPMDLKRGIDIAVKTVVENIRSIAKPADDFKAIEQVGSISANSDTTVGKLIAQAMEKVGKEGVITVEEGSGFEDALDVVEGMQFDRGYISPYFANKQDTLTAELENPFILLVDKKISNIRELISVLEAVAKTGKPLLIIAEDVEGEALATLVVNNMRGIIKVCAVKAPGFGDRRKAMLQDIAILTGATVISEEVGMSLEQATLQDLGTAHKITVSKENTVIVDGAGDAAAIAERVQQIRAQIEESTSEYDREKLQERVAKLAGGVAVIKIGAATEVEMKEKKDRVDDALHATRAAVEEGVVAGGGVALVRAVNALEGLKGANEDQTAGINILRRAIEAPLRQIVANAGDEPSVVINAVKNGEGNFGYNAATGEYGDMLEMGILDPAKVTRSALEHAASVAGLMLTTECMITDIPEDKPAAPDMGGMGGMGGMM

SEQ ID NO: 44819 - protein, 208 aa, Acinetobacter baumannii
  MISC_FEATURE (103)..(103): X=any amino acid
  MISC_FEATURE (120)..(120): X=any amino acid
  MISC_FEATURE (142)..(142): X=any amino acid
  MISC_FEATURE (192)..(192): X=any amino acid
SLYSRMKNDEQFLAEFDRDLSYYVGRPSPLYYAERWSKRVGWCAQFTLTRDRLNHTRLTTKAKQLRLAQALLAKLSGIKTLLLPNTGAGQHGVATATIADTFXVLICVVYMGADRRLAVXAMNVYRMRLLRCNSCACAKWVXNFKKMHERSDADWVTNVDTSILCHWYSCSSAILILKLVRTSNNLLVVSAXTDFGTAGRLPDALVAC

SEQ ID NO: 44820 - protein, 561 aa, Acinetobacter baumannii
HVTVDTVPADLIGAITIPEDLNGDGILNADELGTDGSFNAQVALGPDALDGTVVNVNGTNYTVTAADLANGYITAAIPVTGEGPVADPCRSSGCTKVTVACCRCMTVSRSTVDTVPADLIGAITIPEDLNGDGILNADELGTDGSFNAQVALGPDALDGTVVNVNGVNYTVTAADLANGYITAAIPVTGEGPVAIHAEAVDAQGNVDVADADVTVTVDTVPADLIGAITIPEDLNGDGILNADELGTDGSFNAQVALGPDAVDGTVVNVNGTNYTVTAADLANGYITAAIPVTGEGPVAIHAEAVDAQGNVDVADADVTVTVDTVPADLIGAITIPEDLNGDGILNADELGTDGSFNAQVALGPDALDGTVVNVNGVNYTVTAADLANGYITAAIPVTGEGPVAIHAEAVDAQGNVDVADADVTVTVDTVPADLIGAITIPEDLNGDGILNADELGTDGSFNAQVALGPDAIDGTVVNVNGTNYTVTAADITNGYITAILAATAADPVTGQIVIHAEAVDAQGNVDVADADVTVTLDVTPPDITTTVLAIDPVTADNILDA

SEQ ID NO: 44821 - protein, 238 aa, Acinetobacter baumannii
MSQEEKLPKILIVEDDERLARLTQEYLIRNGLEVGVETDGNRAIRRIISEQPDLVVLDVMLPGADGLTVCREVRPHYHQPILMLTARTEDMDQVLGLEMGADDYVAKPVQPRVLLARIRALLRRTDKTVEDEVAQRIEFDDLVIDNGGRSVTLNGELVDFTSAEYDLLWLLASNAGRILSREDIFERLRGIEYDGQDRSIDVRISRIRPKIGDDPENPKRIKTVRSKGYLFVKETNGL

SEQ ID NO: 44822 - protein, 169 aa, Acinetobacter baumannii
MMILTDKKPRVNVEGILTAEEIHEIEHHIGHYPYPRAASLDALKCVQRRNGWVDDAQMNAIAQLLTISVADLEGVATFYNRIYRQPVGRHVILLCDSIACFLMGAETLAEAFQRELGIQFGQTTQDGRFTLLPICCLGNCDKGPTLMIDEDTHGLVEVTSIKQLLEKYV

SEQ ID NO: 44823 - protein, 302 aa, Acinetobacter baumannii
MQISHKSFRNVGLIGRPDKSSVVETLCLIHDHLLSLGLNPIFDQETAELVPYDHAQVVSRHLLGEVADLVIVVGGDGSLLHAARALVRYNTPVIGINRGRLGFLTDIKPSEAIFKLDQVLQGHFQLDRRFLLEMEVRTNGEVIYDAIALNDVVLHSGKSVHMIDFELNIDGQYVYRQHSDGLIVSTPTGSTAYALSGGGPILHPSMDAIALVPMHPHTLSSRPIVVGGQSEIKIVIRENRVLPMVSADGQHSVSLNVGDSLHIRKHPFKLSLLHPPGYDFYMACRTKLGWNQDFESFQRDES

SEQ ID NO: 44824 - protein, 477 aa, Acinetobacter baumannii
MSQQFDLVVIGGGPGGYEAAIRAAQLGFKVACIEKRIHNGKPSLGGTCLNVGCIPSKALLDSSHRYEDTVHHLADHGITTGEVNFDLAKLLARKDKIVDQLTGGIDQLLKGNGIEWLKGTGKLLAGKKVEFVPHEGETQILEPKYVILASGSVPVNIPVAPVDQDIIVDSTGALNFPEVPKRLGVIGAGVIGLELGSVWRRLGAEVVVFEAMDAFLPMADKALSKEYQKILTKQGLDIRIGAKVSGTEVNGREVTVKYTQGGEDKEQTFDKLIVCVGRKAYAEGLLAEDSGIKLTERGLVEVNDHCATSVEGVYAIGDLVRGPMLAHKAMEEGVMAVERIHGHAAQVNYDTIISVIYTHPEAAWVGLTEEQAKEKGHEVKTGQFGFAVNGRALAAGEGAGFVKFVADAKTDRLLGMHVIGPAASDIVHQGMIALEFVSSVEDLQLMTFGHPTFSEVVHEAALAVDGRAIHAIQRKRK

SEQ ID NO: 44825 - protein, 296 aa, Acinetobacter baumannii
MSVLINKDTKVLVQGFTGKNGTFHSAQALDYGTKVVGGVTPGKGGTTHLDLPVFNTMKEAVRETNADASVIYVPAPFVLDSIVEAVDSGVGLIVVITEGVPTIDMLKAKRYLETNGNGTRLVGPNCPGVITPGECKIGIMPGHIHQPGRIGIISRSGTLTYEAVAQTTKLGLGQSTCIGIGGDPIPGMNQIEALQLFQDDPDTDAIIMIGEIGGTAEEEAAEFIKSNVTKPVVGYIAGVTAPKGKRMGHAGAIISGGQGTAEEKFAAFEKAGMAYTRSPAELGSTMLQVLKEKGLA

SEQ ID NO: 44826 - protein, 1058 aa, Acinetobacter baumannii
MAQFFIHRPIFAWVIALVIMLAGILTLTKMPIAQYPTIAPPTVTIAATYPGASAETVENTVTQIIEQQMNGLDGLRYISSNSAGNGQASIQLNFEQGVDPDIAQVQVQNKLQSATALLPEDVQRQGVTVTKSGASFLQVIAFYSPDNNLSDSDIKDYVNSSIKEPLSRVAGVGEVQVFGGSYAMRIWLDPAKLTSYQLTPSDIATALQAQNSQVAVGQLGGAPAVQGQVLNATVNAQSLLQTPEQFKNIFLKNTASGAEVRLKDVARVELGSDNYQFDSKFNGKPAAGLAIKIATGANALDTAEAVEQRLSELRKNYPTGLADKLAYDTTPFIRLSIESVVHTLIEAVILVFIVMFLFLQNWRATIIPTLAVPVVVLGTFAVINIFGFSINTLTMFAMVLAIGLLVDDAIVVVENVERVMSEDHTDPVTATSRSMQQISGALVGITSVLTAVFVPMAFFGGTTGVIYRQFSITLVTAMVLSLIVALTFTPALCATILKQHDPNKEPSNNIFARFFRSFNNGFDRMSHSYQNGVSRMLKGKIFSGVLYAVVVALLVFLFQKLPSSFLPEEDQGVVMTLVQLPPNATLDRTGKVIDTMTNFFMNEKDTVESIFTVSGFSFTGVGQNAGIGFVKLKDWSKRTTPETQIGSLIQRGMALNMIIKDASYVMPLQLPAMPELGVTAGFNLQLKDSSGQGHEKLIAARNTILGLASQDKRLVGVRPNGQEDTPQYQINVDQAQAGAMGVSIAEINNTMRIAWGGSYINDFVDRGRVKKVYVQGDAGSRMMPEDLNKWYVRNNKGEMVPFSAFATGEWTYGSPRLERYNGVSSVNIQGTPAPGVSSGDAMKAMEEIIGKLPSMGLQGFDYEWTGLSLEERESGAQAPFLYALSLLIVFLCLAALYESWSIPFSVLLVVPLGVIGAIVLTYLGMIIKGDPNLSNNIYFQVAIIAVIGLSAKNAILIVEFAKELQEKGEDLLDATLHAAKMRLRPIIMTTLAFGFGVLPLALSTGAGAGSQHSVGFGVLGGVLSATFLGIFFIPVFYVWIRSIFKYKPKTINTQEHKS

SEQ ID NO: 44827 - protein, 959 aa, Acinetobacter baumannii
MTDAQTAQNIATTYDPTEIEKKWYKTWEEQGYFKPSGHGESFCIMIPPPNVTGSLHMGHGFNNAIMDALTRYNRMMGKNTLWQPGTDHAGIATQMVVERQLGLQGITRHDLGREKFIEKVWEWKEQSGGTITKQIRRLGSSVDWSRERFTMDEGLSNAVKEVFVRLHEDGLIYRGKRLVNWDPKLQTALSDLEVESKEEKGSLWHFKYFFEDKSVKTQDGKDYLVVATTRPETLLGDTAVAVHPEDERYAHLVGKNIVLPITGRLIPIVADDYVEKDFGTGCVKITPAHDFNDYELGKRNSLPIINIFNKNAEVLGEFEYIAKAGEQISKTITAPADYAGLERFEARKKLVAQAEAEGWLDQIQPYDLKAPRGDRSGVIIEPLLTDQWYVKIAPLAEPAIEAVQDGRIKFVPEQYSNMYMAWMRDIQDWCISRQLWWGHRIPAWYDADGNIYVGRSEEEVRAKNNIAADVELKQDEDVLDTWFSSALWTFSTLGWPEQTPELKTFHPTDVLVTGFDIIFFWVARMIMMTMHFMKNEDGSSQIPFKTVYVHGLVRDGEGQKMSKSKGNVLDPLDLIDGIDLESLVAKRTTGLMNPKDAAKIEKSTRKEFPEGINAYGTDAVRFTFCALANTGRDIKFDLKRVEGYRNFCNKIWNATRFVLMNVEGQTVGQEARPDLWELPEQWIISRLQKAEAAVHQAFATYRLDLAAQAIYDFIWNEYCDWYVELTKPVLNDAEVSEERKAEVRRVLLAVMEASLRLAHPLMPYLTEEIWQTLAPMLGQGGPTIMTAQYPIPEQAKINEQAEADMQWLQGLIGAVRNIRGEMGLGNARLLPVLLQNISNAEREQITRIEALFKALAKVESIEFLGKDQEPPLSSSSVVGHASVFVPMKGLIDPKAELGRLQKDLDKIQKQHDQIANKLANEGFVSKAPAAVVEGEKAKLAEFAAQLDKVKANMEQIAAL

SEQ ID NO: 44828 - protein, 85 aa, Acinetobacter baumannii
MATKKAGGSTKNGRDSNPKMLGVKVYGGQTVTAGNIIVRQRGTEFHAGANVGMGRDHTLFATADGVVKFEVKGQFGRRYVKVETV

SEQ ID NO: 44829 - protein, 423 aa, Acinetobacter baumannii
MIDPKLLRNNIEVVNAALAKRGVQLDVQEWASLETRRKDLQSKTEKLQAERNAGAKQVGQIKKSGGDASEIMARMQAIGDEIKAAEVALSELQNEIEQKALSIPNLPDESVPAGKDENDNVEISKWGTPRQFDFEIKDHTDLGEWMGGLEFETATKLTGSRFSVLKGPLARLQRALTQFMLDTHTLKNGYTEAYVPYLVNADSLRGTGQLPKFEEDLFKLQGEKEYYLIPTAEVPVTNFVRDEIIDADRLPLKYAAHTPCFRSEAGSYGRDTRGLIRQHQFDKVEMVQIVKPETSMQALEELTAHAEGILQALGLPYRKILLCGGDMGFGATKTYDLEVWVPSQNTYREISSCSNMGDFQARRMKARYRMDQKKTELVHTLNGSGLAVGRTLLAVMENYQRKDGSIEIPEVLRPYMGGATFID

SEQ ID NO: 44830 - protein, 532 aa, Acinetobacter baumannii
IGIDLGTTNSCVAVLEGDKVKVIENAEGARTTPSIIAYKDGEILVGQSAKRQAVTNPKNTLFAIKRLIGRRYEDQAVQKDIGLVPYKIIKADNGDAWVEVNDKKLAPQQISAEILKKMKKTAEDYLGETVTEAVITVPAYFNDAQRQATKDAGKIAGLDVKRIINEPTAAALAFGMDKKEGDRKVAVYDLGGGTFDVSIIEIADLDGDQQIEVLSTNGDTFLGGEDFDNALIEYLVEEFKKEQNVNLKNDPLALQRLKEAAEKAKIELSSSNATEINLPYITADATGPKHLVINVTRAKLEGLVADLVARTIEPCKIALKDAGLSTSDISDVILVGGQSRMPLVQQKVQEFFGREPRKDVNPDEAVAIGAAIQGAVLSGDKNDVLLLDVTPLTLGIETMGGVLTPIIEKNTTIPAKKSQVFSTAADNQPAVDISVYQGERKMAQQNKLLGNFQLGDIPPAPRGVPQIEVSFDINADGILKVSAKDKSTGKEQSIQIKANSGLSDAEIEAMITDAESNAEEDRKLKNLAKARN

SEQ ID NO: 44831 - protein, 122 aa, Acinetobacter baumannii
MLSAVIPSEHSYPAMRLASQPVHQRFVHSGPLVLGADPLKFPAPTVDRDRTVSRRSKPSSRTSLNGEQPYPWDLLQPQDEMSRHRGAKHRRRYELLGGISLLSPEYLLSVERWPFHTEPPDH

SEQ ID NO: 44832 - protein, 333 aa, Acinetobacter baumannii
MKLLRLNALSPNFQLPQTAVTIGNFDGVHLGHQAMIAQLKKIAAAQGLKTLVMIFEPQPLEFFKGYDAPPRINSLREKVEYLAELGVDYIAVAKFDQHFRSMSASEFADLLKDKLNAQALVLGDDFHFGKDRQGNSEFLKNYGFQVTNLHTIELEGERVSSTRIRQVLQVGNLALAAKLLGRPYSITGRVQYGDQIGRTLDFPTINVRLNRHKPCLNGIYGVEVICETTSLTQKVLQDNPEKPGIAGYHENSLYGAGHVGTRPAIQQEHPEWRLEVHFPDVSANLYGLFMRVTFLHYLHGELNYPSLEALKAGIDNDVQQLRQYRNDTTQFPF

SEQ ID NO: 44833 - protein, 130 aa, Acinetobacter baumannii
  MISC_FEATURE (43)..(43): X=any amino acid
  MISC_FEATURE (107)..(107): X=any amino acid
QRRHHYAIRAGRNLPDKEFRYLRTVIVTAAVYWGFDQELRLRXPHQLTFQHRAGITPYTSTFVFAECYVFNKQLQRPGFCGCRQLRKRVPSPTTAYLLPKLRYHFAXFLQQSSLKRLGLLDLTTCVGFGY

SEQ ID NO: 44834 - protein, 187 aa, Acinetobacter baumannii
MSLINTEVKPFQATAYHNGQFIEVNETNLKGKWSVVFFYPADFTFVCPTELEDLADNYAEFQKLGVEIYGVSTDTHFTHKAWHDTSDAIKKIQYPLIGDPTWTLSKNFDVLIESEGLADRGTFVIDPEGKIQIVEINAGGIGRDASELLRKVKAAQYVHSHPGEVCPAKWKEGEATLAPSIDLVGKI

SEQ ID NO: 44835 - protein, 859 aa, Acinetobacter baumannii
MRFEKFTNRLQQALSDAQSLAMGKDHTAIAGIHILSTLLEEPSNISLLQQAGARLPELKQKLEQALKDAPTIANPTGDVNLNPEAVKALNLADRYAQKAGDEFLSTDWVLLGLAETGETKNILSAVGVTPDSLRKVIENIRGSDKVMSNNHEDQRDSLNKYTIDLTERALSGKLDPVIGRDDEIRRTIQVLSRRTKNNPVLIGEPGVGKTAIVEGLAQRIVNGEVPEGLKNKRVLSLDLGSLLAGAKYRGEFEERLKAVLKDLAKHEGEIILFIDELHTLVGAGKGDGAMDAGNMLKPALARGELRCVGATTLDEYRQYIEKDAALERRFQKVLVDEPSVEDTIAILRGLKEKYATHHGVQILDSAIIAAAKMSHRYITDRQLPDKAIDLIDEAASRIKMEIDSKPEALDKLDRRLIQLKMQLEAVKKDEDAGSKAEVTHLEKQIAEVEKEYNDLEEVWKAEKTLVEGTKQAQVELDKARIAFEKAQREGDLAEAARLQYGVIPELQKQLEQDEVAEENEEPKLIRTKVTENEIAEVVSAATGIPVAKMMQGEREKLLHMEEFLHDRVVGQDEAVVAVSNAVRRSRAGLSDPNRPSGSFLFLGPTGVGKTELTKALANFLFDSDDAMIRIDMSEFMEKHSVSRLVGAPPGYVGYEEGGVLTEAVRRKPYSVVLFDEVEKAHPDVFNILLQVLDDGRLTDSQGRVVDFKNTVIVMTSNLGSQDVRELGEGATDDEVRTIVMNAVSQHFRPEFINRIDELVIFHSLKKAQIRGIADIQLDRLRSRLVDRDMSLTVDDSAFDLLIDAGFDPVYGARPLKRAIQQQVENTLAQKILSGDFVAGDTILVKGENGHLVFDKLKLS

SEQ ID NO: 44836 - protein, 338 aa, Acinetobacter baumannii
MSNHNVALQFEDGVTRFINVAQGETLSDAAYRQKINIPLDCRDGACGTCRAFCESGSYDMPEETYIEDALTPEEAAQGYILACQCRPTSDAVFQIQASSDVCKTEIHSFQGTLARVENLSDSTITFDIQLDEGQPDIHFLAGQYVNVAIPETGETRSYSFSSKPGNRLTGFVVRNVPNGKMSEFLSKNAKTGDKMTFTGPFGSFYLRNVVRPVLMLAGGTGIAPFMSMLQVLEEKGSEQPVRLVFGVTNDFDLVALEKLNELQAKFPWFEYRTVVASPESNHERKGYVTGHIESEWLNGGDVDVYLCGPVPMVEAVRSWLETENIKPANFLFEKFSAN

SEQ ID NO: 44837 - protein, 823 aa, Acinetobacter baumannii
MDSKTTKLPAYSETLSIEGMTCASCVGRVEKALKKVENIEIANVNLATEKAVVYSNQPIQREALVKAVERAGYDVPKAAPVELSIEGMTCASCVARVEKALKKVDGVQEATVNLATEQAWVQTDSSVNVEDLIRAVKKAGYDAKASEKHQDEQLDKKASELDQLKKDLIISIVLALPVFILEMGSHLIPAFHMWVMHTIGQYNSWLLQFVLTTLILVFPGRRFYQKGIPALWRLAPDMNSLVAVGTLAAYSFSVVATFMPQVLPQGTVNVYFEAAAVIVSLILLGRYFEAKAKGRTSQAIQHLVGMQPKTARIQRDGQVVEVAVAEMVSGTIVEIRPGERVPVDGEVVEGHSYIDESMITGEPVPVEKRVGQQVVGGTVNQNGTLNIRATAVGSSSVLSQIIRMVEQAQGSKLPIQGLVDKVTMWFVPAVMLIAAITFLVWFIFGPEPALTFGLVNAVAVLIIACPCAMGLATPTSIMVGTGRGAELGVLFRKGEALQLLQEAQVVAVDKTGTLTEGKPTLTDFNVQSGFERNQVLTLVASVEAKSEHPIALAIVQAAESEGLNLLPVTAFNSITGSGIEAEVSGQKVQIGADRYMHQLGLDTSSFQAIAAQLGEEGKTPLYVAIDQQLAAIIAVADPIKETTYAAIEALHQLGLKVAMITGDNRHTAQAIAKKLNIDEVVAEVLPEGKVDTVRQLQKQYGRLAFVGDGINDAPALAQADVGLAIGTGTDVAIEAADVVLMSGSLKGVPNAIALSKATMRNIRQNLFWAFVYNVALIPIAAGALYPAFGVLLSPMFAAGAMALSSVFVLGNALRLKRFHAPVQ

SEQ ID NO: 44838 - protein, 188 aa, Acinetobacter baumannii
MFVAGVDEAGRGPLVGSVVAAAVILDPNNPILGLNDSKKLTEKKREKLFIEIQEKALAWSIAEATHAEIDELNILQATFLAMQRAVEGLKTQPQKVIVDGNQIPKGIIIPCEAIVGGDASHAEISAASILAKVTRDRQMAELDQQYPLFGFAKHKGYPTKAHFEAIAAHGVIDQHRRSYAPVKRALGL

SEQ ID NO: 44839 - protein, 84 aa, Acinetobacter baumannii
MLILTRRVGETLMIGDQVSVTVLGVKGNQVRIGVNAPKEVSVHREEIYQRIQHERAMHEHLQHLDQDYQVSYEDDNYAQKNFNR

SEQ ID NO: 44840 - protein, 426 aa, Acinetobacter baumannii
MALIVQKYGGTSMGTPERILNVARRVKRWHDHGHKVVVVVSAMSGETNRLLALAKAITETPDPRELDQMVSTGEQVTISMLAMALNSIGVEAKSYTGRQVGIKTDSAFTKARIESIDTDVMTNDLDAGRVIVVAGFQGFDANGNTTTLGRGGSDTSGVAIAAALKADECQIYTDVDGVYTTDPRVAPKAKKIDRISFEEMLEMASLGSKVLQIRSVEFAGKYQVPLRVLSSFDNDDDGAFDDEFKENVGTLITTEAEDTMEQPIIAGIAFNRDEAKLTILGVPDEPGIASKILSPVSDANIEVDMIVQNVEEDGTTDFTFTVNRVDLAKAEKILNETAKNIGAREVSTRDDIVKVSIVGVGMRSHAGVASKMFTALADEGINILMISTSEIKVSVIIDEKYLELAVRCLHTAFGLDREHGESSARA

SEQ ID NO: 44841 - protein, 883 aa, Acinetobacter baumannii
MSTRLMTSAEIREAFLRYFETQGHTRVASSSLVPANDPTLLFTNAGMNQFKDCFLGLEKRDYVRATTSQKCVRAGGKHNDLDNVGYTARHHTFFEMLGNFSFGDYFKRDALKFAWEFLTSEQWLALPKDKLYVTVYHTDDEAYDIWNKEIGLAPERIIRIGDNKGEKYASDNFWAMGDTGPCGPCSEIFFDHGEHIWGGLPGSPEEDGDRFIEIWNNVFMQFNRTADGVLHPLPAPSVDTGMGLERISAVLQHVNSNYDIDLFQHLLKAAANIIGIEDEGQPSLRVVADHARSCCFLIADGVNPSNEGRGYVLRRIIRRAVRHGNKLGATGTFFYKMLQPLIEVMGQAYPELEARREVIEATLIREEEQFAKTLEQGLKLLEGELAQLKDKTIPGATVFKLYDTYGFPTDLTADIARERGFIIDEAGFEVEMAAQRQRARDAGKFAVDYNNIVKVEGETQFDGYTNTTGQGQIVAIYKDGVQVDEVSEGDEALIVLNQTPFYAESGGQIGDTGIFKNETGIFEVQDTKKSGGAFVHQGIVTVGNLKTSQNVEAIVKADIREATARNHSATHLLHAALRQILGSHVQQKGSLVASDILRFDFANDQPVSFEQLQQVERLVNAEIIANTAVTTELLDIETAKAKGAMMLFGEKYGDEVRVLSMGSVIDEKNFSIELCGGIHVKRTGDIGLFKITSEGGVAAGVRRIEAVTGTKALEVVQKADHDIQHINSLLKAQKDQTVERVQANVELVSALQKQIEQLNQKLANFQAADLIDQVQTIAGRQTLITTVQGVDAKALRNLHDSVKSKLENAVIVLAGVEGDKVSLLASVASQYTANLKAGDIIKHLATELGGKGGGKPDLAQGGAPLNEKFGQVMAALPAWLEQK

SEQ ID NO: 44842 - protein, 341 aa, Acinetobacter baumannii
MQRIAINGFGRIGRNVLRAWFESPKQFHFEIVAINDIADVHTLVHLFKYDSTHGRFNGKVDITIENEKIYLNIQSNQRLLKVEVLQQKQPELLPWASLKIDVVLECTGLFRSHADATRHLEAGAKRVIIGAAPFDHVDAAIVYGVNHADVKATDQIISSVSCTTQALVPLVKIIDDAFGIETALMTEIHAVTADQSVLDHAHRDLRRARASGQNIIPTTSSALGALKRVMPKMEDRIDGYSIRVPTINVAAIDLTFIAQSPITVHHINELLIKASQTDYAEIMAVTDEPLVSSDFNHSPYSLIVDLTQTMVVGHQAKVFAWYDNEWGYANRLLDLCDSFKS

SEQ ID NO: 44843 - protein, 224 aa, Acinetobacter baumannii
MLFSQELWQRNLNLYQKILDLPFNQELANGTLDKEAFCHYVIQDAQYLVAYGRVLAVAAAKAFDADDIMQFSDAAKIAIVVERSLHDDFMKNFGVTKEEFKNTPLTLAGHHYTSFLTATAWSESYPVVLAALLPCFWIYAEVGKDIVSKSVPNNPYQAWIDTYAGEEFHTAVRNVIATVDKVAARCDADTLEKMHAAYTMGAKLEWLFWDSAYHQRQWLGLDQI

SEQ ID NO: 44844 - protein, 363 aa, Acinetobacter baumannii
EINPYLNQLKDLTDRSQTLRGYLDYDLKKERLEEVLRELEDPAIWNDQNRAQAMAKEKGELENVINVLDGLSTQLEDAKAMLDLAVEADDESLLEDVQSELSTAEEELAKLEFRRMFSNPMDPNPCYVEIQAGSGGTEAQDWASMLLRMYMRWIERHGFKAELMEVSDGDVAGIKSATIRVEGEYAYGWLRTESGVHRLVRKSPFDSGNRRHTSFSAVFISPEVDDNIEIDINPSDVRTDTYRASGAGGQHINKTDSAVRLTHIPTGIVVACQNQRSQHANRDHAWKQLRAKLYELEMQKRNEAAQALEDSKSDIGWGSQIRSYVLDDSRIKDLRTGVENSNTGAVLDGDLDRFIEASLKQGL

SEQ ID NO: 44845 - protein, 333 aa, Acinetobacter baumannii
MKYRTLGQTGEKVSALGLGCMGMSFAYGASDDTQSIATLEKALDLGINFWDTADMYGNGANEVLLSKVLEKHRDKVFLATKFGFRYKEDNLNPKNSLESYIDGSPEWIKVAVENSLRRLNTDVIDLYYAHRIDPNVPVEDTIGAMADLVKQGKVRYLGLSEASAETIRKAHAIHPIAAVQHEYSLLTREFEQTHLQTIRELGISLVPYSPLSRGLITNTLDVNNLDENDFRRQLPRYQGDNWKNNQSLAQAFSEFAQSKNATAAQLALAWILAQGDDIIPIPGTRKIERLVENAGAVDLHLTPADLAEIEAIIARYPNMGARYNAQQLAAVNH

SEQ ID NO: 44846 - protein, 414 aa, Acinetobacter baumannii
MNSSSTPSTLNTEATSVLSREWIHKGTKAYKHAGFALFLVGFASFSLIYCVQPLLPAFSQSFQISPASSSLALSLTTAFLAISIVLSSAFSQAIGRRGVIFTSMLCAAILNIVSMFTPNWHSLLMARALEGLLLGGVPAVTMAWIAEEIAPEHLGKTMGLYIAGTAFGGMMGRVGMGILVEYFSWRTALGLLGATCFICSIAFLKLLPASRNFVQKKGLNLGFHMQMWRAHLSNTKLLRLFAIGFLLTSVFVTLFNYATFRLSGAPYSLSQTQISLIFLSYSFGMVSSSLAGSLADRFGKKTMMMSGFALMIMGSLMTLLSSLFGIIIGIAFITTGFFITHSLTSSSVGTESKQAKAHASSLYLLFYYMGSSIVGSAGGWFWLHGGWSAIVGLTVVLSLIGIFLAIYTSHAKAH

SEQ ID NO: 44847 - protein, 200 aa, Acinetobacter baumannii
MKRLNKSETTRQHILDTSFELVLHKGFVGVGLQEILKACDVPKGSFYHYFASKEAFGCALLEQYMANYKVRMEQLWQHSEQSAHARLMALWQAWIDDPVHGSWAENCLIVKLAAEVSDLSEDMRQILNDGVHKLTQRLALLLKEGQQEGSIPKHIEPLKTAQVMYQLWLGAALLTKLSQDKAHLHLALETTQQLLKPIEE

SEQ ID NO: 44848 - protein, 943 aa, Acinetobacter baumannii
MSQSHIRIRGARTHNLKNVSLDIPRDKFVVITGLSGSGKSSLAFDTLYAEGQRRYVESLSAYARQFLSQMEKPEVDSIEGLSPAIAIEQKSTSHNPRSTVGTITEIYDYLRLLYARVGTPYCPEHDLPMVAQTVSEMVDAVKNLEEGTALMLLAPVVRERKGEYSNLFEQLQGQGFVRARVDGEIIDIDTPPELDKKKKHTIEVVVDRFKVRDDLGNRIAESFETALRLGGDIAVLSWMNGEHPDRVFSAKHSCPECDRAVAELEPRLFSFNNPFGACPVCDGLGTRSHFSPEKLIPNPELAISEGCYSWLGSSTSLYYSMLQKVADHFGFQLDTPWNQLDKDTQKKFLQGTGKEKIDLSYIDERGRKHTRVQPFEGILPHLERRYRETESNYVRDDLAQYLSNAACDACGGSRLNEISRHVRVKDKTIADITRMSIGDAESYYQGINLEGAKGEIADKIFKEIRERLHFLVSVGLNYLSLARSAETLSGGEAQRIRLASQIGAGLMGVMYVLDEPSIGLHQRDNDRLLQTLIRLRDLGNTVLVVEHDEDAIRAADHIIDIGPGAGVHGGVVIAEGTYDELAKHADSLTGQYLSGKLKIEVPKQRTQPPKPEEKIKLSGAAGHNLKNVDLTIPLGIMTCVTGVSGSGKSTLINRTLLPLAATQLNGATTLTAEKFDSIDGLQHLDKVVDIDQSPIGRTPRSNPATYTGLFTPIRELFAQTPEAKARGYSAGRFSFNVKGGRCEACEGDGMIKVAMHFLPDMYVPCDACHGKRYNRETLEVGYKGKNISDVLEMTVEDAAEFFSAIPVIHRRLETLTQVGLGYIRLGQAATTLSGGEAQRVKLARELAKRDTGKTLYILDEPTTGLHFHDIAKLLDILHELRNKGNTIVVIEHNLDVIKTADWVVDLGPEGGSGGGMIIAEGTPEQVAEVEISHTGRFLKPMLK

SEQ ID NO: 44849 - protein, 566 aa, Acinetobacter baumannii
MTKIQIKQRPLLTRPEQFQGVPPFIAEILARRGVQSEQELELKLKNLLAPELKGLDAAVALMDQAIDEQKKIVIVGDYDADGATSTALMMLVLRDMGAQVDYLVPDRFKYGYGLTPAIAELAHHTYQPDLLITVDNGISSHAGVDAAHALGMQVIITDHHLTTKETPLAEAVVNPNQLGCEFPSKALAGVGVAFYVLANLASLRNRQGKSTSKVTQYLDLVALGTYADVAVLDYNNRILVDAGVKRIQQHQCRVGILALLDIAGREATSIRAQDLGFVLGPRINAAGRMESMRIGIECLLADTMETAYPIAQQLNQLNIDRRQIEGEMKQQALSALDSLQLSQQDIPAALVLFEENWHQGVIGIVAGRLKEQFHRPTIVFAPDEDGIHIKGSARSIDGVHIRDTIEQVAEQHPELVSHFGGHAAAAGLTIRKENFEAFKTVFNDCVAAMDESIFQATLWTDGELPVSALQLDTLNWIEQLGPWGQKFPLPQFEGYFKVIDFRWLKETHLKLRLAIDQYSFDAIAFNAAGRFEFDPMRDHVHLVYEIDRNVFNGNVSLQLRIVHLNQ

SEQ ID NO: 44850 - protein, 510 aa, Acinetobacter baumannii
MVDFAEHRKALLCNDAQSIADYESAMGEAVKAVSAWLQNEKMYTGGSIKELRSAISFQPSKEGMGVQQSLQRMIELFLNKSLKVHHPHSLAHLHCPTMVMSQIAEVLINATNQSMDSWDQSPAGSLMEVQLIDWLRQKVGYGSGQAGVFTSGGTQSNLMGVLLARDWCIAKNWKDENGNPWSVQRDGIPAEAMKNVKVICSENAHFSVQKNMAMMGMGFQSVVTVPVNENAQMDVDALEKTMAHLQSEGKVVACVVATAGTTDAGAIDPLKKIREITNKYGSWMHIDAAWGGALILSNDYRAMLDGIELSDSITLDFHKHYFQSISCGAFLLKDEANYRFMHYEAEYLNSAYDEEHGVPNLVSKSLQTTRRFDALKLWMTIESLGEELYGSMIDHGVKLTREVADYIKATDGLELLVEPQFASVLFRVVPEGYPVEFIDSLNQNVADELFARGEANIGVTKVGNVQSLKMTTLSPVVTVDNVKNLLAQVLAEAERIKDAIASGNYVPPID

SEQ ID NO: 44851 - protein, 406 aa, Acinetobacter baumannii
MRFVDEAVITVEAGDGGNGVASFRREKFVPFGGPDGGDGGRGGSIYIQADDDTSTLVDYRYTRKFRAERGKNGAGANCTGRGGEDVVLKVPVGTTIVDTDSGDIIGDLVEDGQRVMVASGGEGGLGNTHFKSSTNRAPRKCTTGTKGEFREIRLELKVLADVGLLGMPNAGKSTFIRAVSAAKPKVADYPFTTMVPNLGVVDADRHRSFVMADIPGLIEGAAEGAGLGIRFLKHLARTRILLHIIDVQPIDGSDPAHNAKAIMNELAKFSPTLAKLPIVLVLNKLDQIAEESREEWCQHILDELQWTGPVFKTSGLLEEGTKEVVYYLMDQIEQQREREVEDPEYAAEVRAFREQLEAETREQTIAAKEAYRAMRKAQRLESMMDDDDDFDDDEDDGDVESIYVRD

SEQ ID NO: 44852 - protein, 214 aa, Acinetobacter baumannii
MSSINYDELMQPVLAFLGCQTPKEWLDEAVNNLDILMQDHANCEKKAAGTAMNLMFRYSFFTDLQVKLAQLVREEMLHYEQVLEFMTKRGQEWKGLSAGRYAGGLRKEIRTYEPEALIDVLVIGAFVEARSCERFYALAPRVDDELGRYYRYLLKSESRHFEDYLALALDVAKTAKMKDPEEDIQQRIEHIREVEKNLILTPDDTFRFHSGIPA

SEQ ID NO: 44853 - protein, 458 aa, Acinetobacter baumannii
MKSRYLQQGMYAAVFTVAAVQANAAVDFSNLVEQVSPAVVSVNVVKKMTQDELLQQQVPEILKRFFGNQVIIPQQQGPQEKTAYGSAFFISKDGYLLTNHHVIENASRISITLNDRREIDATVVGSDERTDVALLKVNGTNYPALRVGNVDRLRVGEPVLAIGSPFGFDYSASAGIVSAKSRNMSGETSVPFIQTDVALNPGNSGGPLFNQNGEVVGVNSRIFSGTGGYMGLSFSIPIDVAMDVAEQLKTKGKVTRSYLGVMMQDIDRNLADAYKLPKPEGALITQVSPNSPAQKAGLRAGDVILKLNGASVLRTSDLLYALNKVQPNQTVQFEVLRDDKTRNISATLATAPDETPATGNQASASKGPVLGMSIRDLAVPEKNALGIKGGIYVQDVRRGGLASLSNIIPGDVIIQVNNTQILNSQDFAKVVSNLPKNTVARVGIIRQGQRAMLGLRIQ

SEQ ID NO: 44854 - protein, 199 aa, Acinetobacter baumannii
MFISFEGTEGVGKTTLIRKIHQHFEEQGKQVVLTREPGGTPLAEQIRSMLLAVNHDENMSHDTELLLIYAARAQHLQQVILPALESNKIVLSDRFTDASFAYQCSGRGLSQDKLQLLNQNFVSRMPEVTFWLDAPIELGMNRARERGALDRFEQEKLSFFTKVREGYETLWKAEPERIKRLDATQSPDQVFEQALQYLA

SEQ ID NO: 44855 - protein, 270 aa, Acinetobacter baumannii
MWCFKNGQPVETIPLLDRAFHYGDGCFTTIRVFQNKIELKARHWERLKLACQKLSLVADFELIEQSLQHLQNQNLVLNGTLKIVISRGEGDRGYSLPKHAADIYIWFYPKALEQFQPDFIECGVLNQALGLTMPSLVGLKSLNRLEQVLLKKEADQQGWVEALVTDVQGYIVEGVSSNCFIRLNDRWITPELRYNGVHGVMRAEILARMQHYGIACEVRIIELDEVPQIQSLFFCNALHPMRVVTQISEQILESQACLNLFHTLNLNQIH

SEQ ID NO: 44856 - protein, 462 aa, Acinetobacter baumannii
MSKVKTVYRCEQCGADHLKWAGQCSECGEWNCLNEVKLEPTTAHRARPKVGGYAGQVANITTLNKVSVSHETRLPTGISEFDRVLGGGLVTGSVVLIGGDPGIGKSTILLQTATHMASAKSSALYITGEESLSQVALRAQRLDLPTDQLKVMAETCVERICEVLEQERPVVAILDSIQTLYTETLQSAPGGVSQIRESAALLTRYAKNSGTALFIVGHVTKEGALAGPRVLEHMVDCVLYFEGQSDSRYRMIRAVKNRFGAVNELGVFGMTDKGLREVANPSAIFLSRYDEAIPGSIVMISREGTRPLLVEVQALVDDAQGQPRRVALGLEQNRLNMLLAVMHRHGGVQTTGQDVYVNIVGGLKITETGSDLAVLLACASSLRTKALPQQLAVFGEVGLSGEIRPVPNGQERLKEAAKHGFKYVILPRGNAPQKAIPGVQVIAVARLHEALTEAMQLSDELT

SEQ ID NO: 44857 - protein, 115 aa, Acinetobacter baumannii
SRRTDNSGARRVQCIKVLGGSHRRYASVGDIIKVTVKEAIPRARVKKGDVMNAVVVRTKFGIRRPDGSVIRFDDNAAVILNNNKAPIATRIFGPVTRELRTEQFMKIISLAPEVL

SEQ ID NO: 44858 - protein, 92 aa, Acinetobacter baumannii
MAKIKKGDQVIVIAGKEHKGKQGTVLSVSEDRVKVEGLNLVKKHQKPNRVTGAEGGIVTQEASLHISNVAILNATTQKADRVGYQVIDGVKL

SEQ ID NO: 44859 - protein, 203 aa, Acinetobacter baumannii
VISQTGTYGAIIAYILGGASAYMVMLCLGELAVHMPVSGSFGAYARKYISPSTGYMISWMYWLTWTATLGTEFTAAALLMQEWFPQISMWIWTLIFAVTIFGLNISSTRVFAESEFWLALVKVITVIAFIVLGLLAIFGLIPFHGAQTAPLFSNLTAQGWFPHGFLPIFTTMLIVNFAFSGTELIGVAAGETKDPAQNVPKAI

SEQ ID NO: 44860 - protein, 100 aa, Acinetobacter baumannii
MNFKFAKNGTVIIAKIIKMTVLSQKEILLSPKNWSRIATLWQRLQQSFRLMVGVPDYQTYLEHMKAHHPDLTPMDAQTFYRHCVDARYPSAGGNLKKCPC

SEQ ID NO: 44861 - protein, 572 aa, Acinetobacter baumannii
MQTAKHLLFVTNGPQQQVNALILARKLALVATQHGYKHSVISLDEFESSDHFDHVIIIGQQPKNLNIFGQNALSLVSIEDIKDDADKALLTALEHSKPANEWEQKPKQASNTATHFVAITACPTGVAHTFMAAEALQQGAERLGYQIDVETQGSVGAKNILSPQAIADADIVILATDIEVNTDRFIGKRVYRCSTGFALKQTDKAFAEAIANAQVLEQGKQQATTENKDKTEKVGVYKHLLTGVSYMLPMVVAGGLLIALSLCFGLNAAEQAGSLPAILKQIGAAAFTLMVPMLSGYIAYSIADRPGLAPGLIGGLLAAQLQAGFLGGIVSGFLAGYIALFIAKKVKLPTSLESLKPILIIPLLGTLSVGLIMFYVVGQPVAHIFELMKDFLNNMGTTNAVLMGIILASMMCIDLGGPINKAAYAFTVGLLTTNTYMPMAATMAGGMVPAIGMAIATFLARNKFSTGEKDAGKAAFVLGLCFISEGAIPFAAKDPMRVIPTCILGGTVTGALVALFHCELVTPHGGVFVLLIPNAINHAWLYLAAIAAGSIVTGVSYAIIKKNQEEKLLTNS

SEQ ID NO: 44862 - protein, 952 aa, Acinetobacter baumannii
MLALEPQHIHMNQHAVDKTHALKCLVDILEKDGLVTPEYITGLINREQQSATYLGQGIAIPHGTPQSREYILKTGIRLAHFPEGVIWDGENKIYLAVVIAAKSDEHLQVLQILTRALMHDVSEQVKNASKPEQIIELLQAQPLSLALHENLIQTEIDAQDIEDLFWAASQTLKKHNFVKCGFLSSLDPEQAIQLQDQIWSISSDHFVQQPAISITKPSQALELNGKKLNTLVCIAANDQLDNERFNRLIDILFNPEQVAELDKTQTPNEIAKIIGADVVPDWPQRSVVLANAHGLHARPATHLVNLTKTFQGDIQVAVDDGSFVSAKSLTRLLALGCKRGQTLRFIAEPETDAVEALDQVILAVQQGLGEEVEALPVTSETPDQLPAQTVISNATTLGNNTGIAASSGLAFGPVHVIKPKVYQYERMGSGVKVEKENLDIALHAVKNNIHQVIAKADASEIKQIFRAHLEMLDDPDLINGVYQKIYQNLSAPAAWHEHIEAAAKAQEALPDRLLAERATDLRDIGDRVLTQLCGEVVIEEPKEPYILIMHDVGPSDVARLNKDRVAGILTAIGGASAHSAIVARALGIPAIVGAGEQVLEIDPKSTLLINGDTGTFVLDPDVAQIEQAKQEREQQRQIREEAERHSHEPAITLDQHQIEIAANLGKVQATAQAVECGAEAIGLLRTELVFMSHSSAPNEAVQEADYRVVLDALAGRPLVVRTLDVGGDKPLPYLPIAEEENPFLGLRGIRLTLRRPELLKQQLTALLKASDNRPLRIMFPMIGRVEEWRAAKAILDEVRAQHPCGNLQVGIMIEVPSAALLAPVLAQEVDFFSIGTNDLTQYTLAIDRGHPILSAEADGLHPSILNLIDQTVKAAHKHGKWVGICGELAADPKAVPILMGLGVDELSMSPNSIPLVKAQIRTLSYSHAQKLAQQALLCDSAPAVRQLSEQDL

SEQ ID NO: 44863 - protein, 368 aa, Acinetobacter baumannii
MQQQSNMQNKFLIDAEIGDDDVTLPNLPAIDVPIVESPVKQEVKAEEVVEAAPSTEPEQPKSGFFGRMKEGLSKTRRNFTDGMVNILIGGKEIDDELLEEVEEQLLVADIGVDATKTIITNLTERTARGDLIYSHSLYKALQEELVALLAPRVKPLHIDPNKSPYVILMVGVNGVGKTTTIGKLAKRLQGEGKKVMLAAGDTFRAAATEQLQIWGERNDIAVVAQGHGADSASVIFDAFESARAKGIDVLIADTAGRLHNKSNLMEELKKVKRVMQKIDATAPHEIMLVVDAGTGQNAINQVQEFDQAVGLTGITITKLDGTAKGGVLFNIASRTHVPIRFIGVGEKIDDLRPFSAKSFVAALFETEK

SEQ ID NO: 44864 - protein, 528 aa, Acinetobacter baumannii
MISESVVDLSRFQFAMTAMYHFLFVPLTLGLAFILAIMETTYVISGKEIYKDMTKFWGKLFGINFALGVTTGLTMEFQFGTNWAYYSHYVGDIFGAPLAIEGLMAFFLESTFIGLFFFGWDRLSKVQHLGVTWLVALGSNMSALWILVANGWMQNPVGAAFNFETMRMELVDFGALIFNPVAQVKFVHTVSAGYVTGAIFVLAISSYYLLKKRDLPFARRSFAIAAIFGLASTLSVILLGDESGYELGDVQKTKLAAIEAEWDTHPAPAPFTLFGVPNHEEMRTDYAVKIPYALGLIATRSTTKEVTGLKDLMQQHEVRIRNGMLAYAELEKLRAGDRSPELLASFEKNQKDLGYGLLLKKYAPNVVDASEQHIQAAVKDTIPNVTALFFSFRAMVASGFLMLLLFILATWAVAKRNAENKPWLLKYALFALPLPWIAAQTGWYVAEGGRQPWSIGEILPTHLSASSLSTGDVWGSILALAAFYTILLIIEMYLMIKFARLGPSSLHTGKYHFEKQEPKAAVNGEALS

SEQ ID NO: 44865 - protein, 545 aa, Acinetobacter baumannii
MTHFIFVTGGVVSSLGKGISAASVAALLEARGLKVTMVKMDPYINVDPGTMSPFQHGEVFVTEDGAETDLDLGYYERFLRRAKMTKLNNFTSGRVYQDVLNKERRGDYLGGTVQVIPHITDNIKERVLRAGEGYDVAIVEIGGTVGDIESLPFMESVRQLMVELGHKRTMLMHLTLLPYIKSAAELKTKPTQHSVKELLSIGIQPDILICRTEYDVDADTKRKIALFTNVEARAVVVCKDAKTIYQIPRGFYEQNVDDLICERFGFTDLPEADLTDWDNVVEALLNPEYTVRVAMVGKYVELPDAYKSVNEALLHAGIKNRVKVQIDYVNAEELESQDVSILKTADAILVPGGFGERGTEGKMKAIQYARENSIPFLGICLGMQLAVIEYARHVAGMPEASSTEFNRSTKYPLIGLITEWLDERGELQQRSLESDLGGTMRLGAQKSELVEGTKTREVYGKAEITERHRHRYEMNNRFIEAIEQAGMKISGYSSAQHLVETVEIPEHPWFIAVQFHPEFTSSPRDGHPLFASFIDAAKTQHQKSK

SEQ ID NO: 44866 - protein, 1365 aa, Acinetobacter baumannii
  MISC_FEATURE (55)..(55): X=any amino acid
FTSYGLDSIVALSVSGDLEDLTKLELEPTLLWDYPTINALAEYLVSELQQGVASXNNLARLEPEVLSRHAISAEQLGIWYIQRLEPTCSAYNMVVAFDVKVNQPLGNKPIEILEAVMHDYPLLRVSMPANDQGIEQLIWDRVYPNIIFSDARHIETSDLTQLVEQDTKQPFDLTQPPLWRIHCYERGQNHYVIAFVIHHALMDFWSIGLLLRDVSKRFGLVAESDAVNGIEFAQYADKQQSSVIDDTDESLIFWKNALKHAPHVHSIPLDYPRPAVQQHKGSSLVFRVPESVSSGLVNLAKDYEITLFGLVLSGFYILLHKLSNENNLVIATPVAGRLERSLRNALGQFVNTIAIHIDIDADQTLRQFTQQVQEQLRQSLKHQKVAFSRVVEAVAPKRDGSINPLAQIGMFWERLGGMDEFKELLLPIQTPATLVGQDLTLGSFPVRQQEGQLDITLEMGGEYQGELVGVLKYNTDLFSAQSAENMVQLLQAVLSEMVAHPERKIVELDIAPDYKDGIQFEALRGKVTDYAQHDLFAMILKQIDERGDNHALTSNDHTVSYRELGQHIAGIAEYLRAHGITQGDRVGLMLDRTALLPAAILGIWAAGAAYVPLDPNFPTERLQNIIEDAEPKVILTQTELMDALNVSMPCLDINQAGVVALEQVRETLAFGDIAYVMYTSGSTGKPKGVRIGHPSIINFLLSMNDRLQVTAETQLLAITTYAFDISILELLIPLMYGGVVHVCPREVSQDGNQLVDYLNAKPINILQATPATWKMLLDSEWSGNAGLTALCGGEALDTILAEKLLGKVGCLWNVYGPTETTVWSSAARITDAKYIDLGEPLANTQLYVLDEQQRLVPPGVMGELWIGGDGLAVDYWHRPELTDAQFRTLPSLPNAGRLYRTGDKVCLRTDGRLTHHGRLDFQVKIRGFRIELGEIENVLKQIDGITDAVVLVKTTADNDQKLVAYVTGQELDIAGLKKILQIHLPVYMVPSAFIRLDEFPMTANNKLDRKAFPEPIFEQSNDYVAPRDPIEIELCTTFEQILSVKRVGIHDDFFELGGHSLLAVKLVNHLKKAFGTELSVALLAQYSTVERLGEIIRENKEIKPSIVIELRRGTYEQPLWLFHPIGGSTFCYMELSRHLNPNRTLRAIQSPGLIEADAAEVAIEEMATLYIAEMRKMQPQGPYFLGGWCFGGAIAYEISRQLRQMGQQVTGIVMIDTRAPIPENVPEDADDAMLLSWFARDLAAPYGKKLTIPAQYLRELSPDQMFDHVLKEAKAINVLPLDADPSDFRLYFDTYLANGIALQTYFPDPEDFPILLVKAKDEPEDFGESLGWDQLVKDTLTQVDLPGDHSSIMYAENVVAVAQTI

SEQ ID NO: 44867 - protein, 493 aa, Acinetobacter baumannii
  MISC_FEATURE (11)..(11): X=any amino acid
  MISC_FEATURE (13)..(13): X=any amino acid
  MISC_FEATURE (468)..(468): X=any amino acid
  MISC_FEATURE (470)..(470): X=any amino acid
PEHAYGQDRSXAXKDKTRKSKKDITMQTIHGNGSHPKKSSHRLAGISSMVGTTIEWYDFFVYGAAAALIFNKLFFPNLDPLTGVLAAFATYAVGFIGRPLGGLVFGHFGDKIGRKSMLLLTLMLMGIPTVLIGLLPTYESIGYWAAIGLVILRFIQGMAMGGEWGGAVLMAVEHAPEGGKGFWGSLPQASTGGGLMLASIALGLVSLLPEQALFSWGWRLPFLASIILLAVGWYIRVKVPESPDFEKVKQQSEEVKVPAFQVFKNHPKQLITIILARAAENAWFYIASTFTLAYTTTQLGIPRQDILFATICGAAVILFMTPLCGHLSDKVGQRNMFMFGLCVLALYSYPFFSMLNTKDPVLVWTAIVLAIGVVFPIMYAPQAQLFARQFPAEIRYSGISISVQLAGVLGGGLAPMIATKLLSIGQGNPYLIMFYIGSMAVVAIISTSFMPRDWSYKKDETYIRKQTXIXKPRLIDMHSSCSVICIDCYVKIR

SEQ ID NO: 44868 - protein, 306 aa, Acinetobacter baumannii
MSQVMKYHKWAFIFPILAVLIWSLNIVVTRYVSDYISPVSISFYRWLIAFIILTPFMFLSVWRQRRLVIPYLPKLAVLSAFGMVLYQGLAYTAAHYTSATNMGIVNAFIPIFTIFVSLAILKDVPNRFAVFGSILSFAGLLYVMSQGNINKLLSGGGHLGDALMIIAVFFYAFYGVFLKKWQLPLPIMTSLYVQIGFSVLFHLPLIFWFGLDALNAQNAPSAIYAGVFASLIAPLVWMLAVQQLGPNRTSIFMNLVPVFTAIIASIWLSEQWTIYHTFGGIMILVGIIMAQKKVNSKKSDLLPEQN

SEQ ID NO: 44869 - protein, 213 aa, Acinetobacter baumannii
MTNRHETDLVNEDTLKKKRGRPKCFDEQQVLEKAMLLFWEHGYEATSISDLTHALEITAPSLYSAFGDKAGLFYKSIDYYLAHEACPIETIFLEAKTAKIAFELYLYDNVKRLVQPNKPAGCMLVVAAMNCSDATQEVQQNLLDKRIKTKEKLLKRLEQGVEQGDLPTNAPLQEMTDFYATVIQGLTIQARDGASTEQLHKVVEHAMKAWTLF

SEQ ID NO: 44870 - protein, 514 aa, Acinetobacter baumannii
MQQLNPSEISALIKQRIGDLDTSATAKNEGTIVMVSDGIVRIHGLADAMYGEMIEFDGGLFGMALNLEQDSVGAVVLGNYLSLQEGQKARCTGRVLEVPVGPELLGRVVDALGNPIDGKGPIDAKLTDAVEKVAPGVIWRQSVDQPVQTGYKSVDTMIPVGRGQRELIIGDRQTGKTAMAIDAIIAQKNSGIKCVYVAIGQKQSTIANVVRKLEETGAMAYTTVVAAAAADPAAMQYLAPYSGCTMGEYFRDRGEDALIIYDDLSKQAVAYRQISLLLRRPPGREAYPGDVFYLHSRLLERASRVSAEYVEKFTNGAVTGKTGSLTALPIIETQAGDVSAFVPTNVISITDGQIFLETSLFNAGIRPAVNAGISVSRVGGSAQTKIIKKLSGGIRTALAQYRELAAFAQFASDLDEATRKQLEHGQRVTELMKQKQYAPYSIADQAVSVYASNEGYMADVEVKKIVDFDAALIAYFRSEYAPLMKQIDETGDYNKDIEAAIKAGIESFKATQTY

SEQ ID NO: 44871 - protein, 156 aa, Acinetobacter baumannii
MNINLTLIGQAIAFAFFVAFCMKFVWPPLINAISERQRKIADGLNAAEKAKADLADAQAQVKQELDAAKAQAAQLIEQANRRAAQLIEEARTQAAAEGERIRQQAKEAVDQEINSAREELRQQVAALAVTGAEKILNQQVDAEAHNAMLSQLAAKL

SEQ ID NO: 44872 - protein, 291 aa, Acinetobacter baumannii
MAAEEHALTSTEYIKHHLTNMTYGKMPDGTWKLAETAEEAHSMGFTAIHLDSMGWSIGLGVIFCLLFWIVARAANAGVPTKFQSAIEMIIEFVDSSVRDTFHGKSRLIAPLALTIFVWIFLMNLMDLIPVDWIPQVAAFVGANVFGMDPHHVYFKIVPSTDPNITLGMSLSVFVLILFYSIREKGVGGFVGELALNPFNPSNPVAKALLIPVNLILELVTFLARPISLALRLFGNMYAGELIFILIALLPFWIQWALSVPWAIFHILVITLQAFIFMMLTIVYLSMASEKH

SEQ ID NO: 44873 - protein, 181 aa, Acinetobacter baumannii
MSSGLNYGFRHGYWNAIGLQIALLIQIMIVAAGVGVLFATTPLAFQAVKWFGVAYLLYLAYLQWTAPVKDIEIQHEKKDKSVSALLLNGFVVNISNPKAIVFLLAVLPQFLDLSKPQWIQYLIMAATMVTIDLIVMAGYTGLASKVLRLLRSPKQQKYLNRGFAVMFSCAALLLSTVHQAA

SEQ ID NO: 44874 - protein, 306 aa, Acinetobacter baumannii
MTAQSVILPLPSDHARFIVLRLKDLTIAELKEQLEALFETRDRLITQHSDAQIKTAVAFGPELWKQLYSQSPAGFKQLEPENGAFNMPVVPADVLIHIASMRSDICFALSQAFFEGIKDKVEVLDERVCFRYFDGRDITGFIDGTENPQFPDDRAETALLPESAGVFADGSFIFAQRYAHDLEKWKKLKVDAQENVMGRTKLESIELDDDVKPENAHVARTVVEDEEGEEMEILRHSLPYGDGRGDQGLFFIAYTKDLSIIDAMLKRMFGTSGDGIHDRLLHFVTPLDGAYYFAPSEELLEEILEE

SEQ ID NO: 44875 - protein, 596 aa, Acinetobacter baumannii
MNTAIQAALDHAVQTLQQEGVLPSDWNNSSNLTRTKDRSHGDFASNIAMIGSKAAGMKPRDLAEKILAALPEVADISKAEIAGPGFINFFLNADQRFAILDQIQAQKESFGRSQSNAAKKIQVEFVSANPTSSLHVGHGRGAAYGMTVANLLEATGAKVDREYYVNDAGRQMDILATSTYLRYLELLGQNLVFPKNAYQGDYVKEIAQGIIDKDGDAYVREVANVYKDVPEDVQYAEELDSEGNKVVLSGDKEKHIDGLIANSQQLLGEGYRVFHQAALHAILDDIKDDLADFGVTFNQWFSEASLSAKIDEALETLDQRGFLYEKDGNIWFKSTEFGDEKDRVVKRRNGQTTYFASDIAYHLNKLQRGYTDLVDIWGSDHHGYISRVKAAIDAMGYDSKKLTVLLVQFVSLWRGGEMVQMSSRSGQFVTLRDLRKEVGNDAARFYYVMRKSEQHIDFDLDLAVSQSKDNAVYYIQYAHARICRMLEKAASTGLQFEVSAARSHAARLSLDAETEILAKLAAYPDVVLRAANAYEPHQVGNYLKELAALFHGWYNEHKVLSDDAELTQARLLLSINVQQVLRNGLELLGVSAPEAM

SEQ ID NO: 44876 - protein, 522 aa, Acinetobacter baumannii
MTTNTQITEDRILILDFGSQYSQLIARRVREAGVYSEMYAFDMSEEDIRAFKPNGIILSGGPESVHEEGSPRAPQVVFELGVPVLGICYGLQTMSEQLGGKVEPGTVHEFGYAEVDIVKRDQLIGNLQDRENQLHVWMSHGDKVSQIPEGFTITASTPSCPVAAVSDETRRFYGVQFHPEVTHTAKGEELLSNFVHKICGCGGLWTPEHIIDLRVEQLREQIGNEKVLLGLSGGVDSSVVAALLHKAIGDQLTCVFVDNGLLRLNEGDQVMQMFAENMGIRVIRADAEARFLNALAGVTDPEAKRKIIGREFIEVFAEEARKLDGVKFLAQGTIYPDVIESAASKQGKAHVIKSHHNVGGLPDDLAFELVEPLRDLFKDEVRKLGTTLGLPHSMIYRHPFPGPGLGVRILGEVKKEYADILRLADDIFMQELRDSGWYDKTAQAFAVFQPVKSVGVVGDGRRYAWVIALRAVETVDFMTARFAHLPYELVDKISTRIMNEIKDVSRVVYDVSSKPPATIEWE

SEQ ID NO: 44877 - protein, 372 aa, Acinetobacter baumannii
MKVGLVGWRGMVGSVLMQRMVEENDFAHIEPFYFSTSNAGGEAPSFGGKTAPALMEATDITSLKQMDVIITCQGGDYTSEVFPKLKATGWDGYWIDAASTLRMTDDAIIVLDPVNLNVIKDGLAKGTKTFVGGNCTVSLMLMGVGALFQNNLVEWMTAMTYQAASGAGAQNMRELLTGMGYLYNNTKTLLDDPKSAILDIDRQVAELQRGEGFPSANFGVPLAGSLIPYIDKQLESGQSKEEWKGQVETNKILGNSQIVPIDGHCVRIGAMRCHSQALTIKLKKDVPLDEIEDMIRNSNQWAKVVPNTREASMTDLTPVAVTGTLTVPVGRLRKLNMGKEYLGAFTVGDQLLWGAAEPLRRMLRILVEYKSS

SEQ ID NO: 44878 - protein, 73 aa, Acinetobacter baumannii
MANKEELIEFEGVVTETLPNTMFRVRLENGHEVIAHISGKMRKHYIRILTGDSVKVEMTPYDLTKGRITYRAR

SEQ ID NO: 44879 - protein, 318 aa, Acinetobacter baumannii
MAKNYYEELGVKREASADEIKKAYRKLARKYHPDISKEKDAEEKMQAINVAYDTLSNPEKKAEYDQMLDHPQGFNGFGQGAAQSGFDGARFYRQGFTGGEQADFSGFEDLFGRFGAGFGGGQQQYQRQQRSYRGEDQHASIEVDLDIAYHGSTQHITLQIPTINAYGEPEVQRKTLQVKIPKGMKEGQQIRLSGQGQSGINGGANGDLYIEIQYKDTDRVHVEGSDVYLTVDVAPWEAALGQGIEVKTPAGPLHVNLPKNAKQGQQLRLKDKGIPNKTPGHLYLILNIVFPPAHSEKEKEAYQQLAEAFASFEPRSSH

SEQ ID NO: 44880 - protein, 315 aa, Acinetobacter baumannii
MSNENQKPTSPTEQAQSSDKVSPFLSSPLPQGTPQGQQQSLQQTLTDTPVSGSVPKYNLPRGAGNTGNVGETTHFGYSTVRTEDKAQKVAEVFHSVASKYDLMNDLMSFGIHRLWKRFAINMSGVRRGQHVLDIAGGTGDLAKVFSREVGPQGHVVLSDINESMLNVGRDRLIDAGCTNVDFVLANAETLEPFADNSFDLVTISFGLRNVTDKDAALASMFRVLKPGGRLLVLEFSKPVFEPFSKLYDLYSFTALPIMGKLVANDSESYKYLAESIRMHPDQRTLKGMMENAGFQNCDYHNLTGGIVAVHRGFKL

SEQ ID NO: 44881 - protein, 318 aa, Acinetobacter baumannii
MDWTTKDYRFFARLFNPNVVLYTEMVTTGAILFGDAKRHLGYNAQEHPIVLQLGGSNPQELATCTKMAEDWGYDEVNLNVGCPSDRVQNNKIGACLMAEPDLVAECIHSMQKVVNIPVTVKHRIGIDDMQSYEEMLHFVDTVAATGCTHFVVHARIAILKGLSPKENREVPPLRYEDVYRLKQERPHLTIEINGGIKTFAETQAHLQHVDGVMIGREAYHNPYLLAELGQLWNLEAPDRFDIMEQMLPYIEQRLAEGAPLSIITRHILGLFQNLPGARKWRQALSGGNAKTLTDVENAIHNMQAAIIRTEEYLKEHQF

SEQ ID NO: 44882 - protein, 716 aa, Acinetobacter baumannii
  MISC_FEATURE (672)..(672): X=any amino acid
MKISENWLRTWVNPAIDSDTLSDQLTMLGLEVDELAPVAKPFTGVVVGEVLTVEQHPDADRLRVTTVNIGSGEPLQIVCGAPNVRAGMKAPVATIGAILPGDFKIKKGKLRGVESQGMLCGASEIDLEDKIDGLLELPDDAPVGVNIREYLKLDDNVIDISITPNRGDCFSIRGIAREVAVINQLQMNEPEIKSVDATITDEKKVVINTDGAPRYLGRVIKNVNVKAATPEWMEQALARSGIRTHSILVDVTNYVLMELGQPMHAFDLAKIEGTVHVRQAQPQEKLQLLNDQEVELQDDVMVIADDQKALAIAGIMGGLASSVTDDTTDIFLESAFFAPLAIAGRARRFGLHTDSSQRYERGVDFELPLIAMNRASQLIQELAGGEFGPITVVEKSDLLPKREAIELKQAQVDQLLGYKVAAEFITDALTRLGCEVTVQANGEWSVVPPSHRYDMAIYQDLIEEVARIDGYDNIQISLPSMDVQLAKYQDRFEIAQLRQTVVTLGYQEAISFSFADAKLEKQLNPQVSPLMLANPISSDLAVMRSTLLSSLIPCVQYNLNRQQSRVRFFELGLRFDYQNANSIQDLKQIPTLALVAVGSREPESWHAKPQPMDFFDFKGEVEEILAAGRVKVEYVRSERPWLHPGQSAEILVDGQSIGYLGRLHPSSRKRTXICSTTWVAELDQAAVLQSYVSNFTELSRFPSVRRDIALLISDNI

SEQ ID NO: 44883 - protein, 326 aa, Acinetobacter baumannii
MSLEALTTEALAAIAAAQDLVALDQVRVQFTGKKSQLAEQSKALGKMDPEERKVQGAAIHAVRETINNALTERQTALQQAALAQKLASETIDITLPGRGQRVGTVHPVTQVQERICQFFTKAGFTVATGPEVEDDYHNFEALNIPGHHPARAMHDTFYFDANHLLRTHTSGVQIRTMETSQPPIRIVCPGRVYRCDSDQTHSPMFHQIEGLYVAENTSFAELKGLLINLLNEFFEKDLKVRFRPSYFPFTEPSAEVDIMDERGRWLEVLGCGMVHPNVLRAAGIDPDKYKGFAFGLGVERFAMLRYGINDLRMFYQNDVRFLRQFA

SEQ ID NO: 44884 - protein, 112 aa, Acinetobacter baumannii
MDYNKHLFDLKQKQKDAKKKQHQVQVKEIKLRPATDVGDYQVKLRAILKFLEEGNKVKITLRFRGREMAHQQLGLAQLQKIEADVAELGVVEQAPKMEGRQMGMLLGPKKKK

SEQ ID NO: 44885 - protein, 640 aa, Acinetobacter baumannii
MPIITLPNGDQKSFDHPVSVMEVAQSIGPGLAKNTVAGRVNDRLVDACDLITEDSTLQIITPKDEEGLEIIRHSCAHLVGHAVKQLFPEAKMVIGPVIEEGFYYDIWMPRPFTLDDMAAIEERMKKLIDQDYDVIKKMTPRDEVIKVFTDRGEEYKLRLVEDMPEEKAMGLYYHQEYVDMCRGPHVPNTKFLKSFKLTKISGAYWRGDAKNEQLQRIYGTAWADKKQLAAYIKRIEEAEKRDHRKIGKALDLFHMQEEAPGMVFWHANGWTIYQVLEQYMRKVQQDNGYQEIKTPQIVDFTLWEKSGHAANYAENMFTTHSESRNYAVKPMNCPCHVQVFNQGLKSYRDLPIRLAEFGSCHRNEPSGSLHGIMRVRGFTQDDAHIFCTKEQIGKEVADFIKLTLDVYKDFGFEEVQMKLSTRPEKRVGDDALWDLAEKSLADALDAAGLEWELQPGEGAFYGPKIEFSLKDCLGRVWQCGTIQCDFNLPVRLDASYVTEENERDQPVMLHRAILGSFERFIGILIEHYAGFMPPWLSPVQACVMNITDSQAEASEQVVAKLKENGLRAISDLRNEKIGFKIRERTLERIPYLLVLGDREVEEGTVNVRTRSGKNLGTMSVDAFIDLVKSAVAERGRYIVE

SEQ ID NO: 44886 - protein, 119 aa, Acinetobacter baumannii
MARVKRGVVAHRRHKKILARAKGYYGARSRVYRVAFQAVIKAGQYAYRDRRQKKRQFRALWIARINAGARQNGLSYSRMIDGLKKAQVIIDRRVLADIAMHDAVAFAALAEKAKGALAA

SEQ ID NO: 44887 - protein, 74 aa, Acinetobacter baumannii
MPNRCPKEVTMAKLKTRRGAAKRFKATANGFKRKQAFKRHILTKKSAKRIRQLRGCVMVHVSDVASVRRMCPYI

SEQ ID NO: 44888 - protein, 138 aa, Acinetobacter baumannii
MERWLEFMGNHPILFGTLGVLIVLFFIFEGQRNGRKISPQSLGILVKAKNALLIDLRDSKDFREGHISGSRNIPYSQIASHADELKASDRPLVFICNLGQVAGSALQKVAHHDSYRLDGGISNWKAQGLPLVKSKPKA

SEQ ID NO: 44889 - protein, 434 aa, Acinetobacter baumannii
MRREAMDSLTMDNVEQLTLAELRELQTKRLKQTLTFVYENSPVYKKKFDEAGVHPDDFVTLDDLAKFPFTTKQDLRDNYPFGMFAVPQEQIVRLHASSGTTGKPTVVGYTQKDINTWSDIVARCLRMAGLTAKDMVQVAYGYGLFTGGLGAHYGAERLGATVIPMSGGQTEKQVQLIQDFKPTAIMVTPSYCVSIIEKLEQQFGTARNTSLKVGIFGAEPWTNELRREIEERLNIKALDIYGLSEVMGPGVAMQCLGEGEGLTIWEDHFYPEIINPETGEVCKDGELGELVFTTITKEGLPIIRYRTRDLTRLLPGENLAMRKMDKIVGRSDDMLIIRGVNVFPTQIEEQILQVPHLVPNYEILVTKKGHMDTLHIRTEMCHNCTIQANQLAQELMKRIKTMIGISVTVEVVTEATLPRSEGKAKRVIDMRQIA

SEQ ID NO: 44890 - protein, 408 aa, Acinetobacter baumannii
MKRVVVTGMAGITSLGETADDIFARFEAGKSGIRYMPEWEQYVDLRTKLAGPVETFHIPKHFNRKVTRGMGRVALMSVVCAETALQNAGLLGHEILSSGEAGVAFGSSAGSVDAVGEFASMLLHQSMSKINATTYIRMMAHTSAVNMTVYFGLKGLTLPTSSACTSGSMAIGQAYEAIKYGKQQVMIAGGAEELSAAGAAVFDVLFATSGMNDQPEKTPRPFDAKRDGLVIGEGAGCLILEEYEHAKARGAHIYAEVIGYGSNTDGQHVTRPESEMMGRCMELALKDASVEAKDIAYVNAHGTSTDQGDVAESQATAKVLGYKPISSLKSYFGHTLGACGAIEAWLSIEMMNRGRFIPTLNLDEIDSLCGELDYIVQQPRNLDADIIMSNNFAFGGINTSLIFKRVKQ

SEQ ID NO: 44891 - protein, 203 aa, Acinetobacter baumannii
  MISC_FEATURE (68)..(68): X=any amino acid
  MISC_FEATURE (121)..(121): X=any amino acid
  MISC_FEATURE (125)..(125): X=any amino acid
  MISC_FEATURE (165)..(165): X=any amino acid
RYAGLITLAIEGQDYEFLQLDYADDAKVYVPVTNLHLISRYSGGDPEFAPLHKSRTDCLEKAKRKALXQNSLTVAAELLHIQARRHVKILALLVNWISRFYIADFAQRVLRIEEIPLIMAXLQLXATLYDIACKLITKWIRLVCGDVGLGKTEVAMRAAFVAVQXWRQVAVLVPTTLLAQQHYESFKDRFADWPVRIEVLSRF

SEQ ID NO: 44892 - protein, 82 aa, Acinetobacter baumannii
AATAQQTASHLLHAALRQILGSHVQQKGSLVASDILRFDFANDQPVSFEQLQQVERLVNAEIIANTAVTTELLDIETAKAKG

SEQ ID NO: 44893 - protein, 204 aa, Acinetobacter baumannii
MTERSPLRVGIGGPVGSGKTALTLNLCRALRDKYNMAVVTNDIYTKEDSNFLTRNEAMSPDRIVGVETGGCPHTAIREDASINLAAIDDLCEKFDGLELIIIESGGDNLAATFSPELSDLTLYVIDVAGGEKIPRKGGPGITKSDLLIINKTDLAPMVGANLDVMDQDAKRMRGEKPFLFSNMKTQDGLEEIIQFIEKQGLFKA

SEQ ID NO: 44894 - protein, 217 aa, Acinetobacter baumannii
MRIILLGPPGAGKGTQAQLICKRYNIPQISTGDMLRAAIREGTELGLKAKSVMESGGLVSDELIIGLVKERIAQPDCVNGCIFDGFPRTIPQAEALEKEGISIDHVIEIDVPDEEIVKRLSGRRQHPASGRVYHVVYNPPKVEGKDDETGEDLVQRPDDQEETIRKRLASYHTETEQLVGFYQGRAASGENAPTYDKLDGLRTIEDVQKDLFNILDK

SEQ ID NO: 44895 - protein, 309 aa, Acinetobacter baumannii
MITGIEILKFGVEDRAASNKFLADFGLSKSTSDIEGADLYQTQNGSKIYLFNCDDNRLPPAIEQGSTLREVTWGVENAQDLEDLAARLADVDGFKRTENTVQCLDPNGMTIRFEQSFVKEVPELKTEGINQYGNIQRVNAASPVYEKGQPVAIGHVVFFTPDLATTENFYIEKVGFHLSDAYKNRGAFLRCRGEGYHHDLFLLSVPNKSAGLNHVAFVVRDIHEVIGGGLHMNRSEWSTFIGPGRHPISSAYFWYVNSPLGGAFEYYTNDDYLTEEWQPRVEEHRLELFTEWAIEGGLDDKTRRQVKPV

SEQ ID NO: 44896 - protein, 264 aa, Acinetobacter baumannii
MSFQVEGKVAVVTGGSSGIGLAAVEILVAEGAKVAWCGRDEERLNASKHYILEKFPHANIFTKACNVLKKEEVQQFAKEVKLNLGNVDMLINNAGQGRVSNFENTQDEDWMKEIELKYFSVLHPVRAFLDDLKQSANASITNVNSLLALQPEPHMIATSSARAALLNLTHSLAHEFTQYGVRVNSILLGMVESAQWKRRYETRSDLNLSWEEWTGNIAKNRGIPMQRLGRPEEPARALVFLASPLASYTTGSAIDVSGGFNKHL

SEQ ID NO: 44897 - protein, 520 aa, Acinetobacter baumannii
MPLHFYLTEAEMTQQNAQSTSEPTISENDLIAQRHAKLKQIQDVAKETGKSPWPNTFKREHYAADLQEQFKDQSKEQIESAEHVYVKVAGRVMLNRGSFMVIQDMTGRIQLYVDRKGLPKDTLETIKGLDLGDIIAAEGYIGRSGKGDLYVHLEGFELLTKSLRPLPDKFHGLNDTEVKYRKRYLDLIVNEETRKTFEIRAKVVAGIRAFLTNERFMEVETPMMHVIPGGASARPFETHHNALDMPLFLRIAPELYLKRLVVGGFERVFEINRNFRNEGVSTRHNPEFTMIEFYQAYADYKDLMALTENMLEKLAIDILGTTDVPYQGEVFSFKGPFKKISMFDAILENNPQFTPENVGDREFLAKFVREELKEEVKPGFGLGKLQTIVFEETVETKLRQPTFITEYPAETSPLARRNDDNPHITDRFEFFIGGRELANGFSELNDPIDQAERFQAQVAEKDAGDDEAMHYDAEFVEALEYGLPPTAGEGIGIDRLVMLFADAPSIRDVILFPHMRRKEG

SEQ ID NO: 44898 - protein, 600 aa, Acinetobacter baumannii
MPLYKAPLRDMQFVLHEMLQTEQNYQGLRKYQESVNRELIDQYLEAAADFCENELAPINQNGDQEGCHLNQGVVTTPKGFKEAYQKYAELGFTSLTADPEYGGQGLPTLLRIAISEMLCGSNWAWAMYPGLSHGAMRTIEHHGTEQQKQKFLTKLISGAWTGTMCLTESHAGSDLGLIRTKAEPNPDGSYSITGEKIFISAGEHDLSENIIHIVLARLPQAPAGTKGISLFIVPKFNVSDDGQVLDRNKVVCSAIEHKMGIHGNATCVLNFDGAKGYLIGPENRGLNCMFTFMNTARIGTAVQGLAASEISFQGALSYAKERLAMRSLSGPKYPDKNADPIIVHPAVRSMLMTQKAFSEGGRALAYFLAQHVDIVESSNDQEQQKHSDELLAFLTPIAKAFLTESGNESAKHGVQVFGGHGFIVEHGMEQIVRDARISTLYEGTTEIQSLDLLARKVLKSEGKLLKNMTDLIDQFISQHQSNEVLKPYLEKLAELKQQWLSLTKSIAEKAKTTPEEIGAASVDYLYFSSYVVFAYLWVRMAQVAHEKLESGTQEEDFYKAKLTTAKFFYQKLLHRTQSHAASIESGAESVMELDQDAFAF

SEQ ID NO: 44899 - protein, 501 aa, Acinetobacter baumannii
MYRSTINAEDLNRIMIMQLNELALFRQQAFVAGKWCDADHQQTSEILNPATLEIIGTVPNMGKAEAERAIEAAKEAWPLWKNKTAKDRSIILKKWFDLIISNADELAFILTSEQGKPLAEAKGEILYAASFIEWFAEEAKRVYGDIIPSPYPDARIVVNKQPIGVVAAITPWNFPAAMITRKVAPALAAGCPCIVKPAPETPFTALALVDLAVQAGVPAEIFSVITGDAVHIGDAIFESDVVRKFTFTGSTPVGKMLLERSAKTLKKVSLELGGNAPFIVFDDADLEAAIEGALIAKFRNAGQTCVCVNRFLVQAGIYEKFIAALSQKIQNFNIGNGLEAGHDIGPLINANAVKKVEAHIQDALDKNGRLVVGGKKHKAGELFFEPTLIADVTADMDVATQETFGPLAAVFKFENEQQAVEMANATEFGLAAYCYTKDLGRAWRMSEQLEYGMVGINKGLISNEVAPFGGIKQSGLGREGSKYGIEDYLEIKYTLFGGLNI

SEQ ID NO: 44900 - protein, 197 aa, Acinetobacter baumannii
MKAILTKKIISCIAISGVLSFSAFEIMAANQQTINDGKNHSKILNENHENLTDSQIFKILSTANNGEIKQAKTALPKLKMDEAKKYAEMMIKEHSANEKNAQALASRLQLISQTSNLSKSLQNDSDKIVSKLNQITSDTDKNYMMSQVKVHRKVLTIIDKQLIPNTKSSELKNMLVQTRDAVAKHLKAAEDIFKNMK

SEQ ID NO: 44901 - protein, 1289 aa, Acinetobacter baumannii
  MISC_FEATURE (766)..(768): X=any amino acid
  MISC_FEATURE (780)..(780): X=any amino acid
  MISC_FEATURE (915)..(915): X=any amino acid
  MISC_FEATURE (1084)..(1084): X=any amino acid
  MISC_FEATURE (1096)..(1096): X=any amino acid
  MISC_FEATURE (918)..(981): X=any amino acid
RLCINCSRVLTVTYPDGTTATVVAGTDGSWSVPNPGNLVDGDTVTATATDPAGNTSLPGTGTVSADITAPVVALDDVLTNDSTPALTGTVNDPTATVVVNVDGVDYPAVNNGDGTWTLADNTLPALTDGPHTITVTATDAAGNVGNDTAVVTIDTVAPNAPVLDPINATDPVSGQAEPGSTVTVTYPDGTTATVVAGTDGSWSVPNPGNLVDGDTVTATATDPAGNTSLPGTGTVSADITAPVVALDDVLTNDSTPALTGTVNDPTATVVVNVDGVDYPAVNNGDGTWTLADNTLPTLADGPHTITVTATDAAGNVGNDTAVVTIDTVAPNAPVLDPINATDPVSGQAEPGSTVTVTYPDGTTATVVAGPDGSWSVPNPGNLVDGDTVTATATDPAGNTSLPGTGTVSADITAPVVALDDVLTNDSTPALTGTVNDPTATVVVNVDGVDYPAVNNGDGTWTLADNTLPALTDGPHTITVTATDAAGNVGNDTAVVTIDTVAPNAPVLDPINATDPVSGQAEPGSTVTVTYPDGTTATVVAGTDGSWSVPNPGNLVDGDTVTATATDPAGNTSLPGTGTVSADITAPVVALDDVLTNDSTPALTGTVNDPTATVVVNVDGVDYPAVNNGDGTWTLADNTLPALTDGPHTITVTATDAAGNVGNDTAVVTIDTVAPNAPVLDPINATDPVSGQAEPGSTVTVTYPDGTTATVVAGTDGSWSVPNPGNLVDGDTVTATATDPAGNTSLPGTAHVLRQDRSHAACCVCCXXXVVLELSDSCIAXHTLACYHDDTDPDMHTVVVNVDGVDYPAVNNGRRTWTLADNTLPTFADGPHTITVTATDAAGNVGNDTAVVTIDTVAPNAPVLDPINATDPVSGQAEPGSTVTVTYPDGTTATVVAGTDGSWSVPNPGNLVDWSXYSXPVNAVNMTPLQSDNINMSQVTGHVSPDITAPVVALDDVLTNDSTPALTGTVNDPTATVVVNVDGVDYPAVNNGDGTWTLADNTLPTLADGPHTITVTATDAAGNVGNDTAVVTIDTVAPNAPVLDPINATDPVSGQAEPGSTVTVTYPDGTTATVVAGTDGSCFQXHSKVSWSIAILXLKSYVSLSGKDYLLPWYTAVLTADITAPVVALDDVLTNDSTPALTGTVNDPTATVVVNVDGVDYPAVNNGDGTWTLADNTLPTLADGPHTITVTATDAAGNVGNDTAVVTIDTVAPNAPVLDPINATDPVSGQAEPGSTVTVTYPDGTTATVVAGTDGSWSVPNPGNLVDGDTVTATATDPAGNTSLPGTGTV

SEQ ID NO: 44902 - protein, 806 aa, Acinetobacter baumannii
  MISC_FEATURE (173)..(173): X=any amino acid
  MISC_FEATURE (176)..(176): X=any amino acid
  MISC_FEATURE (184)..(184): X=any amino acid
  MISC_FEATURE (191)..(192): X=any amino acid
  MISC_FEATURE (198)..(198): X=any amino acid
  MISC_FEATURE (236)..(236): X=any amino acid
  MISC_FEATURE (240)..(241): X=any amino acid
  MISC_FEATURE (263)..(263): X=any amino acid
  MISC_FEATURE (267)..(267): X=any amino acid
  MISC_FEATURE (272)..(272): X=any amino acid
  MISC_FEATURE (279)..(279): X=any amino acid
  MISC_FEATURE (244)..(244): X=any amino acid
ALNDGLKAELLCLSTNATIQLKSFIGVQAAVDIVTERGELTRVTGIITHAQQGQSDGSLTLYKLTLEDPTALWKYRRNSRVFMNKSVVEIWEILFKEWQTKNPLFAASLSLDLSGLTQTYDVRPFVMQHNESDWNFLTRLLRSENISWLIDEAQHIVPSTDYIYSSSETQVNXCQXSISAFRPXNDSLPPXXCGRTIXQYDSLNCRAFSSTQCYAYTTLASRNIRSRRRDWKCSKXASAXXTLXQCYTWLGASLELFACMDWXLKGXGWGYXIWKSTSXTIKPEPPQLLRGTRRNALLAQTTVRDAYVGYYFELNEHPEIDQHESSDKSFLIVSKNFFNQNNLPKDLNDQINGLLAQSNWAIQNPENSDERQANQLILQRRHIPTTPAYNPQIHSPVTHPQRAKVVGPEGEEIYVDEWGRIKVRFLFTRSDDHSHDGGAGTNNNDTDSAWIDVLTPWAGEGYGARFLPRIGEIVVIDFFNGDIDRPFVMGRIHEAQRQPTKFDNKGKLPDTKKLSGIRSKEVSGGGFGQLRFDDTPGQISTQLQSSHGASQLNLGKLSHPKDKAESEDRGEGFELRTDQWGALRAGQGLLVSTHKQDNAKGDHLDAEVAKKQLEGSQTNSKALSDIAKNQKTDEIESIEQLKDFASQIQQQIAKFEKALLLLSSPDGIALSSSEDIHISADAQINQIAGDSINISTQKNVIAHAQNRLSLFAAQSGLKAVAAQGKVEIQAQSDALDVLANKGITISSTEDCIEISSPKEIVITGASSQITLNGSGIFPKTGGKFQVNAGQHVFQGGASASVQSSLP

SEQ ID NO: 44903 - protein, 368 aa, Acinetobacter baumannii
MKKLLLAAAVATLSVNAVQAAPTLYGKLNVSINQVDNKNFDGKSDVTEVNSNSSRIGVKGEEKLTDKLSAVYLAEWAISTDGSGSDTDLSARNRFIGLKTEGVGTLKVGKYDSYFKTSAGSNQDIFNDDTRLDITNIMYGENRLDNVVGFELDPKLLAGLTFNIMAQTGESTSDSKKGETGKDSKNDSFDSVSTSLGYENKDLGLAIAAAGDFGIKGKYAAYGLKDVYTDAYRVTGSYDIAKSGFVVGALWQHAEPTDDLTAYGQTYKSDGSIDKAGKAYRGLEEEAYAVTAAYKIPNTKLKVKAEYASAETQVSGQADRKIDLYGLGLDYQINKQARFYGIVAQQKRDWLNDDDKQTVVGTGIEYNF

SEQ ID NO: 44904 - protein, 128 aa, Acinetobacter baumannii
KTITVAAAVILNEQNELLLVRKRNTQAFMQVGGKLEPNEAPESAIQREILEEIGSPCVIEQFIGRFETAAANEPDHKLISHLYLVRLKHPTIAAEIAEMKWVKFNDSETKLAPLTKEIVIPWCEQNLS

SEQ ID NO: 44905 - protein, 178 aa, Acinetobacter baumannii
MKNIQKSLLAALIVAGYAVNTQAAVTGQVDVKLNISTGCTVGGSQTEGNMNKFGTLDFGKTSGTWNNVLTAEVASAATGGNISVTCDGTDPVDFTVAIDGGERTDRTLKNTASADVVAYNVYRDAARTNLYVVNQPQQFTTVSGQATAVPIFGAIAPNTGTPKAQGDYKDTLLVTVNF

SEQ ID NO: 44906 - protein, 342 aa, Acinetobacter baumannii
MSEIPFLNPAVLKQLDLPVPNRELTPQVLSPLNLNTLEEPSRELLAYRKLYGLHLLDCEHWQGYVQMPLFRLHVQVFKPKLDKIQGTVCLLHGYLEHSGIYQPIIREILEQGFSVITYDLPGHGLSNGSPASIQNFDHYQQVLMAVYQYVKHADQLPKPWVGIGQSTGGAIWMHHLLEYAEKRQDPIVDRVLLLSPLIRPAKTAWWHNPVGLGIIRRIKRQVPRHFRRNNHNPEFLRFIRLKDPLQPRMMGMDWILAMSKWMQEMEERPACRIPVWLAQGALDQTVDWRYNIEFIRRKFRLQTLLMLEEGSHQLINERADIRAALTGLIPAFLHAKPKHFYY

SEQ ID NO: 44907 - protein, 1198 aa, Acinetobacter baumannii
MKILSIRIKNLASLADEHFIDFESAPLAHAGLIAIVGKTGAGKSTILDAMCLALFNRVPRLKDSDGKLKDVDGSELLTNSPLTVLRRGTGHGFAELCFIAQDQKRYLARWEIKRARENPNGKLQSVQRHLKCLTAGVVLADKAKAVDEKVKQITQLSFEQFTRAVLLAQSEVTAFLKARDSERGELLEYLTNSSIFAKIGELAFRKTADIAKQRKQLEEFLGHIEILSDEEIAAFTEQYQQAEQNYQQLEQQKHVLDKQQQWFERKAKLEQEVQAKQQQFQTQQNHHQQLASEREQLKRLEIFSEIRPQVFQQAQNLQTLQQLEPQIQQAQTKFNELVQIFETGQKQYQLAEQQLKQTLDFEQQHQHALNQVRQSIQERAFIADEYKKCKEKRQVLEQNLSPLQQQRNAVQQHIAQLEQNKIHLQQQLIQTQQYAALDKGLSAHLHQLGQFIQNYEAIEQQIGNPTLARQKLSEAKSELEQLTVSLGTVEQIELKLEQQRKDKDQKLAQVTQLDLIQQKIKIYHELYAELQQFTEKHTQASAQEEQLKTVCQLAEQDYQTAKTEREKLQHILQQQRLLHTENIEQLRANLKEGEACLVCGSTHHPYRIDDSAISKALFDLQQQQEQQAIALEQTKFNAWQTQQHALTQCRAELEQVQKYLAQLQVKQTHLQQELEQTFNLNQLHIELNQAPEQILQTLNELRQATQTAISLFDSENVRLTQAIKQHNQLIQTIQRNESLLNTAQQWQQQVQHIVECLSETEQHAWQQASSQTAKQTWAILDARAKQLEQQEQLSQRFEQQQQELKMLSASLEQMTKQIDEIDQNLQEITLKGQQNNEKAVSLIQQMTGRSDIKPHEWLIEHDAKRQHQQTAYHEAKQRFEQTRQNFEQQKQALDQLKHQYQHTEQHQQQLDGQIQNWLKAHTDFQASDLTALIQINSVQEQDIRNRLNHAERLLSEASSALKTMQEQLSEHLQTQPNIEYEKLVTLIQDNIAKLKAQLEVRDGLKLKLELHQQNLAKQQKYAEQIQNIQQEEHRWSKISGLIGDAKGKEFRDYAQQYHLDILVEHANQQLAMLSQRYTLKRLDQSLSLAIIDHDMDGETRSVASLSGGESFLTALALSLAIANMASGSMKIESLFIDEGFGTLDASSLHMVMNALDQLQNQGRQVILISHIQEMHERIPVQIQVKPLGAGASTIEIVG

SEQ ID NO: 44908 - protein, 301 aa, Acinetobacter baumannii
MKKQIPIKITAFIILIICSVVGYAGLFKNHGQPPIIEGIFWQPDNDTTPPKGNWHYLGINTFVPQWSVVESKSWWKNSNLPQWEKAIDLQKIKQQPWAKNLILGLAGEYNEHEARANVVALGEKSAQIIQEQNDASLKGYYFPVEADPTWLRVSTLGHVLEKLPSPIWVSVYSGESEPENYDLWVKSWLPQQAGVFFQDGVGVGVRTPEQARRILDQLEQTLGKDKTVIVLEAFRTKKNGQFRAAYPWEIISQIKAYEGKKIYIFDGPHYMGRWSVYIVGLWYRFVYGSTPATINGPENSK

SEQ ID NO: 44909 - protein, 244 aa, Acinetobacter baumannii
MNKHQYNMFCLPPAGSSASIYHPWKKQISDNIRIIPIEYSGHGIKINEPLIDDPDLLAMQIANEIQAYSDTPFILFGHSVGGGLIWKVLNYLNEKPIIDQLRLIVISSRPEHHYIQHMRYKHELTDEKIIDELKRYNNFPDEILNNQEALTFFLKIIRNDFYLSDQLLSEKIHKTEVPIVAFYGKQDPDIPNKRMMDAWQQHTENWLGSIEFEGDHFYFLNPETRVKMLENIAAIVETLTVNIE

SEQ ID NO: 44910 - protein, 51 aa, Acinetobacter baumannii
MRDKIRLVSSAGTGYFYTTTKNKRTMPEKMEIKKFDPKIRQHVIFKEAKIK

SEQ ID NO: 44911 - protein, 580 aa, Acinetobacter baumannii
MNNALSDIFHNQTALTRERLSFCEANIKDLNEWVTTLSIMQLGDTSKALFTAILELNELNCSETLRFDLIQTLHPTINNVLASLEKNFFNQGVISTDRNEHIIELAMLLRCYFASIYLNIAQTSHEQLQKQKFSLFSFKQKKNLQTARILATFHALQQLTNLLYQQHMLYSEPVKGQWLIAHQLYETAVQYKYHLTNINHIQGVQHPLANITQAYAQLILLDIFNTNQIRQSEIQALFQCSFDWARMIQILPKDTASTKYVVDPTKDHPPVYNKKQSSNFNPSIFISTQALLEHVTATMHKNAQYMSKNEKIYLSPALKFHVQTILGTTAQRRHERYEYNAALQICFGLSTAHFYLSKAKNFEETLQLSNNYNLQSESKVLSNLEKKEQQTSSYQRLSRESKTIYQTTVLDISVNGYRIKWSGEAPKNLRTGEYILVKETLHGQWRGGVIRWIKQSTEKSLELGLEILSQAMFPCAVHIQAERHTRNYHPALLLQTQNLEEIQNTLILPGSQIFREQQTIHLRLGTEEIKVYLLKAQLITQSFIQFQFELLNEQQQYLLDQFMLKKNNTVNSQDLWEALK

SEQ ID NO: 44912 - protein, 312 aa, Acinetobacter baumannii
MRPLKPLSIIYNEKSGFHASKHEDVYEQLMTVFTEYGFEIQVFELNENTLFDDLINNVIHRHSQNENTGVVVAAGGDGTLNAVATKLKNTSIPMGILPLGTFNYVAKVLEIPLDLLEAAEVIATGKPRSVHVAVINDHIYLNNASLGLYPLFIKKRELYNKYLGRLPLHAYTSALDVLLRENKSMKLSITVDGKKYPVKAPLIFFGNNQLQLCDMKLRIAECAAQGRVAGVVITKSDKLSLLNMLWQWVQGKVEDAQDVYSFCADHVIVDCAKKTKLTVALDGEIIEMKPPLNFTVEKNALNIMVPNVTTSV

SEQ ID NO: 44913 - protein, 208 aa, Acinetobacter baumannii
MPYLLLCIGCVFLGLGVLGLFVPSLQSLDLLTVQTLSHHRLDYLNTITTFLARVGGMPFVCFLSFLVCIYLAWYKKYITVIFISLGVIGSITMGWLLKWCVNRPRPPEAYHIVESYGASFPSAHSVYASTLACLAMIMLCHKHNINSPYIVLISCLWFVCMGLSRIYAGVHFPTDVLAGWGIGFIWIALLWLWLLQTQSRLSKKQIYF

SEQ ID NO: 44914 - protein, 230 aa, Acinetobacter baumannii
MPQPIIAAHQVTQTIQINQNQFTILKNIDLDIYEGEQVAITGRSGSGKSTLLGILATLDQPFEGEVWLCGQAVHKLTEEQRAQIRMQHIGFVFQSFQLLPQLSALENVMLPLRLRKDFDYKIAEKKALDWLHRVGLSRQAEQTPKVLSGGEQQRVAIARALIAEPQIIFADEPTGNLDGQTAQEIETLLFDLNRELGTTLILVTHDRNLAALCQRHVELDDGRLKTVQGG

SEQ ID NO: 44915 - protein, 358 aa, Acinetobacter baumannii
VELTFDTRQKSRFRAALASGVDIGADLPRTGILRSGSYIATQEGDVLRVDAKPERLMKVTAQTEFDLLKAAYHLGNRHVPLMLTPTALYFEPDHVLAEMVEGLGLTVTETDHPFEPESGAYAQHSHDHRLSPIKVLTMSTHNAAQLLQLLTLSSTALPVGAYCYSQGVETAIDIGLIHDESSAIAYFEEVLEMLLVRFELPVLKRLMQHYDDPDQFLIWAHLYKASRESKELLAESQQLAFSLNAWIKDVLKKTVEVKKQFGFVPVYAQLCGRLELKEVDVLTAYTFTVLENQVLAAVKTVPLGQMAGQRILWHLHGRVPQAVEKALKLKDEQLSSALPRYAMLSMKHETQYSRLFRS

SEQ ID NO: 44916 - protein, 204 aa, Acinetobacter baumannii
MSSPFISTFILFFSLLNPFLMSIYMIGLIRHTETRVFNKALIQGSLIAYVVFLLFAWGGEAIFNRYLNVRFESFLIFGGLIFLVIGYRYVFQGADTIGEMRGAPEHLAGTVAMPFMIGPGTISAAVVTGMSMSLLEAAIVIALVLFVSCSVLIAMKFSHDHLRYSHAKYIDRYFDIVGRLAALLIGTIAVDMIVNGVTRLIDKV

SEQ ID NO: 44917 - protein, 186 aa, Acinetobacter baumannii
MFVSAKTILILGDSISAGYGIDPKQGWVQLLQKRLDQQYPKQHKVVNASVSGETTSGALARLPKLLQTYKPEVVVIELGGNDGLRGQPPQMIQKNLSQLIQLSQKQKAKVILFGMKIPPNYGTAYSKAFENSYKTVSQKYQVKLLPFFLDGVAGQKQLMQNDLIHPNTQAQSKLLNLAYPYIKGAL

SEQ ID NO: 44918 - protein, 602 aa, Acinetobacter baumannii
  MISC_FEATURE (7)..(7): X=any amino acid
  MISC_FEATURE (595)..(595): X=any amino acid
  MISC_FEATURE (599)..(599): X=any amino acid
LDPKLKXEEIQMSEQEKKTPLLHIENLRVSFKGEDKQYIETVKGISFDIPTNTTVALVGESGSGKSVTSLATMGLLPVGQSKIDEKSKIIFEGKDLLGLSRTEMRKICGKDIAMIFQEPMSSLNPVFTVGNQIAEVLCLHMGMSRKQARQRVLELLKEVGIPSPETKIDAYPNQLSGGQQQRVMIAMAIACEPKLLIADEPTTALDVTIQKQIIDLLESLRQRRQMSMLFITHDLALVGEIADQVIVMRHGEIREQGTAEQVLEQPKDVYTRALLYCRPQMSQRPYRLPVTSDFMRQENNILVEQSFDVSEIPERKRGLNGDEHIILEVKDLKKSFYSRKGLFGKEEFQAVKGVSFKLAKGKTLGLVGESGSGKTTVGLLLMRLHQASGGQALIEGKDILSLTEKEFAKYQRKIQIIFQNPYASLNPRFTIGQILLEPMQIHGIGKDDAERKQIALGLLERVNLPEQAYYRYPHEFSGGQRQRIAIARCLTLKPEILICDESVSALDVSVQAQVLNLLQDLQDEFGLSYIFISHDLSVVKYISDQVMVMNHGEVVEIANSDELYAHPQHDYTKRLLQAIPTRDSARFVSVKLCRXRHFXVPF

SEQ ID NO: 44919 - protein, 248 aa, Acinetobacter baumannii
MKYSEYQPRPDLLKDRIILITGAGDGIGRAAALSYALHGATVVLHGRTLNKLEVIYDEIEGLGAPQPAILPLQLSSASDRDYDFLVSTLEKQFGRLDGILHNAGILGERVELAHYPAEVWDDVMAVNLRAPFALTQALLPLLQKSENASVVFTSSGVGREARALWGAYSVSKVAIEAVSKIFAAEHTYPNIRFNCINPGATRTAMRVKAYPEEDPKTLPTPESIMPAYLYLMGEDSLTLNGQSIDAQD

SEQ ID NO: 44920 - protein, 283 aa, Acinetobacter baumannii
MQLISLPKQILQCGQLQLDLSQPHVMGILNVTPDSFSDGGKHNQLDQAVDHALSMIEQGATIIDIGGESTRPGASEVVVEEEVRRVVPVVEALSHHNVILSIDTSQPEVIRAAKAAGAHIWNDVRALTRPNALKTAVELDIPVVIMHMRGEPTTMNQLDQYTDVTLDVMQELQQRIDEALAAGVKKHNIIVDPGFGFAKNAQQNLKLLKEFWKLNELGYPILSGLSRKRFIGEALQGAPADQRAVGSVTGHLLSIQQGASIVRAHDVKEMHEAILVWKAMQQV

SEQ ID NO: 44921 - protein, 530 aa, Acinetobacter baumannii
MSFKDELAAQVAQRRTFAIISHPDAGKTTMTEKLLLWGKAIQVAGMVKSRKSDRAATSDWMEMEKERGISITTSVMQFPYKGHTINLLDTPGHEDFSEDTYRTLTAVDSALMVIDGAKGVEERTIKLMEVCRMRDTPIISFVNKMDREIREPLELLDEIENVLNIRCVPITWPLGMGRDFAGVYNILEDKLYVYKAGFGSTITDIEVRDGYNHADIREKVGELAWASFEESLELVQMANEPLDRELFLQGKQTPVLFGTALGNFGVDHVLDAFMNWAPEPKAHPTQERMVEAKEEGFSGFVFKIQANMDPKHRDRIAFMRICSGKYEKGLKMNHVRIGKEVRISDALTFLAGEREHLEEAWPGDIIGLHNHGTIQIGDTFTSGENLHFTGIPHFAPEMFRRVRLKDPLKSKQLQKGLKELSEEGATQVFMPQISNDLIVGAVGVLQFDVVAYRLKEEYKVDCVYEPVSVNTVRWIHCDDEKILNEFKKKAHDQLSIDGGGHLTYLAPSRVNLQIMQERWPDIEFRSTREH

SEQ ID NO: 44922 - protein, 85 aa, Acinetobacter baumannii
MAANVIVYSTSVCPYCVRAKQLLERKGVAYKEVNLSVEAPEVRAELMQRTNHRTVPQIFINDQFIGGFDQLYALEREGKLDELLA

SEQ ID NO: 44923 - protein, 538 aa, Acinetobacter baumannii
MSVSEHPNLDTVQGADSQKAVNETLEDYTLRYAPHSFRRWSPKVVAITALGGIAYLADFSIGASIGMSYGTTNAVFSILFAAIIIFLTGIPLAYYAARYNIDLDLITRGAGFGYIGSVLTSIIFASFTFIFFALEGSIMAQGLLLGLGIPLWAGYLISTVMVIPLVIYGMKALSKLQVWTTPLWLVLMIGPVAYLIYQEPTLVSQFATFTGHEGFAPVDMAAIMLGAGICLSLIMQIGEQIDYLRFMPAKTKENSKAWWAAVISAGPGWVILGAIKQIIGAFLGFYLLTKIPGVNSTEPVQQFNAAFHDMLPGWAALTLAVILVVISQIKINVTNAYSGSLAWTSAYTRISKHYPGRIVFVIVNLAIALALMEGNMFAVLGKILGFYSNFAIAWVVVVATDISINKYVLKLSPKEPEYRRDMLYNVNPVGMVAFLVSAGLSIAAFFGLLGSFLAPYSPIIALVLAFVLTPIMGLLTKGKYYIKSHDDGVKEPRYDAEGTPVATVYHCRVCEQGYERPDIMFSHKHNGTICSLCKTLDA

SEQ ID NO: 44924 - protein, 379 aa, Acinetobacter baumannii
  MISC_FEATURE (49)..(49): X=any amino acid
SYQDQEVNHYVNLQRKAGFYKESPFSEIPLDIEVYVFCFSPTRKLNLRXKLLKKLSERPIIHPKLMINGSTFGLHGTEKLKQHLPKDEWVYFPDVIQEGNAINSVLDVKHVIVGVESRDASEIMQELLRPFFQFSYQYLFMPILDAEFTKLSISGMLATRISYMNDLAMVAEKLGIDIANVKHGIAADTRIGAAYLSPGVGFGGENFSHDILTLSSTVLETGTKSRLLEQVWAINEQQKEILFRKLWNYYHCDLSGKTVAIWGASFKENTSNIHNSPIHILLAALWAQGVKVRLHDPQALDEIASIYGSREDLILCSDQYEAAQNAHALCLVTAWKQYWSPDFKRLQQLMKHPLILDGRNIYDPAYVKARGFAYEGVGR

SEQ ID NO: 44925 - protein, 542 aa, Acinetobacter baumannii
MQVFFLFLAAILLGFAWLSPFHYNPWVMFSSEMSTFAAGLSVLAALFYQNIKIPRAQLLLLPFILIPVVQWAFGLVFDFSTALLSSLYLLGFWFMVVAGYNLSLDQQKRDQIFTGFSLLLIIVSIATSFIAICQWLNIESHFVHMLHLIGNRPYGNFGQPNNMATFLIMGLLGCLFLYEKNKATVWLLFPSALIILFTIALSQSRTSWVVFPFLLIYWIVKLFGKQKRFGFIQGFLWCAGFFVIAGVILPFATSLIEAWSSADVAQASSLVERASSGYLRFNIWTQMLLAVQQHPWLGYGWNQTSVAQMSAYALFPTTEWTTSAHNILLDLIIWNGIPIGIAIIAYFACWFLWLNQQAKETISIIAIMMVCTVLIHAMLEFPQRYAYFLLTCGFLLGIIQAQTPVLKGIVLNKQVLRLIWGVSLILLLAIWRDYNVYVTNSNLLFKNKQPNAEVLGSNQIFVLTQFEQRLKWIEMKPETTLSDADLAVWGNFVKNKATPYNLRKYAQLLAYNGKVEQAEQQIFILQHLYRQQITLAELLKDK

SEQ ID NO: 44926 - protein, 154 aa, Acinetobacter baumannii
MKGNRDVINQLNQVLYHHLTAINQYFLHSRMFNDWGIEQLGSAEYKESIRQMKHADKIIERILFLEGLPNLQHLGKLYIGQHTEEVLQCDIRKVKENIEAIQKAVALAETEQDYVTRDLVQEILEKEEEYWDWLDTQIDLIGSVGIENYIQSQM

SEQ ID NO: 44927 - protein, 101 aa, Acinetobacter baumannii
MSWISVCQQGDVSEDEPKAVEVEGKKIGVFFVDENYFAIENVCPHAYALLTEGFIEDQTVECPLHEAIFDIQTGELKSGPGCRNLCTYPVRVEGQDIQIQL

SEQ ID NO: 44928 - protein, 457 aa, Acinetobacter baumannii
MDIFPISLKLQQQRCLIVGGGHIALRKATLLAKAGAIIDVVAPAIEDQLLQLIKTTDGEPFIEAFAEKFLSTPYRLVIAATNDAEVNKTVFEQCEARNLLVNSVDDIPHCRFMVPAIIDRSPLIVSVASNGTSPVLSRQIRTQLETSIPHGMGKLAEFSGKWRNQVKEKISNPDERRIFWENLYASPLKEQVFNDNLDVADSMLEQALQEWKAPKGEVYLVGAGPGDPELITLKALRLMQQADVVIYDRLVSAPILELCRRDATKIYVGKARSNHSVPQEGINALLVDYAKKGKRVCRLKGGDPFIFGRGGEEIQELFQAGVPFQVVPGITAASGCSAYAGIPLTHRDYAQSVRFLTGHLKEGSPELPWNELVYENQTLVLYMGLVGLERICEQLIAHGQRPDMPVALISKGTTPEQKVVVGSLADIASKVTEHQIHAPTLTIIGEVVRLREQLQWN

SEQ ID NO: 44929 - protein, 273 aa, Acinetobacter baumannii
MSQLSTIIEQAFEDRANFTAADCPSEIRQAVEEAIAGLDNGTLRVAEKINGEWVVHQWLKKAVLLSFKLNDNKPIESCDLRFYDKVETKFSGWTEEQFKAAGVRVVPPAVARRGSFQAKNVVLMPSYVNIGAYVDEGTMVDTWATVGSCAQIGKNVHLSGGVGIGGVLEPLQANPTIIEDNCFIGARSEIVEGVIVEEGSVISMGVYIGQSTRIYDRETGEIHYGRVPAGSVVVPGNLPSADGKYSLYAAIIVKKVDAQTRAKTSLNDLLRAD

SEQ ID NO: 44930 - protein, 796 aa, Acinetobacter baumannii
MTNRVTKRNGSTEPFSQEKIEKAVIWATKNTNVPPQLVIDNAIMLIYDGIKTSDIQEALISAASKLTSATMTDASFVAARLLLLDLYKLVCGEQGKVDGGGFKYPHIKDYIQGGVSCNLLDPALLQSYDLDRINAAIKPERDLLFGYLGLDTLKDRYFIRKNRDVKYEKATGKTSGEIIELPQHFWMRVAMGVAIKEKPENRTARALEYYEMYSTLNYISSTPTLFNAGTLRPQLSSCYLNQVSDTITAELGDSRYASIFGAIEETALLSKFAGGIGTDWTPVRGENEIIIGTNGISSGVVPYIKVQNNTAVAVNQGGKRKGSVAPYLESWHPDFMSFCELKKEAGDDRLRAHDVFPAAWVPDLLMKRKEDPEAMWSFFSPHKFPELHELYGEEFEARYEELEALGEFEFQLPAIKVWRHILSNLFETGHPWITFKDESNRRNPQSHVGVIHHSNLCTEITLNTSKEETAVCNLGSINLAVVMSGDNPLEKLRTAVRLAIRNLDSVIDVNYYPSERAKLSNLRHRPIGLGVMGYYEWLVKQGVDFESDQHLEQADALFEAISYFAIEASADLAQELGSYPSFEGSKWSQGILPIDTAKKMEDGKPFFDRPRRFDWEALREKVKKGMRNSNIMAIAPTATISNIAGTTQCTEVPFLLQFYKTNLGGVYKVIDPSVRHVGTNYHLLKEAFYVDQLWIIKAAAVRQKWICQSQSTNLFAKQGTTGRDLDLIYTEAHRKGLKTTYYLRGQSATKDSASAKDDVIEALKSAVAQGATLSDAEAHQQAKLCSIFEPDCESCQ

SEQ ID NO: 44931 - protein, 710 aa, Acinetobacter baumannii
MYQVLARKYRPRNFNELVGQNHVSRALSSALERGRLHHAYLFTGTRGVGKTTIARILAKCLNCETGVTSTPCEVCATCKAVNEGRFIDLIEIDAASRTKVEDTRELLDNVPYAPTQGRFKVYLIDEVHMLSTHSFNALLKTLEEPPEHVKFLFATTDPQKLPITVISRCLQFTLRPLAVDEITKHLGAILEKEQIAADQDAIWQIAESAQGSLRDALSLTDQAIAYGQGAVHHQDVKEMLGLIDRTIIYDLILAVHQNQREKVSQLLLQFRYQALDVSLVLDQLISTLHELALLQYLPELGLKYSEEINAKILQLSKLISAQDLQLYYQIACKGRSDLQLAVTQEQGFEMCVLRLLAFRPLAPNEILVSEPVQQNGQAEVGLNSQAQTAQVIAPVSAVQPVEVISQPAMVEPEPEPEPEPEPEPEPEPEPEPEPEPEPEPEPEPEPEPEPEPDQDLMVFDPNHHELIGLESAVVQETVSVLEEDFIPVPEQKLVQVQAETQVKQIEPEPASTAEPIGLFEASSAEFSLAQDTSAYDLVSEPVIEQQSLVQVEIVETVVVVKEPNATDNSQLMPQDILKLPSQTLEGEWTLEKWEFWFRNSQLSPAVQELAQHGVMTGEIGGNTVFHIPQEYENMLTQLQQALIEALKQQWPNTQFTVEYGAVNTATPYVMQSVRKEKAFHRATELLQQQPVIKSLIETFDGELQNIQLKP

SEQ ID NO: 44932 - protein, 112 aa, Acinetobacter baumannii
MKASKLIRDKGLQYAKEIVDSAPSNATEWNEGFEFQCGQSVEISKADREKYFVDLSELKRLVESVDLVESWGGIDDVKLYDLSHCKNRPESAGYKLLQAIADYESIYGGGYV

SEQ ID NO: 44933 - protein, 81 aa, Acinetobacter baumannii
MELTLGLVAIASAILIAFGALGTAIGFGLLGGRFLEAVARQPELAPQLQTRMFLIAGLLDAVPMIGVGIGLFFIFANPFVG

SEQ ID NO: 44934 - protein, 147 aa, Acinetobacter baumannii
MYKFNCRSELTKSSTPTPTPTPTPTPTPTPTPTPTPTLSNVLKEIKQLVDRNIPYSQTGARGAGSNKNATSVITANDLKGLDCSETVAIYLLKLGVTDKFYSIHTGVMLTENDFRKAIRSNKIEYVVGSKDLNFIPQIGDIFVWRNG

SEQ ID NO: 44935 - protein, 470 aa, Acinetobacter baumannii
MPRKKEVVSGNFVKYDAVVLGSGPAGEGAAMKLAKAGKRVAIVDVRDQLGGNCAHVGTIPSKALRQTVSSIIRYQRDPMFQKVGEWKQFTMKQVLRNAHKVIQQQVDTHTRFYDRNKIGVFHGRAYIQDKNTVLVFSHEGIKETIICKQIVIATGSRPYHPQGLDFDHPRVFDSDKILDLDYSIQKIIIYGAGVIGCEYASIFIGLDHKVDLINTQQKLLSYLDDEIADALSYHLREQGVLIRHNEQMDHLETFDDHVVLHLQSGKKIKADAILWCNGRSGNTEGLGLENVGLVPNSRGQLSVNDQYQTEVENIYAAGDVIGWPSLASAAYDQGRCAGANMSGEDAKPVRDIPTGIYTIPEISSIGKNEQELTEEKIPYEVGQASFRHLARAQITGDTVGELKILFHRDTLEILGIHCFGNNAAEIIHIGQAVMHSPNNTLKYFVETTFNYPTMAEAYRVAALNGMNRLF

SEQ ID NO: 44936 - protein, 129 aa, Acinetobacter baumannii
MVREDQAGILNQLLSSLDAIPEEIIALTAYGVGAIIALWCWWRLMRRLPTTLGAISWLVVFAILVTPTVSEGPNASVAPAIFGLLFGVLTKDSPLIWSNLSLILFVIGLGLVIGYCWSKYITNKSMRSI

SEQ ID NO: 44937 - protein, 543 aa, Acinetobacter baumannii
MNSNLPPVSDSKLAANLQAKSTNVHVPTPKFFMPVFLTIIIATLIYIGFQVSADLAHVPPLSLYSVILLSTALLIALGFEFVNGFHDTANAVATVIYTNALPAPVAVMWAGFCNFLGVMVASGAVAYGIIALLPVELIMNMGSGAGFAMVFALLIAAILWNLGTWFLGIPASSSHTLIGSILGVGIMNHLLSASTGVTTSGVDMDQVIKVGKALLFSPLIGFAFAAIVFLLVKTIFKRQLELFQPPEGNKPPPAIIRAILIFTCTGVSFAHGSNDGQKGMGLIMLILVGLVPLAYSLNKNLDTQQVQSFHQLSSQTAVLLNQNQPELTDEKARAVLTKYIQTKQQTPEVVPALASMTDHLGERVSSYSNLKDIPEAAISEIRNDMYLSTTTFKRLDKADALPKMDDSQKKLVKDYRSSLDSFLQYIPNWVKVAVALALGLGTMVGWKRIVVTVGERIGKHHMTYGQGMSAELVAMSTIAAADGLGMPVSTTHVLNSAVAGTMVANKSGLNFNTVKTILSAWVFTLPATICLSGGLYWLFLQFV

SEQ ID NO: 44938 - protein, 292 aa, Acinetobacter baumannii
MENTTNQYPSEVPAQVQPHQPGDQEKMHPEPEIIKASHKGSEKLKGKVAVISGGDSGIGRSVAVLFAREGADIAVLYLKEDQDAEITKQLIEKEGQQCLLLKGDISDPDLAKQNIDKVLQHFGKINILVNNAGVQYQQKEIESISNEQLEKTFKTNIFTMFYLTKEAIPYMEEGDSIINTTSITSYQGHDELIDYASTKGAITSFTRSLSNNLMKQKKGIRVNGVAPGPIWTPLIPSSFDAETVEKFGKDTPMGRMGQPSEVAPAYLFLASDDASYITGQVIHVNGGQIVNG

SEQ ID NO: 44939 - protein, 437 aa, Acinetobacter baumannii
MPHVPSEDMDMTTKTVTENMSSTEAIQTPKKIWITAFIFAFFTLLCDGADLGFLALSLTSLKAEFHLTGVQAGTLGSLTLFGSAVGGLIGGWACDRFGRVRIIVFFIAFSSILTCALGFTHSYMQFAVLRTIGAMGLGALYIACNILMSEMVPTKHRSTVLATLMTGYTLGSLLATLLAGHIIPEHGWRFLYWIAITPVVLSVLMHFCVPEPESWKKARQLKALEVAQSNQPKKRQNPYLEILRDKKHGTMFILWIISTGALQFGYYGVSNWLPAYLESDLGIKFKEMAMYMVGTFLIMMFAKVIAGIVADKLGRRAVFAFGTIGTALFIPVIVYLNTPTNILWMMLFFGFLYGIPYAINATYMTESFPTSIRGSAVGGAYNIGKVLSIFSPLTIGYLSQNGSIGLGLLVMAAAYFICGVIPLLFIKDRLFNPQKAE

SEQ ID NO: 44940 - protein, 689 aa, Acinetobacter baumannii
MSKHTVLFELGCEELPPKSLKTLRDALQAETVKGLNEAGLDFASVEAYAAPRRLALKIVDVDAAQADTQKRFDGPAVQAAYDAEGKPTKALEGFMRGQGITVDQLSTFQAGKVEKVCYLKDVKGQSLDALLPQILQTALDNLPIAKRMRSAASRTEFVRPVKWVVLLKDDQVIEATIQDHKAGNVTYGHRFHAPEAVTLAHANDYLAALEKAYVVANFEKRQATIQEQVKKLADEVNATAIVPADLLDEVTSLVEWPVALRATFEERYLAVPQEALITTMQDNQKYFCLINAEGKLQPYFITVSNIESKDPTQIIEGNEKVVRPRLSDAEFFFLQDQKQPLASRKEKLANMVFQAQLGTLWDKSTRIAKLAVALSSITGANPADAEKAALLAKCDLTSELVGEFPELQGIAGTYYARIEGENTEVSEALGEQYLPKFAGDVLPKTKTGTTIALADRLDTLVGIFGIGQAPTGSKDPFALRRSAIGILRLIIENELDVTIEELVNLALQGYGDIVKDHDKTRADAVAFLEGRYRAKYEDQGVAVDVLQAVQALAPKSPLDFDKRVNAVNHFRTLPEAAALAAANKRVANILAKEAAPEGSVIEANLVEDAEKALFAELQAVTPVVEPLLAAKDYTAALSKLAALRAPIDAFFDGVMVMADDADLKANRLRLLAQLRNLFTAVADVSVLQG

SEQ ID NO: 44941 - protein, 270 aa, Acinetobacter baumannii
MTFQVSTLSQKNHVIIQITDTHLLEYPQLEFVGMNPEESFHAIIQQILKQHPEADAIIHTGDLAQAPTPITYKRYINFMQTLGLPFFQTLGNHDNVDHFPLHNENHQQPVVVGLGNWRVIMLNSAVKGKVDGHLSSEQLENLANLLEQFADHPVLLACHHHPFAMKSKWIDHHKLQNSNALLDTLSPFQNVKALVCGHVHQDSLNIWQGIEFFSTPSTSVQFKPFSNDFALDQNAPGYRYIRLNNDGSFETKVFRLENFKTRINTDISGY

SEQ ID NO: 44942 - protein, 431 aa, Acinetobacter baumannii
MSNWFPKWQPYQGDVDHRPVSTNEYLPPVQSAILGIQHAFAMFGATVLAPLLMGFNPNLAILMSGICTILFFLITGGRVPSYLGSSFAFIGVVAAATGHITGSGANPNLSIALGGIVACGIFYALIGFIVMLTGTRWIEKLMPPVVTGAIVMIIGLNLAPVTIKGVAGQPFEMWMALITVLCMGSIAVFTRGLLQRLLLLVGLILAYVIYAIATNGLGLGKPIDFSQISQASWFGIPNFSHPTFDTKAILIIAPVALILVAENLGHIKAVGAMTGENLTPQLGKAFVADGLATTLSGSVGAPGMTTYGENIGVMAVTRVYSTIVFVIAGIFAIFLGLSPKFGAVISTIPSAVLTGASIVVFGLITIAGAKIWIENKVDFSNNKNLIVASVTIILGAGNFELLFGNFNLGGIGTATFAAIILNWLFSLKDKT

SEQ ID NO: 44943 - protein, 612 aa, Acinetobacter baumannii
MCGIVGGVAERCVTEILIEGLKRLEYRGYDSAGVALLNNQQILRERRVGKVANLADAVSEHQLTGAIGIAHTRWATHGKPTENNAHPHMSGKVAVVHNGIIENYQELKDDLQALGYVFTSQTDTEVVAHLVAEALKNTDSLLEAVESVVPQLKGAYALGIIHSDYPDELITVREGSPLVIGVGIGENFISSDQLALLPVTNRFIYLEEGDIARLTRTSIEVFVKGERVERPVKELDATVSSASKGEYKHYMLKEIYEQPEAIKQTISQALDGNNLRDDFLKDADADFSKLQSVQIIACGTSYHSGMIAKYWFEQLIGVPCQVEIASEFRYRSPVIVENTLYICISQSGETADTLAALRETQKRAKANNIDIQTLTICNVATSSMVRETDHHLLTLAGPEIGVASTKAFTTQLAALMLLILKIGQVKQRISNVMIEELARELWHSPKVILDTLKQDAEILRLSELFVEKQHCLFLGRGTHYPIALEGALKLKEISYIHAEGYAAGELKHGPLALVDTEMPIVILAPNDEMLDKLKSNMEEVQARGGELFVFADENSGVVEKDRQHVVQIPAVNEWLAPIIYSVPVQLLSYHVAVLRGTDVDQPRNLAKSVTVE

SEQ ID NO: 44944 - protein, 90 aa, Acinetobacter baumannii
MNKSELIDAIAEKGGVSKTDAGKALDATIASITEALKKGDTVTLVGFGTFSVKERAARTGRNPKTGEELQIKATKVPSFKAGKGLKDSVA

SEQ ID NO: 44945 - protein, 342 aa, Acinetobacter baumannii
MSNNTIQAYAAMQAGEKLVPYQFDAGELQPHQVEVKVEYCGLCHSDISVLNNEWRSTVYPVVAGHEIIGRIVALGSEAKGLQIGQRVGIGWTAESCQACDECIGGQQVLCTGENIATIVGHAGGFADKVRAGWQWAIPLPEDLDPESAGPLLCGGITVFDPLLKHKIQATHHVGVIGIGGLGHIAIKLLKAWGCEITAFSSNPDKTEELKAMGANHVVNSRDTEVVKAQKGKFDLLLSTVNVTLNWRAFISTLAPNGSLHFLGLTLEPVPVSVGSLIDGAKSVTGSPTGSPAALRQLLKFAARKKIAPQIELFPMSQLNEAIERLHSGQARYRIVLKADFAE

SEQ ID NO: 44946 - protein, 156 aa, Acinetobacter baumannii
MAIRRIEGLLHLASEGRYAILVGRFNSFVVEHLLEGAIDTLKRHGVNEDNITVIHAPGAWELPIVAKKLATSNQFDAIIALGAVIRGSTPHFDFVAGECAKGLGVVALESSLPVINGVLTTDSIEQAIERSGTKAGNKGSEAALTAIEMVNLLKAI

SEQ ID NO: 44947 - protein, 345 aa, Acinetobacter baumannii
MEINTIIGIVVAIIIMLIGLRMILKKPNHAEPSLDSDLHINPESNQPVIPRHVRDQLEQPEVTVASAAVAERVEPTLSEPAQSEEKGTKELEQASQAQTVQTQVPVENTPVEVEEVKAEENTVSPTVSENSSVELVDTVSAEPEVVSSSEPKVAEGQPKTEPELSLNPNIETAEIAEFEGESNILDVHLHEQQRFDDESALAMAEQIIALNVYPNPRRALSGDKALKVLLKYGLRYGEMSCFHRYENTDEPSALMFSVLRMTDNGPAGFDLETLSTEQVQGLAFFLALPNSKAVTGFDMMTSIAGLIAREIDGKVYDENNLEFTPQLKEHWRHHVIDYRPAQATA

SEQ ID NO: 44948 - protein, 232 aa, Acinetobacter baumannii
  MISC_FEATURE (160)..(160): X=any amino acid
MAYVMMLARVFSSEKYANEFINNGKFRLNTLNFFKGYKEELSNNIGDQYEGISFRATGEQEVKVTIEYNNESHEIEVNEIYTHDNYVLNNNIFCMYAPAVEQEKKFTLEDIQEIVAFQKDAENLGNYLVLIANPEEFFERFAKTVKKLGYKMKRDLVEYXDFNNSVHVPRDKIGFVKSDQFSHQKEYRLMIDDGRNVDEHIDLEIGSLADITYLIPTEDFNKSLEIKVKEEN

SEQ ID NO: 44949 - protein, 350 aa, Acinetobacter baumannii
MRQTILAVLSLSTLAALLTGCGGDMVLLNSKGPVGQGQSDLMMTAIYLMLLVVIPSIIMALWFGWKYRASNKDADYKPTWAHSTAIEVVVWGIPVIIIGILAWLTWWGSHKYDPYRPLESDKAPLTIQVIAEQFKWIFIYPEQNIATVNEVRFPEKTPLSFKITSNFTMNSFFIPQLGGQIYAMAGMQTHLHLLANETGVYRGFSSNYSGYGFSQMRFKAHSVTEQQFNEWVAAVKAGNGTTINPEAVQKTTLDQAELATLRDGDRSKHQIEHLVNRAKAAGDQEALAKAEAMKPFPTKPHPVTYYSSVEPKLFETIINHYMSNYHGADHSAAHTTAETHVAAEHAAQGE

SEQ ID NO: 44950 - protein, 280 aa, Acinetobacter baumannii
MLLAILPWAIQWRLAHGLANLAWKYLKSRRKTTIRNLEVCFPEWTPEKVQQQAKQVFVDMMLGIFETLNAWYKPYWFKNRVTIEGLEHITNAQAQGKGVLLLGTHSTLLDAGGYVCAQYFEPDVVYRPQNNPLLDMLIYRCRGTIYKAQIDHDDMRGLIRHLKEGDAIWYSPDQDFGLKQGIMAPFFGVPAATVTAHRRLLKISKAVAVPLYFYRHGDVQDPKYHILIEPAVDNMPSEDEVDDATRVNKIIENQLRIAPTQYMWFHRRFKTRPEGYEEIY

SEQ ID NO: 44951 - protein, 264 aa, Acinetobacter baumannii
  MISC_FEATURE (7)..(7): x=any amino acid
ISAFKAXIITSRLNDMQDENDRQFITALARGLELLRCFTPKHQHLGNQELAQMTGLPNPTITRLTHTLSRLGYIKQVPNSSKFQLSVGVLAFGYSMLSNVSIRSIAHPYMKNLADYAGAAVAMATRDRLNMIYLDVVQGKGNMTMRRQVGTYLPIHLSSMGRACLAAMPEDEREFLLNAIRNKHKEDWIKINRDLDKAFKDYQDFGYCFSIGEWHKDVNSVAVPLIHEQHGLLVFNCGGPSFIMNREKLEEDIAPRLLHMVNNI

SEQ ID NO: 44952 - protein, 538 aa, Acinetobacter baumannii
MIEFVRWSPERAQHYRNKGYWIDQPLTRILTVGVQSHPHSPAIICGERQLSYIELDRLSTNLASRLAEKGLGKGDTALVQLPNVAEFYIVFFALLKAGVVVLNALYSHRQYELNAFIKQIQPKLLIGSRQHEVFSNNQFIDSLHEVNLSPEIILMLNHQATDFGLLDWIETPAETLVDFSSTPADEVAFFQLSGGSTGTPKLIPRTHNDYDYSVRASAEICDLNSNTRLLCALPAPHNFMLSSPGALGVLHAGGCVVMAPNPEPLNCFSIIQRHQVNMASLVPSAVIMWLEKAAQYKDQIQSLKLLQVGGASFPESLARQVPEVINCKLQQVFGMAEGLVNYTRLDDSDEQIFTTQGRPISSDDEIKIVDEQYKEVPEGEIGMLATRGPYTFCGYYQSPEHNSQVFDEDNYYYSGDLVQRTPDGNLRVVGRIKDQINRGGEKIASEEIEKLILLHPEVMHAALVAIVDEQFGEKSCAFIVSRNPELKAVVLRRHLMELGIAQYKLPDQIKLIESLPLTAVGKVDKKQLRSILNTSTTS

SEQ ID NO: 44953 - protein, 1325 aa, Acinetobacter baumannii
  MISC_FEATURE (479)..(479): X=any amino acid
  MISC_FEATURE (726)..(726): X=any amino acid
  MISC_FEATURE (751)..(751): X=any amino acid
  MISC_FEATURE (762)..(762): X=any amino acid
  MISC_FEATURE (779)..(779): X=any amino acid
  MISC_FEATURE (799)..(799): X=any amino acid
INASEASGNVTVTGVLKNVPADAANTVVTVVINGQTYTATVDSTAGTWTVSVPGSDLTADADKTIDAKVTFTDAAGNSSSVNDTQTYTLDTTAPDAPVINPVNGTDPITGTAEPGSTVTVTYPNGDTATVVAGPDGSWSVPNPGLNDGDEVEAIATDPAGNPSLPGTAIVDAVGPNTDGVNFTVDSVTADNVINASEASGNVTVTGVLKNVPADAANTVVTVVINGQTYTATVDSAAGTWTVSVPGSGLVADTDKTIDAKVTFTDAAGNSSSVNDTQTYTVDTTAPDAPVINPVNGTDPITGTAEPGSTVTVTYPDGTTATVVAGTDGSWSVPNPGNLVDGDTVTATATDPAGNTSLPGTGTVSADITAPVVALDDVLTNDSTPALTGTVNDPTATVVVNVDGVDYPAVNNGDGTWTLADNTLPTLADGPHTITVTATDAAGNVGNDTAVVTIDTVAPNAPVLDPINATDPVSGQADPXVQSMPVTYPDGNSATISYQAHIDILIYVPHPADLVDGDTVTATATDPAGNTSLPGTGTVSADITAPVVALDDVLTNDSTPALTGTVNDPTATVVVNVDGVDYPAVNNGDGTWTLADNTLPAFADGPHTITVTATDAAGNVGNDTAVVTIDTVAPNAPVLDPINATDPVSGQAEPGSTVTVTYPDGTTATVVAGTDGSWSVPNPGNLVDGDTVTATATDPAGNTSLPGTGTVSADITAPVDCAWMTCXQNDSTPATYMVTVNDPTATVDCSMXDGVDYTGSEQXVTAPGRLQTIHFLQLTXWYHTPLTVELQQIAAGNRRXTILAVVTIDTVAPNAPVLDPINATDPVSGQAEPGSTVTVTYPDGTTATVVAGPDGSWSVPNPGNLVDGDTVTATATDPAGNTSLPGTGTVSADITAPVVALDDVLTNDSTPALTGTVNDPTATVVVNVDGVDYPAVNNGDGTWTLADNTLPALTDGPHTITVTATDAAGNVGNDTAVVTIDTVAPNAPVLDPINATDPVSGQAEPGSTVTVTYPDGTTATVVAGTDGSWSVPNPGNLVDGDTVTATATDPAGNTSLPGTGTVSADITAPVVALDDVLTNDSTPALTGTVNDPTATVVVNVDGVDYPAVNNGDGTWTLADNTLPTLADGPHTITVTATDAAGNVGNDTAVVTIDTVAPNAPVLDPINATDPVSGQAEPGSTVTVTYPDGTTATVVAGTDGSWSVPNPGNLVDGDTVTATATDPAGNTSLPGTGTVSADITAPVVALDDVLTNDSTPALTGTVNDPTATVVVNVDGVDYPAVNNGDGTWTLADNTLPTLADGPHTITVTATDAAGNVGNDTAVVTIDT

SEQ ID NO: 44954 - protein, 283 aa, Acinetobacter baumannii
MFDPRLLRAFVTIFESGSFTAAADKLHLTQSTISQQLARLEESVGHSLIDRTARPLQLTASGEYLIGYAQRILTLQQEAEAVLKDPAGSIPIRIGLPEDMMSTAMAEVFGLFAQEHRTIRLDVTSGLSRNLTERYRNGELDIVIVKESAASADCYASFPEEMAWFESENAITPLSEPIRLVTFPQGGLYRDEMFETLERERRRWYIAFTGSSLESVLVSVETGLGISLLPVSTTKGRRVRRYKSLGEASPMVVSIYTWEKAGLISQLVDHMTTVLHDRFQSGS

SEQ ID NO: 44955 - protein, 306 aa, Acinetobacter baumannii
MINKKPRIPSPVQIPEHLSFLQGFRDYLVAQTVSPHTRNAYLSDLIQCSELHKKNRLPDWTSDDISDVLIELTKVGKSPRSIARCLSALRQFYKFLREQKLRSDNPVATHHSPKIGRALPKDLCEEDVEALIQAPDITTALGLRDRAMFEVLYACGLRVSELLNLRLELINLKQGYLRITGKGNKERLVPLGQYACDWVERYLNEARPQLYKSSTDYLFLTQHGGIMSRQNFWYAIKRYALQANIQAELSPHTLRHAFATHLLNHGADLRVVQMLLGHSDLSTTQIYTHVAQVRMQQLHEKHHPRG

SEQ ID NO: 44956 - protein, 512 aa, Acinetobacter baumannii
MTDLDLSRARIAVIGSGTMGIGIAQLAIVNGHTTVLYDLDAQKAQQAVQGLGQTFKKLVEKSKLTEQQADEALARLTVVNQIEALRDADLVIEAVVEKKEVKQSLFKQLAEICSAQTIFASNTSSISVTAISAGITHPERVVGLHFFNPAPVMKLVEIVQGLKTPNSLCLALKNLMLNWKKIPVLTKSTPGFIVNRIARPFYAEGFRALQEQVTSYDQLDYALKQCGGFAMGPCELTDLIGQDVNFSVTQSVYQEFFYEPRYRPSLVQKELVDAGAWGRKSKQGFYTYNEKNQYQTFQPQAVVAKPVDAHIQLKGTWSQLPAFLTRLGLKSGSASDDNILQIDDIDLRLSQGESANIHYLSRKVVLMDWHHDFEQAEALVLSHNELCETNDLAKVEAYFAQFGMSVMWIKDHPALLTLRTIALLINEACEASLHGVASLEDIDNAMKYGVNYPKGPYQWLTQMGGAYVLQTLNNLYALYGEEKYRASIYLKQYVAKTQNIATQYSRDMTEFA

SEQ ID NO: 44957 - protein, 416 aa, Acinetobacter baumannii
MSKLWMYTTLMLSGSVWAGSFIDNSSVELTTRNFYFDRDYQEQSAYPAAKDWTQGFILKANSGYTEGTVGFGLDVLATAGFKLDADAEHGGTGNLPRDTRTNEPADSYGEIGVTAKAKMSQTELRIGTLMPMNPVLVASPARLLPQTYRGISLTSKDIKDFDLQAAYLDKVNHRDSTNYEKIKISGVNGRFKSAETDGLYYLGGNYQFNPALKLTAFYMDVDDLYNQTMVGALHQHKINDTTNFSSQLRYYRSRDDGQAKAGLVDNDLYHAHFELKHQNHKFIFGTFQHHGDTAFPYLTGGETGLLIDTWPGEFLNPKEKAYSFRYEYDFKDYVPGLRFMTRYTTGHNIYAPNLGGTNLKERETDFDLGYTIQSGWLKNLGLRARYAIYDNNMLSTANIKPVNETRINIDYTWKFK

SEQ ID NO: 44958 - protein, 375 aa, Acinetobacter baumannii
MQIGIPTETVVGENRVAATPETVKKLISAGHSVVIERGAGVKAAYIDSAYEQVGATITDDAYTGSQIILKVRAPQGGEIQKLAANTTVVAMFDPYRNTELDQFANQQVSAFALELLPRTLSRAQNMDVLSSQANLAGYKSVLLAAAEYQRMFPMLMTAAGTVKPARVVIMGVGVAGLQAIATAKRLGAIVEATDLRPTAKDQVESLGGKWLDVPMSEEEQQRAADAAKNGYGWMPGEQYIKDQAAIVDKAVSNADIVITTALLPGRDAPRLIKAETVAKMKPGSVILDMAVETGGNVEGSKVGETVVTENGVKILGIPNIPATVATEASALYARNVFNFVETLFDKEKNFAINQEDEIQKALLVTHGGQVLLKRG

SEQ ID NO: 44959 - protein, 758 aa, Acinetobacter baumannii
MALLNHQRPLWALLAAAPLIATVSSSAYAQTWKINLRDADLTAFINEVADITGKNFAVDPRVRGNVTVISNKPLNKDEVYDLFLGVLNVNGVVAIPSGNTIKLVPDSNVKNSGIPYDSRNRVRGDQIVTRVIWLENTNPNDLIPALRPLMPQFAHMAAIAGTNALIVSDRAANIYQLENIIRNLDGTGQNDIEAITLQSSQAEEIITQLEAMSATGASKDFSGARIRIIADNRTNRILIKGDPQTRKRIRHMIEMLDVPSADRLGGLKVFRLKYASAKNLSEILQGLVTGQAVSSSNNSNNSSNSSNPINSLIGNNQNSGSNTSGSNGASISTPAINLNGNSNSSNQNNITSFNQNGVSIIADNAQNSLVVKADPQLMREIESAIQQLDVRRQQVLIEAAIIEVSGDDADQLGIQWALGDLSSGIGLLSFSNVGASLSSIAAGYLSGGSAGAASAIANGANKGNGATLGLGNFDNSRKAYGALIQALKTNTKSNLLSTPSIVTMDNEEAYIVVGQNVPFVTGSVTTNSTGINPYTTVERKDVGVTLKVVPHIGEGGTVRLEVEQEVSAVQDSRGQAADLVTSKRAIKTAVLAEHGQTVVLGGLVSDDTSLSRQGIPGLSSIPYVGRLFRSDNRSNVKRNLLVFIHPTIVGDANDVRRLSQQRYNQLYSLQLAMDKNGNFAKLPEQVDDIYNQKMTPPSIASKPKNYQQVPSGGKSSTITTPVAVEPTVQKQTLQLPDPEINRTKNTVTTTTLRPSTAP

SEQ ID NO: 44960 - protein, 275 aa, Acinetobacter baumannii
MPKALADAPIGIFDSGIGGMSVAAEIAKYLPNERIVYYADTAYVPYGPRSDEEIRELTARAVDWLYRQGCKIAVVACNTASAFSLDHLREHYGEHFPIVGLVPALKPAVLQTRSKVVAVLATPATFRGQLIKDVVEKFAVPAGVKVMTLTSLELVPCVEAGQQMSPACLNALREVLQPAVEQGADYLVLGCTHYPFLNEAIHYLFDNQFTLVDSGLAVARQTARILIKNELLCDQMRQNVARIECYVSGNNADALQPVLQNMIPQELTWTLHNLS

SEQ ID NO: 44961 - protein, 398 aa, Acinetobacter baumannii
MAGLAQTTIQKINHWYERILPKWPAEVTPRNVLIFCVVALLCIGSVMVASASMPYAEYMHENPFHYVIRHGISIVAAGVVAYLTYRISLNTWFKNTFPLWLLTMVLLLAALAVGSEVNGSTRWIKIGGFTLQPTEVAKVMMAIFTADYVVRRAKEVRTHWKGLLRLSGVMAITVGLIIAEPDLGATVVIVMMMVGVFFLAGAPPTQFLIMLGAIVTGIVFLILFEPYRFQRLISFTDPWADPLGVGYQLSNALMAFGRGEWFGTGLGHSVQKLSYLPEAHTDFMLAVLGEEFGFFGISIVIGLSFLMLACCIKIGHRALKHHYLRAGYLAYGISIIFLLQILVNAGMNMGLMPTKGLTLPFISYGGTSLMMCAAMISLILKIDASTQEVNPEREESNF

SEQ ID NO: 44962 - protein, 101 aa, Acinetobacter baumannii
MHCDIYRSSKKDEMYIYIARPNYPDETEQADPFEKVPEAVLQAFGRATFVMHLELAPTRKLARVNVLHVLDSLQTKGFFIQMPPEGLINPNAVEPEGLRGA

SEQ ID NO: 44963 - protein, 502 aa, Acinetobacter baumannii
MSNCPKKYIVAFDQGTTSSRAIVLDHDANVVSIAQREFTQIYPQPGWVEHDPMEIWATQSAVWVEALAQAGIKSEQVAAIGITNQRETTIVWDKKTGRPIYNAIVWQSRQTTEICNQLYKAGWQEYIRKTTGLVIDPYFSATKIKWILDHVEGSRERAERGELLFGTVDTWLIWKLTNGAVHVTDFTNASRTMLFDIEKLEWDEKLLQALDIPRAMLPEVRSSSEVYGYTHTISGQEVGIPIAGIAGDQQAALFGQMCVESGQAKNTYGTGCFLLMNTGKKIVRSEHGLLTTIACGASGEVNYALEGAVFNGGSCVQWLRDELKVIKNAKDSELYATRVKDNNGVYVVPAFTGLGAPYWDPTARGAIFGLTRGASIEHIIRATLESIAFQTRDVLDAMQQDAEEELRTLRVDGGVTENNFLMQFQADILATPVERPIMKETTALGAAFLAGLATGFWQDLHELRNKSAIEKVFEPKMSSEQSEMIYKGWLKAVKRSQSWAED

SEQ ID NO: 44964 - protein, 566 aa, Acinetobacter baumannii
MKMSRRAYAEMFGPTVGDRIRLADTALFIEVEQDLTTYGEEVKFGGGKVIRDGMGQSQLLADEVADTVITNALIVDWWGIVKADVGLKNGRIWKIGKAGNPDIQPDITIPLGAATEVIAGEGQILTAGGIDTHIHWICPQQVETALMSGTTTMVGGGTGPAAGTSATTVTPGPWHIATMLQAIDDLPMNIGLLGKGNLSLPDPISEQIKAGVIGLKLHEDWGSTPAAIDNCLSVADEYDVQVAIHTDTLNEGGFLEETLAAFKDRTIHTYHTEGAGGGHAPDILKAIGQSNVLPSSTNPTRPYTINTIDEHLDMLMVCHHLDPAIAEDIAFAESRIRRETIAAEDILQDLGAIAMMSSDSQAMGRVGEVILRTWQTAHKMKVQRGPLEGDNEFHDNNRVKRYIAKYTINPAITHGLSHEIGSVEVGKLADLVLWKPAFFGVKPSMIIKGGMIAAAPMGDINASIPTPQPVHYRPMFGAYPRGVHNTCITFLSQVAIDKKVAEKLNLKKLISPCKNTRSITKADMKHNTYCPVMQVHPETYEVRADGELLTCEPADVLPMAQRYFLF

SEQ ID NO: 44965 - protein, 84 aa, Acinetobacter baumannii
MRKDIHPAYQQVLFHDTNADVYFLIGSTIQTKQTKEYQGQVYPYVTLDISSASHPFYTGEVRQASNEGRVASFNKRFARFNRKS

SEQ ID NO: 44966 - protein, 78 aa, Acinetobacter baumannii
MSKVCQVTGKRPVVGNNVSHANNKTKRRFEPNLHHHRFWLESEKRFVRLRLTTKGMRIIDKLGIEKVVADLRAQGQKI

SEQ ID NO: 44967 - protein, 242 aa, Acinetobacter baumannii
MNSVTLPIVGHMCSPFREKFGIPRQPNLVNIESYIEMVEPYNDLLAFEGIEQFSHLWLIWQFHDNKNQETATKFRPQVRPPRLGGNEKIGVFATRSMYRPAPIGLSVVRLNKVEKVGKSLRVYVTGSDLLNGTPILDIKPYIHYSDAIVDAQSGYAQAEPERKSVLWSENALSTQQSLFKNKEINAQYLDELEKVLSLDPRPAYQEDPERVYKMKFSNFDIHFKVNGNVITVVDMVKDTSLV

SEQ ID NO: 44968 - protein, 351 aa, Acinetobacter baumannii
MQQAIELAKRGLYSTKPNPNVGCVIVKDDQLIGEGFHPKAGQPHAEVFALRQAGEQAQGATAYVTLEPCAHYGRTPPCAEALVKAQVKKVVVACPDPNPLVAGKGVQILKNAGIEVEIGICEDLAAQLNQGFLKAMSTGMPYVRLKVASSLDGRTAMASGESKWITGSAARQDVQHWRAISGAVITGIETVIADDCQLNVRSLHNVDIETVAQPKRVILDRRGRLPLTAKILENPETVMVMGPYRQELADLGVIQLEIQPLKTLLQTLSKQYQIYDVLIEAGATLSSAFLQEGLIDEMISYVAPTLLGQSARAMFNADFEYMAQQLRFKLLDVTQLDQDIRLRLIPTQEKV

SEQ ID NO: 44969 - protein, 395 aa, Acinetobacter baumannii
MYIEMNAKEMSNIMNMQPQLDMDLENKYLLLTPGPLSTSATVRRAMQKDWCTWDQEYNSLVQDIRNRLVKLATSEPEKYTAVLMQGSGSFAVESVLGSAIPRDGKILIINNGAYGARMVQMARCLNIEVIELNYLETQTPDLQEVERVLKDKTISHVACVHCETTTGILNPIQEIGRLVKAAGKIWIVDAMSSFGGVPMDMAELEIDFLISSANKCIQGVPGFGFILAKRDCLEACKGLARSVSLDLYDQWNTMEQHNGKWRFTSPTHVVRAFYQALLELETEGGVAARYQRYLQNQQTLSKGMQQLGFELVLGEECLQSPIITTFLYPTAEKFSFQSFYETLKKSGYVIYPGKVTDLNCFRIGNIGEVYIQDIEGLLAAIASYCENHLNQAVTA

SEQ ID NO: 44970 - protein, 203 aa, Acinetobacter baumannii
MRGLYLITNDDPIQLLLEKLDAALATRQIAILQYRRKKIDKAEQPAEVEQIKQLCEKYQVPFVINDDLKLAAQFGLGVHLGQSDGEITDAKSQLPEGVIIGRTCLNSLELAQKAIADGATYVAFGAVYATATKPEAGNVGIEVIKQAAAQYDLPICAIGGLTVENSKPVIEAGADLCAVISDILGRSTAEIPARVQAWAQLFS

SEQ ID NO: 44971 - protein, 459 aa, Acinetobacter baumannii
MNLLLIGVLLALVAIAYQLGLRKSRHLAGKGSNSATLHSRPGYYGALVGLWCGIPAFLILIIWNLVEPSILNHIIFNNVPASVTASLDEAARSVLVDRVQAIASGFGVSDHPAAYELAAAQQYAKFQTIGSFAKFAVVVCAALLGLVWAKKKISQEYRARNQVERAINVGLILCSGVAILTTIGIVMSMFGEAMHFFHFVSPIDFFFGTEWNPGFSTSGNAEGSYGLLPLLWGTLMVSGIALLVAVPVGLMIAIYLAEYASPWLRSWAKPTIEVLAGIPTIVYGVFAMMIIGPFFKAAGAYVGIEINATSALTAGFVMGIMIIPFVSSLSDDIITQVPRALRDGSLGLGATKSETIRQVVLPAALPGITGAFLLAVSRAVGETMIVVLAAGNSPLLHANPFEAVSTVTVTIVKQLTGDTDFASPQALVAFALGLTLFVITLGLNIVALYIVRKYREQYE

SEQ ID NO: 44972 - protein, 240 aa, Acinetobacter baumannii
MNRFFIETELTVGSTIQLTESVFHHWVRVLRAQLQEQATLFNGQGGEYLVTLTEINKKNAFVTIENFNPVNRNAPFKAILGQVMSKGDRMDYAIQKATELGVSKIQLLTSERCEMRLKYDRDQKKLDHWQAVAIAACEQCGLNLVPEVLAPISLHEWLNSSDLPTSKFVLAPEKEQKDVLAGIQPELALLIGPEGGLSENEITQANQAGFMNWCIGDRVLRTETAPVVALSILNYRFLSI

SEQ ID NO: 44973 - protein, 404 aa, Acinetobacter baumannii
MDQSTTSKARPMTSTQGSWFAILAVAIAAFALVTSEFLPVGVLNSVAADLHISVGTAGLIITVPGIMAAIAAPLLPVSVKQLDRRYVLILLTAIMVIANTITAFAENFHVLLLSRLILGISIGGFWATAIALSGKLAPANLPIAKATAVVMAGVTFATVLGVPIGTWLSEFYGWRSAFGITAAIGLVVLVLQLIFLPKLLPESAIHIRDLPALLRTPKARSGMLIVLLIGLAHFCAYSYLAPFFKNVAGFNGTTISSLLLLYGIAGIFGNAFAGYSGNLNVRYTLAFVGTCFAIVFFGFPIFAIHEFGAIVLTALWGFAFGAFPTSANIWMFVHAPHAVEKGMPLFVGMFQVMIATGSLLGGYVVDHFNENTLIYGVLSFVALALISTFTLAKGLNNPKATCEN

SEQ ID NO: 44974 - protein, 399 aa, Acinetobacter baumannii
MSNSHVDVIVLGAGASGLMLAAHAAKRGRSVLILEKANKIGKKILMSGGGKCNFTNLYVEPENYISHNPHFVISALSRYSNWDFIGLVCDYGIAYEERKHGQLFTLNGAKEILEMLVSECNKTNNVEIQTHCEVGQVDPLEQGGFSVHTNQGRFSCESLVVATGGLSIPTLGGSGFGYELAQKFGHTVFPTRAGLVPFTFSDHIKEVTTRLSGNALDVTLTNSKNSFTEALLFTHRGLSGPSSLQLSNYWNTGESFKIDFFPSQDLATYLKDKKKAQPKVLLRTLLNEFTAKSIVQELQQLIWPEQSETAIGNISDAQLDHIAEQLHGFIVKPSGTEGYRTAEVTLGGIDTTEVSSKTLESKKQKGLYFIGEVLDVTGHLGGYNFQWAWSSAYAAAQYV

SEQ ID NO: 44975 - protein, 119 aa, Acinetobacter baumannii
MEKTLQCPKCGSTEIETRDHDKLLKTTGGVLLTAAGTTAGTVGGAATGATVGAAIGTVAGPLGVIVGGTVGTFVGAISAGITGGVVGNIFGKKAGVMIDKNIFQDYRCLKCKYRFKQKK

SEQ ID NO: 44976 - protein, 946 aa, Acinetobacter baumannii
  MISC_FEATURE (363)..(363): X=any amino acid
  MISC_FEATURE (367)..(367): X=any amino acid
DYKATLNLPDTQFAMKANLAVREVKWLEEWYTDNIYQQIRASRIGKKKYILHDGPPYANGTIHLGHAVNKVLKDIIVKSRTLAGFDAPYVPGWDCHGLPIELKVEEKVGKVGEKVDAVTFRKHCREYALKQIDLQRTDFKRLGILGDWDNPYLTMNYKQEADIVRALGLIQKNGHIQPGLKPVNWCMDCGSALAEAEVEYEDKKSDAIDVGFGVVDLKDLSARVNVDVQDPTDIVIWTTTPWTLPANQAVALHAEIEYQLVQVTTERGKQNFILAKDLVVSAIERYKLENPVVLADFTGSALENLTLQHPLLTDRQVPVILGEHVIATSGTGAVHTAPGHGADDYKVGLQYNLKVEITPVGWXQVVXLDQPRPNAFAGEQQCYESQMPKDLCEAVLGAVGSLMGLHANQIKHEPDPTTGWRHKTPIIFRATPQWFISMDQKGLRDGALNAIENDIEFVPNWGKNRIESMIEGRPDWCISRQRTWGVPIPFFVHKDTNELHPRTPELIEEVAKLIEKEGIDAWFNRDAKDFIGEDAEQYNAVRDTLDVWFDSGTTHYAVLEQRDELESPADLYLEGSDQHRGWFQSSLLTSMAIHNRAPYKALLTHGFTVDENGRKLSKSLGNYIPLEEIIKQLGADGLRLYVASSDYRYEIAASKEIFSRVSDSYRRIRNTLRFLLANLNGFKPSTDALAVDDLIALDQYILQRANEVQQTIIAAYEEMNFHVVCSALTSFCINDLGGFYLDIIKDRQYTTKADSQARRSAQTALYHIVQAFVRWMSPILSFTAQEAWPLIPEQTDKYVFTAEWYDLPVSSKANLLSEADWQTLISVKSAVNKQIEAARNAKLVGSNLSAKVELWANESLQTVLNQLADELRFVLITSQVVVHPFAEQGEATEMEGLRVQVSAAEGEKCARCWHVLPDVNTHADHPGLCGRCIVNVTGRGEVRKYA

SEQ ID NO: 44977 - protein, 391 aa, Acinetobacter baumannii
MTDIVIVNGARTAMGGFQGSLSGLTAPELGAVTIKEAIARAGLQPTDVEEVIMGCVLPAGLKQGPARQAMRKAGLPDSTGAVTINKLCGSGMKAVMQAADMIKAGSAEIVVAGGMESMTNAPYVLPKARAGYRMGHGEIKDHMFFDGLEDAETGRLMGSFAQDMANTRGYTREQMDDFAIRSLKRAQTAITEGYFKDEIVPVTVSTRKGDVIVDQDEQPLNAKIDKIPSLKPAFAKDGTITAANASSISDGASALVLTSSEVAAQRGLQPLAKIIATASNSQHPSEFTIAPVGAIEKVLKKAGWNAQDVDLWEINEAFAMVTMCPIDDFKLDPEKVNIHGGACALGHPVGSTGSRIILTLIHALKRTGGKKGVAALCIGGGEATAVAIEIL

SEQ ID NO: 44978 - protein, 273 aa, Acinetobacter baumannii
MTVKILAVDMDGTFLNSKKQYNKARFLKQYEQLKQNNIRFVVASGNQLAKLVTYFPEINHEIAFIAENGAHVVDAGQELAFAHLSKEQFVEILNAIDPVYTSKMVICGKQSAYVHSSMNAEDYAKVARYFEKLTVIDDFYALDDLVCKITFTAQENESFTIFEHFQKQSFVKDKVLVPVSSGFNFIDLILPDQHKAHGLKLLLQKWQVQPDQVVAIGDNNNDIQMIKAAGYGFAVENAVEALKAVAPYTTANNEQEGALQVIDLVLQHQPPFA

SEQ ID NO: 44979 - protein, 204 aa, Acinetobacter baumannii
MVSPYLHSFALFFSLLNPFLMSIYMIGLIRHSETKVFNKALIQGSLIAYIVFMLFAWGGEAIFSKYLNVRFEAFQIFGGLIFLVIGYRYVFQGADTIGEMRGAPEHLAGTIAMPFMIGPGTISAAVVTGIEMSIGAAALVIGFTMFLTCSILILMKFSHDHLRYKHAKYIDRYFDIVGRLSALLIGTIAVDMIINGVTGLIHKV

SEQ ID NO: 44980 - protein, 494 aa, Acinetobacter baumannii
MGREILTVVETVSNEKGVSREAIFEALEQALVAATKKKFYEGTNSEEAQLRVEIDRRTGDYRTFRQWTVVADEDHEMPACQDAISDVDPAKWSIGDVRELEVESIEFGRIAAQIAKQVIVQKIREAERALVADAYESKVGELIYGEVKKQTKDGFIIDLGDNAEAYLAREEMIPKEILRPKQRVNAILYSVNREGRGAQLLLSRAKPEMLIALMKKEIPEISEEIIEIKAAARQPGVRAKIAVKTNDHRIDPVGACIGMRGTRIQAVQQELNGERIDVVVWSDDPAQYIASALEPADVSGIVLDEDAKSADIIFATNDQLARAIGSQGQNVRLASDLTGYKLDMMLEEEYRARQQNEAQQYLDMFVSRLDIEEDLAMALVEMGFTSLEEIAYVPAETFDEIELDAELVELLQSRAKEAALTDALKQQENIQEPSADLLNMEGMTSEIAYSLAARGIITVDDLADQATDDISDIEGLGHDKAGQLIMKARESWFN

SEQ ID NO: 44981 - protein, 189 aa, Acinetobacter baumannii
MKRFFLATLILVCSNAMAEGEGPFAEYTVKPSESLNDIAKRNGTTWAKLAEDNDLPDPPTVYVGQKLAIMKKMNKDEYLAAIAKTRPTCSSKEECDKKMEAAHLWVSKYADYKIRSSNNVLIETYAPREFTGEIIVKVSKEPYGKGTYAIVANMSCNNPNMTKPYDSMTSCKRNVYKEIIKFNDFVSSY

SEQ ID NO: 44982 - protein, 155 aa, Acinetobacter baumannii
MTQQTCPCGKGSYAECCEPLHLGTAKALTAEQLMRSRYSAFALQEIDYIVQTTALGQQTALDKEAIAEWSKQNQWLGLEVVNANEKLDKTHAQVEFKAHYHDGKSAQIHHEVSHFVFHQQQWFFLDPTVDMQVTMKQPCICGSGKKFKQCCAQFL

SEQ ID NO: 44983 - protein, 433 aa, Acinetobacter baumannii
MQQLRTGDIIALGFMTFALFIGAGNIIFPPIVAQQAGDHVWLAAIGFLITAVGLPVITIMALSRMQGSIEIISSPLGRIASLILTVVCYLSVGPLFATPRTATVSYEIGFSSYFGTSSSSLLIYSAIYFAFVTVVSLYPNKLLDTVGHVLAPLKIIALAILGIAAVMIPAGYVPAPINHYVNSPVSEGFVNGYLTMDTLGALVFGIVIIQAIYSRGVTDNKLVTKYAIIASLISGVGLTLVYLSLFKLGLGSHEVAPNAANGAVILHAYVQHAFGNMGSLFLTGLIFLACMVTAIGLTCACAEYFAQLTKLPYKLLVFILVGFSFIISNLGLTKLIAVSVPVLSAIYPPAIVVIMLSFFWKFWHKPSFIVGSVTSIALIFGIIDGLKVAGFGDYLPNFLQHLPLNEQNLAWLIPSLVVLVVTTLIDKVKHKSI

SEQ ID NO: 44984 - protein, 208 aa, Acinetobacter baumannii
MNNEYFKLYTDSQFLSPYAFTVFVGLHEKQIPFEIAAIDLGQQGQFETSFVEKSLTAKVPVLEHNDFALSESSAILEYLEELYPDTAIYPKDIQARARARQIQAWLRSDLVALRTERPTDVIFIQPKSTPLSEEGKKAAEKLFFVAEKLLASDAEFLFGSWSIVDAELALMLQRLIQNGDAVSERLKNYALQQWQRPSVQKWLALRHK

SEQ ID NO: 44985 - protein, 699 aa, Acinetobacter baumannii
  MISC_FEATURE (478)..(478): X=any amino acid
KSTNKTSEMAGADAANKANTTQKTEQLDTVRDDATNEALTTNQGVKIADNQNSLRAGIRGSTLLEDFILREKITHFDHERIPERIVHARGVGAHGYFQAYEGNERLTKAGFLTDPTIQTPIFVRFSTVQGPRGSADTVRDIRGFAIKFYTQEGNFDLVGNNAPVFFVQDGIKFPDFVHAVKPEPDTEIPTGATAHDTFWDFVSLVPESAHAVIWAMSDRAIPRNLRSIQGFGVHTFRLINAEGKSHFVKFHWTPKQGLSALVWDEAQKLAGKDPDFHRRDLYEAIEHGFYPEWELGVQIVEEEDEMNFDFDLLDPTKIIPEELVPVTPIGRFVLNRNVDNFFAETEQVAFCPGHVVPGIDFTDDPLLQARLFSYTDTQLSRLGGPNFHQIPINKPVCPFHNNQRDGIHQHTIHKGQAAYQPNSIDGNWPVETPPAASNGGFESYPEKISGHKLRQRSETFSDYFSQPRLYYKRPCTAXQKHVVDAYTFELSKVQRKHIRERQVQQILANIDLDLARQVGANLGIEVPDLTLSYKKTAVEKSAKLSFLAFPPEDIQGRKVAVLIHNMVKSDALEAIKNWAIKEGVILHLLAPSLAPVKDHKDNVIVADGMQMSEPSIAYDAVIIPDGDNLNTVMQDGVARHYLLEAYKHLKPIVFLGNKSDLLEPLGLVADEGTLIEDEFQHVAEKFKNLIKAHRVWSRE

SEQ ID NO: 44986 - protein, 444 aa, Acinetobacter baumannii
MSAAKIGLLSLTALVFSSMVGSGVFSLPQNMAQVANGSALLVAWLITGVGIIFLALSLLHLTRQRPDLDGGIYNYAREGFGDLIGFCSAWGYWLCTTIGIVGYVVIAFSGVGMFTDSKDHVIFGEGNTLYSLIGSSIFVWLVHWLVSRGIKEAAIVNLLATIAKIIPMVVFIFFTFIAFKFDLFKLNLNDFSLKVPLWQQVKDLMLITLWVFTGIEGAVVLSSRAKNRHDIGKATILGVLLALSFYVMVTVLAYGVVSREALAGMHNPSMATILQQLIGLPGTIIITIGLIISVSSSYLSWTLFATEIPYLAAKNGAFPKLFLKNNQNNVPISSLWLTTIVVQGSLIAVYFFNKNYTQLLLISSVMILLPYFLVSAFYLKESIRHKRTPHIAIASVASIYALWLLYAAGLDLLLLSGVLYLVGLVIFSISYFEHKKSLKQNQLN

SEQ ID NO: 44987 - protein, 718 aa, Acinetobacter baumannii
MTQRFAFSTSKTLLAVAIFTSMTTSHAEEPAEQQNSTNVLPTISIQAQKENPTSYVATKANSALKSDAPLFKTAQSVSVVTREQLDQKQARTLADALEGVAGVEAGKLGRRGWDDFIIRGQTSSDSVYVDGLRVGQNTYVATELSGMDQVQILKGPASINFGLVAPGGMVNLVTKRPEAESFARASMTYGSYSLKEGTFDLNYSPNNSEKGAFRLNGRISDQDDPTDYVYFKNFYISPSYNFDLGDNTDLSVIASYQHREYIRQQGLPVIGTLKDNPNGSIDRSLYIGDPNFGKYEADVYRTGYTFKHTFDNGWNFNQNFAVQKTEMDGKAVFARTGSNFWAKDKQGEIDYTTISRRNNSRHQVIDNLSFAIDNRLNKQFDLYGMQHDINIGVDAFQEKSDYTNDKYDIGDLNIYNPVYGQNVTLKQNVRDINRLKYLGLYLRDRIQLNDQLLLSLSGRQDWAQTQTTSLVTGNASKQSDNAFTGSASVMYTLNDIVAPYVSYATSFTPNSGTDVNSNPFKPEKGKQVEVGMKLQSPDQRIQGAIAWYDLKRQNVLVTDTANSGYKVQRGEQLTRGIETELSAEILEGLKLTAAYTYTIDAEISKDANASNVGKALDNIPEHAYSLSARYKFDPSSKLGWYVGGGFRGETYKTVDGLDVHVPGYTVFDTEAGYDAERWGAQLAIRNLFDKDYYTGALNENLVTLGNPRQINFTVKFNY

SEQ ID NO: 44988 - protein, 227 aa, Acinetobacter baumannii
MSCLLASFFLTGCVSNRIIGENTRELFTKYDSGYEWITLTEDDVIAFGKPSVSLPNEPEDSIVIAGKKYSYVISKGGNDFIQLISQLNPQYIQISNELDFNAPASNSNHFYGHIRFSYTPPNGKLNEKESALFKQYGVIPCDYEKTLELHKFELNLRGTVYPPVNNLKKITPLSKPYHVRIQYLHDKSGKVPLSTKEKLASLPLLPFTLTFDIIALPAKVMGIIYQP

SEQ ID NO: 44989 - protein, 348 aa, Acinetobacter baumannii
MSLLQQLAIKHPIFLAPMAGVSTPELAAEVSNQGGLGSLGLGANTPQSAREQILKTQALTENPFQVNFFCHQSTELNVEKAKQWLDYLRPHFEKFGAQPPQELHCIYPSFLDNDDFLNVVLETKPKAVSFHFGIPHPHQIKALKEAGILTMVSATNLIEAQAIEAAGIDIIIAQGIEAGGHRGIFNQTFDGAIKTSDLVQLIVQHCTLPVVAAGGIMTGLQAKHMLGLGAAAVQLGTAFVQCQTSNASAEYRKALFSKPVTQISASLSGRPARGILNHWHTKIDSPTRPVQPEYPYTYDLAKQLNAIASKHQDYGFGAFWAGSNVAQIRELEAPDLVNQLVVEMLDSE

SEQ ID NO: 44990 - protein, 290 aa, Acinetobacter baumannii
MARIGFVGTGIMGMPMAMNLLKAGHQVKVWNRTSSKAVSLKEAGAYVCSELEQVGKDVEFLICMLSDGKTCDEILFQERGAISQLKPESTVIVMSSIPVEVAKKQSEKCKENGLRYLDAPVSGGEKGAQNASLAIMVGGDAQTFSHAEHVLSAMGRPILVGEAGCGMLAKLVNQMIVASTIATVSEGLLLASKAGADPIKLKQALTGGFADSPILQQHGERMLNRDFKPGGTARNQHKDIHTAVSYAKSLELNLPIAQKVSQLFENMLAAGDGELDHSGLIRELERMNHV

SEQ ID NO: 44991 - protein, 330 aa, Acinetobacter baumannii
MTYANRINDRRLILGPKDDLMAISPMKHTWARDIHQRMKDNNWFPEVVDLSNEGICYRDKLTEAERRLYDKSLAFLSNLDGIQFHNINQNIAKHVTSPEVAICLSRQAWEEANHVESYAKLIETVSADPMSVYMTFERDGILAKKNEFILRQSRILGDQFSARGFALACISNVMLEGEYFFSGFLGFYLLAFKGKMLGSADMIRYIQRDEEGTHLDLFLNMIETLRIENPEVFTSSFWEDAAKIIDESTKMEISWGQYIHQGVTNPEAIELYIKYLANKRAAQIRAPFVPYPGVVNPFPWVEEFSKPNTAEKNFFETRVTDYKTGGALAW

SEQ ID NO: 44992 - protein, 250 aa, Acinetobacter baumannii
MADYNVSMRDLLQAGAHFGHQTRFWNPKMRQYIFGARNKIHIINLEHTVPALNDALNFANQLASKKNKVLFVGTKRAASNIIREQAQRAGQPYVDHRWLGGMLTNWKTLRQSINRLKDLQTQSQDGTFAKLTKREALERTREMEKLERSLGGVKNMGGLPDALFVIDVDHEAIAIKEAKNLGIPVIGIVDTNSNPDNVDYVIPGNDDAIRAVTLYASAMADAILAGKEYAQSQANAQAKGDDAAKDASEA

SEQ ID NO: 44993 - protein, 1362 aa, Acinetobacter baumannii
MAYSYTEKKRIRKNFGKLPQVMDAPYLLSIQVDSYRTFLQDGKSPKNREDIGLQAAFRSVFPIESYSGNAALEFVEYSLGKPEFDVRECILRGSTYAAPMRVKIRLIIKDRETKSIKDVREQEVYMGEIPLMTENGTFVINGTERVIVSQLHRSPGVFFDHDKGKTHSSGKVLYSARIIPYRGSWLDFEFDAKDLVYVRIDRRRKLLATVVLRALGYNNEQILNLFYEKVPVYLDMGSYQIDLVPERLRGEMAQFDITDNEGKVIVEQGKRINARHVRQMEAAGLTKLSVPDEYLYERITAEDITLRDGEVIAANTLLSHEVMVKLAEGGVKQFNILFTNDIDRGSFVADTLRADLTRDREEALVEIYKVMRPGEPPTKEAAENLFNNLFFSSERYDLSPVGRMKFNRRLGRPYEVGTDQKSREVEGILSHEDIIDVLRTLVEIRNGKGEVDDIDHLGNRRVRSVGEMTENQFRVGLVRVERAVKERLSQAETDNLSPQDLINAKPVAAAIKEFFGSSQLSQFMDQNNPLSEITHKRRVSALGPGGLTRERAGFEVRDVHQTHYGRVCPIETPEGPNIGLINSLSVYAKANDFGFLETPYRKVVDGRVTDDVEYLSAIEEVGTVIAQADSAVDKDGNLTEEFVSVRHQGEFVRMPPEKVTHMDVSAQQVVSVAASLIPFLEHDDANRALMGSNMQRQAVPTLRADKPLVGTGMEANVARDSGVCVIANRGGVIEYVDASRIVIRVNEDEMVAGEAGVDIYNLIKYTRSNQNTCINQNVIVNLGDKVARGDILADGPSTDMGELALGQNMRVAFMTWNGYNYEDSILLSERVLQEDRLTSIHIQELSCVARDTKLGAEEITADIPNVGEAALSKLDESGIVYIGAEVTAGDILVGKVTPKGETQLTPEEKLLRAIFGEKAADVKDSSLRVPSGTKGTVIDVQVFTRDGLEKDDRALAIEKAQLDSYRKDLKEEYKIFEEAARERVIRLLKGQESNGGGSTKRGDKLSEDLLSGLELVDLLEIQPADEAIAERLTQIQVFLKEKSAEIDEKFAEKKRKLATGDELTTGVLKVVKVYLAVKRRIQPGDKMAGRHGNKGVVSNILPVEDMPHDANGVPVDIVLNPLGVPSRMNVGQILETHLGMAAKGLGDKIEKMLKEQRTVLELREFLDKIYNKVGGEQEDLDSLTDEEILALAGNLRAGVPLATPVFDGAEESQIKDLLELADISRTGQTVLFDGRTGEQFDRPVTVGYMYMLKLNHLVDDKMHARSTGSYSLVTQQPLGGKAQFGGQRFGEMEVWALEAYGAAYTLQEMLTVKSDDVEGRTRIYKNIVDGNHYMDPGMPESFNVLTKEIRSLGINIELKNGD

SEQ ID NO: 44994 - protein, 585 aa, Acinetobacter baumannii
MNIHVEIDTHWCLEQLLQEGRITERDKLLVQTTNRQKDQLKWHPLQWIAHFNLKDQHHVQAHLSLNRLCQWFADRAQLPLFVIDPLKADVSALTQVMSQEFAIRNHILAVEVHTDRIVIGTDQPFQTDWLNNLEKSLAPKKIERVFLNPEQLQRYLREYYQVSRAVNSAQKDAAHDRDNNGVEALLQLGDSQNPDANDQHIVKLVDWILQFAFEQSASDIHMEPRKDNGKVRFRIDGVLHTIYNMPSNTLTAVISRIKILGRLNVAEKRKPQDGRLKTRTPKGQETELRLSTLPTAFGEKLVMRIFDPDVLVRSFQQLGFDQSLLQQWQRITQNSHGIILVTGPTGSGKTTTLYSSLKQLATEQVNVCTIEDPIEMLEPSFNQMQVNHAIELGFADGVRALMRQDPDIIMIGEIRDQDTANMAIQAALTGHLVLSTLHTNDAPSSLTRLHDLGVQPFLTAATILGVLAQRLVRKLCPNCKQQTHINEDEWQHLTFDYIMEMPEKVYRAVGCEECRHTGYKGRIGIYEFMPVSLELKHLISSHATLNELRSQTKKESVEPLRIAGARKVLEGLTTLEEVLRVVPLN

SEQ ID NO: 44995 - protein, 887 aa, Acinetobacter baumannii
MINTSPLLNYVSSHHDIKAINQWRTDVEKQLQDSYENGQSIREIIKARSDLVDEALVFLWKHAELDQSKLGLFAVGGYGRREMLPYSDVDIMILSEDEISEENEKRISTFISSLWDVGNFKPGISVRTIQSCVEQAATDLTVATTLIEARLITGNTQLAKWPRRIVSQTWTDKTFYDAKMAEQAKRYHQHNNTESNLEPDIKNAPGGIRDINQIGWIAKRHFRVNRIYDLVHLGFISEFELAVLEEAESFLWEIRHHLHRLAKRDENRLLFDHQREIAAKFGYVRQEGQPVNYGVEQFMKRYYRTAQQVSTLNEMLLAYFSESVITPRLPNYERKIEVVNDHFKIVDNKLAVQHHKIFAEHPSAILELFYILANRPDIEGIRARTLRLLILAAKRINQSYRDNPEHQALFMSIIRSPYRLYDTLVAMKRYGVLGNYIPAFGQIMGLMQYDLFHIYTVDAHTLLLLRNLNRFREPEFAKEFPVVSSVFQRLARQDIVFIAALFHDIAKGRGGDHSELGAEDAIEFGRAHGFTERECKLIAWLIQNHLLMSLTAQKKDISDPDVVKDFAEKLGDMEHLDYLYTLTVADINATNPKLWNTWRASLMRQLYTHARDVIRTGLGRPVDYQMLIEDTKFAASELLVNNFALADVEKVWQELGDEYFIKESADEIAWHTQAILKHGDNPEPLVLLRAHRKAAQDAVQIFIYTRDQPNLFATTVAVLDRMNLDVQDAKIITASTAFSLDTYVVLDRFGTLLTDPEREETVKNALVKALSQPDQYPGLMQRRIPRQLRHFDIENTVDVTLNEALQQNMVEISTLDHPGLLARVGGLFMMQGLDIHSARIATLGERAEDIFFVTKKDGKPLNNEEVKLFSEKLKAALDEASNQICQH

SEQ ID NO: 44996 - protein, 490 aa, Acinetobacter baumannii
MSDVQVHQLYIHGRYVEATSGKTFNSINPANGEIIATLQQASEQDIEAAVKSAQQGQKIWAAMTAMERSRILRRAVDILRERNDELARLETLDTGKAYSETSTVDIVTGADVLEYYAGLATAIQGEQVPLRESSFFYTRREPLGVVAGIGAWNYPIQIALWKSAPALAAGNAMIFKPSETTPLTALKLAEIYTEAGLPDGVFNVVQGAGREIGQWLTEHPVIEKISFTGGVETGKKVMASAAGSTLKEVTMELGGKSPLIICEDADLNRAADIAVMANFFSSGQVCTNGTRVFVPKSRLADFEKAVVERVQRIRIGDPMAEDTNFGPLTSFPHMEKVLSFIESGKQQGAKVLIGGGRATEGELAKGAYVLPTVFSDCTDQMAIVQEEIFGPVMSILSYETEEEVIQRANDTTFGLAAGVVTQDISRAHRIIHQIEAGICWINTWGESPAEMPVGGYKQSGVGRENGLTTLGHYTRIKSIQVELGDYQSIF

SEQ ID NO: 44997 - protein, 281 aa, Acinetobacter baumannii
MAEPINFATNFAIKIILSIFGPILKKPIEWITKFLFLDAYKVSTAYRTSRDLQLLWRKDLGGFVNYSINWNQIFLGKQQTNCTLWVKANNDQHYSKVIFCVTASLSNLKYQSVIEIHDLTSKPCVLALPSIPIRNLEWRNGQLYEPYNEFKIELKEVFDKDNTYINLKNNTKSIFNPVDNLGFLQGKKSYVYRWGQWWNLDFLESEKDEFLLTYKAYAFRAKFDKSNNASLFSARAWLLSNRLLLNVFFWSKNIFKAKHLRVAFDKYLKDIEEAAGFKLVD

SEQ ID NO: 44998 - protein, 404 aa, Acinetobacter baumannii
MSPIIHSLLDTDLYKFTMLQVVLHKFPQTHSVYHFRCRNLEDTVYPLVDILDDLNEQLDHLCNLKYKEDELQYLRKLRFIKSDFVDYLELFQLKRRFIHASIDEEGRLDIRIEGPMVQAMMFEIFVLAIVNELYFSRIKTDEVWAEGERRLQAKLELIQQYEKSQQPNDPPFLVSDFGTRRRYSFEWQKHVVAAFHNTVPNVFRGTSNVLLAKELNITPIGTMAHEFLQAFQALDVRLRDFQKAALETWVQEYRGDLGIALTDVVGMDAFLRDFDLYFAKLFDGLRHDSGDPYEWGDKAYAHYRKLKIDTKTKMLTFSDGLNLPKAWELHQYFKDRFQVSFGIGTNLTNDMGQTPLNIVLKLVECNGQSVAKISDSPGKTMTDNDTFLAYLRQVFQIEELDEAI

SEQ ID NO: 44999 - protein, 974 aa, Acinetobacter baumannii
MFIKSILSSITSIIPLPENSNTSSNLGNGSGDGLLNGISSGNGEHNYGIGNGIADDASITAPITIPLNLSGNSITLIGNSSSSSVNSSPTTTSNNVNDNDVTNNGNGSTIGSGTGNGSGDGLLNGAASGNGEHNYGIGNGIADDASITAPLSIPINLAGNSITLIGDSSSSSVNNSATNTSNTVNDNDTTYNGNGSGAGNGSGDGLLNGIGSGNGEQNYGIGNGIADDASITAPITLPINLSGNSITLIGNSSASSVNSSPTTTSNTVNDNDTTYNGNGTGDSGVNALGGSGNGSGDGAGNGIASGNGEHNYGIGNGNGDDVDITAPITGVLNISGNSFTLIGNSSSSSVNTAPTTTSNTVNDNDTIDNGNSGGTGSGSGNGSGDGLLNGAASGNGEHNYGIGNGNGDDVDITAPITGVFNFSGNSFSLIGNSSSSSINTAPTTTTNTVNDNDVTDNGNNGGGLLGGSSGNGSGDGLLNGAASGNGEHNYGIGNGNGDDADFTFPLTGVLNFSGNSLSGFGSSSSESVNVAPTTATNTVNDNDTIDNANTGGLGGGSGNGSGDGLLNGAASGNGEHNYGIGNGNGDDADFTLPFTGGLNILGNALSGIGGSSTDSINISPTTTSNTVNDNDTTNNGNTSGGVIGSGDSGNGSGDGLLNGISSGNGEHNYGIGNGNGDDVDVVAPITTPLNVLGNSFSFIGGEGTGDILGPITGIIGGIGGDGDILSPITGIIGGIDGDGDILSPITGIIGGIGGIGGDLGDNPLTGIIQSGIDVLQNLESLKTGLINTGIDTIAGTIIGVFPDAEHPVGDFADLGKLLFETSRDSVNGTLEAISDLAGADLEGASGSITGVIDTLITNGSTASTIIQHIVGDDLVTENGGLLGSITTIIGGVDSGDGGLLGGLDGLISINYGDSDNSNSVDVEDILGNILGSVGSNQGIAVGEPDPTGGSLIHTISLNTVNQLTDQLLHALPTV

SEQ ID NO: 45000 - protein, 121 aa, Acinetobacter baumannii
MRYILIALLIIVFGYSLALVLQNPTELPVDLLFTQVPAMRLGLLLLLTLALGIVVGLLLGVQVFRVFQKSWEIKRLRKDIDHLRKEQIQSAQLAAAEAAANVRHEKTVVDIYPQDKNSTPL

SEQ ID NO: 45001 - protein, 181 aa, Acinetobacter baumannii
MTQSVYHIPVKAISGETVDLDQYKGKVLLIVNTASKCGLTPQYEGLEKLYQAKKDQGLEILGFPANNFKEQEPGSDEEIQQFCSLNYDVHFPLFSKISVAGEDKHPLYQALTTAQPERIGEGPFRERLEGLGIPTNPAPEVLWNFEKFLVNKNGEVVARFAPNLTADDEQIVKAVEAELAK

SEQ ID NO: 45002 - protein, 428 aa, Acinetobacter baumannii
MTQNLHHIVIVGGGAGGLELATQLGETFGKNGKAKITLVDQNLTHIWKPLLHEIAAGSLNPHEEQTNYFAHAKKHHYEFVLGTLTAVNKDKKIIDLIPPQVSKEQNTHIQQLSYDTLVLALGSVSNDFNTPGVRENCHFLDSRKQADIFQQDLLHLYIEAQNQPDQRTLNIGIIGAGATGVELAAELIETTKNFYRYGLKKIHPNQVKITLIEASERILPALSEKTAEHSAKQLQKMGVEILTKHRVEKIDEHCIYFSNGNQLNSDITVWAAGVKAPKVLESLSDFERDNINRLMVYATLQTYSDPNVFAFGDCAHCQLDARHPPLGPRAQVASQQASFLVDAMAARLNGRSQPMFTFNDKGSLVSLSRNKAVGELLGDVSVQGYIAKTMYVSLYRLHQATIHGYTQAGLLTMKDLLTRRVRPKIKLY

SEQ ID NO: 45003 - protein, 411 aa, Acinetobacter baumannii
MSIVKIENVRVLDPIQKTDSVQTVYLQDGKLIAPVDQVEQTIDGQGKWLMPTMVDLCARLREPGQQQHGTLKSEGKAARANGILHVITPPDSKPIVQDNGALIHGLIEKAWHDGGIHMHIIGAQTQGLNGKQPANMAGLKKGGCTAVSNANAAFENDDVVVRTLEYAAGLGLTVVFYAEEPQLAKDGCAHEGFIASRQGLPMIPAIAETVAIAKYLLMIEATGVKAHFGLLSCGASVELIRAAKAKGLPVTADVAMHQLHLTEQLIDGFNSLAHVRPPLRSEQDKELLRQGLKQGVIDAICTHHEPLSSSAKMAPFAETQPGITAFDTYVALGIQLINEGLFEPLEWVTKVTSAPAQVANMTARWQAEAGWVLVDPELSWTVSKDTILSQGKNTPLLGQKLTGKVLQTFAV

SEQ ID NO: 45004 - protein, 332 aa, Acinetobacter baumannii
MSTDPQFPTPNNLGIAVYSNNAEAIGNTPLVRINRLIKTGATVLAKVESRNPAFSVKCRIGAALIADAEKRGALKEGMHIVEPTSGNTGIALAFVAAAKGYSITLTMPASMSLERRKVLKALGANLVLTEPAKGMKGAVDEAVRLATEQPEVYFLPQQFENPANPQIHVDTTGPEIWQATGGQVDILVAGVGTGGTITGISRYFEQVQNKPLYSVAVEPAESPIITQTKKGENITPAPHKIQGIGANFIPKNLDLDLVDEVIPVSSEEAIQWARNCATQEGILVGISSGAALAAAAKIAERPENAGKTIVVILPDSGERYLSSVLFEGLFDE

SEQ ID NO: 45005 - protein, 570 aa, Acinetobacter baumannii
MEHIERESMEFDVVIVGAGPAGLSAAIKIRQLAIENNLPDLSVCVVEKGSEVGAHILSGAVLEPRAINELFPNWKEEGAPLNVPVTEDKTFFLLSETTSKEAPHWMVPKTMHNDGNYVISLGNVVRWLGQKAEELEVSIFPGFAASEVLYHEDGTVKGIQTGDMGIGKDGEPTHNFTPGYELHAKYTLFAEGCRGHLGKRLIAKYNLDKDADPQHYGIGIKELWEIDPAKHKPGLVMHGAGWPLSETGSSGGWWLYHAENNQVTLGMIVDLSYENPHMYPFMEMQRWKTHPLIKQYLEGGKRISYGARAVVKGGFNSLPKLTFPGGCLIGDDAGFLNFAKIKGSHTAMKSGMLCGEAVFEAIAAGVEKGGDLAVARVTEGEDLFVKELTSYTDKFNNSWLKEELYNARNFGPAMHKFGQWIGGAFNFIDQNVFKVPFTLHDLKQDFAVLKTVDATSFKPTYPKPDGKLTFDRLSSVFISNTVHEENQPAHLKLTDPSIPVNVNLPKWDEPAQRYCPAGVYEIMENDDGSKRFQINAANCVHCKTCDIKDPSQNITWVTPEGGGGPNYPNM

SEQ ID NO: 45006 - protein, 372 aa, Acinetobacter baumannii
MHPYAPTLQRVLLFGLFFILIFLGFNILKYFIVPVLWAAIIAYMTWPIYLRIQHFFGENRNNLNATVMISLVILIVGVPFTCAIFILQHEGRNLYFDLQRQVFSGHLSVPDFIRNLPFIGKEISRTLNEINTDPNSTIQNIAAWVQSHLSYGRVLLNEISKNIVKLCFAILSLFFFYRDGHTILTQVSKALEMVIGPRIHHYLDTISETTRAVVYGVGLTAIAQAVLAGLSYFVAGVPNPMVLTIATFLLALIPFGTPVSYLGVGLWLFSQGQTMEAIGVILWGVLIVSSSDNVIRPLVISGATQIPFLLIMFGVLGGIASFGLVGLFIGPVILAVLLAIWREWLHETIDPEPMPKTTMIYDSDDDLPPSKN

SEQ ID NO: 45007 - protein, 878 aa, Acinetobacter baumannii
MANTSRSASQSTASSASAAHKRALVIVESPAKAKTINKYLGSQYIVKSSVGHVRDLPTGGSKATEKKPAARTKLTEAEKEQKANQALINRMGVDPEHGWQAHYEVLPGKENVVAELKKLAKDADAIYLATDLDREGEAIAWHLREVIGGDDSRYHRVVFNEITKNAIQEAFKQPTRLDLNRVNAQQARRFLDRVVGFMVSPLLWEKIARGLSAGRVQSVAVKLVVEREREIRAFIPEEYWQVFADTKAKKDDIRLEAVKQAGKTLKLKNKAETDALLDVLKGAEYKVAQREDKPTKVNPSAPYITSTLQQAASTRLGFSVKKTMMLAQRLYEAGFITYMRTDSTFLSDDAVSMVRAHIESQYGEKYLPAKPNRYGNKAGAQEAHEAIRPSNVALTGDQLAGVERDAQRLYDLIWRQFVACQMTPAEYLSSTLTVEAGNVELKAKGRTLVFDGFTKVRGANKSDDDIILPAIKVGEILKLEKLDPSQHFTKPPARFTEASLVKELEKRGIGRPSTYAAIISTIQERGYVKLENRRLFAEKMGEIVTDRLDESFNNLMNYAFTADLEGQLDRVATGERNWKELLDTFYGDFKKRLTNAQGEQGMRRNQPVEVPAVHCPECSRPMQIRTGTTGVFLGCSGYNLPPKERCKGTLNLTPVESLAALSDDDSAETADLMSKHRCPKCGTAMDSYVIDGGRKLHVCGNNPDCDGYELEEGEFKIKGYDGPTIPCDKCDGEMQLKTGRFGPYFACTSCDNTRKVLKNGQPAPPRVEPIKMEHLRSTKHDDYFVLRDGAAGLFLAASKFPKIRETRAPKVAELRSVADQLDPKYQFILQAPDVDPEGNPTIVKFSRKNQSQYVGSETPEGKQTKWSLIYQDGKWIEG

SEQ ID NO: 45008 - protein, 1493 aa, Acinetobacter baumannii
MHMPSPNTVAPAQGLYQPDEFKDNCGFGLIAHMKGESSHHLVETAIHSLSCMTHRGGIAADGKTGDGCGLLLAMPKQFFRDEAKKLSDITLSEIFAVGTVFLNIDPALAQHSKNILTKEIESEGLRVLAWRIVPTNNDALGEIALQSLPVFEQVIVNCPMGVTEVEFNRKLFLARRRAEQQLQNDPLFYVTTLCSTVISYKGLMMPAAIAEFYTDLADERLKSHIVVFHQRFSTNTLPRWPLAQPFRYLAHNGEINTITANRNWALARTPKFENPLLPGLTELNPIVNRTGSDSSSLDNMLEILVGGGMDLFRALRMLVPPAWQNVETLDADLRAFYEFNSKHMEAWDGPAGLVIQDGRHAICMLDRNGLRPARWVITKNDYITLASEIGVWGYEPEDVVSKGRVGPGQILVVDTLTGKVLDTKDVSNHLKNMRPYREWLRDHAIRLNANPELEEQLVDKGLTGDALKAAQKMFMVTFEERDQLLRPIAESGQEAVGSMGDDTPMAVLSRQVRHVTDYFRQQFAQVTNPPIDPLRESIVMSLETCLGREQNVFEQGPEHADRIIISSPVLSNSKMQQIRSIERAGYEAVDIDLNYAETEGLQAAITRICEESAQAVRDGKTLIVLTDKNIRQGYLPANAALATGAVHHHLIKTGLRTDANIMVETGFARDPHQFAVLLGFGATAIYPYLAYDVINDLIAKGELLGDPIHAQANFRKGIEKGLLKVLSKMGISTVASYRGGQLFEAVGLSSEVVDQCFLGVPSRIQGATFVDLENDQKKLAATAWSNRKPIDQGGLLKFVFGKEYHAFNPDVINSLHKAVRSGKYEDFKEYAELVNNRPIATIRDLFKLKTTNPIPVEQVESVEAILPRFDSAGMSLGALSPEAHEAIAIAMNTIGGRSNSGEGGEDPARYGTIRNSKIKQIASGRFGVTPAYLTSAEVLQIKVAQGAKPGEGGQLPGGKVNGLIARLRYSVPGVTLISPPPHHDIYSIEDLSQLIFDLKQVNPKAMVSVKLVSEPGVGTIAAGVAKAYADFITISGYDGGTAASPLSSIHHAGSPWELGLSEAHQALRVNDLRGKVRVQTDGGLKTGLDVIKAAILGAESFGFGSTPMIALGCKYLRICHLNNCATGVATQQDHLRQEHYIGEPQMLINFFHFIAEETREWLAALGVASLKDLIGRVDLLEVLPGETEKHAHLDLSALLTSHPAAEGKAQYCEVEGNAPFDKGVLAERMVEEMLPAIESSAGGQFNFNVVNCDRSIGARVSGEIARRYGNLGMEAHPVVMNLTGTAGQSLGVWNAGGLHIRLEGDANDYVGKGMAGGRISIFPPKGSPFQTQNTAIIGNTCLYGATGGKLFAAGTAGERFAVRNSGAFAVIEGAGDHCCEYMTGGVVTVLGKVGHNFGAGMTGGFAYVLDLDNDFVDYYNHELIDLTRISTESMEDHKEFLLRIIDEHIKETGSAWAYKIRNEFDFYSRKFWLVKPKAANLQTLLKTTQADPQ

SEQ ID NO: 45009 - protein, 206 aa, Acinetobacter baumannii
MFIININKVGDIKVFKKVLVVALMGVSSFTFAGNWQVKFGGSVIAPSEDTTTALGVVKADHEYAFTPSVEYFFGQTPFSAELLLATPVNHDVLLDGQKVARIKQLPPTITAKYHFKNSTRFTPYIGIGATAFIPWDEQGVADKVKEDFGVAGQVGFNFQPADAKNWGVFVDVRYADISPEVTLTNGAKFDLDINPFVYTLGYSYKF

SEQ ID NO: 45010 - protein, 462 aa, Acinetobacter baumannii
MPPLPNSHMFKMSHLKKKISLESYYSAADILKKLEELTGLVYLQDDNNPVIGFLPKNYLITQNNQNFLFTKTDLNKYKFSSYIENLLDFTQFQSQELKNSNREKISFKGGYIGFISYDFSAHQFINNQSHKQPSLFIGSYYSFIKKINNEWYFFSDENNAFEIFNYLSDLLNKPANKLQKNNFKLEQNIHPRWSKNTYLTAFHKIQEYIKAGDCYQINLTQEFKANFTGSLLNKADELWNLTNAPYSGYLKLTEFELLSCSPELFIEFNVNKQIKTRPIKGTMPRYENKEQDLLSKQTLKNSKKDQAENVMIVDLLRNDLSIYANTGSVKTTKLFEIESFNQVHHMVSEITATLKNDINPMQMLLTALPGGSITGAPKIRAMQIIEELEGAPRGAYCGTLGYFNFDGTGRWNILIRSFQQYQNQLSIWAGGGITIASEAEAEYQESLDKISAMLNLMNSTAE

SEQ ID NO: 45011 - protein, 304 aa, Acinetobacter baumannii
MNQYVSDALLTWTHHIKNVCGNFETDFDGTRNLFIGEVQCFLLGDTEIAFIKNNANKIVRKADEIDRVNNRFCFLILQYSGKMLLEYKNETLSLNEGDIVLVDPVETISMYPQGLVSQISVHLSREKLLKENISTEYFGKLITQNMSGFLLKNILKNMSAENIKLWYATEDGNAFEDALIALIKPTINYKNINSPNNLMEKAERYIIENLAKPDLTPKLIAEHIGVSLRHLYRLFLQENLSINKYIQLKRLEKVKADLLDKRNKQSSITQIALKWGFWDGAHFSKIFKKTYGISPKEFREGMSV

SEQ ID NO: 45012 - protein, 89 aa, Acinetobacter baumannii
MALTNADRAEIIAKFARAENDTGSPEVQVALLTAQINDLQGHFKAHKHDHHSRRGLIRMVNQRRKLLDYLNGKDHERYTALIGALGLRR

SEQ ID NO: 45013 - protein, 159 aa, Acinetobacter baumannii
MKIRILTIGQKMPAWVLTGFEDYFKRIQPFVQTQVIELPMAKRGKNDSEADILKYCQIEGESILNALKPNETLIALEVGGRELSTEKLADTMKQWMLEGNDVALAIGGPDGLSDQVRKAAAWHWSLSKLTMPHPLVRILLIEQLYRAMSINHNHPYHRA

SEQ ID NO: 45014 - protein, 424 aa, Acinetobacter baumannii
MSEATGKKAVLHLDGKEIELPIYSGTLGPDVIDVKDVLASGHFTFDPGFMATASCESKITFIDGDKGILLHRGYPIDQLATQADYLETCYLLLNGELPTAEQKVEFDAKVRAHTMVHDQVSRFFNGFRRDAHPMAIMVGVVGALSAFYHNNLDIEDINHREITAIRLIAKIPTLAAWSYKYTVGQPFIYPRNDLNYAENFLHMMFATPADRDYKVNPVLARAMDRIFTLHADHEQNASTSTVRLAGSTGANPYACISAGISALWGPAHGGANEAVLKMLDEIGSVENVAEFMEKVKRKEVKLMGFGHRVYKNFDPRAKVMKQTCDEVLEALGINDPQLALAMELERIALNDPYFVERKLYPNVDFYSGIILKAIGIPTEMFTVIFALARTVGWISHWLEMHSGPYKIGRPRQLYTGEVQRDIKR

SEQ ID NO: 45015 - protein, 258 aa, Acinetobacter baumannii
MAVIFLESKDNAKIKHLRGLIELNSARKKHQQTVLEGTHLCLAWLQQQKKLFSLFTTEQALEHPDLKKIIELHQGHVFIISEVLYKDLSTLGNTLPCLAIIDLPKTASTIDYSVDTLILENVQDPGNVGTLLRSAAAANIKQIICTQGSASLWSPRVLRAGMGAHFSLSCFENFQLTDILPKFDIPVFVTSSHRSTSLYSKDLSKPCVWILGNEGQGASDYALEHAQSVTIPQPGGQESLNVAIAGSICFFEMVRQRQ

SEQ ID NO: 45016 - protein, 418 aa, Acinetobacter baumannii
MDKFLITGGVKLEGEVRISGAKNAALPLLAAMILADSPITLTNVPNLKDVNTLVKLIGGLGVTISYENDTVKADTSTLDNQFAPYELVKTMRASILVLGPLLARYGNAKVSLPGGCAIGSRPVDQHLKALEALGAHIEVENGYVHATVDGRLKGGEVVFDMVTVGGTENILMAAALADGVTTIRNAAREPEITDLAQMLIKMGAKIEGLDTDTLVVTGVESLHGCEYAVVADRIETGSYLAAAAITGGRVKTTHTDPSLLEAVLDKFEEMGAEVTRGDDWIELDMLGKRPKAVSFRTLPHPEFPTDMQAQIMAVNAIGRGFATISETIFENRFMHVPELSRMGANIQVEGHDAVVTGVEKLQAAPVMATDLRASFSLVLAALVAEGDTLIDRIYHIDRGYEHVEEKLQGLGAKIKRVS

SEQ ID NO: 45017 - protein, 594 aa, Acinetobacter baumannii
MQELANRLAIQNFVNAYMQETGKGYLLSFDQQSSTQQAFSSGLTLLTLPLPSIQAECSVPLSYVSRVGRHRLAALPKMCIDGQWQKFSAGTIVSLLLEELVIESQFKLDAASLLEKWIQSRDALLQFLKQRHNDFDDLVKAGQNFIESEQALILGHSMHPAPKSRNGFVHEDWLKFSPEHAGKTQLYYWLVHQNYIAEGCATEQPISDQVKDAIRWYLSESDLNLLKTHVEFKLLPLHPWQARYLQGKPWFEQLKQTGQLIDIGLRGWQFSPTTSIRTLASFNAPWMVKTSLSVMITNSIRVNLAKECHRGEISYRLWHSDLGKKILKQCPTLKAVNDPAWIALQIDGEIINETICIFRDQPFAVQQQVTCIASLCQDHPNKELNRFNALFDQIAQKNQQTNFKEIALDWFDHFLKIGLAPLMYVYHKYGMAFESHQQNVLLELEDGLPKNLWLRDNQGFYYIEEFATEIVEALPDLLEKAHAVGPKDFVDERFSYYFFGNTLFGLINAIGATGYISEDELLIHLQQNLLQLLEQYPDSTLLQGLLFNDSLPYKGNLLTRLHELDELIAPLEHQSVYVQLPNPLYVEQKDVSYA

SEQ ID NO: 45018 - protein, 321 aa, Acinetobacter baumannii
MSMSAKIQQIIDSVVKNETLSGTSLISTIFGDSVLHRGGNISLASLIQLLELFGFNDRAVRTSVFRLVKNDWLCSDKIGRTSFYRITDSSRSTYLQAEQRIYNDQMKEWDHYWDLILMSSLDTENKALLKKELEWLGFANISTNLMAYPGCNRIELQRLLVDLNMSEQVVVFKAETLQLFNNSVDTIGRMLRTNWPIDELRQRYLQFLDIFREIGVLLMQENEQLEPVQAFQIRTLLIHYYRRILLKDPALPLELLPTDWPAISARTLSMNIYKKVFEPADEYFLSVAATAEGPMPNATAHYWRRFGGLVATNERLNHALL

SEQ ID NO: 45019 - protein, 308 aa, Acinetobacter baumannii
MESNLDFALQLLSMWLKERKIQNQSEHTITAYERDVKSFLEFCELKKVDLRNVEASDLREYLAQRVEQDQLSSSSMQRHLTSIRQFMKWAEQGKYLEINPTDDFKLKRQPRPLPGMIDIETVNQILDQPMPEKPVDQQLWLRDKAMLELLYSSGLRLAELQGLTIKDIDFNRQLVRITGKGNKTRIVPFGKKAKESLLNWLKIYNIWKGHFDQNASVFISQRGGALTPRQIEKRVKLQAQRAGVNVDLHPHLLRHCFASHMLSSSGDLRSVQEMLGHSNLSTTQIYTHIDFDHLAQVYDQAHPRATKH

SEQ ID NO: 45020 - protein, 341 aa, Acinetobacter baumannii
MKITSARQDQGIPGVYGLLLLDVVSRWGYNDETLFAPFHLTSEQLADPEYRISTPVANELVKHALNLTGESTLGYHIGTQMRISIHGFIGYAIMTAKDITEAIALAARFIQLRLPFLQLYFSTFGPKATLQLQCDIELEPLRTEIVLGLTIGIMTMAKAITGIEDLAGDVDLDFPEPEGFDKYKSKLSSTIRFNQPHLISSFDKKYLGFKLVNADPIASQIAINQCEAELSALGERRRLAMRVRDILSNSEQHYLSIENVAEYLHMSDRTLKRQLAAEGTSFSTLVDEVRYRHATSLLSRTDYSLEQIADELGYSDVANFSRAFKRWSGRSPSNWRKDPYL

SEQ ID NO: 45021 - protein, 360 aa, Acinetobacter baumannii
MRNTILLQPKQIRVFVITLIVLCCGVLFQNAAWSENNIATATDETDTVVAGKIIQQQQAQASKPQINSQAASSVTPQTQVANDMADGESIRGLPTLNQPVIDQANVLSETEKQQLSQKILNLYQQGKAQIGIVIVPTTGQEDIFDYALRVGEKWQLGSSKRDNGLLIAVAINDHRIQILTGYGLEGVLPDIVASRIIRNQITPYFKQAQYAQGLNAGLDEIGRILNLDPEVAQQAAQDLKERQHQAAEEQQAKQTTLTMALFILVAGVVGSFIVGRPLSASTAGVAAAVAGFVNGAGVVMSLLLGFGIFFLLITSIAQLILQAILSGAGGGGRGGGFGGGGGGYGGGGGRFGGGGASGSW

SEQ ID NO: 45022 - protein, 99 aa, Acinetobacter baumannii
MSEEMTLEERKVIYRARRGLKEIDVYFDPYVKNYYLKADPAEKALFAELVEQEDPDLLDWFMVMYQNRTHVPNYVTLVYKIKTAMFMVECYFESTYLNF

SEQ ID NO: 45023 - protein, 600 aa, Acinetobacter baumannii
MPQYKAPLRDMQFVLHELLNAEEHYAKLPDFQGNVSRELVDQYLEAAADFCENELSPLNQVGDREGCTWNDGVVTTPTGFKEAYQKYIELGFPSLSAEEQYGGQGLPNSLGIAISEMVGSSNWAWGMYPGLSHGAVRTLEHHGSEEQKNTYLPNLVSGVWTGTMCLTESHAGSDLGIIRTKAEPNADGSYAISGEKIFISAGEHDMAENIIHIVLARLPGAPKGTKGISLFIVPKFNVNADGTLGERNAVRCGSIEHKMGIHGNATCVINFDQAKGYLIGPENRGLNCMFTFMNTARIGTAVQGLSASESSFQGALTYAKERLAMRSLSGPKAPEKEADPIIVHPAVRNMLLTQKAFAEGGRALVYLLAQYADIVEKGETEEERKFADNILSLLTPIAKAFLTETGSESAKHGVQVFGGHGFISEHGMEQIVRDTRIACLYEGTTEIQALDLLGRKVLQTQGAMLRDFTKIVHKFVEANKDNAAMKEFVEPLAALNKEWGDLTMQIGMRAMQNPDEVGAAAVDYLYFSGYVTLAYLWARMALVAQEKLAAGTTDVDFYNAKVTTARFYFKKILPRVRSHVDVIAGGLDPLMALDAEHFAF

SEQ ID NO: 45024 - protein, 533 aa, Acinetobacter baumannii
MNQLQSKINVRSEDFKTNQQAMQTLVTDLKQVAQRIALGGGENARQKHLARGKLLPRERIDQLIDVGTAFLEIGQLAAYNVYEDDVPAAGVIAGIGQVNGITCMIVANDATVKGGTYYPLTVKKHLRAQEIAEQNHLPCIYLVDSGGAYLPMQDEVFPDRDHFGRIFYNQARMSSLGIAQIAVVMGSCTAGGAYVPAMSDETIIVRNQGTIFLGGPPLVKAATGEVVSSEDLGGGDVHTRLSGVADHLAENDEHAIAIARNIVANLNKKPNELNKQIDEPLFDASELYGVVPSDARKPFDVREVIARIVDGSRFDEFKARFGSTLVTGFASLYGMPVGIIANNGILFSESAQKGAHFIELCTQRNIPLLFIQNITGFMVGRQYENEGIAKHGAKLVMAVATANVPKLTLIIGGSFGAGNYGMCGRAYSPRFLWTWPNSRISVMGGEQAASVLSTLKRDQIEQKGAQWSAQEEDEFKQPIREQYERQGHPYYASARLWDDGVIDPAQTRQVLGLSLAAAMNAPIQPTKFGVFRM

SEQ ID NO: 45025 - protein, 230 aa, Acinetobacter baumannii
MHTRRILLAFSLAASAASVAFADYQNINQSTDSDRLEQLSKTLSQGSYTHPDDLDLPASAKVSVTLREKTVELNNDSLAKKYGTTTAKNSFKTSSSNPYSWLVSHPLPDTVRVSSNFGGRTMGGRAEHHGGLDMAAPSGTPIYATGPGIVTKSGWGTGYGQYVEINHGNGYLTRYAHASRLMVRVGDQVSAGDHIANVGCTGRCTGPHLHYEVVKDGQRKNPSTYLAMLP

SEQ ID NO: 45026 - protein, 1228 aa, Acinetobacter baumannii
MSTLATLKALLAKRILIIDGAMGTMIQRHKLEEADYRGERFADWAHDLKGNNDLLVLTQPQIIQGIHEAYLDAGADIIETNSFNGTRVSMSDYHMEDLVPEINREAARLAKAACEKYSTPDKPRFVAGVLGPTSRTCSISPDVNNPAFRNISFDELKENYIEATHALIEGGADIILIETVFDTLNCKAAIFAVKEVFKQIGRELPIMISGTITDASGRTLTGQTAEAFWNSVRHGDLLSIGFNCALGADAMRPHVKTISDVADTFVSAHPNAGLPNAFGEYDETPEQTAAFLKEFAESGLINITGGCCGTTPDHIRAIANAVKDIAPRQVPETVPACRLSGLEPFNIYDDSLFVNVGERTNVTGSKKFLRLIREENFAEALEVAQQQVEAGAQIIDINMDEGMLDSQNAMVHFLNLVASEPDISRVPIMIDSSKWEIIEAGLKCVQGKPVVNSISLKEGYDEFVEKARLCRQYGAAIIVMAFDEVGQADTAERKREICKRSYDILVNEVGFPAEDIIFDPNVFAVATGIEEHNNYAVDFIEATGWIKQNLPHAMISGGVSNVSFSFRGNEPVREAIHSVFLYHAIKQGMTMGIVNAGQMAIYDDIPTELKEAVEDVILNQNQGESGQVATEKLLEVAEKYRGQGGATKEAENLEWRNESVEKRLEYALVKGITTYIDQDTEEARLKSKRPLDVIEGPLMDGMNVVGDLFGSGKMFLPQVVKSARVMKQAVAWLNPYIEAEKTEGQSKGKVLMATVKGDVHDIGKNIVGVVLGCNGYDIVDLGVMVPCEKILQTAIDEKCDIIGLSGLITPSLDEMVFVAKEMQRKGFNIPLLIGGATTSKAHTAVKIDPQYQNDAVIYVADASRAVGVATTLLSKEMRGAFIEEHRAEYAKIRERLANKQPKAAKLTYKESVENGFKIDESYVPPKPNLLGTQVLKNYPLATLVDYFDWTPFFISWSLTGKFPKILEDEVVGEAATDLYNQAQAMLKDIIDNNRFDARAVFGMFPAQRTDADTVSVFDEAGQNVTHTFEHLRQQSDKVTGKPNLSLADYIRADREQQDYLGGFTVSIFGAEELANEYKAKGDDYSAILVQSLADRFAEAFAEHLHERIRKEFWGYKADEQLSNEELIKEKYVGIRPAPGYPACPEHSEKAVLFDWLGSTDKIGTKLTEHFAMMPPSSVSGFYYSHPQSEYFNVGKISQDQLEDYAKRKGWTLDEAKRWLAPNLDDSIV

SEQ ID NO: 45027 - protein, 1453 aa, Acinetobacter baumannii
  MISC_FEATURE (914)..(914): X=any amino acid
  MISC_FEATURE (927)..(927): X=any amino acid
  MISC_FEATURE (944)..(944): X=any amino acid
  MISC_FEATURE (984)..(984): X=any amino acid
SVTALKSELSSGKGINNIVAPFSDPQELPALGGAGRTVALVDSALRRNGKAYKVSFTAAAHYVYFGTAQAALAPSQMAMQVEAGRAYTFSAWLKALSTAVPSFRFNIMWFIRDPSTGNITTNAGIIFPQGQTDSYVAPNANGQRYSFKPVNSPANTIGATVYVVGNPSGPSAGEYLIDMLMLEESVGSEKPASTWTAGPADLNAIKNALDTNAVAINNLTTRVSNDEGKITSQGNSITQLNNSINTINGTLSNKADATALNALTTRVSNAEGQISSQGSSIVSLQNDLASTNKAVSTKADSSALNSLDSKVSEIDGRVTSTANAVTSLQGSVSSIEKGLSTKADASALNNYYTKTEADSAASGAIDKFNSQLTIGGVNVVANSEAPRTSTAATNREYLLYERSAELKAFYDENLEKPITISFEMSVPVAGPVQVYSSNGSAHQFVTSVNAIIVNQFAKYSVTVSPKAHTASTTVSTIEFYGTYGTGRIPTIRKLQIEAGTKATAWSPSPRDTKAAIDANASAIQTTQTKVDNIDGRLTTATDSITSLNSRMSTAEGNINSTNTAVGGLSTRMATAEGKITNQSDSIASLQNSVTSINGTLANKADSSAVNNLTSRVETAEGKISSQSGQITSLSNSLDLTNSNLNDVNVLARLLSLGKPLREDPTFKTTSSGGLSAYNFPAGTSWIKQAKSTDNPTGSTHEMLIKATQALGGGWYPTAPTLVLTANKTFLIKQIIKMPVGTKLQAIGNATGTGGYIRILGNDLGTGKFETYYSVVQGGADLSGSTIQGHFRVIAGTNPPVPTVDNPVFVILASYEVFDVTAVNDTIPKAYSDAIAANANAINTLSNTVSQQGNTITSHSNSITQLNNSISSINGALSSKADASALQSLDSKVTLIDGKVTSNSSALTALQSSLXGNSKSRRELARPXNFQPNRKAKLDFRSSIXSYSITRYGECACVPNSRCLPTPLAALTSTLVAAKFRDSGXQKVHTFLVLVAKTVGGTPPHAIEWQLYNVDSTRLRFNITATLTRYSGVFTVPAGGAAACMLLIGNPTGKPAGQVINIERMMLERQVGNNTTPSAWIAGSDPTGMILSTQAKATDLFNTATSQNAATAGRVTSLESRMTTTEGNLNKKADASALQNLDTKVTNVDGKVTSNTNAITALSSTLSNATSSISMNAGNAQGDWTFFNTSGEYSIVAQADGQAGRVIQLGNNAGNDIVWMHPNNFIPFDATKTYRLRARYRRRAGTGTIYLGVSQKTPDKALYVTTANALSGDMGSSNYVVNAHAPAIDEWQEIVAYIKGRSAGAASGSGSKTSPRTVSQQAGFITPMFIANYSAQTGIVELDYLILEDAEAIVGNDANASAISALDTKVSEVDGRLTTATNSITSLNSRMSAAEGNISAANSALSGLSTRMTAAENGLTNQSNAITNLSNSLTVTTNTANAALPKIQGGTGAA

SEQ ID NO: 45028 - protein, 377 aa, Acinetobacter baumannii
MKRPFYQLNQSKDVIRHFTPNWFTATMGTGVVSMILIQLPFAKSFLFMLATLLWQFNIVLFSVFSVLYLLRWLLFPHEAKQIFNHPNMSLFLGAIPMGLATILNGFLSFGIGLYGEVAVHIAQALWYIDVFLALAIAWIVPFCMFSRQNHQLHTMTAIWLLPVVACEVAASSAGMLVAHLPTDVHSFHLLLAGYVLWGISVLPAFAILTILMLRMALHQLPEKEVAISSWLSLGPIGTGALGLLLLGEQAQRVFVNVGFPELAHVFQALGVVGSLVLLGFGLWWLGLAILTTLRHAKTGIPFNLGWWGLTFPFGVFILALFNLGHQIEVVFLQYVAVAFSILLLVMWSGVMKKTLAGAYSGKLFFSPCLVALQQRMQ

SEQ ID NO: 45029 - protein, 178 aa, Acinetobacter baumannii
MANDNHNQVLDEHTEVVVEGDKASAKRARKVKPKTSDVGSTASLFGIAPYQPKKNEEYMSEGQLEHFRQILQAWKAELMSEVDRTLNTMQDESTALPDVNDRATQEEEFAIELRTRDRERKLIRKIEQSLEAIKNEDYGFCETCGIEIGLRRLEARPTATLCIDCKTLAEIKEKQNNG

SEQ ID NO: 45030 - protein, 278 aa, Acinetobacter baumannii
MSESKQFKRSVFFISDGTAITAETLGHSLLAQFPNVDFDIHIMPYITTEEAAMAVVVEINKCQTRDGCLPLVFDTLVDPHVREIINTAKAVNLDVFEGLISKLEQELGTPPTTLVGQTHAVTDSEYYKARIDAVHFALDNDDGARTRHYDKADLILIGVSRSGKTPTSIYLSLQFGIRVANYPLTEEDLDDNRLPAVLREHRSKLFGLMIDAERLVAIRSERKANSRYASFSQCQMELRAIEGIYISEGIKYLNVTEMSIEEISTRILQMTGLKRRIG

SEQ ID NO: 45031 - protein, 370 aa, Acinetobacter baumannii
MRNYKIDILRGISILLVLLHHFNIPYKLKDTWLGFDFLGEAFSTVIARNGNYGVTMFFVISGFLITHHTLKRDKQFSAINLKHFYIRRAARILPCLVLLILGVSILGSFDLKPFMNQAPNGIEVSYPLTIFAALTFWMNILIIKFGWVNYALGVLWSLSVEEVFYFVFPLLCLLTRSNKVFITVLVGVILYGPYFRSLHFGEESGAYLYHYFSSFDGIAIGCLTAIFSHTYRPDWTYKKPLSWLIILSMTALYLYAPIKEVSTWGISLFAFATSLLILCFQHPSETQAHNLFTKVMVWLGQRSYETYLFHLVVLGLMKVAFIPAQTDSSIKIMLLIGYLVLTFIISAAIEKYYSTPLNSYIRKVFIKDKS

SEQ ID NO: 45032 - protein, 334 aa, Acinetobacter baumannii
MATVDLFAIGNALIDQEFKVSDDFLSQQGLQKGTMQLSDGETQSALYEKLKQTQDYKGQASGGSAANTTVAFSALGGSAFYGCRVGHDELGGIYLQGLNDAGIQTTPKSISEGVTGTCMVLISPDSERTMHTYLGITAELSQDQIDFEPLKTAKWLYIEGYLSTSETARKAVKQAREIAKAHGVKIALSLSDPAMVQYAREGLEELMDDGVDLLFCNEQEALMYTNTTTVEDALTQLRFKNHTVVITQSAKGALVANPTHHFHVAGRHVEAVDTNGAGDAFAGAFLYALNHHEDLTAAAQLAILISSEVVSQFGPRLAINDYAKLLENFQKECA

SEQ ID NO: 45033 - protein, 336 aa, Acinetobacter baumannii
MKAVAYQKAGPITSPEALVDIEIDTPVAKGHDLLVRVQAVSVNPVDTKIRKNVSAEQSGWKVLGWDAVGTVEAIGDKVTQFKIGDVVWYAGALNRQGSNSELQLVDERIVGHKPKTLEVTEAAALPLTAITAWEMLFDRLQVPKTAPTNTTILVIGGAGGVGSITIQLLKQLTNLTIIATASRPETKEWVEQLGADYVLDHRQPLAAQIKQLGLSAPLYVFSTTETDQHLSDIVELIAPQGHFGLIDDPDQLDIKPFKSKSVSVHWEFMFTRSMFQTEDMEKQSELLNEVSKLVDEGKIKTTVTQVLSPINAENLTRVHEQIESGSTKGKIVLHGF

SEQ ID NO: 45034 - protein, 127 aa, Acinetobacter baumannii
MKKPIVLVLSTLMLGMSATAMADSNHRWDNYHGKDHNRYEQRHDYRYDHRNDHRAPVWSHSERGNHYGRYVAFKRGDRIPVEYRNSRYYVSDWRAHRLYAPPRGYHWVKTPNQYLLVDSKHHIYRVR

SEQ ID NO: 45035 - protein, 237 aa, Acinetobacter baumannii
MIEILRQYWQSYLWTDGLQMTGVAMTAWLLVLSIGIGFVLAVPLSLARVSENIWLRGPVWLFTYVFRGTPLYIQLLIIYSGIYSFDYIHEHQTLDAFFREGINCTILAFALNTGAYTTEIFTGAIRSIPHGEIEAAQAFGMSKWKLYTRIIIPSMLRRALPFYGNEVILMLHATTIAFTATVPDILKIARDVNAATYDTFSAFGIAAVLYAVLAFILIWIFRKLEKRWLAFLKPSNH

SEQ ID NO: 45036 - protein, 263 aa, Acinetobacter baumannii
MDYQNIIAEEKNGVGYLTFNRPKALNSFNVDMHREVAEVLSQWTKNPDVRCVVISGEGRGFCAGQDLGDRVVDPNAEAPDLGYSIETYYNPLIKTIVNMPKPVICAVNGVAAGAGANIALACDLVIAAKSANFVQAFCRLGLVPDSAGTWFLPRAVGHARAMGLTLLGDKLPAETAKEWGMIWDVVEDAELKTKVTELAERLAKQPTFGLSLIKKAIHQSSNNTFDEQMLLERDLQRIAGRSEDYREGVQAFMNKREPNFKGR

SEQ ID NO: 45037 - protein, 441 aa, Acinetobacter baumannii
MSLFQNIIIIVLLIIAAGFLSLTEIALAGARKVKLKILAEAGEERAQKVLDLQEQSADFFAASQIGLNAVAILGGILGEAAFRPFFVNLVDRFYEGPWTQTIGFALSFTLVTSLFILFADLMPKRLAMIAPEKIAISVINPIQIFIKICKPLAWGINAIANLLFRLFKVNTTREDNITFDDISAVMDAGAQAGVLQKQEHHFIENVFELEERTVPSSMTTRENVVYFTLNEHEDSIRQKLAEYPYSKFLVCNENIDQVIGYVDAKDILVRILNNQSLTQLNESTIRTVLMIPDTLTLSELLDRFRSTKEKFAVVINEYALVVGVITLSDIMITVMGDWVTPMEEEQQIIKRDNNSWLIDGSTPIEDLKHALEMDELPDEENYETLAGFMMYRLRKIPRPADFVEFGGYKFEVVDVDHFKIDQLLVTRVLEKNDLPSPPDEN

SEQ ID NO: 45038 - protein, 207 aa, Acinetobacter baumannii
  MISC_FEATURE (101)..(101): X=any amino acid
  MISC_FEATURE (106)..(106): X=any amino acid
MELNPTEKDKLLIFTAGLVAERRKARGLKLNYPEAVAFISAALLEGARDGMTVSELMHFGTTLLKREDVMDGVPEMIAEVQVEATFPDGSKLVTVHQPIVXKEYLXIPGEVITPETDIELNVGRETLKVVVANLGDRPIQVGSHFHFYEANDALQFDREAVKGFRLNIAAGTAIRFEPGQSREVELVALAGKREVYGFAGRVMGKLD

SEQ ID NO: 45039 - protein, 109 aa, Acinetobacter baumannii
MNINMLMQQAQRMQKDMESNIKKAKEELAQTEVHAEAGGGLVKVTMTGRYIVKRIEINPELLQDEPDMIEDLIAAAVNDAVRQAEVVSEEKMQKANSGMGLPPGLAGMF

SEQ ID NO: 45040 - protein, 416 aa, Acinetobacter baumannii
MATNYKDGFSRIQPHTWKIAFIFAFLALLVDGADLMLLSYSLNSIKADFGLSSVQAGMLGSFTLAGMAVGGIFGGWACDKFGRVRIVVISILTFSLLTCGLGFTQSFLQFGILRFFASLGLGSLYIACNTLMAEYVPTRYRTTVLGTLQAGWTVGYIVATLLAGWIIPDHGWRMLFYVAIIPVVIAVLMHVLVPEPEAWQKSRLQQPVMAQNASKTSAFKLIFQDKRNRNMFILWALTAGFLQFGYYGVNNWMPSYLESELGMKFKEMTAYMVGTYTAMILGKVLAGMMADKLGRRFTYAFGAIGTAIFLPLIVFYNSPSNILYLLVTFGFLYGIPYGVNATYMTESFGTAIRGTAIGGAYNVGRLGAALAPATIGFLASGGSIGLGFVVMGAAYLICGVIPALFIKEKIYDPQKS

SEQ ID NO: 45041 - protein, 271 aa, Acinetobacter baumannii
MSFTRSQIFLACALASSLLFSACSKENKPQKEDALTATAPATGEASTIIERNAKQRLIETLQKQFKNANINVKILDIKPTEVPNLYWVNLEGMTSVYTTSDGKYLIQGDVIRLGDKELHNIGDSLQASENKKHLAALKNEDLIVYPAKGGKAKHVIYVFTDASCPYCHKLHEHLAEINEKGIEVRYIAWPRGEQFMPTMEAVWCSADRKAAFDQAVQGISIPPAQCKNPVREQYQLGLNMGVNGTPAIYNVDGEYLGGYLTPDELIKRLDK

SEQ ID NO: 45042 - protein, 339 aa, Acinetobacter baumannii
MIGALMLDIAGTELTQEDIELLQAPQVGGMILFARNIESPQQVRALTDHMRQVRPDILIAVDQEGGRVQRLKSGFTLLPAMGRFGELYITQPQKALELAEQCGWLMATEVLAVGIDFSFAPVLDLNAISDVIGDRGFSKNIEDIAPLAGAFMRGMKKAGMANTGKHFPGHGSVKADSHVAAAIDSRSYDEIYNHDMQSFIKLMPELDALMPAHVIYDQVDPNPAGFSPFWIQEVLRNRLKFNGVLFSDDLSMQAACVAGGADARIQAALAAGCDMGLVCNDRSAACTALDGITNLELPNQERLERMRGRIPQIQVGETLSLGNDWQAVKTAIEEFKNSL

SEQ ID NO: 45043 - protein, 89 aa, Acinetobacter baumannii
MIDTTVDVINKLGLHARASGKLIEVTTKFRSSIQIGKGDHLVDAKNIMSLLMLGAGKGTTLRLVIDGTDEEQALNEVQALFAAKFYEAD

SEQ ID NO: 45044 - protein, 495 aa, Acinetobacter baumannii
MLSTIREQWFSNIRGDVLAGIVVALALIPEAIAFSIIAGVDPKVGLYASFCIAVVIAFVGGRPGMISAATGAMALLMVTLVKEHGLQYLLAATILTGFIQILAGYLKLGALMRFVSKSVVIGFVNALAILIFMAQLPELTNVTWHVYAMTIGGLAVIYLFPYIPVIGKLLPSPLICIVLLTLFALFICLDVRTVGDMGQLPDTLPIFLLPDIPLNLETLAIILPYSLGLAAVGLLESMMTATIVDDLTDTTSDKNRECKGQGVANVASGFLGGMAGCAMIGQSIINVKSGGRTRLSSFSAGVFLLIMVVFISDWLKAIPMAALVAVMIMVSIGTFNWDSLRNIRQYPLSSNIVMIVTVVVVVATHNLAYGVLVGVLLSALFFANKIERYMAIQSVFDESESTRTYTVTGQVFFSSADKFTSAFDFKEALSKVVIDVSQAHFWDVSAVAAVDKVVIKFRREGTEVELIGMNEASKTLVDKFGIHDKPDALDRLNSH

SEQ ID NO: 45045 - protein, 310 aa, Acinetobacter baumannii
MNATVEQLAPVEQQATAGWVVAALYQFKEVQDPADLQQRLLDLVKTINLCGTLIVAGEGINGTVAGDREAIDTIHQFLLNEGFNAMEYKESHSSDKPFRKMKIKLKKEIVTLGVEVKPRDLVGHYLDPKEWNELIARDDVILIDTRNDYEYKAGTFKGAIDPKTETFREFPEYVKKELEQHKDKKIAMFCTGGIRCEKSTSLLLQEGFKEVYHLKGGILKYLEETPPDESLWEGECFVFDGRTAVTHGVEEGANIKCHACGWPLTPEESALPSYEHGVSCLYCIDKTTEKQKAGFRMRQSQIAAAKRKRL

SEQ ID NO: 45046 - protein, 404 aa, Acinetobacter baumannii
MEQPISVTRSNFNDWMVPVFAPANFIPVRGEGSRIWDQENKEYIDFAGGIAVNALGHAHPVAVNALTEQAKKLWHVGNGYTNEPVLRLAKQLTENTFADKVFFCNSGAEANEAALKLARKVGLDSGVAGKSGIVAFNNAFHGRTLFTVSAGGQPKYSQDFAPLPNGISHVAYNDLEAAKAVINEQTCAVIVEPVQGEGGVIPADIEFLKGLRELCDQFGALLIFDEVQTGVGRTGALYAYMNYGVIPDVLTTAKALGGGFPVGAMLTTDKFAPHFSVGTHGTTYGGNPLASAVAGAVFEFINTPEVLEGVKHRHQYFLDALNTLNAEYQVFDEIRGQGLLIGCVLKAEYAGKAKDITTWAGEEGLLALIAGPNVVRFTPSLIIPEQDIDEGIARLKRALAKLAK

SEQ ID NO: 45047 - protein, 268 aa, Acinetobacter baumannii
MDKLLKIMQELREKCPWDQEQTPMSLTKYAIEEAYEVEAAIRQGDINEIRNELGDLLLQVVFQSQMFSEQGAFNFQDVVEAISEKLVRRHPHVFQADQFNNLTPEQVSELWEQIKQQEKQGKPQSRLDEIKHGPALSQAQEIQKNVAKVGFDFETVEDAYTKLEEELDEFKQALKNQNSNEIQDEFGDCLFSLVNVGRKLGISSESSLLSTIHKFRSRFAFIEEQAIKQQRTLEDMTLSEMDELWNQAKRQLKSGEKPHAIQHEILEK

SEQ ID NO: 45048 - protein, 523 aa, Acinetobacter baumannii
MTSQFKKQLSLMDLTFIGLGAIFGSGWLFSASHVASQAGPAGILSWIIGGFAVLILGIIYCELGAALPRAGGIIRYPVFSHGPLQGYLLGSVTVIAFSSLIAIEVVAAREYAAAWFPSLTAVHDGVRTPTTIGWLFQFALLCVFFALNYYSVKTFAIANNLISALKFAVPVLVMVALLYHFKPANFSMTEFAPMGAHGVQGAVSAGGIIFAYLGLTPIISVASEVKRPQFTIPFALILSVVLATIIYVVLQVAFLGAVPTDMLANGWSGLSDKFPLPYRDIAMLLGLGWLALLVVSDAIISPSGCGNIYMAATPRVIYAWSNSNTFFRIFTRVDPKSGIPRYALWLTFALSVFWTMPFPSWDKLISVVSAALVLSYALAPVTVGALRRNAPELERPFYVKGFTVLGPLAFVIASFIVYWSGWNVISWLLGAQIVLFALYVIFKRYVPTQEVSLAQQLKSSTWLLVYYILMILASYLGSFGDGASHLLAAPFDTLFVMVISLGCYYWGIRSGLPKALIKNDDEA

SEQ ID NO: 45049 - protein, 271 aa, Acinetobacter baumannii
MNIAQALAIRGEPDSYERQENAWLLEHFLKINSLELKFRLEQELTVQQEQDYLAGLERIQNGEPLAYVTGSQPFWTLDLKVTSDTLVPRPDTEVLVETVLNLNLPKNANIVDLGTGTGAIALALASERPDWFVTATDIYAPTLDVAKENAQTHGLHHVKFACGAWFEALEPQQFDLIVSNPPYIDPEDEHMQALATEPRRALVADHHGLADIEIIIAQGKNWLKPQGWIALEHGYDQGQAVRNVFAEHGFSEIKTIQDYGQNDRVTLACWI

SEQ ID NO: 45050 - protein, 1106 aa, Acinetobacter baumannii
KAPKVIAGAGGGGGGKGGSESDDDLESKSFLSLIDLLGEGQIGGLVDDSPKSIFLNDTPLVNAAGEYNFQNVTWAMLKGTQDQPSLGEGFDTVESSTSVGQLITRDSPATFSITDPNADRARVIISTPSLISTTSRGDIVGSSVEYKFSISLNNSHFVEIGKGKITGKTRSRYQRQYEYALPKQTEDGTRVTMWTIKIERVSPESNESSTSNDIYLDSYSVIIGSRLSYPNSAVFGLSISSEQFQSIPTRSYLVDGLLIRVPSNYDYKTRKYEGTWNGTFKLAPSDNPAWILYDVITNERYGLGQFVDPAYANPARLYVIGQYCDEMVDDGFGGKEPRFTLNTVINSISDAYQLISDITSVFNGMAYWSGSQFGYMCDMPTQPTMLYNASNVVNGEFVYSGASRKDMHSVALITWNDPERNYQRAVEYVEDPELIQRYGVRKAEITSFGCTSRGQAHRIGKWLLYTERNQSRTISFKVGVDSSFVLPGDVVQIADPNRSGKRMGGRLIGATATSATLDSEIILNENSSIMLRLASGDFVERNIKTIGTDLATGNSVINWDTALSTLPTDNAVWIVKSPELEPQLARVVAIGDSEDAPGTYTITTIAHNPSKFDFIESNIQLDSPNVTIISPSLIEATKNVEIIEEARIEQGITVRNMSINWEQVPNAVSYEVKYKKTEGNWFTLPITKGLSVEIENVYEGEYVAQVVAISSTGSRSPATYSIPTKVNGQASVLPKLGLFKATPAMFAIDLAWEYAPGTKGVDHVEIQMSLDNSLEANFALLGTYPDPMKAHQVTGLNLSDTRWFRARLVDKFGISGEWSDVVSAAPDIDPDKVLEVISGHIDESVLDTALQEKIDTSEQTANAAKDAASAAQGAASAAQNVANAAKDAAATAKNTANLAQNVAKEAQSTAATAQNQANAAKTAADQAVAASNQAKDTADKATSAATTAQTMANSASTAAAKANTAATNAQTTANNAASAASKVASDLTTSTNQLNQKIADEADARTVAISNLKDGLTTETTQRKSEDAALLSNIETFKSSTKGSLSSLQEQITTNATNTDANAQKITSLDSRLTTNEGKTAEAINSAATAQQTASTAVDKANAAAN

SEQ ID NO: 45051 - protein, 309 aa, Acinetobacter baumannii
MLEFMKTLKIATRQSPLALWQAEHIRARLQELHPDLTVELVKFVTQGDKILDTPLAKIGGKGLFVKELEAALLDGRADLAVHSMKDVPMALPEGLTLAVICEREDPLDAFVSNQFEKFADLPQGAKVGTSSLRRKSQILKQRPDLQIIDLRGNVGTRLAKLDDGQYDAIILASAGLKRLGLAERIRHCIEPSVSLPAVGQGALGLECRADDQEVLTLIQPLLHPETDVCVRAERAFNAYLEGGCQVPIAGYATLQDGKIHIEGRVGSVDGQTLLRAELTDEANNAQQLGENLARNLLDQGAGDLLKALY

SEQ ID NO: 45052 - protein, 279 aa, Acinetobacter baumannii
MDHELEEEKVDQTLSWREKMAVEEHEKLSPRLVYEIIRRDGAEELDRPTAALIFSGIAAGLVISFSFVFKAIIASYIPTDAIWTDLITNFGYTIGFLIAILGHMQLFTENTITTVVPLFKPFTLDKLRAVGRLWGIVILCNIIGTGLASLFFLTTDLFTPNIDKALDELAHHVASFSAIQNLLKGVMSGLLIAALVWMLPSVSNKFLVIFFMTYLIGLGDFTHVVVGSTEMSYLVWQGEASLGEYMFNFLIPTTIGNIIGGTGVFTLLIYGQVTEELEQ

SEQ ID NO: 45053 - protein, 768 aa, Acinetobacter baumannii
MVTVREQLPEQLTELSEETTVEHAAETQVGLASWLDRVREILDGAELKQLEEVAHLTLQKELDSTVNHRSNTFATGVGMADILAHLHVDEDTLSAAMLYRSVREDITDIEEVKRKFGEQVYNLVKGTLAMGKLSELIEKNKRLEDHFNNNQREHLSGIYKMLISVTEDVRVVLIKLAERTYSLRELANSSRERQERVAREILTIYSPLAHRLGIAQLKWELEDLAFRYLAPDRYKEIASLLNEKRLEREHYIQFVIDRLKSELAAHGIEAEITGRAKHIYSIYRKMKSKNLSFDQLYDIRALRVLVNSVPECYHSLGIVHQIWRHIPHQFDDYITNPKANGYRSLHTAVIAENKSLEVQIRTHEMHDEAELGVCSHFNYKEGSKNTDHSFNHRLHSLRAVLEHYQERNETTVHQNEDETEGFDQLQDFEGFEKIYVFSRDGDIKELPRGSTVLDFAYHVHTEVGNKCYAARVNQRYVPLTYTLKTGEQVEILTKKDREPNRDWLVNSLGYIKTARARDKLRHWFRQQDRSKNLEVGRELLNKELSRLAIHPKSIDLNDYSSHFNVKTGDDILVSLVSGDISLHALINQINRQMHLDQDEPELVLKPTLNPRASHTLSAHGILIDGLDNVELHIAQCCQPVHGESIAGYITLNRGVSIHKVLCSDYQRMIKQEPERAVEADWEMQPTRGQSVQIVVEAYDRRGLLKDLTQVIFSDQINIRQVNTISEADGIANMKLLIEVKGLAQLSRLLARLEQQPGIISARRMIQGV

SEQ ID NO: 45054 - protein, 443 aa, Acinetobacter baumannii
MNTEPKPIYGDGNPETHPLTWRLSKQESVRSADDYEALEGYAGFKKALGMKPAEVLEVIKAATVKGRGGAGFPAGIKWSLMAPNDGGPRYLICNADEMEPGTFKDRLLMEKLPHQLIEGMLIAGYTLEATQGYIFIRGEYIEAAQYLNEALEQIRAKGYLGDNILGSGWNFELHVHTGAGRYICGEETALINSLEGRRANPRTKPPFPQVAGAWGRPTIVNNVETYNNLPAIMLRGPEWYIGLSAGKSKDPGTKIYGASGKVKFPGLWELPFGTTAREVIEEHAGGMRDGLKLKAWLPGGASTDFLPADTIDLPMDAETIMKAGSRLGTCLLMVVDETQCMVSLTRNLEEFFARESCGWCTPCRDGLPWAVKALKALETGEGKKEDIDHLQELTRKLWIGKTFCAHAPGAMEPLMGALKHFRSEFEAKVTDRPVVQTSNVEQA

SEQ ID NO: 45055 - protein, 625 aa, Acinetobacter baumannii
MQNTAKKATLPATALAALGVVFGDIGTSPLYALKESFHAAHGLGIQPENVLGILSIIFWCLMLIISIKYVAIVMRADNNGEGGIMALLALNLRKAKIADNKKIYMIAIGFIGASLFFGDGIITPAISVLSAVEGLSIATDVFDPFIMPIAIAIIVTLFLVQKHGTAFVGKFFGPITLVWFLSLGILGIHSVIQTPVVLGMFSPHWAIQFIYHHPIMTFFVMGAVVLTVTGGEALYADMGHFGPVPIRLAWFFVVLPCLVLNYAGQGALLLRDPAAIENPFYLLVPQWALYPMIIMATMATVIASQAVISGVFSLARQAIQLGYLPRLSIKHTSESEEGQIYVPFLNWLLLIAIIILILIFKTSSNLASAYGLAVTLTMLCDTILVAVFIYSAWKWSLPKVLLLIIPFFILESVLVGATSLKILSGGWVPLLIGAIAVTILMTWKRGRELTFAKLEHDTLSLDLFVKSIGNSVHWVPGDAVFMTGTPNVVPHAMLHNIKHNKVLHQRNILVTVVIEDVPFVAPEERITTETLAEHFFRIKIFYGFKDEMNVPKALMQAYEQLGLEYDLMHISFFISRDRIVHSVGDGMSPWREKLFISMQRNTSPVSDFYQIPTNRVVELGSQIEI

SEQ ID NO: 45056 - protein, 798 aa, Acinetobacter baumannii
MKFERGIGFFALIFSILVIGAFIALSIYLIRLDNIIREKFEGQRWDIPAKVFARPLEIYNNAPITQANFTQELKLLGYKTSSNYDKSGTYVAQGSNMYVHTRGFDYGDSVESEQVLELSFANDQVVEVRSTKPSSTGVARLEPLLIGGIYPQHNEDRVLIKLNSVPKPLIEALISTEDRNFYHHHGISIRGTARALVSNVTGGRRQGGSTLTQQLVKNFYLTPERTLKRKVNEALMALLIELHYSKDEILEAYLNEVNLGQNGNYSINGYGLASQFYFGLPLRELNVAQQAYLVGLVQGPSLYNPWKNPEGAKNRRDTVLNNMRVMGYLTQAEYETEIARPLNVLSKPSLGPAKFPDFLDIVRRQLRTEYQESDLTNQGLRIFTTLDPIAQTQVQNAFKASVERLANSNPARLKNLQGAVLIAHPENGELIAAVGSTQDFTGFNRALDAKRQVGSLLKPVIYLSAIESGRYNWASQIEDAPISVPVDGGKSWTPKNYSGGGHGIVSLSEALANSYNLSAVRLGQEFGLSTFTNNLRKFGVESTIPAYPSIFLGAVNMSPMEVLGIYENFATGGFKYPTRAIRSVVDANGRLLDRYGLNVQQTIDPSVGYIMNYGLQQVMSSGTGRAAYNSLSPALKLAGKSGTTNDTRDSWFAGYSGNHVAVVWLGLDDNKVTGLTGSSGALPVWINVMKQLRQTPVNLRQPDSVQWQWIDRASGDLSAQACDGAMYIPMLAHTVPHRATPCGAPYYQVDPTYTPQSDNTIPEPQDDNTDSYIRESENQMEQDLSNNTRIISSGSYNN

SEQ ID NO: 45057 - protein, 469 aa, Acinetobacter baumannii
MEKQQGIFERFALRISDWSEKWFPDSYIFALLGVIIVSVAALGIGAPIHDVATSFGNGFWSLIPFTLQMTMLIIVGYVVSVSKPVKFLIQKMARIPSSGRGAIVLVATVSLLISLVNWAISTILTALLVIALAKRKELNMDYRAAAAAAIIGMGATWALGISSSAAQLQANKTSLPESIYNLTGVIPFTETIFLWQSIAMTIILVIVSIAIAYWSAPKGNSVKTIDSFDVQFEEEKTNEAKSTRPGDWLENSPILTIIVVILGLIWMFFEFSKSNPIIAISSLNTYNFVFLMLGLALHGTPRNFLNAVAKAVPAVSGILIQFPLYGSIAFIMTQALNSQDLSLSHYIAEFFVSIASKETFAIVMGIYSAVLGFFVPSGGGKWIIEAPYVMQAANDLKVHLGWSVQIYNAAEALPNLINPFFMLPMLGILKLKAKDVIGFTVTQLVVHFPLVLFLLWFFGRTLSYTPPTF

SEQ ID NO: 45058 - protein, 500 aa, Acinetobacter baumannii
MGNFFLLQAFTVVFALSIATTIFNKRILGFPQAIGVPLVSAIFVFILQWGASLLNGNQFITINIHNIEEAVRHIDFYDFLINGVICFILTSSALKFKISDLRSYWKQISILATIALVICAVLFGSLLYGFQLLVGHHVPILVLLLLGAALGATDPIGIKGVLSSIRAPHHLIVKLEGESLFNDAMCIALFMTLLNVLQGEHFSLVATLEALLYEIVVAVGIGWAFGIGTLRLLRGKHEMESLILTTALLASGAYLVALFAHASAPIACVIGGLIVGNKWKEIREEREIREVNHFWHTVEGIINSFLFTLIGLELFILDLNFSLILGGIVAFFILHISRFAANFMSFAFFPTMRKTKSYNGSLTILSWGGVRGGISLALILAVANIPALSPYSSILIGYTFISVLLSGVVCGLGLPAVMNAFYYNPNEETEGLKGFYQKLCHKMNRRGFQYIVGEDALGRETITIFNPDVIVDQKTEDGIATMHDPNKLQEVKRFESPDNF

SEQ ID NO: 45059 - protein, 178 aa, Acinetobacter baumannii
MRRLVSHLSLGFLIILLAACASAPKKPAPLSPAQVSKLKSMQLPSRLPVPVKGVDRDELKDTWGAARSQGRSHEGIDILAPRGTKVYSATEGLIADLRNNNLGGKVIWILGPAGTWHYYAHLDGHKRGLNVGDYVKKGDLIGYVGNTGNARYTSPHLHYGLYLDGKGRGAVNPYSYLR

SEQ ID NO: 45060 - protein, 429 aa, Acinetobacter baumannii
MSQIVDIRAREILDSRGNPTIEADVILESGVVGRACAPSGASTGSREALELRDGDKSRYLGKGVRTAVQNVNSSIHELLVGQSVFEQKALDEKMIAFDGTENKSKLGANATLAVSLAAAHAAAAEQKLPLFQYIANLRGQTTLTMPVPMMNILNGGAHADNTVDIQEFMIEPVGFTSFAEALRAGAEVFHSLKSVLKKQGLNTAVGDEGGFAPNLRSNEEAITVILQAIEQTGYKAGSDIMLALDCASSEFYKNGQYILEGEGNKSFTSNQFADYLAGLVKQYPIISIEDGLDESDWEGWSYLTSILGDKIQLVGDDLFVTNPKILQRGIDEKVGNSILIKYNQIGTLTETLDAIYLAKANGYTTVISHRSGETEDSTIADLAVGTAAGQIKTGSLCRSDRVSKYNQLLRIEELTKAVYRGKAEFKGLN

SEQ ID NO: 45061 - protein, 220 aa, Acinetobacter baumannii
MNLKIENPPVTLRELCLDKVRNAIITGYFPSGKRLVERTLCEELGVSRSVVREVIRYLEAEGLVEILPNKGPIVSLLNWDIASQIYEIRLLLEQSAVVDCTKNLDEKTAEKLKLLLEDLKAAFAADDINLIIATSTRLYETIFTTANHHIAWEVVQRLNGRISRLRAMTMKSTKREISGYQRIKNMCEAIYLHKDPEKAKQAVAEHIAEAAAVAKNILDA

SEQ ID NO: 45062 - protein, 207 aa, Acinetobacter baumannii
MNSVLTMAVNDSPITSVKTTQPLIALYCGSRAGNNPIYREKAIELASGIAEQGFGLVYGGASIGLMGQVAESVLAHGGEAVGVIPEFMLDYEVAHAGLTELHVVETMHERKAMMAERASAFIALPGGLGTFEEILEIATWGQLNQHQKPMILYNVNGFYNALIAQLDHAVQEGFLPLQHRAKLIVCEEIDQIYNVIKNLKMPKRFVV

SEQ ID NO: 45063 - protein, 191 aa, Acinetobacter baumannii
MTDSAIQIIHQNIHQRQSIGQLVEPAPNTDQLELAFQAALTAPDHHRLKPTRFVIVSGDQRAAFGEVLAKALVDLGESDPAQLERVKQHPFRAPLLILALTQLQDHPKVPHFEQILSTGAAVQNLLLSLQAQGFATMWRSGAVVESNWLKQHLGLQPHDLISGIIYVGTAAKAIAPRADIDSKEFVKVWQA

SEQ ID NO: 45064 - protein, 157 aa, Acinetobacter baumannii
MRLTTRGRYAVTALLDLALQPTEQTITLAEIAARQSISVAYLEQLFAKLKRHGLVSSVRGANGGYHLARNADEITVLEIIEAVNETVDATRCDHKGNCQNGAMCLTHDLWQELSHHIADYLAKITLANLISRDNVQTVALRQNVTGTDSALLSGTGI

SEQ ID NO: 45065 - protein, 899 aa, Acinetobacter baumannii
MTDKSIKELALSVGRPVEKLLEQAREAGLPQRTADDIITTEQQDTLVNYLKKVHGQESGNTGKIALKRKTTSTAKVASTSGKAKTINVEVRKKQVFAKPNPEQIAAEAKARAEAEAKARAEQQAREAAEQKARLQTEQKAKATLDAMRAAHQQDSAAQSAPKAAVVVKKRGGGTVKPAPKPAETLEQKKAREAQTAQLKATEEAARRKAAEEAQQRTLEQMRKMASKYSNDDATATIRVIDDSPLASGLVGQAYEDSFNQEDREIKRGGATTNPRAGKKGGRRGQEEQSFVNHNKRGLKSSQANKHGFEKPVKKQVYDVEIGSSIVVADLAQKMAIKVREVIKTLMKMGELVNQNQTIDQDTAALVVEEMGHNPVLVSDTQAEDNLLEAAEEARGEQTTRPPVVTIMGHVDHGKTSLLDRIRRSKVAAGEAGGITQHIGAYHVETDKGIITFLDTPGHAAFTSMRARGAKATDIVVLVVAADDGVMPQTAEAIDHARAAGTPIIVAINKMDKESADPDRVLNELTTKEIVPEEWGGDVPVAKVSAHTGQGIDELLDLILIQSELMELKASAEGAAQGVVIEARVDKGRGAVTSILVQNGTLNIGDLVLAGSSYGRVRAMSDENGKPIKSAGPSIPVEILGLPEAPMAGDEVLVVNDEKKAREVADARADREREKRIERQSAMRLENIMASMGKKDVPTVNVVLRTDVRGTLEALNAALHELSTDEVKVRVISSGVGAITESDVILAESSEAVLLGFNVRADTAARQKSDQDGIDIRYYSIIYELIDDVKDAMSGKLAPEHRETILGVAQVREVFRSSKFGAAAGCMVMEGVIHRNKPIRVLRDDVVIFQGELESLRRYKDVVDEVRAGMECGLAVKGYNDIKPLDKIEVYDVQMVKRSL

SEQ ID NO: 45066 - protein, 324 aa, Acinetobacter baumannii
MQDFLALTLQGEQPATREGKQANFSWRWLGEGLLECTPHAQYDKAVVLSAGVHGNETAPIELLSHLCTVLFAGRLKLAVRLLLVLGNPYAMRQGKRYVHDDVNRMFCGGYKNLPVTEESKRAEVLEQTVATFFQESSSQAKRYHYDLHTAIRASLLPTFALFPYQTHSYDADLTASLEAADLDALVYHNAVGKTFTHFTSENFKAASATLELGKALPFGQNDLSQFASIDEVIRNVVSEQALPVRNKPKIRVFQVSDSLIKRDEEFHMNLSAEAPNFSTFTKGEIIATQPSGNYVVEQDQVWILFPNPNVKIGLRAGLVLTETI

SEQ ID NO: 45067 - protein, 267 aa, Acinetobacter baumannii
MNIPRFGLGTFRLKEQAVIDSVKNALDVGYRAIDTAQIYENEAAIGQAIAESGVSRQDLFLTTKIWVDNFAQEKFIPSLKESLQKLRTDHVDLTLIHWPAPDLGVSIPEIMQLLLEAKQQGLTKQIGISNFNITLTQQAIDTIGVEHIATNQIELSPYLQNHKLVNFLQEKNIDVTSYMTLAYGKVLQDPVLAEIAAAHKVTTAQIALAWALQRGFAVIPSSTKRENLISNLKAQDIELTAAEMQMIAELDRNSREVSPEPWAPVWD

SEQ ID NO: 45068 - protein, 83 aa, Acinetobacter baumannii
MNDAQLIDKLGGVTAVARLLGIAPSSVSGWKAIPLDRKIRLAVIAEDLGLTTRKELFPDNYQDIWIELRPQTTKSKNLGSLTA

SEQ ID NO: 45069 - protein, 387 aa, Acinetobacter baumannii
MRALTYHGARDVRVESVPDPVIQEPDDVILRVTATAICGSDLHLYRGKIPATEDGDIFGHEFMGIVEEVGPEVTEVKKGDRVIIPFVIACGHCFFCEHELMAACENTNTGRGAILNKKQIPPGAALFGFSHLYGGIPGGQAEYVRIPKGNVGPFKVPGSLPDEKVLFLTDILPTAWQAVNNAQVGRGSSVAIYGAGPVGLLAAACARMLGAEQIFMVDHHPYRLRFAHQTYGVIPVNFDEVDAAEFIIQNTTGYRGVDAVIDAVGFEAKGSMLETVMTNLKLEGSSGSALRQCIAAVRRGGVVSVPGVYAGPIHGFLFGDAFDKGLTFKMGQTHVHNYLPQLLEHIENGDLSPDLIITHRMKLEDAAEGYRIFDKKEEDCRKVILTP

SEQ ID NO: 45070 - protein, 364 aa, Acinetobacter baumannii
MNMPVKVEYFKNPKNRDLTPAELEAFAKELDQIKQEVLDDLGEKDAKYIRRVYAAIRYSSFLGRACLFAGWFPPAWILGTGLLGFSKIMENMELGHNVMHGQYDWMNDPKFNGQTYEWDTVGTSDNWRQTHNYKHHTYTNIKGIDDDIGYGLLRLFPEQRWKPGFLLQPIYSIPFCLLFQWGVAIQNLEIGRVLYKRKTKAQFLEELKPVNKKIGKQLFKDYVFFPLIAGPAALPVFTGNLVANGLRNIWTFSIIFCGHFTKDAEVFPKSVLQEESRGHWYMRQIRGSSNLTGSEAFHILSGHLSHQIEHHLFPDIPARRYRQMAPKVEAVCKKYGLNYNNASFVKQFGQVVGRIVKYAFPFKK

SEQ ID NO: 45071 - protein, 1397 aa, Acinetobacter baumannii
MKDLLDIMRKKTDSDGHAPVEFDRIRIGLASPEMIKSWSHGEVKKPETINYRTFKPERDGLFCAKIFGPVKDYECLCGKYKRMKYKGVICEKCGVEVTTAKVRRERMGHIELASPVAHIWFLKSLPSRIGLLLDMTLRDIERVLYFESYVVTDPGMTPFEKYQLLNDEEYFTALEEHGDEFVAKMGAEAVQDLLKDIDLEAEISRLREEIPQTTSETKLKKASKRLKLMEAFKDSNNKPEWMVMNVLPVLPPDLRPLVPLEGGRFATSDLNDLYRRVINRNNRLKRLLDLAAPDIIVRNEKRMLQESVDALLDNGRRGRAITGSNKRPLKSLADMIKGKQGRFRQNLLGKRVDYSGRSVITVGPTLRLHQCGLPKKMALELFKPFIFAKLQASGQATTIKAAKKMVERETPEVWDVLASVIRQHPVMLNRAPTLHRLGLQAFEPILIEGKAIRLHPLVCAAFNADFDGDQMAVHVPLTLEAQLEARALMMSTNNILSPANGEPIIVPSQDVVLGLYYITRDAVNAKGEGMVFADTHEVNRALATGQVAIHARVKVRVHQTVINENGEREQQTIIVDTTPGRCLLWEVVPEGLSFDMINLEMTKKNISKLINSCYRKLGLKDTVIFADQLMYLGFRQATRSGVSVGMEDMLIPPTKHTIIDKAETEVREIEQQFEQGFVTAGERYNKVVDIWARTNDQVAKAMMDNLSYTLVKNKQGEDEKQKSFNSIYMMSDSGARGSAAQIRQLAGMRGLMAKPDGSIIETPIKANFREGLTVLQYFISTHGARKGLADTALKTANSGYLTRRLVDVAQDLVITEPDCGTSGGLVMTPFIQGGDVIEPLRDRVLGRVTAEDVRRASDDEVVLPRGTLIDEKIAAQLEEAGVDEVKVRSVIACESTFGVCAKCYGRDLARGHLVNPGESVGVMAAQSIGEPGTQLTMRTFHVGGAASRTSAANSVQVRNKGTVRFHNVKTVQHAKGHLVSVSRSGEIGIADELGRERERYKLPYGASILLKDGELVEAGGIVATWDPHTHPLVTEVAGKARFSQIADGVTATSKTDDATGMTTVEILPVTARPASGKDLRPAIVLDTTDGGEQFYFLPQNTIVTVRDGETIGVGDVIGRVPQESSRTRDITGGLPRVADLFEARKPKEHAILAEVSGIVSFGKETKGKNRLVITPDDGSEIYEELIPKWRQINVFEGEHVNRGETISDGPQNPHDILRLKGEVALTNYIVNEVQDVYRLQGVKINDKHIEVIVRQMLRKVDIIDGGDTSFIKGEQVDYIRVVQENQAVLAQNKFPAKFERQLMGITKASLSTDSFISAASFQETTRVLTEAAVTGKEDDLRGLKENVVVGRLIPAGTGLAYHLERRRQEAEAAEHALHNDFSEVDQAFSQALNSEQF

SEQ ID NO: 45072 - protein, 557 aa, Acinetobacter baumannii
MASPAQIIRHKFLNTFFSRHSIWFLCIFTVLTITWFRTVYTPHSIYYFISDTLLNGLWVVSGALSLLGLYDVLQNRHSILRNYPIMGHFRFLFEDIRPEIRQYFIEADQDALPFSRMQRSLVYQRAKNENADKPFGSIIDVYQEDYRFIVHSISPCPPADPKSFRIQIGNTQCLQPYSASIMNISAMSFGSLSANAIRALNKGAQLGGFYHDTGEGSLSPYHLENGGDIVWQIASGYFGCRTLDGKFDEQKFAKQSQLPQIKMIELKLSQGAKPGHGGILPKHKITAEIAEIRGVSRDHDCISPAKHSSFSTPIEMMHFLQKLRTLSGGKPVGFKLCIGQPWQFMSIVKAMLETKIVPDFIVVDGSEGGTGAAPIEFSDYIGTPLREGLRFVHNTLVGAGLRDQVKIGASGKIISAFDIASTFALGADWVNSARGFMFAVGCIQAQSCHTNQCPVGVATQDKDRQKALHVPTKAERVFNFHKNTLHALSEMIAAAGLRHPSDIKAHHLAQRINDREIKNYAQLHFFLKEGELLQSELKNDDDNFYYRMWNMADANHF

SEQ ID NO: 45073 - protein, 325 aa, Acinetobacter baumannii
MVIDFKQDILAPVATDFAAMDHLINEGISSKVGLVMSVSKHVVEAGGKPMRPIMCLLAARACGLDNMQNAQRLAAIIEMLHTATLVHDDVVDESGLRRGRPTANATWNNQTAVLVGDFLIARAFDLLVDLNNMTLLKDFSTGTCEIAEGEVLQLQSQHQPDTTEETYLKIIHGKTSRLFELATEGAAILAGQEAYREPLRLFAGHFGNAFQIIDDILDYTSDAETLGKNIGDDLMEGKPTLPLISALAHSTGEEHAIIRRSIATGGVDQLPKVIEIVQKSGALDYCQRRAQEETEAALQALSILPDTPYRQALINLTRLALHRIQ

SEQ ID NO: 45074 - protein, 558 aa, Acinetobacter baumannii
MKYKALLSSLSIALFSLSLAGCNDNDSQETAVSTPKQPNILFIMADDLGYSDLGAFGGEIHTPNIDSLAQEGRILTDYHTAPTCSPTRSQLISGTDHHLAGIGAMAELTPDHLKGQPGYEGYLNERSLSIAQVLKDNGYRTYISGKWHLGLTPETNAHAKGFDHSFTLLQGLDHHFKQAPSAFKRNSTYTEDGQIIPISALPDDFFSTNYFTDKLLSYLESGKNSGKPFFAYAAYTAPHWPIQAPAEYREKYRGVYDVGYDAIRNARIARQKQLGIIPVNFEAAEPIATQNAPQKYGKWNELTAEQKALEARKMEIYAGMVENLDANVGRIIQYLKQNNLYDNTLIFFVSDNGAEGFVRGSYGSESGFDNSVANVGTPTSYHYIGPRWAEVSAAPFHLWKDTAGEGATTAPAIVKLPNQKKAEETNHSFASVLDVFPTLLDYAHIPVPQGQYKGRTINTPSGYSWKSVLENKSQTIRPANFSFADELHGSKYAKQGEWKIALQGRPELGTGSWELYNIATDRGENHNVAQLYPAKVQELLAVYQKYTEQNGVQEYNAK

SEQ ID NO: 45075 - protein, 291 aa, Acinetobacter baumannii
MSDLRQRFYIEDFPVRGEVVHLEEALKTILAQRDYMLAVQILLGEMLSATALLASTLKIKGRISLQIQANGSFKWAMAECNHLGEVRALADYETDPRFGEATDSSTVLAALVNPVLFINIEPEHGERYQGIVPLDQANLAGCLMQYYDLSAQIPTRIVLASTAQRSGGLLIQLLPRHDEEEQKLVDEDLWPRLTMLTETLKSEELTELSANEILYRLYNEEEVRLPEVEHLKFGCTCSKERCAKALIQIGVDAVHETLEAQNPIQMDCQFCNTRYEFTAEEALGLFGEHLS

SEQ ID NO: 45076 - protein, 569 aa, Acinetobacter baumannii
MLNEAASAVLKTQPRRKTEYSLRSNVALAAVAIALTLAIIAPLMMLFETAFFDENQNFVGLENFYNYFVSPALLSSVFNSVWVACAATVITVFLASIYAFALTNVNIKGKGFFKLVAFLPILAPSLLPSLALVYLFGKQGVFKPLLGDIQIYGPIGILISYCFWLFPAILMLMMVSFRSVDQRLIEASLSLGKNIWKTHYHVTLPAIRYGLISASLVAFIYVLTDFGIPKVIGGSFNMMALDVYKQIIGQQNMSMGAVISILLLLPAVFVFIFDRIQSKRHARFQAFQTKPYVSASNKKLEVVLSIFCGLVSGSILLIVFTAVLASFIQSWPYDLSLTLAHYSFEYVDGGGWAAYFNSVRMALFSTVFGTALIFMVALLTERFKAHPLIKNYVQALVLLPLAVPGLVLGIAYILFFNQQSNPLNVLYGTMTILVISTIVHYYTVPHLTLTNAIKQIPLQLDQAAQTLGTSKWKTFWKVYLPMCFPALCDVSVYIFVNAMTTVSAAIFLYSPDTSLAAVAVLNMDDAGDTVAAVAMSILILTTSCVVKLIHWLFTRKIMARSQQWRESAH

SEQ ID NO: 45077 - protein, 649 aa, Acinetobacter baumannii
MNEIYPVPEEFKKTARTVEADYFKRYQHSIENPDEFWAEQAKIVDWIKPFTQVKNTSFDKDNFKIEWFADGELNVSANCLDRHLKEHPHKPAIIWEGDHPSRHKIVSYKELHDEVCRFANVLKKYGIGKGDRVVLYMPMVTEAAIAMLACARIGAVHCVVFGGFSPDSLASRIEDSQAKLVITADSSLRAGKLLPLKENVDLALALPGTECVENVIVVYRNANPIEMKPGRDLWYHLIIMEVDANCPPEPMKAEDPLFILYTSGSTGKPKGVLHTTGGYLVYVASTFKEVFDLKQDDVYWCTADVGWITGHSYLIYGPLANGTTTLMFEGVPQYPTWARLGHVVDKHKVSILYTAPTAIRAMMREGDSYVRESNRSSLRLLGSVGEPINPEAWNWYYNVVGEGRCPIVDTWWQTETGGILIAPLPGATALKPGSATRPLFGIQPAIVDGEGNELEGAAEGNLVIKDSWPGQMRTIWGDPDRFIEAYFSTFKNTYFTGDGARRDEDGYYWITGRVDDVLNVSGHRLGTAEIESALVSHESVAEAAVVGMPHDIKGQGICTFVTLQAGVPESEELRKELISWVRKVLGPVASPDALHWAPALPKTRSGKIMRRILRKIAANELDSLGDTSTLAEPAVVDQLIATVYPDRQK

SEQ ID NO: 45078 - protein, 416 aa, Acinetobacter baumannii
MAPIDILFLFGFLGIWIPQAFWAWLSYQAWKYSKTAEKELQNLPIPERWPVLSVLIPAYNEGVVIEDTLHAIAQQDYPAKSYEVLLINDGSKDNTLEIAENLAKIYPCIKIVNVPKGMGGKGKSRTLNNGLPHAKGELIVVYDADSTPEPDCVRLLAQTLLADKKLVAVNGKVRTRNWQDSILTRFIAIEFIFFQWIFQGGRWQRFELSTLMGTNYVIWRDALETLGGFDEKSLVDDTEMSFRIFIGQKRIKWVPYAIGWQQDPPSLSVFVKQRSRWTQGNFYVTRKYLPVALRTPFPIGIEILNNIMCYILFVPALFWSHITLTLGLLDIAGISVPGPFTLLWGLSFCLYVAQMWFTLSLEKVKPELYFYSVLSYVSYSQIFLFIVFKAAFDMLKNKIQGNSLQWYKTERSKEKK

SEQ ID NO: 45079 - protein, 154 aa, Acinetobacter baumannii
MTKKYARFLPTTESFTLEDFPYYWITQVHAQYVQNIDNALKKYGLDNSRRRIMLALSSKPHASVSELSDMIISKMSTTTKIVYRLKDEGLVETYSCQSDGRITRVYLTERGTEMINKINDLTSVVLEQSFEGITPLQLEKMMESLKLLLKNLSR

SEQ ID NO: 45080 - protein, 342 aa, Acinetobacter baumannii
MSMHSDQINPDSNENQDPNNLIDQFFSSKGVTIPSDFKSGFVAIVGRPNVGKSTLMNHLLGQKLSITSRKPQTTRHKIIGIDSREKMQAVYVDTPGMHKKEVRAINKMMNRAAHSALRDVNLVLFVIDAQKWTQNDDLVLEKLKNADMPVILVINKADTFGDKREILPLIQERAKLMNFAEIVPVSALRGANLEHLSETIEKYLPYQPPLYSIDQITDRSERFLASEIIREKIMRQLGEELPYDLTVQIESFKTEEATVNEKTGRLKPACTYIDATIFVDRPGQKAIVIGEKGAKLKTIGMDARKDMEKMFEQKIMLTLWVKVKGGWSDDERALKSLGYSDI

SEQ ID NO: 45081 - protein, 256 aa, Acinetobacter baumannii
MIHVKNINKSYGNKPILTDVNVEFPTGQVTSLIGPNGAGKSTLLMMMARLIEPDKGEIFLNHQNIADIKTAVYAKHVATLRQAPGFNLRLTVEELVSFGRFPYSRGVLTEQDHQVVDEAIEFLSLEPLRKSYIDEISGGQRQMAFLAMTIAQQTDVLLLDEPLNNLDMKHAVQIMRALRRLCDEQGRTVILVIHDINFATNYSDHIVALKNGKLHFSGLTEQVITEAQLNDLYELDFEITYSERGCMCNYFNSSGA

SEQ ID NO: 45082 - protein, 356 aa, Acinetobacter baumannii
MRQATVYIDRQALQYNLNRVKQLAANSKIVSMVKANAYGHGVKDCLAALNASDAFGVACLQEGLEIRELGFEQPVTLIEGVFSEDEMPVAIEQKFECVIHHQQQFEWLIKHKQAYIAQGLKVWVKLNSGMNRLGFKDPEIIEVIKTLKSEGFTCVLAMHFANADVDHPLNEQQKQQFLHIKETCDPILASCCNSAAIFKWPELNFDYVRPGIMLYGASPFADKTVHDLDLKPVMTFTAEIIALNHIEAGEHVGYGSTFCAQQAMDIAIVSIGYGDGYPRAYVKQNFVAIDGKLCPVVGRVSMDMIAIDVTNTQVKLGTQVELWGNHRLVDDVAEANGTIGYELLCRLSSRPVRQGT

SEQ ID NO: 45083 - protein, 51 aa, Acinetobacter baumannii
MSEQTAQRQYSIGWIMLLALLTALGPLSIDMYLPALPQMAHDFGVSFGICQ

SEQ ID NO: 45084 - protein, 489 aa, Acinetobacter baumannii
MNNTEAIIKSSYDAKLTNQDLAPLKKQTWGAYNIFAFWMSDVHSVGGYVMAGSLFALGLNSWQVLLSLLIGIAIVQFFTNLIAKSSQQTGTPYPVICRATFGVLGANIPAVIRGLIAVAWYGIQTYLASSAFLLVILKFFPDWSAYADVSTYGFLGLSYLGWVGFMLLWLLQAIVFWSGMDSIRKFIDWAGPAVYVVMFAMAVWLIWKAGWQNIDLNLSGVQYDGFAVVPVMIGAIALVVSYFSGPMLNFGDFSRYGKSFNAIKMGNFLGLPINFLGFSLLTVVCIAATLPVYGKLITDPVEMVGKLDNTFVVILGSLTLMIATIGINIVANFVSPAFDFSNVSPSKISWRMGGMIAAVGSIFITPWNLFNNPQVIHYTIDILGAFIGPLFGVLLADFYLVKKQKIVVDDLYTLDTQGSYWYKNGYNHSAFYALIPASLIPILCVLLPQLSGLANFTWFIGMGFGFVIYRFLNQPLAHAKSAMTKVKVQ

SEQ ID NO: 45085 - protein, 419 aa, Acinetobacter baumannii
MTIFAAIWSHALKFVFYYPLFMSYLWMIGAIIFYWKERKAPPYDQPAPLESYPKVAVLIPCFNEGDNAEETITHALKLDYPHFEVIAINDGSSDNTGEVLDRLAEQHEKLRVVHLAQNQGKAMGLQAGSLMTDAEFLIGIDGDALLDPHAAKWMVRHFLQNPTVAAVTGNPRIRTRSTLLGRIQVGEFSSIVGMIKRAQRTFGRLFTVSGVITAFRKSAVHQVDYWSPNMLTEDIDITWKLQRAGWDIRFEPNALVWILMPETLNGLWKQRLRWAMGGAQVLIKNIDVFTKPKLNFLWPLMFELCLTLVWSYLMLAMALLWLVHFILPVPALAVVSSPFLPYGSGILLGATCLIQFALSKWMDSRYEPHLGKNYFWMIWYPLVFWLITISATIVAFPKVLRRGDEKRARWVSPDRGIRG

SEQ ID NO: 45086 - protein, 628 aa, Acinetobacter baumannii
MSDMHSPTSQVAALISRGKEQGYLTYAEVNDHLPDSITESEQIEDIIQMLQDVGIPVHERAPESDDTMFGESADATDEVAEEEAAAVLASVENEPGRTTDPVRMYMREMGTVELLTREGEISIAKRIEEGIRDVLNSIAYWPNAVEVVLKEYNDFLTGERRLADILSGYLDPETDEDIPEVLEDVEELEEEDESSTKSTKEVKLDDDDEEEESEGDDDSEGDSGPDPEVAKVRFAELEAAWAQTKAVIEKHGRNSPEANEALESLATVFMMFKFTPRLFDIISEMIRGTHEQIRANEREIMRYAVRRGRMDRNQFRTSFPKQESNPAWLDEQIAKAPAEIKAHLEKVRPDVLAFQQKIADIEKELGLNVSEIKDISKRMAIGEAKARRAKKEMVEANLRLVISIAKKYTNRGLQFLDLIQEGNIGLMKAVDKFEYRRGYKFSTYATWWIRQAITRSIADQARTIRIPVHMIETINKINRVSRQLLQEMGREPTPEELGERLEMDEVKVRKVLKIAKEPISMETPIGDDEDSHLGDFIEDQNITSPIDAATSEGLKEATREVLENLTEREAKVLKMRFGIDMPTDHTLEEVGKQFDVTRERIRQIEAKALRKLRHPSRSEHLRSFLEND

SEQ ID NO: 45087 - protein, 193 aa, Acinetobacter baumannii
MNDRTARQKILDAAATLFYNDGITATGINTVTAKADVAKMSLYNNFSSKGELVDAYIAARHQEWLDLYQKRLEKTKTAKEAILAVFDAYQDHAEFAYEKGFRGCGLLNAAAEFPANSSGRNAVRQHKEQVEAIVAEHLNRLLKDSQRVSYIASQLSFLLEGSMARAGLEGSSRQLQLARQMAEDVLDRECQHD

SEQ ID NO: 45088 - protein, 233 aa, Acinetobacter baumannii
MNRKLISTIVLISVFGVTACSKASNEQAKVDTTEKSSSQNVKTELSASDKAILDRYETITNEVVTAGEDEKIKQTLAPLIPEIKKVTAKKQREMALMNIYMLSGMYKEAYELNEQQIKEKPLPQRIMFRCTLLEKLNEAKVKIQQCHEASAQLIQTELSKSSSKNDPQYRDAEFVYLTEMYKAGHTDYKAKIQKFIDETKDVASKDKYKSLYDADIESFYGTDSPNYVPESLK

SEQ ID NO: 45089 - protein, 310 aa, Acinetobacter baumannii
MTVKNSPAELSSALANQRNDVPLIRYSGRFAPSPTGPLHFGSLITAVASYCDARAHQGRWLVRVEDTDIPRIYPGSEDHILASLEAFQFDPDAEIIFQKDRLDIYESVLDQLKKEGLVYACQCTRKMLGSNAIYAGTCRDLHLDFQHQAIRVKVQDQPICFDDRLQGLHCSNLEHDLGDFVLKRRDGIINYQLAVVVDDYLQGITHVVRGADLLDNTERQIWLGQLLGYPKLSYMHLPLAMNDQGQKLSKQNLAHALDLTKAPELLQQAIQALGQPQVDLDRPEVMLKQAVAQWNVDLIPHGQQLCGTYL

SEQ ID NO: 45090 - protein, 472 aa, Acinetobacter baumannii
MAGKTLYDKLWDDHVVTQRDDGSCLLYIDRHLLHEVTSPQAFEGLQLAGRQPWRLSANVATPDHNVPTSKKERDQGIAGIEDDTSRIQVQTLDDNCKAFNIVEFGINDIRQGIVHVVGPEQGLTLPGMTVVCGDSHTATHGAFGCLAHGIGTSEVEHVLATQCLVQKKSKNMLVRVDGVLGKGVTPKDVVLAIIGKIGTAGGTGYAIEFGGQVFRDMSIEGRMTVCNMAIEAGARVGMVAVDDKTIEYVKGRSYAPKGEQWEQAVAYWNTLHSDVDAVFDAVVELNGAEIEPQVSWGTSPEMVIPVSKAVPTLEQAKDDVQRNDWTRAYQYMGLNAGQALADIQLDRVFIGSCTNSRIEDIRAAAEVVKGRKVAPSIKQAMIVPGSGLVKQQAEKEGLDKIFLEAGFEWREPGCSMCLAMNADKLQPGEHCASTSNRNFEGRQGNGGRTHLVSPAMAAAAAIAGHFVDVRSF

SEQ ID NO: 45091 - protein, 262 aa, Acinetobacter baumannii
MTKQFAVIGNPIEQSRSPELHHAFAEKTGVDLNYQKRLAPLDGFESSMRSFFAKGGSGMNVTVPFKEQAFALCDVLTERAQIAKAVNTLWMENGKLHGDNTDGQGLVAAIQALEWNLENTTILILGAGGATRGVIYPLVQAGAKKIVIANRTLARAEQLVDDLKTAVPQAQLQAISLNDLEGDFDIVINATSASLSGDALQLPEKLKFKYAYEMAYGKPSSFLDQAKQRNVPYAEGFGMLVGQAIEAFSIWNNVRPQLKDFL

SEQ ID NO: 45092 - protein, 445 aa, Acinetobacter baumannii
MSYFGTDGIRGKFGQMPITPEFALKLGFAAGKVLKRTSPKNKPLVVLGKDTRLSGYILESALQAGLNAAGVYVHLLGPLPTPAIAHLTRALHAHAGIVISASHNPYFDNGIKFFSSEGKKLPDSLQEEINKELEKDLFIEDTANLGKSVRVTDANGRYIEFCKSTFPYHFDLNNLKIVVDCAHGAAYSVGPSVFRELGAKVVALYNEPDGLNINENCGSTHPESLQKAVVEHGADLGIAFDGDADRVVMVDKFGSLIDGDHILYILATQAKNKPAGVVGTVMSNMALEVALEKANVGFVRAKVGDRYVLQALEENGWVTGGEPSGHILTLDKSTTGDAIIAALQVLTVMVEQNKALHELVHDFKLYPQVLVNVRLEQMLDPYSIPALVAEFNKAEEQLKGRGRILIRKSGTEPVIRVMVEGDNEQEVKTLAEHLANAVRSQAQVA

SEQ ID NO: 45093 - protein, 322 aa, Acinetobacter baumannii
MSYLFLSCTEKKLNQWFDYYVGIGSSAAVAITFILINVLENGQDNVLFHAAMMYAIVIIYGAVGMRFYTAIIAGWVGGLIGILVSTYLNGDIDWTFLNRTYTFSSFLGMTLAYATDRQHRENYLQNCMIELNRIELMQQAQQLSLLSQQDALTGLANRRYLDETLDNEWRRALRHETPLTIMMVDIDFFKPYNDSLGHLKGDQCLKDIATAISSIAARSGDLVARYGGEEFLLLFPMTNAQQAKIQAERLMNAIKKIAIVHPCSSVSPYVTISVGVATTIPRLNDSISAFVSRADHALYQAKTNGRNQYQIALNEEQIVDLT

SEQ ID NO: 45094 - protein, 904 aa, Acinetobacter baumannii
MSVSEIRPIAIEDELKHSYLDYAMSVIVSRALPDVRDGLKPVHRRVLYAMHELGNDYNKAYKKSARVVGDVIGKYHPHGDLAVYETIVRMAQDFSLRYLLVDGQGNFGSIDGDSAAAMRYTEVRMTKLAHELLADLEKDTVDWEDNYDGSERIPEVLPTRVPNLLINGAAGIAVGMATNMAPHNMTEVVNACLAYADNPNISIEGLMEYITGPDFPTGGIIYGKSGIVDAYRTGKGRLHIRGKYHFEEDEKTGRTTIVFTEIPYQVNKARVIERIAELVKEKKLEGISELRDESDKEGMRIAIDLKRGENAEVVVNNLFLNTQLENSFSINMVCLDNGQPKLMNLKDIIAAFIRHRQEVVTRRTMFELRKARERGHILEGLTVALANIDEIIETIKTSANPAEARERLLAGEWAGGGVVALLEKAGAISVRPDEIEGEDPNRPFGLSDSIYRLSPTQVGAILELRLHRLTGLEQDKLHAEYTEILGQIAELTAILNDFNLLMGVIREELAQVLQQYGDARRTEIVESRVDFCREDLIPEEQVVLTVSQTGYAKTQPLSDYQAQRRGGRGKSATSMKDDDFIQHLIVASNHATVLCFTNVGKVYRLKVFEVPQASRGAKGRPIVNLLPLDATETVTAILPLTEFPENHYVFMATASGTVKRVELEQFANIRSNGLRAIELNEEDTLIGVAITDGNQQIMLFSNEGKAIRFAETDVRAMGRTAKGVRGMRVSFASSTLSEEDADVENDDSDDNDDSADSSLVSRIVSLVVVPETGEVLCASANGYGKRTPVNDFPTKKRGGKGVIAIKTSERNGELVGAVSIDETKELLLISDGGTLVRTRAAEVAMTGRNAQGVRLIRLSEEETLVGVVSIEAVEDEEELLEGEVDTTETDSEEAVSNNEDTSEE

SEQ ID NO: 45095 - protein, 556 aa, Acinetobacter baumannii
MSKSIEQFPKDLSSPLIQLKSSVEKNSKLHIKELFALEPERFQNYSVKFDQLFFDYSKQRITKNILEQLVALANNKQLTQWINRLFSQDKINCTEQREAMHWALRLPSEYSKFPELTKQVHTQLQRMYVLVEKIHAGQYRGATGEVIQDVVNIGVGGSDLGPQMVTHALCDFKVKTAKPLNVHFVSTMDGSQLSDLLHQLRPETTLFIISSKSFGTIDTLSNAQTVRQWLEKALGKHDRVVKSHFIGVSTKAEKMTEWGIAPENQLLLWDWVGGRYSLWSCIGFPIALTIGIDGFQQLLAGAHAVDEHFQNTNFEQNIPVLMALLGIWNNNFLNIQTHAVLPYDGRLKYFAAYLQQLEMESNGKSVQRDGQKVELDTCPIVWGEVGPNAQHAFYQLLHQGTQAVSCDFIAPIQRYNADHFTYVENAEALIEQHHLALSNCLAQSRLLAFGNEALDSAELKNLPIYKQYEGNQPSSTLLLKELNPYSLGMLIALYEHKVFVQSVIWNINPFDQWGVEKGKQIADQLLPILNGAQNDLSTLDASTRGLIKILLGKVDG

SEQ ID NO: 45096 - protein, 238 aa, Acinetobacter baumannii
MRHLHHQTSQTKLWAVIPAAGSGSRFSKTELKQYQYIQDATVIEHTVKRLSQLPLTGYVLAIGKQDTFASTLSFQDKHKAHFCNGGVERVHSVLNALNYLSQIADEDDWVLVHDAARPCVTFECLNTLVKNAIETNQSAILAIPVRDTLKQVNQEQQIDKTVSRELLWQAQTPQIAKIGILKKAIETALKNNLTITDEASALESIGESVLVVMGRSDNIKITYPDDLELARLILQSQN

SEQ ID NO: 45097 - protein, 417 aa, Acinetobacter baumannii
MFANISISEFDPELAQAIASEDERQEAHIELIASENYCSPAVMEAQGSKLTNKYAEGYPGKRYYGGCEFVDVIEQMAIDRAKELFGADYANVQPHAGSQANSAVYLALLNPGDTVLGMSLAHGGHLTHGAKVSFSGKTYNAVQYGLNAETGEIDYEEVERLALEHKPRMIVAGFSAYSRVVDWQRFRDIADKVGAYLFVDMAHVAGLVAAGVYPNPVQIADVTTTTTHKTLRGPRSGLILAKANEEIEKKLQSAVFPGNQGGPLMHAIAAKAICFKEAMSDDFKAYQQQVVKNAQAMAEVFIARGYDVVSGGTDNHLFLLSLIKQDVTGKDADAWLGAAHITVNKNSVPNDPRSPFVTSGIRIGTPAVTTRGFGEAEVRELAGWIADVIDSKGDEKVIADVKAKVEAVCAKFPVYAK

SEQ ID NO: 45098 - protein, 714 aa, Acinetobacter baumannii
MNTILLIPTGEGVGLTSACLGMIYALDCNGIKAGFLKPFSQVDQENLDRTTSLFGHLFQSKTVQSISHEKLTQRIAAGEVDELLEEAVSLHRSIAADNNVIIVEGLLPNGQDHFASELNASLAQALDAEVVLVSTADIQNPRKTAEKVEAHLRQFGGATSNRTAGVLFMRTRGLSEETAQIPVAFDPSLRPTEDIAKFTAELQKYNRYFGSSDLPIIGLVPFSNTLSVPRTLDIASVIDGQWINQGEAKTRRILHSSLIASSIEYELNKFIAGELIISASERTDVLLASSLATSNGIPLAGLVLTEREAPAPKLLEFCQSAIKQGLPILHTHLNTLETAQRLSDFGNEIPTDDTERAEQVTRFVSSHIDVEWLKQHSNNGAIPRLSPSAFRHELVQKSIAAKKRIVLPEGDEPRTIEAATICQARGIAHCILLAKPEAVHDVAKARGIELPAGLEIIDPDQIRDQYIAPMVELRKGKLNDLQAKEQLQDTVVLGTMMLALDHVDGLVSGAVHTTANTVRPAFQLIKTAPAYSLVSSIFFMLLPDEVYVYGDCAINPDPTAEQLAEIAIQSADSAKAFGIDPRIAMISYSTGTSGTGADVEKVQQATQIAQQRRPDLLIDGPLQYDAASVESVGRQKAPDSRVAGRANVFIFPDLNTGNTTYKAVQRAANVVSVGPMLQGLNKPVNDLSRGALVDDIVFTIALTAIQAEQQAAAK

SEQ ID NO: 45099 - protein, 379 aa, Acinetobacter baumannii
MWSWWLSKIKKSISLAEAQQTKLFSTAYRNQNSSYFFTKIDRWQHLLELIIASNVLALVLALAEAQSWHALNGSRLLQYIVFINWVILSFFALVEHFQDFFSQLQQKYALVIGFVMLQAIVVVTTIISNFFQFGVLKKTSVIAQDWSIYFTNVPLYLSYGILLGAFCLRYLYVREQWLHQQYAELNARIQAMQARIHPHFLFNSLNNVVSLITIDPDKAESMLISLSRLFRASFQELKLVSLHEEIELSKQYLMIEQIRLGERLKVEWKVEIEPLQLKQVTIPLLTLQPLLENSIFHGVEPMMGKATIGVLVEILQNQVSIVITNPYTHDTINSRKGHGIALENVKQRLKAYYGNSVRFQVYKGEALYTTIMSYQYQSK

SEQ ID NO: 45100 - protein, 339 aa, Acinetobacter baumannii
MKLLASLLTLLILCGCSSSEQNRKTQENSTSHSICVFDSTNTKVCVAKPAQRIVSLFESGLDGLYMLGQGDKVIGIPAEVYIQPLLFNAYSKIDKRIANKQLAAPSQGANATNIESLVLLKPDLVIVGSGQTQTIELLRQFGIAVYVMESGTYKQVKEELSEIAILSGAQKRAQEILNFSDEIVAEVAAKTARQPNKQSIYYAWSGGRIFSTSGRESITNDFIELAGAYNIVQTNANQPNVNPETLIEWNPDNIVLWNTNPKLIYERKELQGLSAVQNRKVFNLSPAFIYNPHTIKIIITAIYLNHSIYPEQSDLPVSALQQRILTKLYGEQLAKVLMQ

SEQ ID NO: 45101 - protein, 168 aa, Acinetobacter baumannii
MALLIEDKKQIVAEVSEVASKAFAAVLADYQGLSVEQLTTLRVEARKLGVTTRIVRNTLAKRAFQGTQFDILNDNLVGPTILGFSTSEDDMGAAARLFEEFAKTNKAFELKAAAFDGKVYQGADVSVIANLPNQEKALTMLASVLQAPISKLGRLITALKEKNESEAA

SEQ ID NO: 45102 - protein, 246 aa, Acinetobacter baumannii
MQQKHPGRTLVLWIIAAHLFMGMVAYEWLPVSFRGSWIFILLLLISGAFLEVGLSLIVGLVAFIGVAVYFLLDLGAQTHIERQLLLLFIIPLIPLFLSAVRHNIEINVQKYRDIQSYDRNYRRDIFPLSALKYFQRSFFKLLDHHNVQDYEVFEIRILNRSLIKEMLGDDVWKTTQNEMIKILSQHEPNEIVFQFADDDLENIYSIMIRQQKTEEDPVFLKKLKEITTLRLEVEYKIVPLPPEEMS

SEQ ID NO: 45103 - protein, 470 aa, Acinetobacter baumannii
MSQNSTLQRGLNTRHIRFLALGSAIGTGLFYGSATAIKMAGPSVLLAYIVAGIAIYIVMRALGEMAVHNPVSGSFSHYASQYIGPLAGFTTGWTYVFEMVIVAIADVTAFGIYMGFWYPDVPRWIWILSLIMFLGAINLIHVKVFGELEFWLSIVKVSAIVAMILGGLGLMFYGFHADHSSVVPGIQNLWIYEGFMPHGIAGLVACLSVVVFAFGGIEIIGITAGESQDPKTTLPKAINAVPVRILLFYVLTIFVLMSIFPWNQIGSQGSPFVQIFENLGIKSAANILNIVVVTAAISAINSDVFGAGRMLYGMANRGQAPRIFQKLSRNGVPWMTVVVMAGVLLIGVVLNYLIPENVFVIIASIATFATVWVWLMILLSQVAMRRKLSTAEIKALDFPVFGWPYAPAFAIGFMVFILVMMGYFPDSRPAIYVGITWLALLTIAYRIWVKPEQSLGKESEPVQQNIEMES

SEQ ID NO: 45104 - protein, 275 aa, Acinetobacter baumannii
MDFDFNLILVPVTLILFAVWLLDKLVFKQRANKGRENENFVITWAYDFWPVLAVVLVLRSFLYEPFNIPSDSMVPTLETGDFILVNKFDYGVRLPIVNKKVIDIGEPKRGDVIVFRYPPQPTISYIKRVIGLPGDHIVYDHGQLIINGQKIPKVPTQFSREKDALDTPTSIYHKETIGDHTFTMRELEGVNVARQAPFINYVDNGKYANQDGLYWEVTVPKGHYFAMGDNRDQSADSRFWGFVPEENLTGRAFYVWMHKEPGFHLPSFNRNGKID

SEQ ID NO: 45105 - protein, 506 aa, Acinetobacter baumannii
MLDQSKEIKVCTYLGLTTLILSVALVGCGGGSSSGGSSNTPKPSEPTPEVMTDITLKTPVEMRNVQLKVYDNTDNSILIDTQVASLTSYDIKLPSTKLNRLYRVEVTTQGSSQVFDPTKSEYQNISGVYHAFITPSSISNKTQLISPSSEAIYQRAVIRSGQLPNETIIPTRIEQLHVDLASQDVYRSLLNAFKDTNIPSLSPASTLTILNLLKYSTTKPSTYVDSYLSFGYLQYWSSIHNTNSPYQDLTQSLATDLKDGYLDGKKLIGDKSSFTPIFTSAPDNIDPAKNTLLDIAANQKVTRDYFATNLRAATFKLADLQDQSHLDPIGYDLLDKKQYSGIIPAGNTSEFFRIDGAGDYRRAVGFSGITTTCNGSAYPCKQGLTSINISDPKLPATDYLVGHYEDSTTGCQLNFRANGQIELIKGSQSYRSALSADSTDNLLQTDAASYSYLLNSSSSEPNNSTQQYNFIQLHIKANKIVSAQAGLDSRKAPDVLQTTQLECSFS

SEQ ID NO: 45106 - protein, 373 aa, Acinetobacter baumannii
MPLSRVEELVADIRAGKMVILMDDEDRENEGDLVIAATHVRPEDINFMITHARGLVCLTLSRERCKQLNLPLMVDQNGAQHGTNFTLSIEAAEGITTGISAAERAHTIQAAVAAHAKPTDIVQPGHIFPLMAQPGGVLHRAGHTEAGCDLARLAGLEPASVICEIIKEDGTMARRADLEIFAEKHGLKIGTIADLIHYRMTNEQTVERLDQRTIQTEYGSFELYRYREIGNPDIHLALVKGEPKEGVTTVRVHGFSPVRDLLKLNKADGEPAWNLDRALQTIAASDRGVLVWIGQDHLQDLGPALDDLTKPKPVKSNAALSHQYQTIGVGAQILRDLGVEKMKLLSSPLRFNALSGFNLEVVEYVTADQITTK

SEQ ID NO: 45107 - protein, 383 aa, Acinetobacter baumannii
MIISSGNDYRAAAQRRLPPFLFHYIDGGAYAEYTLKRNVQDLSEIALRQRVLNDMSALSLETKLFNETLSMPVALAPVGLTGMYARRGEVQAAMAADKKGIPFTLSTVSVCPIEEVAPAINRPMWFQLYVLRDRGFMRNALERAKAAGCSTLVFTVDMPVPGARYRDAHSGMSGPNAAMRRYMQSVFHPHWSWNVGLMGRPHDLGNISKYLGKPTGLEDYIGWLGSNFDPSISWKDLEWIREFWDGPMVIKGILDPEDAKDAVRFGADGIVVSNHGGRQLDGVMSSARALPAIADAVKGDLAILADSGIRNGLDVVRMLALGADTVLLGRAFVYALAAAGGQGVSNLLDLIDKEMRVAMTLTGAKSISDINADCLVQAIKQGL

SEQ ID NO: 45108 - protein, 304 aa, Acinetobacter baumannii
MPEHPEWLNKQDLLSFEALFQFCHFMVQQGIQSIRITGGEPLMRQGIVHFIRDLQSLKSLGLKRISMTTNGHYLAKHAKQLKDAGLDDLNISLDSLDPVQFKELTKKKLEPVLEGIQAAKEVGLPFKINCVLMKDRNDDQILPMVKWSIAHHIPLRFIEFMPLDGDALWSNKDVVSEAEILQVLQPYYSVQVIEQQHEPARQYLINGSYHLGIISTITHSFCHQCDRIRLTAKGELYNCLFAPEGLNIKPQLQTLVSKQHTPEYGMYIQKLKNLVHPYIWHKAKGFHALQHQQTRKISMHMLGG

SEQ ID NO: 45109 - protein, 231 aa, Acinetobacter baumannii
MAKLTKRQKAIAAAVEANKVYTLEEAVQVLNSLPAAKFKESLDISVNLGVDPRKSDQVVRGATTLPAGTGKTVRVAVFAQGAQAEAAKEAGADVVGFDDLAESIQGGNLDFDVVIAAPDAMRVVGKLGTILGPRGLMPNPKVGTVTPDVAGAVKNAKSGQARYRVDKAGIIHAAIGQVGFDAAAIRQNVETLVADLKKLKPATSKGVYIKKITLSSTMGPGLTVDVNNVSN

SEQ ID NO: 45110 - protein, 264 aa, Acinetobacter baumannii
MGRLAVNLSMIFTEVPLIERFALAHAEGFEHVEIQFPYELAISDIQDQLERYNLNLCLINVPAGDLMQGGNGLAGIPGQEAAFREALQLAIRYATALKVPRVNILAGKQPQDSDLLPCLKTLASNLKLACDLLTEHDIEPVFEMINGTDMPRFLVQNIAQAQEMLEAVNHPALKMQYDCYHMAMMGEDVLEGLQENIHQIGHIQFADCPGRHEPDTAQIPYEQIFSWIKQSAYEGYIAAEYKPKNGSNQSFTWKKKYFSDDVNI

SEQ ID NO: 45111 - protein, 1277 aa, Acinetobacter baumannii
MFIVAGAAAHSSFKKAQLLTRLSSISSVQSFDSQWVYLFDQALNEQQHQSALQLLNDGESFELRQPASDEIQILVTPRVGTISPWSSKATDIFKNCNTPVHRLERGLLFTLKGVSEISNEVKQVLHDRMTETVFAQIEDAKALFSETAPKPLNSIDILGQGKEALVKANNEFGFALSEQEIDYLTEAFTRLGRNPNDIELMMFAQANSEHCRHKIFGSEWTIDGEKQPLSLFQMIKNTYKESPTDVLSAYKDNASVIVGYDTMRFYPKADENGHFVYKYKSQAAHILMKVETHNHPTAISPFAGAATGSGGEIRDEGATGRGGKPKAGLTGFTVSNLNIPGFEQPWEENYGKPSRMASPLQIMIEGPLGGAAFNNEFGRPALNGYFRTFEQNVNGEVKGFHKPIMIAGGYGNIRPDHVEKDAIQPGDLLIVLGGPAMLIGLGGGAASSVDSGTMGESLDFASVQRENPEMERRCQEVIDTCWRLEDFNPIVSIHDVGAGGLSNAMPELVNDHELGAVLNLRKIPSLEPGMSPMEIWSNEAQERYVLAIRPESLEQFESICARERCPFAVLGEATEARHLTVEDPLFQNNAVDIPMQVMLGGTPRMQRSYETIERKGNEFDASKVDLKDAIFRVLKNPTVASKSFLITIGDRSITGMVARDQMVGRWQIPVADAAVTTTSLQGFTGEAMAMGERPPVALLNPAASARLAVAEAITNIACANIEQISDIKLSANWMAAAGQKGEDQALFEGVKAIGMEMCPALGIAIPVGKDSLSMRTTWNDNGEDKAVTSPMTGVITAFAPVADVRKTLTPELKNLEDSVLVRIDLSKGQFRLGGSILAQVYKAIGSVTPDVDSFDDFKAFFALIQDWNNRGVIQAYHDIGDGGLLATVAEMMFASRLGVALEDQTTAGLFAEEIGAVVQIKAADWEALQAEVAASSLKDAIAVVGRVNNTDQLSVNGLTLERAELQQAWSEVSHQIQRLRDNVETADQEFALITDKSHQGLIAKPTFDLNEPIEAPFINSRRPNMAILREQGVNGHIEMAAAFDKVGFNTIDVHMSDLLAGRVSLSDFEGLVTCGGFSYGDVMGAGGGWAKSVLFNAKLRDQFEQFFHREGTFSLGICNGCQMLSQLAPLIPGAEHWPRFHRNMSEVFEARSVNVRVEKSVSVLLDGMEGSILPIAVAHGEGRAVASEADIASLNAANQVALRYVDSHGNPTQHYPLNPNGSPEAITGVTSKDGRATIMMPHPERTFRAIQHSWKPEEWTEDGAWLRMFRNARKFIG

SEQ ID NO: 45112 - protein, 519 aa, Acinetobacter baumannii
MRAYFEKLLDSSQQQKQLPLIFPLLIALFSGAVFSFALAPYYWWWLAILSPALLYATLHNRSAKQAFAIGWSYGFGLWFVGAFWLYTSIHVYGDTNAFLSVCMIAVMALVMGLFTAFQTWIYRRFFPETPLTFAPLWIIFEWAKTWVFTGFPWLFVGYAFTERLLDGYAPLFGIYAISFVVIVLACALVEILRKRIFWIIPAALLVLGAWGASYIQFVQPKAAKPLSVSLIQGNIPQDLKWLTEYQVRTLEIYAGLTQSEWGRDLIVWPESSIPLFQTDIEPFLDAMDAQAKKNHTAWVTGIPYWDVAKSHQVGSPLYYNSIMASGSDSSGLYKKQRLVPFGEYIPLSGLLSWVLPAMQNDISMSGFTRGESDQKPLLIKGHALAAAICYEVAYPNLTRRNAEDSDFLVTVSNDAWFTGTAGPWQHLQMVQMRAKENGRWFIRATNTGVTAFIDQNGHITEQAPIDKEFVLRGDLPAMQGQTLYNRLGDYPILGFAILLLVLGWIYRPRKVDVSYKSRR

SEQ ID NO: 45113 - protein, 91 aa, Acinetobacter baumannii
MPNQVEDKKKILLRVRKIKGQTQAIEKALEDNVECGAILQQICSVRGAINGLMNEMLEVHLKDTLVSGETTEQQRKEELAEIAKILKSYLK

SEQ ID NO: 45114 - protein, 448 aa, Acinetobacter baumannii
MSSNINLDAKKATEIKLFSFSTPAMRAFHMTWLAFFVCFFAWFACAPLMPVIKGEFGLTKDQIANINIAAVAITILVRLAVGPLCDKYGPRITYTTLLLLGSIPVFGVAAANSYESFLFFRLLIGAIGASFVITQYHTSIMFAPNVVGTANAAAAGWGNAGGGATQALMPLLLGAIVMFGVEQTMGWRVALIVPGVMMVIVGVLYWKLTQDCPQGNFKEVRAQGIEVGSGKKGGMAILMQAARNYRVWILFLAYGACFGIEIFIHNVAAMYYVDQFKMDLKTAGLTAGIFGLLALFARALGGIISDKVALKKGLDGRTKVLVLMILGEGLFLILFSQMNVVALAIISMTVFALFTHMACGATYALVPFIDRNALGGVAGIIGAGGNVGAVAAGFLLKGVLDIQTCLFILGGLVMVAGCSVILIRFTTEHKEKEKVLFEQALLERNSAA

SEQ ID NO: 45115 - protein, 684 aa, Acinetobacter baumannii
MGHVDYDSTLIVGSFIAAGAICYIVISMEQLIFKQTYKKIEPFILLLNGLLLAAAISIVHIVGMHAYHLFEAASSNVPLITLAFGISAVLSSVAIWLTSRFTLPIFRLILSSVIMGIGISASYYVSMLGWNIDIYKKDYTSFLILFSVLIAMSGSGLAFLLAYKLKESERHRISLKLAFAVMMTLSIMGMHYTALISTNITDKFVSQYQAEHDLLLFTIILVTCLVLVASFIVAVLEQRLNQRNLELRKANKELANLSIQDNLTKLPNRLYLVDYAEVLLSDHRYKDQKIAFLYIDLDRFKSVNDAFGHHIGDQLLIQMANRLHWQLNEKCKLLRIGGDEFLLIAENTDTEEAMQLAEKVLHLIQDSYQISGKEINISASLGIALFPEHGQNVQDLLMNADAAMLMSKEQGRNTYTVFSYSTHQQETRSQSKLINDLYKAVEEKQFVLYYQPKFNTNLEICGVEALIRWNHPSLGMLTPHMFIGGAEKTGLIIPMGYWALEQACQQIQEWERSNTQFYPIAVNLSALRFENKKLFSTLEGLLKKYQIQPHHLIIEITESTAMRHIDLSIRACERLRDMGIRVAIDDFGTGHSSFLYLKDLPVDELKIDRGFIVDLKPGSKEEVILESIIHLAKKLGLTVTAEGVETQQQVEILTRLGCQQFQGYLLGMPVNVGQLIQSQGAHFV

SEQ ID NO: 45116 - protein, 611 aa, Acinetobacter baumannii
MGAINPKEDYSNIQNLTFDAVIVGGGGSGMRASYQLAQAGLKVAVLTKVFPTRSHTVAAQGGIGASLGNMQEDNWHFHFYDTVKGSDWLGDQDAIEFMCREAPKVVYELEHLGMPFDRNADGTIYQRPFGGHSANYGDKPVPRACAAADRTGHALLHTLYQSNVKMGTQFFVEWIALDLIRNEAGDVLGVTAIDQETGNIAVFQAKATLFATGGAGRVYRASTNAYINTGDGLGMAARAGIPLQDMEFWQFHPTGVAGAGVLLTEGCRGEGAILRNKDGEPFMERYAPTLKDLAPRDFVSRSMDQEIKEGRGCGPKGDYILLDMTHLGADTIMKRLPSVFEIGKKFANVDITKEPIPVVPTIHYQMGGIPTNMHGQVCLPEPGTDNYTKPVKGFYAIGECSCVSVHGANRLGTNSLLDLVVFGKAAGEHIIDYVTKHHGDEYAPLPTNVLEQTLARVRKLDESTSGENAQEVADAIRDIVQDHAGVFRTQALLDKGVKEILALEPRVRNIHLKDKSKVFNTARVEALEVENLYEVAKATLISAAARKECRGAHTVVDYELPADHPTYSYGRRDDEWMKHTLWYSSDNRLEYKPVRFKPLTVDPIPPAPRTF

SEQ ID NO: 45117 - protein, 109 aa, Acinetobacter baumannii
MNLSYLKTSLYTAATTAILLCSSQSQAQQYYKWMDQSGSTHYTTTPPPKGAKHLNKVSTYGSQPLLKNPTSNLEQPSQDKVVQEVTNVAVEKGAPAVPVPPAPSVSAPR

SEQ ID NO: 45118 - protein, 178 aa, Acinetobacter baumannii
MARRPKRYTEEDFDSLEGRASKTEQKKAVQRMAALGEQLAQLSIKQIQKLPVDERLIDALLEVQNISSFEARRRQFQRVGKLLRNEDETVILSYLTPQQGAKKQAQLMRWVDRMIEQGDPAINEFSKIYNASERHTLRQHVLRINRDKTQQVAEADLEATKMKFINYVQQVALLSDQG

SEQ ID NO: 45119 - protein, 205 aa, Acinetobacter baumannii
MEEHLLTQKLQQRLRFSTRIQEAQAAVLIAITNENNPKVLLTRRSIHMNNHAGEVSFPGGKRDPSDTSNIVVALREAQEETALNPFDVQLLGDLPMQRARSGLSVKPIVGLIPPEVTLIPQPTEIDRIFFVPLQQLIETRPTPYEVRYAHQSLYFPSLQIDNEIIWGLTARMLIALFKYGLGYQKEWPFLLNAPTFGMPKFSHKK

SEQ ID NO: 45120 - protein, 140 aa, Acinetobacter baumannii
MKATKLIRDKGLQYAKEIVDSAPDNATEWNEGYEFQCGQSVEISPADREKYFVDLVELKRLVESLKIINDLGGVEKLTPAFITTDKHVGYTHVRMVGNGRLSFLDDFCDFIPDGSISIKRVMTAIRDHESIYGGGESHAN

SEQ ID NO: 45121 - protein, 356 aa, Acinetobacter baumannii
MQAIEKRNSLFNSLTQAVFDKNMANFWLQKINPLWSVQHGLVQIVKKEFVAHDTVSLTLKCNRLVKMGAAGQHHPVIVEIAGRRYERTYSLTQIDAEHLRLTVKKVADGIVSNWFIAESKIGDVFELGQPYGDMQQNIQTPKLIMLAAGSGITPMLSLITAIKQSQQLEKTQVQLLYWVKQRSDAAFTEYFEQVAEQNPNFSYQVFYTQETPNDERLNAEHLALVDGIENSTVYACGPSGFVSTVEQLFEKAPTVLTEAFSLTNESSADDIGYVNVTLTQSNKVIAIPKGQSILVSLEHEGLKPTHGCRMGICNKCVCSKTQGSTRNLLNGSQNTEPSQLLKICVNSAQSDLVIDL

SEQ ID NO: 45122 - protein, 169 aa, Acinetobacter baumannii
MAWQNVKVVHVVAMDKNHCIGKGNALPWHISADLKHFKEITQGGVVIMGRKTLESMGRALPNRVNWVITRDINWHFDGVKIAYSIEDALNAALEDAKNTEKQALFIIGGGEIFKQTLSIADRLELTHVDLDVQGDAHYPTIPSEFHKTASEQQVDEKSGTSFEFATYKK

SEQ ID NO: 45123 - protein, 2265 aa, Acinetobacter baumannii
MNKVYKVIWNASIGAWVATSEIAKSKTKTKSKTLNVSAAVLSGVICFAPNAFAGTNTEGGIGQGTSISGTTSCREGSANTANQKDIAIGCGAQTQDRTGSNIANRNNPYNNSTGAYAGAMKQGGAISVGTGAVVEKGLGTAIGSYATTQGISGVAIGTGALSSGNTALAVGRQSAATADFSQAIGNVAAATGKGSLAIGHSATAEGYRSIAIGSPDIENADPVAGQVGAAYQPKMATKATGKDSIAFGGGAVATEENALAIGAFSESKGKKSVAIGTGAKAQKDNAVVIGDQAEASFEGGVAIGKGARSEAENSIALGKDSKASQATGESYLTKQSAPTGVLSIGDIGTERRIQNVADGAADSDAATVRQLKAARTHYVSINDNGQQGGNFENDGATGRNAIAVGVNASAAGREAMAIGGSAQAIGSGAIAMGSSSQTVGRGDVAIGRNASTQGAEGVNSNQSVAIGDQTKAIGDQSVAIGADVIAKGNSSVAIGGDDVDKIARDTELSNTYTEITGGTLQAGKYPTTEANHGSTAVGVQAVGTGAFSSAFGMTSKATGDASSAFGVMSNASGKGAAAFGAVAQATGDGASAMGINSLASGTNSTAIGSGNKPGEGAKATGNSSAAIGSGAQATGDNSAAIGKGAEATNENAAAVGGGAKATGKNAAAIGGGAIADQENAVAVGQGAQSLVEGGVALGARSKVEAKNSVALGQDAVATEATGTSFLTNRDASQSNGVISVGSAGKERRITNVEDGSADSDAVTVRQLKNVDSRVNQNTSNIGKNTQNITNLNQKLDDTKTNLGNQITDTNKNLNDAKKDLGIQITDTNTKLNTTKDQLTTQINDTKTELNNTIGNTKTELNTKIDNTKTELENKGLNFAGNSGADVHRKLGDKLNIVGGAAASTPAAKTSGENIITRTTQDGIQIELLKDSKFDSVTTGNTTLNTNGLTIKEGPSITKQGINAGSKQITNVADGINAKDAVNVDQLTKVKENLNGRITDTNNQLNDAKKDLGNQIADTNKNLNDAKKDLGDQITDTNTKLNNTKDQLTTQINDTKTELNNTIGNTKTELENKGLNFAGNSGSDVHRKLGDKLNIVGGAAASTPTAKTSGENVITRTTKDGIQIELLKDSKFDSVTTGNTTLNTNGLTIKEGPSITKDGINAGGKKITNVADGINAKDAVNKSQLDNLAAKQNATDDAAVKYDDAKTKDKVTLKGKDGTVLDNVKAGHISSTSKEAVNGSQIHNISNSIKNSIGGNTVVNPDGSLTTNNIGGTGKNNINDAISEVKNTAKKAKTTVTEGDNIVVKETVNKDGSTNYEVSTKKDLTLNSVTTGDSVLNNNGLTIKEGPSITKEGINAGGKKITNVADGINAKDAVNVDQLTKVKDNLNGRITDTNNQLNDAKKDLGNQIADTNKNLNDAKKDLGDQIADTNTKLNNTKDQLTTQINDTKTELNNTIGNTKTELNTKIDSTKTELENKGLNFAGNSGADVHRKLGEKLNIVGGAAASTPVAKTSGENVITRTTKDGIQIELLKDSKFDSVTTGNTTLNTNGLTIKEGPSITKDGINAGGKKITNVADGINAKDAVNKSQLDNLAAKQNATDDAAVKYDDAKTKDKVTLKGKDGTVLDNVKAGHISSTSKEAVNGSQIHNISNSIKNSIGGNTVVNPDGSLTTSNIGGTGKNNINDAISEVKNTAKKAKTTVTEGDNIVVKETVNKDGSTNYEVSTKKDLTLNSVTTGDSVLNNNGLTIKDGPSITKDGINAGGKKITDVANGVIAQNSKDAVNGGQVHHISNSIKNSIGGNTVVNPDGSLTTNNIGGTGKNNINDAIKSVDEKVTNGVNDLTQKGLNFGANDQKTTQGKAVHRKLGDTINIVGGANPETAEDKTSGENIITRTTEDGVKIEMLKDVKFDSVNVGGHVLNQQGLTIKGGPSITVNGINAGGKQITNVADGINAKDAVNKGQLDKQINEVKDQIGKDIGKLSDHAVQYDKDKNGNVDKNSVTLGGGEKGTNLKNVADGKIAEGSKDAVNGGQLWNVQNQVDKNSNDIKNIQNNIDNISNGKAGLVQQQKPNGEITVGKDSGGTSINMAGKEGDRVVQGVKDGEIKAGSNQAVNGGQIHKISESIKNSIGGNTTIDPKDGSITTNNIGGTGKNNINDAIGTLNQSNQELGNKITNLGDQLQQVFYDTNKRIDDVEKKANAGIAAAMALENAPFVAGKYTYAVGAAYHGGENAVGVTLRKTSDNGRWSITGGVAAASQGEPSVRVGISGVIN

SEQ ID NO: 45124 - protein, 448 aa, Acinetobacter baumannii
MLIQRGGLKVVAGLGISGVSAVNFLHEQGYQVAVTDSRPTPPGHDQIPAGVKTSFGQLDQELLLQAEEIILSPGLAPQLPEIQAAIAKGISVVGDIQLLRRATDVPIVAITGSNAKSTVTTLIGLMAKDAGKKVAVGGNLGRPALDLLKDQPELLVLELSSFQLETTSHLNAEVAVVLNMSEDHLDRHGNMLGYHQAKHRIFQGAKKVVFNRDDALSRPLVPDTTPMQSFGLNAPDLNQYGVLRDADGTLWLARGLQRLIKSSDLYIQGMHNVANALACLALGEAIGLPMESMLETLKRFKGLEHRCEYVKTVRDVRYYNDSKGTNVGATLAAIDGLGAAIEVKKGKVALILGGQGKGQDFSPLRSSIEKYAKVVVLIGEDAPVIEQAIQGATKILHAATLKEAVELCQRETQAEDVVLLSPACASFDMFKSYNDRGQQFVACVNSLV

SEQ ID NO: 45125 - protein, 283 aa, Acinetobacter baumannii
MKRILIVTGQSGSGKSSALQVLEDLGYYCIDNLPLALLPEIVAKLDHENNLEQLALGVDVRSTRADMQEFDHVFEQLQKHGTVDVIYLTTQDQDLIARFSASRRPHPLANRFKSLLQCIHEEKQLLIPIQFRATVHIDTTDKSVHDLKHILLSKLGQSDNLIVILQSFGYKHGIPLDADYVFDVRHLPNPHWDLELRRFSGLDEPVKQFLEASPQANEMFEDILHFLKKWLPAFAEGHRHYMTISIGCTGGQHRSVYMVDRLKQALEAEWSVQVLHREMKHWS

SEQ ID NO: 45126 - protein, 552 aa, Acinetobacter baumannii
MNIKEYDYIIIGAGSAGNVLAARLTEDKDTTVLLLEAGGPDYRLDFRTQMPAALAYPLQGRRYNWAYLTDPEPHMNNRRMECGRGKGLGGSSLINGMCYIRGNAMDLEQWATHKGLENWTYADCLPYYKKAETRDIGGNDYHGDSGPVSVATPKNGNNVLFHAMVEAGVQAGYPRTDDLNGYQQEGFGPMDRTVTPKGRRSSTARGYLDMAKGRPNLTILTHATTNKILFNQKQAIGVEYIIGADQNNLQRALVKREVLLCAGAIASPQILQRSGVGQSTFLKSMDIDVVHDLPGVGENLQDHLEMYLQYKCKQPVSLYPALKWYNQPAIGAEWLFNGTGIGASNQFEAGGFIRSSDEFKWPNIQYHFLPVAINYNGSNAVKEHGFQAHVGSMRSPSRGRIKLKSKDPFAHPSILFNYMSTEQDWREFRDAIRITREIMHQPALDPYRGDEISPGKHLQTDAELDDFVRNHAETAYHPSCSCKMGEDEMAVVDGQGRVHGMNGLRVVDASIMPLIITGNLNATTIMIAEKIADQIRGREALPRSTAPFYVAS

SEQ ID NO: 45127 - protein, 228 aa, Acinetobacter baumannii
MQAIILDTETHTLNGLPIEIAYAPIEINAGKLTLDKSKLFDQLYQVGTPISYAAMAVHHILESDLENQPHYKTFKLPDTTTYIIGHNIDYDIAAIARCGVDVSHIKPICTLALARKTWPDAEAHNISALIYMISQGSSKARELLKGAHRADADIILTANILMHIVYHLNIHDIEELYRVSEEARIPTTINFGKHKGTAIAELPKDYIQWLLRQDELDVYLRKALESAF

SEQ ID NO: 45128 - protein, 441 aa, Acinetobacter baumannii
MSLIANTTVVRGRFLDIQQTVSEPTDIPNQIRYLEDGVLISEHGKIKWFGAWADAQQHLPAGVEVQHYPEQLIVPGFIDTHIHFPQTEMVGAYGEQLLSWLNTYTFPTEIQFQDKTYANEIAQFFVQELLKHGTTTALVFCTVHPESVDALFEAAERVQMRLIAGKVLMDRNAPEALCDTPETAYSDTKALIEKWHGKGRALYAITPRFAPTSTPEQLERAGQLKQEFPDVYVHTHLSENKDEIAWVKSLFPEQAGYLDVYQHYGLTGKRSVFAHCVHLEDEEWQCMHDTQSAIAFCPTSNLFLGSGLFPLKKTWEKQVKVGLGTDIGAGTSFSLLQTVNEAYKVQQLQGDKLSAYEALYHATLGGAKALDLQDQLGNFNVGKEADFVVLNLKPTALQELRQSKSKSVEDSLFALFTLGDDRNIEATYIYGNRAYQKETAK

SEQ ID NO: 45129 - protein, 615 aa, Acinetobacter baumannii
MLKDLSQNLGQMNDKNNNVENFLKQIYENIFDQNSNRTALIFENRSISYAEVGTQVAKVMYALKMQDLATGSVVAICLRKSPEHIYTALACALTGIIWLPVDMDSPPSRLNYLLTNSRADVVVSDSSIAGVQTLNINEILSATTEYEPSFNAEINRLPAYYLYTSGSTGTPKCVVLNNQATENTLQQTISEWKITADDVIMAVTPFHHDMSVFDVFASMAVGATLVVPSFEQSKNAVVWADLVDRCKVTIWSSVPAIVDMLFSVAQKEQLQSLRLIAQGGDYIKPSLITKLRQQLLNARLFSLGGPTETTIWSIWHEINEQDQEIIPYGKALENNQYFILDENLKPCQMGEVGTMYMTGLNLSNGYLLDGEINYKDFVDIQVSENETQTAFRMSDQGYFREDGNIIFAGREEGYLKIKGVRISAAEVENALTKHPYIHNCVVVSCVHPTTETQELVAVYTLENKYKTTRLNSPELKNFLKVHLPSSHIPSKYLSIETIPLTRNGKIDRKAVQEIAQEKIYVSSTLSANSTKTLSSVAELGDSVLSIFRECIADSQAEKMDIFYRSEILAIGIRPKQLMSIAQKLSQKLNTQIDFYTLISCKTIQDVVNKVEQQIK

SEQ ID NO: 45130 - protein, 338 aa, Acinetobacter baumannii
MQIFYDKDCDLSIIQSKKVAIIGYGSQGHAHALNLKDSGVDVTVGLRAGSASWKKAENAGLKVAEVPAAVKQADLVMILTPDEFQSQLYRDVIEPNIKEGATLAFAHGFSVLYNQVVPRKDLDVIMVAPKAPGHTVRSEFQRGSGVPDLIAIHQDASGNARNVALSYASGVGGGRTGIIETSFREETETDLFGEQAVLCGGAVELVKMGFETLVEAGYAPEMAYFECLHELKLIVDLMFEGGIADMNYSVSNNAEYGEYVTGPEVINEQSREAMRNALKRIQSGEYAKMFIQEGALNYPSMTARRRQNAAHGIEQTGAKLRAMMPWIQANKIVDKEKN

SEQ ID NO: 45131 - protein, 313 aa, Acinetobacter baumannii
MRFGLFCIFIILCICSLLLGAEQIQWSTLFSFSHESWLTLTASRIPRLITIVLTGIGLAVCGVILQHIVRNKFVEPETSGGLDAAKLGILVSLTLVPVTSTLSKMIFAIIFCFIASLIYIAIIRRIRFRNMVLVPVIGLMYGSVLSALAEFYAYRFNILQSMQGWLLGDFSKIVQGHYEVIYIIFPIVVLTYLFAHRFTVIGMGEEMASSLGLSYAAIAAIGLILVAITVSTTVITVGAIPFVGLVVPNLVALKYGENLAKTLPIVALGGASLLLICDILGRSIIYPFEVPIGLTAGGVGGIIFLILILREFR

SEQ ID NO: 45132 - protein, 238 aa, Acinetobacter baumannii
MGMTFTDIENKSAKRLIGIAAVIFLHLLVAYILMSGLANNIQKPAEKPVELQIIQDIKPPPPPKPEEPKPKEKPPEPPKMVEKVAKVPEPPKEVEKVATPVQKTTPVAQPTKVATPAPAAPSTPSPSPVAAPAPVAAAAPAPKPAGVTRGVSEGSAGCEKPEYPREALMNEEQGTVRIRVLVDTSGKVIDAKVKKSSGSKILDKAATKAYSLCTFKPAMKDGVPQQDWYEIEYPFVIE

SEQ ID NO: 45133 - protein, 451 aa, Acinetobacter baumannii
MSQLYASLFYQKDVTEIFSDSSLITYMIQVEVALAQAQAQVGVIPQNAANTIAQVAEQALEKFDFSALAVATGLAGNIAIPFVKQLTAIVKDTDEDASRYVHWGATSQDILDTACILQCRDALNIVEGQLQQCYTTALHQAKQYRHQVMIGRTWLQQALPITLGHKLARWASAFKRDLDRIQAMKSRVLTAQLGGAVGSLASLQDQGSLVVSAFAKQLNLTVPTSTWHGERDRIVEIASVLGMIVGNTGKMARDWSLMMQTEIAELFEPTAKGRGGSSTMPHKRNPVAAASVLAAANRVPALMSSIYQSMVQEHERSLGAWHAEWLAIPEIFQLCAGALSRTGEVLQGFEVNAEHMQQNLECTNGLIMAEAVMMALAPKIGRLNAHHLVEAACKTAVAQNQHLFDVVSQLDEVKGQFSQEEIRNIFKPENYLGNIQQQIDAVLKEAQGESK

SEQ ID NO: 45134 - protein, 214 aa, Acinetobacter baumannii
MIRKLILLVIFGLMSFVTNAKTLELQEKNMRQIFVLHGYSASINDHWFLDLKHQIEDENTTVTLIPFPDSEHPDVDAWQKVLDEQIPAVNENTYFVAHSLGVITLLHFLQRHDYQNIGGMILVSGFSGPISDSSPLSPYITKSKVDTNYFRDIKKKLVYLSDNDDLVPPQLTIQLAKDIDAPYITVPNGGHFLGREGYTEFPQLVDSLKEMLEN

SEQ ID NO: 45135 - protein, 142 aa, Acinetobacter baumannii
MQIKNILVVCIGNICRSPMAEYLLKQQYPQLNIESAGISGLIGHQADEKAQLCMQRLGIDMQPHIARKLNAELIKKADLILVMSSNQQKHIEQTWPFAKGKTFRLGHWQNKNVPDPYQHEQAVFDETCQLIQQCVADWKPYI

SEQ ID NO: 45136 - protein, 277 aa, Acinetobacter baumannii
MNMKTLLSLSLLALPFFTAQVNAEPVALAAQAQPAATAVKTIVPITAKTKEQALAQAQVIANTADADLAEFRIDLLSFASDTKQVIALGHELKKILGNKPMIATIRTKNEGSQLEISDADYGKTYQAYLKNPFMDWLDVEMFRDQKVVSEIVQKAHQKKVLVVMSNHDFQKTPSQDEIEKRLLKQDQMGADVLKIAVMPKSKQDVFTLMNATLKVSQQTTKPLLTMSMGQLGTISRVATANMGGSYSFGMIGQASAPGQIDVTKLKQILQTVQPTNP

SEQ ID NO: 45137 - protein, 442 aa, Acinetobacter baumannii
MRYAFAYGADAVYAGQPRYSLRVRNNAFDHENLKIGIDEAHALGKKFYVVVNIQPHNSKLKNFIRDLEPIVAMQPDALIMSDPGLIMMVREHFPEIQIHLSVQANAINWATVKFWKDYGLSRVILSRELSLEEIEEIQQHVPDIELEVFVHGALCMAYSGRCLLSGYMNKRDANQGACTNACRWDYKLHEAQEDLNGDVIPVTQLNTPEKSCCSSGQSETTSVQTLLVQRNDEEMFAAEEDEHGTYFMNSKDLRAVQHVDRLTKMGIASLKIEGRTKSYFYCARTAQIYRKAIDDALAGKPFDPRLMTQLEGLANRGYTEGFLRRHVHSEYQNYADGSSHFDYQQFCGEVVERHGNYIRIEVKNRFVVGDSLELMTPQGNITFNLTEMRDLKGNPITDAKGSGHFVEIPLSQDVDISYALLIRNLPHAKESITASTLAYSAS

SEQ ID NO: 45138 - protein, 377 aa, Acinetobacter baumannii
MQQRVIVGMSGGVDSSVSAALLLQQGYQVEGLFMKNWEEDDGTEYCTAMEDLADAQAVADKIGIKLHTANFAMEYWDRVFEHFLAEYAAGRTPNPDILCNKEIKFRAFLDHAMTLGADFIATGHYARRAETAYNSKGEAYAPLLRGLDKNKDQTYFLHAVHGREINKTLFPVGEIEKPEVRRIAEELDLATAKKKDSTGICFIGERRFNDFLKQYLPAQPGKIVLDNGKEVGEHHGLMYYTLGQRGGIGLGGMKGASEGAWFVLHKDVANNRLVVGQGHDHPLMQSTQLWSEAIDWVAGEQNIPAEGLRCTAKTRYRQPDQACTVFIDENSEHGVRVEFDEPQRAVTPGQSVVFYSDEVCLGGGVIHHTNAPTPNFI

SEQ ID NO: 45139 - protein, 305 aa, Acinetobacter baumannii
MAEFSIIDQYFNRQSHPDVALGIGDDSALITPPPNQQLVICADTLVAGRHFPLETSPHAIGWKSVAVNLSDIAAMGAKPHSILLAISLPQVDHEWLEGFSQGIYDCCDQFGVALIGGDTTQGPHLTITVTAMGWIETGKAVLRSGAKVGDYVCVSGQIGDAAYGLQHLGHSLQQRLDYPTPRCKLGEELKGLASSMIDVSDGLAQDLGHILKASTVGARLILEKLPVDPVLQQLEERQRWQYALAGGDDYELCFTITPQNYEKLLQKQLDVKITMIGQIVEQTKLTFEHLGSDYPLQIHGYQHFA

SEQ ID NO: 45140 - protein, 246 aa, Acinetobacter baumannii
MKVLICDDEPLAVERLSRLVSKMGHEVVATAHHGQDALEQARLHHPDVILLDIQMPGMNGLVCAEQLSQLNPRPAIVFCTAYDQHALEAFKSQAQAYLLKPIDPQELEQTFKQLTQLTQAQLSALPKPELLQDLKTQRHQIAAKTYRGVELIPVENIYYFLADQKYVTVRHKNGSVLIDETLKELETEFADQFIRIHRNALVSIAYLDGLELVSSGQYQVRLRGLDERLSVSRRHLSTLRERIHQL

SEQ ID NO: 45141 - protein, 287 aa, Acinetobacter baumannii
MNMTTANTARLLITCEDKPGIVQAVSSFLYHQGANITALDQYATEAQGGRYFMRVEFELDHLQSRKDALIQTFAANVAERYGMQWRLAFVNDIKKVGILVSKVDHALLELLWRHARGSLPCEITHVISNHEDLREAVENFGIPFTVIKVTKDNKAEAYAQIHEMMQGNDLLVLARYMQILSEDFVSKWEMKIINIHHSFLPAFVGANPYKQAYEKGVKLIGATAHYVTADLDQGPIIEQDVERVSHDYNVEQLRELGEDVERNVLARAVKWHLEDRIIVDGNKTVVF

SEQ ID NO: 45142 - protein, 639 aa, Acinetobacter baumannii
MSEQASQNYSFQAEVAQLLHLVTHSLYSNPEIFLRELISNASDACDKLRFEGINHPEYYENDPNLHVRISLNKEDKTLTISDNGIGLSQQEAIDNLGTIAKSGTKDFMSKLTGDQKADAQLIGQFGVGFYSGFIVADKITVESRRAGLDASEGVRWISGGTGEFEVQQIDKASRGTDIILHLRDDALDYLESYKVKQIVNKYSDHISLPIEMQKEVWQEEEVAEGEEPKGGQMVKTDEWEAINSASALWTRNKSEVTEEQYVEFYKNLTHDFEAPLAWAHNRVEGSTEYTQLLYIPSKAPHDIFTREAKAGIKLYVKRVFIMDDADNLIPNYLRFVQGVVDSADLPLNVSRELLQESRDVKTIREGNARRVLTLLDGLAKSEDEKDQEKFKTFYTEFGSVLKEGLGEDFGNRERILKLLRYATSTNDEVTTSFADYKARMKEGQKAIYYVTAESLAAAKNSPQLELFKKKGIEVLLMAERVDEWAMNFVHEFDGTPLKNVSKGAVDLGDLQDAEEKKALEQAAEQFKPVVEKLSDSLKAKTKEVRVTTRLVDSPACLVTSEGELSPQLIRMLKQAGQAVPEIKPILEINPEHPLVKKLEGSEQFDDLANVIFDQAVIAEGGLPEDPAAYVKRINSLLLK

SEQ ID NO: 45143 - protein, 483 aa, Acinetobacter baumannii
MNTLRLTTLALGLMVSGIAAAQTYVVDRYQDDSNKGSLRWAIEQANANPSEASEILIQAVGKAPYAIKLNSALPEIKAPVKIIGTQWDKTGEYIAIDGSNYIKGEGAKACPGANPEQYGTNVRTMTLPGLVLRDVNNVTLKGLDIHRFCIGVLINRSSNNLIQHNRISNNYGGAGVMLTGDDGKGNPTATTTNNNKVLDNIFQDNGDGLELTRGAAFNLIANNHFVSTKANPEPSQGIEILWGNDNAVVGNKFENYSDGLQINWGKRNYIAYNEMTNNSIGFNMTGDGNILDSNKVHGNRIGVAIRSEKDANARITLTKNLIWDNGKDIKRCEAGGSCVPDQRLGAIVFGVPALEHEGFVGSRGGGVVIEPSKLQKTCTQPNQQDCNAQPNQGIKAPKLTANKGSVTVEVNGLPNQRYQVEFFGNQNAASKEAEQYLGTITVATDTEGKAKANWKPTVKVASITANVTDRFGATSELGFVQVK

SEQ ID NO: 45144 - protein, 459 aa, Acinetobacter baumannii
MFISVFDLFKIGIGPSSSHTVGPMRAAYSFVDDLLKQDDLQATVRVQVKLYGSLSATGVGHATDKSVLLGLMGFDPEHIDTQVSTSLIEDVLENKAIQLNQQKSISFDYKHDVLFLDESLPYHPNAMELIAYNRAQEILYAETYYSVGGGFIVSERQLTHTQTETNDVKVPYPFHSAAELLSLCRTHHLSVSELMLENEKSWRSEAEIRSKIMEIWKVMQQCIHNGLINEGILPGGLNVKRRAKKIHDKLLNKKNSNLIVTTFHAMEWVNLFALAVNEENAAGGRVVTAPTNGAAGIIPAVLYYYVTFSKDFSEDKVVRFFLSAAAVGILCKLNASISGAEVGCQGEVGSACAMASAGLAEILGASPEQVEHAAEIGLEHNLGLTCDPIGGLVQVPCIERNAIAAVKAINAAQMALHDDDEHFVTLDKVIQTMKETGRDMSEKYKETSKGGLAVNAIEC

SEQ ID NO: 45145 - protein, 180 aa, Acinetobacter baumannii
MCVQGNMQNFVYNRITLFLLSYCLAMLDHLEQFLPNKEPSSIQNFPFFWISQVNGKYSQLIEKSIKKLGIDNTRRKIILSTNALGEASITDIANLSTLKLTTATKAVYRLVEDGIVEVYSSTADERISMVKLTAKGVELVEQINQISVVTLAGILNAFSEDELHNLNHQLKKLFDLMPSS

SEQ ID NO: 45146 - protein, 420 aa, Acinetobacter baumannii
MSDPQLSLSEYLGTVQEVIRLTFDEPVWVRAEIRNLNVKGGHYYLELAEKDADTDKVIASCKATIWKFSASKIVLKFERETGIELASDLNVLIKIRARFDPQYGFSVNIEEIDSSFTLGEIAKRYQQIVERLTQEGLIHKNKLLPTPFDIQNVLVIAPQNAAGLGDFKKDADALERNGVCHFVYQSATFQGNTAAVSLMESLATGLKQWANNFNFPPDLIVIIRGGGAVNDLAYLNDYELAALLCKRSVPIWVGIGHEKDRTILDEIAHRSFDTPSKVIAGIRNHIVERVQEAVDNLQTIKLLSQHQITTYQSKSDQYLQHIKSSAQAQLNSAHQFLEQIKERIQFVSQQQVKFSLSQTESLMREILLQNPKQIQAKGYAIVRSEGKAIRSIHQITSSTITVDMQDGAINANITEVIPNE

SEQ ID NO: 45147 - protein, 664 aa, Acinetobacter baumannii
MITRFASPLLNLTLGLALAGLSGMALANPPKIDASTLTVIGYHEITDTKNALIPQYAVTTQQFTEHVDWLQKNGFHFITVDQLIRAHQGKAALPTKPVLLTVDDGYQSFYQNAYPVIKAKKIPVVLAVVGSWLEPKAGQKVDFSGEEIPRDKILSWGELKEMQDSGFVEIASHSYHLHRGITGNPQGNSEPAATTRFYDVKTKTYENDSQYQARIYNDLKKNNQLLKEHGIRSPRIMVWPYGRYNMQTVQIAKKLGMPITITLDDGADHAKQSLQNMSRILVEGGMSTNDLAQEIKNRELNLTDNNRPQKIMHIDLDYIYDPDPQQQERNLGHLLDRINAMGVNTVYLQAFSDPDANGSADMVYFPNRHIPMRADLFNRVAWQIQTRTPVSRIYAWMPLLAWELPKTDPVSKDLVVTEQAKAGEHLNMGYIRLSPFSPEARQTIREIYQDLAKSASFNGILFHDDVTLSDYEDASPDALKAYAKQGLPTDLAKIRENDQDLQKWTAYKTKYLDDFAMQLVEDVRQYEPFLLTARNLYAQVALKPYAENWYSQSLEESLRRYDFTAIMAMPYMEQVDNADQFYKDMIDRVKKYPNGIKKTVFELQATNWRNNEKVPSTEMAATIHSLYQQGAMHVAYYPDDPIKDHPDVNVMHKAFAEKSSRLVP

SEQ ID NO: 45148 - protein, 363 aa, Acinetobacter baumannii
MAGNSIGQLFRVTTCGESHGVGLMAIVDGVPPGLALTEEDLQKDLDRRKPGTSKFATQRKEPDQVEIISGVFEGKTTGTPIGLLIRNTDQKSKDYGNIAQTFRPGHADYTYTQKYGFRDYRGGGRSSARETAMRVAAGAIAKKYLAEKFGVVIRGHVTQIGNEVAEKLDWNEVPNNPFFCGDVDAVPRFEALVTSLREQGTSCGAKLEILAEKVPVGWGEPVFDRLDADIAHAMMSINAVKGVEIGDGFAVAGQFGHETRDELTSHGFLANHAGGILGGISSGQTIRVAIALKPTASITTPGKTINLNREDTDVLTKGRHDPCVGVRATPIAEAMLAIVLMDHFLRHRAQNADVVPPFAPIEP

SEQ ID NO: 45149 - protein, 229 aa, Acinetobacter baumannii
MSFSGYGPLLLSGTWMTIQLALLSLLLSVIIGLIGASSKLSNIKALRYIATAYTTLIRSVPDLVIMLLLFYSLQLGLNQITEALQMDQIDINPFVAGVITLAFIYGAYFTETFRGAFQSVPRGQIEAAMAYGMTPWQVFHRVLFPQMMRFALPGIGNNWQVLIKATALVSIIGLTDIVKITQDAGRSTMQLFFFSIVAAAIYLAITTVSNLILIWLERHYSAGVRKGQL

SEQ ID NO: 45150 - protein, 300 aa, Acinetobacter baumannii
MNTIDITNSLEKDKLVNTEQSQLTDTQLHHGTSYVSHFEPHASKKPNSTEIKISAQDAHVYYGDFEAIKGIDLDIYQNEVIAFIGPSGCGKSTFLRTLNRMNDTIDGCRVTGKITLDNKNIYDPNLDVVLLRAQVGMVFQKPNPFPKSIFDNVAYGPKLHGLARDKYDLEEIVENSLRKAGLWEEVKDRLNQPGTGLSGGQQQRLCIARTIAVSPEVILMDEPCSALDPIATAKVEELISELSDQYTIVIVTHSMQQAARVSDRTAYFHLGDLIEVNSTEKVFTQPDHQLTEAYITGRFG

SEQ ID NO: 45151 - protein, 153 aa, Acinetobacter baumannii
MTTQVWFEIARSWLSEIRFLVNTPNKNVIQLFESFDVNLHLSHPVTPLAFEYLSTQERIVLLSMLDQIMDIPCDLLVQRSKEYGVSRANFWDKRKKLPVQLQQMKDLMIKPTRRYPVSRAAITVTKPKSKATVQRQWLNLLRRSNNSGAMHID

SEQ ID NO: 45152 - protein, 622 aa, Acinetobacter baumannii
MWLIILGVLILIFSNISDRNKPTAMKYSDFVAAVNAGQIKQVTIDGLNISGEKTNGSQFETVRPQVEDTELMPSLNKQNVVVEGTAPQRQGILMQLLIASFPVLLIILLFMFFMRNMGGGAGGKNGPMSFGKSKAKMLSEDQIKVTFADVAGCDEAKQEVVEIVDFLKDPAKFKRLGATIPRGVLMVGPPGTGKTLLAKAIAGEAKVPFFSISGSDFVEMFVGVGASRVRDMFEQAKRHAPCIIFIDEIDAVGRHRGSGTGGGHDEREQTLNQMLVEMDGFEGNEGVIVIAATNRVDVLDKALLRPGRFDRQVMVGLPDIRGREQILNVHLKKLPSVTGVDVKVLSRGTPGFSGAQLANLVNEAALFAARRNKNTVDMHDFEDAKDKIYMGPERKSMVLREEERRATAYHEAGHAIVAEILPGTDPVHKVTIMPRGWALGVTWQLPEQDQISHYKDKMLNEIAILFGGRIAEEVFIQQQSTGASNDFERATKMARAMVTKYGMSDKMGVMVYEDENQNGFFGNVGSRTISEATQQQVDQEVRRILDEQYKVARDILENNKDIAHAMVKALMEWETIDRDQIRDIMEGREPQPPKVYIAENPVSAFEPPKDGPSTPPPLPAMN

SEQ ID NO: 45153 - protein, 115 aa, Acinetobacter baumannii
MKQRLVWVKINKNQYLSRRFSHHPLGMKEPMATRGKHVAQLDLLLMPLLACDHYGTRIGMGGGYYDRTLASAKHKPYRLGLAHQFQFIEHTLERQSWDQPLDGLLTPQHFYYFKR

SEQ ID NO: 45154 - protein, 534 aa, Acinetobacter baumannii
MTTYQTAIDAVRELKAKFGNTWADISPEDAARMQLQNRFKTGLDIAKYTAAIMRRDMAEYDADSSKYTQSLGCWHGFIAQQKMIANKKYFGTTSKRYIYLSGWMVAALRSEFGPLPDQSMHEKTSVPALIEEIYTFLRQADAKELNDLFRALNKAKEAGDSAKVAEITAQIDNFETHVVPIIADIDAGFGNEEATYLLAKKMIEAGACALQIENQVSDAKQCGHQAGKVTVPHEDFIAKIHALRYAFLEMGVEDGVIVARTDSEGADLTQKIPVVKEPGDIASKYISYLDTQEIDISEAQEDEILIKRDGKLHRPTRLASGLYQFREGTQIDRVVLDCITSLQNGADLLWIETPTPNVQEIAHMVNRVKEVVPNAKLVYNNSPSFNWTLNFRQQAYDRWVAEGKDVSAYDRAKLMSAEYDNTELAAEADEKIRTFQADAAREAGVFHHLITLPTYHTAALSTHELAQGYFGDQGMLAYVAGVQRKEIRGGIACVKHQAMAGSDIGDDHKEIFAGENALKAGDDAKNTMNQFSAH

SEQ ID NO: 45155 - protein, 445 aa, Acinetobacter baumannii
MSLKPKPHKTLNLSPPSLLALGFLGFIVFGTLLLKLPIANNGHVSWMDALFTATSAVTITGLSVLNIHESFTLFGQVIILLLIQSGGLGFMTFAILAALSLSPKVGLKQQMMAQDSLGQTSLSKVTFVAKGVVTYTLLFELIGTVILTTAFTPIYGFARGLYYAVFYSISSFNNAGFSLFSNSLVNFQSNYLICITISLLYTLGGLGFLVLMDIKQNKKWKKLSPNSKLILTTIAIINLVAFVLIWVLEAQNPHTLGLLNVGDQALNAWFQATVPRSSGFNTIDTGAMTNSSSLLMMLLMFIGGGSLSTAGGIKVGTFIILVLSVLSFLRRTDEIRVFNHSVSHETTYKALAVTAITSILIFIGFFILLLLEPKADFMNLLFEVVSAACTVGLSRGITPDLHNGSLFILSLLMFAGRLGPLTLAYLIATPKKSRLKHPQANIQIG

SEQ ID NO: 45156 - protein, 280 aa, Acinetobacter baumannii
MRAYLDLLQHILDNGGDKGDRTGTGTRSVFGHQMRFDLSKGFPLLTTKKVHFRSIVIELLWFLKGDTNVKYLQDNKVTIWDEWATAEQTARFGRPEHELGPVYGHQWRNFGATKNADGTYNQDGFDQIKWLINEIKTNPNSRRLIVSGWNPNEAGQVALPPCHTLFQFFVQDNKLSCQLYQRSADVFLGVPFNIASYALLTHMIAQVCGLGVGDFVWTGGDTHLYANHFEQAKLQLTREPLPLCQLKLNPDVKDIFDFKFEDIEIVGYESHPAIKAPVAV

SEQ ID NO: 45157 - protein, 418 aa, Acinetobacter baumannii
MGYQKIVVPADGDKITVKADLSLNVPNHPIIPFIEGDGIGVDITPAMKKVVDAAILKAYGGKRSIEWMEVYCGEKANKIYGTYMPEETFEALREFVVSIKGPLTTPVGGGIRSLNVALRQELDLYVCVRPVRWFQGVPSPVQHPELTDMVIFRENSEDIYAGIEWKADSEEAKKVIKFLQEEMGVTKIRFPEGCGIGIKPVSKEGTQRLVRKAIQFAIDNDKPSVTLVHKGNIMKYTEGAFKEWGYELALDRFGGELIDGGPWVKIKNPKNGKDIIIKDVIADAFLQQILMRPADYSVIATLNLNGDYISDALAAEVGGIGIAPGANIGGAIAVYEATHGTAPKYAGQDKVNPGSIILSAEMMLRDMGWTEAADLIIKGISGAIAAKTVTYDFERLMPGATLLRCSEFGDAIIQHMED

SEQ ID NO: 45158 - protein, 610 aa, Acinetobacter baumannii
MVDKRTKQTRKKQQSISEKPSLAFDMWRFYLLWAVVLLCFVVLIARAFYVQVINKDFLQNKANANILRTERIEAMRGVISDRHGVPLAISSPIMKIVIDPRDYFETKHLYDQITAELKQDPNNRKLKRQLPDKNLNLDELADVVGVDRADLKKQMNARPRSRYLVLKKEVPPQQADLIMKGNFQGVYAEKTYKRYYPQPQPNAQIIGLTNSEGQGIEGLEMQLNKQLSGVDGEQKIIRDKRGNRLKVSEVIREGEPGENITLSIDSRLQYIMYRELTAAGVANNARSATAIAVDVKTGEILAMTSWPSYNPNDKNGLSNKDAMRNRGAIDMFEPGSTMKPFTISAALETGQYTPNTIVNTSPGSMRLGWHTIRDTHNYGALTVSGVIIKSSNVGSAKIALSLPKETLPSFFNRVGFGKRSAVRFPGESSGLVLPVNKLNSSQIGTMAYGYGLNATILQLAQGYAMLANHGVKMPLSLHKLDQPPKGEQVLNPKIADQVLLMLEQVTMPGGTAKQVNIPGYRVGGKTGTAHKLRADGKGYSNNEYRALFAGVAPISDPRLAVIVVVENPQGRYYGGLVAAPVFARIMQESLRLMNVPLDKPLNTPENPIRR

SEQ ID NO: 45159 - protein, 175 aa, Acinetobacter baumannii
MLLTYEATKDLPVVDCEIEGWAGNVTTQRIAGKKITIVPILRAGIGMLDGVLNLIPSAKVSVLGLERDEATLEVRTYYKKLVSDVANRIAMIIDPMLATGNSLVAAIDVLKASGCKDIRVMVLVAAPEGIAKVEAAHPDIQLYTASIDNGLNEHGYIVPGLGDAGDKIFGSVQKD

SEQ ID NO: 45160 - protein, 334 aa, Acinetobacter baumannii
MKHLKEALLELTNDEDVTEHILKEHYFCDTVVNRMVSKLSNQNLYRQLRIKHNFLEQHLEDVEQEDQIEIEDCNKLNQEQLNQASIYVDNMRRNFQPGHILQSMDLILFHSETDMPIYVEKGSPLLEKLRQVVLVDQITDIQLIKNRLWNGVHAMLAWYASLMGYESIGVAMGDHLVKAFAENLIAEVKQGLAIVLPNYAKDLDRMSQSFLDSCEYAFKDPCQRVARDPLRKLNHNERVMASIAVNICHDLPYKNLLKGAALGYAYAIQFLEIEETKAVEQLQQQIQNLDLSTTQRRQLEAELVQLIQYLFSEQGKQPLDIKLNNTKTTSNQYV

SEQ ID NO: 45161 - protein, 258 aa, Acinetobacter baumannii
MLCMGVAVALLTSGCQTSQTVKKDPEKAVKVRTQLAAEYIRSGDLDSAKRSLDQALSVDSRDATANMMMGILLQQEGSKPNLEKAEHYFKRAISSEPDNAQARNNYGTYLYQMERYNDAIEQFRIAGATLGYDQRYQALENLGRIYLKLGDIASAEKTFKQALLANRDSYISMLELAEIFYLQQQIPAATQMYEQYVRTVGQKNQGARALWIGLRVARANADKMGMQVLVNQLRALFPESPEYQRYLQLQYSTEAVWK

SEQ ID NO: 45162 - protein, 263 aa, Acinetobacter baumannii
MEINPNSQQPTGSSLPTSALGNIQRPGEYLRQIRVSQKKELEQVSSDLNMPLKTLNALEQDDYKSLPEATFIKGYYRSYAKYLNTDATAIIQRFDEIYANDTGLLPNHALNNSPIKIMGKLPGSNSDRNKKWLKRALLAILIIAVVSLIVMGVQKWTSNKGDAELPKANQSNVEVLPMKGNTSATAGDQLVLNFNRPTSVHIVDATGKVLATGRQASTLTLNGESPFQIRLDDATAVSLSLNQEQISLSPYTVNGKAEFRLSR

SEQ ID NO: 45163 - protein, 809 aa, Acinetobacter baumannii
MSELIMNEKTDLEPQVPSVLPLLALRDVVVYPHMQIALFVGREKSINAVDVARNSDNLVFVVAQKDSLTEEIDHDNLYQYGTVAKIVQVVNHENDENCIKVLIEGLHRSKLKKIIDEDSYLTAEHELSPMTINVDKATQETRLQELRNLFAQYAEAKLRNARELVAAANKIEDLLQLMFFVATRVPLNIEIKQKFLEYDEFEAHLQELMNYLMNQSAEQQIEQTLHDSVKRQMEKNQREYFLNEKMKVIQRELSDMNGGAEDDVAEIEKRLAEADLPEHVRKKAEAEFRKLKAMQPASSEAAVVRNYLEVILDTPWNKASKVSINLNKAQEILDADHYGLDDVKDRIVEYLAVQSRVKKLKGPILCLVGPPGVGKTSLGESVAKATGREFVRMALGGVRDEAEIRGHRRTYIGAMPGKIVQSLTKVGVKNPLFLLDEIDKMAQDYRGDPASALLEVLDPSQNSKFNDHYLDLDLDLSEVMFICTANSMNIPEALLDRMEVIRLPGYTEDEKVNIAERYLVPKAIKNNGLRPKELTIHEEAIRDIVQRYTREAGVRNLEREVSKIARKVVKEAVSKKSKNLQLDVTSANLPEYLGPHKFDFGMAEDEAQVGRVNGLAWTSVGGELLTIEVAAVKGKGKFITTGSLGDVMKESITTAMTVVRTRADELGIEASRFEETDVHVHLPEGATPKDGPSAGLALTTALVSAFTGIAIRPDIAMTGETSLGGRAMRIGGLKEKLLAAHRGGIKLVFIPQDNVRDLAEIPDNVKEGLEIKAVKSIDEILPLALTSMPKPLPKTPIVKPVEGSKAARH

SEQ ID NO: 45164 - protein, 342 aa, Acinetobacter baumannii
MEKLNMSEHRKPEQGVKLRGAEKVARIPVKVVPTVEVPRKPDWIRVKMTAPEEVQRIKTTLRAQKLHTVCEEAACPNLPECFGGGTATFMIMGDICTRRCPFCDVAHGRPNALDPDEPRHMAETIANLKLKYAVITSVDRDDLLDGGAQHFVDCIKEARALSPNTLLEILVPDFRGRMDIALRIMTECPPDVFNHNIETVPRLYKAMRPGSDYQHSLNLLKMFKEYCPDIPTKCGLMVGIGETEEEVIALLDDLRAHDVDYVTIGQYLQPSKQHAPIDRFVTPEEFERYAEHGRKLGFRNIWSAPMVRSSYFADRQYYGEPVPEVRRKVDPAKKIAVQAIEA

SEQ ID NO: 45165 - protein, 382 aa, Acinetobacter baumannii
MNMALKVSMASKSAHLTPEQIEEFGRRVEQIRQDVMQSLGEQDAKYIYKVRNFVRYTEIASRGMLMFGGWIPPVWLLGTGILGISKIVENMELGHNVMHGQFDWLNEPSLNGNTYDWDTIASGDDWRETHNYVHHTYTNIVGKDHDVGYGILRVSDQQKWEPRHLFNIPLALQLMFFFEWYVGVQNLHLEDALVYKTKSWKQVWKDSAKVRKKATRQVLKDYVFFPVISGPMFLPVFAGNVVANIIRNLWSSAVIFNGHFTEDAETFEPDNTDTETKAEWYLRQIRGSSNFSGTEWLHFMSGNLSHQIEHHLFPDMPANRYKEVAPKIKALCAEYGINYNEANFMRQFWSVWVRLAKCSLPNHTTAKVMQTLEKLKAKFKFA

SEQ ID NO: 45166 - protein, 302 aa, Acinetobacter baumannii
MDLFCRAKYNGKTIALIIFEDRMSQNTETEKPINFDEIRLDPISHIHRENNPQFIASLARGLELLRCFSANNQVLGNQELAKMTGLPKPTIARITNTLVSLGYLKQLPNSTKYTLDIGVLSLGYAALSNISIRNIAHQYMEEMSQYVQAPVAMATRDRLNMVYIDVVQIETALNMRRPIGSTLPLHSSSMGRACLAATPERERNFLLDALKQKNPENWPAIKRSLERAFRDYQDYGYCLSLGEWHKEVNSVAVPLVSSKHGLYVFNCGAPSFHLNPEKLEGEIGPRLIHMVHNIQDALNETH

SEQ ID NO: 45167 - protein, 459 aa, Acinetobacter baumannii
MWGGRFSEATDAFVAEFTASVQFDQRFYKQDIAGSIAHATMLAKVGVLTEAERDDIIEGLSTIRAEIEAGTFEWRIDLEDVHMNIESRLTQRIGITGKKLHTGRSRNDQVATDIRLYLRDEIDDILGLLERLQKGLLGLAAKNVNTIMPGFTHLQTAQPVTFGHHLLAWFEMLVRDTERLQDCRKRVNRMPLGSAALAGTTYPIDRAYTAELLGFEAVSENSLDAVSDRDFAIEFNAAASLIMMHLSRMSEELILWTSAQFKFVNIPDRFCTGSSIMPQKKNPDVPELIRGKSGRVFGDLISLLTLMKGQPLAYNKDNQEDKEPLFDAIDTVRGSLMAFADMIPALVPNVEIMREAALRGFSTATDLADYLVKKGVAFRDAHEIVGKAVALGVAEEKDLSELTLEQLQQFSDLITADVFDKALTLEASVNARDHIGGTSPKQVEAAIARAHKRLEQLYA

SEQ ID NO: 45168 - protein, 273 aa, Acinetobacter baumannii
MSAAPRIGILGAGGRMGRTLIQAVQQAGYQLAAAVERPESSLVGTDAGELAGIGSVGVKVSGSLADVLKDCDVIIDFTAPAATAQHLKLCREAGVAMVIGTTGMSDEQKAELDEAATHTPVVYAANYSVGVNVSIKLLELAAKVFGDTVDIEVIEAHHRHKVDAPSGTALMMGEAIADTLGRNLKEVAVYGREGHTGPRDRQTIGFETIRGGDIVGEHTVMFIGEGERVEVTHKATNRMNFAAGAVRAAAWVVGREARKYDMKDVLGLNDVQV

SEQ ID NO: 45169 - protein, 421 aa, Acinetobacter baumannii
MSDTHIPLPERLRPRDLSEIIGQDHLLGEHAPLRQMIDQGHLPSIIFWGPPGVGKTTIALLLAQAIDRPFVSLSALNTGVKELREVIAESGDLLTPVVFIDEIHRFNKSQQDALLGAVEKGKITLIGATTENPSFEVNSALLSRCQVYTLNSLDSEAIQTLLNNALQNDRFLKERYIHIEEYDALLQFAAGDARKALNLLDLIASTFEPEVENTITNAVVVKVAQQNIARYDKSGEQHYDLVSAFIKSIRGSDPDAALYWMARMLKGGEDPVFIARRMLIAASEDIGNSNPNALLLAGECFRSVQAVGMPEARIILGQTAVYLATSAKSNSTYLAINKALELAEKTANLPVPLHLRNAPTKLMKQQGYGINYLYPHDYPEHFVLQDYLPPELKGTKLYESARNKREVEGERLQQRRWQQEQ

SEQ ID NO: 45170 - protein, 86 aa, Acinetobacter baumannii
MALTNEEILNAVAEKTVLELVELISAFEEKFNVSAAAVAVAAPAGGAAAAAEEQSEFNVELTSFGANKVAVIKAVREATGLGLKEA

SEQ ID NO: 45171 - protein, 872 aa, Acinetobacter baumannii
MTQKLDQVTSSTLSLAKTNTTNVTINAFPSAFEQPDIKMTLDKTALKPEQLTHIPNFENIPASTKRIKPLNNFLGQDRAKASVEAGISLPYSGYNIFAVGTAGLGKRTMIKRLLQQHAKTVPTPDDWVYVYNFKQARQPIALRFPAGQGTKFQQTLHQTWQIILKQLERRFSAETYHNRIERIRQETGDEQQQALVELTKEGEELDLKLISRNEKHGFVPVQLKDNQVQELTQTEIDALNSKQRAEIAANIRYMDKKLERLGLHLGDLEDDARDKVSVLNRDIATQVVMPRMDLILNKYGQVKGLEDYLKQYAQDIIDNVELILEQEEDDFAPAMFNRVPARYQANVIVSNKPNSGAPVIFEDFPTHYNLLGHVEQLTHNGTITTDFTLIRPGALHQANGGFLMLEAEQLLEQPYAWQGLKRALKSGQLKLSSLEHMLTLTGSISIEPAAIPLDIKVVLMAEPEIYYEILEVEPELGSVFKIRADFTDTLQRNDENEQAYMQLIADYVQADKLLPFDRSALAALLTDSSRQAEDQSSLSLHASTLGDLIREAHHHAFKANDKMVTDQHINLALQHRQYRLGYLRELYWQDLSRGTQLIETSGHRLGQINALSVIHYADVEFGLPSRLTASVYQGGGDILDIERSVELGGSLHAKGVLLMSSFLKAHFGREQILHFSAALAFEQSYGQVDGDSATVAELSALISAISQLPIDQSWAITGSMNQLGQVQPIGGVNAKIEGFYDACKLQGLTGKQGVIIPRQNMQHLMLRQDVIDAVRMGQFHIHAIDTIDQALEILMARPVGTLDKKGKYSKHSIYAAVMEQLEYWQAIEDGAEVEEEPKKKKKNKKKIKKHEELTADDLPQETQEEVATLKQK

SEQ ID NO: 45172 - protein, 926 aa, Acinetobacter baumannii
MNSIPSVEIDSSDHVAKITKTTCPYCGVGCGVSVNVQQKPQGPVVQVEGDAEHPSNFGRLCIKGSRLADTLGLETRLLQPMFGRKPLRTVTTWDAAINKIADKFQSCIDKYGRDSIAFYVSGQLLTEDYYVVNKFVKGYLGTANIDTNSRLCMSSAVAGHKRSFGEDIVPASYEDFEHADMVVLVGSNTAWCHPVLYQRIMQAKSHNPDMFVVVIDPRFTSTCEQADLHLPILPGQDVALFNGLFQYLYQNGHADQVFVDAYTEGLQEVLASSQQETDIAYVAKRSGISLDKLQQFFEKFAQTEKVITLFSMGVNQSSQGVNKANSIINCHLLTGKIGKLGAAPFSMTGQPNAMGGREVGGLANMLAAHMDLDNPLHQKVVQTFWDSPFIATQAGLKAVDLFHAVEAGKIKAIWIMATNPVVSLPDADQVKRALEKCELVVVSDICVDTDTTAYADILLPALGWGEKDGTVTNSERRISRQRAFLPAPGEAKADWWAMSQVAKKLGFKGFDFNNAVDIFNEHAALSAQDNADIEAREQTDTFRYFNLKGLMNLSTAEYDALQPVQWPVWDKKQDAKAVHQLFCKGQFSHKNAKAKLIPTVAINPVHAISEDYPLILNTGRIRDQWHTMTRTGLSPNLTSHRAEPFCEIHPSDALKFGVRDQGLVEVRSKWGSCVLRVTFSSGVRRGQIFAPIHWTEQVASDARIGKVVNPEVDAISGEPEFKHTPVTIQPFYTTWQGVLYIREGYDSHIQESLHHCAWWTKVKMVKTNRYELADRQTFHDTQKNLKSFLPFADETFEWLSIEDISSQLSHSIILKDGIVIASLYIAPPDLLPDRDWVASLFKRERLSALHRKALLAGMPMSATNNDGPLVCSCFKVGKNKIIEAIKTQNITHEKQVTACLKAGGNCGSCLPEIRGLIKACQQEVEV

SEQ ID NO: 45173 - protein, 103 aa, Acinetobacter baumannii
MYAVIQSGGKQHRVVEGETLKVELLKAESGATITFDDVLMVVNGDNIQIGAPVVAGAKVTAEVIGHGRHDKIRIIKMRRRKHYRKQQGHRQWFTELKITGISG

SEQ ID NO: 45174 - protein, 258 aa, Acinetobacter baumannii
MTELQDIDFVELSDEEMHLYSRQILLDGWDIEAQEKLKLANVLIVGAGGIGCSSAELLARAGVGKITLIDADTIEISNLQRQIAFGHEDIGRYKAEVLAKRLQKINPYICVEYFNERLDGHNIDKLVEHQDVVLDGCDNFTTRYLVNAACKKHQVALISASAIGFQAQMFMVEGDSACYECLFPKEQHANEGLRCAESGVLATTPVMIASLQAHHTLLYLGLNRTPLKQKLLLWDGLNMTQRIVSFDKDINCPLCQAS

SEQ ID NO: 45175 - protein, 75 aa, Acinetobacter baumannii
MHDFSKPPHVTSPEETAKKRRLPVYILIIVGLFLLALVVYMVADHSKTPKEEAAFQHETIPQVISGTSDLKTYEG

SEQ ID NO: 45176 - protein, 762 aa, Acinetobacter baumannii
  MISC_FEATURE (188)..(188): X=any amino acid
  MISC_FEATURE (193)..(193): X=any amino acid
VVAYDYGVKTNILRMLADRGCKLTVVPAETPAEKVLALNPDGVFLSNGPGDPAACDYAIEAVKTIVETTTLPVFGICLGHQILALASGAKTVKMNHGHHGANHPVQNLEDGTVMITSQNHGFAVDAETLPANLKATHKSLFDGTLQGIHRTDKPAFSFQGHPEASPGPHDCAPLFDHFIELIEASKQXLRSEXCLNVRIIKSILIIGAGPIVIGQACEFDYSGAQACKALREEGYRVILVNSNPATIMTDPSMADATYIEPITWQTVAQIIEKERPDAVLPTMGGQTALNCALALDENGVLEKYGVELIGATKEAIEKAEDRKLFDEAMRKIGLECPKAAIAETMEEALEIQSRFGFPVIIRPSFTMGGSGGGIAYNREEFLEICERGFDLSPTHQLLIDESLIGWKEYEMEVVRDKNDNCIIVCAIENFDPMGVHTGDSITVAPAQTLTDKEYQLMRNASVAVLREIGVETGGSNVQFGINPKDGRMVVIEMNPRVSRSSALASKATGFPIAKIAAKLAVGYTLDELKNDITGGVTPASFEPSIDYVVTKIPRFNFEKFPQAEPVLTTQMKSVGEVMAIGRNFQESVQKALRGLEVGVSGFDEKVEAGATNVKETILKELKVPGPERIWYVADAFRHGFSLDDVFEATKIDRWFLIQIQDIVNTEAQVKTLGFGDLTAENIRSFKRKGLSDLRIANLMGISQKQFRKQRWNLGVYPVYKRVDTCAAEFESGTAYMYSTYDEECEANPSNRDKIMVIGGGPN

SEQ ID NO: 45177 - protein, 252 aa, Acinetobacter baumannii
MTKLAKTFSAPRYNTLIGIVLACVMGVLTYFGLFYQQKAIAQDYPVQGFDVSHHQENINWKKISPKKFQFVYLKATEGGDYKDPKFQENWLKAREHGFHVGAYHFYRLCRDGKTQAENFISTVPNKADALPPVIDLEYDSNCINSHTKEQLLKEIGIMHDSLKHHYGKQPIFYISKTFYHIVLIGSFPHTPLWVRDYEGKPELKDKRKWLFWQHSNQGKIEGITKPVDLNVYEGSVKEWHQFLQQQGIVKAQ

SEQ ID NO: 45178 - protein, 378 aa, Acinetobacter baumannii
MKKIFISIVFGTRPELIKLAPVILLAKQDSRFQVEVIFTGQHDELVRDAIDFFGVEIDHRLKIMNAGQSLNQLLIHGLTQLENIYTDSQKRDAIVIQGDTTTVLAAGLVAFSMKIPVAHVEAGLRSYDLDHPFPEEGNRQLVSRITKWHFAPTEQSKRNLLNEQIPPSLITVTGNTVVDAVYLGRKLIAEKTGLKNQLEPYGIELKQNDKVVLITAHRRENFGEGIQNICNAVEYLAKHHPDLHFIWPVHLNPAVHNVVHDKFKNHAQIHLVKPLDYPSLLAVIDRSTFILTDSGGLQEESPSFNKPVLILRDTTERPEVVEVGAGVLVGTNQQKIIEEAEKLLTDSQHYQKMAHVENPFGDGCAAQRILDEIARTYN

SEQ ID NO: 45179 - protein, 210 aa, Acinetobacter baumannii
MDTPLINTPVRHWCEFEFISKTVKNPNIHIKGNYSYYSAYWDQGFERCVVRYLHDKPSTPDKPIDQLYIGNFVCFGAECVIMMGGNQLHRPDWISTFPFDTRSFLAAGDTIIADGCWIGSRAMIMQGVKIGEGAVVATGAVVTKDVPPYTIVGGVPAKIIKYRFPQEQIEKLLALKIYDLDEKQVLKMREYLQTDDIDALTAHLKKLQSE

SEQ ID NO: 45180 - protein, 1448 aa, Acinetobacter baumannii
  MISC_FEATURE (79)..(79): X=any amino acid
  MISC_FEATURE (105)..(105): X=any amino acid
  MISC_FEATURE (114)..(114): X=any amino acid
  MISC_FEATURE (195)..(195): X=any amino acid
  MISC_FEATURE (371)..(371): X=any amino acid
  MISC_FEATURE (465)..(465): X=any amino acid
  MISC_FEATURE (654)..(656): X=any amino acid
  MISC_FEATURE (663)..(663): X=any amino acid
  MISC_FEATURE (667)..(667): X=any amino acid
  MISC_FEATURE (680)..(680): X=any amino acid
  MISC_FEATURE (1051)..(1051): X=any amino acid
  MISC_FEATURE (1353)..(1353): X=any amino acid
  MISC_FEATURE (1355)..(1355): X=any amino acid
  MISC_FEATURE (1359)..(1359): X=any amino acid
  MISC_FEATURE (1365)..(1365): X=any amino acid
  MISC_FEATURE (1371)..(1371): X=any amino acid
  MISC_FEATURE (1385)..(1385): X=any amino acid
DTDGYRLGRLAILVSATATDPAGNTSLPGTGTVSADITAPVVALDDVLTNDSTPALTGTVNDPTATVVVNVDGVTIRQXTMVTAPGRLQTIHFQHSQTVHTPLPXLQQMQQVTXVTDTAVVTIDTVAPNAPVLDPINATDPVSGQAEPGSTVTVTYPDGTTATVVAGTDGSWSVPNPCKPAWMADITLRRNQANXPEPGNSVSSARYGASFFSRQFTAPVVALDDVLTNDSTPALTGTVNDPTATVVVNVDGVDYPAVNNGDGTWTLADNTLPALTDGPHTITVTATDAAGNVGNDTAVVTIDTVAPNAPVLDPINATDPVSGQAEPGSTVTVTYPDGIQSLHMMVAWNQDWNGGQVPNHQGRHGGRRDQXRQQQGNPAGNTSLPGTGTVSADITAPVVALDDVLTNDSTPALTGTVNDPTATVVVNVDGVDYPAVNNGDGTWTLAYIYTFQHSAERSTQSIHAXSCYTDARQDNVGNDTAVVTIDTVAPNAPVLDPINATDPVSGQAEPGSTVTVTYPDGTTATVVAGTDGSWSVPNPGNLVDGDTVTATATDPAGNTSLPGTGTVSADITAPVVALDDVLTNDSTPALTGTVNDPTATVVVNVDGVDYPAVNNGDGTWTLADNTLSKHFADRFHNTITVTIQNQCGYVLISXXXSIILLFXMTTXLRVASNSATADAXLRSTAQDPVSGQAEPGSTVTVTYPDGTTATVVAGTDGSWSVPNPGNLVDGDTVTATATDPAGNTSLPGTGTVSADITAPVVALDDVLTNDSTPALTGTVNDPTATVVVNVDGVDYPAVNNGDGTWTLADNTLPTLADGPHTITVTATDAAGNVGNDTAVVTIDTVAPNAPVLDPINATDPVSGQAEPGSTVTVTYPDGTTATVVAGTDGSWSVPNPGNLVDGDTVTATATDPAGNTSLPGTGTVSADITAPVVALDDVLTNDSTPALTGTVNDPTATVVVNVDGVDYPAVNNGDGTWTLADNTLPAFTDGPHTITVTATDAAGNVGNDTAVVTIDTVAPNAPVLDPINATDPVERSGESLVHTVICSTLSXWHRLHIRWICSATNGSWSVPNPGNLVDGDTVTATATDPAGNTSLPGTGTVSADITAPVVALDDVLTNDSTPALTGTVNDPTATVVVNVDGVDYPAVNNGDGTWTLADNTLPALTDGPHTITVTATDAAGNVGNDTAVVTIDTVAPNAPVLDPINATDPVSGQAEPGSTVTVTYPDGTTATVVAGTDGSWSVPNPGNLVDGDTVTATATDPAGNTSLPGTGTVSADITAPVVALDDVLTNDSTPALTGTVNDPTATVVVNVDGVDYPAVNNGDGTWTLADNTLPALTDGPHTITVTATDSSRXMXVIGXTVVTLXYGCQPXATVLDHRSRQQTQXAVRQSLVQTVTVTYPDGTTATVVAGPDGSWSVPNPGNLVDGDTVTATATDPAGNTSLPGTGTV

SEQ ID NO: 45181 - protein, 160 aa, Acinetobacter baumannii
MTVTTYIGLGSNLGDSRQILSEAIAKLKSLGEVKVSKLYQSPPMGPQDQPNYLNAVAQLKTELLPLDLLDQLQRFEQEAGRVRLRHWGERTLDLDLLIYGNEKIQNERLTVPHVGILQRDFVVIPLLDLDADLHINDQPLKNLELIQQPTLTVLADESWA

SEQ ID NO: 45182 - protein, 337 aa, Acinetobacter baumannii
MDPRSEVILRQHDYLKGRVLLINAPNDALVSQLPTEIDASVWTWNYADYQGFLNAGATAHFSVEFPLQEFDQAIIFVPKSKELLNYILHVVMSHLKIDQSVFLVGEKKGGVERAAKQLQSFGKILKLDSARHCQLWHLKIEKTEKIKPLESWLKTYTVQVNEQELTICALPGVFSQTHLDVGTAVLLPYLNQVKSGRIADFGCGAGIISCYLAKANSSNIIHALDIDAFALQSTEMTFSRNGIGSDQLRLQPVTGIADAPTELDAIVSNPPFHQGIHTNYDASEGLCQNAKKHLKASGELWIVANRFLNYPILIEKHFGQCEIKTDLQGFKVLYACA

SEQ ID NO: 45183 - protein, 896 aa, Acinetobacter baumannii
AASFAQTTLVKSKQNVEEYKLDNGFRVVLAPNDKENKIFINTIYLTGSLNDPQGKSGLAHLLEHLAFKGTQNVKGEEFQRRLDQYTLMTNASTDYYSTKYTNIVRPEKTALDQVLYLESERMDKLVLQEKFVPSEIEIVKREREVRMDQPFAVLMDQMWKSAYGNQYLGRLPIGDLPELKSIKMPELNQFYRSWYAPNNAVMVISGKFDKTDVLKTIDQYFSPIPARAVPKPVQVPVLDSTKLKNREFVVKKGSDLAKFHIYMDGKNTKIQPELAFAPMLYTMQPSGHLYQNMVETGVSTDVQASTWLDQDFNVVFLGAIYSPKNDPKKVESALLSGIEKGKPFTETELNRVKSLMKTQGELVNKDAVALGSRLSDYTVADGQWDQYFKDLDSIDKVKLNEVNQTLKQFLVAGHRIDGRYLPTPEDQKKALQLDAKDKPKTLDQTDVKAEPLKDPKVYQQEVAEFLKTSKQYAESNEKKILRGKLKNGMKYALFPVETRDDRTYATITMDFGTEKSLFDKGTVVDLTSYLLLRGSDKYSLQDIADKSIDAGGAAYASADGNGMTINIQSKTEKFDEFFKFVLEVMKNPKFEQSQFDLIKSQSLSSLDRPYTEPDVVAGLTLSRLVEEYQPGDLRYHFEPELAKKQLKNVTQEQVKELYQHFFAMNHAQIAITGAFDTQKMKKLLNQEFGSWNSKQPYEKILIQHVDFPAQQVHVLSEQREFGSYQSVLALPVGKNHPDASALILMNYILGESQISSRLAQELREKNALVYGFGTGLQLDRDTNVGALSISANYTAGRSAQVSASVHKVLNDLITHGITEQELAAAKADIMKKRVTALEDERNIHGMLNLELESGKTLLDRVKHDQELTKLTVADVNAVIKKYIKPSNLVEVMADQY

SEQ ID NO: 45184 - protein, 434 aa, Acinetobacter baumannii
MSQVTSNSSRFNLRAQVVQTLLKVQQGQSLASILNTQLNQVAERDRALFHELVLGTLRQWFALKSISLPLLSKPLNNETVETCLYVGLYQVLCTRIAAHAAISETVDATKQLGFPALSGIVNAILRRATRETDDFQQGLQQAHGLPSWLFKRLKKDWGEQTEALCQSLKQAAPLTLRVNQRHIGRDAYLAKLQSLDIQSRACLFSEAGIVLEQSVQITQLPGFEQGWFSVQDEHAQLCATLLPDLNNKTVIDACAAPGGKMAHLLEKFKPAQLIAIDQDPSRLVRVIENLNRLALDQSHTEILAADATKWNPVQPVDCIVLDAPCSATGVIRRHPDIRLLRQSSDIAQTIELQKQILEHMWQQLKVGGTLLYITCSILKSENEQQMINFFTEHPDAKEVKIEADWGIEQVHGRQLLPEAQSGDGFYYCKIQKIT

SEQ ID NO: 45185 - protein, 874 aa, Acinetobacter baumannii
MTISHIDPEYQANTIEPSVQQDWENRKVFKVADTVEGKHRYILSMFPYPSGKLHMGHVRNYTIGDVISRFYRLKGETVLQPMGWDAFGLPAENAAIAHKVAPAKWTFENIAYMRDQLKKLGLSVDWDREFATCTPEYYHWEQWLFVQLYKKGLIYRKLSTVNWDPVDQTVLANEQVENGRGWRSGALVEKRDIPMYYFRITDYAQELLDDLDTLQDGWPQQVLTMQRNWIGRSTGMEITFPSANTEIYADGLTVYTTRADTLMGVTYVAVAAEHPLALKAAENNPELAAFIEECRMGSVAEADLATAEKKGMATGLFVKHPVTGEELPVWIANYVLMSYGSGAVMAVPAHDERDFEFANKFNLPIKQVIDAKGADDADYSATEWQEWYGSKEGKLVNSGEFDGLEFQAAFDAFLAKLEPQGLANSKVQFRLRDWGVSRQRYWGCPIPMINCDTCGQVTVPEDQLPVVLPTDVVPDGSGNPLNKMPEFYETKCPCCGGDARRETDTLDTFVESSWYYARYASPDFTGGMVKPEAAKNWLPVNQYIGGVEHAILHLLYARFFHKLMRDEGVVQGNEPFTNLLTQGMVLADTFYREAENGKKTWFNPADIELERDEKGRIISAKYSGDGQEVIIGGQEKMSKSKNNGIDPQAIIDQYGADTARVFMMFAAPPDQSLEWSDAGVEGANRFLKRVWRLVASFLEKGNSATAIDKANLSKDAQDLRRKTHETIQKVSDDIERRHAFNTAIAALMELLNASNKFEAKDDNDVAVEREAITTLLTLLAPFAPHLSQTLLAQFGTDLTEATFPEVDASALTRNTQTIVVQVNGKLRGKLEVSVDISKDELLAQAKALPEVQQFLTGPTKKEIVVPNKLVNLVV

SEQ ID NO: 45186 - protein, 83 aa, Acinetobacter baumannii
MWSLIVAIVVGFFAGLIARALHPGDDKAGFIVTTLIGIAGSLLATYGGRLLGLYGENSAAGFIASVIGAVIILFIYNLIARKS

SEQ ID NO: 45187 - protein, 341 aa, Acinetobacter baumannii
MTRLSAPIKASMKKTATALTLACSLLSVMSISQAQAADNIDVSFQTILQQERNWAGLQSKSLKVGDITWSYSEGGSSTKPTLLLIHGLAGSRDNWNRVAHYLTTNYHVIIPDLPGSGETIVSQDFDYSVPNLAEKLRRFVEAANLKGPIHIAGHSLGGSIALLYAGQYPFETKSLFLVDSGGIFRSANTIYLKDPTYLKQLLVSKKGDFNYLLKQTMFNPPFIPKEFLQAQEKLMINQAPQTQKLVDQLIALNKVYTPDSFAVLTKTIDAPTLILWGKQDKIINVEVANELKRLLKNAQPPVILENVGHMPILEAEQLVIQQYVPFLLKVETNQSSKTTTP

SEQ ID NO: 45188 - protein, 304 aa, Acinetobacter baumannii
MIKWIILAIFVISALYIQHRGKVRHSFYRQFFDHSTLLAPINFLMYIFSKVPNQPYIDTQHFKDLKVLDENWEMIRDEAKALYDQGGIKASSTYNDLGFNSFFKTGWKRFYLKWYESSHPSAAELCPKTTALLKTLPTIKAAMFTELAPDSRLVRHRDPYAGSLRYHLGLITPNDDRCFIDVDGERYSWRDGQSVVFDETYIHYAENKTDQNRIIFFADVERPMKVKWMERFNHWFGRNVMTAASSPNETGDQTGGLNKAFGYVYQIRIKAKALKAKNRKLYYFLKWFLMLGIFFLIFVRPYVF

SEQ ID NO: 45189 - protein, 72 aa, Acinetobacter baumannii
  MISC_FEATURE (64)..(64): X=any amino acid
MLSAVIPSEHSYPAMRLASQPVHQRFVHSGPLVLGADPLKFPAPTVDRDRTVSRRSKASSRTLXWRQQYPWD

SEQ ID NO: 45190 - protein, 389 aa, Acinetobacter baumannii
  MISC_FEATURE (350)..(350): X=any amino acid
SLFNNIKKILLGNGAAQLIQFAFLPLSAFLYTPEQFGVFGTIQAYSTALTVFISLQLYVAIPFEKNQFLLNDLIVLNFKCIFAVTTFLLILYGLFNIDYFSILAIFLASITAVTNTLRSLIVYSGNFTRLSTSYVIRALVIVISQAALSFSTAINGLIYGLLLGEVIYSGLLHYFIKKSIDLPSFSLRSLFKVPIKNIFTKYRPFSLYGSILELTSVFIFYGPIVIFSYIFNGNNNYIGQYSFISRLVWPPIILISTSCTNALYFHITKINNLEVKSLTLKATALGGFIIAIAPFLGWCGHYIINLLIKTPTWNLVSDFGFYIITLAFVFMGTIYVRVVIRYNIYKNINXIMDIFFIAIVAIILYFREKIGISDVFEILKSYTVIYFIY

SEQ ID NO: 45191 - protein, 345 aa, Acinetobacter baumannii
MKQYVQQTIKLGTASVLGVVVAIQMGCSSATSKQSEEITVYTAVEADQLKQYQEELHKAYPELKVKWVRDSTGVITAKLLAEQKNPQADVVFGVALTSLLVMEKKDMLEPFKPEGIQNLKPEFVSQKPVPTWTGMDAWESAICVNKVELEKRKLPIPKTWKDLTNPIYKNLIVMPNPASSGTGYLDVTAWMQIWGEKQAWDYMQALDKNISQYPHSGSKPCKMAAQGEIPIGVSFGYPAFKLKAEGAPLEVVYPTEGLGWEMEASAIVKGTKKLSSAQKFINWSVSKAANEAYAHNFSMVAYKGIENTTMDFPKNLPQMLIKNDFYWAAEQRERILAEWSKRFEK

SEQ ID NO: 45192 - protein, 659 aa, Acinetobacter baumannii
MQIKTPDIGVDKANVAEILVKVGDRVEVDDSIVVLESDKATVEVPSTSAGVVKSILINQGDDVTEGVALIEIEAEGAAQAAPEPTPAPAAEKPAAPAPAQQTQASAQPAATSTATVEVTVPDIGVEKALVGEILVKVGDQIDVEQSIVVVESDKATVEVPSSVAGTVESIQVKEGDTVKEGVVLIQVKTAAASNAQAEAPTTTPAPAAVAEPVAAKQETVAAAPAQSGSVDINVPDLGVDKAVVAEILVQVGDKVDVDQSLVVVESDKATVEVPSTVAGVVKAIHLQAGQQVSQGVLLATIEAEGQAPAAAPAAKAEAAPAPQAAAPKAAAPVATQSAPAASTSGTDKLTKEQEAENAKVYAGPAVRKLARELGVILSQVKTSGEHGRVVKEDIFAYVKSRLTAPQAAPIAQATAAPAGLPSLPDFTAFGGGEVKPMTRLQQVSVPQLSLNNYIPQVTQFDLADITELEAWRGELKDGFKKQGVSLTILAFIAKAVAHLLKEEPYFAGHLADDQKSVLLRNEIHMGIAVATPDGLTVPVLRNPDQKSIKQIAVELGELSKKARDKKLTPKDLQGANFTITSLGSIGGTAFTPLVNWPQVAILGISPATMQPVWNGKDFDPRLMLPLSLSYDHRVINGADAARFTNKLTKLLKDIRTLLI

SEQ ID NO: 45193 - protein, 233 aa, Acinetobacter baumannii
MRTLAISTLLLGTVLSPMVFAQDDNALHYNIVNVQAEASRQVSNDEMHATLYIEKSNKQPAELSNQINQLMNQALATSRKYPQVKVETGAQSTYPIYDNDSNKLKEWRGRAEIRLESKDFKAASQLINELQQSFQTQSINFSVSDEQRKKVENELMVEASKNFQQRAQMLTQAWNKSQYSLVTLNLNTNNYFPQPVMRASLAKFAAAEAAPAQDMAAGESKITVNANGSIQFK

SEQ ID NO: 45194 - protein, 1232 aa, Acinetobacter baumannii
MNSRVQVSYQPIIDIEFSGLHLIEASAGTGKTYTLSSLMVRIFLEKYLPGQVIATTFTRAAAAELKSRIRARLVETHRYLDAKRSLTEKEILLQAEQESDLLLQHILKHFATRIAYACERLKLVIDQLDELFVGTLDSFSQKLLREFAFESGKIERAQITDDAKTYSRQLIHDVLREWIQSQPQTVIDALYLAGELKSVDSFVKLVEDSLNFSSAHFKLPEKPTIQFEQLAQLKQLAAEIDISLLEPYYSLDGDHYKHVSGTIFRNGAFNKLFSECLPQLLQVLKQSDSILVFDGSLAIQRELVFKFLGQLADQKVFKKCPAEISDGFYQHPCIQQIQQLFGVLKNYAEQFDQLHIYLKAYLCIEVKKRLPQVLQNKGETTFSQQIRTLSEALKGEQGQRFAVFVQARYPLILVDEFQDTNQDQDDMLASIWRHPERYQKGCMIMVGDRKQAIYGFRGGDMLTFLNAYKDIQAKHGREYKLIHNHRSVADLVEVVDALFQRQIDFGEQVQYDPIRAGTRPHPVLIDQNQPNPHPLRWLMLKDKETEAQQVAWKIRDLLNQSHAGQLYFQKDAQTQTLNEDDIAVLSRNHDGLDKVQFELERLGIRVNRPSKRSVFDCTIAQDVGALLTAILHPYDEAKVKRALISRLFAMDLKQLLQLEQTAEGLSQFMTGFDTIRELWSAQGFLVAWQQCLNQFGIWKNLVAVQSKDNERVVVNLRHLTEILSQHSEKYQGAQNLYHWYLKQLQSPLDREWELERRLSSEAGVQLMTIHQSKGLEFKIVFLLGADKPFRENNKTLNFSTQDITVSESAQTLTQRVVAIADKTYLNENELKQHEERALAEQNRLWYVALTRASHRVYALLQDTDGKSVSGLAFWKNRAEPFQHRCCTDEIILEQPPAARHLNQHINIIEIQAQHFPDQRFYSRGKTSFSYLAQHLRHKVGTDLLASQSHEAVLAEDELDQVISVEAPAAQPISWIKSNFPRGTLAGNFLHEIFEHIDFQCSDEWVSEIRRRFKNDYSSLWQDLLIKYQESFPEEQEAEYSLYHAVAEWLQEILSTPLYQGFRLNRLQPEHYLSECPFYLALSDRVLAMKRIQQLFAEYGMEMPELLEARSARYLNGSIDLVYFDGQRYHIADYKSNYLGENLADYSVESIAQSMSLASYWLQAGLYLVALHRYLKVKMQNYDIEQHLGGATYLYLRGMNGEAEQGYYYWQPSTEFVLRLDAILGYFAEDKIA

SEQ ID NO: 45195 - protein, 112 aa, Acinetobacter baumannii
MLSAVIPSEHSYPAMRLASQPVHQRFVHSGPLVLGADPLKFPAPTVDRDRTVSRRSKPSSRTSLNGEQPYPWDLLQPQDEMSRHRGAKHRRRYELLGGISLLSPEYLLSVER

SEQ ID NO: 45196 - protein, 310 aa, Acinetobacter baumannii
MLDREILLKKWLDEYLLANKSNETIYTLKNSLNLFFEYTNLALEEIEASDIRTFIAYRAQNGVGVSTLKKNISAIRTFFHYLTKEKLINFNPAEDIKIKKSSKVLPKFHEVTVINEVLDSNKNLEFERPSSTVIFKRDLALIEIAYSCGLRLEEIHSLQIENVEVKRKQVRVTGKGNKTRIIPLGSKAIEAYLEWLPLREEIMNKDTNQKHNYVFVTTTGAQLSRVQINKRIKNAFKLAGYPIQSNPHMLRHSFATHLINNSVGIREIQEMLGHSNLNTTQIYTDLDHTSMTNVYMDTHPRAVKNTEGEN

SEQ ID NO: 45197 - protein, 317 aa, Acinetobacter baumannii
METIGNLWLYIAFFGIVIVMLLIDFLGFKQKQGQDVSIKQAAYWSVAWVSVAALFGGGLWLYLQQTVGVTLANQKTMEYFAGYLLEKSLAIDNVFVWLMIFAAFAIPAALQRKILLYGVLGAIVLRTLFIFIGAWFVQEFSWVLYIFGAFLVYTGFKFLKGQEEETNIEDIKLLKWLRNHMRITPQLEGDKFFVRQNGLLWATPLFLVLILVEASDVIFAVDSIPAIFAVTSDPFIVLTANLMAILGLRAMFFLLAGAATKLHYLPYGLGIILLFIGAKMLLLDVFHMPIWISLSFIVIVLAITAYLSLRHNKRQIS

SEQ ID NO: 45198 - protein, 159 aa, Acinetobacter baumannii
MLLSYKYINSPVGQLKLVANENALVAVLWDNENPKRVRLAELVEQLEHPVLLKTEQQLQEYFEGKRREFTLPLDFEGTAFQKQVWTALLTIPYGETRSYKDIAVQIGNEKAVRAVGAANGKNPISIIAPCHRVIGAGGALVGFAGGLDKKDILLRLEQK

SEQ ID NO: 45199 - protein, 362 aa, Acinetobacter baumannii
MKASLRLRLDQLCDRHEELTALLADAEVISDNKRFRKLSREHSDLTEITEVWGKYRQAEEDIETAEMMKSDPDFKDMAEEEIQANKALLEELESQLNILMIPKDPNDSNAAYLEIRAGTGGDEAAIFSGDLFRMYSKYAESQGWRIEVLSENEGEHGGFKEVICRVDGDGVYGRLKFESGAHRVQRVPATESQGRVHTSACTVAILPEIDVDTNVEINPADLRIDTYRASGAGGQHINKTDSAVRITHIPTGTVVECQEERSQHKNKAKAMALLVSRLENAKRAAADAATSEMRRDLVGSGDRSERIRTYNYPQGRMTDHRINLTLYKLDAIMEGDLTELLDSLHREYQADQLAMLAQENGG

SEQ ID NO: 45200 - protein, 462 aa, Acinetobacter baumannii
MYCTNLIHYYAEDRALKYNNLNEFLNYVQARDPHQPEFLQAVEEVMTSLWPFIEKNPEYAEQGLLERLVEPERVIQFRVSWMDDQGQTQVNRAFRVQYNSAIGPFKGGMRFHPSVNLSILKFLGFEQTFKNSLTTLPMGGGKGGSDFNPKGKSDAEIMRFCQALMIELYRHLGPNTDIPAGDIGVGAREVGYMAGMMKKLSNDTACVFTGKGISFGGSLMRPEATGYGTVYFAEEMLKTRGQSFAGKTVSISGSGNVAQYAAEKAMFLGAKVVTLSDSNGTVYLKNGFTDELLAEVMELKNIQRGRISEFASKHGFEYFEGKTPWHIPVDIALPCATQNELTGEDAKTLIANGVICVAEGANMPSTLEAVEHFIEAKILYAPGKASNAGGVATSGLEMSQNAIRLGWTHAEVDERLHAIMKDIHANCVRYGTKEDGTVNYVDGANIAGFVKVADAMLAQGIY

SEQ ID NO: 45201 - protein, 75 aa, Acinetobacter baumannii
MARFYRRRKFCRFTAENVAYIDYKDIDTLKQYITENGKIVPSRITGTKARYQRQLALAIKQARYLSLIPYTDNHK

SEQ ID NO: 45202 - protein, 755 aa, Acinetobacter baumannii
MDQLGWDACDFILVCGDAYIDHPSFVSGVIGRVLEAQGFRVGIIAQPDWTNVESFRVLGKPTIAWGVTAGNMDSMINRYTADRKIRSDDAYSPNNEPNKRPDRAATVYCQRCREAFPDVPVLLGGIEGSLRRIAHYDYWSDKVRRSILMDSKADMLMYGNGERAIIDVMHRLAKGEKIHEITDVRGTAFIINKHNKAAKAKFVEIASNDVDTIGRVDPIINPYVMTEDIDGCEIEKDKGNTLAQYQGFQKEIVANPIVREGDQLDENTQIVQLKPAQSKAIKHKLPPRELAVIRLPSFEEVANDQVLYAHANRILHLETNPGNARALVQRHGERDVWINPPPIPLTTEEMDYVFDLPYARLPHPAYGDARFPAFDMIKFSVNIMRGCFGGCTFCSITEHEGRIIQNRSEDSILREIEKIRDTAPNFTGIISDLGGPTANMYRLHCKDPEIEKNCRKPSCVYPGVCQNLHTDHAPLVQLYRKARAIKGVKKILIGSGLRYDLAVLNPEYVKELVQHHVGGYLKIAPEHTEQGPLSKMMKPGIGTYDRFKQMFDRFSKEAGKEQYLIPYFIAAHPGTSDYDMMHLAIWLKKNGFRADQVQTFYPSPMATATTMYYSGKNPLAKVARYTENVDIVKGEKRRRLHKAFLRYHDPNNWPLLREALKEMGRADLIGNSKQHLIPTYQPKGAEGEYKSARKKNSTVAGDSVKRSGQTVQNKNQHKRPQKGQVLTQHTGLPPRETGEKRPFGGKSKPKSKARG

SEQ ID NO: 45203 - protein, 245 aa, Acinetobacter baumannii
MSTAIKTREIQYTAPDGSHLIGYFAAPESETPVPGVIIGPEWWGRNEYTEQRARELAEHGYAALAIDMYGDKKVTTTAAQAYEWMMQTFEDLDTVTDRANAGLQTLAAQPEVNSEKLAAVGFCYGGKVVLDLARSGAPLKATATFHGTLTPKAPAQKGNIQGEVLVLHGELDSMVTLEDVANFEKEMQAAEVKHEVVVLKDAKHGFSNPLADERAKANGVDLGYNSEAEKQGLAKMYALLERTLK

SEQ ID NO: 45204 - protein, 159 aa, Acinetobacter baumannii
MKLSSIPVVKLPLVDVSTDPLDLLVAGLALRMKQLARTSPKFIELVHDRAFRIQIGTDLGVARQIIINHGHIDTVAGSPEKADFILQFADSEQGVKTLLKGDPTAFMTGMQDGSIKMEGDFSLLVWFNQAAKLIPPKLPKPVKDKVRQARAFIKEKTGR

SEQ ID NO: 45205 - protein, 292 aa, Acinetobacter baumannii
  MISC_FEATURE (65)..(65): X=any amino acid
  MISC_FEATURE (72)..(72): X=any amino acid
MSRRNIAIWFDPATQWYAPSKGKQGRNQTYSDAAIECCLMIKSLFRLTLRMVTGFLQSLIKLCGXAAPNYQXYSYTTLCRRQKHIDIVISYQKSSDGLHLLMDSTGMKFLGESEWKRKKHGPEYRRQWRKLHIGIDSKTLQIRAVQLTTNNVSNSQVLGDLLNQIPQDERIDSVYTDGAYDTKQCRQVIADRQAHAVIPPRKNAKPWKDTKSSSLERNELLRTVKRLGRTLWKKWSGYHRRSLVETKMNCIKLLGDKLSARSFDSQVNEIHARVAVLNRFTELGRPLTQVTP

SEQ ID NO: 45206 - protein, 337 aa, Acinetobacter baumannii
MSNVDQRPIILTGDRPTGQLHLGHFVGSLRSRVGLQDSHHQHLLLADAQALTDNADNPDKVRRNILEVALDYLAVGIDPTKTTICVQSCLPALNELTMLYLNFVTVARLERNPTIKSEIQMRGFERDIPAGFLCYPVAQAADITAFKATVVPVGEDQIPMIEQTNEIVRRVNRQIGQDLLPECKALLSNMARLPGFDGKAKMSKSLGNTIVLNASDKDIKKAVNAMYTDPNHLRIEDPGQVEGNIVFTYLDAFDPNKEEVEELKAHYRRGGLGDGTVKKRLEGVLKELITPIRERREELAKDPDYIMDVLRQGTDKCRIITQQTLDEVKDGLGLFKF

SEQ ID NO: 45207 - protein, 302 aa, Acinetobacter baumannii
MSRQISTLIGVSALLLWSTLVGLLRLSTESFGPIYTVTYVYTISAIILFLTYGLPDLKKVSKKFLILSSLLFVVFELCFAFSITLANSSEKSIEMNIIFNMWPTLIIIMLAVLKEEKVNLLTILGVIVSFAGIVVINYHPNLNFIDNFSKNPISYLLIFLAAILWAVYCIYTKKQSNGTNAVSLYFILTAIALWILTLSTQGFHLPHVQGINGYIFVLINAVFFSMGYLAWNIGIIKGNMPVLIMLSYFSPIFSSAFSAFVLNSNLTINFWYGALTVTLGSLICWYSIRKNHVQHNQAKLAS

SEQ ID NO: 45208 - protein, 71 aa, Acinetobacter baumannii
MALGLLYATHQGKGFVRLLKDARVELRRVTWPTKQETVTTSWQVLLVVVVASLVLWCFDYGLGWLIKLIIG

SEQ ID NO: 45209 - protein, 839 aa, Acinetobacter baumannii
  MISC_FEATURE (234)..(234): X=any amino acid
  MISC_FEATURE (426)..(426): X=any amino acid
TVVARHRWYCPVPNPGHLGGCDTVTATATDPAGNTSLPGTGTVSADITAPVVALDDVLTNDSTPALTGTVNDPTATVVVNVDGVDYPAVNNGDGTWTLADNTLPTLADGPHTITVTATDAAGNVGNDTAVVTIDTVAPNAPVLDPINATDPVSGQAEPGSTVTVTYPDGTTATVVAGTDGSWSVPNPGNLVDGDTVTATATDPAGNTSLPGTGTVSADITAPVVCSSGIARIQXCRLTWLIETNTTHYRETGRSDIIATVLAMNNGDGTWTLADNTLPALTDGPHTITVTATDAAGNVGNDTAVVTIDTVAPNAPVLDPINATDPVSGQAEPGSTVTVTYPDGTTATVVAGTDGSWSVPNPGNLVDGDTVTATATDPAGNTSLPGTGTVSADITAPSGCADKVLIGRKAHQHKVAQWKTTPANVYXSMVDGVDYPAVNNGDGTWTLADNTLPTLADGPHTITVTATDAAGNVGNDTAVVTIDTSLPVVSLDDLTTNDTTPALTGAIDDPTATVVVNVDGIDYPATNNGDGTWTLADNTLPALIDGPHTVAVTATDPAGNTATDTATLTIDTVPADLIGAITIPEDLNGDGILNADELGTDGSFNAQVALGPDALDGTVVNVNGVNYTVTAADLANGYITAAIPVTGEGPVAIHAEAVDAQGNVDVADADVTVTVDTVPADLIGAITIPEDLNGDGILNADELGTDGSFNAQVALGPDALDGTVVNVNGVNYTVTAADLANGYITAAIPVTGEGPVAIHAEAVDAQGNVDVADADVTVTVDTVPADLIGAITIPEDLNGDGILNADELGTDGSFNAQVALGPDALDGTVVNVNGVNYTVT

SEQ ID NO: 45210 - protein, 128 aa, Acinetobacter baumannii
MAYSEKVIDHYENPRNVGVLDKNSENVGTGMVGAPACGDVMRLQIQVNDNGVIEEARFKTYGCGSAIASSSLVTEWLKGKTLDEAQAIKNIDIATELALPPVKVHCSVLAEDAIKAAIEDYRSKKSKA

SEQ ID NO: 45211 - protein, 285 aa, Acinetobacter baumannii
MSQLKPQEVVRLGDIQMANHLPFVLFGGMNVLESKDLAFEIAETYIDICKRLDIPYVFKASFDKANRSSLHSFRGPGLEKGIEWLGDIKKHFNVPIITDVHEPYQAAPVAEVADIIQLPAFLSRQTDLVEAMAKTQAIINIKKAQFLAPHEMRHILHKCLEAGNDKLILCERGSAFGYNNLVVDMLGFDIMKEMNVPVFFDVTHALQTPGGRSDSAGGRRAQITTLARAGMATGLAGLFLESHPDPDKAKCDGPSALRLSQLEPFLAQLKELDTLVKGFKKLDTH

SEQ ID NO: 45212 - protein, 522 aa, Acinetobacter baumannii
MSKTTQENPAVENSAQEKVSNTSKSASNTAKHNSTTPKAATNTPKTTRTRSTTAPARSPRSKSAASATPSTSSNVAAAPKATKTKTSVQQDKTMSQNTVRRVAILGGNRIPFARSNTAYFKASNSDMLTAALNGLVERFNLQGKRIGEVVAGAVLKHSRDFNMTREVVLSTDLAPETPAYDIQIACGTGLQAAFVVANKIALGQIDVGIAGGVDTTSDAPIAVGDGLRKVLLELNVAKTGKDRLKALTKIDFKKLLDAPSNGEPRTGLSMGEHQAITALEWGITREAQDELAASSHQKLAAAYERGFFDDLMTPFLGLNRDNNLRPDSTVEKLAKLKPVFGKGETATMTAGNSTPLTDGASVVLLASEEWAKENGHEVLAYLSFSETAAVDFIGKSGPKEGLLMAPAYAVPRMLKRANLKLQDFDFYEIHEAFASQVLSTLKAWEDEKFCKERLGLDAPLGSIDRSKLNVNGSSLGAGHPFAATGGRILATAAKLINEKGSGRALISICTAGGEGVVAIVEK

SEQ ID NO: 45213 - protein, 569 aa, Acinetobacter baumannii
MPHDVDLIILLAVGFGVALFFGYIAARLRLPPLIGYLIAGIIISPNTPGVEADIHLANQLAELGVMFLMFGVGMHFSLNDLLLVRRIALPGAILQIAVATLLGIGVSMLWGWSFGSALVFGLSLSCASTVVLLKALGDRGLLDSVNGKIAVGWLLVEDLVMVLVLVLLPATAVLLGGKAPAGAEGNIWLTLGITLLKVIGFIAFMLIVGKRVVPIIMQFVARLGSRELFTLTVVAAAVSIAYGSYAIFGVSMALGAFFAGMVVKESDFSHRAEEETLPLREIFSILFFVSVGMLFDPHILIERPLHILAVIAIIMVGKTLAAMALVLFFRYPINTALTVGASLAQIGEFSFILATLGVSLGLLTLEAQNLILAGALFSITLNSFIFSAIEPVQRWIRERSHLARLLERSGDPLAMLPDEVDQSYLRDQVVIVGYGGVGRRITENLINQNIKVVIAEENREIVEKLRQANIAAVSGVATEPGVLIQAHIMHARLLVISPMDILDIHRIVDIAKQLNPQIQVLICAESKEEAAVIRDEHIGEVFYAKEEMAKNMSHHILNQIELAHQSTHH

SEQ ID NO: 45214 - protein, 462 aa, Acinetobacter baumannii
MNALTALSPLDGRYASKCDALRPFLSEFGLIHARVTVEVRWLQALSNRPEIVEVAPFSAETNAALDAIVSNFSEEDANRIKEIERTTNHDVKAVEYFLKEKIAGIAELQNAGEFIHFACTSEDINNLSHALMLKNGREVLVSSMKQILNAISALATTHAEQPMLSRTHGQTASPTTLGKEMANVAYRLARQIKQFENVELLGKINGAVGNYNAHLSAYPNVDWPAHSQAFVESLGLTFNPYTTQIEPHDYMAELFDALRRFNTILIDFNRDVWGYISLGYFKQKLKEGEVGSSTMPHKVNPIDFENSEGNLGIANAVLAHLGEKLPISRWQRDLTDSTVLRNMGVGFAQSLIAFDACLKGIGKLELNANRLNEDLDQAQEVLAEPIQTVMRRYNVEKPYEKLKALTRGQAMTRDMMVDFVNGNELAQVPSEERARLAELTPATYTGNAAEQAKQINELISKI

SEQ ID NO: 45215 - protein, 178 aa, Acinetobacter baumannii
MAELLTLARPYAKAAFAYASEQGATDNWSNALQVLSAAVQDEAFSAYLNRPELTPAEQVKLFAKVLGEDQSQAVSNFLTLLADNDRLVLLPEIAAEYEQLKSQNNNNVDVVIESAFPLTAEQEQLLKSALEKRFNSTVTVSVEVKPELIAGVVIRAGDQVIDDSALNKLEKMRTRLLA

SEQ ID NO: 45216 - protein, 269 aa, Acinetobacter baumannii
MISLSDLRKFKAEGRKFSCLTCYDASMAKAMELAEIDTILIGDSLGMAIQGRDSTLPVTVEDMAYHTAAVRRGNQHALIMTDLPFMSYATLNDALQNAKTVMQAGAQMIKIEGGAWLSETVQVLTRNGVPVCVHLGLTPQSVHVFGGYKLQARTREAADQLIADCTAVVEAGAAVLLLECVPAQLGQEIAELFPNTPVIGIGAGNATDGQVLVVQDMLGLTFGRVARFVRNFMKEQSGETAILDAFKAFHAAVQDQSFPAKEHTFQVEL

SEQ ID NO: 45217 - protein, 945 aa, Acinetobacter baumannii
MLPIIILLPLILGTTLVSLLQRFSRGVTALGAIGVSLTSFGLLLTQAKTVLGGASIQQSWDWLPQLGINLSFRLDALGLLFSLLITGIGTLIYIYAYYYLGPKNSLSKLYLLLMLFMAAMLGISLSNNLIILLVFWELTSISSFLLVGYWSHYEAAQRGSRMALTITGMGGLAMLGGFVLLGQITGTYEINDIVGMKDLIQSHYLFVPTLLLILLGAFTKSAQFPFHFWLPNAMAAPTPVSAYLHSATMVKAGIFLLARLAPIFIGAALYHNIVTFVGLFTLCMAACFAIFKEDLKGLLAYSTISHLGLIVCLLGIGSPLAVAAAIFHIINHATFKAALFMIAGIIDHETGTRDLRKLSGIWQLLPFTATLTMITAASMAGVPLTNGFISKEMFFTELLASLSGSTVIFASIIATLAGIFAVSYSIRLVHGVFFDGPVGKQVPNKNAHEPPIGMRAPAILLATLCILVGIFPALLVEPLVNSVTRASLMQPDFAGTHLAIWHGFNAPLIMSIIALVGGTLFYFALAKDGMIRKIDLDPRLGRLQGRILFDLFLKHLLLTSRKIKQKTENGSLQSYLFLIIAFSIVMVTLPLFNQGLTTGTRELTHAPWIAVVLWLTLFSGCWMMLWFHHERIKAVLISGAIGLVVTMVFVTMSAPDLALTQITVDVVTTVLLLMSLSLLPQLTPYESRRSRRWRDAALAIIGGLGIGWITWLILTRDHNSISWFFAQQSLPLGGGSNIVNVILVDFRGFDTFGEITVLGIAAIGALCLMDGMRVHGTTMTQGLTYRFNPSPLMFRITASWVLPLALVVSVYIFMRGHNYPGGGFIAGLITSMALIIQYIALGQDQAEQMLKAQSGRLYEIWIGSGLTIAGLTGIAAWFWARPFLTSAHVYVELPVLGKLHLASAASFDLGVYITVVGATMLLISVLGDSRHSSMSGPVPHGEKSS

SEQ ID NO: 45218 - protein, 163 aa, Acinetobacter baumannii
MRHIISVLVENEAGALSRLVGLFSQRNYNIETLNVAPTEDPTLSRLTLTTYGDDHKIEQITKQLNKLVEVVKVVDLSEGSHIERELMLIKVKALGASRAEIKRTADIFRAQIVDVTPTTYTIQIAGTTEKLDGFIDALAENTILEVVRSGVSGIARGEKVLAI

SEQ ID NO: 45219 - protein, 489 aa, Acinetobacter baumannii
MSNSLFINGVWLQGSGTTFVKTNPVDNQTVWSGAEATASDVEKACQAARTAFPAWARLPFAERVAIVEKFAALLEENKKHLAEVISQETSKPFWETLTEVQSMIGKVAISIRAYHQRTGESSTEMADGVASLRHRPHGVLAVFGPYNFPGHLPNGHIVPALLAGNTVVFKPSELTPWTAEETVKLWQQAGLPNGVMNLVQGGRTTGEALAASHEIDGLLFTGSANTGYHLHKQMAGAPEKILALEMGGNNALIIDEIENMDAVVNLTIQSAFVSAGQRCTCARRILVKNSAQGDAFIQRFVEVAKNLKVGRWNDEQQPFMGGVISSAAATNMMNAQQKLLELGAKSLLPMTRPQEDSSLLTPGIIDVTGVAGIPDEEYFGPLTTIQRYDSFDEALKIANATRFGLSVGLVSPKRELFDDLLIEARAGIVNWNKPLTGASSAAPFGGVGASGNHRASAFYAADYCAWPMASLESESLTLPEKLSPGIVLP

SEQ ID NO: 45220 - protein, 157 aa, Acinetobacter baumannii
MIHVVLYEPEIPANTGNIIRLCANTGAQLHLVKPLGFELDDKKLKRAGLDYHEWARMQIWDNIELCLADLKAKGVEHVFPLTTKGSATPHTVDLNRPVALLMGPETRGLPEHVRLMFPQEQWIRLPMAENSRSLNLSNATAVIVYEAWRQQGFKKLG

SEQ ID NO: 45221 - protein, 333 aa, Acinetobacter baumannii
MLSQFVNKTLKVLALCTGLISTSHFAQANDFVTHPNYLNFKQKAMSTYGLSGEQVDAAMNGAKNLPNIINIMTRPGESKPWYDYRSMFLVEGTIQRGVRFKNQYADALNRAEQQFGVSQAVILGILGVETGYGANKGSFITRDALATLAFGYPRRAEYFGDELAALIAWTYKEGYPTNSIVGSYAGAIGFPQFMPSNISKYGVDFDGNGHIDLRNSAEDAIGSIANYLAKQGWQRDQPIGFMARYTGSNPESIIAKDLTQPTPYGALKNQGISPLNPLVKIDDLDMVNVIQLQDYNGPIYYLTYPNFQVITTYNKSRMYATAVWLLGTEVASR

SEQ ID NO: 45222 - protein, 306 aa, Acinetobacter baumannii
MALRHFLTLRDLSTLELNRILERASELKKMQQSNKVYQPFVGKVLGMIFEKSSTRTRISFEAGINQFGGSAIFLSPRDTQLGRGEPIEDSARVISSMLDIVMIRTFGHDIVERFASYSKVPVINGLTDDHHPCQLLADLQTYIEHRGSIEGKTVAWIGDGNNMCNSYIEAAHMMGFKLKIASPKSYEPKPEFLAEFGHCVELFDNAEDAAVNADLIVTDVWASMGQEEEQKLREKAFADFQVNEKLMGLAHPDCLFMHCLPAHRGEEISETMLDHKNAVVWDEAENRLHAQKALMEFLLNENLKKA

SEQ ID NO: 45223 - protein, 1064 aa, Acinetobacter baumannii
MFNNIFQILESFGFLSQHRSVYLQFSDASLNSQVFLQRIDGQHYLNQGMTAELICLSTNAHIPLKTFIGVQVAVDQVTDRGSFFRTTGIITGASQGQSDGALTLYKLAISDPTYLWHKRRNSRVFMNKSVKEISEILFQEWQGKSPLFASSLTLDLSGLKQTYDVRPFVMQLNESDYDFLTRLWRSEGISWLIDEAELTVASNMDNIQPQKLRLIDDNNQYQALTRRAIRYHRSSATEQFDSMTSLMADRSLQPTSIFVQRWQPDVLQQTDGAGSVQSKHQHSTNYDNQSLSLEEAWHFSPAWMQDLNGEDGATSASNQQLEKFNQNLSAYYDAQSKQFIAKTTVRDTQVGYWFELNEHPEIDQHESTDKEFLIIGKNYYNQNNLPKDLNQQIQTLVQQSDWQASNTDERQANQLILQRRYIPTTPAYNPQTHSPVAHPQRAKVVGPEGEEIYVDEWGRIKVRFLFTRSDDHSHDGGAGTNNNDTDSAWIDVLTPWAGEGYGARFLPRIGEIVVINFFNGDIDRPFVMGRVHEAQRHPTKFDNKGKLPDTKKLSGIRSKEVSGGGFGQLRFDDTPGQISTQLQSSHGASQLNLGKLSHPKDKAESEDRGEGFELRTDQWGALRAGQGLLVSTHKQDNAKGDHLDAEVAKKQLEGSQTNSKALSDIAKNQKTDEIESIEQLKDFASQIQQQIAKFEKALLLLSSPDGIALSSSEDIHISADAQINQIAGDSINISTQKNVIAHAQNRLSLFAAQSGLKAVAAQGKVEIQAQADALDVLSKLGITISSTDDKVIISSPKEVKITGGSSQITLNGSGIFPKTGGKFQVNAGQHLFMGGASANASAPELPKAKPMQGALELLRSYGGDNFFKQNSYKVIDSLGKQITGKLDGNGFAQVTGIAPGPAKVVFEKDNTSAWLQSSDFKRNYTWAEPVKSVQGLMKNALEAVGQNTMSQLQNNLLSTDKNSFKNLGKNTLDNLAGQTVAQIKNQVTNTALNTVSKQLNLNLSADQMKSLGQMATNPSQSLEMLKEQGGDFLSDQMTAKLFKTTNQESPIQQGDLDTFVRSKK

SEQ ID NO: 45224 - protein, 306 aa, Acinetobacter baumannii
MNHTFKWQGRHDGEGEAHQRIHHIVNTTQHAEFALIGFSSDEGVKRNKGRVGAADAPDAIRTQLANLPIHRPVSIVDLGTVTCEYGNLEQAQSELAEQVANSLEHGLKPVVLGGGHEVAFGSFSGLFQYVQAHAPNKKIGIINFDAHFDLREAEHATSGTPFLQAARLSEQHQKQFNYLCIGVANHANTKILFDTADALNCSYLRDHEVNMFNLNNVLVAVDAFIEKVDCLYVTIDLDVFTAAVAPGVSAPAVKGIDLATFEAIFKHIQETGKIKLLDIAECNPKFDLDNRTAKLAAYIVYQYLFS

SEQ ID NO: 45225 - protein, 368 aa, Acinetobacter baumannii
MGIRITGTGLFHPTEIISNEELADSLNAYVEQYNQENAEKIAAGELEELRGSSAEFIEKASGIKRRYVIEKSGILDPTRLRPRLSERSNDELSIQAEWGVIAAKQAMENAGVTAEDIDVVILACSNMQRAYPAVAIEIQSALGIQGYAYDMNVACSAATFGLKQAADAIRSGARRVLLVNVEITSGHLDYRNRDCHFIFGDVATASIIEETTTKTGFEILDIHLFTQFSNNIRNNFGFLNRSEDAVVDDKLFRQDGRKVFKDVCPLVAKIINAQLEKMQLTANDIKRFWLHQANANMNELILKYVAGKDADLSRAPIILDEFANTSSAGVIIALHRTGHEVDDGEYGVISSFGAGYSVGSIVVQKHVA

SEQ ID NO: 45226 - protein, 325 aa, Acinetobacter baumannii
MSRAISHIDTFQGLILALQNYWAEQGCVVLQPYDMEMGAGTFHTATFLRALGPETWNAAYVQPSRRPKDGRYGENPNRLQHYYQFQVVLKPNPDNIQQLYLDSLKAIGIDTLTHDIRFVEDNWESPTLGAWGLGWEVWLNGMEVTQFTYFQQVGGVECYPVTGEITYGLERLAMYLQGVDSVYDLVWTKGQFGTVTYGDVFHQNEVEQSTYNFEYAPVDKLFELFDFYESEANRLMEAKLPLPAYEQVVKASHTFNLLDARGAISVTERQRYILRVRTLARAIAQSYVQARAELGFPMAEPHLRDEVLAQLKAQAESEAAKAEKN

SEQ ID NO: 45227 - protein, 411 aa, Acinetobacter baumannii
MSGCGAEHGLISIDEALDLVINKPKNLSSIQKTLKNSLSSYLAKEIYSEINLPSFSQSAVDGYALCSHTEDLNNQKFQVTGEIRAGSESHDILGEGQAIRIFTGGKIPEGTTHVARQEIVSVISAQEICLTEYIRPQADIRFTGEEIQQGQLLAQVGQFLNIGSLAALSMAGVQELTVYRRPKVAVLVTGDEVAQTAEDLIDGKVFDANGPLLKAWFEDYGLDVELIHVADEADQVTHYFNQLKDSHDVVITTGGVSVGDYDFVRPCAFEVGFEQIFWKVKQKPGKPLFFAEYHNSQASHSCYLLGLPGNPAAVYVAMQVYGKSLLDALQGNRHGPEWFTAILEHDLKEDARERFLRMYAYFDAGQLRVKSLAKQQSHMLSNLMQANCLVRIPASTKLASGTVLKGIFISN

SEQ ID NO: 45228 - protein, 409 aa, Acinetobacter baumannii
MERVVITGMGINSCIGNTLEKVTESLKAGRSGIRYNEVYAKLNFRSHVSATAEMNFENIDPELKKHMGVCAMYAYNSALDALQHAKLDVTDIANNPKYGVIGGTGGTSTASIIDMLHTLKEKGASEVSPDLAPRYLTSTISSNLSRAFNLKGVSQSVASACATSADAIGYAYHLIAAGKQDLMLAGGGEEDHWSQTAIFDAMGALCSKYNDAPETASRPYSVDNDGFVIAGGGGMVVLESLSHAQKRGAKILAEVVGYAANSDGVDMVAPSGEGATRCIKLALAEAKQNGSDTIDYINTHGTSTPAGDIPELLAIERAFGGEEVPPLSSTKSMTGHSLGAAGVHEAIYSILMLQNSFIAPSINITELREEAKKFDIVQTSRETELKTVMSNSFGFGGVNTCLVFRKWEE

SEQ ID NO: 45229 - protein, 41 aa, Acinetobacter baumannii
ATKHLPIHMTRIAQGVPQGGELEYVDSHTLSQAVHNRMRMK

SEQ ID NO: 45230 - protein, 558 aa, Acinetobacter baumannii
MTTTTTKFRDVEIRAPRGTELTAKSWLTEAPLRMLMNNLDPDVAENPKELVVYGGIGRAARNWECFDKIVDTLKNLETDETLLVQSGKPVGVFKTHKDAPRVLIANSNLVPHWANWEHFNELDAKALAMYGQMTAGSWIYIGSQGIVQGTYETFVEAGRQHYNGDLKGRWVLTAGLGGMGGAQPLAATLAGACSLNIECQQASIDFRLRTRYVDEQATDLDDALARIDRYTKEGKAISIALHGNAAEILPELVRRGVRPDMVTDQTSAHDPLNGYLPVGWTWEEYRERAKTEPEAVVKAAKQSMAKHVQAMLDFQKMGVPTFDYGNNIRQMAKEEGVANAFDFPGFVPAYIRPLFCRGIGPFRWAALSGDPEDIYKTDAKVKELIPDDEHLHHWLDMARERISFQGLPARICWVGLGLRAKLGLAFNEMVRSGELSAPIVIGRDHLDSGSVASPNRETEAMQDGSDAVSDWPLLNALLNTAGGATWVSLHHGGGVGMGFSQHSGVVIVCDGTDEAAARIARVLTNDPATGVMRHADAGYEIAINCAKEQGLHLPMITQ

SEQ ID NO: 45231 - protein, 477 aa, Acinetobacter baumannii
MQSLNYRNNDASQHGSSAPLKRAMSTRHLVMISLGGAIGTGLFLGSGDVISQAGPIGAIISYFLGGLIAYTVMLCLGELAVHVPESGSFGEYARRYIGPGTGYMITWLYWLTWTATLGTEFTAAALLVQEWFPSTSVWAWTLFFGALVFFLNVSSTRLFAESEFWLALVKVITIICFIGLGLLAIFGFIPYQGHETAPLFSNLTAHGWFPNGLFPIFATMLIVNFAFSGTELIGVAAGEAENPAKTVPKAINAAIWRLLIFFVGTIVVISSLLPYHLAGLSANDVSSSPFVTVFNYIGIPYAEDIIRFVIITALLSAANSGLFAASRMMWSLSAKNQLPKIFAKLTPSGTPIIAIIVTMFGAIPGLLSEQFAPETIFKNLLGVAAFTMVVVWIAICISQFNFRRQWYKSGKTVKDLRFAAPLFPLTPIVGGLFCIVTCISMVFDPSMQVGFICCIIFILLCYVSYFIFYRKKDIAQN

SEQ ID NO: 45232 - protein, 294 aa, Acinetobacter baumannii
MQMKKHSLLFIALMSTTSLYANIPIESRGLSQNDGSASNTSSSNISVPTNLNWELMQKNQQLENDIRTLRGQLEEQANDIEQLKKDLANRYTDLDQRLELLHQKVDPDSATQDDSSNATSDNTTPASAPAPQTTESNKVAAVPATQTSEQQPSAPTTTTQPAPAAAQNQSNSLELEKAAYTVALDAYKQGGAKKAIAPMQNFIKNHPNSIYTGNAYFWLAEFHLATDPVNYNEAKKNYNVVANQYPNSSKAPRALYQLYSIAKDVDKNTVSANQYKNKLLSQYPKSEEAKFFNK

SEQ ID NO: 45233 - protein, 636 aa, Acinetobacter baumannii
MNALQPVYQVMDQGILQDFINSLLVETIIPEQFIFDFATAQTALNQHGKNLQEVFKNTSEQFSFVLLHEESRQGLVMFAVQKGITQAWKFANETEVFLLERTNDHVQINVIGIIELFEFIQAIGLFNQCSTDKVQAFYEQLQKCLKQYHLLQQHRVNAHDLLNQSLAHRFRILEQYAGYRDRPYHPLAKLKEGLSQQEYMQYCPEFAQELSIHWVAVHKDKMMFGEGVENIFKQQPSEIFIPRAERYQLKQEMFQRGLNETHIAMPIHPWQFEHLFPKFYADDIADGVCHPLNFISKGMYASASMRSLLSKNVLEESLKLPIGIKALGSLRFLPIVKMINGEKNQKLLQQAKAKDAVLKQKLWLCEETQWWSYLPEKQNDRTADNEWLFVEKPTHLAAQRRHIPAELLQEPYQLIPMASLGHTIMGEPAIFDYILQLQHKDINSKQILIEFEKLCTCFFDVNLRLFRLGLMGEIHGQNICLVLKNGEFDGLMFRDHDSLRIYLPWVEQSGLKDPNYLSPHDFRNTLYHESVEALLFYIQTLGIQVNLGCIVDNLASHYQIEVKDLWSVLAHALQQVIQNLNFQPEILTQLQHLLFEVPEWPYKQLLRPLLEQDTRIGSMPTGIGKTRNPLWYALNC

SEQ ID NO: 45234 - protein, 487 aa, Acinetobacter baumannii
MVEVELKFQLPESKKKTVQQYLKKHKAQYIHLQAKYYDTPDRLLAKNGMALRLRKENDLWVQTFKAAGQSHLHRVEEEVFLGKCDQEPDLNLELYKDNKAVTDLITQALGSEVEKLSLQFETDVQRTYHVFEADDTAIEVCLDDGAVKTATAQSKICEVEFELKQGAVKTLIQFAQQWINRYELWLDVRSKAERGNLLALGQAASPAVHAKKLNLDKNISAEQALKKIVENCLGQFLPNMAAIADGVAEAEHIHQARVSLRRLRSALKHFSAWSDELNPVWEEQIAELFRQLGDTRDEDAIRTEILPMIVQHGSPELLLPISEQPLKDLATLFKSADTIKLILALLAFAYSEEDDQNAKGKLKKYIGKSLDKLHHQVVSNADHFTELEVTEQHRTRKKAKQLRYCIEFISSLYPRKNVQQFLKQLQPVQNTLGLYNDLFIAEDLFNKAVEHDPHFWFALGWVKAKQPYLQNQSAEALQKFKQAKTFW

SEQ ID NO: 45235 - protein, 301 aa, Acinetobacter baumannii
MISLIKNSSYGGTIAILVASFLWGTTGTAAAFAPTLGPLAIGAVAMGGGGLLQALIASRAIREHRQFIGRNISIILLGVVAVGIYPLAFYSSMHYAGITIGTVVSIGSAPLIAAVLERFFDRKVLSKTWFLSFVLGVVGVSLLSMGESHAAQESTNEWNKIFGIFLGLVAGATYSLYSWAAKRLIDRGIAAKAAMGMIMGGGAVILLPTLLITGGGLLQSSTNLLVAGYMMLIPMFLGYLLFGFGLKTVNASQATTLTLFEPLVAAIFAIVLVGESVSWIGWAGMFLIFICILMLSKPENT

SEQ ID NO: 45236 - protein, 513 aa, Acinetobacter baumannii
MALWRSTFIVSAMTMLSRVLGLVRDVVLLNVFGAGKDFDTFVVAFRIPNFFRRLFAEGAFSQAFIPVLTEYKTGRVHAEVQILISRVFGCLLTVMTLLTFVAMVLAPAIIYMYAPGFHNDPEKFDLAVSMFRLTIPYLMFMSLTAFASSILNSYGSFASPAFSPVLLNVAMIAGAWWLTPYMAEPIKALGWSVVAAGILQLAIQIPELWRKNLLIPPKVDFKHEGVERILKLMLPALFGVSVTQINLLLNTIWASFMQDGSVSWLYSAERMTELPLGLIGVAIGTVILPSLSARHAEQDQAKFRSMIDWAAKVIVLVGLPASIALFMLSTPIIQALFQRGEFDLRDTQMTALALQCMSAGVISFMLIKVFAPGFYAQQDTKTPVRVGLMSVAANAILNVVFIGFFKLINWHAEHMALALASSGSALVNAGLLYFYLHKRNIFRFGAHWKKLALQYGLANLAMIAALWFGLNWYNGELSQWIRVAEVVGLCVVGVIAYLSGLLLTGFRPRDLKH

SEQ ID NO: 45237 - protein, 288 aa, Acinetobacter baumannii
MQFRKTLNIGIMLKIVLSEIGMTQGLLAGKRFLIAGVASKLSIAYGIAQALHREGAELAFTYPNEKLKKRVDEFAEQFGSKLVFPCDVAVDAEIDNAFAELAKHWDGVDGVVHSIGFAPAHTLDGDFTDVTDRDGFKIAHDISAYSFVAMARAAKPLLQARQGCLLTLTYQGSERVMPNYNVMGMAKASLEAGVRYLASSLGVDGIRVNAISAGPIRTLAASGIKSFRKMLDANEKVAPLKRNVTIEEVGNAALFLCSPWASGITGEILYVDAGFNTVGMSQSMMDDE

SEQ ID NO: 45238 - protein, 472 aa, Acinetobacter baumannii
MYKSEQLAHSIRQLIESGTLNAHEKLPSLRDQVQRSGFSLMTVMNAYQELESQGLIYSKEKSGYFVAEQIALKPLEQYSIVSLNSKIEINSLVFKYLKSIQHESVVPFGSAFPDSQLLAASKLIQIMGQLARQRQSYDQTASLPPGNLALRKLIAQRYCMQGIQTDPDDIVITSGGLDALNLSLQAVAKPGDYILLQQTVFYGAWQAAERLGLKVITIPEHPQHGFDLEAFEQVIHTYPIKVCWLMLNSHNPIGFTVSDEIKYKIAKLLHEHQIYLIEDDVYEELYYGGQKPLSMKYFDQQNLVLHCSSFSKTLGAGFRVGWVYAGKFSDHIQHLQLMSTISVNALIQNALVEFLSHHHYEKHLRTLRLSLERYKKQFYHYLKQHLPAICEIYYYPSGYFLWVKLPHKLDSMQIYEELIQQDIGVAPSPLFSVLPAQQHYLRINCSFEWNEKIQAALDQVIKTIQQRVEASL

SEQ ID NO: 45239 - protein, 411 aa, Acinetobacter baumannii
MNNFAVSRGDFNEWMVPVFAPANFIPVRGEGSRIWDQENKEYIDFAGGIAVNALGHAHPVAVNALTEQAKKLWHVGNGYTNEPVLRLAKQLTENTFADKVFFCNSGAEANEAALKLARKVGLDSGVAGKSGIVAFNNAFHGRTLFTVSAGGQPKYSQDFAPLPNGISHVAYNDLEAAKAVINEQTCAVIVEPVQGEGGVIPADIEFLKGLRELCDQFGALLIFDEVQTGVGRTGALYAYMNYGVIPDVLTTAKALGGGFPVGAMLTTDKFAPHFSVGTHGTTYGGNPLASAVAGAVFEFINTPEVLNGVKERHDYYKKALNQLNEKYEVFKAIRGSGLLLGCVLKDEFAGKAKDINNLAGEEGLLSLIAGPNVVRFTPSLIVPFADIDEGLKRFERALARFVELQKDEQAA

SEQ ID NO: 45240 - protein, 250 aa, Acinetobacter baumannii
MPRTSKQEHTELSIEADSPVPLYQRVKQLISQKIYEGSWAVNKKIPSESELVNQLGCSRMTVNRALRELTTEGLLVRIQGVGSFVAEGQGRTALFQINNIADEIIARNHKHHAEVLVLEQIYANAEQSVLMQTREGQKLFHSIIVHYENDVPVQVEDRLVDAALIPDYLEQDFKTITPNAYLMAKAPVTEGEHIVEAVLASPQECKWLKITKAEPCLLIRRRTWSNKQLISSARLIYPGSRYYLEGKFNP

SEQ ID NO: 45241 - protein, 1059 aa, Acinetobacter baumannii
MNISKFFIDRPIFAGVLSVLILLAGLLSVFQLPISEYPEVVPPSVVVRAQYPGANPKVIAETVASPLEESINGVEDMLYMQSQANSDGNLTITVNFKLGIDPDKAQQLVQNRVSQAMPRLPEDVQRLGVTTLKSSPTLTMVVHLTSPDNRYDMTYLRNYAVLNVKDRLARLQGVGEVGLFGSGDYAMRVWLDPQKVAQRNLTATEIVNAIREQNIQVAAGTIGASPSNSPLQLSVNAQGRLTTEQEFADIILKTAPDGAVTRLGDVARVELAASQYGLRSLLDNKQAVAIPIFQAPGANALQVSDQVRSTMKELSKDFPSSIKYDIVYDPTQFVRASIKAVVHTLLEAIALVVVVVILFLQTWRASIIPLLAVPVSIIGTFALMLAFGYSINALSLFGMVLAIGIVVDDAIVVVENVERNIEAGLNPREATYRAMREVSGPIIAIALTLVAVFVPLAFMTGLTGQFYKQFAMTIAISTVISAFNSLTLSPALAALLLKGHDAKPDALTRIMNRLFGRFFALFNRVFSRASDRYSQGVSRVISHKASAMGVYAALLGLTVGISYIVPGGFVPAQDKQYLISFAQLPNGASLDRTEAVIRKMSDTALKQPGVESAVAFPGLSINGFTNSSSAGIVFVTLKPFDERKAKDLSANAIAGALNQKYSAIQDAYIAVFPPPPVMGLGTMGGFKLQLEDRGALGYSALNDAAQNFMKAAQSAPELGPMFSSYQINVPQLNVDLDRVKAKQQGVAVTDVFNTMQIYLGSQYVNDFNRFGRVYQVRAQADAPFRANPEDILQLKTRNSAGQMVPLSSLVNVTQTYGPEMVVRYNGYTSADINGGPAPGYSSSQAEAAVERIAAQTLPRGIKFEWTDLTYQKILAGNAGLWVFPISVLLVFLVLAAQYESLTLPLAVILIVPMGILAALTGVWLTAGDNNIFTQIGLMVLVGLACKNAILIVEFARELEMQGATAFKAAVEASRLRLRPILMTSIAFIMGVVPLVTSTGAGSEMRHAMGVAVFFGMIGVTFFGLFLTPAFYVLIRTLNSKHKLHSAAVHEAPLASPHDH

SEQ ID NO: 45242 - protein, 296 aa, Acinetobacter baumannii
MLDSKQCEAFLAVAEVGSFDAAGEHLCITPSAVSLRVQALEKYLGQILIIRGRPCVLTQAGQTLLQHLRHTRLMEQNLLQGLMGKSSESEFYKIALASNADSLATWLLPSIQQTLFKEKIVLELKIDDQSHTHTLLETGQVNACITAEEQVMAGCLAQPLGKMRYKMLASAEFVNRWFSGGVNREVLRKTPAVIFNHKDLMHSEVLLKGYGLPMQSYPYSFIPATDAFVKAIQLGLGYGMVPELQVQPLLENGILVDIMPEAQLDVPLYWHHWKRQSKQLDVLTETIVESAKQILR

SEQ ID NO: 45243 - protein, 229 aa, Acinetobacter baumannii
MNKYFAEFLGTFWLVFGGCGSAVLAAAFPELGIGFAGVALAFGLTVLTGAYALGHISGGHFNPAVSVGLWVGGRFDVKDLIPYIVAQVVGATAAAFVLYIIAQGQAGFSGVGGFATNGFGDLSPNKFGLGSAFIIEVVLTAFFLIIILGATDRRAPAGFAPIAIGLGLTLIHLISIPVTNTSVNPARSTGVAFFAETAALSQLWLFWVAPILGAVIGAIIYKVVAGDKD

SEQ ID NO: 45244 - protein, 946 aa, Acinetobacter baumannii
MQEVADALRLDTELSADSAAYIEELYEQYLTSPTSVAEDWRQYFDKYPKGDQPHSAVREQFLLLGRNANRVQPVVQSTVSTEHERRQIGVLQLIAAYRNRGHQKAKLDPLGLAKREDIPDLDLSAHGLTKSDLDTVFNTGNLEIGKSEATLAEMIEAMEAIYCGSIGVEYMHIVDTKEKRWIQQRLESARGKFNFSNEQKKGFLERLTAAEGLEKYLGNKYVGAKRFGVEGGESFIPMVNEIIQRAGAVGCKEVVIGMPHRGRLNLLVNIMGKNPADLFGEFEGKALHKKGSGDVKYHQGFSSNVMTPGGEVHLALAFNPSHLEIVGPVVEGSVRARQVRRRDIGGDDVLPVIVHGDAAFAGQGVNMETFQMSQTRGYTVGGTVHIIVNNQVGFTTSDPRDARSTEYCTDVAKMIQAPIFHVNGDDPEAVIFATQLAHDFRHEFRKDVVIDLFCYRRRGHNEADEPSGTQPLMYQVIAKKATTRTLYADQLVQEKVLDRAEADQMVEDYRADLEAGNHVANALILEPNTKMFVDWTPYLGHEYTDDWDTSFDINRLKELGEGMSKLPEGFVMQRQVQKVIEDRVKMQTGETPLNWGAAETLAYATLLDEDYLVRITGEDVGRGTFSHRHAKLHNQVDGSTYIPLCHVKENQPRFAIYDSLLSEEAVLAFEYGYATTIPKSLIIWEAQFGDFVNCAQVVIDQFIASGETKWERVCGLTMLLPHGFEGQGPEHSSARLERFLQLCAEDNMQVITPTTPAQIFHALRRQAVRPIRKPLIVMSPKSLLRHKLATSTLEELAHGSFQTVIDEIDQINKSDVTRLVLCGGKVYYDLLEKRREQNLTNVAIVRIEQLYPYPEQRLAEILAAYPNVKELVWAQEEPKNQGAWLFIAPRLYDDILKSGKQIRISFAGREASAAPACGSPYLHAKQQAQLINDALAIEAEQSGDSQ

SEQ ID NO: 45245 - protein, 574 aa, Acinetobacter baumannii
MELLSGGEMLVRALADEGVEHVFGYPGGAVLHIYDALFQQDKINHYLVRHEQAAGHMADAYSRATGKTGVVLVTSGPGATNTVTPIATAYMDSIPMVVLSGQVASHLIGEDAFQETDMVGISRPIVKHSFQVRHASEIPAIIKKAFYIASSGRPGPVVVDIPKDATNPAEKFAYEYPEKVKMRSYQPPSRGHSGQIRKAIDELLTAKRPVIYTGGGVVQGNASALLTELAHLLGYPVTNTLMGLGGFPGDDPQFIGMLGMHGTYEANMAMHHADVILAIGARFDDRVTNNPAKFCPNSKVIHVDIDPATISKTIMAHIPIVGAVEPVLQEMLAQLKQLNVSKPNPEAIAAWWSQINEWRKVHGLKYENPSDGTMKPQQVVETLYKVTNGDAIITSDVGQHQMFGALYYKYKRPRQWINSGGLGTMGVGLPYAMAAKLAFPDQQVVCITGEASIQMCIQELSTCKQYGLNVKILCLNNRALGMVKQWQDMNYEGRHSSSYVESLPDFAKLMEAYGHVGIQINHADELESKLAEAMAINDKCVFINVMVDRSEHVYPMQVAGQSMRDMWISKGERI

SEQ ID NO: 45246 - protein, 193 aa, Acinetobacter baumannii
MRGVNKVILVGTLGRDPETKTFPNGGSLTQFSIATSEVWTDKNTGERKEQTEWHRIVLHNRLGEIAQQFLRKGSKVYIEGSLRTRQWTDQNGQERYTTEIRGDQMQMLDARQQGEQGFAGGNDFNQPRFNAPQQGGGYQNNNQGSGYGQNNGGYGGQGGFGNGGNSPQGGGFAPKAPQQPASAPADLDDDLPF

SEQ ID NO: 45247 - protein, 587 aa, Acinetobacter baumannii
MDKCVDNLNSPEQSDLSWLTTWSTFLNQAPFTAQTQAPEAAYFLQQLIEASLQGDSCIEISPEQIETLGQLVISAEQAKSQVAPCVHDEQGLALYRYWNLEQRLAEQIRRLKQQPIQPVSCEEHLDLLTDPHQQAALQMVTRQSLSIITGGPGTGKTYTLARIIAVLSQAIPHIRVAMAAPTGKAAQRMQEALQNSFNDPKLLESGLISAELRNQSTQTIHRLLGMGHSQTPRFNQKQPLPYDVIVVDEASMLDLNLATLLFEAVPESCRIILLGDANQLASVDVGAVLADLQQIEALSENRVHLQTSRRFAEGALIGQVARFIQMQTSQINHEQILQKFEIDIVQVSELRSIPLETDMPDVVQLEYLPEESPIALETYYQKLMVDFQGYVQSLKAYIQDDRSLEHIENIVRSFDDYRILTAVRHGPFGLQQLNQYAERWLQQQLGIVTLGGWYVGRPVMMTYNDYQLGISNGDIGLCFEHRTQPQQFEVYFPSLNKWVAANRLPKSIQSAFALTIHKSQGSEFTHTAVVLDQAAKNLLSQELIYTAITRAKKVVSLLVDPEALLQSFTVRTTRKSGLVEKVNRLVR

SEQ ID NO: 45248 - protein, 487 aa, Acinetobacter baumannii
MQTLRASKCGLSTAQLPSSILDVIDSLTKAGYEAYIVGGGVRDLMLGLNPKDFDAVTNATPSQIKEVFGRRCRIVGRRFELAHVYSGRELIEVATFRAPPKKAVTSASGMILRDNNWGTIEQDFARRDFSINTLYYQPRKGIVLDFCKAIDDVKSKTLRLLGDPVQRFEEDPVRMLRTLRFAAKLNFKIDSAILDIFDVEMTQLLRDVSPHRLYDESQKLFTMGHLARVLPMLIDFGVWKQLFADIRPDLTPFIQRAAKNTDQRIQVGKTINPAFFYAVLLWQPFLERCDFYLSKGVVPAEARAQAGLDVLKRQATRTVIPRFAETFIREVWEMQTRLLNPKPQQIEALASHARFRAGFDFLLLREKSGDDTTQGMGSWWEAYQEMSNDEKEAAISQYNRQKAKSRRKVAAEPVESNKVDTEIEPLVDVPESRSRRGKKERARQEQSIDRFIEKSSAAQTNVMSDHPILKRKRVQRDLSQVIFGPTQ

SEQ ID NO: 45249 - protein, 126 aa, Acinetobacter baumannii
MKMTAKIALFSAAIVTMGSLAACQSTTQPPKPEHGMMQDGPRDGHHHRMKHREFTPEQKAAWEQHRAERKARFEQIQKACEGKAVGQTVNVQVGDKTLEGTCNLRFEPKRPQPPVNAPAPVASQAK

SEQ ID NO: 45250 - protein, 198 aa, Acinetobacter baumannii
MFSDRFEQLVQALRILPSVGPKSAQRMALHLLMKNREGAFALAHALHEASSYIHECSVCHSLTEHEICDICASTERDDQLLCVVESPADVMAIEQSGSFRGKYHVLGGHLSPLDGIGPEEIGIPYLIQRLSQGTIEEVILATNATVEGQATAHYLVEATKHLPIHMTRIAQGVPQGGELEYVDSHTLSQAVHNRMRMK

SEQ ID NO: 45251 - protein, 225 aa, Acinetobacter baumannii
MKAFIVRVLLIFIGAILLIQLWIFSSLVWWRTHEVDTTMFMRIDYWSDPSEPIIHEWLDYDDISDNFKHAILAGEDAKFIHHHGFDWDGIRFALERNNEQGEVVAGGSTVSQQLAKNLFLYNKRSFIRKGQETVATWMMERMWSKRRILEVYMNSVEFGKNLYGVEAAAQYYYGKSAKSLTREQAAFLAALLPDPKYYQDHRNDRKLQYRKRVILRYMNSTQIPE

SEQ ID NO: 45252 - protein, 452 aa, Acinetobacter baumannii
METVQGGMLLVYTLIAIVALIVMIAKFRIYPFLVLIIVSLGLALAVGMPMDGIVKSYEAGTGKTLGHLAIVIALGTMLGKMMAESGGAERIAITLIKWFGEKHIHWAMMFIALIVGLPVFFEVGFVLLIPIAFNIAKRTGKSLLIVGLPMVAGLSVVHGLIPPHPAALLAVQAYHADIGKTIMYSLLVGVPTAVVAGPLYALWINKYVKLPENNPLAKQFVEADANNTRELPSFGITLFTIMLPVALMLVGSWADVFFAPKTFPNELLRFIGTSDIALLIAVLVSFITFGTMQGFNREQIEKFCGGCLASIAGILLIVGAGGGFGGILRDSGISNEIVSTALKANLSPLLLGWLVAALIRLATGSATVAMATACSIVAPIAAAAGVVVRPELLVLATGSGSLIFSHVNDAGFWLIKEYFGMTVGQTLKTWSVLETIISVLGLSFTLLLSAVL

SEQ ID NO: 45253 - protein, 208 aa, Acinetobacter baumannii
MKFLKFLTFSTILTLSAHTYATVGGGQKIEVLGYQQKEKKLYVLRHYEDGRGRLPQLYYYLLNSKSPDKLIEVKSLYINPKTHKIDYDQDSTAFNKALNKIKRNLTPLIVSNSKTVKIQTLKTHQNQISSWFDPSGKITQYKTEYVVKSPSLQSKTHVAVHYSKAIKISQNYSVPKQNKRLVIVKYLGVPEETGYDIEDPVLLLPIKK

SEQ ID NO: 45254 - protein, 223 aa, Acinetobacter baumannii
MATNDSTSKKKTKTVSKERQFKGLSLSERKEARREKLIEAGIATYGTLGFFSVTVKDVCQEAKLTERYFYESFKKSEDLFQTIFLKMIEELQQNLMQAVIKAAPDPEQMVDAGLRALLSTLKDDPRLARIVYVDAILVQELHNQATIQETLAQFDRMIQAFVMLTMPQIQHNENELSLIATGLNGYVTQIAVRWVMGGFKQSLEQVLAACRIVFLALLAKVSK

SEQ ID NO: 45255 - protein, 288 aa, Acinetobacter baumannii
MNFDRNTPIAFLGIGLMGSRMASRLIQAGFQVAVWNRTASACEELIDIGAHALDLSNIGQYPLILTCLADDKAVQAVFDQIQTNLKAGQVIVDFSSLSVAATKALAQAAASQDVIWIDSPVSGGTAGAEQGTLVIFAGGDAQTIEALSPVYNVLSQRVTRMGDTGTGQATKICNQLIVAANSALIAEAVALADRAGVDTTLLAPALAGGFADSKPFQILAPRMATHTFEPVQWKVQTLSKDLNNAVTLANNVNLDIPVAQKALLQLQTHQKNGFAEKDLATMIQVVEQ

SEQ ID NO: 45256 - protein, 643 aa, Acinetobacter baumannii
LQGCGDDSSSDQPKDDSNTTPPNLIVDNDPTSCSKLAQDGSSVVVGSNQNGDPAAPEGASGYRLGNTVKYADKYMVVANTPLAVKAGCDVLKAGGSAVDAAVAVQAVLGLVEPQSSTIAGSGFMMYYDAKTKQVTAYDGRETAPAAANEFYLIRQNIYDPNSPPPVPNARRSGRSIGVPGVMRLLEQAQKEHGKLEWKQLFGEAIGLADNGFRIPGRLADAIASNASNLALDANAMATYFYPDGSPRKVGETMTNKAYARTLEALASQGANALHTGPIAQAIVAKAGQTVGDDPAKTPITPSLMTLQDLSNYQVKKRDPICTTYRDRYYVCTMPPPISGGIAVAQTLGILENFDMSLYPPKNPENEGGVPDVMGVHLVSEAERLAYADRDKYVADTDFVRLPAQGIPSFIDKNYLKQRAALINPNQSMGVAPAGNFNTAAGVDTTVEHGTTQFTIVDAYGNVVSMTSTVESSMGSFHMVDGFLLSNQLTDFSANPYDSTGAPVANRVEGGKRPRSTMAPTLVFKGTTPDEFYMATGSPGGGTIIQYVVKTLVGALDWNLNAQQATSLVNFGATNSKNTNIDSSNVQLSLVDLIEGLKAKGHGISNTAQTSGISTIMKVNINNQSKYAGGVDPRREGIVLGNGA

SEQ ID NO: 45257 - protein, 203 aa, Acinetobacter baumannii
MTDSLLKYREQHKHRLNYMPWLYWTLKPKHRVWAEEWQKEYQAYLMDMETVEIGENCFISPLAHIFAEPGRKIKIGNNCFIAADCSLHGPLEIGNEVAINHHCILDGGRAGIKLHDQVRIAAYCHLYAFDHGMQLDRPLYQQPVRSQGIEIEKDVWLGAHVGIKDGIKIGKHAVVGMNSMVTKDVEPYHIVGGNPAKFIRLRE

SEQ ID NO: 45258 - protein, 192 aa, Acinetobacter baumannii
MSQSYIAPVELEKAYRLLNHGPTVLVSAQHGDDRNVMAAAWACALEFKPAKVTVVLDKSTKTRQLVEQSGYFTLQVPCYAQLNMTKQLGTISKLDDPQKLEHCGVELFYQKDLTSPLVSGCIAWLVCKLIPEPHNQSAHDLFIGSVVGAWADSRVFRDGHWHFQHVPKELRSLHYIAGGTFYLIGEEVKADL

SEQ ID NO: 45259 - protein, 512 aa, Acinetobacter baumannii
MELLIQPGKLTLADLRQAYLNPIKVKLDESASSAINASVACVEQIVNEGRTAYGINTGFGLLASTKIAPEDLEKLQRSLVLSHAAGVGEALDDAMVRLIILLKANSLARGFSGIRRKVIDALLALINAEVYPHIPLKGSVGASGDLAPLAHMSLVLLGESKARYKGEWLPAVEALKIAGLEPISLAAKEGLALLNGTQVSTAYALRGLFEAEDLFAAATVCGGLSVEAMLGSRAPFDARIHEVRGQRGQIDVAAAYRDLLTDSSEISRSHEECGKVQDPYSLRCQPQVMGACLTQIRQAAEVLEIEANAVSDNPLVFAEQGDVISGGNFHAEPVAMAADNLALAIAEIGSLSERRISMMMDRHMSQLPPFLVANGGVNSGFMIAQVTAAALASDNKALAHPASVDSLPTSANQEDHVSMAPNAGKRLWYMADNVRGILAVEWLGACQGLDFREGLKSSPKLEQARKILRDQVPYYSEDRFFAPDIEQASELLASGCLNELLIPKLLPSLSEV

SEQ ID NO: 45260 - protein, 413 aa, Acinetobacter baumannii
AASNHDSDDDSSAPVDTTPPSTDGVTFSVDPVTSDNVINASEASGNVTITGVLKNIPADAANTAVTVVINGVTYNATVDKAAGTWTVSVPGSGLVADADKTIDAKVTFTDAAGNSSSVNDTQTYTLDTTAPNTPVIDPVNGTDPITGTAEPGSTVTVTYPDGSTKTVVAGPDGTWTVPNPGLNDGDEVTAVATDPAGNTSGPGTAIVDAVGPNTDVLISAVDSVTADNVINASEAAGNVTITGILKNVPSDAAATAVTIVINGVTYTATVDSAAGTWTVSVPGSGLVADTDKTIDAKVTFTDAAGNSSTVNDTQTYTLDTAAPSAPVIDPVNGTDPITGTAEPGSTVTVTYPNGDTATVVAGPDGSWSVPNPGLNDGDEVEAIATDPAGNPSLPGTAIVDAVGPNTDGVNFTV

SEQ ID NO: 45261 - protein, 142 aa, Acinetobacter baumannii
MAKKIDGYIKLQVPAGKANPSPPIGPALGQRGVNIMAFCKEFNAATQKVEPGLPIPVVITVYNDKSFTFIMKTPPASILLKKAAGIQKGSSVPNKTKVGKLTRAQLEEIATTKEPDLTGADLDARVRTIAGSARSMGLEVEL

SEQ ID NO: 45262 - protein, 279 aa, Acinetobacter baumannii
MQEEPSPSWGMRGLRKWLGTAPETRDELLKLVQNSRRFLEPDTVAMLEGVLDLPATKIREVMTPRTAMISMQEDDQLLDILHVLVESAHSRFPVFSADQPDNVVGILLAKDLLPFLTEPNTKLDIGSLMRQPLFVPESARSDQVLRMLKHTQTHIAIVIDEYGSTAGLVTLEDILEEIVGEIEDEHDTADEDAQYIVPDNDHTIANAWMVQALTPIEHFNTVLDADFSDDEVETVGGLLLQEIGLVSDLQGQTVELGNWLFTIVEADARTIHLIRAVRQ

SEQ ID NO: 45263 - protein, 385 aa, Acinetobacter baumannii
MSSNETTTGFKPKKSVALSGQVAGNTALCTVGRSGNDLHYRGYDILDLAAGSEFEEVAHLLVHGKLPNKAELKAYKAKLKALRGLPAALKTALEQLPPSAHPMDVMRTGVSVLGCLTPEHEDHNEAGAKDIADKLMASLGSMLLYWYHFSNNGRRIEVETDDDSIAAHFLHLLHGEKPCEEWIQAMHTSLILYAEHEFNASTFTSRVVAGTGSDMYSAITGGIGALRGPKHGGANEVAFVIQQRYDNPDEAEADIRKRVENKEVVIGFGHPVYTVSDPRNEVIKKVAHDLAEAQENTKMYLIAERLEAVMKEVKNMFPNLDWFSAVSYHLMGVPTAMFTPLFVIARTAGWSAHVIEQRQDGKIIRPSANYTGPENLEFKPLAERG

SEQ ID NO: 45264 - protein, 448 aa, Acinetobacter baumannii
MNKNQKPPFKQNAIALSFTLGVHAIAIVGLLFLGLSKPPEQPKKLTTVLVKPEDLPPPLAKEVEQPTVAENQAEEVLSPIVDETLPQNLPAAPPPPTAQQLAAQKQKAEQAQQAKLAEEKRKAEEAAKAKQAAEQQRLEEAQKQQAEAKRQAEAKARAEAEQKRKAEQNAKAEADAKARQKATEEAKRKAETEARLKREAQKAENAKLQAQQEAKRKAEADAKAKQQKAAEDAKRKAEADAKAKQQAADNAKRKAEADAKAKQQKAAEDAKRKAEADAKAKQQKAAEDAKRKAEADAKAKQQKAAEDAKRKAEADAKAKQQKAAEDARRKAEIEAEEKAASAKKAQEEAAQKKGEAKKIASSAKRDFEQKIRRAWDVPTGSSGKTVSVRFTLSDSGSVSSIVITRSSGDDALDASIKAAIQASAPYPMPSDPDARREARSVTSTFRAQ

SEQ ID NO: 45265 - protein, 341 aa, Acinetobacter baumannii
MYIGPYQLSNNLIVAPMAGVTDRPFRTLCKYFGAGHAVSEMMTADKTLRMTKKSLYRANFDGELAPISAQIAGSDPEQLAEAARYQVANGAQIVDINMGCPAKKVCNKLAGSALLQDEDLVARILDAVVAAVDVPVTLKTRLGFLNGQENILRVAKRAEEAGIAALALHGRTREDMYLNTARYELIKHVKELIHIPVIANGDIDSPEKAKYVLDYTGADAIMIGRAAQGRPWIFREIAHYLKTGEHLAAPNIEEVKEVLLGHLSELYQFYGEYSGCRIARKHIAWYTKGLRSSNEFRQNMYKVETTAEQALVVESYFNQLLAEGNLMSDVQVEQVNLLDTH

SEQ ID NO: 45266 - protein, 439 aa, Acinetobacter baumannii
MGKNVVVLGTQWGDEGKGKIVDLLTDQAAAVVRYQGGHNAGHTLVVGGKKTVLHLIPSGILRENVLCLIGNGVVLSPAALIEEMGILEAEGVPVKERLRISPNCPLILPNHIALDQAREKKRGNAKIGTTGRGIGPAYEDKVARRAVRVADLVRGGAALEEKLAEMLELHNFQLTQFYGVEAVKFEDVLALCNQWREVLAPLVIDVTKVLHDYRKEGKAVMFEGAQGSLLDIDHGTYPYVTSSNTTAGGVSSGSGMGPLHLDYVLGITKAYTTRVGAGPFPTELVYDAASDSGDPIGKHLGTVGHEFGASTGRQRRCGWFDAEILRRSVDVNSLSGICLTKLDVLDGLEEVKICVGYENTDSGCVGSSDAVSFECLKPIYETMPGWSESTVGLTSIDQLPANALAYVKRIEQLIECPIDIVSTGPDRAETIILRHPFSA

SEQ ID NO: 45267 - protein, 697 aa, Acinetobacter baumannii
MSMFNIVRKEFQFGQHQVVLETGRVARQANTVLITMGGVTVLVAVVAAPTAKAGQDFFPLTVNYQEKQYAAGRIPGGYGKREGRASEAETLISRLIDRPIRPLFPEGYYNEIQVTATVVSSDKTMEADIAAMLGTSAALAIAGTPFRGPIGAARVGLINGEYVLNPNFEQMAQSDLDLVVAGTESAVLMVESEAKELSEDQMLGAVLFGHDEMQIAIQAINEFAAAAGAKPSDWVAPAHNEELRAKLKEAFEAKISEAYTIAVKQDRYAALDALHAEAVAQFVPEEDVDGIADEVDYLFEDLKYRTVRDNILSGKPRIDGRDTKTVRALDVQVGVLERAHGSALFTRGETQALVTTTLGNTRDALMVDTLAGTKTDNFMLHYNFPAYSVGETGRESGPKRREIGHGRLARRGVQAVLPAADRFPYVIRIVSDITESNGSSSMASVCGASLSLMDAGVPLKAPVAGIAMGLVKEGERFAVLSDILGDEDHLGDMDFKVAGSANGITALQMDIKIEGITEEIMEVALNQAFAGRMHILNEMNKVISRARPEISMHAPTFEVITINPDKIRDVIGKGGATIRQITEETKAAIDIEDNGTVRVFGETKAAAKAAIAKIQAITAEVEPGKIYDGKVIRIVEFGAFVNIMPGTDGLLHISQISNERIANVTDVLKEGQEVKVQVQDVDNRGRIKLTMKDIEQA

SEQ ID NO: 45268 - protein, 718 aa, Acinetobacter baumannii
MSNESKCPFSGHNSKPQVTVGGGTANLHWWPNQLRVDLLNQHSERSNPLGKDFNYRQEFKKLDYYALKADIKNVLTDSQDWWPADWGNYTGLFIRLAWHAAGTYRMGDGRGGAGRGQQRFAPLNSWPDNASLDKARRLLWPVKQKYGQKISWADLFILAGNIALESSGFRTFGFGAGREDVWEPDNDVNWGDEKEWLAHRNSEALAGSNLAATEMGLIYVNPEGPQASGDPRSAAPFIRATFGNMAMDDEEIVALIAGGHTLGKTHGAASADHVQADPEGAPIEQMGFGWANSYGTGVGKDAITSGLEVIWSQTPTQWSNYFFENLFKYEWVQERSPAGAIQWVAADAEAIIPDPFDPSIKRKPTMLTTDLTLRFDPEFEKISRRFLNDPQAFANAFARAWFKLTHRDMGPKARYLGPEVPAEDLIWQDPLPAASATPSSASIADAKAKIVALGLSTGELVSLAWASASTFRGGDKRGGANGARIALSPQREWEVNKKAVETLTKIEELKASTQLSLADLIVLAGNVGVEQAAQAAGFNITVPFAPGRVDALQSQTDVESFQLLLGLADGFRNWKKQGVNTPAEVLLIDKAQQLTLTAPELTALIGGLRVLGTNWDGSQHGVFTQQVGVLSTDFFTNLLDMSNVWAPVDSTSEVFEGKDRKSGTVKFTATRNDLVFGSNSILRALAEVYAQADGKEKFVQDFVAAWTKVMNLDRFDLA

SEQ ID NO: 45269 - protein, 1093 aa, Acinetobacter baumannii
MLFNIFSVLEKIGLNAQKRAIHVQFSNELLNHQVFLQRIEGQHQLNGGLMAELICLSTNAQIALKQFIGVQVAVDQVTDSGQLFRTTGIVTEASYGQSDGALTLYKLTIEDATNLWHKRRNSRVFMNKSIVEITEVLFKEWQEKSPLFAASLSLDLGGLSQNYDIRPFTMQHNESDYDFLTRLWRSEGVSWLIDESELFVPHFTAPIQAQKLKLIDDNNQYQALARRSIRYHRSSATEYQDSITGFVAVRSLQPTAVHVQRWQPDALAQEEGNGSVVTTHTHSDNFDSATLSLEQAWHVSPAWMQDLKGEDQATASSSSQLEKLNQHFTDMHASRAKYFKAYSSVRDTQVGYWFNLREHPEIDQHEGADQEFLIIAKNFYNQNNLPKDLHQQVSQLLTQSRWDQHGYDEIERQGNELTLIRRQIKTAPEYNPEQHRPIAYPQRAKVVGPEGETIHVDEWGRIKVRFLFTRSDDHGHDGGAGSNDNDTDSAWVDVLTPWAGEGYGARFLPRIGEVVVIDFFDGNIDRPFVTGRIHEAQRSPTKFDVKGQLPDTKKLSGIRSQEVNGSGFNQLRFDDTTGQISTQLQSSHAATQLNLGNLSHPKEQATSQGRGEGFELRTDAWGAVRAGKGMLISTYAQEQAIADHLEAAQAQSLLSQGYESMKMLSEVAAKQQTDALNVINRLPKFIQSLELKTTGQALNSTVNLFKEGINNDPIHALKDCGGFIQDIGALGGNAKGVVDEFNSFFSDAKDAVENLKAFIENVEEHGPDIVKGKLASIKDRIHKNPFESIQEVGKVLANVETKDFDLMSTCGTFSKGSKLEVSPSKALSSLQGFMEGYTQGLESSSDTKQQEQGKIFRQALMLLASPNGIALTTPENIILQASQDIAESASGSINLSAQKNIIGHAQDKISLFAAQKGLRAYAAKGKLELQAQDDAIEAIAKKVIKLISTEDKIELTSPKEIVLTAGGSQLKINANGVFSTTGGKFESKAGQHLFTGGAKVSMKLPHLPVIQEGGFSQLFDLKDLSKDNPNLIGAPYKILLKKTGDILMVGTINDDLQTERVFTKEEEEIELILFETNYTDFNIENLDYLFGEE

SEQ ID NO: 45270 - protein, 146 aa, Acinetobacter baumannii
MKELSVYPVIYDQKVAWGDMDAFGHVNNVQYYRYIESSRILYMENVNILTPNIYTVVASSQCKYLKPVFYPDVLKVGVRVEELRKSAFRMAYILWSESQQQIVATGEAVMVCVNKMTGLKCEIPSEVKSKIIELEKSVGHDLIHLA

SEQ ID NO: 45271 - protein, 291 aa, Acinetobacter baumannii
MTAITASMVKELRDRTGLAMMECKKALTEANGDIELAIDNLRKSGQAKAAKKAGNIAADGAITIVQDGNKAILVEVNCQTDFVAKDENFSNFAHTVAAAALAAGETDAAKIAELKLADGQSVEEARIALVQKIGENIQVRRAKIVEGEQLAIYKHGLKIGVVVSYTGDADTGKGIAMHVAAFNPVAVNAEAVPADLIAKEKEIAEAKALESGKPANIVEKMVTGSVEKYLNEVALDRQMYVIDNEKKVADVLKATGTNVANFVRFEVGEGIEKKAELSFAEEVAAAQAAAK

SEQ ID NO: 45272 - protein, 119 aa, Acinetobacter baumannii
MALVYGLVMVTPVYWIDHSPPDQLIFKECKSGKLCVKPKKRARQNVKARKHNASLRSMVRTYIKRTLSAIAGGDYAVATEAYKKAVPVIDRMADKGIIHKNKAARHKSRLNAQVKALAN

SEQ ID NO: 45273 - protein, 77 aa, Acinetobacter baumannii
  MISC_FEATURE (70)..(70): X=any amino acid
MLSAVIPSEHSYPAMRLASQPVHQRFVHSGPLVLGADPLKFPAPTVDRDRTVSRRSKPSSRTSLNGGTAXPWDLLQP

SEQ ID NO: 45274 - protein, 230 aa, Acinetobacter baumannii
MYKTLTTCLLITCLGLSGCATSILSTALPNETTEVQTTILKTDQIIALGQAVKNQQEQGVVFIGQDFNYLMTEGSSEFLNIIKNIPVNQRTLIIPSPLLLEMDDPTHFHGELKFQYNIPASKLSDQQKENLKNLGFKNHFMVMENQTQLLYPYAIIRFKGQIYQTSPTLKVQQTIPTPYPIALQQKDEITKKHPFKRVTRMALYPLAMAFDIVTVAPSLILSDLRGDFTK

SEQ ID NO: 45275 - protein, 469 aa, Bacillus anthracis
MEGNGGKSKIKSPLNSNFKILSDLVGPTFPPVPTGMTGITGSTGATGNTGPTGETGATGSAGITGSTGPTGNTGGTGSTGSTGNTGATGSTGVTGSTGVTGSTGVTGSTGVTGSTGPTGETGGTGSTGVTGSTGATGSTGVTGSTGVTGETGPTGSTGATGNTGPTGETGGTGSTGATGSTGVTGNTGPTGSTGVTGNTGATGETGPTGNTGATGNTGPTGETGVTGSTGPTGETGVTGSTGPTGNTGATGETGATGSTGVTGNTGSTGETGPTGSTGPTGSTGATGVTGNTGPTGSTGATGATGSTGPTGSTGTTGNTGVTGDTGPTGATGVSTTATYAFANNTSGSVISVLLGGTNIPLPNNQNIGPGITVSGGNTVFTVANAGNYYIAYTINLTAGLLVSSRITVNGSPLAGTINSPTVATGSFSATIIASLPAGAAVSLQLFGVVALATLSTATPGATLTIIRLS

SEQ ID NO: 45276 - protein, 786 aa, Bacillus anthracis
MLERTLRVLEYNKVKEQLLEHTASSLGRDKVKHLVPSTDFEEIVEMQDTTDEAAKVIRLKGSAPLGGITDIRSNVKRAKIGSMLSPNELLDIANTMYGSRNMKRFIEDMVDNGVELPILETHVAQIVSLYDLEKKITNCIGDGGEVVDSASDKLRGIRTQIRTAESRIREKLENMTRSSNAQKMLSDSIVTIRNERYVIPVKQEYRGVYGGIVHDQSASGQTLFIEPQVIVELNNALQEARVKEKQEIERILLMLTEEVAVEADIVLSNVEVVANLDFIFAKAFYAKRIKATKPIVNNERYMDLRQARHPLIDPEVIVPNNIMLGKDFTTIVITGPNTGGKTVTLKTVGICVLMAQSGLHIPVMDESEICVFKNIFADIGDEQSIEQSLSTFSSHMVNIVDILEKADFESLVLFDELGAGTDPQEGAALAISILDEVCNRGARVVATTHYPELKAYGYNREQVINASVEFDVNTLSPTHKLLIGVPGRSNAFEISKRLGLSNRVIDQARNHISTDTNKIENMIAKLEESQKNAERDWNEAEALRKQSEKLHRELQRQIIEFNEERDERLLKAQKEGEEKVEAAKKEAEGIIQELRQLRKAQLANVKDHELIEAKSRLEGAAPELVKKQKVNVKNTAPKQQLRAGDEVKVLTFGQKGQLLEKVSDTEWSVQIGILKMKVKESNMEYINTPKQTEKKAVATVKGRDYHVSLELDLRGERFENAMARVEKYLDDAQLASYPRVSIIHGKGTGALRQGVQDYLKKHRGVKTFRYGDMGEGGLGVTVVELK

SEQ ID NO: 45277 - protein, 463 aa, Bacillus anthracis
  MISC_FEATURE (196)..(196): X=any amino acid
  MISC_FEATURE (224)..(224): X=any amino acid
  MISC_FEATURE (236)..(236): X=any amino acid
  MISC_FEATURE (398)..(398): X=any amino acid
KLHRTMKSRHLFMIALGGVIGTGFFLVSGYTHNQAGPGGAHPSYLVGGFIMYLTMLCLGELTVAMPVSGSFQKVCDKFMDPGTGLMIGLAILLGLGSNSGLELTSIGLMMKRWFPNVDVWVWCLVFGVILYASNAISAKSYAELEFWFSSIKVITILAFVVLGGSALLRFISYDGKEAAPLFSNFCSESGLFPNGXAAVLLTMIYSNFLVPRNRLIGIAAGTKXKSRKTIPSCHPXYSMRIMLFFILTMTILVGLISWKEAGVIESPFVVVFDKIKYSIRPADIMNFVIITALLSVANSGLYAATRILWSLANEGMAPTSFQKVNKRGDPIYRISCNDCCAGLSLFTSFLAEDTVYMYLLSIAGLSAVSSWIIIALSQLRFRSQYIKGGGKLRGFKIXNTAIPIVPILALITNSIVVISLAFIPEQRMALYCGIPFIIFCYIYYYINKKRQKPMKVEMEKANE

SEQ ID NO: 45278 - protein, 144 aa, Bacillus anthracis
MQVKTVDILGVPFSTMTMDETIQYLKGQLEVERTHTFQVVTANPEIVMCAKKDEAFYKTLLNTDLITPDGIGVVKASGMLGTPLKERVAGFDLMCNLFAKLSEENKPVSVFLLGAKPHVVQAAADHLTKTYSAVSIGGIQDGYF

SEQ ID NO: 45279 - protein, 215 aa, Bacillus anthracis
MKFFIDTANINEIKEANALGVLAGVTTNPSLVAKEGVDFHERIREICNVVEGPVSAEVISLEADKMIEEGKELAKIAPNVVVKVPMTTEGLKAVKAFSDLGIRTNVTLVFSAVQALLAARAGATYVSPFLGRLDDIGHNGMDLIRQIAEIFAIHGIETEIIAASVRHSVHVTDAALNGAHIATIPANVIASLVKHPLTDQGIEKFLADWEKTQEK

SEQ ID NO: 45280 - protein, 489 aa, Bacillus anthracis
  MISC_FEATURE (120)..(120): X=any amino acid
  MISC_FEATURE (122)..(122): X=any amino acid
  MISC_FEATURE (125)..(125): X=any amino acid
  MISC_FEATURE (139)..(139): X=any amino acid
  MISC_FEATURE (302)..(302): X=any amino acid
LTGHTLTIEEMKRLLLEGEGVTACPTSMQKVAECREVVEKIVENGKVVYGITTGFGKFSDVLIQKDDVKALQHNLIQSHACGIGDPFPEEVSRGMLILRANTMLKGVSGVRPAVENMLPXTXKSXNFPRMFPQQGSPWXQWGFTRPLSHLALILLGEGEVFYKGKRVHAMVALTEEGLEPIELEAKEGLALINGTQAMTAQGVLSYIEAEATAYQAELIASMTIEGLQGIIDAFDENVHKARGYKEQVEVASRIRDILHDSKLTTKQGELRVQDAYSLRCIPQVHGGFLQVLNYVKEKLEIXMNAATDNPLIFDGGEKVISGGNFHGQPIAFAMDFLKVGMAELCNISERRIEALVNPQLNDLPPFLSPEPGLQSGAMIMQYAAASLVSENKTLAHPASGDSIPASANQEEHVSMGTIGSPPGPSIFQMEKAVLPLKRIGARQPPNYPGFETLSTGTKSSYLQGRHQEPPITIDRISFTDIEIISLWLK

SEQ ID NO: 45281 - protein, 329 aa, Bacillus anthracis
  MISC_FEATURE (152)..(152): X=any amino acid
  MISC_FEATURE (183)..(183): X=any amino acid
  MISC_FEATURE (191)..(191): X=any amino acid
  MISC_FEATURE (197)..(197): X=any amino acid
  MISC_FEATURE (236)..(236): X=any amino acid
EKRHEELGLSDEQVLEMFRTMLLARKIDERMWLLNRAGKIPFVISCQGQEAAQVGATFALDREKDYALPYYRDMGVVLAFGMTAKELMLSGFAKAGDPNSGGRQMPGHFGQKKNRIVTVSSSVTTQVPHAVGIALAGKMEKKDLVTFVTFRXGSFYPGDFHEGCKPLLGVHKLPGYFHCEKYXIRISIPSXKQIKMXKCFRRANWIRYAWITVDGNDPLAVYKAVKEAADRGPPWXRTNFIETVSYRLTAHSSDDDDRVYRDKEEVEEAKKNDSIVTFAAYLKEVGVLTEDVGKQLLGGIYAYRKRATEYAENAPYAAPEDALKHVYAE

SEQ ID NO: 45282 - protein, 260 aa, Bacillus anthracis
  MISC_FEATURE (3)..(3): X=any amino acid
  MISC_FEATURE (68)..(68): X=any amino acid
  MISC_FEATURE (85)..(85): X=any amino acid
  MISC_FEATURE (97)..(97): X=any amino acid
  MISC_FEATURE (104)..(104): X=any amino acid
  MISC_FEATURE (138)..(138): X=any amino acid
  MISC_FEATURE (191)..(191): X=any amino acid
KKXHYNLAKKYVLIRFVIEKYNLKNVVRYLCKIAGVSRSEYYNYFSVPHKISGRTKWIRVKYRKSSYXRHFVLKTEEKGFVKSKXHWRVNFKLSITXNVFVELXRNVKKYGIICPTRKANPYKRMTRATKEHFVVPNXLKQELRKGVHGKVLLADITYLFYGRNRKVYLSTILDRSTNEILAYHVSGQLTXDIATMTFDNLKKNKKIRLTKDAYIHSDQGTHYISPIYQKLIQKIKLGPSIFRTRNWWENGPPESFFRNI

SEQ ID NO: 45283 - protein, 319 aa, Bacillus anthracis
MKRIGVLTSGGDSPGMNAAIRAVVRKAIFHDIEVYGIYHGYAGLISGHIEKLELGSVGDIIHRGGTKLYTARCPEFKDPEVRLKGIEQLKKHGIEGLVVIGGDGSYQGAKKLTEQGFPCVGVPGTIDNDIPGTDFTIGFDTALNTVIDAIDKIRDTATSHERTYVIEVMGRHAGDIALWAGLADGAETILIPEEEYDMEDVIARLKRGSERGKKHSIIVVAEGVGSAIDIGKHIEEATNFDTRVTVLGHVQRGGSPSAQDRVLASRLGARAVELLIAGKGGRCVGIQDNKLVDHDIIEALAQKHTIDKDMYQLSKELSI

SEQ ID NO: 45284 - protein, 414 aa, Bacillus anthracis [sequence omitted]

SEQ ID NO: 45285 - protein, 328 aa, Bacillus anthracis
MKLSKYRKIISSMFDFKRNIEVLVVTELGQKLKEARGTKGLSIDQLHEITKIQKRHLVAIEEGNYDVLPGAFYARAFIKQYADAVGLNGEELLVEYQSTIPQSEKRDVPQVSTGQKTQETMQKSSSWPIADHMPKILVALLVIAVGVVIWFVFQALTGKDDEKVPNTQSEKIEVKKAENSPLDTKKDEVKAEEPKKEEPKKEEPKKEEQPAQPTGQQEVKVSWDNWVKYLLLEIHNNKTLELEISGKGASYVDVKDDAGNEVLNTTIQDGQTEKRDLSTAKEVRLNIGNATNVEVKLNGQVVAYPLDPEKELHQRLVIKNQGIEQPAQ

SEQ ID NO: 45286 - protein, 415 aa, Bacillus anthracis
  MISC_FEATURE (88)..(88): X=any amino acid
  MISC_FEATURE (124)..(124): X=any amino acid
  MISC_FEATURE (285)..(285): X=any amino acid
  MISC_FEATURE (329)..(329): X=any amino acid
  MISC_FEATURE (336)..(336): X=any amino acid
  MISC_FEATURE (350)..(350): X=any amino acid
  MISC_FEATURE (401)..(401): X=any amino acid
  MISC_FEATURE (414)..(414): X=any amino acid
ENTALNNEQYADPKKWHKQDTTWALSLFGTAIGAGVLFLPINAGSGGLLSLLLITLLAYPVMYYSHRALAKMIYASNSADEGITGTIXEYFGNKASIIFNIVYFGFNYTIVLMYSGAPTNTAKXFIVHQLHMPEPPRAILSLVLVLGLIAILNFGQDITVKVMSMLVYPFIVSLLFIAISLIPQWNTSMLSFSAVSTASTGTGLFGTIVMILPIIVFSFNHSPYDSSFVVKQRATYGIEATDAKCAQIQKGCYIMTFAVVMFFVWSSALSLTPDDIKMAKEQNLXILSFLGNELNSPCNTIAAPNHAFGGNYKCLSLGHYIGAFEVNAXMIIKVWXITWKDIEKKPIKPXSLTFVVLSCWVVLNTNTKYSWTIDSLSGPLVAAILCLLPMYAIQKVPGISXVQGENETVFVFMXG

SEQ ID NO: 45287 - protein, 74 aa, Bacillus anthracis
MKVSRGTMLKRLRQVWGQRKHFISLLVGVPSYETYVEHMKKHHPEEEVVCQKQFFAEAQEARFNAKGGKISRCC

SEQ ID NO: 45288 - protein, 275 aa, Bacillus anthracis
MLGTKHIIEGSQKYGIKRLIHVSTPSIYFYYDERQNVVENAKLPDTFVNHYATTKYMAEQAIDQAFAHGLPVITIRPRALFGPGDNAILPRLIKVCEKGALPRIGTENVLVDITYVENVVDALLLCMHSPKHTLGQKYNITNDERINLYEVIENVMKRLDKEVRYKKISYKTAFTLAAILEGISKTILFGKEPILTKYTVSVLSKSQTLSIDKAKEELGYAPKVSIERRIYKICRLVENTMKIKSLKLYDTGYCTHPEKIAYSKGSGNKSVFQPQ

SEQ ID NO: 45289 - protein, 729 aa, Bacillus anthracis
  MISC_FEATURE (297)..(297): X=any amino acid
  MISC_FEATURE (445)..(445): X=any amino acid
  MISC_FEATURE (452)..(452): X=any amino acid
  MISC_FEATURE (522)..(522): X=any amino acid
MANEQVLTAEQVLEKASQYLVDEDIELVARAYEYARDAHTRQYRKSGEPYIIHPIQVAGVLVDLHMDPATVSAGFLHDVVEDTEITLEDIEREFNKEIAMLVDGVTKLGKIKYKSHEQQQAENHRKMFIAMAQDIRVILIKLADRLHNMRTLKHLPQEKQRRIANETLEIFAPLAHRLGISTIKWELEDTSLRYLNPQQYYRIVNLMKRKRAEREEYLDEVMTGIREKLDEVAIQPEISGRPKHIYSIYRKMALQNKQFNEIYDLLAVRVVVNSIKDCYAGLGIIHTCWEPMPRRFXDYIAMPKANLYQSLHTTVIGPKGDPLEVQIRTKEMHEIAEFGIAAHWAYKEGKTAEQQVHYQKKLTWFRQILEWQNEASNAEEFMESLKIDLFSDMVFVFTPKGDVMELPTGFVPMTFAYRVYFRDWENKQNGAKVNGENGDTLTINXKPGDIIXIFTSKHSYGTKTKMRETSSTSHANNKIRQFFIKQRRDENIEKRAWNLVEKKNAGASNFENEKRVNPLTIXKRVAEKIQLANEEDMFAAVGYNGITASQIVTRLTDKFRKQREEEEIVEVKEVRKPMKIRKWDSGVKVSGADNLLIRLSKCCNPVPGDDIVGYITKGRGVSIHRRDCVNVHTEEAIERLLEVEWEGSPEKEIEYNVDIEISGYDRRGLLNEVLQAVTETKTYISAVSGRSDRNKMATINMSISIRNLQHLKKVVERIKRVPEIYAVRR

SEQ ID NO: 45290 - protein, 462 aa, Bacillus anthracis
  MISC_FEATURE (34)..(34): X=any amino acid
  MISC_FEATURE (118)..(118): X=any amino acid
  MISC_FEATURE (126)..(126): X=any amino acid
  MISC_FEATURE (141)..(141): X=any amino acid
RSTHEKVQDHLFAVQQRMTPMSVWKANANAKSLXRKLGITDFTATVGNLSGGQKKRIAMAQCFIETPDLLILDEPTNHLDHETVEWLEEYLARYTGGYLSGTQDSYFLGSWTNWILEXDNEKCIVXEGNSSPFLEAKALSXEQELAQESKRQNLYRRELAWIRRGAKARSTKQKARIQRFEELKGQEGPAAKQSVIMRFSGSRPGKKVLELKDVTKKFGDKTVLNNFNHIVKPGDRIGIIGANGSGKSSLLNMLAGKISPDSGEIEVGQTVKIAYYTQENEEMNLNQRMIEYIKEIAEVIHTTDGKVIGASQMLERFLFPPHSHGTPLGKLSGGERRRLYLLRILMGEPNVLLLDEPTNDLDPQTLTVLEDYLEDFSGVVLTVSHDRYFLDKVVDELFIFTGEGEVREFLGSYTDYLEMEKTRELIEKAEVQKEKKVVEEAPKQQRKRKLSYNEQREWETMK

SEQ ID NO: 45291 - protein, 98 aa, Bacillus anthracis
MKIKQFKPDLLLVGLGSPKQEEFIYENLQTLNIPLSIGIGGMIDIISGTVKRAPKIMRDTGTEWLYRLLSQPKRIKRQLVLPKFLISVMVERMKGTSS

SEQ ID NO: 45292 - protein, 463 aa, Bacillus anthracis
MQHSNKSGTLNRGLKERHITLMSLGSAIGVGLFLGSASAIKLAGPSILLGYMIAGLVIFFIMRALGEMAIEQPVAGSFSKYAYDYLGPLAGYITGWNYWFLWVVTCMAEITAAGIYMQYWFPDIPRWTWALLALLLMSAFNFLSVKVFGELEFWFALIKIVTIICMIVVGAGIILFGFGNGGIATGISNLWSHGGWFPNGFSGLLLSMQMVLFAYLGVELIGVTAGEAQNPKKTLAKAIDNVFWRILLFYVGALFVMMAIYPWNELGEKGSPFVLTFQQIGIAKAAGIINFVVLTAALSSCNGGLFSTGRMLYTLAQQKKAPERFGRLNKNGIPSQGIVATAIVLLIGVILNYLVPAKVFTWLTSISTFGAIWTWGIILVAQIKFRKSLPTQNRQKLSYKMPLYPLSSYFSLAFLVLVLGIMAYSEDTRIALIVGPIWLIGLAIVYYMKGFHKIDETPNSKIS

SEQ ID NO: 45293 - protein, 276 aa, Bacillus anthracis
MSVCHKHSVIGVLDSGVGGLTVASEIIRQLPKESICYIGDNERCPYGPRSVEEVQSFVFEMVEFLKQFPLKALVVACNTAAAATLAALQEALSIPVIGVIHPGARAAIKVTKKGKIGVIGTVGTIQSNMYEKALHELDTYLKVHSHACPTLATVVENRLEDTAYVTQQVKQALLPLTKEDIDTLILGCTHYPLLESYIKKELGEDVTIISSAEETAIELSTILQHKGILADNLNPKHRFFTTGSVSSFEHIAERWLGYQISVDCVDLPVKNARICN

SEQ ID NO: 45294 - protein, 552 aa, Bacillus anthracis
MKKFQIELNKLPTENTGEIVISIDESIVLQEKTDIIAPICQLFDAWGECFKDDGAVIFLDGYEKKVEFKKKDGEFLIINQRGKKLASVNSEQFLRVLFSFLKKEIGQIYMSGVDSFRIKDAYHRILEIEPFLSELINGNNAIMYRTYHSTSGKYELNWNYLKGIEVEPIFTPVLSHDEKSIFYVEENNHKIRKLDSETKEEIWQCHIPLVEDCNCITVNGVTVIWHANRFGENIAKLYAISSSSGEFLWNLEIEGHIIQDVKTTREELPRLLVITQEGYNVLLDLESGVKVWEKNVRVGGEKLQCHLGPDYYVLAGNPSDEDGEMDVYSNATIAIQLLDASTRWKQTIEECNPNEQVALTNEHFICVAMEVLQKWEYGKEGCNSIFEKALDEAWYSHIASDESKILLTRTEYGYEDISRQIQCYDHKNSQKLYEVNMPSEIELPPFLIGEMMVLSLGEGRICGINIQTGKVLWNNNTLHDITEVLLYKGGEIYIATSNLELIILDATCGEVKDIIKLPKNVVAIDFIVSIEEVNDALFISCVSGNMFEIVES

SEQ ID NO: 45295 - protein, 356 aa, Bacillus anthracis
  MISC_FEATURE (17)..(17): X=any amino acid
  MISC_FEATURE (114)..(114): X=any amino acid
  MISC_FEATURE (265)..(265): X=any amino acid
  MISC_FEATURE (341)..(341): X=any amino acid
QVIYAILASFITVLVVXPLVIKLALKLGATDKPNARKVHQKDMLVLGGLAIFMGVAVEFVVGGLYEQRMLSITLGAIIIVIIGNFDDMYELICEVNFRGQLFSCHYICKKVDYXCKYYIFQSSGDTELGWLAYPITVFWIVGITNAINLIAWLRWLSAGISSIVLATLAYMAFTSPWGTGTAIILPLALIALASTLGFLFYNFHPAKIFMGDTGALFLGYCISVISLLGIIQKWYVIQLLSFPFIILSVPVFDTNICNYSLYPKXKTFFPPDKIAFSFTPLLCNGVLPLQKPGLIIYAFGIFFSVNAIIFSSATLWLSIILLFILIFFTEIIAEVIRFCTXTLQTTISFYKKVKKR

SEQ ID NO: 45296 - protein, 673 aa, Bacillus anthracis
MKLKNTHLKKMQEWFNKRKKLRNLLIILGSLLATLFIAINIIISIQDISELKQAVPQPTLIYDANNEVATKLASSKTEGVKRKDIPDIMVQAIVAVEDKEFFNHHGIYYSGIISAIFKNITAGEVVAGGSTITQQLAKNVFLTQDRTYSRKIKEYFLTKKIERTYTKDEIIEMYMNQIYFGEGAWGIKRAAKSYFDKDVKDLTISEAATIAGLIKAPSAYSPYKNFNKSIERRNVVLSLMKEQGYISDEQYNKEKESGLVLKRGVDDKYKGKYSQYVDYIVREAMDKYELTQNEILAGGYRIYTELDPKKQQAVEDVVNNDSYFKDSGSDQLMQTGVVLMNPTTGGVPALVGGRGPYQFLQFNHATQLKRQPGSTLKPLAVYVPALEQGYEVYDILKDEPFNIKEYKPQNSDHTFHGDVTMYEAVAKSYNVSAVWLLEQIGLDKGLKSLERFGIPLVPEDRTYPIALGGMHVGTSPFVMAQAYSTFANDGVQVEAHAIREIQNAEGETIGKWYKKETRVTSEKISQKMTYLLKGVVEKGTGEKAKVTNVDTAGKTGTTQIVNGPSTGAKDSWFVGYTPDLVGAIWVGYDKTDSDHYVPGGSQITTTMFRDIMKKANANPAQKAFQLSLISEADYKKQLTTIEEEKRRKEEEQQRKQEQQEWLDKVKEWIPSFW

SEQ ID NO: 45297 - protein, 787 aa, Bacillus anthracis
  MISC_FEATURE (39)..(39): X=any amino acid
  MISC_FEATURE (82)..(82): X=any amino acid
  MISC_FEATURE (330)..(330): X=any amino acid
  MISC_FEATURE (384)..(384): X=any amino acid
  MISC_FEATURE (388)..(388): X=any amino acid
  MISC_FEATURE (390)..(393): X=any amino acid
  MISC_FEATURE (411)..(411): X=any amino acid
  MISC_FEATURE (438)..(438): X=any amino acid
  MISC_FEATURE (457)..(457): X=any amino acid
  MISC_FEATURE (466)..(466): X=any amino acid
  MISC_FEATURE (471)..(471): X=any amino acid
  MISC_FEATURE (480)..(480): X=any amino acid
  MISC_FEATURE (505)..(505): X=any amino acid
  MISC_FEATURE (526)..(526): X=any amino acid
  MISC_FEATURE (535)..(535): X=any amino acid
  MISC_FEATURE (554)..(554): X=any amino acid
  MISC_FEATURE (564)..(564): X=any amino acid
  MISC_FEATURE (569)..(569): X=any amino acid
  MISC_FEATURE (598)..(598): X=any amino acid
  MISC_FEATURE (605)..(605): X=any amino acid
  MISC_FEATURE (611)..(611): X=any amino acid
  MISC_FEATURE (633)..(633): X=any amino acid
  MISC_FEATURE (633)..(633): X=any amino acid
  MISC_FEATURE (635)..(635): X=any amino acid
  MISC_FEATURE (685)..(685): X=any amino acid
  MISC_FEATURE (710)..(710): X=any amino acid
  MISC_FEATURE (747)..(747): X=any amino acid
  MISC_FEATURE (776)..(776): X=any amino acid
  MISC_FEATURE (782)..(782): X=any amino acid
HAMDLFEEEKKFIKAQVFHTIFLMEDILYSVVSMKVIEXNEACDEKEVMINGHFARMHEDEVFTLTGHFKDHPKYGKQYLVXRFKKELPQTKAGMAQYLASDLFKGIGKRTAEKIVAHLGEHAISKIMDDPEALNGVVNKQKAQEIYETIVEHQGLEKVMSFLNGYGFGTKLSIKIYQQYKEMTLEVIRNNPYQLIEEVDGIGFERAIDFGRRVGISGKSDDRVRAGCFYTLENVSLQLGHVYMRKDQLVRETMSLLNNQEGRVTEEDIISCIEMMQSEGKVIIERRAVYLASLFYSEKSVVKSIRRLMNQEETTSFPGAKMLKTLGENXRTLNVQYAYSSARSIPTALHKPMMLIDRVDQIQGKTTVIKGIGEMYASLQGLSXNQKXIXXXXPFPDTISSSSRMSCEIEXVKPHGLRACTIHRLLGMDARSVLPSVXNRSGTEGKYLIIDEFFNGXYLACKISVXVIADXHSVIVCRRXRSITICRTWQVLKDLLNERCSSNQXSLLEFIVKGRFHQDSTCPMRXKMKTLHQIXRKIKTPLLFIPLHRTSICXNLLKKVAKTXDKRVXRKRCTVLAPMYRGPAGINVLNEAVARSVXSEKRKEXRNCLRXCVYRRGDKVLQLVNQPREPSIXWXYRRNCFGVLCERKVSPTRYDYRFIGGNWRKHIQNPVLIKLPMLYCCSISXRKGSEFSLWDLPIVERYIPWYAGFXFYLELQEKKIPLLFAGEEAAFQSGVNRLDDQCVKRLXLALARITREVQMVTVNGEGDGRGKHFTVXFHVTRXNYIVK

SEQ ID NO: 45298 - protein, 404 aa, Bacillus anthracis
AGNNVWIANAGFLVTGVVSPLLAITAFVFSSESGLQSLARRVHPGFGIVFAIVLYLAIGPFYAIPRSGTVSFEIGIKPFLSNDAGPAALTVFTILFFIVTCLLSLNPTKTVDIVGKILTPIKLTVIGMLVVVAFIHPIGRIQAPSEVYASDAFFKGFQEGYLTLDALGAFVFGIIIVNAIREKGATTKKQLMVVCVKATTIAATLLALIYTALSYMGASSVEKLGHLNNGAEVLAKVSDYYFGSYGAIFLGVMIIVACLITSVGLITACSSFFHKLFPKISYKKLAIILSVFSTLVANIGLTQLIKNFIPVLITMYPNCITLIFLTFLHSVFNGRFEVYQGSLILTFIFSSLDGLKAAGIESEIIHNFFEHFLPLYSVGLGWGFPAIIGGVCGYVVSVLRKKNT

SEQ ID NO: 45299 - protein, 96 aa, Bacillus anthracis
MQNQAFSYDAAPDLLIITCIDDNKLGQFIFPKDILLKEKILRTQNQKGKMAMRIYPIWDTPVSNQAKKSQMWQLQYFVDLSDHNNLPIDKLLHLYS

SEQ ID NO: 45300 - protein, 164 aa, Bacillus anthracis
MFKIQEVRELIKLIDSSNIDEFEYKKDGTTIKMKKRGNEVVAVQAPVAKQAVQPVAPVEVETTVAAAQVEVPKQEEKKAVQNENLHKITSPMVGTFYSSSSSSPDTPPYVSVGDRVSKDSIVCIVEAMKLFNEIDADVDGEIVEILVNNGQLVEYGQPLFLVKA

SEQ ID NO: 45301 - protein, 237 aa, Bacillus anthracis
MLKLIQNEFLKLHAKKGMYILIGVIAVLEILGVLAMMKWGDGTEFKGSYLDFASSEIGLITLFATIFGITIASRMITDEFQKGTIKQLLIRPRKRMTVLFSKYITVLLTIIFIIFASTLIAMIIGGIVMDGSKTELTIGIVMKSTLYQVLSPLFFATLAFFLANVFRTSVLPLIITMFLFFLPGAINMVLMMVAKGVAKFIVFFHLDLRAYDGHKLISGRSRTYIHRIYVYNFVITW

SEQ ID NO: 45302 - protein, 794 aa, Bacillus anthracis
MAEFGAGVDKSMQEVLDKTKISADQFEKWGQAIAGGGENGQKAMLEATKALAGVENATDRNALGTKMFGTLWEDQGKKIIDTILKAEGKQVDLKKGVEDLHGATSKIDASPAVKFQKAMQDLQMALQPVLGVIADVVAKIADWISNNPKLAATLAAIAVAAGVIAGAFMALAPIVVVISGVGAAMMGWVALIAIVVAAVVALGIAIYQNWDSIKQWTIDAWNAIGEFLVGIWDGIVQWASEAWNSISESTSAVWNSIKEFLIGIWNGIVEFVVTWGTAILEAYVGIWTSIFNFCMEIWNGIVEYLTSVLQGIATFFTEIWTSISTFFQETWNGLVAFITPILQGIADFFSMIWNGISTVIQTVWNFITQYLQAIWTAILYFATPLFESIKNFISECWNTISSTTSFVWETIKNFLVSCWNGLVAFVMPIFEQIKSWIISVWDTISSATMTVWNAVKNFLQSCWNGLVAFVTPIFNSIKDWIINTWNTISSTTSAVWNTIKSFLSGLWNSIVSTASSVFNNIKEAISTVWNMISSTSSSIWNGIKSTLSNIWEGIKSTASSVWNGLKDAIMTPVRWVTNAVSGAFEGMKSAVLGVWDGIKSGIRTAINGIIRIINKFIDGFNTPAELLNNIPGVSAPTIPHVPMLAKGGKPVGDGSFITGEAGPELFTKKGNSITVTPLSSKEKSLGITGTMNQLMGDMSRMMASSMSQLAGLKSVMSGVYGSMSNSRQAMAGNIANQVFNYSSGQTGGNELIPAQGGDLVIEVPVILDGRDLARGTFRYTKEYQEREEKRNSDF

SEQ ID NO: 45303 - protein, 290 aa, Bacillus anthracis
  MISC_FEATURE (171)..(171): X=any amino acid
ETMPQQNNFVTMPAQHQKQQAGIESLMNPLPQVKDPNYKRSRKLKGKNVFITSGDSGIWRTVSIAFCEEGANIAIAYLDEEGDANETKQYVEKEGVKCVLLPGDLSDEQHCKDIVQETVRQLGSLNILVNNVAQQYPQQGLEYIISEQLEKTFRINIFSYFHVRKSSTSHXKQGGCIINTASIVAYEGNETLIDYSATKGAIDAFTRSLSQWIVQKRYLCKGCCARTNWTPLIPSSFDEKKVSQFGSNVPMQRPGQPYELAPAYVYLASSDSSYVTGQMIHVNGGGFGNG

SEQ ID NO: 45304 - protein, 328 aa, Bacillus anthracis
MCTSLTLETKNGQHLFARTMDFTLDMNQEVIIIPRHYQWNNITGEIINTKHATVGMGINHQGRIIMADGVNEAGMTCATLYFPGFATYSQSIDDNTTNLAPFDFVTWSLTQFNSVKELKKSVDSITFLDIPLPDLGLTPPLHWILADKWGDCIVLDPTSEGLKLYDNPLGVMTNSPEFNWHLQNLRQYIGLKSQPFAPTEWSNLPLSAFGQGSGSMGLPGDFTPPSRFVRAAYGKQNIQGIDSEEEGVSALFHILSNCEVPKGGVITEEGALDNTIYTSVMCMESGTYYYHTYDCRQIIAVHLFHENLDTDEIKAYPFQRKQKIFYEN

SEQ ID NO: 45305 - protein, 203 aa, Bacillus anthracis
MMKHVFQKGKDTSKPVLLLLHGTGGNELDLLPLAEIMDPEASVLSVRGNVLENGMPRFFRRLAEGIFDEEDLIFRTKELNEFLDGAAKTYEFDRNNIVAIGYSNGANIAASLLFHYDNALKGAVLHHPMVPRRGTQLPNLAGKSVFIAAGTNDPICSSAESEELKVLLENANANVTMHWENRGHQLTMGEVEKAKEWYENTVL

SEQ ID NO: 45306 - protein, 461 aa, Bacillus anthracis
  MISC_FEATURE (257)..(257): X=any amino acid
  MISC_FEATURE (285)..(285): X=any amino acid
  MISC_FEATURE (447)..(447): X=any amino acid
RMFTMVQKLWLTVVCAVFVTVSFLYFVSLYSYEKLYVDNLKDSLVMEGKRLAAPYDKSKGYQLFVKKVRAFDQISMFHVLFVSNPRDLSACLPFDVHHHSLISEGDRQALLDGKTVTKIGYEEHFERNIMGVVIPVLENKKLVGIVYSYIPLKSIKDFIYDMGLILAPLALAITLLTIWIWVENYYLLLRDPLSQMERVANHLATGDFSERITISSEDEIGRLGKAFNKMANSLETEDVKRNEFLANVSHELRTPLXYIKGYCEAILNGVTEGTAQEKMKHALSXKKPIRMQRLVHDLLELAQFRREHFPLQKQPIVFSQLIEDVLDTYEIKFIEKKIRISTNLNPEIIVMIDEDRMQQVLHNVLDNAIRYTNQKRGYYDTLRQIDDYCELSIKDTGIGIDTEHLENLGERFYRVDKARSRQHGGTGLGLAIVRQIGHIHDGQWANXSEKGNGTTVSIKLK

SEQ ID NO: 45307 - protein, 300 aa, Bacillus anthracis
MALFLKYKNRLTWRRKGCLVLKKEKLRTENISFQYPGAATYALKDVSFSLFEGEWVSVIGQNGSGKSTLAKLLNGLFLPEAGTITVNDTMILSEETVWDVRKQIGMVFQNPDNQFVGTTVQDDVVFGLENIGMPREQMVERLNQALRLVRMEDFLNDEPHSLSGGQKQRVAIAGVLALQPSILILDEATSMLDPQGRREVVETVRQLVNEKGITVLSITHDLEEAAQSDRVIILNKGEILEEGTPEQIFKSSHMLQEIGLDVPFSVKIAELLKRNEILLQNTHLTMESLVNELWRLHSKK

SEQ ID NO: 45308 - protein, 379 aa, Bacillus anthracis
  MISC_FEATURE (227)..(227): X=any amino acid
  MISC_FEATURE (229)..(229): X=any amino acid
  MISC_FEATURE (255)..(255): X=any amino acid
  MISC_FEATURE (304)..(304): X=any amino acid
  MISC_FEATURE (369)..(369): X=any amino acid
IATGILAGSLLSYSTSIVADTHRFPDVPAWADKSVTYLVDKQVLSGYPDGTFGSSDTLDRASAATIMTTALGIHIDLNAKPSFKDSQNHWGTPYMPAAEKAGSIKVEGKGIFNPSGKVTRAAMATMLVNAYKLQNKNTSNGQSKFEEFKGHWGGKIPNTLIGFEISVGTDNGWQPNKFITRAEAAQLTAKTDMLQYSHSNPLENKTIIIDPGHGGEDPGKDTKGLPXKXIVLDTSLRLQKLLEKHTPFTVLLNSXSDTRTGHGSKSSLQERGKFAKTKQGDILIMGHANAFNGNGKRTETYYYXSSKSEKTNPHVEKKPGFPGKIQTRLVDALQTRDRGVKHGDLHVIRENDMPAVLTELAFIDNGIDXRTLSTENPRR

SEQ ID NO: 45309 - protein, 208 aa, Bacillus anthracis
MKGLFVTIEGPEGSGKTTLIQSLLPYFEQKEQKVMATREPGGIAISEDIRTILHKQEYTMMEARTEALLYAAARRQHLVEKVMPALNEDYLVLCDRFIDSSLAYQGYARGLGMDKVFEINRFATEDCMPSLTIYLDIEPEVGLARIAKDAGREVNRLDMEDISFHKRVREGYLQVVERFSDRIVLVNADQPMEKLIEEVIQVIEDKLL

SEQ ID NO: 45310 - protein, 61 aa, Bacillus anthracis
MAKKSMIAKQKRTPKFKVQEYTRCERCGRPHSVYRKFKLCRICFRELAYKGQIPGVKKASW

SEQ ID NO: 45311 - protein, 473 aa, Bacillus anthracis
MAKEYDLVIVGGGTGGYVAAIRASQLGLKTALVEKENLGGTCLHKGCIPSKALLRSAEVYATAKKSEEFGVIASNVELNFAKVQERKEKIVTQLHKGVQHLMKQGKIDVFEGIGRILGPSIFSPMPGTISVELASGEENEMLIPKNVLIATGSRPNSLPGLELDGEYVMSSDHALKMETLPSSIIIVGGGVIGIEWASMLADFGVEVTVLEYAKTILPLEDQDVSKEMQRLFKKKGIKVVTGAKVLPETLVKDNGVTIQAEHNGENKEFKAEKMLVSVGRQANTQNIGLENTDIVVEKGYIQTNEFYQTKESHIYAIGDVIGGLQLAHVASHEGIVAVEHIAGKEVTPIDYSMVSKCVYSSPEVASVGLTEQEAKEKGYKLKVGKFSFRAIGKALVYGESDGFVKLVVDEETNDILGVHMIGPHVTDMISEAGLARVLDATPWEVAHTIHPHPSLSEAIGEAALAVDGKALHA

SEQ ID NO: 45312 - protein, 657 aa, Bacillus anthracis
MLIGKRLNDRYKLLKMIGGGGMANVYLAHDDILGRDVAVKILRLDYSNNEEFIKRFHREAQSVTTLSHPNIVNMYDVGEEDGIYYLVMEYVPGQTLKQYIIERGMLPIGEALDIMEQLTSAMAHAHHFEIVHRDIKPHNILIRADGVIKVTDFGIATATSATTITHTNSVLGSVHYLSPEQARGGIANKQSDIYSLGIVMFELLTGRQPFSGESAVAIALKHLQSEIPSPKRWNENIPQSVENIILKATAKDPFHRYQSANAMKRDIETALYPERINEQPFYIPEDMEATKAIPIIQQEQLFENVTDETIVLKGSKVDEQIRKEETDLSKKKKRSNKWLKILITTFLLLAIGITLALTVIPGFFIPKDVKVPDVAGMKYTTAVNTLVEKGFEVTEPNIVYTDDVETGDVIKTDPVAGRVVKENSKITIYQSGGKKKSKMIDFTGKDLESIRTELEEKYKQVTVYYIEDDRPKGAIVEQIPTSDQMVVEAEQELKIWVSKGPYQIRPGDFSRWTENSVTGYLNERKLTPDIKREYSDTVDKGLVISQSPKPGTPLKEGDKVTIIISEGPKPKVTKTVKVDNISIPYESSIIGEKKPQTIEIYKEDMQQKMDRPIETRTISESATISLEFVIQEDTKGRYKIVRDGVTIIDKEVPYPTQ

SEQ ID NO: 45313 - protein, 636 aa, Bacillus anthracis
  MISC_FEATURE (151)..(151): X=any amino acid
  MISC_FEATURE (280)..(280): X=any amino acid
  MISC_FEATURE (302)..(302): X=any amino acid
  MISC_FEATURE (561)..(561): X=any amino acid
  MISC_FEATURE (620)..(620): X=any amino acid
YNEDAIQVLEGLEAVRKRPGMYIGSTDSRGLHHLVYEIVDNSVDEALAGFGDEISVVIHKDNSISVIDKGRGMPTGMHKLGKPTPEVILTVLHAGGKFGQGGYKTSGGLHGVGASVVNALSEWLVVTIKRDGNIYEHALLLGGVPVTTSLXKIGKTKESGTTMHFKPDTTIFSTTNYNYETLCERLRESAFLLKGMKISIKDERNDLEDVFHYETGIEAFVSYLNEEKDSIHPVVYFTGEQNGIEAELAFQFNDGYSENILSFVNNVRTKDGGTHEAGFXTAMTRVVNEYARKVALFKEKGXNLEGTDIREGEATIVSGRVPKEELPFERQPKGKLGTSEARSSIDAIVSEHLAYFLEENPDVATLLVRKAIKAAQAREAARKAREEARTGKKKKKSEGTLSGKLTPAQSRNPQKNELYLVEGDSAGGSAKQGRDRRFQAVLPLRGKVINTEKAKLADIFKNEEINTIIYAIGGGVGNEFDVEDINYDKVVIMTDADTDGAHIQVLLLTFFYRIYKPLIEAGKVFIALPPLYKVSKGKGKSEVIEYAWSDVQLDSVTKKLXKGYMLQRYKGLGEMNADQLWETTMNPETRTLIRVKMDEPPRPDPRVQPLRGDKVDPPPXMDERNVHFGMQEEGNF

SEQ ID NO: 45314 - protein, 272 aa, Bacillus anthracis
  MISC_FEATURE (6)..(6): X=any amino acid
  MISC_FEATURE (24)..(24): X=any amino acid
  MISC_FEATURE (39)..(39): X=any amino acid
  MISC_FEATURE (43)..(43): X=any amino acid
  MISC_FEATURE (124)..(124): X=any amino acid
LKTPIXKDAHFNDVDVSFPRWGLXCHLSCHTGSGKFGRXFNIXNGLLQPTNGNVKIGGTFHSAGKKRKKAKSPLRKKVGVVFHFPRPQLFEETVRKDICFGPTNFGVSGESSEAKSQEKQLNLXGLEPELLARSPFELSGGQMRRVAIAGVLAMEPEVLVLDEPTAGLDPKGQNELMEMFYKLHKEKGLTVILVTHNMEDAAKYAEQIVVMHKGTVFLQGSAEEVFSHADELEKIGVDLPYVFKSYKRAIEEKFGISIPKATLSLEDLTHEV

SEQ ID NO: 45315 - protein, 122 aa, Bacillus anthracis
  MISC_FEATURE (106)..(106): X=any amino acid
MLSALIPSAHSYPAMPLAEQLVHQRCVHPGPLVLRTAPLKFPTPTTDRDRTVSRRSEPSSRTALMGEQPNPWDRLQPQDAMSRHRGAKPPRRCGLLGEISLLSPGXLLSVERWPFHAEPPDH

SEQ ID NO: 45316 - protein, 163 aa, Bacillus anthracis
MEIMSGAEADIKIGNALPLINIPVGTVVHNIELKPGRGGQLVRSAGTSAQVLGKEGKYVLVRLTSGEVRLVLSACRATVGQVGNESHELIKIGKAGRSRWLGKRPTVRGSVMNPVDHPHGGGEGRSPIGRKSPMSPWGKPTLGFKTRKKNKASDKFIVRRRKK

SEQ ID NO: 45317 - protein, 452 aa, Bacillus anthracis
  MISC_FEATURE (167)..(167): X=any amino acid
  MISC_FEATURE (340)..(340): X=any amino acid
GKRLLDKLWERHVVTTNENGLDLLYIDLHLVHEVTSPQAFEGLRLTNRTVRRPDLTFATMDHNIPTKDVWNITDRIARQHLDTLGKNCKQFQVPLADIGDEEQGIVHVIGPELGLTQPGKPMVGGDSHTATHGAFAALAFGIVTSEVEHVLATQTLCQRNPKAMGIXLKGKLQKGVYAKDIILHLLSKYGVAVGTGYVMEFYGETIGTMEMEERMTLCNMAIEGGAKAGIIAPDEKTFAYVKGRKYAPRDYETFEKKWFELYTDADAIYDLHISIDVTDLAPYVTWGTNPSMGVRIDEKLPEKHDVNDERAFSYMGLILGQSTYDIPVQHVFIGSCTNFXLSDLEIAASVVKGRKVKEGVRALVVPGSKRVRDAAMQKGLHHIFEEAGFEWREPGCSMCLGMNPDQVPEGEHCASTSNRNFEGRQGKGARTHLVSPAMAAAAALYGHFVDIR

SEQ ID NO: 45318 - protein, 300 aa, Bacillus anthracis
FGEMRIFLAVLLGFIVLLSIIFIAIASRYIVRPIRKFTNATQKIASGEYEIELDVKRKDEIGTLSTSFQKMTKSIKELDEMRQEFVSNVSHEFQSPLSSIQGFSKTLQTEKMSVEERNHYLQIIEGESKRMSSLCKQLLTLASLDKEEKVLQIKEFNLQKQIKDVIFMLEWKWREKNIAIEFDVPDITIKGDENLLHQVWSNIFTNSIKFSNEGGTHEFFVEELESSVIISISDNGIGMEKEEMDRIFDRFYKVDTARARNVEGSGFRLSIVQKIVELHNGNVSVYSTFGEGTTVRVVPP

SEQ ID NO: 45319 - protein, 417 aa, Bacillus anthracis
  MISC_FEATURE (71)..(71): X=any amino acid
  MISC_FEATURE (73)..(73): X=any amino acid
  MISC_FEATURE (79)..(79): X=any amino acid
  MISC_FEATURE (81)..(81): X=any amino acid
  MISC_FEATURE (83)..(83): X=any amino acid
  MISC_FEATURE (118)..(118): X=any amino acid
  MISC_FEATURE (176)..(176): X=any amino acid
  MISC_FEATURE (196)..(196): X=any amino acid
  MISC_FEATURE (199)..(199): X=any amino acid
  MISC_FEATURE (212)..(213): X=any amino acid
  MISC_FEATURE (402)..(402): X=any amino acid
MLAKRIPIPVAEAVARVMKYAYQGETEEVSLIEKYGRRLGEDVIADHDVPHFDRSPYDGFAIRAEDTKKQXQXPIQLKXMXKXARGVFTEKVKAFQAVRIMTEPAIREGCNAVVMLDXREGLKKSEKTYMTLKRCFAAGDNISFKGEDVKQNTILVKEGTVINPGVAGILAYVWVXFPYHVVKTAGLLAIVTTGRXTSXGHDPIKPGKVWKXXFLYIAAQIERAGGVVQYYGKFADDFETCFNTVKKAIKEVDILITTGGVSIGDYDYLPAIYERLQANVLFNKIAMRPGSVTTVAEIEGKLLFGLSGNPSACYVGCELYVRPVIGEHICIGKDPHIYRARSNFTERLSESKSVYSFVRGRVEFADGQLQVTPVGLDKSSAISSLAEANAFIVLPRGNERIXSWITVSVLLLESTSG

SEQ ID NO: 45320 - protein, 261 aa, Bacillus anthracis
MIEWYFEYEIHKNRPGLLGDVSSLIGMLGINIVTINGVDNARRGLLLMCDNQEQISRLESILNTMDNITVTKYRPPKLRDKLAVRHGRYIQRDADDKKTFRFVRDELGLLVDFMAEIMKKEGHKLIGIRGMPRVGKTESIVAASVCANKRWLFVSSTLIKQTVRSQLIEDEYSDDNIFILDGIVSTKRANERHWQLVREIMRLPATKVVEHPDVFVSQSEYTLDDFDYIIELRNDYDEEIQYNLVDEIEQGTQNNFSMFDF

SEQ ID NO: 45321 - protein, 96 aa, Bacillus anthracis
  MISC_FEATURE (80)..(80): X=any amino acid
VLPGPLVLRTAPLKFPTPTTDRDRTVSRRSEPSSRTALMGEQPNPWDRLQPQDAMSRHGGNALPRRCGTLGGDSLVSPGXLLSVERWPLHAETTDH

SEQ ID NO: 45322 - protein, 485 aa, Bacillus anthracis
MSLFDHSVSELHKKLNNKEISVTDLVEESYKRIADVEDNVKAFLTLDEENARAKAKELDAKIGAEDNGLLFGMPIGVKDNIVTNGLRTTCASKILANFDPIYDATVVQKLKAADTITIGKLNMDEFAMGSSNENSGFYATKNPWNLDYVPGGSSGGSAAAVAAGEVLFSLGSDTGGSIRQPAAYCGVVGLKPTYGRVSRYGLVAFASSLDQIGPITRTVEDNAYLLQAISGLDRMDATSANVEVGNYLAGLTGDVKGLRIAVPKEYLGEGVGEEARESVLAALKVLEGMGATWEEVSLPHSKYALATYYLLSSSEASANLSRFDGVRYGVRSDNVNNLMDLYKNTRSEGFGDEVKRRIMLGTFALSSGYYDAYYKKAQQVRTLIKNDFENVFANYDVIIGPTTPTPAFKVGEKVDDPMTMYANDILTIPVNLAGVPAISVPCGFGANNMPLGLQIIGKHFDEATIYRVAHAFEQATDHHTKKASL

SEQ ID NO: 45323 - protein, 568 aa, Bacillus anthracis
  MISC_FEATURE (246)..(246): X=any amino acid
  MISC_FEATURE (256)..(256): X=any amino acid
  MISC_FEATURE (316)..(316): X=any amino acid
  MISC_FEATURE (340)..(340): X=any amino acid
  MISC_FEATURE (379)..(379): X=any amino acid
MKQSMVFSLTLREVPADAEIKSHQLLLRAGFMRQNASGIYSFLPFGLKVLHKVERIVREEMERAGAVELLMPAMQAAELWQESGRWYSYGSELMRMKDRNAREFALGATHEEVITDLVRDEVKSYKKLPLTLYQIQTKFRDEQRPRFGLLRGREFLMKDAYSFHATQESLDEVYDRLYKAYSNIFARCGLNFRAVIADSGAMGGKRYHEFMVLSDVGEDTIAYSDTSDYAANIEMGSCCSYVYEEXRSRKRALKSXHPQAQKAMEEVSAFLTIEADKCIKSMLFKVDEKLVVVLFRGDHEVNDVKVKNVYGASGCXAASPEEVKELLNWGSGSLGPDWVXMVISKIFADHAVASLFNGCSGANEKGFPLCKGNPERGLXSKSYTDLRFIQEGRPISQTENGTFLFARGIESGSCIQIRNSYSEAMNATFLDENGKTQPLIMGCYGIGWVSYSGSNCRQFNDENGLVWPKAVAPFHVHVIPVNMKSDAQREMGENIYNSLQEQGYEVLLDDRAERAGVKFADADLFGLPVRVTVGKKADEGIVEVKVRATGESEEVKVEELQTYIANIF

SEQ ID NO: 45324 - protein, 271 aa, Bacillus anthracis
  MISC_FEATURE (146)..(146): X=any amino acid
  MISC_FEATURE (153)..(153): X=any amino acid
  MISC_FEATURE (159)..(159): X=any amino acid
  MISC_FEATURE (163)..(163): X=any amino acid
IMQQLIIGRYIPGNSLIHQLDPRTKLLIVFLYVFVVFLANNAISYGFLFLYALIALFFAKVPIRYVLSGLKPILWIFLFTFFLHIFTNKEGEVLFQLGWFSIHEKGLEQGIYISIRFFVIILMTTLLTLTTTPIENYKNGLEGGIXSPLKAEXKIPCSXKSHXMMSISLSFISPLMDGGSKIMKAQSSRGIDFAGGPDKRRMKAIISLLVPLFISAFKRAEDLAIAMEARGYQSGEGRTKFRQLRWKTSDTVTIISLLCLACILAWVAIVM

SEQ ID NO: 45325 - protein, 464 aa, Bacillus anthracis
MGKRLLDKLWERHVVTTNENGLDLLYIDLHLVHEVTSPQAFEGLRLTNRTVRRPDLTFATMDHNIPTKDVWNITDRIAKQQLDTLRENCKQFQVPLADIGDEEQGIVHVIGPELGLTQPGKTIVCGDSHTATHGAFGALAFGIGTSEVEHVLATQTLWQRKPKAMGIELKGKLQKGVYAKDIILHLLSKYGVAVGTGYVMEFYGETIGTMEMEERMTLCNMAIEGGAKAGIIAPDEKTFAYVKGRKYAPRDYETFEKKWFELYTDADAIYDLHISIDVTDLAPYVTWGTNPSMGVRIDEKLPEKHDVNDERAFSYMGLIPGQSTYDIPVQHVFIGSCTNSRLSDLEIAASVVKGRKVKEGVRALVVPGSKRVRDAAMQKGLHHIFEEAGFEWREPGCSMCLGMNPDQVPEGEHCASTSNRNFEGRQGKGARTHLVSPAMAAAAALYGHFVDIRKESYDGAISYS

SEQ ID NO: 45326 - protein, 462 aa, Bacillus anthracis
MTFSKSTTDKPSYTYEELSVKNKAYVWHPFTQMKDYLEEDPVIIERGEGRKLYDVNGNEYWDGVSSIWLNVHGHQVPELDEAIREQLNKIAHSTMLGLANVPSILLAEKIIEVVPEGLKKVFYSDSGSSAVEIAIKMAFQYWQHKGKPKKQRFVTLKEAYHGDTIGAVSVGAIDLFYQVYSSLLFEAIKMPYPYTYRSPYGNDKAEIVKKHLEEMEELLKDKHEEIAAIIVEPLMQGAGGMITMPKGYLRGLRNLCTKYNVLFITDEVATGFGRTGKMFACEHENVTPDILTAGKGLTGGYLPVAITVTTDEIYNAFLGSYEEQKTFFHGHSYTGNPLGCAVAIANLELYEKTNLIEEVARKTEYVATQLEELFACKHVGDIRQCGLMVGIELVKNKETKEAFEWTERVGVQVCKRSRELGMILRPLGNTIVFMPPLASTIDEIDEMLRILYKAISDITEGE

SEQ ID NO: 45327 - protein, 218 aa, Bacillus anthracis
MIKNGTLKPGDKLLPVHQLAEQFQVGRSAVREALSALRAMGLIEMKQGEGTYVKNFDSSSLTKSLNNRLLMKKEDILNLLEVRKVLEVGAVRAAAAKRTEANLQNMKHWLDEMAKSIGDEKAGEKADFQFHMGIAESSHNNILLELMNHVSEMIAETIGESRRIILYGEQTTSERLIEEHQVIYDAVLKQDVELAQQAMLDHLTNVEHIVTGRNDINS

SEQ ID NO: 45328 - protein, 147 aa, Bacillus anthracis
MKLHELKPAEGSRKVRNRVGRGIGSGNGKSAGRVQKGPNRPVGGGGFRLVLEGVQTSIIRWLPKAGFTNITCKEFAIVYLSTLNRFEDGTEVPPELLLETGVISKLNDGVKILASGAVEKKLNCKSAQFSSSVKEAIEAAGGSVEVI

SEQ ID NO: 45329 - protein, 179 aa, Bacillus anthracis
  MISC_FEATURE (67)..(67): X=any amino acid
  MISC_FEATURE (134)..(134): X=any amino acid
  MISC_FEATURE (154)..(154): X=any amino acid
GSFRPVAGNLHLHRYYISPSLWLRQCPNRYTFRAGRNLPDKEFRYLRTVIVTAAVYWGFSSELRLRXPLSLTFQHRAGVTPYTSPYGFAESCVFAKQSLGPIHCGFSVKKAPLLPKLRGHFAEFLNPEFSRTPXGFSPRLPVSGLRYRHLLSRXKLFLAAGNQRLRSIRSFPITAQPSR

SEQ ID NO: 45330 - protein, 469 aa, Bacillus anthracis
  MISC_FEATURE (150)..(150): X=any amino acid
  MISC_FEATURE (189)..(189): X=any amino acid
  MISC_FEATURE (198)..(198): X=any amino acid
KDGFTYSLYVTIVLIMIDGQISESYIMMKDILPLKNQQEEIKYLAFHDTVTKIGNRAFFHKKLKKIIKNAKTTESEFALLYFDLDRFKAINDTLGHSAGDYILEEVAKRFQSCLPSHTHLSRIGGDEFTILIENYTDEDSLIRVMQPVIXMHEKSFVIYEHTLTLSLGIGIANYSHLGIDTATLSENAXCCMYDAKAXQLNSVSIYDDVIAKKIERRLRLEKDLPNAIQNEELFLLYQPQVDSKSNKIIGAEALIRWNHPELGVISPYEFIPIAEETLQIIPIGKWTLQQACEQMKRWHTSGYSHLKIGVNLSAKEFEQEDFVKSISATLTNTGLPASSLDLELTERIAMMDERETLIKLRTLKSLGVHISIDDFGTGYSSLAYLPLYPIDTLKIPREFITMSETCDDGMEIIKTIITLANTLGMSVIAEGVETKEHVSFLQKNNCKFIQGYYYSKPIHADSFSTLLKK

SEQ ID NO: 45331 - protein, 423 aa, Bacillus anthracis
MHYDVIVIGGGPSGLMAAIGAAEEGASVLLLDKGNKLGRKLAISGGGRCNVTNRLPLDEIVKHIPGNGRFLYSAFSIFNNEDIITFFENLGVKLKEEDHGRMFPVSNKAQSVVDALLTRLKDLGVKIRTNTPVETIEYENGQTKAVVLKTGEVLETNHVVIAVGGKSVPQTGSTGDGYAWAKKAGHTITELFPTEVPILSNEPFIQDRSLQGLALRDVNLSVLNPKGKAIISHKMDMLFTHFGLSGPAALRCSQFVVKALKKFKTNTVQMSIDALPEENSEQLFQRMLKQMKEDPKKGIKNVLKGYVPERYFLFLLERNEIDGSEQAGQVSHEKIRALVKDFKEFTVNVNGTQSIEKAFVTGGGVSVKEINPKEMSSKFTNGLYFCGEVLDIHGYTGGYNITSALVTGRIAGTTAGENAKMQY

SEQ ID NO: 45332 - protein, 246 aa, Bacillus anthracis
  MISC_FEATURE (70)..(70): X=any amino acid
RIKCTVAYDGMHFCGYQIQPQHRTVQQEIEKALQKLHKGELVRVQASGRTDSTVHAKGQVIPFDTPFSSXKSGQWSNALTTMLPDDIVITQVEKKTEEFHARYGVERKEYRYRVLVSKTADVFRRNYVYQYPYPLEVNSIRKAIPYFIGTHDFTSFCSAKTDKKDKVRTIYEIELIEQDDELIFRFVGNGFLYNMVRIIVGTLLNVGQGKLDPDSIPEILAKQNRQFAGKMAPGHGLYLWQVNYNN

SEQ ID NO: 45333 - protein, 97 aa, Bacillus anthracis
MFKFNDEKGQLKCSFCGKTQTQVRKLVAGPGVYICDECIELCTEIVQEELAKDEEVEFKDVPKPVEIREILDEYVIGQDNAKKALAVAVYNHYKRIN

SEQ ID NO: 45334 - protein, 485 aa, Bacillus anthracis
  MISC_FEATURE (63)..(63): X=any amino acid
  MISC_FEATURE (135)..(135): X=any amino acid
  MISC_FEATURE (220)..(220): X=any amino acid
  MISC_FEATURE (245)..(246): X=any amino acid
  MISC_FEATURE (257)..(257): X=any amino acid
  MISC_FEATURE (260)..(260): X=any amino acid
  MISC_FEATURE (350)..(350): X=any amino acid
  MISC_FEATURE (451)..(451): X=any amino acid
  MISC_FEATURE (462)..(462): X=any amino acid
  MISC_FEATURE (464)..(464): X=any amino acid
LLFMLGATGDLAKRKIYPALYNLYRDQKLPKQISVIGLGRREVSHVDFQKRIKGFIETFFSSXRRRYSRTEGFLDNFRYCPLDVSKPEDYERLLPVVREREEELHIKGNRMFYLFGCSPEFFETIALNIKGKRTXKNDGMKRLMIEKPFGHDLTSARELNDKLSRTFEEDEIYRIDHYLGKPMIQNLEALEFANPVLPSIWNKEHIANVQFTASETVGCXRRAGIYDQAGAISRYGSKQYVTNNXXGLRLNWPGKVXCMXNSREKRKVMEALRKVKKEDVQNHIIRGQYGAGEINAGQVVAYKEEPGSKSLLLYRHIYCCSLWIDNPFWTGVPFYIRPGKRMKEKSTRMXIEIKKYVKTAISDSNPNAAPNLLIIEISPGENVSLQLNSKNPLKNGEIEPIRINFTCEQADVGVPEAYERLIHDAVSGDATFFAHWREVELSWEWVQPNSXSIRGKLITSPXIXVWFIWSRGSNELLQESGFKWW

SEQ ID NO: 45335 - protein, 234 aa, Bacillus anthracis
  MISC_FEATURE (127)..(127): X=any amino acid
MFRTISNFMRVAEIRRKILFTLAMLIVFRIGTFIPVPHTNAEVLKIQDQANVLGMLNVFGGGALQHFSIFAVGITPYITASIIVQLLQMDVIPKFSEWAKQGEMGRKKSAQFTRYFTIILAFIQAIXMSYGFNNIAGGQLITDQSWTTYLFIANVLTAGTAFLLWLSEQITANGVGNGISMLIFAGLVAAIPNVANPIYLQQFQNAGESLFMHIIKMALIGLVILTIGVGVIYI

SEQ ID NO: 45336 - protein, 450 aa, Bacillus anthracis
MKTVTEFQNKNILVLGIAKSGYAAATLLQKLGANVIVNDGKPLAENVLAAELQAKGMDVVCGGHPLELLERNISLVVKNPGIPYSNPILVAAKEKQIPIVTEVELAYRISEAPFVGITGSNGKTTTTMLTFEMLKEGQKHPVIAGNIGTVACEVAQDAKENEVVVTELSSFQLMGVELFQPKIAAFLNLFEAHLDYHGTKKEYGLAKANIFKNQTENDYSVINADDADVMALSAYSKGQKVLFSTTKEIEDGACIKDNALYFKAEKVVEVDDIVLPGQHNLENILAAMSIAKLLGVSNEAITAVLKRFTGVKHRLEYVTTINNRKFYNDSKATNMLATEKALSAFTQPTVLLAGGLDRGNEFDDLIPYFKNVKAIVTFGQTAPKLVRAAEKAGLDTIESVDTLDEAVVKAYAHSTDGDVILLSPACASWDQFKTFEERGDIFIQAVHKLI

SEQ ID NO: 45337 - protein, 317 aa, Bacillus anthracis
MKRMLKIHEMSIITLLLIYIAIVGMINPSFIQFNSLSLMVKSSVILVVLAIGQSFVLFTKNIDVSVGSSMGLSAAVCGMLLTNEYSASLSIFAAITLGAIIGFVNGMGVAKFRVPAIIMTLGMLGIIRGAMLIFTGGKWIEDIPNDFKQLSSIVILGLPITVWFVLIILLLLYFFLRKVPFGRYFYAVGDNEDGARLIGIPVNKVKICAFIISGISAALAGCIFVMNIGFIPNQTGTGLELQVIAAAVLGGIHLKGGTGSLFGAALGALFLETISSSLVFLKIPAFWNNAISGFLLLLIIILDSVMKKWKAERRMNL

SEQ ID NO: 45338 - protein, 239 aa, Bacillus anthracis
MKVTLFVTCLVDMFETNVGKATVEVLERLGCEIEFPEAQVCCGQPAYNSGHVEAAKEAMKHMIETFEDAEYIVTPSGSCATMFHEYPHVFKDDPKWAKRAQKVADKTYEFTQFIVDVLKVTDVGASLPGIATIHKSCHMTRMLGVTEAPGILLSNVKGLTVRELPNVQNCCGFGGTFSVKMTPISEQMVDEKVDSAMETGADYLIGADCGCLLNIGGRIERLGKEIKVMHIAEVLNSRS

SEQ ID NO: 45339 - protein, 114 aa, Bacillus anthracis
MIKITISRTKLGSIQSFKMTGHADYAPHGQDLVCAGTTAVVFGSINAVEELCNVQATIELGSDGGFLTYELPNDLDVHAAEKAQTLLEGLVVSLKTIELDYGKYIRLIEKVQEV

SEQ ID NO: 45340 - protein, 277 aa, Bacillus anthracis
MKQLYGVIGNPIGHSLSPVMHNDAFEHLKMDAHYHAFLVKEEVLGEAVRGLKALGISGFNVTTPHKVAIMDYLDEIDPLAKQIGAVNTVVHKDGKLIGYNTDGIGFVRALQSISSEPLQEKRILLLGAGGASRAIYFSLADAGVKEIDVANRTVDKAKELIAACTATVHSVALSLEKATKEQGNYDIIIQTTTIGMHPRVEHTPLQISSLKKGTIVSDIIYNPFETKILCEAKEQGAIIQNGIDMFVYQGALAFEMWTGCVPNIERMKQLVIKKLGG

SEQ ID NO: 45341 - protein, 187 aa, Bacillus anthracis
MKKVEEAFKVMRDIAAEGGDILFVGTKKQAQEAIKEEATRAGMYFVNQRWLGGTLTNFQTIQKRIKRLKDIERMQEDGTFEVLPKKEVVQLKKELERLEKFLGGIKDMKGLPSALFVVDPRKERIAVAEARKLHIPIIGIVDTNCDPDEIDHVIPANDDAIRAVKLLTSKMADAILEAKQGEETVTA

SEQ ID NO: 45342 - protein, 361 aa, Bacillus anthracis
MDILKLLMVAILIGLTAFFVAVEFAIIKVRSSRIDQLVSEKRRGALAAKKVTSNLDEYLSACQLGITITALGLGWLGEPTIKHLLEPLFLKLNLSPAIASTVSFIIAFAVITFLHVVIGELAPKTFAIQRAEQVSLLLSKPLIYFYRIMYPFIWALNGSARLVTGLFGLHPASEHEVAHSEEELRLILSESYESGEINQREFKYVNNIFEFDNRVAKEIMVPRTEVIGLYEDEPFETHIKIIAQEKYTRYPVFGEDKDEIIGMVNVKDLFIRYMDGNRDEECSITPYTRPVIEVLENIPIHDLLLQMQRKHIPLAVLYDEYGGTAGIVTLEDILEEIVGEIRDEYDEDEHPPIEHISEGGH

SEQ ID NO: 45343 - protein, 712 aa, Bacillus anthracis
MSQEKQVFSIDLAGRQLTVETGQLAKQANGAVLVRYGDTAVLSTATASKEAKNVDFFPLTVNYEERLYAVGKIPGGFIKREGRPSEKAILASRLIDRPIRPLFADGFRNEVQVVNIVMSVDQDCSSEMAAMLGSSLALSISDIPFEGPIAGATVGRINGEFVINPTVEQQEQSDIHLVVAGTKDAINMVEAGADQVPEETMLEAIMFGHDEIKRLIAFQEEIVQAVGKEKSEVKLYEVDADLNQAVREMAEKDMHSAIQVHEKHAREDAINEVKKRVIEHYEAQEADADTLGQVNEILYKIVKEEVRRLITVEKIRPDGRKGDEIRPLASEVGILSRTHGSGLFTRGQTQALSICTLGALGDVQILDGLGVEESKRFMHHYNFPSFSVGETRPMRGPGRREIGHGALGERALEPVIPSEKDFPYTVRLVSEVLESNGSTSQASICGSTLAMMDAGVPLKAPVAGIAMGLVKTGEHYTILSDIQGMEDHLGDMDFKVAGTAHGVTALQMDIKIDGLSREILEEALQQAKVGRVHILNHMLSVIAEPRTELSAYAPKIITMTINPDKIRDVIGPSGKQINKIIEETGVKIDIEQDGTVFISSINQEMNDKAKKIIEDIVREVQVGEIYEGKVKRVEKFGAFVELFSGKDGLVHISELALERVGKVEDVVKIGDVITVKVIEIDKQGRVNLSRKVLLKEEQEKEAAKEENKQEQQ

SEQ ID NO: 45344 - protein, 373 aa, Bacillus anthracis
MADKPARSKQIETEMTLEQVKEQLTELGKKRGVLTYEEIAERMNGFEIESDQMDEYYEYLGEQGIDLVGDNDEGPNNHQITKTEEEFDLNDLSVPPGVKINDPVRMYLKEIGRVDLLSAEEEIRLATRIEEGDEEAKRRLAEANLRLVVSIAKRYVGRGMLFLDLIQEGNMGLIKAVEKFDYRKGFKFSTYATWWIRQAITRAIADQARTIRIPVHMVETINKLIRVQRQLLQDLGREPSPEEIGEEMDLAPEKVREILKIAQEPVSLETPIGEEDDSHLGDFIEDQEATSPADHAAYELLKEQLEDVLDTLTDREENVLRLRFGLDDGRTRTLEEVGKVFGVTRERIRQIEAKALRKLRHPSRSKRLKDFLE

SEQ ID NO: 45345 - protein, 351 aa, Bacillus anthracis
MANHELDQLRKQVDEINLQLLHLLNKRGEIVQKIGEQKQVQGTKRFDPVREREVLDMIAENNEGPFETSTVQHIFKTIFKASLELQEDDNRKALLVSRKKKQENTIVDVKGELIVNGPQNFHMGPCAVERLEQVGQVGQAMKDQGLKINAGGASKPRTSPYDFQRFRVEGLQILRQVADEFDLSIISEILNPNDVEMALDYVDVIQVGARNMQNFDLLRAVGKVNKPVLLKRGLAATIDEFINAAEYIIAQGNDQIILCERGIRTYERATRNTLDISAVPILKKETHLPVVVDVTHSTGRRDLLLPTAKAALAIGADAVMAEVHPDPAVALSDSAQQMDIPEFHRFMEELK

SEQ ID NO: 45346 - protein, 232 aa, Bacillus anthracis
  MISC_FEATURE (231)..(231): X=any amino acid
RIDMSEYMEKQLVSRLIGAHPGYVEYEEGGQLTEAVRRKPYSVMLLDEIEKAPPRVFNIFIQMLDDGRITDSQGRTGDFKKYRYYYTSNNWILLFIRWLEEDGSIKEESRELVMGQLRGHFRPEFLRRVDEIILSNLLPPNEIKGMVDKIVKEFQGRLAARHIPVKLPEAAKEFVVEAGFDRDVRSSSLKRYVQRQVETKLARELIAGTITDNSHVVVDVENNELVVHVKXK

SEQ ID NO: 45347 - protein, 249 aa, Bacillus anthracis
  MISC_FEATURE (236)..(236): X=any amino acid
LVFDTKNLNLWYGEDHGLKDINLSIHENEVTAIIGASGCGKSTYLKTLNRMVELVPIVRTTGVIEYRERNIFDKSYPVEELRTHVGMVFQKPNPFPKSIYENVAYGPKIHGISDKKTLDEIVEKSLRGAAIWDELKDRLHDNAYGLSGGQQQRLCIARCLAIEPDVILMDEPTSALDPISTLKVEELIQELKKDFSIVIVTHNMQQAARISDKTAFFLSGEVVEYTDTNKLFTTPXDKRTEDYITGRFG

SEQ ID NO: 45348 - protein, 170 aa, Bacillus anthracis
MERTTIKEYIIRTATEEESDSIITLLKEVAQWLQHKEVDQWQYLLGGEATDEILEGIREKYTYVITKEDEIIGTVTVSPKQNEWDEHIFGKEEVSNSLYIHRFAVKRKYKGNGIGEWILQWIEENVQHDKEFLKLDCVGHNRTLNDFYKKNGFDYVGSTDGLSKFQKKRG

SEQ ID NO: 45349 - protein, 328 aa, Bacillus anthracis
  MISC_FEATURE (156)..(156): X=any amino acid
  MISC_FEATURE (173)..(173): X=any amino acid
  MISC_FEATURE (325)..(326): X=any amino acid
MSVIFSGIQPSGTITLGNYLGAMKQFTELQNEHDCYFCIVNQHAITVPQDPRQLRKNIGSLAALYVACGIDPEKATYFVQSEVPAHAQLGWIMQSVAYVGELERMTQYKDKASGRDSVPAGLLTYPPLMAADILLYNTEIVPVGDDQKQLIGLTPXLAERFHQTLREVFTIPXNPHPKVGARVMSLTEPTKKMSKSDPNPKSMISMLDEPKTIEKKIKSAVTDSEGIVKFDKENKPGISNLLTIYSSFSGKTVEEIEAMYEGKGYGDFKGDLAQVVVEAIRPIQDKYNELINSPELDEILDTRCFESKPRCHQQLRKVENGKGGXXKR

SEQ ID NO: 45350 - protein, 329 aa, Bacillus anthracis
MNSLQFNRHRRLRQSGGMRALVRETFLHTEDFIYPIFVLEGENVRNEVPSMPGVYQMSLDLLQAEMQEVVDLGIRSVIVFGLPAEKDEVGSSAYCDHGIVQRAIQQIKGEFPDLVVVADTCLCQFTSHGHCGVIEDGIILNDESLAVLAKTAVSQAKAGADIIAPSNMMDGFVTAIRHALDENGFGHVPVMSYAVKYSSAFYGPFRDAAHGAPQFGDRKTYQMDPANRMEAFREAESDVMEGADFLIVKPALSYLDIVRDVKNNFNLPVVAYNVSGEYSMIKAAAQNGWINEKEVVLEKLISMKRAGADLIITYHAKDAARWLQEGGAK

SEQ ID NO: 45351 - protein, 425 aa, Bacillus anthracis
  MISC_FEATURE (238)..(238): X=any amino acid
  MISC_FEATURE (275)..(275): X=any amino acid
  MISC_FEATURE (291)..(291): X=any amino acid
  MISC_FEATURE (400)..(400): X=any amino acid
  MISC_FEATURE (404)..(404): X=any amino acid
RTQIGLTVALSIVVGTIIGSGVFMKRERAVLDYSGSSNMAILAWVIGGSLTLASGLTVGEIGAQIPKNGGLYSYLEEILGSFWGIIIGWNAKRLFMGPAIMGTLGVILSSLMINFFYLDKVWNLPIAIGTVVFLGVVNSMGDKYGGYRQNDHTFWEDDSNVLIVVLGFWKGNSDIFNVVCRLSENQSIGMRFLATLLLYDGWILLASMGGEMKNPTKLLPESNDSWGFNCTSCLVINXLSVTECLPATQIVDLGENAPATAAGMLLGEYGGKNYXYRYYRIYIGCLNGKIXTFPTYPDVDGRTWTLPFAKFIAKESPRFKTPANAITVEIILGIILMIISDPNKLSEISVFIIYIFYVMTFIGVFILRKRNKNKERAYSVPLFPIVPIVAILGLTLVNRXCDYXRPLSCFYQMGIVLRGLSGILV

SEQ ID NO: 45352 - protein, 191 aa, Bacillus anthracis
MHYPEPISKLIDSFMKLPGIGPKTAVRLAFFVLDMKEDDVLGFAKALVNAKRDLAYCSVCGHITDRDPCYICNDSHRDQSVVCVVQEPKDVISMEKMKEGGGVYHVLPGAISPMGGIGPEDINIPQLLKRLHDETVQEVILATNPNIEGEATAMYISRLLKPTGIKVTRIAHGLPVGGDLEYADEVTLSKA

SEQ ID NO: 45353 - protein, 370 aa, Bacillus anthracis
MNEMTHRTKTRPVKVGNLTIGGNNELIIQSMTTTKTHDVEATVAEIKRLEEAGCQVVRVAVPDERAANAIADIKKQINIPLVADIHFDYRLALKAIEGGIDKVRINPGNIGRRHKVEAVVNAAKERGIPIRIGVNAGSLERHILEKYGYPTADGMVESALHHIKILEDLDFHDIIVSMKASDVNLAIEAYEKAARAFDYPLHLGITESGTLFAGTVKSAAGLGAILNKGIGNTLRISLSADPVEEVKVARELLKSFGLASNAATLISCPTCGRIEIDLISIANEVEEYISTLQVPIKVAVLGCAVNGPGEAREADIGIAGARGEGLLFRKGQVVRKVPEEIMVEELKKEIDVIAAEMAAEREKEKETQEQ

SEQ ID NO: 45354 - protein, 275 aa, Bacillus anthracis
WIMSYRKLKRNKMAFIGGIIVLFYIVIAIFAPLLAPYNPFDIQLVNKLQPPSMEHWMGTDDKGRDILSRLLHGTRLSLLVGFSSVFIGALFGIILGIISGYYGGWFDTVIMRIIDIMLAFPGILLALAIVGALGPSSVNVIFAMGFFSIPYVARIVRASTLPVKKLEYIDAIRALGANDFTIIMKHIFPNILSPIIVQATLRLATAILSAAGLSFLGLGAQPPSPEWGAMLSNGRDFLFTAPHIAMFPGIAMSTLVIGLNMFGDGLRDALDPRLK

SEQ ID NO: 45355 - protein, 65 aa, Bacillus anthracis
MEQKQYNLYDVVEMKKAHPCGENRWKIIRMGMDIRIKCEGCDHSVMIPRREFDRKVKKILVKHEE

SEQ ID NO: 45356 - protein, 352 aa, Bacillus anthracis
LYGGKSAEHQVSLQTALAAIKALNQDKFEIHPIYITEQGQWIRGERIEGEVANVEVLKMSGAENAISPLSLSTEIIPSANAEENAIDVIFPLLHGPNGEDGTVQGLLELMNIPYVGNGVLASAAGMDKVVMKNIFAEAGLKQAKYASFIRSGWEKDRETAYEKVEEVLGYPCFVKPANLGSSVGINKCKNREELENAFEEAFQFDRKIIVEENIIGREVEVGVLGNDEPKCSVVGEIVPKKDFYDYKSKYIDGDTALIIPAEMTEEESNVIKRDAIVAFQSLDGAGLTRADFFLTKDGEVYINEVNTMPGFTPFSMFPLLWQHTGLPYPELIEELIRLAMERHEEKQKIKYT

SEQ ID NO: 45357 - protein, 260 aa, Bacillus anthracis
MDNKIVYVVSDSVGETADLVVRAAMGQFPFAPDIRRVPYVEDTGTLKEVISIAKSNQALICFTLVKPDMRQYLVTEAAKEGVEAYDIIGPLIDQIEEITGQVPRYEPGVVRRLDEEYFKKIEAIEFAVKYDDGRDARGILKADIVLIGISRTSKTPLSQILAHNNRLKVANVPLVPEVDPLENLYQVAKEKCFGLKITPEKLNHIRKERLKSLGLSDGATYANINRIKKRMTHLENVVSKINCQVIDVSTKAMKEPATII

SEQ ID NO: 45358 - protein, 212 aa, Bacillus anthracis
VSNLNYTVRSIKRFKNRTVIISGGGNSAIDWANELEPIAKKVYFTYRKEELSGAEAPGKQLMNSSCRCFFNTSITTLIAGHPHEAIEYVELTNPETGEVSQLAIDEVIINHGYERDITLLENSELDVAIIDNYYIAGNANTESSVDGLYAAGDILTHEGKLHSIAGAFQDAGKGGKKGEQFFHPDAREYGMFSWHNEVFKKRNRELIKQMMK

SEQ ID NO: 45359 - protein, 303 aa, Bacillus anthracis
MKKKILFWVLGILGVLIIGGGIYAYNVYSSVSNTLKEVHQPLKRDQNNSNVGEKVSKSEPVSILLLGADERGEDKGRSDSLMVITLNPKNNSMKTVSIPRDTYTEIVGKGKSDKINHAYAFGGVDMSVATVENFLNVPINYYIEVNMEGFKDIVDAVGGVDVKNDLEFTQDGHHFAKGNIHLTGDQALAFTRMRKQDPRGDFGRQMRQRQVMQGVIKKGASFSSLTGYGDVLSAIQKNVKTNLTQDQMFDMQKNYKDCLKNSEDIQIPGDGHKAADGIWYYYVPDAAKQDLTNKLRTHLEVTK

SEQ ID NO: 45360 - protein, 364 aa, Bacillus anthracis
  MISC_FEATURE (21)..(21): X=any amino acid
  MISC_FEATURE (42)..(42): X=any amino acid
  MISC_FEATURE (63)..(63): X=any amino acid
  MISC_FEATURE (88)..(88): X=any amino acid
  MISC_FEATURE (101)..(101): X=any amino acid
  MISC_FEATURE (116)..(116): X=any amino acid
  MISC_FEATURE (175)..(175): X=any amino acid
  MISC_FEATURE (188)..(188): X=any amino acid
  MISC_FEATURE (235)..(235): X=any amino acid
  MISC_FEATURE (254)..(254): X=any amino acid
  MISC_FEATURE (329)..(329): X=any amino acid
  MISC_FEATURE (332)..(332): X=any amino acid
  MISC_FEATURE (342)..(342): X=any amino acid
  MISC_FEATURE (354)..(355): X=any amino acid
TIETKLAQIGNRSETTTGNWXSPCYLSTGYRPEGMGKSTGIXYSQTGNPTRGLLEQAIADLEXRQQVYACSSGMAAVLLVLSLFRSEXELIGSQKLFRGPXSIISGPQKKGDGPRXIRNYQPIKQIEQAIPTETKAIFIENRRQSLNARLLILPPVATGSKKTRDYVLIVDNTFXHALYTAPFTERCXHVLHSATKYLGGHNDVLSGLVVAKGKELCEEIAHYHNASGCGAKSIXLWLLIRGMKTLAPSHETHXKKCQNQLLAYLNGEGRVGQKYFYPWKRAGGNPLSALKMKTWINPFLQSLAYNYIRRKSWGVESLMTYPATQNTRXYSXRNQNAKRCMXSSSSIFCWHEKXXRFNQRLTAA

SEQ ID NO: 45361 - protein, 744 aa, Bacillus anthracis
TTFIDGSVLVNNIPQLNANPSTGILVGTIAPNISIPVTFSVTVVALPTSGHVQNQATSRYTINGEEQISTSNITFTEVISANIIAVKTTPIQYADLQTIIPYTISITNNGNIQVENIIVTDIIPANTNFIENSVIVNGNTRPNDNPLSGIPIDNILPNTTATVLFQVRVTSIPQTNPISNTSTIEYEYTVGDQPPITKTIISSAALTEINHANLNSNKAVDLAFAMVGDTLTYTITLNQTGNVAANDVIIQDMIPQGTTFIENSVIVNGETLPGVNPANGIPIGTIIVDGDAIASFQVTVTSIPIRNELTNQAISTFNYIVNPNNVPVTNTTTTNTVTTTVQNDNVIAIKAVDFTSALPGQTLTYTITITNNGNITIEDLLLVDMAPVDTTFVIGSVTINGINQPNANPENGITLGTLAPNDSVIITFQVTISSSTLQSTINNDATIFYTPIVGLIEPPITITRQIDIVTKQTNTVTTTIIDPMVHIEKTADKSIVVLGDILTFTLEIFNDSPIPTVSTAVIDTIPAGTTFIENSVTLNGTPVPNVRPDTSMNIGSLPADAVAILTFKVLVTSIPSNSTIINSATVTATFQLTPQDPIITFIVNSNIVRIPVQFVTATVVKNASVTSAYLNQYFDYTVRITNTSEISLSNISLQDTIPVGLQFINGTVFINEERSPLANPNIGFLVATNLEPNETIIVLFTVQVISPPVNNEFKNTANISLQLQVSPTDPPITETVTSNENIVI

SEQ ID NO: 45362 - protein, 529 aa, Bacillus anthracis
MLKKIIPVALALSTVIFTSVFAVPSAQASTEPNRYIDVQMLGINDFHGQLDTVKKINNKDAGGIEYLGAYLRDREKQNPNTLKVHAGDVVGASTPVSALLQDEPTIEFLNDLKFDVGTIGNHEFDEGVEEMNRLIYGGYHEKTGKFKGAKFPYVAANFYNKSTGRLFLPPFTIKKVQGVPVGFIGVVTTDVPNLVMPTMLKNVEITDEVEAINKSVKQLKKLGVKSIVVLAHNGGTTDGNGVTNGDIVRLANETDPEVDVIFGGHSHTYVNGTVNNKLVVQANSYGMAFADVDVKIDRKTQDIVEKKAEIVTTYHEGMEPDKKIKKKMEKYQAKIAPLVNEVVGKSIAPLDRKLNTAGESTLGNLVADAQRATMQSQIALMNPGGIRNDLDAGDITWGEIYGIQPFGNQLIKVNLTGQDIRDILNQQWQKDITRMLQISGIQYTWDANKPNGEKVTSIRLTNGEEIIPSKTYSVVANAFLASGGDGFVSFKNGKDAETGPTDFEALVDYIKKSKEPIQSIIDGRIQKIN

SEQ ID NO: 45363 - protein, 316 aa, Bacillus anthracis
MIPVTILTGFLGSGKTTLLNRILTENHGQKLAVIVNEIGKIGIDNQLIMNVEEEIMEMTNGCLCCTVREDLLVALKQLLDVKAEGKMDFDGLVIETTGLANPGPIIQTFFLDPVIQSAYQINGVVTVVDSYHIHKHFEKGLEAKEQIAFADVILVNKLDLIEESEKENLLHELQGINPTAKLIQSTNCDVDIPSLLKIQTFKTKDTLQIYPHKEHNHLEGVKSFVLREERPLDLQKLNEWMSAVVQELGEYLYRYKGILSIDGVDKRIVFQGVHTLFAASYDREWQEGEERVSEVVFIGKDINKEWFQEHFEECVK

SEQ ID NO: 45364 - protein, 87 aa, Bacillus anthracis
GNARSCSMEAIDCAKRGEFTEAEAKLQEALEELKEAHRVQTDLIQKEAGGEKTEVTLLMVHAQDHLMNAITVKELASEFVELYTKMS

SEQ ID NO: 45365 - protein, 361 aa, Bacillus anthracis
MKELHTFGWYAARVSPHLPKKAFKPVPTRLFGGLAYLLVALAGLISIGVFELNVWANLGIAIVLGLCFASLGFLGHEILHGTVVRKAWLRDFLGAIAFMPLSTGPKLWRKWHNATHHVHTQHEENDPDAWPTLEKLKKSKFLSWVYRMPLHVRSFFSFLSLTIQFTLHSTRMFFHFIKEFKSSNQKSVWLQLLLPWTVWISLLFIMGPGKWLFAYVIPLLIANFIVMAYIATNHRLNPIVPVNDPLANCLSVTVPRWVDVLHFNFSYHTEHHLFPAMSSKYYPLVKEKIKEMWPERYHEMPMTKALAALWNTPRVYYQGSELVDPHREHFYGSLGNGLDPHNISYREEHIEEEESIKKVNQ

SEQ ID NO: 45366 - protein, 53 aa, Bacillus anthracis
MDKLLTNVDWNQMLEATGETLYMTAIAALATFILGLILGLLLFMTAKDNLWEN

SEQ ID NO: 45367 - protein, 370 aa, Bacillus anthracis
MSTIETKLAQIGNRSETTTGTVNPPVYFSTAYRHEGIGKSTGFDYSRTGNPTRGLLEQAIADLEYGEQGYACSSGMAAVLLVLSLFRSGDELIVSEDLYGGTYRLFSEHEKKWNVRCRYVNTQSIKQIEQAITTETKAIFIETPTNPLMQVTDIAAVATVAKRHGLLLIVDNTFYTPYIQQPLTEGADIVLHSATKYLGGHNDVLSGLVVAKGKELCEEIAHYHNASGAVLSPFDSWLLIRGMKTLALRMRQHEKNAKAVVAYLNDEDGVTDVFYPGRGGMISFRLKDETWINPFLQSLSLITFAESLGGVESLMTYPATQTHADIPEEIRTANGVCNRLLRFSVGIENSNDLIQDLQQAIKLVKEGVRI

SEQ ID NO: 45368 - protein, 140 aa, Bacillus anthracis
MPTINQLVRNGRTDKVWKSKSPALNKGFNSLKKKSTDISAPQKRGVCTRVGTMTPKKPNSALRKYARVRLTNGIEVTAYIPGIGHNLQEHSVVLIRGGRVKDLPGVRYHIVRGALDTAGVDKRMQGRSKYGTKKPKSAKK

SEQ ID NO: 45369 - protein, 414 aa, Bacillus anthracis
  MISC_FEATURE (15)..(15): X=any amino acid
  MISC_FEATURE (42)..(42): X=any amino acid
  MISC_FEATURE (45)..(45): X=any amino acid
  MISC_FEATURE (50)..(50): X=any amino acid
  MISC_FEATURE (386)..(386): X=any amino acid
KKELIEKFSEIIKGXFRNPREDCHSGPTNPQGKMEFGKVIKXKSXKKLGXPEVPMNDNGYVMATLPVNTDRDVSVIGFLAHLDTATDFTGKNVKPQIHENFDGNAITLNEELNIVLTPEQFPELPSYKGHTIITTDGTTLLGADDKAGLTEIMVAMNYLIHNPQIKHGKIRVAFTPDEEIGRGPAHFDVEAFGASFAYMMDGGPLGGLEYESFNAAGAKLTFNGTNTHPGTAKNKMRNATKLAMEFNGHLPVEEAPEYTEGYEGFYHLLSLNGDVEQSKAYYIIRDFDRKNFEARKNTIENIVKQMQEKYGQDAVVLEMNDQYYNMLEKIDPVREIGEIAYEAMKSLNFRTQSFLRIGGETDGSQLSVYGLPTPDHFHRGEKLSRXFEYVFGRCYGKKAVQVIIEIARRFEEQA

SEQ ID NO: 45370 - protein, 291 aa, Bacillus anthracis
MNRINRMYVMMLFVPLFWGGSFATAEHVLTEIPPITAATIRFGLAGCILIGIVFMKSEWNTSLLLKNWKGLLFVSLTGIFGYNVFFFMGLNYTSTLNGSLIIATMPVFVTLGAILFFKESWSTKVGMSLILSLIGVIVVITSGSMDTLMSLSFNKGDLLFIAALICGVLYSLTGKKVMRGVSPLLTTMSMTVLGTVFLAGLSLYEDGWGKVGAFSLTGWIEMLYMVICGTLIGYIVFNKGVEELGASKASMYLNLTPIVATCISVVLYGAAVTWKQIAGMIIVLIGVYIAT

SEQ ID NO: 45371 - protein, 296 aa, Bacillus anthracis
MEDQLKDFIHYMVVEKGLAKNTVVSYERDLKSYVKYLQKVEQAKSFHEVTRLHIVNFLQHLKENGKSSKTLARHIASIRSFHQFLLRERAVEHDPSVHIETPQGERKLPKVLSVDEVEALLQTPKMTSAFGVRDKAMLELLYATGLRVSELIALNLEDVHLTMGFVRCVGKGNKERIIPLGSLATEAIQKYIEKGRRELMGKKVVDALFLNHHGNRLSRQGFWKILKRLAKEANIEKELTPHTLRHSFATHLLENGADLRAVQEMLGHADISTTQIYTHVSKTRLKDVYKQFHPRA

SEQ ID NO: 45372 - protein, 290 aa, Bacillus anthracis
MLELKNVCKSYEDFAVKNISFTLPRGYIMGFVGPNGAGKSTTIKMIMNLIKKDSGEIKIFGKDNKKAEKEIKQNIGFVYDENHYYEDLTCEQMKRIIAPLYKKWDEEQYQSYMHRLQVPKYKKIKELSKGMKMKFAIAIALSHHAEFIIMDEPTAGLDPVVRSELLDMLQEIVMEDEVSVLFSTHITTDLERIADYITFINDGEIIFTGEKDDLMENYVIVKGSNDLLDREGKELFVGLRKNKFGFEGLAKDKQTIIDWFGNEVVLEKPTLDEIIVYTAKGRGAYASARI

SEQ ID NO: 45373 - protein, 283 aa, Bacillus anthracis
  MISC_FEATURE (232)..(232): X=any amino acid
MVIQWFPGHMAKARRQVTEKLKLIDVVIELVDARLPLSSRNPMIDEIITHKPRLVVLNKADMADDRLTKQWIAYFKEKGIWALSINATAWPGMKGNCTGLCKVFIERGNLDKMVRAKVIRPRVIRALIVGIPNVGKSTLINKLAKKNIAKTGDRPGVTTAQQWIKVGKEMELLDTPGILWPKFEDELVGLRLATTGAIKDSILNLQDVAVYALRFMEKHYPERLKERYNSQXIPEDIVELFDAIGKNRGCLMGGGMIDYDKTSELVLRELRGGKLGKMTFETP

SEQ ID NO: 45374 - protein, 961 aa, Bacillus anthracis
MKRVSKSKDFIVVKGARAHNLKNIDVTIPRNQLVVVTGLSGSGKSSLAFDTIYAEGQRRYVESLSAYARQFLGQMDKPDVDTIEGLSPAISIDQKTTSRNPRSTVGTVTEIYDYLRLLFARIGTPICPNHGIEITSQTVEQMVDRVLEYPERTKLQVLAPIVSGRKGAHVKVLEDIKKQGYVRVRVDGEMLDVSEDIALDKNKKHSIEVVIDRIVVKEGIASRLADSLESALKLGGGRVLIDVMGEEELLFSEHHACPHCGFSIGELEPRMFSFNSPFGACPSCDGLGSKLEVDLELVIPNWDLSLNEHAIAPWEPTSSQYYPQLLQSVCNHYGVDMDVPVKDIPKDLFDKVLYGSGEEKVYFRYVNEFGQVKENEILFEGVIPNIERRYRETSSDYIREQMEKYMAEQACPKCKGGRLKPESLAVFVGGKTIADVTKYSVQEVQEFFSNVELTEKQQKIAHLILREIQERVGFLVNVGLDYLTLSRAAGTLSGGEAQRIRLATQIGSRLTGVLYILDEPSIGLHQRDNDRLIRTLQEMRDLGNTLIVVEHDEDTMMAADYLLDIGPGAGIHGGQVVSAGTPAEVMQDENSLTGKYLSGKEFIPVPLERRKGDGRKVEIVGAKENNLKNAKMSFPLGTFVAVTGVSGSGKSTMINEVLYKSLAQKLYKAKAKPGTHKEIKGLEHLDKVIDIDQSPIGRTPRSNPATYTGVFDDIRDVFAQTNEAKVRGYQKGRFSFNVKGGRCEACRGDGIIKIEMHFLPDVYVPCEVCHGKRYNRETLEVKYKDKNISEVLGMTIEDGVEFFANIPKIKRKLQTLVDVGLGYMKLGQPATTLSGGEAQRVKLASELHRRSTGRTLYILDEPTTGLHAHDIARLLEVLQRLVESGETVLVIEHNLDVIKTADYIVDLGPEGGDKGGQIVASGTPEQVVKEERSYTGKYLKEILNRDKARMKEKIKEVELSQ

SEQ ID NO: 45375 - protein, 212 aa, Bacillus anthracis
MKQLFRQWYDLSEIKKELTTRNWFPATSGNISIKVSHEPLTFLITASGKDKTKTTPDDFLLVDHLGVPVLETELRPSAETILHTHIYNNTNAGCVLHVHTTDNNVITNLYSDAVTLQNQEIIKALDIWEEGATIHIPIIENHAHIPTLGENFRKHIQGDSGAVLIRNHGITVWGRDSFDAKKRLEAYEFLFQFHIKLLSIQGGVSNGANSYS

SEQ ID NO: 45376 - protein, 162 aa, Bacillus anthracis
MGVHVVLYQPEIPANTGNIARTCAATGTELHLIRPLGFSTDDKMLKRAGLDYWQHVKITYYDSIEEFYEKNKDGEFFYLTKYGEKAHTAFDYSKREKDYYFVFGRETNGLPANVIEENFDHCLRIPMTDKVRSLNLSNTAAILIYEAFRQQNYPGLDLEIVY

SEQ ID NO: 45377 - protein, 179 aa, Bacillus anthracis; identical to SEQ ID NO: 45329
  MISC_FEATURE (67)..(67): X=any amino acid
  MISC_FEATURE (134)..(134): X=any amino acid
  MISC_FEATURE (154)..(154): X=any amino acid

SEQ ID NO: 45378 - protein, 183 aa, Bacillus anthracis
MKFAFIKATEGSAFVDKYFSKNGTNANKTSMRVGAYHFFSFDSKGETQAEQFIRNVPKYKQALPPVIDVEFYANKKDNPPKREDVTKELSVMIEMLEKHYGKKVILYATQEAYDLYIKDAYPQCDIWIRSVLTKPSLSDERKWTFWQYTNRGKLSGYNGKEKYIDLNVFYGNEEEFENYGMKD

SEQ ID NO: 45379 - protein, 122 aa, Bacillus anthracis; identical to SEQ ID NO: 45315
  MISC_FEATURE (106)..(106): X=any amino acid

SEQ ID NO: 45380 - protein, 351 aa, Bacillus anthracis
  MISC_FEATURE (45)..(45): X=any amino acid
  MISC_FEATURE (241)..(241): X=any amino acid
  MISC_FEATURE (335)..(335): X=any amino acid
MKALLWHNHRDVRVEEVPVPDVKPGAVKIKVKWCGICGTDLHEYXPGPIFIPTEEHPLTHVKAPVILGHEFSGEVVEIGEGVTSHKVGDRVVVEPIYSCGKCEACKHGHYNVCEQLVFHGLGGEGGGFSEYTVVPEDMVHHIPDEMTYEQGALVEPAAVAVHAVRQSKLKEGEAVAVFGCGPIGLLVIQAAKAAGATPVIAVELSKERQELAKLAGAGYVFNSGTPRVLAEFRTLTNSLGXNVGLKVTGVEVVLRQAMKSTSFEGQTVIVSVWKKTAPNTPNNLVLKEKEVVWYLGIRSYFPAVIKIIALGQIQAEKIKFEKNSPVDQVVEERIXSTCKDKTQVKILVSPK

SEQ ID NO: 45381 - protein, 455 aa, Bacillus anthracis
  MISC_FEATURE (125)..(126): X=any amino acid
  MISC_FEATURE (128)..(129): X=any amino acid
  MISC_FEATURE (428)..(428): X=any amino acid
VKKGAALLMVATMALSSAACSNSKTEGKPEAQAKVAPVEKNGDKTVIRFWHAMGGKTQGVLDGLVADYNKSQNKYEIKAEFQGTYEESLTNFKPMSATKESPALVLSSGITTKYMIVSKKITPHXXLXXKRKYDTSPLGKAITNYYSVMGKMYSMPFNSSTPVLIYNKDAFAKAGLDPEKAPKTYAELQEAAKKLTIKEGGNVKQYGFSMLNYGWFFEELLATQGRFIVDNENGRKDAAKKAVFNGKEGQKVFGMLDELNKAGALGKYGASWDDIRAAFQSGQVAMYLDSSSWCSDLIDASKFNVGVSYIPYPEDSKQNGVVIGGASLWMTNMVSEERQQGAWDFMKEITKPRRQAKWHTATGYFSINPDAYNEPLVKEQYEKYPQLKVPVDHLPAAEPFPSTHKVPLISVFPRIKRCSVKSVRSNVXWGKIVKEALDEAAKAADRATSIPARTS

SEQ ID NO: 45382 - protein, 437 aa, Bacillus anthracis
  MISC_FEATURE (236)..(236): X=any amino acid
  MISC_FEATURE (252)..(252): X=any amino acid
  MISC_FEATURE (342)..(342): X=any amino acid
  MISC_FEATURE (371)..(371): X=any amino acid
  MISC_FEATURE (393)..(393): X=any amino acid
LEKIIVRGGKRLNGTVRVEGAKNAVLPIIAAALLASDGKNVLSEVPVLSDVYTINEVLRHLNAEVVFENNQVTIDASKELNIEAPFEYVRKMRASVQVMGPLLARNGRVRIALPGGCAIGSRPIDQHLKGFEAMGAKVQVGNGFVEAYVVGRTKGAKIYLDFPSVGATENIMSAATLAKGTTILENAAKEPEIVDLANFLNAMGAKVRGAGTGTIRIEGVDKLYGANHSIIPDRIXKGDFMVAAAIIGETFXIENAVPEHLRSITAKMEEMGCKNYEENESVRVIRPHKFKTGEIKTMPHPGFPTDMQSQMMALLLQADGTSMITETVFENRFMHVEEFRPXKAYFKMEGCFCFYEGSQPVYRGAEVGANXFTVLQPALILAGLVSEGLQIVXLSLKHFARGYVVFIGKLVALGATIGPCNGKSREVKEQEVSDLHA

SEQ ID NO: 45383 - protein, 314 aa, Bacillus anthracis
  MISC_FEATURE (136)..(136): X=any amino acid
  MISC_FEATURE (291)..(291): X=any amino acid
  MISC_FEATURE (293)..(293): X=any amino acid
ENEYLNLCRHVMEHGTKKEDRTGTGTVSVFGYQMRFDLSKGFPLLTTKRVPFRLVASELLWFMKGDTNIRYLLQHNNNIWNEWAFKSWVESDEYTGPDMIDFGLRSQQDEEFKVQSDEQMDLFKKNVLEDDEFSIXYVYLGDVYGKQWRAWKTTAGETLDQLKDVIEMIKKTPDSRRLIVSAWNPEDVPSMALPPCHTLFQFYVADGKLSCQLYQRSGDIFPWFPFNIASYSLLTHLIAHECGLEVGEFVHTIGDAHIYTNHFEQVEKQLAREPRPFPETYTNPDVKSVFXFXNEDLTIEGYDPHPAIKAPVAV

SEQ ID NO: 45384 - protein, 294 aa, Bacillus anthracis
MKRFSYFMVGCLTLTLLVGCSAAEKPVEQVKQVKNTLTAKLATEEKMIEIDGQTIYFKKIGNEKPPLLMIHGFGGSSDGFRKIYSDLAKDHTIISVDALGFGRSSKPMDFYYSFPTHANLYYKLMKKLGYDSFAILGHSMGGEISLNLTYLYPEAVTHLILTDATGGAHTLVNKQGSPKPQLSTDLHTVSAIADYDESKVKFKRNDEEHYNKMKLWPRRLQINANEIQQPTLIIWGRNDSSVSWKEGETYHQFLKNSTFHIIEKGYHAPFRQEPQEFVGYVKEFFKNNPIQAEK

SEQ ID NO: 45385 - protein, 314 aa, Bacillus anthracis
MKNFKMALLAMVLVVTSVLFAACSNKEEKKADAKDAKTEERTVQHAKGEIKIPANPKKIADLSGSTEELLIFGMKPIITANTSQEKIDAHIEKKLKDVKPVGSAWGDKINIEAVAAAKPDLILVNNRQEKIYDQLSKIAPTVMLKTPLDQWRPKFEEVGQIFGKEKETKEWFKQYDEKASKLHDKIVAKTGDAKFMKMAAYPNAFRVYGDYGYGSVIFNDLKLPAVKGTPTDKPLVQVQKEALIDYNPDYLFVFTTGDGSQRLKEFQEESIWKNMNAVKNNHVFTIKNEELNKGYFPLGKEMILDEVAEFVLGK

SEQ ID NO: 45386 - protein, 83 aa, Bacillus anthracis
MPLFFIDLDEFHLINDTFGHKEGDKVLQKVTECLSSFRIPDMHLFREHDDQFGMLIENITKERVEVFAKSIQKKITEHFVIER

SEQ ID NO: 45387 - protein, 222 aa, Bacillus anthracis
IRDVVKEEQPRERLLLEGAGSLSNRELLAVVLRTGSKEESVLKLSDKILHHFDGLRMASDATLEELVSIHGVGVAKATQLIAAFELGRRMVRLEYQNRYSIRSPEDCATYMMEEMRFLQQEHFVCLYLNTKNQVIHRQTIFIGSLKFSMYHPREVFKEAFRRAAASIICLHNHPSGDPAPSREDIEVTKRLVECGRIIGIEVLDHIIIGDHKFVSLKEKGHI

SEQ ID NO: 45388 - protein, 221 aa, Bacillus anthracis
MLKKAIAEFIGTFVLVLFGTGVAVIGGGIEGIGTLGIAMAFGLSIVAMAYSIGTISGCHINPAVSVAMFINKRMNAMELCYYVLAQILGGLLGAATLVTILQSAKTPLDNLGQNGFGTLGLSGAFLVEFILTFVFILVIVAVTGKKGSSSLAGLVIGFTLVLVHLLGIPLTGTSVNPARSIAPALFVGGEALSQLWVFIVAPILGGIVAAIVGKFILNTEK

SEQ ID NO: 45389 - protein, 286 aa, Bacillus anthracis
  MISC_FEATURE (24)..(24): X=any amino acid
  MISC_FEATURE (115)..(115): X=any amino acid
IYMNGEFVEKEKAVVSVYDHGFLXGGGVFEGIRSYGGNVFCLKEHVKRLYESAKSILLTDPLTVDEMEEAVLQTLQKNEYADAYIRLIVSRGKGDLGLDPRSCVKPSVIIIAEQXKLFLQEFYDNGLSVVSVASRRNTPDALDPRIKSMNYLNNVLVKIEAAQAGVLEALMLNQQGYVCEGSGDNVFVVKDGKVLTPPSYLGALEGITRNSVIELCERLSIPCEERPFTRHDVYVADEVFLTGTAAELIPVVKVDSREIGDGKPGSVTKQLTEEFKKLTRERGVRV

SEQ ID NO: 45390 - protein, 168 aa, Bacillus anthracis
MPTLLLGAAIPFGTIAYTLFIFLLLLVMLRKFAWGPLMGIMKEREEHVANEIDAAERNNAEAKKLVEEQREMLKQSRVEAQELIERAKKLAVDQKDVIVAAAKEEAESIKASAVQEIQREKEQAIAALQEQVASLSVQIASKVIEKELKEEDQVKLIRDYIKEVGEAR

SEQ ID NO: 45391 - protein, 291 aa, Bacillus anthracis
MWQQKSFQQNEKGVLYLVPTPIGNLEDMTFRAIRILKEADLIAAEDTRQTKKLCNYFEIETPVMSYHEHNKEVSGKKILEKLDEGKTVALVSDAGMPCISDPGYDIVVEAVAEQYHVIPLPGANAALTALIASGLQTKQFYFYGFLQRNKRERKMELEKLRYVQTTMMFYEAPHRLDDTLISMQEVLGNREIVLCRELTKKFEEFIRGTVEEAIEWTKQNEVRGEFCILVAGSTEEPAPEEQWWESISVYNHIEHYINEKGMNSKEAIKTVAKDRDLSKRDVYQIYHVDKK

SEQ ID NO: 45392 - protein, 82 aa, Bacillus anthracis
MGWIITLIVGAIIGAIASSITGKNFPGGMFGNIIAGLLGASLGGKLFGSFGPSFGGIHVVPALLGAIVLIFIVSFVVKAAKK

SEQ ID NO: 45393 - protein, 436 aa, Bacillus anthracis
  MISC_FEATURE (95)..(95): X=any amino acid
  MISC_FEATURE (109)..(109): X=any amino acid
  MISC_FEATURE (134)..(134): X=any amino acid
  MISC_FEATURE (240)..(240): X=any amino acid
  MISC_FEATURE (351)..(351): X=any amino acid
  MISC_FEATURE (358)..(358): X=any amino acid
MFRTISNFMRVGEIRRKILFTLAMLIVFRIGTFIPRPFTNGDVLKAQDQLNALGILNTFGGGALKNFSIFAMGIMPYITASILGAIYCKRDVVQXFSERGEAGEMGPSXITAFHAYFTIVLRFIQGGWYVNRFXRYVGWTNNFESGLEHLFIHCYVLTAGTAFLMWLGEQITAKGVGNGISILIFGGIAAAIPSVISQVYQQQFQNIGDQLFMSIVKVALILLAVLAVIVGGYFHSTGWXKIPISICEACNREEMVGYAGAQNTHLPLKVNSAGVIPSNFCCFILNYPPTIAQFFPKHDVSQWIIANFNYSHPVGMIIYVALIVAFTYFYAFVQVNPEQMSEDSNQTKVDXFQVSSGXETDQYLPKNLVSFDLCRINFPAAIAILPVIFTKLGNLPPSAQIGGTSMLIVVGVCLGTNEAARKPSCKTAYKRVYQAV

SEQ ID NO: 45394 - protein, 109 aa, Bacillus anthracis
MYFADLSPVVGSEQGGVRPVLVIQNDIGNRFSPTVIVAAITAQIQKAKLPTHVEIDAKKYGFERDSVILLEQIRTIDKQRLTDKITHLDEVMMIRVDEALQISLGLIDF

SEQ ID NO: 45395 - protein, 337 aa, Bacillus anthracis
MQERYSRQVLFSGIGENGQKKIREKHVLLIGAGALGAANAEALVRMGIGKLTIADRDYVEWSNLQRQQLYTEEDAKQCKPKAIAAAEHVRKINSEVEIVPVVTDVTMKEMEELTKEVDLLLDATDNFDTRLLINDISQKENIPWIYGGCIGSYGVTYTILPGKTPCFRCLMDHPMGRATCDTAGNYQPAVQMVVAHQVTEAMKILVDDFETLRGTMLSFDIWNNQFLSLKVNKQKKSTCPSCGNTRTYPSLTFESQVKTEVLCGRNTVQIRPGIKRVLNLNEIKKRLQKIVHVQKTPYLLSFLIDEYRFVLFTDGRAFVHGTNDVKIGKRLYAKYIG

SEQ ID NO: 45396 - protein, 237 aa, Bacillus anthracis
MKKYALVTGGSGGIGSAISKQLIQDGYTVYVHYNNSEEKVNELQKEWGEVIPVQANLASSDGAEQLWEQIEHPLDAIIYAAGKSIFGLVTDVTNDELNDMVELQVKSIYKLLSMALPSMIQRRSGNIVLVSSIWGQIGASCEVLYSMVKGAQNSYVKALAKEVSLSGIRVNAVAPGAIETEMLNVFSEEDKNEIAEEIPLGRLGLPEEVAKTVSFLVSPGASYITGQIIGVNGGWHC

SEQ ID NO: 45397 - protein, 238 aa, Bacillus anthracis
MKILLIMEEAEERRSLAEKFIENIKNVECFEASMGTEALFIMKKHTPDFVFLNSKLMDGTGFEYVNLLREVNCYAKFIFMGEDIEESITAFRFQAFYYLLRPFREEDLQFLLYRMGKEQGEKAKSYLRKLPIEGQEGIRYIFPEDIVYVSKNKENKTVSIYTTNNQYISTYTLQELENKLNAYDFLRVHKSYLINMSYVQELKPYYNGTYNLYLDKYDEQPIPVSRNYVKRLRNKIEL

SEQ ID NO: 45398 - protein, 410 aa, Bacillus anthracis
MTNTKDMHYMLVLYGILLGSIVGATVWLFLVTINIGIHFIWEYLPTIFASPPYYTICVTTIGGILVGLTQKYFGTYPRLMPEVMGEYKKTGRIEYRFVHKATLTAIIVLIFGASLGPEAALVGIIGGLCTWVGDRFTFALKGMNGLTEVGIGATLSVIFNAPLFGYLAPNENEGEQINEFSKGKKAIVYLATTFAGFSVYLLLSKFDNRGSFIVDFGKGSLSLNEWIAFLPLASIGAIVGFFYFKLEFTLEKLIHPLKEYKLALGIIGGILLGITGTFLPYTLFSGEHQLKDLVVEWSHLSFWVLLLSGILKLCITAVCLNTGWRGGHIFPIIFAGSSIGYAIASIIPIDPIASVAVVTTAISSYALRKPIAITLLLLMFFPLNLLLPMLGAAAIGNAFPLPKNNEATNE

SEQ ID NO: 45399 - protein, 219 aa, Bacillus anthracis
  MISC_FEATURE (161)..(161): X=any amino acid
AEKFSLAGRIAAGIAHEVRNPLTTVRGYLQFLQENVSPSNKELFKNLLIPELDRANSIITKFLSISKTREFTREPFPINTFLREYIQQLLASEVFLHNISIDYNFSTELDDILVHIDAMNFVQVFLNLFQNAVDAQRRKKLSIQITSYRLDNFVRITFTGXGTGDSHNDSRIIFDPFFSTKDSGQRLGLSGTKKFIQNHNGTLKMTSNEDGTTFTISIP

SEQ ID NO: 45400 - protein, 316 aa, Bacillus anthracis
MPKKVLIFCDPGIDDTMALLLAFFIDEIEIIGIVADYGNVPKKMAVQNAHFLKNETRNRNIKIFGGSERPLTGAPPAFFTEVHGKQGLGPIIPNGNVTNGEMENFFEVIPLIEQYKDELIIVSLGRLTSLAILFIMCKQLMKQIKSYYVMGGAFLHPGNVTPISEANFYGDPTAANIVLQSAANMYIYPLNVTQYSVITPEMAEYIEAKGKVPLVKPLFDHYYYGYYKNALPDLKGSPFHDTMPILALLDNSMFTYHKSPIVVMAESYAQGASIGEFRSLGKPKPFMDWPSHQIAIDFDYNRFFKHFMSLMTGEQF

SEQ ID NO: 45401 - protein, 187 aa, Bacillus anthracis
MITVSNVSLRFADRKLFEGVNIKFTPGNCYGLIGANGAGKSTFLKILSGEIEPSTGDIHITPGERLAVLKQNHFEYEEFPVLETVIMGHTQLYKVMQEKNAIYMKEDFSDEDGMRAAELEGEFAELNGWEAESEAAILLKGLGIGEDLHDKKLSELTGAEKVKVLLAQALFGKPDILLLDEPTNHWT

SEQ ID NO: 45402 - protein, 428 aa, Bacillus anthracis
MEKIVYEQLKETLYYEKLPNGLDVYILPKQGFNKTFATSTTKYGSVDNTFVPLGKEEMIRVPDGIAHFLEHKLFEKEDHDAFQLFSKQGASANAFTSFTRTAYLFSCTSNVEQNLNTLLNFVQEPYFSEKTVEKEKGIIGQEIQMYQDNPDWRLYFGLIDSLFVKHPIKIDIAGTIESISKITKDLLYECYETFYHPSNMLMFVVGAIDPEKTMDLVHENQAKKDYKNQPEIVRSFEEEPDEVNEKKKIISMPVQTPKCLVGIKATNLKEKGEALLKQEIALTLLLDYLFGKSSVHYESLYNEGLIDDTFSYDYTEENNFGFAMVGGDTKQPDELEERLKSILLNTNYNQLDEAALERVKKKKIGGFLRSLNSPEYIANQFTRYAFNESSLFDALTVLESLTVQDLQEVAQLLLSEEKMSVCQVLPKK

SEQ ID NO: 45403 - protein, 291 aa, Bacillus anthracis
  MISC_FEATURE (46)..(46): X=any amino acid
  MISC_FEATURE (130)..(130): X=any amino acid
MICSMTGFGRAKIKRGTFSNTVEMKSVNHRFSRDSIRLPKQMMVFXDKIRKIIAQQVRRGRIEVSISIAGEGLVERKLSVNWSLLEQYQSIMEDIKGKFQLPRFYTLEQLMAMPEVTAIEEVENVNGTIXESLYEAVRQAAHMLKTMRDGEGERLHKDIAYRLQEIHNCVNAIIPHAPIVTKKYRERLENRLKELHNQDLDEQRLLTEVAIFAERCDIHEELVRLQSHLEQFRETLQIEEPVGRKMDFIVQEMHREINTIGSKANDLTISKYVVEMKNNLEKIREQVQNIE

SEQ ID NO: 45404 - protein, 487 aa, Bacillus anthracis
  MISC_FEATURE (52)..(52): X=any amino acid
  MISC_FEATURE (72)..(72): X=any amino acid
  MISC_FEATURE (456)..(456): X=any amino acid
KEDSYPLHTDLYQINMAYTYWKDGIHNRRNLVRLYFRKLPSQNGYAVFAGLXKFVEYIENFHFNRKQYRLIXQNLQFERRIFSFFSKILNFLGYGLVVCKKVEVCFNNEPLLRVDAPLGEAQIIETALLNIVNYQTLIATKAARMKHAANNDELLEFGTRRAHEFDAALWGTRAAFIGGFSSTSNVRAGKRFGIPVAGTHAHSFVQAYRDEYVAFKKYAETHKKCVFLVDTYDTLKSGVPNAIRVAKEFGDRIDFYGIRLDSGDMALLSQKGRKLLDEAGFTNTKIIASSDLDEYTIMHLKSQGAKINVWGRWEQIITSFEQPALGAVYKLVGRLKIRAGKLNDTIKISSNPRKNYYPGLKRIYRIINRVNDHAEGDYIALDYEEPGKEETLKNVHPVHTYISKFVTNFEARELHKDIFVNGERTYELPSILDIQKYNEQSLSLFWEEYMRLLTPXRIPCRFSQECWDHKMNYIQTVREQVKKNIQK

SEQ ID NO: 45405 - protein, 180 aa, Bacillus anthracis
MGNFHATTIFAVHHNGECAMAGDGQVTMGNAVVMKHTARKVRKLFQGKVLAGFAGSVADAFTLFEMFEGKLEEYNGNLQRAAVEMAKQWRGDKMLRQLEAMLIVMDKTTMLLVSGTGEVIEPDDGILAIGSGGNYALSAGRALKQYASEHLTAKQIAKASLEIAGDICVYTNHNIIVEEL

SEQ ID NO: 45406 - protein, 355 aa, Bacillus anthracis
MLDRLQAVENRYEKLNELLSDPAIISDSNKLREYSKEQSDIQETVEVYREYKDVREQLKDAKAMLEDKLDAEMREMVKEEVSELESQEKTLSERLKILLVPKDPNDDKNVIVEVRGAAGGDEAALFAGDLYRMYSRYAEVQGWKTEIIEASYTELGGYKEIIFMINGKGAFAKLKFENGAHRVQRVPETESGGRIHTSTATVAVLPEAEEVEIDIHEKDVRVDTFASSGPGGQSVNTTMSAVRLTHLPTGVVVSCQDEKSQIKNKEKAMKVLRARVYDKFRQEAQAEYDQNRKQAVGTGDRSERIRTYNFPQNRVTDHRIGLTIQKLDQILQGKLDDFINALVMEDQAQRMEAAE

SEQ ID NO: 45407 - protein, 811 aa, Bacillus anthracis
  MISC_FEATURE (59)..(60): X=any amino acid
  MISC_FEATURE (68)..(68): X=any amino acid
  MISC_FEATURE (82)..(82): X=any amino acid
  MISC_FEATURE (90)..(90): X=any amino acid
  MISC_FEATURE (126)..(126): X=any amino acid
  MISC_FEATURE (163)..(163): X=any amino acid
  MISC_FEATURE (255)..(255): X=any amino acid
  MISC_FEATURE (272)..(272): X=any amino acid
  MISC_FEATURE (284)..(284): X=any amino acid
  MISC_FEATURE (317)..(317): X=any amino acid
  MISC_FEATURE (445)..(446): X=any amino acid
  MISC_FEATURE (488)..(488): X=any amino acid
  MISC_FEATURE (499)..(499): X=any amino acid
  MISC_FEATURE (562)..(562): X=any amino acid
  MISC_FEATURE (576)..(576): X=any amino acid
  MISC_FEATURE (580)..(580): X=any amino acid
  MISC_FEATURE (608)..(608): X=any amino acid
  MISC_FEATURE (638)..(638): X=any amino acid
  MISC_FEATURE (716)..(716): X=any amino acid
  MISC_FEATURE (770)..(771): X=any amino acid
  MISC_FEATURE (776)..(776): X=any amino acid
  MISC_FEATURE (780)..(780): X=any amino acid
  MISC_FEATURE (634)..(634): X=any amino acid
  MISC_FEATURE (810)..(810): X=any amino acid
QIKKAAVLGSGVMGSGIAAHLANIGIPTLLLDIVPPALTKEEEAKGLTLEHKSVRNSFXXFGLCKIYXKQNPASLDSEREIXHLIEAGTXDDDLERLADVDGINESVVENIRIKKKLLRRVDAVCXPGLIVASITSGISVEKMAEGSFQTISRKHFLGTTLFXPPTILKTLGVNPPKKPDSTGIKLMKLFGEDVLGKGVVIAKDTPNFIGNRIGTYGLLVTLQEMVKRGYSIGEVDSVTGPLIGRPKERQRSVLXDVVGLDPFGIPLQIMLXETVQEKGPQFIXSTSFSCMTCLIKNGWKAKPGQSFLLKTKEKNFXNLIPETMEYEARKKLKAASIELSKQEKGLSNKLKALVYAKDRAGELLWNIITPTLLYSAKLHKEIADDIVAIDQAMKWGFGWEQGPFEVWDAIGVEKSVQKMEESGAVIPAWVKEMVSERFPLLSTNXXRDSYYYDNGEYKLIECNKKAISLKQLKAKNGVLKEEERSRAXFDLGRAVSLGXKFPLGDQRQSVGILRKWINSAVMEVEKIYKVLVIGTQWKNFCVGANLAMILMEAQDDNYFVIXVGCEKLPKMQDENXILFXPVVFSAIWYDAWRWHRVCLHSSEHSSFXENVYGLYKRWWLLNPWPEAGIKSYHXTLEXNGNGVEFDPPKSWQIKGFETSRHGRKFLPSGTRRRFFHNFLRRIKTGISVKGGSLSYRMQNQKALALYEAGYKATNSXKRYRLLVKQDIATPALGAKNAFIWVTFRSQLHLCEENLHMSLRGGKWPYRNESXXSSFYXMEEPESIYLYLVKWKWKSQARMQHMLCKRKAITXL

SEQ ID NO: 45408 - protein, 491 aa, Bacillus anthracis
  MISC_FEATURE (35)..(35): X=any amino acid
  MISC_FEATURE (84)..(84): X=any amino acid
  MISC_FEATURE (140)..(140): X=any amino acid
  MISC_FEATURE (253)..(253): X=any amino acid
  MISC_FEATURE (272)..(272): X=any amino acid
  MISC_FEATURE (343)..(343): X=any amino acid
  MISC_FEATURE (348)..(348): X=any amino acid
  MISC_FEATURE (358)..(358): X=any amino acid
MFQKIAKEMFSGFTVAIVALPLSHCFWYCATGNIXGELIRMDGANFCTCIFAGYFGGTTWGRVKGPRGPFRVFPKGVICHPRDXREVLKIIEGRELFQILFGVCKLGSYVCTIPVSGRFRIMTGMALIIILGEMNACAKXFSTVVLTIMSMIVSGKWIKAIPSSLVHLVGVTACFPYFSSALEGLTVKLPVIGNLTLNKVIEKIGTDSRRESDRFNIPFLRLTSIYRTCFSQPLGMPLLGLDDLVVTSVGNEXGRGYRHKSNKELVGTRYRXYGERIFGGITGAGATVPSIRNIRSGGKPALSAGRHRGILFIFHMGTGISRAIHPLAVLSGILILTGIGHVXWEKAXRKMHVAPKGXCHCYARHDDCHVKFDLMIAVAFGILLSFVIYMVKCKERKVSIVKRKRRRHIKLNGPLSFLTVDRVFYALQDVKSPVVFAHERCTLYGCIRAMALLNFIEQSDKSGLSVTLEQVPVHIKKTLVTMASNEQKDKL

SEQ ID NO: 45409 - protein, 84 aa, Bacillus anthracis
MDHKEHEAVTHRSEKEKEQIINRLKRIEGQVRGIQNMIENDRYCVDILVQISAINAAMKKVGMGVLKNHTSHCVSGAIKDGNGD

SEQ ID NO: 45410 - protein, 607 aa, Bacillus anthracis
MCGITGWVDWKEDLSNQHVILKKMANRIQHRGPDAEGFWFSPRAAFAHRRLIVIDPEGGAQPKTFRAGDYTYALTYNGEIYNFRELREQLQKCGHTFETHSDTEVLLHAYLEWKEDCVQHLNGIFAFALWDDQKQRLFLARDHLGVKPLFYTERNDSIIFGSEIKALLAHPSVPAEIDADGINEIFGLGLFRTPGCGVFKHIEEVRAGHSITFTRDKKVVTKYWNLESKVHTDSIEDTSSHILSILQDTVKRQLIADVPLVCMLSGGLDSSGITALAGKEFAAENKTLHTYSVDFVNSAKDFELTFARTGLDAPWVKRVSEHVGTSHHDIIVNAEELANHLFVPLRAKDLPSAGEMETSLYLLFCEMKKDATVALSGESADEVFGGYPWFHQEELLYVDKFPWLTNWKNTSPLLLHEISNQCNLENYIDTRFQEAILEVPTLEGESKKSAKQRQMFYLFLTRFLPFLLDRKDRMSMAVGFEVRVPFCDYRLVEYLWNVPFNIKSIDNIEKGILRRALKPALPDDVRNRRKSAYPTSQDPQYLQTIRHLSLDMCSNKNNPIFSLINHSTLLAIADGSNKEINNFEARSAMEYMLQVNEWLKTYHIHIA

SEQ ID NO: 45411 - protein, 327 aa, Bacillus anthracis
MGNVFDYEDIQLIPAKCIVNSRSECDTTVTLGKHKFKLPVVPANMQTIIDERIATYLAENNYFYIMHRFQPEKRISFIRDMQSRGLIASISVGVKEDEYEFVQQLAAEHLTPEYITIDIAHGHSNAVINMIQHIKKHLPESFVIAGNVGTPEAVRELENAGADATKVGIGPGKVCITKIKTGFGTGGWQLAALRWCAKAASKPIIADGGIRTNGDVAKSIRFGATMVMIGSLFAGHEESPGETIEKDGKLYKEYFGSASEFQKGEKKNVEGKKMFVEHKGSLEDTLIEMEQDLQSSISYAGGTKLDSIRTVDYVVVKNSIFNGDKVY

SEQ ID NO: 45412 - protein, 1778 aa, Bacillus anthracis
  MISC_FEATURE (177)..(177): X=any amino acid
  MISC_FEATURE (185)..(185): X=any amino acid
  MISC_FEATURE (198)..(198): X=any amino acid
  MISC_FEATURE (211)..(211): X=any amino acid
  MISC_FEATURE (215)..(215): X=any amino acid
  MISC_FEATURE (224)..(224): X=any amino acid
  MISC_FEATURE (515)..(515): X=any amino acid
  MISC_FEATURE (518)..(518): X=any amino acid
  MISC_FEATURE (524)..(524): X=any amino acid
  MISC_FEATURE (554)..(554): X=any amino acid
  MISC_FEATURE (556)..(556): X=any amino acid
  MISC_FEATURE (583)..(583): X=any amino acid
  MISC_FEATURE (587)..(587): X=any amino acid
  MISC_FEATURE (591)..(591): X=any amino acid
  MISC_FEATURE (595)..(595): X=any amino acid
  MISC_FEATURE (600)..(600): X=any amino acid
  MISC_FEATURE (607)..(607): X=any amino acid
  MISC_FEATURE (705)..(705): X=any amino acid
  MISC_FEATURE (762)..(762): X=any amino acid
  MISC_FEATURE (769)..(769): X=any amino acid
  MISC_FEATURE (775)..(775): X=any amino acid
  MISC_FEATURE (786)..(786): X=any amino acid
  MISC_FEATURE (848)..(848): X=any amino acid
  MISC_FEATURE (900)..(900): X=any amino acid
  MISC_FEATURE (900)..(900): X=any amino acid
  MISC_FEATURE (902)..(902): X=any amino acid
  MISC_FEATURE (959)..(959): X=any amino acid
  MISC_FEATURE (973)..(973): X=any amino acid
  MISC_FEATURE (1029)..(1029): X=any amino acid
  MISC_FEATURE (1052)..(1052): X=any amino acid
  MISC_FEATURE (1064)..(1064): X=any amino acid
  MISC_FEATURE (1176)..(1176): X=any amino acid
  MISC_FEATURE (1229)..(1229): X=any amino acid
  MISC_FEATURE (1231)..(1232): X=any amino acid
  MISC_FEATURE (1235)..(1235): X=any amino acid
  MISC_FEATURE (1248)..(1248): X=any amino acid
  MISC_FEATURE (1251)..(1251): X=any amino acid
  MISC_FEATURE (1292)..(1292): X=any amino acid
  MISC_FEATURE (1418)..(1418): X=any amino acid
  MISC_FEATURE (1516)..(1517): X=any amino acid
  MISC_FEATURE (1520)..(1521): X=any amino acid
  MISC_FEATURE (1525)..(1525): X=any amino acid
  MISC_FEATURE (1581)..(1581): X=any amino acid
  MISC_FEATURE (1586)..(1586): X=any amino acid
  MISC_FEATURE (1595)..(1595): X=any amino acid
  MISC_FEATURE (1601)..(1601): X=any amino acid
  MISC_FEATURE (1624)..(1624): X=any amino acid
  MISC_FEATURE (1626)..(1626): X=any amino acid
  MISC_FEATURE (1629)..(1629): X=any amino acid
  MISC_FEATURE (1631)..(1631): X=any amino acid
  MISC_FEATURE (1687)..(1687): X=any amino acid
  MISC_FEATURE (1746)..(1746): X=any amino acid
  MISC_FEATURE (1748)..(1748): X=any amino acid
  MISC_FEATURE (1764)..(1764): X=any amino acid
HSLLVFPDIRAKAETLKETSLFDTVEMKDATDQIIDEAKNPNNLIKIGSTIQVEYAWSIKDQQVVHANDTAVLQIPLALKVSKDLQGRFSTLDQKNIGQYFITAKDNKLKLIFNDQVENSKDAKGKIKIDTVFNPTLKTEEKSVQIAFPLGTLVQPITVPIPVKESKEKGTQQDTNXPVPEPVTXPTTGYSEPKSTTXTGNGHSEPNSPTXTCYXQSEPNSSTXPWLLIIRNKIQQQNLLLIPRTKILASDPAEITNSVPKQITPNFLNGVKLTDKDGNPFTEDTRPSTDSPANIEFTWDFLNPMNVKAGDYYIFDLPKHLKIYNTINSPLYDSENNPIGNFTVTKDGKVTMTFNDYVEEHPDVVGNLQLKTEFNKAEIKGTTTREIPFPIKDKDVSITVDFKPNVQTATNKKGLPDRPINTNEINWTVEMNKTKDTLKNAVFKDNIPPRTSLNKDSIKVYYLKVDVNGNATRGQEADPADYKIISSDGSKLRDAFKDSIKKAYQIEYVTKITGXKTXKSFPKXVTITSDNQGQQKSKLYVTVSRGTHLNKTKXLXSKTQALKCTITYSGDQRNINKHRCTFXEYFXRYTXIRWXFYRCXKRFIRRXKKGFVQETLVNITLVLTRRMGFDLQFNEDINSAYVITYKTKPTNNVIKDGKIKNTVTADNGSSKENEAGFQQQNIIKSNNKAETNYKDKTTTWDNYRXIIQLSHNHAIITDTFDHGGFTLKDKKLEIKDGDYTLQAETDYVLDVTDKGFQNYPLXVHISLIXPRHYSXNIRTTLTYSNXKSGKTFIKNTSNLIWERMQGPIHNQNKVEADFDPDTFTKANGYKYGSYNAQTNRNHLDNRFXLNNVEIKDPYVIDVIQDKQKLVPGSIEVRHMILNGSPDNARPGDAVPIRAGXTXRTYQIKIKTPYRFISSQSINSPLLYYLLNKPLMGDLSKTLPKRGRGKRWSKIVNTLXGDPQVNKGGSFGTXKAVQDDNYINWSIAINESQSTIADAVVTDDPTDNQVLVEDSFHLYPHYSKMAMEMXQYIQQNELKRGTDYKLTITTLQXYRESNISKLPSXKKLIELYILEYRSLINADDKEKVSNKAKIAGNQLTVKNTETVETIEVRMSSGSGGGSATNGRGNLEIIKVDNDNKKVPLSGAEFTLYDRTGKTVIRKITTRPKMVLLSLNNXKRDKYLLKETKAPEGYVISWDLKQGKIVELGSQETTTYKLANKKFVGKVGLTXVXXPEXKRNTARSPFSTTXYRXINNFRTRKINTNDRGQITVYNLKPGNLLLYRNQPLLSTINXTVHLFIHNQRRSTTVINRTATNSLIPGSAILTKVDKDGKTLAGAEFSVRDRHNNVIRGYEKLTTNDQGQIEATNLRSCETINLLKKKLLKDFDIDKTPLSYNCKKSKEKQFLLLRQITSLKVASLXQKLMISMVSSCRCYIKIVDANDEKKVIRENVKTGADGKVTVKDLEPGTYKFIETEAPKDYVLNANPIEFTIDKSQQSFATVTATNSLKTGESEIIKSXXIRXXKTFXKGAVFKNGGGNNKEFRPDLTTDGDGKTKADKLRPGTYKFIEPAALEHYVLRAEPYXMYIRXKSERTPYLXQLKMLXTRGDAELAIMMLSMVQLCRRCMXNXACXRXKKVIPRKCKNWCGCVKLSLLAYALAIINLSKYYDKIQVQSSSQYRKSNNVSYCYCXKQLNKRRIELTKVNAADEKETLEGAVFKIVNRDTNEDARTNLVTNSEGKLVVDDLRPWXLXTYRNKGFPPYIDVKMXTQIEFYNRKKGQQT

SEQ ID NO: 45413 - protein, 278 aa, Bacillus anthracis
  MISC_FEATURE (209)..(209): X=any amino acid
  MISC_FEATURE (214)..(214): X=any amino acid
MKEKERLIIEMAMKLFATKGVNATSVQEIVTACGISKGAFYLYFKSKEELLLATLRYYYDKIQNKMMDIEKESLLPREKFAKQLHCQFNDIQKHKEFIIMHARENAIPFNKEVEEFMMRMKLESHAFYRNSLLSIYGDKVMPYLLDLVIMVEGICRGYLELIILQAPEIDLSYVSAFILKRVDDLVDGLVKSSEEPVLHEEKLGRISLXIRAYXGQVKEHFLKEIIVFKRTLADQLEDEELLVTLDVLEAEMRLPNPRIPVIQGMLSNLEVYPNLKEF

SEQ ID NO: 45414 - protein, 463 aa, Bacillus anthracis
  MISC_FEATURE (152)..(152): X=any amino acid
  MISC_FEATURE (178)..(180): X=any amino acid
  MISC_FEATURE (192)..(192): X=any amino acid
  MISC_FEATURE (260)..(261): X=any amino acid
  MISC_FEATURE (264)..(264): X=any amino acid
  MISC_FEATURE (295)..(295): X=any amino acid
  MISC_FEATURE (297)..(297): X=any amino acid
  MISC_FEATURE (365)..(365): X=any amino acid
  MISC_FEATURE (393)..(393): X=any amino acid
  MISC_FEATURE (395)..(395): X=any amino acid
  MISC_FEATURE (397)..(397): X=any amino acid
  MISC_FEATURE (411)..(411): X=any amino acid
  MISC_FEATURE (422)..(422): X=any amino acid
  MISC_FEATURE (452)..(452): X=any amino acid
MSTRFAVILAAGKGTLMKSKLYKVLHPVCGKPMVQHVVDQVSQLGLQKLVTTPRNGAEMGQQQPRKVREFGLSNRKNLGTAHAVDQAAGVFAMKKGTTLVICGDTPLITAETMEALLQQHKEAGGNGTVVTAYIEEPAGYGRIVRNENGSCXKDCEHKDANEKELAIKEINTGTYWFXXXSLFPSLFQGFQXKTYKGEYYLAQMFLENFLKNEGHIVSAYQTEHFDETLGVNDRVALSQAEIIMKNRINRKNLVNGCHNXXSKXPPYISADPIIGSEYSSPSRNHIEGEHCNWFXLXNGPHTVIRDSEIGDRTTIRQSTVHDSKLGTEVSVGPFAHIRPDSVIGDEVRVGNFVGNQKNCFLVIKXSFTLKLIGGCASWEKTGILGVGQLRGTXRXEXIQTVNWYGGFIGMXFPPLLLPVNIXKMGLYVAAGSTITENVPSKSIICSTCTSSXQRRLCDQLVKK

SEQ ID NO: 45415 - protein, 605 aa, Bacillus anthracis
KEQKGKKQKTYISIRLNIMFLCIFLLFSAIIMQLGKVQIVEGEAYKNQVENSQNATTSIPVPRGQILDREGKTVVNNKSLRTITYTRVKGITSDDILKTAKDLAKVLEMPEQDINKLTDIDKKDFWMQLNTKRADTKITKKDIEKFKEKGIEGKELDKKIEDLRRSRVTEVELGELTEQDLKVLAIKSKMSSGYQLTPQIIKKDVTDEEYARISENLANFPGVDATVDWERNYVNGNLFRSVLGNITSSEEGLPKENLDSYLVRGYNRNDRVGKSYIEQRYEDVLHGTKEEVKNITDKSGNIINTEVIAKGKSGKSLTLTIDMELQKKVEESIEKNLRAFKSSEPLLDRAFVVMTNPNNGQILSMAGKKIVEKEGVLEIEDLALGNMTTSYELGSAVKGATLLTGYETGAIHPGDQFYDAPMKFKGTQAKKSWNVSGFGNINDLRALQVSSNVYMFQTALKIAGVNYVPNGSLDIKQGAFDTMRYYFKQFGLGVPTGIDLPNEIIGQTRKVDSQPGFLLDFSIGQYDTYTPLQLAQYISTIANGGYRMQPQIVQEIREQSIKEEVGKVIRSIEPVVLNRIDMKTEYIDRIKEGFRWVFQEGDGTG

SEQ ID NO: 45416 - protein, 639 aa, Bacillus anthracis
MKEQMIEIKFPDGSVKEFVKGITLEEIAGSISSSLKKKAVAGNVNDELYDLRRNIEENAEVEIITIDSNEGVEIARHSAAHILAQAVKRLYGDINLGVGPVIENGFYYDMDLPSSVNVEDLRKIEKEMKKIINENIKVERVEVSREEAAKLFQEMNDRLKLELLEAIPSGESVTLYKQGEFVDLCRGPHLPSTGYLKVFQLTHVSGAYWRGDSNNQVLQRIYGVAFSSQKELEEYLHFVEEAAKRNHRKLGNELELFMFSEEAPGMPFYLPKGQIIRNELEAFLREIQKEYNYQEVRTPFMMNQEVWERSGHWGHYKDNMYFSEVDNKSFALKPMNCPGHMLMFKNKLHSYRELPIRMCEFGQVHRHEFSGALNGLLRVRTFCQDDAHLFVTPEQIEDEIKSVMAQIDYVYKTFGFEYEVELSTRPEDSMGDDELWEQAEASLENVLQSLNYKYRLNEGDGAFYGPKIDFHIKDALNRSHQCGTIQLDFQMPEKFDLNYIDEKNEKRRPVVIHRAVLGSLDRFLAILIEHFGGAFPAWVAPVQVKVIPVSNAVHVQYADEVADKLAQAGVRVERDMRDEKLGYKIREAQMQKVPYVLVIGDKEMENGAVNVRKYGEEKSGVIELDMFVESMKEEINNRK

SEQ ID NO: 45417 - protein, 249 aa, Bacillus anthracis
  MISC_FEATURE (135)..(135): X=any amino acid
LAGKTVLITRAQHQAKQMSVAVKEKSGIPLEIPLLRMEGMFHRQIQHIAGQLHSYDWVIFTSKNGVAFFLDCLGKKLPVTTKIAAVGVKTKLELEKRGYHVDFVPTSFVAEAFAESLVKELSGNERILFPEGDFXQRGNSRVPSREIGGLLDELILFRTKVDIEKKPGALSAFGFREEDTYSFFQSPSTVTSLVRLLEGTNWREWTKKCTIACIGPITEKEASLYFPHVIMPKEYTVEALLQCVCESIK

SEQ ID NO: 45418 - protein, 91 aa, Bacillus anthracis
MDYKTQFAESLSNIFTNELTQQQILDLIETPKQDEFGDAAFPCFSLAKQYKKSPAIIAKEVAEKLSDPFFTKVEAGGSYVNVFFNRDTVSD

SEQ ID NO: 45419 - protein, 1224 aa, Bacillus anthracis
  MISC_FEATURE (727)..(727): X=any amino acid
  MISC_FEATURE (729)..(729): X=any amino acid
  MISC_FEATURE (845)..(845): X=any amino acid
  MISC_FEATURE (850)..(850): X=any amino acid
  MISC_FEATURE (865)..(865): X=any amino acid
  MISC_FEATURE (967)..(967): X=any amino acid
  MISC_FEATURE (972)..(972): X=any amino acid
  MISC_FEATURE (972)..(972): X=any amino acid
  MISC_FEATURE (984)..(984): X=any amino acid
  MISC_FEATURE (1038)..(1038): X=any amino acid
  MISC_FEATURE (1061)..(1061): X=any amino acid
  MISC_FEATURE (1065)..(1065): X=any amino acid
  MISC_FEATURE (1090)..(1090): X=any amino acid
  MISC_FEATURE (1109)..(1109): X=any amino acid
  MISC_FEATURE (1127)..(1127): X=any amino acid
  MISC_FEATURE (1129)..(1129): X=any amino acid
  MISC_FEATURE (1167)..(1167): X=any amino acid
  MISC_FEATURE (1222)..(1222): X=any amino acid
LKYFSPIDRYNDNHTQETYEDREWENVYRKRWQHDKVIRSTHGVNCTGSCSWNIYVKDGIVTWEGHELNYPTTGPDMPDFEPRGCPRGASFSWYIYSPLRVKYPYVRGVLWSMWLEELQNNESPLDAWKSIVENPEKARKYKQARGKRGFVRANWGEVLQLVSASLLYTVMKYGPDRNVGFSPIPAMSMLSHAAGSRFMQLMGGPMLSFYDWYADLPPASPQIWGDQTDVPESSDWYNSGYIMTWGSNVPMTRTPDAHFLAEVRYKGTKVVSVSPDFAESTKFADDWISVKQGTDGAVAMAMGHVILQEFYVDNQVEYFTKYAKQYTDFPFFVTLKQKGDQFVADRFLNASDIGRETKLGEWKPVLWNENTNDFATPHGTMGSRWDNEKKWNLRLEDEETGGKIDPRLSLLGMEDMFQRVQFPYFSDDGNTVLERTIPVEKFMTQERPKCSLTPVYHLTVSQITGGNQGLGGQEPKDFNDDVPFTPAWQEKMTGVKRELIIQIAREFAQNAVDTNGRSMIIVGAGINHWFNSDTIYRAVLNLVLLVGAQGVNGGGWAHYVGQEKLPPAERWATIPMAKEWRGPPKLKMVPSFFYFVTDQWRYEKSPMGTFISPVEGNSRYQHHGDYNVLSAATWLLPSYPTFEKNGIELYKEAVAAGGTNPRRNGKYVAQKLKEKELKFAIEDPDYKNNFPSHLFVMACELNFKFRLRAQNIFLKHLLGTPNGINEXRXGSLRPEDIKWHDDAPEGKLDLLINLDFRMAGTALYSDIVLPSFNLVRKTDFNRSDKHSIGYSVYSTLGSPWEARSDWDIFTSLSKAVSDLAEKIDLDPMKEVVGTPTSSRYTRRNXTTTGXELKIGSKVSVNQTRXNDPQIHVVERDYKTIYDKMTALGPNAGKQPIGTKGISWSAEKEYEQLQSRLGVVRTDSIAKGCPDIKEAINAAEAVLTLSSTTNGPMACKAWGSTCKNNRFXNYPDXHKKRGEKMLLIXNKLQAQPKTRIYFFRPFQGSEKRWGPVTPPFQKKWKGHPLGENPWRTIFLFRSXHDEEFGETMATFKPILQHKPFRXITAXSRRKRNYIKLFNPHNKWSIQKEGLXIHYGRLTFFRGGSNRLDEXGGCNGSRPLGIKLVGVFXPXRCCCSRAVVTHRIQRGNGVYASCTRSSYKRTWYEINKXRGGTHNSPTRIHVKPTHMIGGYGSLSYGLLYYVPRGNQRDLTFVISQLKGGRLAXRL

SEQ ID NO: 45420 - protein, 457 aa, Bacillus anthracis
KYLGAYNYTIYDGIQSAKASTERALADGDNMTEVRNYLTSTYASPNPEYFGKGKGMNVIYIHLESFQNFLIDYKLNGQEVTPFLNSFTKDANTLYFDNFFHQTGQGKTSDAEFMLENSMFGLPQGSVFTTKSHNTYQSAPAILGQQGYTSAVFHGNYKTFWNRDDIYKSFGFNKFFDASYYDMNEKDVVNYGLKDKPFFNESIPLLETLKQPFYTKFITLSNHFPYPIDKEEATIEPANTGDSSVDTYFQTARYLDESVKGFIDYLKQSGLYDNSIIVMYGDHYGISDNHNAAMSKVMGKEINSFENAQLQRVPLIVRVPGVKGGVQHQYGGEIDVLPTLLHLLGTDTKNYVQFGSDLLSPDHKQVDAFRNGNFVSPQSTALNGKYYDTATGKPVEFTDEIKQNEQMAQNSLKYSDQVVNGDLLRFYTPEGFTPIDRSKYNYNNRDKNKTKVKTAPE

SEQ ID NO: 45421 - protein, 224 aa, Bacillus anthracis
  MISC_FEATURE (42)..(42): X=any amino acid
  MISC_FEATURE (155)..(155): X=any amino acid
  MISC_FEATURE (206)..(206): X=any amino acid
PKVSILIPAYNRPHYLELALKSALNQTYENIEIIISDDSTNXEKKVMIQPYLKEYNYITYVKNETPLVAENFNQCIELATGEYINFLLDDDLFDHEKIDRMMKLFLELENISFVTSYRELIDENGEILPPSTLNVKIATETTIFEGEALGNYMVXHLKNVVGRTDTGFVYRNFFWRASWVFLREKRIQPLNDIATWPRYDRKGKKXLYIQEPLSYFRKHIGGNS

SEQ ID NO: 45422 - protein, 452 aa, Bacillus anthracis
MSVTAHIFFGKKRKGDKYMTTQVVNVIGAGLAGSEAAYQIAKRGVQVRLYEMRPVRQTPAHHTDKFAELVCSNSLRANTLTNAVGVIKEEMRLMDSVIIRAADECSVPAGGALAVDRHEFAAKVTEYVKNHPNVTVMNEEITEIPEGPTIIATGPLTSPDLSAQLKELTGEDYFYFYDAAAPIVEKDSIDMNKVYLKSRYDKGEAAYLNCPMTEEEFDRFYEALIAAETVPLKEFEKEIFFEGCMPVEVMASRGRQTLVFGPMKPVGLEDPKTGKTPYAVVQLRQDDAAGTLYNIVGFQTHLKWGPQKEVLQLIPGLENAEIVRYGVMHRNTFINSPNLLRPTYQYKQRDDLFFAGQMTGVEGYVESAASGLLAGINAARLVKGEEPVVLPPVTAMGSMANYITATNAKNFQPMNANFGLFAPLEKKIKKKAERNEAYATRALEMIRNFVNI

SEQ ID NO: 45423 - protein, 156 aa, Bacillus anthracis
  MISC_FEATURE (67)..(67): X=any amino acid
  MISC_FEATURE (74)..(74): X=any amino acid
MPRKGPGCKRDVLPDPMYISKLVTRLINKMMVDGKKGKISTIPYNAFDIRKRTTGKEPMGVFEAALXEHMPVLXGTPRPGGWGNYQFQLEVPSKTRTTLGLRWLVNYARLRGEKTMEERLANEILDAANNAGASVKKREDTHKMAEANKAFAHYRW

SEQ ID NO: 45424 - protein, 586 aa, Bacillus anthracis
  MISC_FEATURE (47)..(47): X=any amino acid
  MISC_FEATURE (160)..(160): X=any amino acid
  MISC_FEATURE (162)..(162): X=any amino acid
  MISC_FEATURE (211)..(211): X=any amino acid
MLKGAFYHRPKDNYAYAYDEKTIHIRIRTKRDDVQSTTLIMGDPYEXKDGKWISSSTPMKKTGSTALFDYWFIPIEPKFKRLRYGFELKNDTDTLIYAERGFFSTTPNDDVGNFFCFPFIHANDVFKAPSWIKDTVWYQIFPERFANGDHTLNPENTLPXVXAEPTPTNFFGGDFAGIIQNLDYLVKLGISGIYFTPIFKAHSNHKYDTIXLMGIDPQFGYKETFKELVQACHTHGIKEMLDAVFNHRGKPFSNKFKTYYQMGGQAAYKEWFHILGVPIRTEPLPNYDTFAFTPDLPEINTTPPRVKNTLPEKGRYWVREFNIDGWRLDVANEVDHNFWREFRSEIKALNSEVYILGEIWHDALPWLQGDQFDAVMSYPVTNALLSYFANDSIKANEFMKQITESLHSYSMNVNEAAFHLLDSHDTPRILTTCNGDKNKLKLLYVFHLSFIGSPCIYYGDEIGMDGGMDPDCRKCMVWDTEEQDHTLFTHVQTLISLRKQYKAFGGHGTFQFIEANDEYNYISYTKTYEDETIFFVLNPTNSDITASLPLHVTGKEIINIYTNEEFSAEASVLQVTLPPYGFSILK

SEQ ID NO: 45425 - protein, 323 aa, Bacillus anthracis
  MISC_FEATURE (232)..(232): X=any amino acid
  MISC_FEATURE (296)..(296): X=any amino acid
  MISC_FEATURE (300)..(300): X=any amino acid
SLHLNRHPRLRQSGGMRALVRETFLHTEDFIYPIFVLEGGKGRNEVPSMAGVYQMALNLLQAEMQKSVDLGYRSVNVLGYPLEKDEVGSSAYCVSWNCQRAIQQIKGEFPDLVVVADTCLCQFTSPWYIRCNEDGIILNDESLAVLAKTAVSQAKAGADIIAPIKHDGRFVTAIRHALDENGFGHVPVMSYAVKYSSAFYGPFRDAAHGAPQFGDRKTYQMDPANRMVSIPXSRSYVMEGADFLIVKPALSYLDIVRDVKNNFNLPVVAYNVSGEYSMIKAAAQNGWINEKEVVLXKINXYETAGADLIITYHAKDAARWLQE

SEQ ID NO: 45426 - protein, 132 aa, Bacillus anthracis
MEQIPVKRIEEVLVVAGDDKQKQKEFYELLLSTEFYVAGSLEAEEGATEGILRLRHFQGDGRWIVPFFTQMEFVKDVLPEGTPLITIRGKELFGSIEKDATAVLNVGTDISKTFIPEEIADIASGRIFNYYK

SEQ ID NO: 45427 - protein, 531 aa, Bacillus anthracis
  MISC_FEATURE (205)..(205): X=any amino acid
  MISC_FEATURE (252)..(252): X=any amino acid
CESAIGGNEMIVLIDNYDSFTYNLYQLLGEYEEEIVVVRNDQITIEQLEEMNPKGIVLSPGPGKPEEAGICIEVIRHFYKNVPILGICLGHQAIISAFGGEIVRAERIKHGKTSRAKHNGTSIFSYVTQPLTAMRYHSLVAAQTSLPQCFDILATAMDDGEIMAVRHNYYPLFGLQFHPESIATEEGGKLIRAFLGEVKEEERVXITILRKLVEGQHLTEEEMYKAGLLLLNENILGSEIAAFLVLLRAKRXTAERIYGLVRALREKALPFSNHIQGAMDNCGTGGDGAQTFNISTTSAFVLAGAGVKVAKHGNRAVSSKTGSADLLEELGVNISSTPNEIDYLLEHVGIAFLFAPAMHPALKRIMKIRKELNVPTIFNLIGPLTNPVNLETQFVGIYKRDMLLPVAQVLQKLGRKQALVVNGSGFLDEASLQGENHVVILKDNEIVETSIEPEKYGFSIVKNEEIRGGNSKENAKITLGVLSGEKKVLPVILFLFNAGLALFANGKSKTIERRITLAAHSIDSGKALAKL

SEQ ID NO: 45428 - protein, 221 aa, Bacillus anthracis
MFKRLREDIEVVFEQDPAARSYFEVILTYSGLHAVWAHRIAHAFYKKNFFFIARWISQVSRFFTGIEIHPGATIGRRFFIDHGMGVVIGETCEIGDNVTIYQGVTLGGTGKEKGKRHPTIQDNVLIATGAKVLGSITVGENSKIGAGSVVLKEVPAHSTVVGIPGRVVIQNGVKIGQELNHSDLPDPIFDKLKVMEVELDKLKKQLEVKVERKDKNDYSHL

SEQ ID NO: 45429 - protein, 412 aa, Bacillus anthracis
  MISC_FEATURE (389)..(389): X=any amino acid
  MISC_FEATURE (394)..(394): X=any amino acid
VAFEFKLPDIGEGIHEGEIVKWFIKPGDEVNEDDVLLEVQNDKAVVEIPSPVKGKVLEVLVEEGTVAVVGDTLIKFDAPGYENLKFKGDDHDEAPKAEDTPAATAEVVNERVIAMPAIRKYARVNGVDIHKVAGSGKNGRIVKADIDAFANGGQAVAATEAPAAVEATPAAAKEEAPKAQPIPAGGNPETREKMSGIRKAIAKAMVNSKNTGPPLNLREEENRTATVAHRKKFKAVAADKGIKLTLPSYVVKALTSGLREYPMLNTSLDGASQEVVHKHYFNIGIAADTDKGLFSSSVKDTDRQAYLRNFNEINDLAGKAREGRLAPAEMKGASCTITNIGSAGGQWFTPVINHPEVAILGIGRIAEKPVVKNGEIVAAPVLALSLKLXPFVNXRRNGSKSIKPNKRLLEGP

SEQ ID NO: 45430 - protein, 101 aa, Bacillus anthracis
MAQDFQLYEKKFKALADQKRLEIMYELCQRGQTCVCDLTEIFEMTQSKLSYHLKILLDAGLIVKETKGTWSYYDLNDAEVNNLLSEELCCIFRKTGKGSCC

SEQ ID NO: 45431 - protein, 181 aa, Bacillus anthracis
MFVIHGSSRQNGNTEALTHMMIEGIETEQIYLRDHTIHPITDQRHNAEGFQPVDDDYEQLMKRMLEHDTIIFATPLYWYGMSGHMKNFFDRWSQSLRDTSLHFKEKMKGKKMYVVIVGGDNPKLKALPLIAQFQYIFDFIGSSFEGYIIGDANGLDEIQNDAEALAKAQIYNKEFKNHKQK

SEQ ID NO: 45432 - protein, 294 aa, Bacillus anthracis
MSLQIQNLTKQFGESKAVNSLQISLPKGEVLGLLGRNGAGKTTTIKMLLGLLTPNEGSITWDGKTFGTSGVTIGYLPEERGLYTKSRVIDQLRYFGRLEGMAKKEVDLAIDHWLDRLAIPEYKFKTAGELSKGNQQKIQLIAALLHNPELLILDEPFSGLDPVNAGMLASIIEEQVQSGKTIILSSHRMEQVEAFCQHVCILKKGEAVVKGQLSDIKKEYGFRNLTIEDTEENEKGLQAIHVSYEKQQGLLYVKVQDDAEALNILQQLQEQGVTLRQFKMLEPTLNEIFVERAK

SEQ ID NO: 45433 - protein, 195 aa, Bacillus anthracis
MTIRQAINNLVEQGYLYRKRGIGTFVQLPKVEQKLQGMTGFTEDMISRGMNPSSQLLSFRLVPATAKIADRLRIQEGESVYEVRRIRLADDEPIAFETTYLSPALVKDINEEILQQSLYEHLEKKLGFKLVSATQSIEASIATDNEAEHLHIPKKAPVLVMRQWSYSEGEVPLEYVKCIYRGDRYKFITNIARNK

SEQ ID NO: 45434 - protein, 321 aa, Bacillus anthracis
MSIVNKKIIFFGDFGIDDAVALIYANKTCKLDILGIVAEYGNVSREIVTENVYFLERYYATEVKIIEGAARPMTAEEPLFFPEIHGEHGLGPIIPPDLRICKRENFCELIKLIEPCPEDIIIVATGRLTTLATLFLLYPNVMDKVCSYYIMGGAFLFPGNVTPVSEANFYGDPIAANIVMKYAKNAHIYPLNVTQEALITPEMVDIINKEGTGQAKLIKPMIDFYYENFYKKEYPGIAGSPIHDLLPFISFINDDIFEYKKSAVWISTTNDVTRGQSVADFRKIAEPTRFDDRPVQKIAVGFNYPAFKEEFMRTILKPDCP

SEQ ID NO: 45435 - protein, 250 aa, Bacillus anthracis
VFEVKGLTKVYQSKGSVATTALNDINFKIEEGEFVGIMGPSGSGKTTLLNLLATIDKQTSGHVLVNGEEINQMRAAKLAEFRRTHLGFIFQDFNLLDTLSIKENIILPLVMAKKSVNEIDAKVLEIAKFLNIEEILNKKVYEVSGGQQQRAAAARAIIHEPTLILADEPTGNLDSKSAKSLMSALQDLHEQKRVTIAMVTHDPVAASYCERILFIRDGEIFSEIHKGARKQAFFQENLDVLAMLGGEYHD

SEQ ID NO: 45436 - protein, 332 aa, Bacillus anthracis
  MISC_FEATURE (87)..(88): X=any amino acid
  MISC_FEATURE (104)..(104): X=any amino acid
  MISC_FEATURE (111)..(111): X=any amino acid
  MISC_FEATURE (140)..(140): X=any amino acid
  MISC_FEATURE (153)..(153): X=any amino acid
  MISC_FEATURE (156)..(156): X=any amino acid
TQINKRDLLQVQNLKQYFPIKKGILGRSISYIKAVDDISFTVYEKETVSIVGESGCGKSTTGRAILRLDEATSGKNIFQDKGFTSIXXPPQAQRCRKNFQGIFXEPLPSFXPRQMVGSILEEAMSIQNVCPKRGKEKQKXFEFTREKLGLPPXMKXSGYSTMKFSGGQRQRIGIARALAVNPRLIICGRSRSALDVSVASHKFLFIKAGCKQPIGFTVLYFISHDFSWSFVTYQIAIICMYLGNIVEIADKHSLFKNSATPYNKKVFFQQFLPLVQKRKKSVLNLRGAFPSLINPPTGCRFHTRCPYAIEKCATQQPSFQSISKDHKVACHI

SEQ ID NO: 45437 - protein, 500 aa, Bacillus anthracis
MSNMQQKTDVILIGAGIMSATLGSLLKELAPEWEIKVFEKLASAGEESSNEWNNAGTGHSALCELNYTSEKSDGSIDISKAVKVNEQFQLSRQFWAYLVKSKLIRNPQDFIMPLPHMSLVQGEKNVEFLKNRFEALSKNPLFQGMEFSDAPETLKKWLPLIMEGRTSNEPMAATKIDSGTDVNFGALTRMLFDYLKTKDVELNYKHSVENIKRTKNGLWEVKVHDMNSGKIEHHTAKFVFIGGGGGSLPLLQKTGIPESKHIGGFPVSGLFMVCKNQKVVEQHHAKVYGKAKVGAPPMSVPHLDTRYIDNKKALLFGPFAGFSPKFLKTGSNLDLIGSVKPNNVLTMLAAGVKEMGLTKYLIQQVMLSHEKRMEELREFIPNAKSEDWDIVVAGQRVQVIKDTDAGGKGTLQFGTEVVSAADGSIAALLGASPGASTAVHVMLEVLEKCFPSRMVEWEGKIKEMIPSYGISLTENPRLFQDLHTSTGRTLGLNEKETVHN

SEQ ID NO: 45438 - protein, 295 aa, Bacillus anthracis
  MISC_FEATURE (60)..(60): X=any amino acid
  MISC_FEATURE (122)..(122): X=any amino acid
  MISC_FEATURE (175)..(175): X=any amino acid
  MISC_FEATURE (215)..(215): X=any amino acid
VIEKYNLKNVVRYLCKIAGVSRSEYYNYFSVSSQNQRKNKMDQGEISKEFILKAFRFKNXRKRVRKIKMTLAGQFQVVYNLKRIRRIMKKVKKYGIICPTRKANPYKRMTRATKEHFVVPNXLKQELRKGVHGKVLLADITYLFYGRNRKVYLSTILDRSTNEILAYHVSGQLTXDIATMTFDNLKKNKKIRLTKDAYIHSDQGAHYIVQSIKNXSKKLKLGQSISRRGNCWENAPQESFFGNIKYEAYIKTCTSSAQLIQEIKDYMKYYNQYRYRWNLKKMTPVEYRNHLLKAA

SEQ ID NO: 45439 - protein, 313 aa, Bacillus anthracis
  MISC_FEATURE (209)..(209): X=any amino acid
  MISC_FEATURE (217)..(217): X=any amino acid
  MISC_FEATURE (219)..(220): X=any amino acid
MRKIISVLVIFFMTGSIFAGGAVHAKAEGKHEWNKNKFLNIAHRGASGHAPEHTFASYDLVKKMKADYLELDIQLTKDGQLIAMHDTAVDRTTNGTGEVRDKTLSEIKSLDAGSWFNKAYPEKAKQEYVGQKVPTLEEIFQKYGRSMKYYIETKSPDVYPGMEEKLLALLEKYNLIGQNMSSSRVMIPSFSKDSLKKIYSINKNIWLVXLVLVLFKXKXXRFVEWSGITHEPKRVTNDDFPEIKKYAVGIGPNLRNDNGDLIINESYMKMARQNGLLIHPYTINEKPDMRLLMKWGATGMFTNYPDRLHTVLK

SEQ ID NO: 45440 - protein, 231 aa, Bacillus anthracis
  MISC_FEATURE (85)..(85): X=any amino acid
  MISC_FEATURE (154)..(154): X=any amino acid
  MISC_FEATURE (163)..(166): X=any amino acid
  MISC_FEATURE (175)..(175): X=any amino acid
VKNGTLQVIGASIYYEVRGSGPILLLIHGGGGDADKFHNIAHHLAKWYTVVTYHRRGHSPSNLLHKNGGIPWAHAITKNAPSVAXLFLTKKPALCISESRFLVAVIGLDLCIRHPEQVQLLIPHRPVLLQLLSENELKQAINFPGDLKGNHPKXVMKLLSKIXXXXFPNHRRICXQNGLLGNIHQFPEYENPRKFTLYFNIDALEVPIKTCSIQVRPACGKYFKKDFSYHC

SEQ ID NO: 45441 - protein, 246 aa, Bacillus anthracis
MLKGKVALVTGASRGIGRAIAIDLAKQGANVVVNYAGNEQKANEVVDEIKKLGSDAIAVRADVANAEDVTNMVKQTVDVFGQVDILVNNAGVTKDNLLMRMKEEEWDTVINTNLKGVFLCTKAVSRFMMRQRHGRIVNIASVVGVTGNPGQANYVAAKAGVIGLTKTSAKELASRNITVNAIAPGFIATDMTDVLDENIKAEMLKLIPAAQFGEAQDIANAVTFFASDQSKYITGQTLNVDGGMVM

SEQ ID NO: 45442 - protein, 233 aa, Bacillus anthracis
  MISC_FEATURE (86)..(86): x=any amino acid
  MISC_FEATURE (99)..(99): x=any amino acid
  MISC_FEATURE (102)..(102): x=any amino acid
MQQSKEERVHDVFEKISDKYDVMNSVISFQRHKAWRKETMRIMDVKPGSKALDVCCGTADWTIALAGAVGEQGKVCWFKLSGKNRXSGGKQKGRGRYNXNKXELLHGNAMELPFERYTFDYVTIGFGLRNVPDYMHVLKEMTRVVQLGGKSNCLETSQPTMIGFRPSIFYIFKYIHAVILQKLFAKSYKEYSWLQESASTFPGMKELGYMFEKTGLETCASKPFTFGVAAMHF

SEQ ID NO: 45443 - protein, 419 aa, Bacillus anthracis
MAFEFKLPDIGEGIHEGEIVKWFIKPGDEVNEDDVLLEVQNDKAVVEIPSPVKGKVLEVLVEEGTVAVVGDTLIKFDAPGYENLKFKGDDHDEAPKAEATPAATAEVVNERVIAMPSVRKYARENGVDIHKVAGSGKNGRIVKADIDAFANGGQAVAATEAPAAVEATPAAAKEEAPKAQPIPAGEYPETREKMSGIRKAIAKAMVNSKHTAPHVTLMDEVDVTELVAHRKKFKAVAADKGIKLTYLPYVVKALTSALREYPMLNTSLDDASQEVVHKHYFNIGIAADTDKGLLVPVVKDTDRKSIFTISNEINDLAGKAREGRLAPAEMKGASCTITNIGSAGGQWFTPVINHPEVAILGIGRIAEKPVVKNGEIVAAPVLALSLSFDHRLIDGATAQKALNQIKRLLNDPQLLVMEA

SEQ ID NO: 45444 - protein, 520 aa, Bacillus anthracis
  MISC_FEATURE (24)..(24): X=any amino acid
  MISC_FEATURE (33)..(33): X=any amino acid
  MISC_FEATURE (163)..(163): X=any amino acid
  MISC_FEATURE (203)..(203): X=any amino acid
  MISC_FEATURE (263)..(263): X=any amino acid
  MISC_FEATURE (380)..(380): X=any amino acid
  MISC_FEATURE (383)..(383): X=any amino acid
  MISC_FEATURE (387)..(387): X=any amino acid
  MISC_FEATURE (446)..(446): X=any amino acid
  MISC_FEATURE (475)..(475): X=any amino acid
  MISC_FEATURE (480)..(481): X=any amino acid
  MISC_FEATURE (506)..(506): X=any amino acid
  MISC_FEATURE (512)..(512): X=any amino acid
ILISIWLATVGAVVGFFCRKVYCXKRRLNGASXMKRKRILDEANREAEALKKEALLEARDEIHTLRTEAELEIRDSRSELQKPRNRLMQKEENLDRKDETLDKRELQLEKKEDSLVARQQQIEELESKVGELVQKQQTELRAHSQSDTRNKRKPLFLGKVEKXKFLMKMPLMVKKKGKSGRKKKPNKKAKEILSLGNAVIRSXSVAETTVSVVNLPNDEMKGRIIGREGRNIRTLETLTGIDLIIDDTPEAVILSGFDPIRSXNSSYALDKLVQTGRIHPARIERMVEKSRREVTKYIREVGEQTTFESGVSRFTSRFIKILGRLKYRTSYGQNVLKHSMEVAYLTGLMAAELGEDEKLARRAGLLHDIGKAIDHEVEVXPRXNLVXTSQRKIKRHPVVITGIAFHQGTTEPNFYHCSFSCSSRALSAARLGARSETLENYISSSXKVRRDFRSYEGVEKSFGISSRTRSSYFWXNRYNXXFRSSRLARDIRKRIENELDYPRTYXSNCYSXNTCSEYAK

SEQ ID NO: 45445 - protein, 342 aa, Bacillus anthracis
  MISC_FEATURE (158)..(158): X=any amino acid
MDSKGGTTMLDEISSKEKAAILIRTLEEGVAAKVIEYMTAKEKEVLLREIAKFRVYKSETLENVLGEFLYELNVKELNLVTPDKEYIRRIFKNMPEDELEKLLEDLWYNKDNPFEFLNSLTDLEPLLTVLNDESPQTIAIIASYIKPQLASQLIERLXDHKRVETVMGIAKLEQVDGELINQIGDLLKSKLNNMAFNAINKTDGLKTIVNILNNVSRGVEKTVFQKLDEMDYELSEKIKENMFVFEDLLGLEDLALRRVLEEITDNGVIAKALKIAKEEIKEKLFTCMSSNRKEMILEELDGLGPLKMTDAEKAQQTITDTVKKLEKEGRIIVQRGEDDVLI

SEQ ID NO: 45446 - protein, 175 aa, Bacillus anthracis
MSIVNTISLWVIPCVIGFILLYGTIKKVPTYESFVEGGKEGISIAISILPFMVGMLVSISIFRASGALDAMISVMKPMLDLIHVPAEIVPLALIRPISGSAGLSITTDLIATYGPDSFIGRLASTMQGSTDTTFYILTVYFGAVGIRKMGDALKVGLFADLIGIICSIVFVSLMF

SEQ ID NO: 45447 - protein, 313 aa, Bacillus anthracis
MKKAKGIAKSVAVASVIMSGSLGLQATSAFADSKGTVENLQNGGKVYNSFKTTYDMKQNIKNSIKVSFIEDPYADKKIAIVTTDGSNIDAKYTINGGYYNAGLKWPSAYHTEAEITSGDSAQFHKAAPVNTMTSAKVTSEVGYTLGGSVKVGVNDKGPNADASITGSFAWKESVSYDQVDYKTVLETHTDKKLNWKVGFQSFNFPEWGIYNRDSFNTFYGNQLFMKSRSYNEGTNNFVSKDTVPALTGYGFSPNVVAVITADKTESTSDLKITNRRISDQYHIEWVSSKWWGNNNKDTYNEFFTTTINLDWKN

SEQ ID NO: 45448 - protein, 146 aa, Bacillus anthracis
MKLHELKPAEGSRKVRNRVGRGIGSGNGKTAGKGHKGQNARSGGGVRLGFEGGQTPLFRRLPKRGFTNINRKEFAIVNLSTLNRFEDGTEVTPELLLETGVISKLNDGVKILASGAVEKKLTVKAHKFSSSAKEAIEAAGGSVEVI

SEQ ID NO: 45449 - protein, 145 aa, Bacillus anthracis
MRTTFMAKANEVERKWYVVDAEGQTLGRLASEVASILRGKNKPTFTPHVDTGDHVIIINAEKIHLTGNKLNDKIYYRHTNHPGGLKQRTALEMRTNYPVQMLELAIKGMLPKGRLGRQVSKKLNVYAGAEHPHQAQKPEVYELRG

SEQ ID NO: 45450 - protein, 455 aa, Bacillus anthracis
  MISC_FEATURE (285)..(285): X=any amino acid
  MISC_FEATURE (311)..(311): X=any amino acid
  MISC_FEATURE (441)..(441): X=any amino acid
MSDVMADRTPPPNIKTEQGALGAILIDPDALTSPSGTFGPWIFLSKQNIQKIFEVMLGLSDKGEPIDLVMMTSAMADQGLLEEVGGVSYLAELAEVVPTAANVEYYARIIAEKALLRRLIRTATHIVSDGYEREDDVDGLLNEAEKKILEVSHQTNAKAFQNIKDVLVDAYDKIELLHNQKGEVTGIPTGFTELDKMTAGFQRNDLIIVAARPSVGKTAFPLNIAQNVATKTDENVAIFSSKEGVLNQPFMRYACGRKEIMEAQKLCTGSINFEDWAKLTNGKGXLFNAGFYIDDTPGIKVNEIRAKCRRXKPRTGSGMILIDYLQLIQGSGKSGENRQQEVSEISRTLKGIARELQVPVIALSQLSRGVESRQDKRPMMSDIRESGSIEQDADIVAFLYREDYYDRETENKNTIEIIIAKQRNGPVGSVELAFVKEFNKXINLERRFEDGHAPP

SEQ ID NO: 45451 - protein, 310 aa, Bacillus anthracis
MKKVLFLGDPGIDDSLAIMYGLLHPDIDIVGVVTGYGNVTQEKATSNAAYFLQLARRGDITYINVAKIPLSVRYTTYYPENSWGRKAYEPIRPPKNLSPNIRPFCEFFDILEKYKGELIIVDAGRSTTLATAFILEKPLMKYVKEYLYMGRCFFMAGNGTPVAEANFHGDPIASQLVMQNAQECDVVPLNVTSEVIITPEMVKYITKYSKTSFNKLIEPIFTYYYKAYRKLNPKITGSPVHDVVTMMVAANPSILDYVYRRVDVDTVGIAKGESIADFRPQPDAKALKNWVRIGWSLHYKKFLEDFVKIM

SEQ ID NO: 45452 - protein, 319 aa, Bacillus anthracis
  MISC_FEATURE (83)..(83): X=any amino acid
MIDNFWRDLPRPFFVLAPMEDVTDVVFRHVVSEAGRPDVFFTEFTNSDSYCSSEGMKRLRGLLIFPEGDQPMVAHIGGDNPEXFRQMSIGMAELDFKGIDINMGCPVPNVASRGKGSGLILRPDVRAELIQAAKAGGLPVSVKTRLGFKELSEWEDWLTHIFKQDIANLSIHLRTREEMSQVDAHWELIPEIKKLRDRIAPNTLLTINGDIPDRKTGLELAEKYGIDGVMIGRGIFKNPFAFEKEPREHSSKEHLDLLRLQLDLQGSYAEVLPRSITGLHRFFKIYVKGFPWGCELRNQLMSTKSTDEVRALLNKFEEK

SEQ ID NO: 45453 - protein, 380 aa, Bacillus anthracis
MKDILWLIQKTLSVLLKNKKSLLIISLPIIGTLISFSMYGNVGQGTLNIGVINKENQPIANDTVKFLEGLNHVKVSKIKESEVEDKLTSKKLDGVITLDSGFSESVREGKPDHIEISSIKGDQVTVFIKSYLYNYIDNIVAISKVAGTDQSTFNSMYAGYQKNLFKVKSETLTDTSKNKDMTNQTMGYLIMFMLFSAANLSGYILKEKENRTYFRLLTTPIDGKKFILSNVGVNMMILTIQILITILFLTNVFHTNINMPFIVMIGVLMLFALIAIGISLVLVAFSKNSASANTMQNLVIVPTCLLAGCYFPYDIMPKAVQKVADFLPQRWLLDTIAKLQQGIPFSELYVNILILFAFAVAFFLIAIYKFGRNNDARNFV

SEQ ID NO: 45454 - protein, 46 aa, Bacillus anthracis
MTSVKGIINSTMDWKTGGRFLTLGVTLIMFIIVFELPWFTIHVFNS

SEQ ID NO: 45455 - protein, 429 aa, Bacillus anthracis
MSSVVVVGTQWGDEGKGKITDFLSEHAEVVARYQGGNNAGHTIVFGGVKYKLHLIPSGIFYKEKICVIGNGLVVDPKALLEELKYLHDRGVSTDNLRVSNRAHVILPYHLKQDELEEASKGDNKIGTTKKGIGPAYMDKAARIGIRMADLLDREAFKEKLEQNLAQKNRLFEKMYDTEGFSVDEIFEEYFEYGQQIAQYVCDTSVVLNDALDNNHRVLFEGAQGVMLDIDHGTYPFVTSSNPIAGGVTVGTGVGPAKVTRVVGVCKAYTSRVGDGPFPTELHDEIGHQIREVGREYGTTTGRPRRVGWFDSVVVRHARRVSGLTDLSLNSIDVLTGIPTLKICVAYKCDGKVIDEVPANLNILAKCEPVYEELPGWTEDITGVRSLDELPENARKYVERVSELTGIQLSMFSVGPDRNQTNIVRNVYEA

SEQ ID NO: 45456 - protein, 313 aa, Bacillus anthracis
  MISC_FEATURE (14)..(14): X=any amino acid
  MISC_FEATURE (59)..(60): X=any amino acid
  MISC_FEATURE (159)..(159): X=any amino acid
SLPDGKQEQVLKIXKKRARITNGLNGFTFLLLIQPIIYISTPLYYVFAPYKPHGRYRMXXKQPKSVTEPNVYMKERDMEQTLLPLSLQLHFDLYKRVGKKDIRIGEEKTYSLLSKVAKVSREYTTDEKIPEVPYVDNEVLSHPKKIYTSYNSSEEAQVXKVLPQESVVEAFVSFRELLSVQEVTNMFPTIDIVWYAVNTGLEEKQKNDEGMYVAPIGFPADMISSLSGPFVSDSPHEEQFIGVLKSLQNHEDLAVKLSRAKTLELSKRISFLEKNGVKTYGAVVTGPKGEVEKLMSHEKVRNLKVGEARLWNW

SEQ ID NO: 45457 - protein, 519 aa, Bacillus anthracis
MTRQSFLKGAFILMIAGFITKILGFINRIVMARILGEEGVGLYMMAVPTFILAITLTQIGLPVAIAKFVAEAEAVNDKQKVKKILTVSLAVTSVISIVLTIGIMLLTPILAKTLLTDERTYYPLMAILPVVPVIAVSSVLRGYFQGKQNMKPSAYAQVIEQIVRITIIAICIQLFLPYGVEYAAAGAMLSAVLGEVASLLFLLTLFQREKHLSIRSGFFTTVKESKGTFYSLMDIALPTTGSRLIGSVSYFFEPIVVMQSLAIAGVAASVATQQYGILNGYAFPLLSLPAFITYALSTALVPSISEAMAKRQHKLVEHRLQQALRISLITGGWSVVILYVFASPVLTLMYGSDSATAFIQLLAPCFLFHYFQSPLTSVLQALNLARAAMMNTFIGAIVKLIVIFVLASRPEFQMMGVALAIAANIVTVTFLHYATVLKKITFTIYAKDYIFGGLAIGIAGSFGFYLHKYIIFSHSLGIQTLWEITLTTLVYIVLLFSFKLIRKEELSRLPIIRKLSFLK

SEQ ID NO: 45458 - protein, 300 aa, Bacillus anthracis
  MISC_FEATURE (47)..(47): X=any amino acid
  MISC_FEATURE (56)..(56): X=any amino acid
  MISC_FEATURE (61)..(61): X=any amino acid
MGKIHPKTRIGYVEFKVKVLERQIAFYENVVGLEVMKQEGNIRAFSXKRWKRTRYXFLRNXRNGVLQEPRTTGIYHVAFLVPTRETFASALFDVIRNKNVIDSPVEQEGRYTYSNEILPISRFNSASDHTYSEAFYLQDLEGNGIEIYADRPRDQWGDGPGGSTPLDLKELATLVDYEFDGLPANTVVGHVHLRIANVEESHDFYVDTVGFEVQQREDDCLFISAGGYHHHIGANTWNGVNNPHPPAHATGLKVYTIVLPHKEALDEVKERLIEKQHEIHEITNGFTVVDPSGITVQFEI

SEQ ID NO: 45459 - protein, 166 aa, Bacillus anthracis
MSKVIETKQQVVTEIADKLRASKSTIVVDYRGLTVSEATELRKQLREAGVEFKVYKNSLTRRAAESAEMAELNEFLTGPNAIAFSNEDVVAPAKVLNDFAKDHEALEIKAGVIEGKLVTLDEVKAIATLPSRESLLSMLLSVLQAPIRNLALATKAVADHKEEQGA

SEQ ID NO: 45460 - protein, 135 aa, Bacillus anthracis
FKKKTTSNVIVRNSGGLAVVLDEGVLNVSLLFQETEKGIDIDLGYDTMWHLIQEMLKDYDVTIEAKEIVGSYCPGSYDLSIRDQKFAGISQRRIRGGVAVQIYLCATGSGSERAALVRDFYNLAIQGEETCICPR

SEQ ID NO: 45461 - protein, 225 aa, Bacillus anthracis
  MISC_FEATURE (169)..(169): X=any amino acid
  MISC_FEATURE (183)..(183): X=any amino acid
  MISC_FEATURE (225)..(225): X=any amino acid
MKFCDRLLETVQPVWEMSHNHPFCSRLWGNGTVEKDKFQYYIIQDYLYLLDLCKLYAIWRCKGNESTVMGKFAEQIDGILNGEMTIHKQYAKRLGISIEEIESAKPSAKNLAYTNYMMSVSQNGTLAELIAALLPCMWNYWGNGKRLNDISWSRDHGFFGEGISGNSSXQVPNLWNLGKPIFXRKLAVGKSEKELDRLEEIFLYSSRFEYLFWDMSYRKENVGIX

SEQ ID NO: 45462 - protein, 285 aa, Bacillus anthracis
  MISC_FEATURE (120)..(120): X=any amino acid
LRLVTAKKEEKVFVGIVDEEEEKVLHLREAAKQKGEKVTIPITMLECIERGTECFEKIIGIWKLGRRKNGRDGRTFRLRKEKILVPIPRPRKKIFCGVEKNYREHAIENGRSRVNSRKIXCIFTKAPTTVIGMDEKINSHPHATNELDYEGELAIVIGKRGKQIKKEKALEHVFGYPIINDITARDIQRKHKQFFLWKKFDTFCPMGPYLIHKSMISTPNALHIETIVNGEVRQTSNTNKMIFSIEEIISTISKGMTLEPGDIIRNGNPAGVRKRFHATKFLHAG

SEQ ID NO: 45463 - protein, 396 aa, Bacillus anthracis
  MISC_FEATURE (69)..(69): X=any amino acid
  MISC_FEATURE (155)..(155): X=any amino acid
  MISC_FEATURE (165)..(165): X=any amino acid
  MISC_FEATURE (229)..(229): X=any amino acid
  MISC_FEATURE (244)..(244): X=any amino acid
  MISC_FEATURE (257)..(257): X=any amino acid
IKPKFIKEIKSGYPIILKDAIQNLNDGQEEGNIIKVVDEKNHFVGKRYYWKQNKRYGLDFYEKRSEQNXSIFLLKSKIKSALHKRKQFYKSSDTTAFRALNGEGDGLGGLIIDYYDGYYVVSWYSEGIYTFRDEIIAALQKVANFKGIYEKEAFXYKGKYMGRRXFRTGKTRGVPALRKRERGELPLVILNDRTNGLVAFFNQRKPAEKQIPGINMRKGKTRLNIVLLXQGLFSGLTRLGGADXNNKGPNLANPKVXGKTIEQFSVNEIDYEAQDIIVEDVFLYFKYAAKKKMKFDMVVLDPPSFARSKKYTFSAAKDYKNLLKETIAITENNGIIVASTNCSAFDMKKFKGFIDTAFKEMNGKYKVLEEHSLPEDFRTIDQFKEGDYLKVVFIEK

SEQ ID NO: 45464 - protein, 70 aa, Bacillus anthracis
MLYKRKVLNYSILLWKKRKLPVLAREVNQHKDSLLKFKKAGREDLVNKLQSEIQDLERILPEAINRRRAS

SEQ ID NO: 45465 - protein, 194 aa, Bacillus anthracis
MYLINQNGWIEVICGSMFSGKSEELIRRVRRTQFAKQHAIVFKPCIDNRYSEEDVVSHNGLKVKAVPVSASKDIFKHITEEMDVIAIDEVQFFDGDIVEVVQVLANRGYRVIVAGLDQDFRGLPFGQVPQLMAIAEHVTKLQAVCSACGSPASRTQRLIDGEPAAFDDPIILVGASESYEPRCRHCHAVPTKQR

SEQ ID NO: 45466 - protein, 262 aa, Bacillus anthracis
MERRAIICSSFFMYKWILGSGIRRTNDYHCNLRGDVVTITNQDKEVVATYEYDAWGNVVKSDTKGIAVDNPFGYAGYMYDKEIGMYYLIARYYNPEHGVFLSVDPDPGDEDDPVTMNGYTYGDNNPVMMINPDGHLAWFIPVAVHEARIAAPHVGRFVGKQLAKRAITQPLKYKNTKAVAGKIIGYTKHGFNQAISRNNGLGVSPKAILHTVKSGKMVIQKDRGTIKYTSKQAVVVLNKRGKIVTTFARGTKYTRKGKNKRE

SEQ ID NO: 45467 - protein, 871 aa, Bacillus anthracis
  MISC_FEATURE (50)..(50): X=any amino acid
  MISC_FEATURE (123)..(123): X=any amino acid
  MISC_FEATURE (142)..(142): X=any amino acid
  MISC_FEATURE (205)..(205): X=any amino acid
  MISC_FEATURE (465)..(465): X=any amino acid
  MISC_FEATURE (491)..(491): X=any amino acid
  MISC_FEATURE (514)..(514): X=any amino acid
  MISC_FEATURE (517)..(517): X=any amino acid
  MISC_FEATURE (664)..(664): X=any amino acid
  MISC_FEATURE (666)..(666): X=any amino acid
  MISC_FEATURE (774)..(774): X=any amino acid
WNGGFQIVSETELSQLFEKQAHIKPNAIAVVFEDEKLTYEKLKKKFEKNXLVLLIGERNLGPDQLVALAMPRSLNMVVSLLAVLKAGAGYLPLDPDYPSDRISLWLHDAKPSCVLTNSDVEIXCDEGIEILIDDIEVIEEGXKYSEDNIDEMERMKPLTPSHIAYVIYTSGSTGRPKGVMIPHQNVVRLLGATDHWFQFDADDVXRMFHSYALIFSVWETLGPLLYGGRLVVVPHTVSRSPKEFLQLLVKEKVTVLNQTPSAFYQLMQADRENEEIGQKLSLRYVVFGGEALELSRLEDWYSRHPHNAPKLINMYGITETTVHVSYIELDETIVSLRANSLIGCSIPDLKVYVLDNYLQPVPPVLSWRNVVAGARACSWYLGRAGLTAERFIADPFGKPGTRMYRTGDLARWRHDGTLDYIGRADHQIKIRGIPNLMREQKRVHKQPPKSGASSRYVGKDQPGGXTVSFLYVASNNEMIDTNEMRQFAWWXFTRLHGPYAFVVVNELPLTPNRXIRXKGIASPEFIASASSRGPRTPQEEMLCDLFTEVLSVPQIGIDDGFFDLGGHSLLAVQLMSRMKEALGVELNIGTLFAAPTGAGLAERLEMGNGQSALDVLLPYGSGGDQLQLFCVHPAGWIKLVLCRTYGSFRNRLSNLRVCKTWYRXKXRTSKSLEEMAADYLKQEVRSTASRNISFTRWSLGRKCVHAMAAQLPNEGGRSGITRYGRILFVVLPTEYGSAYGRRSVIALLALGGYDPDNMDGKPLTMESAVEILSXDGSALTSLEEKTIFEFERNICKLSRIVREIIPKVYNGDILFFRTTGIPDWVDPISPKTWGKIFKRGNCANTILIVDIKIMSTRALTEIGQVLAKYLQ

SEQ ID NO: 45468 - protein, 279 aa, Bacillus anthracis
MKNLQSTTKLHNGVEMPWFGLGVFKVEEGPELVEAIKSAIKTGYRSIDTAAIYGNEAAVGEGIRAGIEATGISREELFITSKVWNADQGYKETIAAYEESLKKLQLDYLDLYLVHWPVEGKYKDTWRALETLYKEKRVRAIGVSNFQIHHLQDVIQDAEIKPMINQVEYHPRLTQKELQAFCKEQGIQMEAWSPLMQGQLLDNETLQAIAEKHGKTTAQVILRWDLQNGVITIPKSTKEHRIIANADVFNFELTKEDMEKIDALNENHRVGPDPDNFDF

SEQ ID NO: 45469 - protein, 258 aa, Bacillus anthracis
LKGHWGEKFANTLIDLKISVGTDNGWQPNKFITRAEAAQLTAKTDMLQYSHSNPLENKTIIIDPGHGGEDPGKDTKGLPESKIVLDTSLRLQKLLEKHTPFTVLLTRKSDTRPGHDQKSSLQERVKFAKQNQGDIFISVHANAFNGNAKGTETYYYKSSKSEKTNPHVEESRVLAEKIQTRLVDALQTRDRGVKHGDLHVIRENDMPAVLTELAFIDNGIDYSKLSTENGRQIAAEAIYEGILDYYEWKGNNVSEYRL

SEQ ID NO: 45470 - protein, 555 aa, Bacillus anthracis
MKFLKNDQAAVFALGGLGEIGKNTYAVQFQDEIIIIDAGIKFPEDELLGIDYVIPDYTYFVRNEDKIKGLFITHGHEDHIGGIPYLLRQVNIPIYGGKLAIALIKNKLEEHGLLRKAKLYEIQEDDVIKFKKTSVSFFRTTHSIPDSYGVVVKTPQGQVVHTGDFKFDFTPVGEPADLTKMAEIGKDGVLCLLSDSTNSEVPNFTMSERRVGDSIQDIFRKVEGRIIFATFASNIHRLQQVVEAAVENNRKVAVFGRSMEAAIEIGQNLGYIRCPKDTFIDASQLNRLPANKVVILCTGSQGEPMAALSRIANGTHRQIQIIPGDTVVFSSSPIPGNTISVSRTINMLYRAGADVIHGKLSNIHTSGHGGQEEQKLMLRLIKPKYFMPIHGEYRMQRMHMKLANDCGIPEENCFIMDNGDVLALRSDEASVAGKIPSGSVYIDGNGIGDIGNIVLRDRRILSEEGLVIVVVSIDMKEFKVAAGPDIISRGFVYMRESSDLINDAQTLITTHLEKVMERKTTQWSEIKNEITDTLAPFLYEKTKRRPMILPIIMEI

SEQ ID NO: 45471 - protein, 778 aa, Bacillus anthracis
MGNQHAMDLFEEEKKFIKAQVLHTIFHNEENLYSVVSMKVIETNETYDEKKVMINGHFPRMHEDEVFTLTGHFKDHPKYGKQYLVETFKKELPQTKAGMAQYLASDLFKGIGKRTAEKIVAHLGEHAISKIMDDPEALNGVVNKQKAQEIYETIVEHQGLEKVMSFLNGYGFGTKLSIKIYQQYKEMTLEVIRNNPYQLIEEVDGIGFGRADDIGRALGISGNHDDRVRAGCFYTLENVSLQLGHVYMRKDQLVRETMSLLNNQEGRVTEEDIISCIEMMQSEGKVIIEEERVYLASLFYSEKGVVKSIRRLMNQEETPSFPEAEVLKTLGEIEEQLNVQYAPLQQEAIQTALHKPMMLLTGGPGTGKTTVIKGIVEMYASLHGLSLNPNEYSDDNPFPILLTAPTGRAAKRMSESTGLPACTIHRLLGWTPEGSFQRNETDPVQGKLLIIDEFSMVDIWLANQLFKSLPTNIQVIVVGDEDQLPSVGPGQVLKDLLNAGAVPTVKLTEIYRQAEGSSVIQLAHAIKNGTLPPDLAQNQKDRSFIGCTGAQIVEVVKKVCENAKTKGFSARDVQVLAPMYRGPAGINVLNEALQEVFNPKREKSKEIAYGDVVYRRGDKVLQLVNQPESQVFNGDIGEIVSVFYAKENVEQQDMIIVSFDGIEVTYTKPDLNQITHAYCCSIHKSQGSEFPIVIMPIVKSYNRMLRRNLIYTGITRSKKFLIICGEEAAFQSGVNRLDDAMRQTTLASRLQESQGEVQMVTVNGEEMDVENISPYDFM

SEQ ID NO: 45472 - protein, 94 aa, Bacillus anthracis
MPNPKTGTVTFDVTKAVNEIKAGKVEYRVDKAGNIHVPIGKVSFEDAKLVENFRTIADTLQKVKPAAAKGTYMKNVTVASTMGPGVRVDVSTLA

SEQ ID NO: 45473 - protein, 323 aa, Bacillus anthracis
MKLIHLTHPHEQNKLELPPTVMALGFFDGIHLGHQCVIRTAKQIADEKGYKSAVMTFYPHPSVVLGKKEAHAEYITPMCDKEKIVESLGIDILYVVKFDESFAGLLPQQFVDDYIIGLNVKHVVAGFDYSYGRLGKGKMETLPFHARGEFTQTVIEKVEFQEEKVSSTALRKLIRNGEMEQIPSILGRAYTVGGTVVHGDKRGRQIGFPTANVGLSDEYLLPPVGVYAVRLQVHGEWYDGVCNIGYKPTFKEDERQLSIEVHLFEFNNDIYDQNVTVEWHMRIREEKKFNGIDELVEQIAKDKKTAQEYFANEKNILAFSNEK

SEQ ID NO: 45474 - protein, 130 aa, Bacillus anthracis
  MISC_FEATURE (57)..(57): X=any amino acid
ITNLKEEKQNAEYAGCLFHLNNKTIRFRKSKITPNKIGQFVSFWEKDDGICKNQASXSYDAAPDLLIITCIDDNKLGQFIFPKDILLKEKILRTQNQKGKMAMRIYPIWDTPVSNQAKKSQMWQLQYFVD

SEQ ID NO: 45475 - protein, 389 aa, Bacillus anthracis
MKSPNFQLSLQTSNLIIGFMVWVILSSLMPYIKVDIPLTAGQISMVTAVPVILGSVLRIPIGYWTNRFGARKLFFISFILLLFPVFYISVANSMMDLIIGGLFVGIGGAVFSVGVTSLPKYFPKESHGFVNGIYGVGNAGTAITSFLAPVIATSVGWRTTVQCYLVLLAAFALMNFLLGDRKEKKVNTPLMEQIKGVYKNEKLWFLCIFYFLTFGSFVAFTVYLPNFLVSHFGLEKVDAGMRTAGFIVLATIMRPIGGWLGDKFNPFKILIFVFIGLTLSGIILSFMPSMNVYTFGCLLVAFCAGIGNGTIFKLVPMYFSEQAGIVNGLVSALGGLGGFFPPLILTLLFQLTGHYAIGFMALSEVALACLIITVWMYSQEKLLVMLKNH

SEQ ID NO: 45476 - protein, 346 aa, Bacillus anthracis
  MISC_FEATURE (10)..(10): X=any amino acid
  MISC_FEATURE (36)..(36): X=any amino acid
  MISC_FEATURE (41)..(41): X=any amino acid
  MISC_FEATURE (54)..(54): X=any amino acid
  MISC_FEATURE (77)..(77): X=any amino acid
  MISC_FEATURE (100)..(100): X=any amino acid
  MISC_FEATURE (263)..(263): X=any amino acid
YKKTFICTFXKIKKSYFIISWRIIGTLILSQCMAMXGKGRXIFGVIKKENSPLXQMIAWKFLGGFNPGRGKKNKRFXSRKITSLPKNLDGVTTVESGFFXKVLEKGKPDHMEISSIKGDQVTVFIKSYLYNYIDNMVAISKVAGTDQSTFNSMYAGYQKNLFKVKSETLTDTSKNKDMTNQTMGYLIMFMLFSAANLSGYILKEKENRTYFRLLTTPIDGKKFILSNGRGHSVLILTIQILITILFPNECFSYEYQYGFSKGXFGELKAIWPLITNGIIIKSLVAFSKNSASANTMQNLVIVPTCLLAGCYFPYDIMPKAVQKVADFLPQRWLLDTIAKLQPGNSL

SEQ ID NO: 45477 - protein, 144 aa, Bacillus anthracis
MLDIQQIKEIIPHRYPFLLVDKVLEVEEGKRAIGIKNVTANEEFFNGHFPDYPVMPGVLIVEALAQVGAVAMLKKEENRGRLAFFAGIDNCRFKRQVRPGDQLRLEVEMTRVRGAIGKGKAIATVDGEIACETEITFALGDKKE

SEQ ID NO: 45478 - protein, 692 aa, Bacillus anthracis
MSDYLVIVESPSKAKTIEKYLGKKYKVVASMGHVRDLPKSQMGIEVKNNFTPKYITIRGKGPVLKDLKSAAKKAKKVYLAADPDREGEAIAWHLANTLNVDVESDCRVVFNEITKDAIKESFKHPRAINMDLVDAQQARRILDRLVGYNISPLLWKKVKKGLSAGRVQSVAVRLIIEREREIQSFEPEEFWTIKTEFVKGKDTFEASFYGVDGEKVQLTNETQVNEIIEQLKDNAFSVENVTRKERKRNPALPFTTSSLQQEAARKLNMRAKKTMMLAQQLYEGIDLGKQGTVGLITYMRTDSTRISETAQTEARTYITEAYGTEYIGAEKKKETKKSNAQDAHEAIRPTSVMRKPEELKSFLSRDQLRLYKLIWERFVASQMASAIMDTVTARLINNNVQFRASGSVVKFPGFMKVYVESKDDGAEEKDKMLPPLEVGETVFSKDLEPKQHFTQPPPRYTEARLVRTLEELGIGRPSTYVPTLETIQKRGYVGLDNKRFVPTELGEIVIELILEFFPEIINIEFTANMEQSLDEVEEGNANWVKIVDDFYVGFEPRLEKAEKEMREVEIKDEPAGEDCELCNHPMVFKMGKYGKFMACSNFPDCRNTKPIVKEIGVTCPKCDKGQIIERRSNKKKRLFYGCGTYPECDFVSWDKPIGRKCPKCEGMLVEKKLKKGVQVQCISCDYEEEQQM

SEQ ID NO: 45479 - protein, 169 aa, Bacillus anthracis
MKRIVTATVRNQSGVLNRITGVMTRRHFNIESISVGHTESSDISRMTIVVHVENEQQVEQLIKQLHKQIDVLKVSDITEEAMIARELALIKVATSVARAELYSLIEPFRAAVIDVGKDSIVVQVTGTQEKVEALIELLRPYGLKEIARTGVTAFTRSMKKQDKQVMLIQ

SEQ ID NO: 45480 - protein, 676 aa, Bacillus anthracis
  MISC_FEATURE (79)..(79): X=any amino acid
  MISC_FEATURE (92)..(92): X=any amino acid
  MISC_FEATURE (104)..(104): X=any amino acid
  MISC_FEATURE (278)..(278): X=any amino acid
  MISC_FEATURE (320)..(320): X=any amino acid
  MISC_FEATURE (323)..(323): X=any amino acid
  MISC_FEATURE (338)..(338): X=any amino acid
  MISC_FEATURE (348)..(348): X=any amino acid
  MISC_FEATURE (525)..(525): X=any amino acid
  MISC_FEATURE (545)..(545): X=any amino acid
  MISC_FEATURE (604)..(604): X=any amino acid
  MISC_FEATURE (606)..(606): X=any amino acid
KTMDRDIVKHAMKQSVAKLNPKVMIKNPIMFVVEIGFVITFILSFLPSHSSSIQEWFNITVSLILFITIFIGELGRKLXQEVRVKPQADFLXSSRRRDVFANVXKEKGRMVQVSATDLRKDDVVIVKQGEMIPSDGEVIKGLASVDESAITGESAPVIKEAGGDFCSVTGGTMGVSDEITIVITSNPGKSLIDKMTLLAEGGARQKNTNEIAFNTVLTSLTLIFLNRCVTLPNFYNYLGFSIDTAVLVALLSLFNPTTIGWGNSGNGNGRDGPRHKVXCVSDSGKAVEAAGDINTIILDKTGTITFGKPNGSYIYYCKKXNDXAVWKVGPLIVSVFRXNTQKVRSVNXVCARRNLYHIIEELAETGRVIPFKAETRMSGVDFTGRNESEKRAVGSVIEWVRSQGGTIPKDVNQKADFISKEGGTPLVVAVDNRIYGLIYLKDTVKPGMRERFEQLRQMGIKTVMCTGDNPLTAATIAKEAGVDEFVAECKPEDKIAVIKAEQDKGKLVSMTGDGTNDAPAITASXRWINNEYGTDSCERSSEYDXFRFEPTKIIEVVGIGKQLLMTRGALTTFSIANDIAKYFAIIPAMFTLAIPAMEALYILXNXHHRCQRFYQHYLFNAVIIPLLIPLAMKGIAYKPMSSNALLGRNLLIYGLGGVIVPFIGIKVIDIIVGLFI

SEQ ID NO: 45481 - protein, 182 aa, Bacillus anthracis
MSTNVVTVESVEKTYGKRNENQSKALRGVSLNIKEGEFVGIMGPSGSGKTTLLNVISTLDQATGGSVTIAGTNITSMKGNALSDFRSQKLGFIFQDFNLLENLSIYENIALPLSLQGVPSSEITGKVNEVAKKLGITEILTKYPTAVSGGQKQRTAAARALVHNPAIVLADEPTGALDSKNA

SEQ ID NO: 45482 - protein, 696 aa, Bacillus anthracis
  MISC_FEATURE (35)..(35): X=any amino acid
  MISC_FEATURE (88)..(88): X=any amino acid
  MISC_FEATURE (202)..(202): X=any amino acid
  MISC_FEATURE (386)..(386): X=any amino acid
  MISC_FEATURE (392)..(392): X=any amino acid
  MISC_FEATURE (477)..(477): X=any amino acid
  MISC_FEATURE (482)..(482): X=any amino acid
  MISC_FEATURE (504)..(504): X=any amino acid
  MISC_FEATURE (510)..(510): X=any amino acid
  MISC_FEATURE (514)..(514): X=any amino acid
  MISC_FEATURE (563)..(563): X=any amino acid
  MISC_FEATURE (573)..(573): X=any amino acid
  MISC_FEATURE (576)..(576): X=any amino acid
  MISC_FEATURE (578)..(578): X=any amino acid
  MISC_FEATURE (583)..(583): X=any amino acid
  MISC_FEATURE (591)..(591): X=any amino acid
  MISC_FEATURE (632)..(632): X=any amino acid
  MISC_FEATURE (636)..(636): X=any amino acid
  MISC_FEATURE (672)..(672): X=any amino acid
KEQKGKKPKTYISIRINIMVPCIFLLFSAIIMQLXKVQIVEGEAYKNLVENSPNATTSIPVSRGQILYPERKTGGYNKSLRTITHTKXKGITSDDILKTAKDLAKVLEMPEQDINKLTDIDKKDFWMQLNTKRADTKITKKDIEKFKEKGIEGKELDKKIEDLRRSRVTEVELGELTEQDLKVLAIKSKMSSGYQLTPQIIXKNVQMRSMHGISEILAIFPGVDATVDWERNYVNGNLFRSVLGNITSSEEGLPKENLDSYLVRGYNRNDRVGKSYIEQRYEDVLHGTKEEVKNITDKSGNIINTEVIAKGKSGKSLTLTIGFALQKKVEESIEKNLRAFKSIEPLLDRSFCRMTNPNNGQILSMAGKKIVEKEGVLEIEDLALGXIYNFVXLGSAVKGATLLTGYETGANTSREINFYDAPMKFKGTQAKKSWNVSGFGNINDLRALQVSSNVYMFQTALKIAGVNYVPNCSLDYXTRSIXDDAYYFEQFGLGVPTGIDLREXNNWTRXKSRXSTWIFTRLFHRQYDTYTPLQLAQYISTIANGGYRMQPQIVQEIREQSIXKKLVKVNRLXRPXEXIRIEXRQKLLIQXKKGLYGDSPKGKETGVKHFKNAPYKPAGKTGTAQTVYGWRXSHWXKCKRERMEMLHLTLVGYGSYDNPESSVFCSSPMASXDKSGINSIIGKEVLDVYFDLKKQR

SEQ ID NO: 45483 - protein, 261 aa, Bacillus anthracis
MAGSTLTVKDLHVSIDGKEILKGVNLEVKGGEIHAIMGPNGTGKSTLSSAIMGHPKYEVTEGSIIIDGEDVLEMEVDERAQAGLFLAMQYPSEISGVTNADFLRSAINARREEGDEISLMKFIRKLDKNMEFLEMDPEMAQRYLNEGFSGGEKKRNEILQLMMIEPKIAILDEIDSGLDIDALKVVSKGINEMRGEEFGCLMITHYQRLLNYITPDFVHVMMNGRIVKSGGPELAQRLEAEGYDWIKKELGIEDETTEQEA

SEQ ID NO: 45484 - protein, 302 aa, Bacillus anthracis
GRYVPKKVVTNQDLEKIMDPPEEWIRTRTGIAERRIADDTIDTSYMAVEASKKALEDAGISGEDIDLILVAVSTPDRAFPAVACVIKEAISAKHAAAMDLSAACAGFMYGMITAQQFIQTGTYKNVLVVGSDKLSKIVDWNDRNTAVLFGDGAGAIVMGAVSEGKGVLSFELGADGSGGKHLYQDEYVMMNGREVFKFAVRQLGDSCLRVLDKAGLTKEDVDFLVPASSDHSYYESARERLNLPQEKMSMTIEKFGNTSASSIPIAMVEELQNGRIQDGDLIILVGFGGGLTWGAVALRWGK

SEQ ID NO: 45485 - protein, 77 aa, Bacillus anthracis
MLNKTNTWTPSLFRDYKNAEHDACGIVSVMEKRKIPTKENIDLCIQSLVKMNHRAGFINGEGDGIGIHIDVPKALWK

SEQ ID NO: 45486 - protein, 191 aa, Bacillus anthracis
  MISC_FEATURE (147)..(147): X=any amino acid
MRKICVFAGSNLGERPEFKEQAIALGKMFVENEYELVYGGSCVGLMGEVANESLRLGGRVTSVMPARSFRGEIVHTGLTEFIGVEPMHDRKAKMPELADAFMALPGRIWNFEELLKAVCWSQIGIHNSPVGLWNIKDFYGPILKNGXTCAEEGFMNPSNKELIVAAETADALIHKIQNYERPGFRNEVKQL

SEQ ID NO: 45487 - protein, 385 aa, Bacillus anthracis
  MISC_FEATURE (21)..(21): X=any amino acid
  MISC_FEATURE (124)..(124): X=any amino acid
  MISC_FEATURE (136)..(136): X=any amino acid
  MISC_FEATURE (143)..(143): X=any amino acid
  MISC_FEATURE (187)..(188): X=any amino acid
FIMGGCFYFMVGIIHVCIGSXIPSLIQYYGRTPDQLGVLIFFQFTGFLFGVLSSPILVRKYHYFKTITLGVLVMSIVLGGFIYIKEWAYLSVICFVLGYGAGLLETTVGFFIISAEKNSAAKFXHLEVWVWGWGRXGFPLPSXYIYKIYEWVFYFLMGILLFFNFYTGLFWYVVWTYEISKFFSSKXXKGEGASLSSFTLKFKSEKNYSYIIYFTFCILICGIETNLANFLSTIMILTNNELISSVSISCFWLAIVIGRILVGKLAHKFNYWTYITSSCFTLVILLSLFPFVRGTGMYLFIIFIIGLVIAGVFPITLILASRIMENNIDQVTSLFIASASLGGALVSFLISWSLSLNTITVTFGIFSLFALSLGCIILKMRKIST

SEQ ID NO: 45488 - protein, 474 aa, Bacillus anthracis
  MISC_FEATURE (96)..(96): X=any amino acid
  MISC_FEATURE (100)..(100): X=any amino acid
  MISC_FEATURE (109)..(109): X=any amino acid
  MISC_FEATURE (114)..(114): X=any amino acid
  MISC_FEATURE (179)..(179): X=any amino acid
  MISC_FEATURE (184)..(184): X=any amino acid
  MISC_FEATURE (192)..(192): X=any amino acid
  MISC_FEATURE (245)..(245): X=any amino acid
  MISC_FEATURE (248)..(248): X=any amino acid
  MISC_FEATURE (337)..(337): X=any amino acid
  MISC_FEATURE (339)..(339): X=any amino acid
  MISC_FEATURE (342)..(342): X=any amino acid
  MISC_FEATURE (360)..(360): X=any amino acid
  MISC_FEATURE (377)..(377): X=any amino acid
  MISC_FEATURE (384)..(384): X=any amino acid
  MISC_FEATURE (396)..(396): X=any amino acid
MVVGDFPIEIDPVVVGAGPGGIVAAIRAAQLGQKVAIIEKATFGGVCLNVGCIPSKALINAGHRYENAMHSDDMGITAENVKVDFTKVQRRENPGXLRKXTGRCKGLPXRNQRXNSFAGEAYFVEDITLRVMTEEAAQLIPLKNAVLATGSTPIEIPGFKYSKRVINSTGALSLPEIPXKNFLXSAGGYHRXGIRSAYVDFGSRSYCSEAGDEILAGFEKAMSSVVKRALQKKGNVNIHTKTMAXRAXKNRKPGVKVSFEVKGEIQTVEADYVLVTVGRRPNTQEIGLEQVGVKMTDRGIIEIDEQCRTNVPNHLCHSVIRFLDNISSQKLLRKERXLXKHXWAASAIDYIGNPCSMLHXSRISSGGYTKKQAEGGXNAGNCIXFPFGANGGAYPXTSTAGFLQLVTRKERCSSCRCSSCRCRRFDIISEIGLAIEAGMTAEDIAQTIHAHPTLGEITMEAAEVALGMPIHIVK

SEQ ID NO: 45489 - protein, 136 aa, Bacillus anthracis
MIYESDYLVQESKDEGFYFLIKLISEYENKINTFNKTGECLYGIFQGEKLIGIGGLNADPYTENNKIGRLRRFYIAKDYRRIGLGKLLLNKLLSHAEKYFKVVVLHTDTKQGDVFYTANGFVKREVYKRSSHYKVL

SEQ ID NO: 45490 - protein, 296 aa, Bacillus anthracis
MTIAFDTFLKESKTFVEEKLVSYANELQCPNVLREAMAYSLEAGGKRLRPLLLFATLQAFDKERNLGVGAACALEMIHTYSLVHDDLPCMDDDDLRRGKPTNHKVFGEAMAVLAGDGLLTYAFQVIMAYGQKEISAEKKVRLVLELAKAAGPEGMVGGQVADMEAEGKQLTIDELEYIHKHKTGKLLEFAVLAGSILSDATEEQEEKLLEFAKYIGLAFQIRDDILDVEGTEEEIGKPIGSDVSNEKSTYTTLFTVDRAKDILDETIAKAKDAIGSLQLQDEYLLSICDLIAKRNN

SEQ ID NO: 45491 - protein, 888 aa, Bacillus anthracis
LICYSIYFMFFYLFPTHFSNSDVRFASLIVEAITFVSLIYSIYSKKVSSNPFWICITIAIGSFLLGKIVYTYQDSFFKIPIHRFTISDVFYMLFLLFCLIAFCYKILKECDKWEKAFFICDICIVLTSIFTLEWYLFNQPNLNIFSLSLGDVFLSFLYPIADLLFLLLGVSLFFRPTIFNSKRKIYIFIFVLISSATFNYIYFYLNNHLSTETITLLRLLYRIPILLIAIAGSISEDRNSHKNYFIVNPIIGKKALVVFPYLAVAILIGFTLKEQTSSSTLITGNCITFIFVLIRHSIVRMQNNSLTKRLQAFNAQLEEKVTLRTSDLVHKSEALSQKQQKFKSLYEYHPDPIFTIDLNGVFLNVNKAGSILLGAPTDELLGETCFSIILDEDKYKLASALEKVKQQESASLQLSSQYYKDGFTYSLYVTIVPIMIDGQISGSYIMMKDITALKKQQEEIKYLAFHDTVTKIGNRAFFHKKLKKIIKNAKTTESEFALLYLDLDRFKAINDTLGHSAGDYILEEVAKRFQSCLPSHTHLSRIGGDEFTILIENYTDEDSLFELCNQLFECMEKSFVIYEHTLTLSLSIGIAIYPHSGIDTATLLKNANVAMYDAKAKELNSVSIYDDVIAKKIERRLRLEKDLPNAIQNEELFLLYQPQVDSKSNKIIGAEALIRWNHPELGVISPYEFIPIAEETLQIIPIGKWTLQQACEQMKRWHTSGYSHLKIGVNLSAKEFEQEDFVKSISATLTNTGLPASSLDLELTERIAMMDERETLIKLRTLKSLGVHISIDDFGTGYSSLAYLPLYPIDTLKIPREFITMSETCDDGMEIIKTIITLANTLGMSVIAEGVETKEHVSFLQKNNCKFIQGYYYSKPIHADSFSTLLKK

SEQ ID NO: 45492 - protein, 341 aa, Bacillus anthracis
MNVLKIGIIGAGRIGKLHVDNLQLMPQVKIKAVSDVVIGHLEKWAQDKGISTLTTNYQDLLADPEIDAVFICSPTNTHAQIIKEAALAKKHIFCEKPVSFSVEETLEALEVVKEQGVSLQVGFNRRFDPNFRKVYDFIQQGEVGQPHILKITSRDPQPPSIEYVRSSGGLFMDMMIHDFDMARYVMNSEVVEVFAYGTTLIDPSIQEVHDVDTAIVTLKFANGALGVIDNSRQAVYGYDQRVEVFGEKGAVAADNCCPTTVQVSKTEGIVKDKPLYFFLERYTQAYIEEVTQFTKSIIEGQAVICSGNDGLQAERIAKAAKESLLTGKPVQIEHKQPALNQ

SEQ ID NO: 45493 - protein, 234 aa, Bacillus anthracis
  MISC_FEATURE (32)..(32): X=any amino acid
  MISC_FEATURE (44)..(44): X=any amino acid
  MISC_FEATURE (110)..(110): X=any amino acid
  MISC_FEATURE (123)..(123): X=any amino acid
  MISC_FEATURE (212)..(212): X=any amino acid
  MISC_FEATURE (224)..(224): X=any amino acid
  MISC_FEATURE (229)..(229): X=any amino acid
  MISC_FEATURE (232)..(232): X=any amino acid
LRIAVIGAMEEEVRILRDKLEQAETETVAGLXFYEKGIYPDLEXSWLKSGIGKVNAAMSTTILLERYKPEKVINTGSAGGFHHSLNVGDVVISTEVRHHDVEGTAFYYEXWQVPRNPPWDSRXEKPLVPLVEKCMQAEKKLFKVEKGYVGNGGFIMRNRNRVAPIRDKFEKSLAVEMEAAAVAQVCHQYEVPFVIIRALSDIAGKESKCSIXPIFRIKQLFHSXKPFWXKYXRV

SEQ ID NO: 45494 - protein, 757 aa, Bacillus anthracis
MAFVRAEKESAEKRKQDYEILAALEPLVIEKRAHEKVLEDESGQFPVNGMARYEAIKAKMEPLQLQVDSLYKKIETVQSEMESIQIDEEFLQKESYVEELRMQHMSYENARQEMRDVTGTITNIKEELAELEQQIGATFEKETVLSFDMSLATKELITQAVQKARELETQKAQLDDRFKVAQEQLEEQEENIRQIQKQMLADEERNTLVEKEKSFQDAAFIGMGAERMKRKYEEKAGAAMQKKKQWQRVCLLLLLINTGVLFTSLFIDNRLLLFISVIVFVGIVLALVLYKDPSSGLQEELLTLQQSAGGRQSEEAMTVRYQLEKDEEIRKLFERESYKLQQMERAYDKVVSSYEEWERETFRMSEQVNVYKKRYTFPEFYTYAHILPAFERMEKMQQLYRELEKQGTRKSSLYEMISQFEHKLETVIGSAEYSKLHEAQSRMQNEKEKRQTCKQLKEKLAEWQEEYALMQEQLKQLLVERDSLWHIAHSTDEEMFLEAGKLAEKREDAEKQVGRLLPQIDLLEQRLTSLSLAEHYEADGYDEKLKQEMTVMQNCLTKEKELTERIAKHRMEIANLEEGSTYGDLLHEWEMKKAQVREQVKKWAAYAAAKTVLTKTKQYYHKVHLPRILQKSEEYFVYLTGGRYSKIFSPSEAEPFIVERNDGMRFYSHELSQATAEQLYLSLRFALAKTFEHDYPFIIDDSFVHFDAVRTNRTIELIKEIAKDRQVIFFTCHAHLLAYFTEKQIIKLTHMRKENEL

SEQ ID NO: 45495 - protein, 611 aa, Bacillus anthracis
MSKIIGIDLGTTNSCVAVMEGGEPKVIPNPEGNRTTPSVVAFKNEERQVGEVAKRQAITNPNTIMSVKRHMGTDYKVEVEGKDYTPQEISAIILQNLKASAEAYLGETVTKAVITVPAYFNDAERQATKDAGRIAGLEVERIINEPTAAALAYGLEKQDEEQKILVYDLGGGTFDVSILELADGTFEVISTAGDNRLGGDDFDQVIIDHLVAEFKKENNIDLSQDKMALQRLKDAAEKAKKDLSGVTQTQISLPFISAGAAGPLHLELTLTRAKFEELSAGLVERTLEPTRRALKDAGFAPSELDKVILVGGSTRIPAVQEAIKRETGKEPYKGVNPDEVVALGAAVQGGVLTGDVEGVLLLDVTPLSLGIETMGGVFTKLIERNTTIPTSKSQVFSTAADNQPAVDIHVLQGERPMSADNKTLGRFQLTDLPPAPRGIPQIEVTFDIDANGIVNVRAKDLGTSKEQAITIQSSSGLSDEEVERMVQEAEANADADQKRKEEVELRNEADQLVFQTDKVVKDLEGKVDAAEVAKATEAKEALQAAIEKNELEEIRAKKDALQEIVQQLTVKLYEQAQAAAGQAEGAEGAQDAGAKKDNVVDAEFEEVKEDK

SEQ ID NO: 45496 - protein, 317 aa, Bacillus anthracis
MSTQYLNSNLKVFSLNSNKELAEQIAKHIGVGLGKCSVDRFSDGEVQINIEESIRGCDVFIIQSTSFPVNEHIMELLIMIDALKRASAKTINIVIPYYGYARQDRKARSREPITSKLVANLLETAGATRVITLDLHAPQIQGFFDIPIDHLMGVPILSDYFETKGLKDIVIVSPDHGGVTRARKMADRLKAPIAIIDKRRPRPNVSEVMNIIGNIEGKTAILIDDIIDTAGTITLAANALVENGASEVYACCTHPVLSGPAIERIQNSNIKELVVTNSIVLPEEKKIDKVHELSVAPLIGEAIIRVYEEESVSVLFN

SEQ ID NO: 45497 - protein, 170 aa, Bacillus anthracis
MEKKFMRESKAIKTTRVFPNDLNNHQTLFGGKLLAEIDSIASIAAARHSRKHCVTASIDSVDFLTPIHQADSVCYEAFVCYTGKSSMEVFVKVIAENLLAGERRIAATCFITFVALKDGKPSSVPQVLPETEEEHWLHKTGAERAESRKKGRVKSKEMAEVLTLSKPWSM

SEQ ID NO: 45498 - protein, 365 aa, Bacillus anthracis
  MISC_FEATURE (93)..(93): X=any amino acid
  MISC_FEATURE (175)..(175): X=any amino acid
MNYKVKFEHVTKKYKLYNKPFDKLKDLFFRSKDGEYHYALNNISFEVPEGEIVGIVGLNGSGKSTLSNLIAGVTMPNKGTVDIKGSAALIAIXSGLNGQLTGIENIELKGLMMGITKEKIKGIIPEIIDFADIGKFMYSPVKTYFSGMKSRLGFAISVHINPDILVIDEALSGGXSTFTKKCLDKMNEFKEPGKNIFFISHSLSRNKKFLYKALWLHYGQVKEYGDIKEIVDHYDEFLKKYNQMSVEERKDLEKEQISQFQHGLLQEDQTGRERKRKKGKKTSRKFKKKRVLITGVCIALLTGIISTGYYYKNLLPFNSENKYAEKVASKENVTESKQMVKKEKGAAKYIYNCSGSGIREEPDAS

SEQ ID NO: 45499 - protein, 441 aa, Bacillus anthracis
MKSSLKFSEMFAISLMLFALFFGAGNMIFPPALGQGAGTDVWIALFGFIVTGVGLPLLGVIVIALKGDINELAGRVHPIFALVFITAIYLCLGVFVSVPRTGTVAYEMSVAPFLPSEIAGQSYSLVIFTFIFFAVTFYLALNPSKLVGRIGKVLTPILLAVIAIIVGKALITPIGEFGAPTEAYSAPLFKGFIDGYLTLDGLAALVFGNVVIHALKEKGITNKNSIAKVTIFAGFIAALGLLLVYLALAYLGASSVSLGMGANGGIILTNVVNHLFGSYGTLLLGIAITAACLTTSVGIVAACGDYFSSLLPKLSYQKVVFIFCVLAFMVANLGLTQLNALALPILIAIYPIGIVLIVLSLVENYVRLPLAMYVGGIVGAFAISFFDGLHNANLQIAALAPILDKIPLYSVGIGWLVPGIIGIGFGYIVSKFQKQEVAVEK

SEQ ID NO: 45500 - protein, 486 aa, Bacillus anthracis
MEAFVNWLNNIVWSPALVYLCLGVGLYFSIRTRFLQVRHVGEMVKLTFQGEKSEAGVSSFQALALSLSGRVGTGNIAGVATAVAFGGPGAVFWMWAVAFLGAGSAYVESTLAQIYKTKHQGQFRGGPAYYIEKGLGVKWYALVFVAATILATGLLLPGVQANSIAVSLETAFGINTTLSGALLVVVLALIIFGGVKRIVNVAQVVVPFMAVGYILVACVIVAMNIEKLPEAFMLIIRSAFALEAAFGGIIGLAISWGVKRGIYSNEAGQGTGPHAAAAAEVSHPAKQGLVQAFSVYIDTLFVCSATAFMMIITGMYNVFDASGKNFIVNKLNGAQPGPGYTQAAVESVFPGFGNGFVAISLLFFAFTTIMAYYYIAETNIAYLNRDKDRPWLSMVLKFVFLGAVFYGCIKTAATAWALGDIGVEIMAWVNIIAILLLQKPALVALKDYEKQKKEGKDPVFDPGPLGIKNADFWEHEYGKGKKEEVS

SEQ ID NO: 45501 - protein, 446 aa, Bacillus anthracis
  MISC_FEATURE (33)..(33): X=any amino acid
  MISC_FEATURE (65)..(65): X=any amino acid
  MISC_FEATURE (117)..(117): X=any amino acid
  MISC_FEATURE (323)..(323): X=any amino acid
  MISC_FEATURE (393)..(393): X=any amino acid
  MISC_FEATURE (402)..(402): X=any amino acid
FQNKNILVLGMQKSGYAAATLLQSLGGKCYVKXRKPVSRKCTSLQISRQNEMVVVCAWSSFSIHXRGILSLVVKNPGIPYSNPILVAAKEKQIPIVTEVELAYRMSEAPFVGITGIXTVKRPTTMLTFEMLKRGQKHPGNWRGTLGLVPVESAPDAKENEVVVTELFSFQLMGVELFQPKIAAFLNLFEAHLDYHGTKKEYGLAKANIFKNQTENDYSVINADDADVMALSAYSKGQKSTFSTTKEIEDGACIKDNALYFKAEKVVEVDDIVLPGQHNLENILAAMSIAKLLGVSNEAITAVLKRFTGVKPSFEYVTTINTPXVLNDSKAANMLATEKALSAFTQPTVLLAGGLDRGNEFDDLIPYLKNVKAIVTLGQTAPKLVRAARKSGYXIQLKVSILXDEAVVKAYAHSTDGDVILLSPACASWDQFKTFEERGDIFIQAVH

SEQ ID NO: 45502 - protein, 309 aa, Bacillus anthracis
  MISC_FEATURE (122)..(122): X=any amino acid
  MISC_FEATURE (138)..(139): X=any amino acid
  MISC_FEATURE (260)..(260): X=any amino acid
MALLKVEDLKVHFPIKGGVFGRTLDYVRAVDGVSFELQPGETYGIAGESGKRKSTTGKAIMHLTKATGGSIHFNNRDLTKLSRSELREQRKDIQMIFPRSLFILNPKKRVMEIIPEPLWNFXETLPEKKRKAVSELSXXRSALNPESIYKYPHEFSGGQRQRIGIARALTLKPKLIIADEPVSALDVSVQAQVLNFLQDLQSELGLTYLFISHDLGVIRHMCDRIGGMYRGRIVEESTSAEIYYNPQHIYTKRLISAIPXYSVRKTEQQRKLRREVSAEYEKSYENYFNENGRAYDLKPISPTHRVALP

SEQ ID NO: 45503 - protein, 85 aa, Bacillus anthracis
MKAMPQLLKVLAHPVRLCMVKGLIERGPSNVSTMYTGLNMPQSTISQHLAKLKSAKIVSSERKGLEIYYKVENETIIQLVRVLLG

SEQ ID NO: 45504 - protein, 411 aa, Bacillus anthracis
  MISC_FEATURE (237)..(237): x=any amino acid
HLKRQDEKVFAAIEAELGRQRSKIELIASENFVSEAVMEAQGSVLTNKYAEGYPGKRYYGGCEHVDVVEDIARDRVKEIFGAEHVNVQPHSGAQANMAVYFTILEQGDTVLGMNLSHGGHLTHGSPVNFSGVQYNFVEYGVDAESHCINYDDVLAKAKEHKPKLIVAGASAYPRSLNFERFREIADEVGAYLMVDMAHIAGLVAAGLHPNPSPHAHFVTTTTHKTLRGPRGGNDLCXRTFAKQIDKSIFPGIQGGPLMHVIAAKAVAFGEALQDDFKTYAQNIINNANRLAEGLQKEGLTLVSGGTDNHLILIDVRNLEITGKVAEHVLDEVGITVNKNTIPFETASPFVTSGVRIGTAAVTSRGFGLEDMDEIASLIAYTLKNHENEAALEEARKRVEALTSKFPMYTDL

SEQ ID NO: 45505 - protein, 306 aa, Bacillus anthracis
  MISC_FEATURE (81)..(81): X=any amino acid
  MISC_FEATURE (109)..(109): X=any amino acid
  MISC_FEATURE (117)..(117): X=any amino acid
  MISC_FEATURE (128)..(128): X=any amino acid
  MISC_FEATURE (172)..(172): X=any amino acid
  MISC_FEATURE (183)..(183): X=any amino acid
  MISC_FEATURE (210)..(210): X=any amino acid
  MISC_FEATURE (213)..(213): X=any amino acid
  MISC_FEATURE (264)..(264): X=any amino acid
  MISC_FEATURE (278)..(278): X=any amino acid
  MISC_FEATURE (274)..(274): X=any amino acid
MKRARIIYSHASGRELYKKSFPEVLHKLDQAGYEASCHATTGPGIATVAARQAADSKFEVVIAAGGGGTLNEVVKRFSRAXTSSRKSEIFRGGTNYDFARAIRVPRSNXRGSKYYLXKEKLVPLKTWXKQPIHIFINIAGWRAPFTNLTFGSTRVSLRTVLGQLAYYLKGIXNAPSLHPNICXIEYDGKLLQEEITMFLITNTRSVGGLXKRXHPMHPFTIGLFDLLAAEKRSIADLIKAATQAQRGEHIINPKVLYTPANPNXSAFPDKLMIXFRWXIRGRCTDGIRKYIHCLELFVPEHQEDAL

SEQ ID NO: 45506 - protein, 432 aa, Bacillus anthracis
  MISC_FEATURE (265)..(265): X=any amino acid
  MISC_FEATURE (288)..(288): X=any amino acid
  MISC_FEATURE (315)..(315): X=any amino acid
  MISC_FEATURE (391)..(391): X=any amino acid
  MISC_FEATURE (409)..(409): X=any amino acid
  MISC_FEATURE (419)..(419): X=any amino acid
MPHQTFTQYDLNPFLIDAVREYRFTEPTGIQQKIFPVVKKVVSVIGHPQTGSGKTHAYLLPTLNRINPGREEVQLVITAPTRELAQQIYEEIVKLTKFCAEDQMITARCLIGGTDKQRSIEKLKKQPHIVVGTPGRIKDLVEEQALFVHKANTIIVDEADLMLDMGFIHDVDKIAARMPKNFAMLVFSATIPQKLKPFLKKYMENPEHIHINPKQVAAGNIEHYLVPSKHRNKIDLVNKMLLNLNPYLAVVFPEYKENGRDPGCXRINGNPGLKWNEFPEDFHPLDLXKMMKPNGDLKFPNLGCNDFTAPGFQFXRISHVINYELPSDLDFFVHRVGRTARAGHSGIAVTIYDPTNEEALDSLEKPRHIEVQHGNLPRKEWADLSETPSSXNRKKPNEELDGMATKGIXKAKKVKPNYXRQLATGPDQVEKK

SEQ ID NO: 45507 - protein, 118 aa, Bacillus anthracis
MIQTKDKIKVMRAEDLPIQIGKEVQMKGMSIALFRLSNGDIRAVENRCPHKNGPLAEGIVSGEFVFCPLHDWKISLLTGEVQKPDDGCIQTYEVEVINGDIYIYICNLQKEASPLASF

SEQ ID NO: 45508 - protein, 260 aa, Bacillus anthracis
MLKSYRAVLVSLSLLLVFVLSGCSNATPIDAHSTGIWDHYFVYPISFMIQFVAHHIPGASFGIAIIIMTLVIRSAMIPLAVSQYRSQAKMKKMQPELQKLKQKYGDVSKDLEKQKQYQKEMSELMKSGGWNPLAGCWPLLIQMPIFSALYYAISRTEEIRTSTFLWVNLGHADPYHILPIIAALTTFIQMKVFQSNSTSGEQVQMLKMQQIMMPAMILFMGFAAPSGLVLYWITGNLFTMMQTIVLRKIMEREELQLQKA

SEQ ID NO: 45509 - protein, 1177 aa, Bacillus anthracis
  MISC_FEATURE (14)..(14): X=any amino acid
  MISC_FEATURE (66)..(66): X=any amino acid
  MISC_FEATURE (120)..(120): X=any amino acid
  MISC_FEATURE (204)..(204): X=any amino acid
  MISC_FEATURE (479)..(479): X=any amino acid
  MISC_FEATURE (549)..(549): X=any amino acid
  MISC_FEATURE (626)..(627): X=any amino acid
  MISC_FEATURE (663)..(663): X=any amino acid
  MISC_FEATURE (689)..(689): X=any amino acid
  MISC_FEATURE (751)..(751): X=any amino acid
  MISC_FEATURE (808)..(808): X=any amino acid
  MISC_FEATURE (853)..(853): X=any amino acid
  MISC_FEATURE (866)..(866): X=any amino acid
  MISC_FEATURE (895)..(895): X=any amino acid
  MISC_FEATURE (916)..(916): X=any amino acid
  MISC_FEATURE (1046)..(1046): X=any amino acid
  MISC_FEATURE (1051)..(1051): X=any amino acid
  MISC_FEATURE (1055)..(1055): X=any amino acid
  MISC_FEATURE (1085)..(1085): X=any amino acid
  MISC_FEATURE (1087)..(1087): X=any amino acid
  MISC_FEATURE (1110)..(1110): X=any amino acid
FVIGRAGSGKSPLXEALKCKKNLKTAPQGGETNFIFLAPEQMAFPTQQALICHEDFRGFIRAPKFXFSRLAWKVFQEVGGASRLHIDEAGVTYVTRKIVKSRKDGLSVFQKAAEQKRVLXHLGSMIAEFKRYNVTPSNVYEMWQQLDAHSSSAEQKLLANKVYDLQLLYDDFERALIGKYLDSEDYLQLLVEKLPQSEYVKGSXSLYRGFHSFSPARVRNCRQLMICGARVTITLTIDEKTLAQPVNELDLFYETTLTYEKIKQVAREEKIEIEKTIPLMEQPRFHSPAFNAFKNAYEARPNEKFHGEASVTIHTAANLRAEVEGVAREIRRLVAEENYRYRDIAVLLRNGESYYDVMRTLFTDYNIPHFIDEKRPMSHHPLVECIRSALEIISGNWRYDAVFRCVKTELLYPLDVRKETMREEMDEFENYCLAYGVQGKRWTSEDPWMYRRYRSLDDTNGMITDSEREMEEKINRFAXRCKNAVIRMQKRLKRAGTVMQMCEAVYLFLEELDVPKKLEALRIRAEENGDFLFATDHEQVWGRSYESSXYVVEMLGEEKMSLSMFTDVMSTGLEALQFANIPPSLDQVLIANIGSSKIIKCESPFVIGVDERVLSSSTDGRKDAFXXRKRCFSAAGIELAPTTRQTLLEEQFVMYKMGNESNXEIIYFMPAANVGGENFTCVLALIRKXKNVPPDVKDTFITNDVNDLSRLEQISYCSNAGSNTVICYAATANVEAYGFVREFRLLVGCIXFSRNLRMKWKAKKVGRVIIQVLFLTENRAAKSLSTAVSIDLYGRQNKRKRFSYGTIXSLCYAHFAQHGLSLRERDIFKLDAPDIGELFHAALKRIADRLITXKSYWGRFINKRVXASFCCSNRRIAPLLQRQILLMFKPVLSIXNKNFHQIISGRQSFFVPCEVXRFRPVDLEVPFGMGGTGSLRRWEFSLPNGVKMEVVGRIDRVDKAEDENGTFLRIIDYKSSSKALDLTEVYYGLALQMLTYLDVVTSNAQTWMKKGGTASPAGVLYFHIHNPIVEVKGDASEAEIEKGNFXEISKXKVFXQEDADVVRLWITNFPPEFQILFLLVKKGRXFXCAFSIASEQEFTVLQKYVHHTFXKYREKTLTEVVIGYLLHTKKGNKAAWTFCNFQSVCQFDESLEDNQFRTLKDMKDSEAMEKIREEVGG

SEQ ID NO: 45510 - protein, 311 aa, Bacillus anthracis
MAKKGNVLQQLGSLIGLALIIVVITALNPAFIEIPNLFNILRQVSINALIAFGMTFVILTGGIDLSVGSILALSSALVAGMMASGMDPFLAMAVGLLAGLVMGIVNGIIIAKGKVAPFIATLATMTIFRGLTLVYMDGRPITGLGDHLMFQMFGRGYFLGIPVPAVTMMIAFAVLYFILKKTTFGRRTFAIGGNEEAAALSGINVTKIKVMIYGLSGILAAFAGIVLTSRLDSAQPTAGTSYELDAIAAVVLGGTSLSGGRGWIVGTFIGVLIIGVLNNGLNLLGVSSFFQQVVKGLVILLAVLIDRRKEA

SEQ ID NO: 45511 - protein, 161 aa, Bacillus anthracis
MCWKVIFLFEIEKMQKQYPHITFSVVPPFSTHPHMVELVVKRIREAMPMQNSSILLVGRGSSDPQPIHELQQIGVAVEQKLGMRVCCSFLTKGTPSFTAELKTITSTASHVYVMPYLLFTGLLLQKIKLHTKKYDHVTTCNCLQLASIYEINITTNEWIQT

SEQ ID NO: 45512 - protein, 325 aa, Bacillus anthracis
MAQMTMIQAITDALRVEMKNDPNVLVFGEDVGVNGGVFRATEGLQAEFGEDRVMDTPLAESGIGGLAVGLALEGFRPVPEIQFFGFVYEVMDSISGQLARMRYRSGGRWTAPVTVRSPFGGGVHTPELHADSLEGLVAQQPGLKVVIPSTPYDAKGLLISAIRDNDPVIYLEHMKLYRSFRQDVPEGEYTIDLGKADIKREGTDVSVIAYGAMVHAALKAAEELEKEGISLEVVDLRTVQPLDIETIIASVEKTGRVVVVQEAQKQAGIAANVVAEINDRAILNLEAPVVRVAAADTVFPFSQAESVWLPNHKDIVEAVNKVMNF

SEQ ID NO: 45513 - protein, 485 aa, Bacillus anthracis
  MISC_FEATURE (307)..(307): X=any amino acid
  MISC_FEATURE (483)..(483): X=any amino acid
MYNTEMDETLKIINRELKKTTSPKQIIVVGAGMAGLVSASLLKAAGHEVKIFEANNRVGGRIETVRMEDTGLYLDVGGMRNPYSHTLTMAYIRKFGLQVSPFINRNETDIIYVNGRKTTLKQYEKDPSILKYPVEMNEVGKTSEELLLLAVQPIINFIKKNPEKNWDVVVKDFGRYSTGQFLKYHPYQYNTYFSPVTIEMIGVLLDLEGFLERSFVETLRFLYIMQEESGFCEIVGGNDRLPKSFLPQLEENIIYNQKLMKLPSRDNGVTAFYRNEETFEYSSITGDLVIGTIPVFTMRFVESEPLXSISHEKWKAIRELHYMPSNKIGIQFKSRFWEEQGQLGGRIITDLPIRYAYYPSYGIGEKGPAMMLGSYTWSYDALLWDGLSKGDRIYYTLQNLATILGGQVYDEFLSGISKSWTLDPYALGGFCVIPAGQNSEFQPAIVNQEGRIFFAGDHTTLYHGWIQGAMKSGFRVAEEVNEXNM

SEQ ID NO: 45514 - protein, 483 aa, Bacillus anthracis
  MISC_FEATURE (427)..(427): X=any amino acid
SERLASLPGVDTTVDWEREYPNDKILRSILGSVSTENEGLPREQLDYYLVRDYNRNDRIGKSYIEKQYEDALHGTKEQSRSITDKAGNIIRTEKVTEGKSGNNLMLTVDMELQKKVEGSLEKNLRAFHSAEPMMDRAFVVMMNPKNGQILSMAGKKIVNKDGGMQIEDYALGTMTSSYELGSTVKGATLLAGYQTDTIKPYTHFFDAPMYFKGSSKPKKSWKDFGDIDDLRALQVSSNVYMFNTALKMAGINYVPNNPLDIKQETFNKMRYYFRQFGLGVPTGIDLPNESIGQMGRTDNIPGFLLDYAIGQYDTYTPLQLAQYISTIANGGYRMKPQIVQEVREQPHRPEDVGKVIRSIEPVILNRVDMNTSYINHVKEGFRRVFQENDGTGTATFKGLPYKPAGKTGTAETVYGGESEIGRDENQXSKKCYNLTLAGYAPYDADPEVAFSVVVPWVNDDKSGINSAIGKEILDAYFELKAKR

SEQ ID NO: 45515 - protein, 323 aa, Bacillus anthracis
MEIAVERVFTKEIVKRAASLFHVTVDEKPLGDFENYIFKAKGDRGEDYVLRLTHSSHRSKQGVEAELDFLRYVAENGAKVAGPLYSTSRNLVEEIVAEDGTFFFASLFTYAKGEQVKGEESPYWGDAYFEAWGKAIGQLHRLTMNYPKTNHRDTWEEDESGIVNELEDDQVKKIATVLMDEIKALPVERETFGLMHGDIHPGNFHYDGKELTIFDFDDAAYNYFIHDLAMVLYYSVLFTPWTAEEKTDFARKQLQVLRKGYEYEHRLADSWYESLPLFLRLRDIGLYGTLQKKFKGKDMPDNFQKLSEELYERIISEEPIVNI

SEQ ID NO: 45516 - protein, 332 aa, Bacillus anthracis
  MISC_FEATURE (93)..(93): X=any amino acid
  MISC_FEATURE (102)..(102): X=any amino acid
IKLSVLDQSPISDGSTATQAFSHTVTLAQEVEKLGYTRFWVSEHHNSVSLAGFSPEILISHIAAKTERMRVGSGGCMLPHYSPYKVAEDFPVXEALYPNPIXPGVRRSTWGMPIATRALQEGKMVSLDQYPEQIADVAMYLHDQVPENHHYANLKATPVIPTSPDMWLLGSSGESAKIAAQQGASFAFAQFINGYGGPEVMEANQKQFQPSYLGDKPKSIVAIFVIAGETNEEAEKIASSLDLSILLLEQGKRTTGTPSIETAQNYSYSTYDLFRIKENRQRMIVGDPSSVKEKIINLSKAYNTEEFMIVTITHRFEDKLNSYRLLANAFNL

SEQ ID NO: 45517 - protein, 414 aa, Bacillus anthracis
  MISC_FEATURE (136)..(136): X=any amino acid
  MISC_FEATURE (412)..(412): X=any amino acid
LMLWRSVVGKLWMTILLLVSFVLGFVAILLSQFFRTYYVDMSEARLQKVATSVSELIEEGADVKTIENIAYKFSDPLSRIIIVEEGKEISSSPKQEGLVTLTIDDLKEDKELAAVFTDKKEIKNKVRKASNSRKNXNPGNDYMIVGKPGQSKNESAVFVYESLQVPIQGMERTTDFIFLSAGIAIILTTFFAFFLSTRITAPLRKNAEVAFEVSRGKFDAKAPMVSQDEIGELATALNQMGKQLKFNMNALQQEKEQLASILSSMADGVITLNQEGEVVVINPPAEHFLQVWQEEKEIELSKKLPSELVEEKPSRCRSEQQQVVGINLQKGNYVVLMTPLYNQTKIRGAVAVLRDMTEERRLEKMRQDFIANVSHELRTPMVMLQGYSEAILDDIVQTKEEINKCSNHYDEXVK

SEQ ID NO: 45518 - protein, 421 aa, Bacillus anthracis
  MISC_FEATURE (102)..(102): x=any amino acid
  MISC_FEATURE (416)..(416): x=any amino acid
MLDIKFLRTNFEEVKAKLQHRGEDLTDFGRFEELDTRRRELLVQTEELKSKRNEVSQQISVLKREKKDAEALILEMREVGEKVKDLDNELRTVEEDLERLMXSIPNIRHESAPVGEAEDDNVVARTWGEVKEFAFEPKRHWDLATDLGILDFERGGKVTGSRFVFYKGAGAKIRRALISFMLDLHTDEHGYEEVLPPYMVNRASMTGTGQLPKFEEDAFRIESEDYFLIPTAEVPVTNMHRDEILNKEQLPIRYAAFSSCFRSEAGSAGRDTRGLIRQHQFNKVELVKFVKPEDSYEELEKLTNDAERVLQLLELPYRVMSMCTGDLGFTAAKKYDIEVWIPSYGTYREISSCSNFEAFQARRANIRFRREPNGKTGTCSTFKWIWLAIGRTVAAILKDYQKEDGTIYNSRNSPPXYGEEK

SEQ ID NO: 45519 - protein, 444 aa, Bacillus anthracis
MRQNVRELALDGLIQVEKSGAYSNLLLNNLIEKSTIDRKDIGLLTEIVYGTIQRRDTLDYYLQPFLKKKVEAWVRVLLRLSLYQMIYLDRVPERAAIHEAVEIAKRRGHKGIAGMVNGVLRSIQREGVPSVDEIKDPVERLAIATSHPVWLVQEWTAEYGLETAEKMCEVNMLPPVPTARVNVDKITVEEAITLLASEGIEAKRGDLSDDAIQIEKGNVAHTDAFKKGFLSIQDESSMLVARALEPDEGDVILDSCAAPGGKTTHIAERLKGTGQVMSLDLHAHKVRLIKQQAERLGLENVETKALDARKVQEHFANETFDKILVDAPCSGFGVIRRKPDIKLGKDKGDSERLSMIQFAILEKIAPLLKQGGRLVYSTCTIEKIENEQVIERFLQEHPEFEWDTTIKERMPEKLSPYMDEGQVQILPHYFATDGFYIACLRKKV

SEQ ID NO: 45520 - protein, 120 aa, Bacillus anthracis
  MISC_FEATURE (106)..(106): X=any amino acid
MLSALIPSAHSYPAMPLAEQLVHQRCVHPGPLVLRTAPLKFPTPTTDRDRTVSRRSEPSSRTALMGEQPNPWDRLQPQDAMSRHRGAKPPRRCGLLGEISLLSPGXLLSVERWPFHAGPP

SEQ ID NO: 45521 - protein, 888 aa, Bacillus anthracis
  MISC_FEATURE (3)..(4): X=any amino acid
  MISC_FEATURE (23)..(23): X=any amino acid
  MISC_FEATURE (26)..(26): X=any amino acid
  MISC_FEATURE (126)..(126): X=any amino acid
YLXXFIMWQCLFYMNTHFPFKYXLEXVLYSLILSLVVIYFIFQNMKEGLPRLFWTILCVGTLSYFIGDIVVAYQRLILKDYYTFVDPSDFFYLLFLISFAFAFLYEIIYNRDLLEKLFMICDICIIVTAQFTLSYYLLIERTIHVFTTSYIDIFVQLTYPMADLLFLLIGINLLFRPLSLLPKKVGALLGSALLLYATTDAIYAFIKYFTPEYSMFTVTPLYQVTLVLVAIACIIHTKEPEKQEQILLTPKLGESIRLSLPYISVVMLIVFILVEYVFAPIVVIGLIITFSFVLIRHSLVRKQNKLLLLAQMQFNSELEKQIELRTEDLVEQKNELYHNQQMFKSLYEHHPDPIFTLDLYGNFLKVNNAGTTLLGYQTNELLNQPYYSLIYEEDLEEIINTFHRVKKGHSISLEIRAYHKNRDIYYLHVTAVPIFLKDHISGVYLMIKDITESKQQQEQINFLAYRDTLTELANRRAFHQYVEQAIARSKISKRPFAVMFLDLDRFKIINDTLGHRVGDLLLIAVAKRLERMATPNMKLARLAGDEFTILIENYNKRPDVKRMADTIVEAMNEPFEIENQHLQISPSIGIAIYPEAGEDPLSILQHADMAMYEAKNRGKNGSSLYTKELYKKMERKARIEKDLPLALVNKEFYLVYQPQIDITTKKIIGAEALLRWKHPLLGDIPPCEFIPIVEETPQVIPLGHWVLQESCRQLTIWHSFGYKDLNISVNLSAKEFQQDHLIENISQILTDVKVDPKYVTLELTERIAMIDEKETLSRLKQLKEYGIQTSIDDFGTGYSSLAYLSIFPIDTLKVPREFTQLADHRPEERAIVSTILSLANTLNLSVVAEGIETEKQLKFLQRNNCKYMQGYYFSKPLTSQQFIKFLQK

SEQ ID NO: 45522 - protein, 450 aa, Bacillus anthracis
MKNVKFFLMSWLCIHVCLLFPLQSKAEEQNVPEQNINEVNVQEENKEVQEQLEQVEMKQDKEEQQEAKNEQETEKKIETDQGVITVNKPELKVGEEVLVTIEPKEKNVQSIKGILRLPKNGDQYEQERMLSFKYEEETKRWIANYKVETFDLQGDWNLQLVQSYKENEKEELVENEVKVPLIHINNEMPTLDKELPKLHKVTIDEMKGNVIERKQGDSIRVRVKATDVESAVKEVHVTLKGKENKEITFLLDYNKRDMDWQKVFEITDALPSGTYELLVEVVDAAGNKLIEASEYVVSVLEQKTEEDKKIEEPENEDKLENKLEDKKVTEKQEDSKVEISLPEEKTPVVQIPKKEEKVNDLIKEPLKEKEKITYVIKEPLTDNKEVNKTKAQKDKDNNNQVISKKKEKKEEPEEKKEAKSEQGIQASNVFAIMSGLFVLFLVLKSNKEWG

SEQ ID NO: 45523 - protein, 514 aa, Bacillus anthracis
MRTKKRLLRLYGIGGESVMDKLMENHWFLKGISLLLACMLFMSATLTEKNTTSGILPFANDAKETLTNYAINVKYDEEKYIVSGIPAEGVKVKLEGPKAAVATAKAKKQFDIPVDLRDSEKGTYEVSLKTNGLPDDVKGTVQPSTIKVTLHEKARKYVHVDLKLSNEDQMPAGAILEKSSLKPDTVEVVGTKEEIESISSAKAYVDLKGVNKTVTKTPEVTLYNKEGKRLNVRTSPSKISVTLNVATQATANNTEKTVPIAYTKKGSLPEGLAVTNISVEPREVTIAGPKDILDNIQSIEGVEVDLSQLTESTTFDTSVLLPKGVTSAKPNQVKVSVGVQKTKQTKTRTIDGISIQKNGLSKDVTAQLLSPQDGKISVDISGETSIVDKIIANQITAVINLQNVSPGTKDVAIQVSGPSNISIEPKQKSAKVTIVKKENPDKEVQGNGEQPNSNNNQDNQDNQTEKPKNPEPEPNPDPDPEKEKEPEQNKDKETSQEPTVDNQKEPEKGANHNG

SEQ ID NO: 45524 - protein, 338 aa, Bacillus anthracis
MKKILNTDKKRAITVTTIFGCIGIAVILISLNTGTLSIAPLKVIQTLFGYGDFESATVLYDYRMPRIIITMLAGIGLGISGAILQGLSRNALADPGILGLHSGASFGLIVFVTFFHSINENASILIPLFTFGGGVLAAFLIILLASDRSKGLLPIRLILVGIAVSAGFSAISLFFSLKLNDETYTFASRWLVGNVWGRDWIHVLALLPWIFILTPYAWLKSKTLNALSLGDSVAAGLGVSVQKERLLLLATAVGLSCGSVAMAGGIGFIGLVAPHIARKLVGTTYQHFLPLAGIIGMIILVLADTIGRSIFEPNSIPAGVVVAALGAPYFLYLLTKTK

SEQ ID NO: 45525 - protein, 45 aa, Bacillus anthracis
MSKTVVRKNESLEDALRRFKRSVSKTGTLAEARKREFYEKPSVKG

SEQ ID NO: 45526 - protein, 399 aa, Bacillus anthracis
  MISC_FEATURE (126)..(126): X=any amino acid
VGKVKEISKRKLLGIAGLGWLFDAMDVGMLSFVMVALQIDWGLSTQEMGWIGSINSIGMAVGALVFGILSDKIGRKSVFIITLLLFSISFGLTALTTTLSMFLVLRFLIGMGLGGELPVASTLCIXRVYEAHERGKIVVLLESFWAGGWLIAALISYFVIPKYGWEVAMILSAIPALYALYLRWNLPDSPRFQKVEKRPSVIENIKSVWSGEYRKATIMLWILWFSVVFSYYGMFLWLPSVMVLKGFSLIKSFQYVLIMTLAQLPGYFTAAWFIERLGRKFVLVTYLMGTACSAYLFGVAESLTVLIVASMVLSFLLLGAWGALYAYTPEQYPTVIRGTGAGMAAAFGRIGGILGPLLVGYLVASQGSLSLIFHDFCGSILIGVFAVIILGQETKQREL

SEQ ID NO: 45527 - protein, 132 aa, Bacillus anthracis
MVMTDPIADMLTRIRNANMVRHEKLEVPASKIKKEIAELLKREGFIRDVEYIEDNKQGILRIFLKYGANNERVITGLKRISKPGLRVYAKADEVPRVLNGLGIAIVSTSKGVMTDKDARQLQTGGEVVAYVW

SEQ ID NO: 45528 - protein, 433 aa, Bacillus anthracis
MNSNEIYVSLDIGTSNVKVIIGEMVNDSLNIIGVGNVKSNGLKKGSIVDIDETVRSIKKAIEQAERMVGIHIEQVVVGVNANQVQLLPCHGVVAVSNEDREIGNEDVLRVLDAAQVVSIAPEREFIDVVPRQFIVDGLDEINDPRGMIGVRLEMEGTLITGSRTLLHNLLRCVEKAGLEIVDICLQPLAAATVAISSDEKNRGVALVDMGGGSTTLSIFKDGELQATSVLPLGGDHITKDIAIGLKTSTENADQIKLKYGHAFYDTASEEEMFTVPIMGSDQTEQYSQLELSDIIEARVEEILMFVQDEVRKLGVKQVASGYVLTGGIASMPGVLDLAYDILHENVRIATPDYIGVREPQYTSGVGLIKHSYQKAKLRGKNVQEKQEHFEPVPAPAPVQQQPAKQKTRNQNNNNQNDDRMMSKVKRVFRYLWD

SEQ ID NO: 45529 - protein, 103 aa, Bacillus anthracis
  MISC_FEATURE (48)..(48): X=any amino acid
FFGGGPKRKIWPQFLSGVLVFLKSPVGKEASSLGIGFPAGLVLHIFIXGRDAETFVQWEQTFEPVTENHELYKEFYETWKTVYNSQLALADNGLTSHMWIAPG

SEQ ID NO: 45530 - protein, 1203 aa, Bacillus anthracis
MIDVNNFEYMKIGLASPDKIRSWSYGEVKKPETINYRTLKPEKDGLFCERIFGPQKDWECHCGKYKRVRYKGVVCDRCGVEVTRAKVRRERMGHIELAAPVSHIWYFKGIPSRMGLVLDMSPRALEEVIYFASYVVTESGDTPLDKKQLLSEKEYRAYRDRYGSTFQAAMGAEAIKKLLQDIDLDKEVDFLKEELKTAQGQRRTRAIKRLEVLEAFRNSGNEPSWMILDVLPVIPPELRPMVQLDGGRFATSDLNDLYRRVINRNNRLKRLLDLGAPSIIVQNEKRMLQEAVDALIDNGRRGRPVTGPGNRPLKSLSHMLKGKQGRFRQNLLGKRVDYSGRSVIVVGPNLKMYQCGLPKEMALELFKPFVMKELVEKGLAHNIKSAKRKIERVQPEVWDVLESVIKEHPVLLNRAPTLHRLGIQAFEPTLVEGRAIRLHPLVCTAYNADFDGDQMAVHVPLSSEAQAEARLLMLAAQNILNPKDGKPVVTPSQDMVLGNYYLTLEREGAIGEGMVFKDANEALLAYQNGYVHLHTRVAVAASAVNNVTFTEEQKNMLLLTTVGKLIFNEILPESFPYINEPTNSNLEKETPAKYFVEKGANIKEIIASREEVAPFSKKILGNIIAEVFKRFKITETSRMLDRMKNLGFKYSTKAGITVGVSDILVLGEKDEILHEAQAKVDNVIKQFRRGLITEEERYDRVISIWSNAKDVIQGKLMKSLNKRNPIFMMSDSGARGNASNFTQLAGMRGLMANPSGRIIELPIKSSFREGLTVLEYFISTHGARKGLADTALKTADSGYLTRRLVDVAQDVIVREDDCGTDRGLLIGAIKEGNEVIESLYDRLVGRFARKTVKHPETGEVLVAENQLITEDIAHIVENSGVETVNIRSAFTCNTRHGVCKKCYGRNLATGTDVEVGEAVGIIAAQSIGEPGTQLTMRTFHTGGVAGDDITQGLPRIQEIFEARNPKGQAVISEIDGVIAAINDVKDRQEVVVQGEVEARTYAIPYGARLKVIPGQKISHGKELTEGSIDPKELLKVTDITAVQEYLLREVQKVYRMQGVEIGDKHVEVMVRQMLRKVRVSDAGETDVLPGTLLDIHQFTDANAKVLLQGKQPATARPVLLGITKASLETDSFLSAASFQETTRVLTDAAIKGKRDELLGLKENVIIGKLVPAGTGMNRYRKVDLVKTTQDDMNVENDEVYVEQ

SEQ ID NO: 45531 - protein, 270 aa, Bacillus anthracis
MKKVLLSIVSGAVLLLGACSAGSDKEVKALDEKKITVGVTGGPHEQIFEKVKEVAAKDGLEIDVKVFNDYVAPNVSLDEKSLDVNSYQTKSYLDVFKAERNMKLTEVFSTVTFPMGVYSKSLKDVKDLKDGDAIAVPNDPTNELRALKLFEKAGVLKVDPKATEKATAKDVIENPKNLKIVELEASQLPTQLSEVKAAAINTNFALGAKLSPAKDSIFREGKDSPYVNWVVVRTENKDDAVVNKLKKAYQSKEVKEFIEKKFDGSVLPSW

SEQ ID NO: 45532 - protein, 806 aa, Bacillus anthracis
MFVSYRWLQEYVDIKDVTAQELADKITKSGIEVEGVEVLNKGVKGVVVGHVLECEKHPEADKLSKCLIDIGEEEPVQIICGAANIAKGLKVPVAKVGAVLPGNFKIKKAKLRGEASHGMVCALQELGIDGKLVSKEYADGIFIFPSDAEVGADALEILNLHDEVLELGLTPNRADCLNMLGVAYEVAAIYGREVKLPAIDLQETAEKTSDYISVSVEAKEENPLYIAKMVKNVKIGPSPMWMQTRLMAAGIRPISNVVDITNYILMEYGQPLHAFDYDKLGSKEIVVRLAKEGEKIETLDDQERTLQSHHLVITNGTKALAVAGVMGGADSEVTNETVNVLIESAYFAGQTVRRTSKDLGLRSESSARFEKGIDPTRTFEAIQHAAALMAKYAGGEALEGVVEADNLQVQERTVSVTAEKVNRVLGTNISASEMGTMFTNLKFPFTEVEGTFHVNVPARRPDITISEDLVEEVGRLYGYDHIPVTLPSGTMTRGKLTAAQTKRRKVRRFLEGAGLYEAITYSLTSADKAKQYMVEPNEKAPVNLALPMSEERSQLRLSLVPQLLEAVSYNVARKNDSVALYEVGSIFLPTEAGELPKEEQHLAGVMTGLALHHAWQGEKKVVDFFVVKGVLEGLFDVLGVSNQITYAPAKREGMHPGRTADIVLDGEVIGFIGQLHPEAEKQLDVKNTFVFELSLVKVFGTDAEETYYSAIPRFPSMTRDMAVVVTKETKAGEMKQVIAEAGGELLKDVTLFDLYEGEKMEEGKKSLAFSMNYFDPERTLTDEEVTEAHNRVLTAVEEKFGAELRK

SEQ ID NO: 45533 - protein, 411 aa, Bacillus anthracis
  MISC_FEATURE (211)..(211): X=any amino acid
VIAEVKRASPSKGDINLHVDVRKQVKTYEECGAGAVSVLTDGQFFKGSFYDLQTAREESSIPLLCKDFIIDKIQIDRAYEAGADIILLIVAALTKEKLKELYSYVLEKGLEAIVEVHDEQELEIAIQLNPHVIGINNRNLKTFEVDLSQTEKLGKRLNEEKLLWISESGIHSKEDIIRVKRAGAKGVLVGEALMTSSSIHTFFEDCKVNIXKVKICGITDMETAKRACEYGADALGFVFAESKRKITPGLAKEIIQELPANVLKIGVFVNESVEVIQKITGNCGLTHVQLHGGEDNHQIRRLNIPSIKSLGVTSESDMKNAQGYETDYILFDSPKEKFHGGNGKTFPWELLAHMPKELREKTILAGGLNTLNIEEAIRTVRPYMVDVSSGVETEGKKDVEKIKQFIIKAKE

SEQ ID NO: 45534 - protein, 136 aa, Bacillus anthracis
LQITANDKGITSVIFVDERQEEHTNEMIDQCINELDEYFKGNRKEFTVPLSPEGTAFQKNVWDALYTIPYGVSASYLDIAEKVGNTKAVRAIGGANSSHPVSKLVPVSWLIRKEAGILVGYAGRFMEEKGGFLNRE

SEQ ID NO: 45535 - protein, 579 aa, Bacillus anthracis
MKIMDYYIRLRLHAQDQQHIRNSLQELADVLYCSTKNVKILLKKMSEEQLISWTPGRGRGNKTEILFSHNFVEAIESYTDELLAQEKLKDVFLLLKEPLPPALQKKIENKLHHHFGYEPSNDMYDILKIPISRKIFPLDPAFVAVTTESHLTSQIFDTLVVYNDVTEKMEPHIAHTWELSEDWLTWTFYLRKDIHFHNETILTSKDVQFSFERLKEVHSPFEWLTEEIVQIETPSPLQIRFHLAKPNLFSLHYVSSIQLAILPRDVSIENHHYIGTGPFKLAHYSEDNIVLEAFTHYFKERALLDRIEFWGIPDHVQIDADYELPNEEENERHDIQIEEIGCIYAGFNFTKPGPHHDMYFRKAWRELYDVETILRSIEGRRTIAASSFFPERSRQAFKRSYSLEKAKKYLKKSTYNGEAIHIYFFAFKDSANDAYFLKERCDGLGIQVELHPFLVSDYMNRSIDQHADIIFMGEVFASNHELAFLNVFKNKSCFVNRFMDQHYEKQINCLLDTFLLEENKEKRYELMYEIEEFLQAEHIILFNYHVLKRKTYPSSLKNVTIDSFGWANFAKLWIQPSMS

SEQ ID NO: 45536 - protein, 299 aa, Bacillus anthracis
  MISC_FEATURE (183)..(183): X=any amino acid
  MISC_FEATURE (185)..(185): X=any amino acid
VKIAISGGTGFIGTYLSTFFIQKGYTVYILTRKKTTETSHPNLQYVQWTPDLQTFPLSSIDVVINLAGESINSRWSKKQKKIILNSRISTTKGLIIQLQALPCKPHTFITASAIGYYGPSEPESFTEQHVTPGNDFLANTVYSWEQEASKARSLGIRTIYARFGVILGPDGGSPSPNRVFPYXLXIGSSNGFGNPMLSWISLRRCRFSIVFFLPKKKIEGRLTITVPDLKRMKGLGDTIATIMKNPHWSPVPSFMLHALLGEMSILVLEGQHVFLSKAIEHGYQYTFPTIAHALQNILS

SEQ ID NO: 45537 - protein, 89 aa, Bacillus anthracis
  MISC_FEATURE (3)..(3): X=any amino acid
  MISC_FEATURE (20)..(20): X=any amino acid
  MISC_FEATURE (23)..(23): X=any amino acid
  MISC_FEATURE (68)..(68): X=any amino acid
GSXLEKGPLSMSFMSKMQSXMNXAKASGKTGSRRSTIFPQFIGHTIAVYDGRKHVPVYVTEDMVGHKXGEFAPTRTYKGHDADDKKSRR

SEQ ID NO: 45538 - protein, 487 aa, Bacillus anthracis
  MISC_FEATURE (135)..(135): X=any amino acid
  MISC_FEATURE (143)..(143): X=any amino acid
  MISC_FEATURE (175)..(175): X=any amino acid
  MISC_FEATURE (302)..(302): X=any amino acid
  MISC_FEATURE (355)..(355): X=any amino acid
  MISC_FEATURE (356)..(356): X=any amino acid
  MISC_FEATURE (388)..(388): X=any amino acid
  MISC_FEATURE (389)..(389): X=any amino acid
  MISC_FEATURE (406)..(406): X=any amino acid
  MISC_FEATURE (413)..(413): X=any amino acid
  MISC_FEATURE (416)..(416): X=any amino acid
  MISC_FEATURE (429)..(429): X=any amino acid
  MISC_FEATURE (465)..(465): X=any amino acid
RRKKLHTLRSKEIDPFGKRFERTNAPNDLLSLYGESSKEDLEEKEISVSIVCRIMTKRGKGKAGFAHIQDLHVPVQIYVRKDVAGDEEYELFKTADLGDLVGIEGKVFKTNVGRTSVKATGFTLLTKSLRPLPGXIHGVKRCXTRYRQRYLDFIYQYGKVVKHFVTRSKIIFAKXRRSLDDHRLLEVGTPYDACNCGGAFARPFITHHMALDMELYMRIAIDLHLKRLYCGWIRKVYEIGRVFRNEGVSTRHNPEFTMIELYEAYADYKDIMKLTENMVAHIAKSSTRYNNNPNMVIMKLIXNQNGHAFNMVDAIKEHSGARFLESDECRRSVVNLQKKHDVEIKDTNGSWSYYXXILEQKVEDKLIQPTIFLPVIRVEISPTCEKEXXRIPISRIRFEIVYRCTXTCNAFTXAKXSNPIPKNVLKRHXKTPNKGNDQAPMMDDDYIEALEYGMSSYRWTRNWYXSLVMLLTNAPSIRDVLLFPAMR

SEQ ID NO: 45539 - protein, 333 aa, Bacillus anthracis
  MISC_FEATURE (130)..(130): X=any amino acid
  MISC_FEATURE (140)..(140): X=any amino acid
  MISC_FEATURE (212)..(212): X=any amino acid
  MISC_FEATURE (215)..(215): X=any amino acid
  MISC_FEATURE (216)..(216): X=any amino acid
  MISC_FEATURE (324)..(324): X=any amino acid
KNVSVLTILVGLIVTVFLVSLNTGTLKSPPMDVIKSLVGLGAEDQFVILFEFRKPRMVIAIIGGFALGKSGGILQGLSRNPLGDSGIIGINAGAGLTVVIFVYFFFGKVGTGTFLSVLSFPFFALVGGDXAAGYYYLLAXKDGVSSTRLILVGIAVAARVWCCSLIFSMKMTSNDFRFCLGFGIAGKFFGGTRLGSFVLSVLSMEWLFSGHXVIXXRHTFLNVVTLGRLYSQWVFGVNVEKERRKLLFIAVCLARCICRCCGGIGFIGLNGSTFSEALVGGKHQIMLPTAALIGTFLLLFAESNFKKSGVTTSEIPGRSLLFLXLVPPLFNIL

SEQ ID NO: 45540 - protein, 235 aa, Bacillus anthracis
  MISC_FEATURE (40)..(40): X=any amino acid
  MISC_FEATURE (190)..(190): X=any amino acid
MGKKILVVDDEKPIADILKFNLEKEGFEIVMAHDGDASDXKFRLQEQPDMVLLYIMLPGKDGLEVCREIRKSSEMPIIMLTAKDSEIDKVLGLELGADDYVTKPFSTRELLLRVKGNYCRHQQGGAAEKEENTKMVIGPNCINPNAYSVAKREENIELTHREFEAAAYLAKHLGQVMTREHLLQTVLGLXYFGKGTYSGVTVRRLREKIEDNPSHPTLIVTRRGVGYYLRDPEQE

SEQ ID NO: 45541 - protein, 59 aa, Bacillus anthracis
MRLTNFFGDVGREMKKVSWPKKDELLRSTATVIATVVFFAIFFAVVDMGISSLIRLILG

SEQ ID NO: 45542 - protein, 148 aa, Bacillus anthracis
MKVIFLKDVKGKGKKGEVKNVPDGYANNFLLKQGLAAEATNSSMKTLEAQKRKEEKDAAAELESAKQLKETLEKLTVELKAKSGEGGRLFGSITSKQIVDAMQKSHKIKLDKRKFEMDDAIRALGYTNVTVKLHPQVTATVKVHVSEQ

SEQ ID NO: 45543 - protein, 209 aa, Bacillus anthracis
  MISC_FEATURE (82)..(82): X=any amino acid
MKFFIDTANINEIKEGNHLGVLAGVTTNPSLVAKRGVDFHERIREICNVVEGPVSAEVISLEADKMIEEGKELAKIAPNVVXKVPMTTERFKAVKAFSDLGIRTNVTLVFSAVQALLAARAGATYVSPFLGRLDDIGHNGMDLIRQIAEIFAIHGIEGRNYAASVRHSVHVTDAALNGAHIATIPANVIASLVKHPLTDQGIEKFLADW

SEQ ID NO: 45544 - protein, 390 aa, Bacillus anthracis
MRYITAGESHGPQLTVILEGVPAGLTLAAEHINKELLRRQKGHGRGRRMQIEMDTVEIVSGVRHGMTLGSPITLIVKNDDFKHWTKVMGAEPISEKESKEMKRTITKPRPGHADLNGAIKYGHRDIRNVLERSSARETTVRVAAGAVAKQILKELGVEIAGHVLEIGGVKAKHISNLSIEEIQIITENSPVRCLDKTVEQEMMDAIDNAKSSGDSIGGIVEVIAEGMPIGVGSYVHYDRKLDAKLAGAIMSINAFKGAEIGVGFEAARQPGSKVHDEILWDEEQGYTRKTNNAGGLEGGMTTGMPIVVRGVMKPIPTLYKPLASVDIDTKEAFQASIERSDSCAVPAAGVVAESVVAWELAHALVEQFGKDRMELIQQNITQHNKYAKEF

SEQ ID NO: 45545 - protein, 311 aa, Bacillus anthracis
MKYTKLQKAGLHISKLGLGTNAVGGHNLYADVNEEEGKQLIEEAMGQGITFFDTADSYGFGRSEELVGEVLKGKRHEIVLATKGGIQPLLNGEVYINNERSYLRNAVENSLRRLQTDYIDLYYLHFTNPETSYIDSIGELTRLKEEGKIRSIGISNVNVEQLKEANQHGHIDVVQSPYNMLDRTAGEELLPYCIESGISFIPYGPLAFGILGGKYTEDFKLNEGDWRQSVNLFEENTYKSNFKKVEKLKGVAKEEAVEVSHLALAWLLNKKGIDTVIPGGKRAEQIRESVRAVEVSLNENVMKEIESILED

SEQ ID NO: 45546 - protein, 219 aa, Bacillus anthracis
MKRILLVSTSAHDMNGHPTGLWLEELAAPYNLFKKAKFDVDIVSIQGGRVPIDRVSIPNGIPREFKHVASLLQNTKSISTVHFSDYDAVLFGGGHGAIVDFPGNPYVANLIVNMYNNNRIVAAVCHGVSSLVGVKNKDGSFFSAGKRITGYTNDEEKAVHLEKRVAFLLESKMKEEGALFYVAPKFTPHVVVDGALNTGQNPQSSMEIGKAIGRAVNKV

SEQ ID NO: 45547 - protein, 324 aa, Bacillus anthracis
  MISC_FEATURE (255)..(255): X=any amino acid
KRDWKKLAYDVVEEKMITKEDAIAILEADDTEVLEIMNAAYIIRHHYFGKKVKLNMIINTKSGLCPEDCGYCSQSIISEAPIDKYAWLTQEKIVEGAHEAIRRKAGTYCIVASGRRPTDKEVNHVIGAVKEIRETTDLKICCCLGFLNRDQGGRLSWAGVHRYNHNLNTHANNYESICSTHTYDDRVDTVQKAKQAGISPCSGAIFGMGETIEERAEIAFELQRIDADSIPCNFLVAVKGTPLEGQKELTPVECXKCGNDAFVTHKEIRIQGGRESILRSVQPIGYLQANSIFVGDYLTTAGQEPTADWGMIEDLGFEIEECAL

SEQ ID NO: 45548 - protein, 428 aa, Bacillus anthracis
MNKFVTFLDKNLSGPMARLSEQRHLQAIRDGVISALPFIIVGSFFLIVAFPPLPKDSFISVWALKNQTSILIPYRLTMFIMSLYIAFGIGYNLAKSYKLDALSGAQLAVCSLLLTLTPELIDKKGFMLPMTNLGGHGLFVTMIVSILSVEILRFCKKNNVTIKMPEQVPPSVSRSFEALIPAAFVIIIIMSLITVVFKVDVHYVVDKLAAPLVKAGDSYFGVIIPVFLITFFWSFGIHGVSVVGTVARPLWDVYLGKNGEAVASGASQFPFIAPEPFYQWFIWIGGSGATLGLVLAMIVFGRSKYSKALSRTCIVPGIFNINEPVIFGLPIVLNPILIIPFVITPLVTATIAYAATAMGFVTPTHIMPPWTLPAPIGAYLATGGDWRAIVLVLINIAISFLIYLPFFKMYDKNMLEIEKNGEGESVNP

SEQ ID NO: 45549 - protein, 173 aa, Bacillus anthracis
MYLINQNGWIEVICGSMFSGKSEELIRRVRRTQFAKQHAIVFKPCIDNRYSEEDVVSHNGLKVKAVPVSASKDIFKHITEEMDVIAIDEVQFFDGDIVEVVQVLANRGYRVIVAGLDQDFRGLPFGQVPQLMAIAEHVTKLQAVCSACGSPASRTQRLIDGEPAAFDDPNYSF

SEQ ID NO: 45550 - protein, 376 aa, Bacillus anthracis
MIEKKRIEIFPKHMGFFPYMWFVYLLFPIYHLVQASGWKLIIGSGMLIIFIITYRQLYFVQRTFIFLACIQMILIFLFALFYNPFMIFFGFFTASAMGFAPSKKVFRVLLCLLVIMLGAFVFVNMNQLTPTSLVNIVPMFILMILTPFGMRNFNQKKMLRNQLNEANEQIKDLVKREERQRIARDLHDTLGHTLSLITLKSQLVEKLIVKNPERASTEAKEITQTSRTALKQLRELISDMRMITVEEELEQIKAILQAANIRLEIKQETSASSLSPIEQNILGMCLREAVTNVVKHSKATRCTVSVLESQGELILTVEDNGIGLADQNHDGNGIRGMKERIALIDGSVELDMINPGTLLTVKVPVVIRTGKDGVRA

SEQ ID NO: 45551 - protein, 338 aa, Bacillus anthracis
MKSVTLDKLQRPLKDLRISVTDRCNFRCRYCMPEEIFGPDYSFLSNDKILSFDEIERITRIFVSLGVRKLRITGGEPLLRRGLPQLIERLNKVDGVEDIGLTTNGSLLKKFAPDLYKAGLSRVTVSLDSLEEERFFYLNGNRSKVQRVLEGIQAAAEVGMKIKINMVVQKGKNEQDILQMAQYFKENKHILRFIEYMDVGNYNGWELKEVVSKQEIVDMIHQVMPLERIEANYAGEVATRYSYIGSDEEIGVISSVTDSFCSSCTRARISAEGKLYTCLFASKGNDLRELLRSDYTDEEITDVVRDIWNNREDRYSDERLSNSNKKAMPKIEMSHIGG

SEQ ID NO: 45552 - protein, 294 aa, Bacillus anthracis
MLENLSTEHRNEKTMNLDEMNIKEVLQSMNEEDRTVALAVEKEIEHIEKVVRVVIQSFEEEGRLIYIGAGTSGRLGILDAVECPPTFGTDDKMVQGFIAGGLKAFTKAVEGAEDREELAEEDLKSIGLNEKDTVIGIAASGRTPYVIGGLKYANSVGASTASISCNKNAEISKYAKLNVEVETGAEILTGSTRLKAGTAQKLVLNMISTASMIGVGKVYKNLMVDVQSTNEKLVERSKRIIVEATGVSYEVAAEHYEKAERNVKAAIVMVLLQCEYGEALEKLKQAKGFVKKAL

SEQ ID NO: 45553 - protein, 344 aa, Bacillus anthracis
MEARLKELKQKALELIEEAKELKGLNDVRVAYLGKKGPITEVLRGMGKLSAEERPRMGALVNEVREAIQTRLDDKISNLEKAVIEAKLATETIDVTLPGRPVETGCHHPLTAVVEQIEDVFIGMGYEVAEGTEVEKDYYNFEALNLPKDHPARDMQDTFYITEETLLRTHTSSVQARTMENNKEKGPIKIICPGKVYRRDDDDATHSHQFMQIEGLVIDKNIRMSDLKGTLQVFVKKMFGEDREIRLRPSFFPFTEPSVEMDISCMMCHGKGCGTCKGTGWIEILGAGMVHPNVLEMAGYDSKEYQGFAFGMGAERIAMLKYGVDDIRHFYTNDVRFLQQFKRA

SEQ ID NO: 45554 - protein, 395 aa, Bacillus anthracis
  MISC_FEATURE (240)..(240): X=any amino acid
  MISC_FEATURE (374)..(374): X=any amino acid
  MISC_FEATURE (381)..(381): X=any amino acid
  MISC_FEATURE (384)..(384): X=any amino acid
TIMIQLKDIIDFTDTYGANNYHPLPIVISKAEGVWVEDPEGNRYMDLLSAYSAVNQGHRHPKIINALIDQANRVTLTSRAFHSDQLGPWYEKVAKLTNKEMVLPMNTGAEAVETAIKTARRWAYDVKKVEANRAEIIVCEDNFHGRTVGAVFISPNEEYQAGIRSMSSGHIVIPYGDLEALKAVHLTPNTAAIILEPIQGEAGINIPTSWFLKEALEVCKKENVFFVADEIPNGLKPVWXSICLDWDNVTPDMYILGKALGGGVFPNLLRSSKPGHFRRIRARSHGSTFGGNPLACAVSIAALEVLEEEKLTERSLQLGEKLVGQLKEIDNPMITEVRGKGLFMRYLIKRASSSLCEQLKAAGLLCKKTPRKMXFVSHHHXNLXEDLEWASQKIK

SEQ ID NO: 45555 - protein, 321 aa, Bacillus anthracis
MERSLSMELVRVTEAAALSSARWMGRGKKDEADGAATSAMRDVFDTIPMKGTVVIGEGEMDEAPMLYIGEKLGTGYGPRVDVAVDPLEGTNIVAAGGWNALAVIAIADHGNLLHAPDMYMDKIAVGPEAVGAVDIDAPIIDNLRAVAKAKNKDIEDVVATVLNRPRHQAIIEEIRKAGARIKLINDGDVAGAINTAFDRTGVDILFGSGGAPEGVLAAVALKCLGGEIHGKLLPQNEAELARCKKMGIEDINRILRMEDLVKGDDAIFAATGVTDGELLRGVQFKGSVGTTQSLVMRAKSGTVRFVDGRHSLNKKPNLVIK

SEQ ID NO: 45556 - protein, 241 aa, Bacillus anthracis
MSKPLIFAHRGVKGTHPENTMIAFQEAERIGAHGIELDVHLSKDGELVVIHDETVDRTTNGIGLVSEKTVEELQALDAGSHKDASFHEAKIPTLREVFIWLSTTNFQLNIELKTDVIHYPNIEEKAVALVREYHLSNQIVFSSFNHESVSLLAEIAPEIPRAILYDTPLADPIAEAKTREATGLHPNFQLLTKEFVQLAQKQGYVFRPYTINEYKDLQTMLDYGVDVIITDWPARAFELLS

SEQ ID NO: 45557 - protein, 570 aa, Bacillus anthracis
MTLNIQGIAASSGIAIAKAFRLENPEFNIEQKSITNEAAEIARLEAALEKAKTELEAIKDHAFAELGADKAAIFEAHLLVLNDPELVNPVKDKVNSEKVNAEFAMDEVASMFISMFENMDNEYMKERAADIRDVTKRVLAHLLGINFSNPGTNSEEVIIIAEDLTPSDTAQLNRKYAKGFTTDIGGRTSHSAIMARSMEIPAVVGTKVVMEKIQNGDIVIIDGLDGEVIVNPSEETLRSFEEKKAKFEEQKAEWAKLKDQATVTSDGHHVELVANIGTLNDVQGIIDNGGEGVGLYRTEFLYMGRDNLPTEEEQFEAYKAVLEGVKEGQPVVVRTLDIGGDKELPYLHLPKEMNPFLGYRAIRLCLDEQDVFRTQLRALLRASVYGNLKIMFPMIATLDEFRQAKAILLEEKAKLVEVGTTVSDSIEVGMMVEIPASAVLADQFAKEVDFFSIGTNDLIQYTMAADRMNEQVSYLYQPYNLSILRLVKMVIDAAHKEGKWAGMCGEMAGDSLAIPLLLGLGLDEFSMSATSILPARTQLSKLSKAEMETLAEKALMMSTAEEVVELVKSI

SEQ ID NO: 45558 - protein, 185 aa, Bacillus anthracis
MKIKEIIVVEGKDDTVAIKRAVDADTIETNGSAIGDHVIEQVKLALQKRGVIIFTDPDYPGERIRKIISDKVPGCKHAFLPKEEALAKRKKGVGIEHASNESIRRALENIHEEMEAYTSEISWSDLVDAGLVGGEMAKSRRERMGKLLKIGYTNAKQLHKRLQMFQVSKESFAEAYKQVIQEERK

SEQ ID NO: 45559 - protein, 442 aa, Bacillus anthracis
  MISC_FEATURE (174)..(174): X=any amino acid
  MISC_FEATURE (204)..(204): X=any amino acid
  MISC_FEATURE (210)..(210): X=any amino acid
  MISC_FEATURE (311)..(311): X=any amino acid
  MISC_FEATURE (341)..(341): X=any amino acid
  MISC_FEATURE (355)..(355): X=any amino acid
MIKKVLIANRGEIAVRIIRACKEMDIETVAIYSEADKESLHVQIADEAYCVGPTISKESYLNLTNIISVAKLTGCDAIHPGYGFLAENADFAELCRECNLIFIGPSPEAISKMGTKDVARDTMKEAGVSMTPGSQGIIKNAEEAIELANQIGYPVIIKATAGGGGKGIRVARPXEELVKGIQITQQEASTAFGNPGVYLEKFRXDFRACXIQIMADTHGNAIHLGERDCTIQRRLQKLLEESPSPALDENVRKQMGEAAVKAAVAVDYTGAGTVEFIYEYKTKSFYFMEMNTRIQVEHPVTEMVNRGGLNXRTNLVASGEKLSLQQERVPFYGWGIEWANXCGNPAKKFMPSPGXSRNVLATGGIWVSRRFSCYPGYSIPPFYDSMVAKLIVHGKTREEAIAKMKRALSEFVVEGVHTTIPFHLQLLDHPDFVKGEFNTKFF

SEQ ID NO: 45560 - protein, 414 aa, Bacillus anthracis
MKNRIIAAGVIAASILSYSSSSFAQTKTFPDVQTGHWAEDSINYLAEKGAVTGNEKGMFEPGKEITRAEAATMMAKILNLPIDKNAKPSYADSQKHWATPIIAAVEKAGVVKGTGNGFEPDGKIDRVSMASLLVEAYKLESKVNGTPATKFKDLETLNWGKEKANILVELGISVGTGDKWEPKKILTKAEAAQFIKKADSLKVGNPLVEKVVIIDPGHGGFDPGNPGQGVEESKIVFDTSLRLQKLLEKNTPLKALLTREENGNPGSNKNESLANRVKFGQENNADIFVSIHANSSEKHDGHGTETYYYKKSKRGEETQIEKDSEVLAKKIQNRVVEALHTRDRKIKDDHSLYVVNNNTVPAVLTELAFIDNDIDNGKLATESGRQIAAEAVYAGILDYYEWKGFDVSKYRLAK

SEQ ID NO: 45561 - protein, 219 aa, Bacillus anthracis
  MISC_FEATURE (43)..(43): X=any amino acid
MKRILLVSTSAHDMNGHPTGLWLEELAAPYNLFKKAKFDVDIXSIQGGRVPIDRVSIPNGIPREFKHVASLLQNTKSISTVHFSDYDAVLFGGGHGAIVDFPGNPYVANLIVNMYNNNRIVAAVCHGVSSLVGVKNKDGSFFSAGKRITGYTNDEEKAVHLEKRVPFLLESKLKEEGALFYVAPNFTPHVVVDGRLITGQNPQSSMEIGKAIRRAVNKV

SEQ ID NO: 45562 - protein, 278 aa, Bacillus anthracis
LLVSVALVWGANYTIGKYGVAYMSPFNLIVYDFLVASPVLLLITFLMERSLRIERKDWLRLVAVGIVGTTMYQTMFMLSVKYTSATNASLLIAMSPIFTGILAVLHKQERFSMKVQIGSIVAFIGAAFVLLTGHTGGATYEYAWLGNIIGLVAAIAWGWYPILAQPLITKYSAMRVTSWSTLIGIVPLVIYCLFNVNSLTWPVDTLSWGSLAYSIIFATIFGLAMWYVGISQIGSTKVMVYMYLVPLFAVIFAAVTIGEQINMMQLVGGTYYLWGVYM

SEQ ID NO: 45563 - protein, 520 aa, Bacillus anthracis
MSSTVWILISILLATVGAVVGFFVRKSIAEAKINGAANEAKRILDEANREAEALKKEALLEAKDEIHTLRTEAELEIRDRRSELQKQENRLMQKEENLDRKDETLDKRELQLEKKEDSLVARQQQIEELESKVGELVQKQQTELERISNLTREQAKAIILGKVESEVSHEIAVMVKESEVRAKEEADKKAKEILSLAMQRCAADHVAETTVSVVNLPNDEMKGRIIGREGRNIRTLETLTGIDLIIDDTPEAVILSGFDPIRRETARIALDKLVQDGRIHPARIEEMVEKSRREVDEYIREVGEQTTFEVGVHGLHPDLIKILGRLKYRTSYGQNVLKHSMEVAYLTGLMAAELGEDEKLARRAGLLHDIGKAIDHEVEGSHVEIGVELATKYKEHPVVINSIASHHGDTEPTSIIAVLVAAADALSAARPGARSETLENYIRRLEKLEEISESYEGVEKSFAIQAGREVRILVKPDTIDDLEAHRLARDIRKRIENELDYPGHIKVTVIRETRAVEYAK

SEQ ID NO: 45564 - protein, 484 aa, Bacillus anthracis
  MISC_FEATURE (109)..(109): X=any amino acid
  MISC_FEATURE (132)..(132): X=any amino acid
  MISC_FEATURE (166)..(166): X=any amino acid
  MISC_FEATURE (204)..(204): X=any amino acid
  MISC_FEATURE (229)..(229): X=any amino acid
  MISC_FEATURE (314)..(314): X=any amino acid
TFRELGLSDSLLQSVESMGFEEATPIQAETIPHALQGKDIIGQAQTGTGKTAAFGFPSLDKVDTHKESFQGMVIAPTRELAIQVGEELYKIGKHKRVRILPNYGWSRYXPAQIRALKKPPTIYCWYTKYVFXININRKTLSLTKRETVVLDESDEMLNMGLHWKIXSNFTDVPETHQTLLFSATMPGPSCFIEEGFKNGASPPXCKSKEVTMPNIQHFYLEVQEKKKFXRVNTLTRYQSPELAIVFGRTKRRVDELSEALNLRGYAAEGIHGDLTQAKRMSVLRKFKEGSIEVLVATDVAARGLDISGRNTRIXLRYSQDPESYVRRIGRTGRAGKKGIAMLFVTPRESGQLKNIERTTKRKMDRMDAPTLDEALEGQQRLIAEKLQSTIENENLGILQAYCRRNGRENDSVTVVAAAFKNDDKRARYNSIALTSEPPVVSRGGGSKKRGGNGGGYRDGNRNRSRDGRGGDGRNRDRNRDGRNR

SEQ ID NO: 45565 - protein, 304 aa, Bacillus anthracis
MKKRQLGNSDLFVTEMGLGCMSLGTSEAEAMRIIDEAIDLGINFFDTADLYDYGLNEEFVGKALKGKRDQIVLTTKVGNRWTEEKNGWSWDPSKNYIKAEVKESLRRLQTDYIDLYQLHGGTIEDPIDETIEAFEELKKEGIIRHYGISSIRPNVIREYAKRSNIVSVLMEYSLLNRRPEEWFPLLNEHQISVIARGPLAKGILTDNNARKIERVKEKDYLSYSYDELYGTLANVKELIVESSLTGTAIQYCLHNDTVAAVIPGASSIQQLRENVQACKQTQLTTEEYIQLQQIAKCDTYALHR

SEQ ID NO: 45566 - protein, 305 aa, Bacillus anthracis
MVIFNYILVCIIFGTTFLTIKIGIEAGAPPLFSAGIRFFLAGVILMIIFKLKRKEIMPHIFSRRIIYAGFCLTFMTFATLYWAEQYISSGLAAVLSATGPMMILLLQTKRNKTKLKKEQLLALIIALIGVVFVSLPGMHQEISFIWSIACFVLIIGELFYGIGSIRSKEILSDLQSVSLFLINGIQMFYGGVLLLIVSFIVEQPNVTVLASWSVQWPILYLIFIGSIGGHGLYYWLLSKTNPVFPSTWLYVSPLIAIIVGYIILGEPLNPIMGIGACFILVGVFLANRSTLRTYFKQGRLFEKEM

SEQ ID NO: 45567 - protein, 321 aa, Bacillus anthracis
MKLNKNLQLCILIGTLICYSIYFMFFYLFPTHFSNSDVRFASLIVEAITFVSLIYSIYSKKVSSNPFWICITIAIGSFLLGKIVYTYQDSFFKIPIHRFTISDVFYMLFLLFCLIAFCYKILKECDKWEKAFFICDICIVLTSIFTLEWYLFNQPNLNIFSLSLGDVFLSFLYPIADLLFLLLGVSLFFRPTIFNSKRKIYIFIFVLISSATFNYIYFYLNNHLSTETITLLRLLYRIPILLIAIAGSISEDRNSHKNYFIVNPIIGKKALVVFPYLAVAILIGVTFKRTNIIFNSHYGKLYYFYFRTHSSFYCTYAKQFP

SEQ ID NO: 45568 - protein, 287 aa, Bacillus anthracis
  MISC_FEATURE (144)..(144): X=any amino acid
VMVIFNYILVCIIFGTTFLTIKIGIEAGAPPLFSAGIRFFLAGVILMIIFKLKRKEIMPHIFSRRIIYAGFCLTFMTFATLYWAEQYISSGLAAVLSATGPMMILLLQTKRNKTKLKKEQLLALIIALIGGWFCFFTWECTKKXVSYGVSLGFVLIIGELFYGIGSIRSKEILSDLQSVSLFLINGIQMFYGGVLLLIVSFIVDQRKCNCIASWSVQWPILYLIFIGSIGGHGLYYWLLSKTNPVFPSTWLYVSPLIAIIVGYIILGEPLNPIMGIGACFILVGVFL

SEQ ID NO: 45569 - protein, 223 aa, Bacillus anthracis
MNIAKLIDHTILKANTTKEDVMKVIEEAKEYKFASVCINPTWVKLAAEELAGHDVDVCTVIGFPLGASTTETKAFETKDAIAKGATEVDMVINVGALKDGDNELVEKDIYEVVQAAKGKALVKVIIETCLLTDEEKVRACELSVKAGADFVKTSTGFSTGGATAEDIALMRKTVGPNVGVKASGGVRTREDAEKMVAAGASRVGASASVAIVLNDAKGATDNY

SEQ ID NO: 45570 - protein, 877 aa, Bacillus anthracis
MEKKVVLVDGNNIAYRAFFALPLLNNDKGIHTNAIYGFTMMLMRILEEEKPTHMLVAFDAGKTTFRHKTYSEYKGGRQKTPPELSEQFPFIREMLDAFNVPRYELENYEADDIMGTLAKEASEQGASVKVISGDKDLLQLVSDNTLVCIPRKGITEVDEYTKEALFEKYSLSPKQIIDMKGLMGDQSDNIPGVPGVGEKTAIKLLTQFGTVEEVYENIDQVSGKKLKEKLEANKDQALMSKDLATIITDAPITVNVDDMEYKGYEASDVIPMFENLGFTSLLNKLGVTPEETAPAELDDITFDIVEEVTEEMLQQDSALIVEVQEDNYHKADIQGFGIQNENGCYFIQTDIALKSDAFKEWLADGEMRKYTFDAKRAIVALKWNGIDMQGIDFDLLIAAYLLDPADTDKDFRTVAKMKETHAVKSDEEVYGKGAKRAVPELEIVAEHVARKVHVLYDVKQTFVEELEKNEQYELFTELELPLARVLADMEVKGVKVDTERLRNMGEELAGRLKEMEQEIYKLAGTEFNINSPKQLGVILFENLNLPVIKKTKTGYSTSADVLDKLMDHHEIIPNILHYRQLGKLNSTYIEGLLKVVHEDSSKIHTRFNQVLTQTGRLSSTDPNLQNIPIRLEEGRKIRQAFVPSEEGWIMYAADYSQIELRVLAHIANDKGLVEAFQHDMDIHTKTAMDVFGVEKDEVTSNMRRQAKAVNFGIVYGISDYGLSQNLGITRKAAAEFIEKYLESFPGVQEYMDDIVKDAKQKGYVATLLNRRRYIPEITSRNFNLRSFAERTAMNTPIQGTAADIIKKAMIIMADRLEEEGLQARLLLQVHDELIFEAPKEEVEKLEKLVPEVMEHAIELAVPLKVDYSYGPTWYDAK

SEQ ID NO: 45571 - protein, 362 aa, Bacillus anthracis
  MISC_FEATURE (242)..(242): X=any amino acid
MRVDGREKNELRHIHIHHNYLKHPEGSVLIEVGDTKVYLSSATIKGAFPPIYWGEKEKGMVTAEFGDVSRGGQNKGPFGGSSKGKVTGRTMEIQRLIGRALRAVVDLEALGERTVWIDCDVIQADGGTRTASITGAYVAMVLAFEKLLQAEKVSKIPVKDYLAATSVGIVEEQGVVLDLNYAEDSKADVDMNVIMTGKGQFVEVQGTGEEGDFSRAQLNEFLDAAGTGIFHLIDIQKRSVRXYRISYRVEVENMKQVVVATKNMGKVREFAELFERFDLEVKSLHDFPHIEEVEETGETFEENAILKADSLSRQLNAIVIADDSGLIVDALNGKPGVYSARFAGEPKDDQANIDKVLQELNE

SEQ ID NO: 45572 - protein, 200 aa, Bacillus anthracis
MQDIKLVAVTKTVGIEKTNEVIEAGIIDLGENRNEGFLQKYEHFGSKVNWHFIGSLQTRKVKEIINEIDYLHSLDRLSLAKEIQKRANKKVKCFIQVKTSSEESKQGLAIEETVSFIQSLQELDKIEVVGLMTMAPFTEEEEEIRRCFKELRMLQKEVQGLELLHAPCKELSMGMSNDYTIAIEEGATYIRLGTILVGKA

SEQ ID NO: 45573 - protein, 117 aa, Bacillus anthracis
MKKGKLIDSFGYAIVGIFFCLRHERNMKIHYLAAVIVLCCGFYFHITKVEWMILLIVIGIVMSLEMVNTAVEKTVDLATTDIHPFAKVAKDVAAGAVLLFAIIAVIIGAIIFLPYVV

SEQ ID NO: 45574 - protein, 342 aa, Bacillus anthracis
  MISC_FEATURE (11)..(11): X=any amino acid
  MISC_FEATURE (162)..(162): X=any amino acid
  MISC_FEATURE (211)..(211): X=any amino acid
  MISC_FEATURE (257)..(257): X=any amino acid
  MISC_FEATURE (284)..(284): X=any amino acid
  MISC_FEATURE (285)..(285): X=any amino acid
  MISC_FEATURE (327)..(327): X=any amino acid
  MISC_FEATURE (336)..(336): X=any amino acid
MEEKYELYLVXKQSCDETAVAVVKNGKRKLWGIVFPSQIESHKRFGGVVPEIASRHHVEEITVVLEEAFKRRGLSLWEVMKAIAVTEGPGLVRSISNRVNPAKASGFSHDILIVGVHHIAGHILCDPFVKEVQFPITITCWFGGHTELVLYERTWFIWSNWXNADDAAGEAYDKVGLLRFFCPIPGGASLFIPSPQGGNPTHSILLRAWAXTLIRMNSSFSGLKSRPFSTAVHNAKPARYRDCTRKFSGHVPKRVSXRTSNESIRAADAYSVKQSASCWWSGCXXRASARLETEFAQKENVELIIPPLSLCTDNAAMIAAGGTNCIXTRKTCYIAXKCIPGL

SEQ ID NO: 45575 - protein, 368 aa, Bacillus anthracis
MSTELLDALLVLESEKGISKDIIIDAIEAALISAYKRNFNQAQNVRVSFNPQVGTIQVLARKDVVDNVFDPRLEISVEEARQINPNYQDGDVLEIEVTPKDFGRIAAQTAKQVVTQRVREAERGVIYSEFSDREEDIMVGIVQRQDARFIYVSLGKVEALLPVSEQMPNEQYKPHDRIRVFITKVEKTTKGPQIYVSRTHPGLLKRLFEMEVPEIYDGTVEIRSVAREAGDRSKISVHAENIDVDPVGSCVGPKGQRVQRIVDELKGEKIDIVRWSNDPVEYVANALSPSQVVKVLVDEEEKATTVVVPDHQLSLAIGKRGQNARLAAKLTGWKIDIKSESDAKQLGIVTEEDSVVAFGFDSVEDEIE

SEQ ID NO: 45576 - protein, 479 aa, Bacillus anthracis
MLLCELKQGWNHEYNTRPFFREECFFISFLHHTRIGRRIRSMHHDEKNKIGLTVALSIVVGTIIGSGVFMKPGSVLDYSGSSNMAILAWVIGGLLTLASGLTVAEIGAQIPKNGGLYTYLEEIYGSFWGYLSGWMQTIVYGPAIIGTLGLYFSSLMINFFYLDKVWNLPIAIGTVVFLGVVNSMGTKYGGIVQTITTIGKMIPIVLIVVLGFWKGNSDIFNVVVPISENQSIGMAILATLFAYDGWILLASIGGEMKNPTKLLPKAMTVGILIVTAAYVLINLALLNVLPATQIVELGENATATAAGMLLGEYGGKIISIGIIVSIFGCLNGKILTFPRIPMSMAERGQLPFAKFIAKESPRFKTPANAITVEIILGIILMIISDPNKLSEISVFIIYIFYVMTFIGVFILRKRNKNKERAYSVPLFPIVPIVAILGSLFVIGSAIINDPLSCFLSIGIVFTGLPVYWYLNKKNKTEVS

SEQ ID NO: 45577 - protein, 497 aa, Bacillus anthracis
MLQFLQRIGKALMLPIAVLPAAGLLLRLGQEDVFNIPVMAQAGAAIFDNLALIFAIGVAIGLSVDGSGAAGLAGAIGYLVLQNTTNALSKTYSAAELNDKLKSVQDLVGSVDPTKLADTMTKVSKAAALTPKINMAILGGIIAGVVAGLLYNKFHKIKLPEWLGFFAGKRFVPIITSIVMLLLGLVFGQIWPTIQSGIDAVAHGIVNLGSIGAGLFGLLNRLLIPIGLHHVMNTYFWFVLGDFTNAAGDIVHGDIARFFAKDPSAGMFMTGFFPVMMFGLPAACFAMIAAAKPEKRKMVTGMLGGLALTSFLTGITEPIEFSFMFLSPVLYGIHAVLTGLSLFITTTLGIHDGFSFSAGAIDYVLNFGIATKPLLLAGIGLIYAAIYFVVFYFLIKKFDLKTPGREDEEEMAEGEEAPVAGSIGETYVAALGGKENLTVIDNCATRLRLQVKDAGQVNEAALKRAGAKGVMKLSNTSVQVIVGTNVESVADDMKKHV

SEQ ID NO: 45578 - protein, 458 aa, Bacillus anthracis
MKSLYSRFVFMTVGIMLLSSIIGFLLTNVYYQVKLKPYNSEKILKYAEEVKSLYEKQSEENQEAYLQSIAKLGYEIYIVDDQKNGKRIGNAFRKTTISDDTIRKVLNGETFNGVSTYPTRLFITGFFDNELINSVGVPLKHGDKQYALFIRPDIQNQFGEMRIFLAVLLGFIVLLSIIFIAIAAGYIVRPIRKFTNATQKIASGEYEIELDVKRKDEIGTLSTSFQKMTKSIKELDEMRQEFVSNVSHEFQSPLSSIQGFSKTLQTEKMSVEERNHYLQIIEGESKRMSSLCKQLLTLASLDKEEKVLQIKEFNLQKQIKDVIFMLEWKWREKNIAIEFDVPDITIKGDENLLHQVWSNIFTNSIKFSNEGGTIEFFVEELESSVIISISDNGIGMEKEEMDRIFDRFYKVDTARARNVEGSGLGLSIVQKIVELHNGNVSVYSTKGEGTTVRVELPK

SEQ ID NO: 45579 - protein, 493 aa, Bacillus anthracis
  MISC_FEATURE (40)..(40): X=any amino acid
  MISC_FEATURE (67)..(67): X=any amino acid
  MISC_FEATURE (126)..(126): X=any amino acid
  MISC_FEATURE (158)..(158): X=any amino acid
  MISC_FEATURE (213)..(213): X=any amino acid
  MISC_FEATURE (263)..(263): X=any amino acid
  MISC_FEATURE (266)..(266): X=any amino acid
  MISC_FEATURE (418)..(418): X=any amino acid
MSLFDHSVSELHTKLNNKEISVTDLVEESLQRIADGKDTXKAFLTLDEEKRTAKAKELDAKIGAERXWFIFGMPIGGKDNIVTNGASYNCASKILANFDPIYDATVVQKPKAAGHHYNPVKLNMGXIPQGGSSNENSGFYDYEKIPGNSTLRLPGGSXGGGSAAAVAAGEVLFSLCSDTGGSIRQPAAYCGVVGLGRTYGRRMSLRISAFSSXLDQMRTGVHSTVEDNAYLLQAISGLDRMDATSANVEVGKLLRLVYTGGVXRVXAIAVPKRNTRVKLFAREPRKSVLAALKSIRRYGRNLGEVSLPHSKYALATYYLLSSSEASANLSRFDGVRYGVRSDNVNNLMDLYKNTRSEGFGDESKRRIMLGTFALSSGYYDAYYKKALQVRTLIKNDFENVFANYDVIIWTNYANSGIXSGETVDDLMTMYANDMFTMPVKLDGCSTRLLIPCGFGANNMPLGLQIIGKHFDEATIYRGCTCSLSTATDHRTKR

SEQ ID NO: 45580 - protein, 204 aa, Bacillus anthracis
MNEVNVFYNLEGIGDTLIVALQDITLENRTFDRKGDVARVYDRESNETAGFNIFNASSYLEVKETGNLTLTKELVEKINEILAKNGFEETVEADLSPKFVVGYVAEKEKHPNADKLNICKVEIGTETLQIVCGAPNVDAGQKVVVAKIGAVMPSGMLIKPAELRGVPSAGMICSARELELPDAPQEKGILVLEDSFEVGQEFKF

SEQ ID NO: 45581 - protein, 129 aa, Bacillus anthracis
  MISC_FEATURE (87)..(87): X=any amino acid
MARKTNTRKKRVKKNIEAGVAHIRSTFNNTIVTLTDTHGNALSWSSAGALGFRGSRKSTPFAAQMAAETAAKAAMEHGLKTLEVTVXGPWAGREAAIRALSAAGLEVTAIRDVTPVPHNGMQPTKTRRV

SEQ ID NO: 45582 - protein, 62 aa, Bacillus anthracis
MARVCTITGRKARSGNSRSHAMNATKRKWGANLQKVRVRIDGKVQRVYVSARALKSGKIERV

SEQ ID NO: 45583 - protein, 216 aa, Bacillus anthracis
  MISC_FEATURE (3)..(3): X=any amino acid
  MISC_FEATURE (10)..(10): X=any amino acid
MFXRLSGRNXKSFLNRDPAARKYFEVILTYSGLHAVWAHRIAHAFYKKNFFFIARWISQVSRFFTGIEIHPGSTIGRRFFIDHGMGGCMGETCEIGDNVTIYQGVTLGGTGKEKGKEAPTIQDNVLIATGAKVLGSITVGENSKIGAGSVVLKEVPAHSTVVGIPGRVVIQNGVKIGQELNHSDLPDPIFDKLKVMEVELDKLKKQLEVKVERKDK

SEQ ID NO: 45584 - protein, 896 aa, Bacillus anthracis
MELYIPAGMTVEKVQAILTVLPGNRNKDYVKAANLMIEKNTYMIPPFGSSSYSNLINWNEQRERGYLRLIHGHTFLGCLIAAYNDTGDMKYIKKSIELIKDWINNHSFELHQHSMAFHDETTALRLQYWLRFYIFTRQVLSEEEIILLEKSMEDTAKLLSEDFFHATNTNHGMFQDRALLTYASYFKGENPSLEKYIKLAVTRLKDYFEKVFTEEGVHKEHSPSYHLLVASNIKKLANWMKEFDKEVSLIFNKIYKKTEEYAIHIIRPDGSLPPICDTEANLVGNNYKDLYESDQYLYVVTKGKKGKAPTEDDKVFPKSGYAIFRNDWSKEEKATYVLFTAAYHVDYHKHSDDLNLYIYSNGEIITEAGPNGYNYKDPFTEYAYSSFAHNTLIVDGKGLPRTDRQYEKVYLSDYEINKDKVEATGINLRYTGVEHSRTVSYMKDEEKIVVKDLVKSDKRHEYKLLWHVASDITVHVRDRIVELFRNNHKVMEMEVTTVTGVSIRALNEQTKPQVSGWVFPKMGEKRGATTIEVDISGSNVECITEFRLKDFKLGRDDLIPYNLEKTFKSTRNLRYHFEEAKNQKHKDKLFVVFSAMAPEYKFAFNYMRSLKDVDVNKLFILDDFGDQGAYYLGNKRDHAIETAVSSLIQYIMAKYKICHEQVTAIGSSKGGYAAVYFALKYYFGNVIAGAPQSKLGHFLINQANHKNIARYIAGGDEESDCFYLDQLVFQLLNQPNDISPSINLIVGTKDHHYLNHVMPLYEVLVENGYEVQLEIEEDLTHADLKVHFPLYLQNKVEEILDKKHSSLSNFEEPIIHSIDIRYIEGSNIILTCDATGSNIHYAYYVYKDGHTIDKFMYTMKSHLYYELKDLGEYMFKVFVKDQYNRIITKTFKFGKV

SEQ ID NO: 45585 - protein, 281 aa, Bacillus anthracis
MSNSRSILSQPEWRIVDQSSLGPTFHALQSFAMDDTLCTSIGKGESAATMRSWVHHNTIVLGIQDSRLPHLEEGISFLKENNFNVIVRNSGGLAVVLDEGVLNVSLLFQETEKGIDIDLGYDTMWHLIQEMLKDYDVTIEAKEIVGSYCPGSYDLSIRDQKFAGISQRRIRGGVAVQIYLCATGSGSERAALVRDFYNLAIQGEETRFTYPEIVPSTMASLSELLDETITVQDLMMRLLKTLQQFAPKLTPSQLTIDEIPLYETNLQRIIDRNNKALGLEK

SEQ ID NO: 45586 - protein, 215 aa, Bacillus anthracis
MKKFKLSSFLPLSYILLLVLVSPLYDVLNKSTVHAVDVTTVVDDWIPFVKAFIIPYLIWFPYLYGALIYYCFADRKQYYVTLSSIILGKLACFSIYYFWQTTVPRPTVVGTDVFSELVRYIYSIDQPVNCFPSIHVLTTFVIMLAAFKRREQHAFEYYTLTFFGTLIILSTLFTKQHAFVDAISGMTLASVLYFGVQLLLAKETVRVPVKQHHKM

SEQ ID NO: 45587 - protein, 88 aa, Bacillus anthracis
LSILFVSQLHVYAEENRWTWPVEGQLSDYFGTRHGKHYGIDVAAPIGTPVVAIQDGKVTRSYYSSSYGNVVFIKHGEYEAVYAHLNKR

SEQ ID NO: 45588 - protein, 298 aa, Bacillus anthracis
MKIIKGAFPVLITPMDEFQEINWNGVKQNVNYFIEQKVAGIIINGSTGEFVSLSKEERFKMVETVLKEVNGRIPVIVGTAAETTKETIEFTKHAETHGADCALIINSYYCKPKEEEIYFHFKEISNAVNIPIMLYNNPFTSGVDMSTELMLRIGKDCENVTHIKESSGDIRKARDLVRQGEGAFQVFCGSEDLVMESYLVGATGWVSVAGNVVPGLVTKMYEHFQNGELEKAWEINDAILPLCEFLEGSGKYVQIVKRSMELQGQAGGPSRYPRLGLTEEEDQKLQAIISKIAAHAAV

SEQ ID NO: 45589 - protein, 424 aa, Bacillus anthracis
MLDIKFLRTNFEEVKAKLQHRGEDLTDFGRFEELDTRRRELLVQTEELKSKRNEVSQQISVLKREKKDAEALILEMREVGEKVKDLDNELRTVEEDLERLMLSIPNIPHESAPVGETEDDNVVARTWGEVKEFAFEPKPHWDLATDLGILDFERAGKVTGSRFVFYKGAGARLERALISFMLDLHTDEHGYEEVLPPYMVNRASMTGTGQLPKFEEDAFRIESEDYFLIPTAEVPVTNMHRDEILNKEQLPIRYAAFSSCFRSEAGSAGRDTRGLIRQHQFNKVELVKFVKPEDSYEELEKLTNDAERVLQLLELPYRVMSMCTGDLGFTAAKKYDIEVWIPSYGTYREISSCSNFEAFQARRANIRFRREPNGKPEHVHTLNGSGLAIGRTVAAILENYQQEDGTIIIPEVLRPYMGGKTVIK

SEQ ID NO: 45590 - protein, 457 aa, Bacillus anthracis
  MISC_FEATURE (221)..(221): X=any amino acid
  MISC_FEATURE (241)..(241): X=any amino acid
  MISC_FEATURE (330)..(330): X=any amino acid
  MISC_FEATURE (342)..(342): X=any amino acid
  MISC_FEATURE (425)..(425): X=any amino acid
  MISC_FEATURE (435)..(435): X=any amino acid
MEQVVNLAKHRGFVFPGSEIYGGLANTWDYGPLGIELKNNVKKAWWKKFIQESPYHVGLDAAILMNPKTWIASGHVGNFNDPMIDCKKCKARHRADKLIEDALDAKGIEMVVDGLTFDQMADLMKEHEVKCPDCGSEEFTEIRQFNLMFKTFQGVTESSTNEIFLRPETAQGIFVNFKNVQRSMRKKLPFGIGQIGKSFRNEITPGNFTFRTREFETMELXFFCKPGEDLEWVAFWRETLXNWVLFLGMTEESMRLRDHGEEELSHYSNATTDIEFKFPFGWGELWGVCIRTDFELKRHMENSNEDLYYIDPQTNERYVPEWLEPSFSGXPRTLDFLCGGLXEKTIIKKDSSVQFLSFHPALAPYKAAILPLSKKLSESATGVFAEIAKDFLGRLLTKWFYPKRYRRPDKIRTPFCITFHFQLSXRTTCSVPGPXHNGTSSMPISELKGFLEKKIQF

SEQ ID NO: 45591 - protein, 92 aa, Bacillus anthracis
MEENQITIVDEKGNEHLCEIIFTFDAEKFGKKSYVVFSPIGEVDEDGDQIYDAMAYEQNEEEGGTLLPIESEEEWEMVQEMFNTLADEQEAE

SEQ ID NO: 45592 - protein, 1227 aa, Bacillus anthracis
MKKKPSALMRRLKYFSPIDRYNDNHTQETYEDREWENVYRKRWQHDKVIRSTHGVNCTGSCSWNIYVKDGIVTWEGQELNYPTTGPDMPDFEPRGCPRGASFSWYIYSPLRVKYPYVRGVLWSMWLEELQNNESPLDAWKSIVENPEKARKYKQARGKGGFVRANWDEVLQLVSASLLYTVMKYGPDRNVGFSPIPAMSMLSHAAGSRFMQLMGGPMLSFYDWYADLPPASPQIWGDQTDVPESSDWYNSGYIMTWGSNVPMTRTPDAHFLAEVRYKGTKVVSVSPDFAESTKFADDWISVKQGTDGAVAMAMGHVILQEFYVDNQVEYFTKYAKQYTDFPFFVTLKQKGDQFVADRFLNASDIGRETKLGEWKPVLWNENTNDFATPHGTMGSRWDNEKKWNLRLEDEETGGKIDPRLSLLGMEDSVQTVQIPYFSDDGNTVLERTIPVKKVMTEEGEVFVTTVYDLTLANYGVNRGLGGQEPKDFNDDVPFTPAWQEKMTGVKRELIIQIAREFAQNAVDTNGRSMIIVGAGINHWFNSDTIYRAVLNLVLLVGAQGVNGGGWAHYVGQEKLRPAEGWQTIAMAKDWQGPPKLQNGTSFFYFVTDQWRYEDTPVGHLASPVEGNSRYQHHGDYNVLAARLGWLPSYPTFEKNGIELYKEAVAAGATTQEEIGKYVAQKLKEKELKFAIEDPDNKNNFPRNLFVWRANLISSSGKGHEYFLKHLLGTTNGLMNDDRDSLRPEEIKWHEDAPEGKLDLLINLDFRMAGTALYSDIVLPASTWYEKHDLSSTDMHPFVHPFNPAIGSPWEARSDWDIFTSLSKAVSDLAEKIDLDPMKEVVATPLLHDTPQELAQPLGKIKDWSKGECEPIPGKTMPQIHVVERDYKTIYDKMTALGPNAGKQPIGTKGISWSAEKEYEQLKSRLGVVRTDSIAKGCPDIKEAINAAEAVLTLSSTTNGHMAVKAWEALEKQTDLKLRDLAEEREEECFTFEQITAQPKTVITSPAFTGSEKGGRRYSPFTTNVERLIPWRTITGRQSFYLDHDMMKEFGETMATFKPILQHKPFRKSRPEVEGKEITLNYLTPHNKWSIHSMYFDSLPMLTLFRGGPTVWMNKEDAAEAGVADNDWIECFNRNGVVVARAVVTHRIPRGMAFMHHAQDRHINVPGTKLTSNRGGTHNSPTRIHVKPTHMIGGYGQLSYGFNYYGPTGNQRDLNVVIRKLKEVDWLED

SEQ ID NO: 45593 - protein, 120 aa, Bacillus anthracis
MAYRKLGRTSAQRKAMLRDLATDLIINERIQTTETRAKELRSVVEKMITLGKRGDLHARRQAAAFIRNEVANAETGQDALQKLFADVAPRYAERQGGYTRIAKIGPRRGDAAPMVIIELV

SEQ ID NO: 45594 - protein, 779 aa, Bacillus anthracis
MLQPKTRWKEKEYNGERVSELASKLQLSPLVVSLFLGRGLDTEDKILDFLNTENQEFHDPFLLEGMDRTVERVNKAIQNGEQILIFGDYDADGVSSTTVLYLALQELGADVEFYIPNRFTEGYGPNEEAFRWAHSAGFSLIITVDTGIAAVHEAKVAKELGIDLIITDHHEPPPELPEALAIIHPKLDGGVYPFHYLAGVGVAFKVAHALLGRVPEHLLEIAVIGTVADLVSLHGENRLLVKRGLKHMRMTKNIGLKALFKVANVSQSEITEESIGFSIAPRINAVGRLEDATLAVHLLLSEDPEEAKELAEEIDELNKLRKDIVKQITEEAIAEVENNFPPEENKVLVLAKEGWNPGVIGIVASKLVERFYRPTIVLCIDPVKETAKGSARSIAGFDLFANLSDCRELLPHFGGHPMAAGMTLHMNDVDELRRRLNEQAEEILTEEDFIPITAVDAFCKVEDVTLAAIEDMQKLAPFGVGNPKPRIAVKDAELESIRAIGSDGSHLKMALRDGQATLDTIGFGFGAYAKEISPVAKVSVIGEASINEWNNFKKPQLMVKDIAVEAWQLFDWRSMRNVEANVAELPKEKITMVYFSKEVLHKFSLEDYKEHMMHASEVTELDEQYIVLLDLPKGTDELRDLFKVGFPSRIYTLFYQENNHLFSTVPTRDHFKWYYSFLSQKSPFSLRQYGEQLCQHKGWSKDTVNFMTQVFFELEFVTIKDGVIFMADKKQKRDLIESNTYREKMNHLQLEKELVYSTYQQLYTWFETIRNHKEVEQLG

SEQ ID NO: 45595 - protein, 136 aa, Bacillus anthracis
  MISC_FEATURE (22)..(22): X=any amino acid
  MISC_FEATURE (24)..(24): X=any amino acid
  MISC_FEATURE (129)..(129): X=any amino acid
GTGISTCCPSPTPVGLGLGPDXPXADEPSSGNLRHSVDGILTRLFATHTGILTSKHSTSPSGLTSLSLERSPTTDTIGINSAASVVYLAPVHFRRRVTRLVSYYALFKWWLLLSQHPSCLSNSTSFSTXYTLWDLS

SEQ ID NO: 45596 - protein, 529 aa, Bacillus anthracis
MKYRAVAAGILAASLLSSPVSSFAAAKKFSDVPTWAQQSVDYLVGKKALDGKPDGTFSPSEAVDRGSAAKILAVVLGLPVDPKAKPSFKDAQNHWAAPYIAAVEKAGVINGDGTGKFNPSSQINRASMASMLVQAYSLDKKIIGELPTQFKDLEPHWGKKQANILVALEISKGTGNGWNPEGTVTRAEAAQFIAMADQNKTSTSKRMYMNRNVITYHQPSLSSGITDVQHKPQMVEVTEQRADGWLKIVTSKGEKWTPLTEKTETINEEFTTYETASHSSKVLGTYNAQTVTVMEESGSWIRIRVGAGFQWVDKNQLNPVKQENFLEGKAIIIDPGHGGIDSGNVGYYEKESETVLDVSLRLKKIFEQKAPFTVMFTRTDNTRPGVNSTDSLKKRVEFAQEHNGDIFVSIHANGSAEKNGQGTETLYYQSARAKVTNPHVEDSKLLAQKIQDRLVAALGTKDRGVKHQDLYVTRENTMPAVLTELAFVDNKSDADKIATPKQRQAAAEAIYQGILDYYEAKGNNVSSFR

SEQ ID NO: 45597 - protein, 219 aa, Bacillus anthracis
MGQKVNPIGLRVGVIRDWESRWFAEKDYATLLHEDIKIREYINVRLKDSAVAKVEIERAANRVNVTIHTAKPGMVIGKGGTEVEALRKALNQLTGKRVHINILEVKRADLNAKLVGENIARQLENRVSFRRAQKQVIQRAMRAGAKGIKTQVSGRLGGADIARAESYSEGTVPLHTLRADIDYAAVEADTTYGKLGVKVWIYRGEVLPTKKKASEEGGK

SEQ ID NO: 45598 - protein, 680 aa, Bacillus anthracis
MYKTFTNISEGKNSMSHSIEQLSINTIRTLSIDAIEKANSGHPGMPMGAAPMAYTLWTQFMKHNPNNPTWFNRDRFVLSAGHGSMLLYSLLHLSGYDVTMDDLKNFRQWGSKTPGHPEYGHTAGVDATTGPLGQGIATAVGMAMAERHLAAKYNRDAYNIVDHYTYAICGDGDLMEGVSAEASSLAAHLQLGRLVVLYDSNDISLDGDLNRSFSESVEDRYKAYGWQVIRVEDGNDIEAIAKAIEEAKADEKRPTLIEVRTTIGFGSPNKSGKSASHGSPLGVEETKLTKEAYAWTAEQDFHVAEEVYENFRKTVQDVGETAQAEWNTMLGEYAQAYPELANELQAAMNGLLPEGWEQNLPTYELGSKAATRNSSGAVINAIAESVPSFFGGSADLAGSNKTYMNNEKDFTRDDYSGKNIWYGVREFAMGAAMNGIALHGGLKTYGGTFFVFSDYLRPAIRLAALMQLPVTYVFTHDSIAVGEDGPTHEPIEQLAALRAMPNVSVIRPADGNESVAAWRLALESTNKPTALVLTRQDLPTLEGAKDDTYEKVAKGAYVVSASKKETADVILLATGSEVSLAVEAQKALAVDGVDASVVSMPSMDRFEAQTAEYKESVLPKAVTKRFAIEMGATFGWHRYVGLEGDVLGIDTFGASAPGEKIMEEYGFTVENVVRKVKEML

SEQ ID NO: 45599 - protein, 324 aa, Bacillus anthracis
MKKILSIFIVVFLFAVGCGQQKEEKKETKADNKNQAITIKHAEGETKLDKPAKKVVVLEWVYSEDLLALGVQPVGMADIKNYNKWVNTKTKPSKDVVDVGTRQQPNLEEISRLKPDLIITASFRGKAIKNELEQIAPTVMFDPSTSNNDHFAEMTETFKQIAKAVGKEEEGKKVLADMDKAFADAKAKIEKADLKDKNIAMAQAFTAKNVPTFRILTDNSLALQVTKKLGLTNTFEAGKSEPDGFKQTTVESLQSVQDSNFIYIVADEDNIFDTQLKGNPAWEELKFKKENKMYKLKGDTWIFGGPESATSLATQVADVMTAKK

SEQ ID NO: 45600 - protein, 138 aa, Bacillus anthracis
MLKGINHLCFSVSNLEDSITFYEKVLEGELLVRGRKLAYFNICGVWIALNEEIHIPRKEIHQSYTHIAFSVEQKDFERLLQRLEENDVHILQGRERDVRDCESIYFVDPDGHKFEFHSGTLQERLNYYREDKPHMTFY

SEQ ID NO: 45601 - protein, 598 aa, Bacillus anthracis
  MISC_FEATURE (102)..(102): X=any amino acid
  MISC_FEATURE (103)..(103): X=any amino acid
  MISC_FEATURE (127)..(127): X=any amino acid
  MISC_FEATURE (203)..(203): X=any amino acid
  MISC_FEATURE (282)..(282): X=any amino acid
  MISC_FEATURE (338)..(338): X=any amino acid
  MISC_FEATURE (347)..(347): X=any amino acid
  MISC_FEATURE (549)..(549): X=any amino acid
  MISC_FEATURE (550)..(550): X=any amino acid
  MISC_FEATURE (551)..(551): X=any amino acid
IAEHATIQSFLNCYLRETGSGEWITEDKRIEDIFYPLFQKEILALLIYAVGYRHKTLSLYGEVIYKSPTDRHLFGEQFYYQMGDIYFVLESPDFGSQLIPFXXKGMFFQSGEKGRTLADLMFRVIPXVSKYWGIFQKERKEDPSALYGFHTSLIEPEQSLLFGHLAHPLPKSRQGIWERKKVGCYSSKIKGGKCQFHYFGATXEVWGIENSFFVSFSSSNFKRGVPQMMKWLVRNLYREYCNEDEYSLFPIHPLQAKGFLPQPFLSGLDEQGVLEYIGPTRXVLMANIILRTLYHPDAKYMLKFSFPVKVTNSMRINKLKELESGLGRHGIVNSGDGXMLRETFRAXYHCDAAFITLNYGTQESGFEVIIRENPFYSEHADDATLIAGLVQDAIPGERTRLSNIIHRLADLESRSCEEVSLEWFRRYMNISLKPMVWMYLQYGVALEAHQQNSVVQLKDGYPVKYYFRDNQGFYFCNSMKEMLNNELAGIGERTGNLYDDYIVDERFRYYLIFNHMFGLINGFGTAGLIREEILPLGIKNYLESFLPIXXXTFYFLRDLSNEDKSACKQNLLTRFFDVDELSNSLEQAIYVQVQNPLV

SEQ ID NO: 45602 - protein, 396 aa, Bacillus anthracis
MKKLGNLILFIGFLTIIFSFGILSLLKTDRDISPVENRPLAQKPALTKEALLTGSFFKDFETYTNDQLIGRDELIKNYTIAQINMGKSLINDIILTDDKWLLKNPAWTTKYNEIDQSMPAINDLSQFSKEQNVEFYFALPPSKTNALSFKLPSHIHTYAQENLNYFLTKLPADVKPIKLMEHLKKNYTNEEIQDMYFKTDHHWNMDGAFLGYQYIMNTIGQQSSIYKGKEIKKEDYTRTCAQNKHLVGSFNNQLYQLIDATGEKLCYYTPKDGFNFTSVTAKDVKGTIHQNLDEIYGVEKQKDTTSYAGYYTDDYPEIVIENNNAQNEVRALVLKDSFANAIVPHLAQSFKHTSILDLRHYHEKDVYQYMKDNNINMVLFVYSDSNLSGDMFKFKK

SEQ ID NO: 45603 - protein, 90 aa, Bacillus anthracis
MSINNVQYEVIKNFRDGFSEEAFKERYAEILNKYDYIVGDWGYEQLRLRGFFDDSNQRATYDTKISTLSEYLYEYCNFGCAHFVLRKVKK

SEQ ID NO: 45604 - protein, 397 aa, Bacillus anthracis
MERFKKASSIIETLKQQGHEAYFVGGSVRDLIIDRPIGDIDIATSALPEEVMAIFPRHVPVGLEHGTVIVVENGEPYEVTTFRTESEYEDFRRPSSVQFVRSLEEDLKRRDFTMNAIAMTEEGEMVDLFAGQEAIQKREIVTVGNAADRFQEDALRMMRGIRFVSTLGFSLETKTKQAIETYGHLLEHIAIERITVEFEKLLTGTYCVKGLKELVETKLFSHLPYLQMSEERLLKATQYNWDSFETDIEAWAFFLYCIGEEHPSVFLRQWKFSNKKIKDIVAVLLTIRKRKEKDWDTVLLYKTGIHIAEMAERVYEAMIESYDHTSVERVQTLFQALPIKSRQEMDVTGNDLLNWASKKPGPWVAEMIQKIEEAIVQGNVVNEKECIREWLQECNLL

SEQ ID NO: 45605 - protein, 430 aa, Bacillus anthracis
  MISC_FEATURE (224)..(224): X=any amino acid
  MISC_FEATURE (244)..(244): X=any amino acid
GAVALIVERDVNIEIPKIIVKDARYAMAVIASHFYGYPSNKMKLIGITGTNGKTTTSYLLEKILSDYGYHTGLMGNNGVKVGSKWYPTDINTQEPPTLQRNLQMMKNQNADYCVMEVTSQGLHMERVKGCNFKIAVFTNLTQDHLDYHGTFDEYKHVKSLLFARLGNNLSTIDKKIAVLNADDPSVGYFKKLLSAEVITYGIHNGADVQAKEILLSPKRNSFFXFSSFNGRNRGVSLNLCRRFXWFINALAAITVALVEGIPLTNISDSLSNLKSIEGRMEIIDENQDFLVIVDYAHTPDALENVLSTIREFAKGKIITVFGCGGDRDAKKRSIMGGIAGSYSDFVFITSDNPRSEDPQAIMKDIEKGFSQNNNLNYKVEVDRELAINHAINMASSNDIVLIAGKGHETYQILKDSTIHFDDKEKARQAI

SEQ ID NO: 45606 - protein, 292 aa, Bacillus anthracis
  MISC_FEATURE (101)..(101): X=any amino acid
  MISC_FEATURE (236)..(236): X=any amino acid
IFLNGEFVPKDEAKVSVYDHGYLYGDGVFEGIRVYSGNVFRLREHLVRLYESAKSIMLEIPYSLDEITNIVVETIRQNKLSNGYIRLVVSRGAGNLGLDPXSCTKPNVVVIAEQLSLFPQEYYEKRIPVVTVATRRNRPDVLSPQVKSLNYLNNIFVRIEAKIGWVQKALMLNDQGYVAEGLRRNVLLVKGNKFITTTKFAERLEGITRNAILEIGEKLGYDVRERVIYQDMMYMXADESIFNRNRAGGKKLAVTTVDGRTIGLGQTGPHTNRLLEEFRKLVIEDGEKIYEE

SEQ ID NO: 45607 - protein, 96 aa, Bacillus anthracis
MLRLDLQFFASKKGVGSTKNGRDSQSKRLGAKRADGQTVSGGSILYRQRGTKIYPGVNVGRGGDDTLYAKVDGVVRFERLGRDRKQVSVYPVAQEA

SEQ ID NO: 45608 - protein, 185 aa, Bacillus anthracis
MGQQVLKFSNEKMEKAVAAYSRELATVRAGRASASVLDKVQVDYYGAPTPVVQLANITVPEARLLVIQPYDKTSIGDIEKAILKADLGLNPSNDGTVIRIAFPALTEERRRDLVKVVKKYAEEAKVAVRNVRRDGNDDLKKLEKAGEITEDDLRGYTEDIQKETDKYIAKVDEIAKNKEKEIMEV

SEQ ID NO: 45609 - protein, 44 aa, Bacillus anthracis
MKRTYQPNKRKRSKVHGFRSRMSTANGRKVLAARRRKGRKVLSA

SEQ ID NO: 45610 - protein, 323 aa, Bacillus anthracis
MSNLFTTVKEKVQGKGISIVLPEGTDERILGAAERLAKEELVKPILVGNKEEISAKAASMNLTLAGVDIYDPATYEEMDAMVASFVERRKGKATEEDARKILKDENYFGTMLVYMGKAHGLVSGAAHSTADTVRPALQIIKTKPGVTKTSGVFIMVREEEKYVFADCAINIAPNSQDLAEIGIESAKTAELFGIDPRVAMLSFSTKGSAKSPETEKVVEATRIAKEMAPELTLDGEFQFDAAFVPSVAEKKAPGSTIKGDANVFVFPSLEAGNIGYKIAQRLGNFEAVGPILQGLNMPVNDLSRGCNEEEVYKLALITAAQAL

SEQ ID NO: 45611 - protein, 254 aa, Bacillus anthracis
MKNIDSVQNPRVKQWKKLQTKKERDKKGLFFVEGFHLVEEALKAGVVTELIVSDQTDLPKDWTVNDVEMYIVPEAIVKVLRETETTQGVFAVCEKHESEVALTDGKFLLLDGLQDPGNLGTIIRTADAAGIHAVVLGEGCVDAYNSKVLRSTQGSIFHLPIVKGNLKEWVDKLKENNVPVYGTALENGVPYGEVTPAGSFALIVGNEGNGVRQEILAKTDQNLYIPIYGGAESLNVAVAAGILTYYLQSPVANK

SEQ ID NO: 45612 - protein, 446 aa, Bacillus anthracis
MENISDLWNSALKELEKKVSKPSYETWLKSTTAHNLKKDVLTITAPNEFARDWLESHYSELISETLYDLTGAKLAIRFIIPQSQAEEEIDLPPAKPNAAQDDSNHLPQSMLNPKYTFDTFVIGSGNRFAHAASLAVAEAPAKAYNPLFIYGGVGLGKTHLMHAIGHYVIEHNPNAKVVYLSSEKFTNEFINSIRDNKAVDFRNKYRNVDVLLIDDIQFLAGKEQTQEEFFHTFNALHEESKQIVISSDRPPKEIPTLEDRLRSRFEWGLITDITPPDLETRIAILRKKAKAEGLDIPNEVMLYIANQIDSNIRELEGALIRVVAYSSLINKDINADLAAEALKDIIPNSKPKIISIYDIQKAVGDVYQVKLEDFKAKKRTKSVAFPRQIAMYLSRELTDSSLPKIGEEFGGRDHTTVIHAHEKISKLLKTDTQLQKQVEEINDILK

SEQ ID NO: 45613 - protein, 214 aa, Bacillus anthracis
  MISC_FEATURE (198)..(198): X=any amino acid
QESGMGAGKNKFVLLINEGPIIAATLRAFEKDKACKNIIMAINEEERPYFEELMQKYPVEKPVQFIQGGAERQDSVYNAIQHTTDVEYVLVHDGARPFVTNKVIQDVLTAAEKYGASICRVPGKDSFIEIWSKVFFSKTVKKIANLKPVKPPPRVFLFRLVRKLIEVGNKSCFLGTGDASFVEVIGKQVVVVEGSFLXYKVTAPGGFTIAESFL

SEQ ID NO: 45614 - protein, 173 aa, Bacillus anthracis
MKQAQEENAVQSKQLLDALKQLGIADKDIETISYTITPQYEYVNDKALLQGYRVEHLYEITVLNVQKAGEVYDIAVSNGANVAKGLRFRISHPNKYYEQALIQALQQAVEKARAIASTYNLNINPVPLSFVEESAQLPREVTSYATLHAQAAPPIQSGELEIISTIRAIFTYL

SEQ ID NO: 45615 - protein, 337 aa, Bacillus anthracis
MQERYSRQVLFSGIGEMGQRKIREKHVLLIGAGALGAANAEALVRMGIGKLTIADRDYVEWSNLQRQQLYTEEDAKQCKPKAIAAAEHVRKINSEVEIVPVVTDVTMKEMEELTKEVDLILDATDNFDTRLLINDISQKENIPWIYGGCIGSYGVTYTILPGKTPCFRCLMDHPMGGATCDTAGIIQPAVQMVVAHQVTEAMKILVDDFETLRGTMLSFDIWNNQFLSLKVNKQKKSTCPSCGNTRTYPSLTFESQVKTEVLCGRNTVQIRPGIKRVLNLNEIKKRLQKIVHVQKTPYLLSFLIDEYRFVLFTDGRAFVHGTNDVKIGKRLYAKYIG

SEQ ID NO: 45616 - protein, 382 aa, Bacillus anthracis
MVEKMNEEVMDSKELQVGDVVTGSVTKVEEKQVLVNVGYKTDGVIPISELANVHIEKASDVVELDQTLELKVIKLEENDLVLSKRAVDAEKAWVELQEKFNSGHVFDVTVKDIVNGGLVVDLGVRGFIPASLVEVHYVEDFTDYKGKTLAVKIVELDREKNRVILSHKAVVELELDSKKKEAISSLKEGDVVEGTVQRLTDFGAFVNVGGVDGLVHISQISHERVEQPSEVLEQGQKVKVKVLSVDADTQRISLSIKAAQPGPWENVGGEVKAGDIREGVVKRLVTFGAFVEILPGVEGLVHVSQIANRHVKNPNEVLEMGQEVKVKVLEVHVAEKRISLSIKEALEENNVTEDYSQYEPNADSATFQLSDIIGEQLKKLKK

SEQ ID NO: 45617 - protein, 502 aa, Bacillus anthracis
  MISC_FEATURE (10)..(10): X=any amino acid
  MISC_FEATURE (441)..(441): X=any amino acid
  MISC_FEATURE (456)..(456): X=any amino acid
  MISC_FEATURE (462)..(462): X=any amino acid
  MISC_FEATURE (480)..(480): X=any amino acid
MLQFLQRIGXAVMLPIAVLPAAGILLRLGQEDVFYISVMAQAGAAIFDNLALYFAIGCCNPVCLVDGSWSNLDFAGAIRISLVLPNTTNALSKTYSAAELNDKLKSVQDLVGSVDPTKLADTMTKVSKAAALTPKINMAILGGIIAGVVAGLLYNKFHKIKLPEWLGFFAGKRFVPIITSIVMLLLGLLFGQIWPTIQSGIDAVAHGIVNLGSIGAGLFGLLNRLLIPIGLHHVMNTYFWFVLGDFTNAAGDIVHGDIARFFAKDPSAGMFYGLFLPSYDVGLPAACFAMIAAAKPEKRKMVTGMLGGLALTSFLTGITEPIEFSFMFLSPVLYGIHAVLTGLSLFITTTLGIHDGFSFSAGAIDYVLNFGICTKTLLLAGNRFNYAAIYFVVFYFLIKKVDPKTPGREDEEEMAEGEEAPVAGSIGETYVAALGGKRKLXQLLITCATGFTLYRXRWLSKXPKAALKRAGAKRCYEIKXTSVQVIVGTNGESVADDMKKHV

SEQ ID NO: 45618 - protein, 384 aa, Bacillus anthracis
  MISC_FEATURE (34)..(34): X=any amino acid
  MISC_FEATURE (63)..(63): X=any amino acid
  MISC_FEATURE (88)..(88): X=any amino acid
  MISC_FEATURE (184)..(184): X=any amino acid
IMDRPFRYVFIKNFVNKPGARFKNWYIPPHRSFXTPTFMPVGTLANVRTCHPEELKAMESGHXFLSNTYPFMLPSRHEIFLKTRGLPXFLNWGSGNLTDSGGFQVFSLSDFRRIEEEGVHFRIHLNGDKLFLSPEKAMGNSKCIGSDIMMAFDECPPFPATFEYMKKSVERTSRWAERCLKAAXTSTRSGLFGIVQGGEFEELRRQSAKDLVSMDFPGYAVGGLSVGEPKDIMNRVLEFTTPLLPDNKPRYLMGVGSPDSLIDGAIRGIDMFDCVLPTRIARNGTCMTSEGRLVVKNAKFARDFGPLDPNCDCYTCKNYSRAYIRHLMKCDETFGIRLTSYHTLHFLLNLMEQVRTAIREDRLGDFREEFFEQYGFNKPNAKNF

SEQ ID NO: 45619 - protein, 585 aa, Bacillus anthracis
MRKTKIVCTIGPASESIEKLEQLIEAGMNVARLNFSHGSHEEHGARIKNIREASKKTGKTVGILLDTKGPEIRTHDFVDGQAELVTGAEVVLSTEQVLGTAEKFSVSYAGLYDDVDPGSRILIDDGLIELEVIEKADGNIRTKVLNSGTVKNKKGVNVPNVSIKLPGITEKDVKDIIFGIEQKVDFIAASFVRKAADVLEIRELLEEHNAQYIQIVPKIENQEGIDNIDSILEVSDGLMVARGDMGVEIPPEEVPLVQKRLIKKCNVLGKPVITATQMLDSMQRNPRPTRAEASDVANAIFDGTDAIMLSGETAAGQYPVEAVTMMANIAVRVEKSLQYEDMFKKRIKEFTPTITDAISQSVAHTALALDVAAIVAPTESGYTAKMISKYRPKSPIVAVTSDEQVGRRLALVWGVQAFMAEKRAASTDEMLDTAIQTGMDAGLIGLGDTVVITAGVPVAETGTTNLMKIHVVGEEVAKGQGIGRKAAKGKVVVAKTAAEAVANVNEGDILVTTSTDKDMIPAIEKAAALVVEEGGLTSHAAVVGVSIGIPVIVGVNGVTATLKNGQEVTVDAARGIVYNGHAEVL

SEQ ID NO: 45620 - protein, 243 aa, Bacillus anthracis
MNLKKFEEVINGEGLHESFHHLEIHGVCIDSKNIKEGNVFVPIIRVKDGHEYVKEAMDNGAIASLWKKSYGSPPKGIPIIFVDDTLFALQQLAQFYRREINVKVIGITGSNGKTTVKDIVEGILRSTYRVHKTKGNFNSQIGLPLTILEMKRDTEILILEMGMSEKGCRIIERFTWNSFRGNCPKVDVKNQNLFKNACILQSEEIEYSVNIKSDDQEKYMMQRSTESNRLLERLRYRMMERHL

SEQ ID NO: 45621 - protein, 156 aa, Bacillus anthracis
ESRVFKTSRVFPTDLSDHNTLFGGKILAEMDMVASISATRHAIKECVTASMDWGDFLHPVSSSDCVRYESFAMLTGRTSMEVFVKVVAEDLISGEKRIAATSFVTFVALSKENNPVPVPRVIPETEEEKELHRIAVLRAEQRHIRKAESKKVATLL

SEQ ID NO: 45622 - protein, 44 aa, Bacillus anthracis; identical to SEQ ID NO: 45609

SEQ ID NO: 45623 - protein, 667 aa, Bacillus anthracis
  MISC_FEATURE (146)..(146): X=any amino acid
  MISC_FEATURE (191)..(191): X=any amino acid
  MISC_FEATURE (210)..(210): X=any amino acid
  MISC_FEATURE (222)..(222): X=any amino acid
  MISC_FEATURE (410)..(410): X=any amino acid
  MISC_FEATURE (547)..(547): X=any amino acid
  MISC_FEATURE (585)..(585): X=any amino acid
  MISC_FEATURE (590)..(590): X=any amino acid
  MISC_FEATURE (618)..(618): X=any amino acid
  MISC_FEATURE (629)..(629): X=any amino acid
  MISC_FEATURE (630)..(630): X=any amino acid
  MISC_FEATURE (639)..(639): X=any amino acid
RIEELRDLLNTFNYQYHVLDNPSVSDAEYDRNMQELIKLEAENPEFMSEDSPSIRVGGTGLDIFEKVTHKSPMLSLGNAFNEGDLRDFDRRVRQGIDDANVRYICELKIDGLAVSLHYEKDCSSKGPPRGDGVPVKDIPPNFKRIXAIPLRLNEEVTLEARGEAYMAERSFVKLNEEKEQNGERCIWNPAXCGAGFIPPNLIRKFAAKAXLYLYLYTVLRMXSTKPIPSHSESLDYLGELGFKTNPNRRTCETIEEVIAYVEEWQEKRPHLDYEIDGIVIKVDDVALQESLGTTAKSPRWAIAYKFPAEEVVTRLTGIELSVGRTGVVTPTAELEPVRVAGTIVRRASLHNEDLIREKDIRIGDYVVVKKAGDIIPEVVNVIFDKRTGVGKKEYHMPTHCPAGESDLGRXEERVSISCNNSTLSLFKLEKGLIHFVSRNGMNIDGLGERVITQLFDADYIRTFADLYSLTKEQLLQLERFGVYLSNELVQAIENSKENSLVAIIISVLVSPCRAKASTYICRSISKRMDALVKAAEEDIKPNYGDWXKMGQSVVAYFDNEDVLELLQQFKGVWREYDIKRYKNCXFTKCXVYFCRKKPVVLNWENWKLWKLGKREEDXALGGKVTRKCXXKYGFSCRRXSAGSKLAQAEKHNVEVWNEERFLQELNK

SEQ ID NO: 45624 - protein, 370 aa, Bacillus anthracis
MTKQNKAYKFRLYPTEEQAHLIRKTFGCVRFVYNKMLAERKEVYEKHKANKEELKEQKFSTPAKYKVEYEWLKEVDSLALANAQLNLQTAYKNFFSGQSDFPTFKSKKSRKSYTTNRVNGNIMLFHGYIKLPKLKMVKLKQHREIPPKHIIKSCTISMTPTGKYYVSILTEYEKEITPKEVERVVGLDFAMVELYVSSEDEKANYPRFYRQMLEKLAKAQRVLARRVKGSERWNKQRIRVAKLHEKVANQRKNFLHHKSKELATSFDVVAIEDLHMKGMSRALRFGKSVADNGWRMFTAFLAYKLQEQGKQLVKIDKWFPSTKMCSRCGNKKEMPLCERTYACSCGLTIGRDYNAAINIKKEAIRLLALA

SEQ ID NO: 45625 - protein, 136 aa, Bacillus anthracis; identical to SEQ ID NO: 45595
  MISC_FEATURE (22)..(22): X=any amino acid
  MISC_FEATURE (24)..(24): X=any amino acid
  MISC_FEATURE (129)..(129): X=any amino acid

SEQ ID NO: 45626 - protein, 173 aa, Bacillus anthracis
MMNRVILVGRLTKDPDLRYTPNGVAVATFTLAVNRAFANQQGEREADFINCVIWRKQAENVANYLKKGSLAGVDGRLQTRNYEGQDGKRVYVTEVLAESVQFLEPRNGGGEQRGSFNQQPSGAGFGNQSSNPFGQSSNSGNQGNQGNSGFTKNDDPFSNVGQPIDISDDDLPF

SEQ ID NO: 45627 - protein, 173 aa, Bacillus anthracis
MGVDFTCLKFQKFVDLFKLIDSSNIDEFEYQKGWYDHSKWKRRGNESCWRCQPPVSETRPCNPVAPVEVETTVAAAQVEVPNQKEKKAVQNENLHKITSPMVGTFYSSSSSSPDTPPYVSVGDRVSKDSIVCIVEAMKLFNEIDADVDGEIVEILVNNGQLVEYGQPLFLVKA

SEQ ID NO: 45628 - protein, 379 aa, Bacillus anthracis
MRFSIQKDYLVRSVQDVMKAVSFRTTIPILTGIKVVATEEGVTLTGSDADISIESFIPVEEDGKEIVEVKQSGSIVLQAKYFSEIVKKLPKETVEISVENHLMTKITSGKSEFNLNGLDSAEYPLLPQIEEHHVFKIPTDLLKHMIRQTVFAVSTSETRPILTGVNWKVYNSELTCIATDSHRLALRKAKIEGIVDEFQANVVIPGKSLNELSKILDESEEMVDIVITEYQVLFRTKHLLFFSRLLEGNYPDTTRLIPAESKTDIFVNTKEFLQAIDRASLLARDGRNNVVKLSTLEQAMLEISSNSPEIGKVVEEVQCEKVDGEELKISFSAKYMMDALKALDSTEIKISFTGAMRPFLIRTVNDESIIQLILPVRTY

SEQ ID NO: 45629 - protein, 103 aa, Bacillus anthracis
MKMAYLLQVDFPFEGPFGEEMEKGFWDLAKSINEEEGFHWKIWTENQETKEAGGIYVFEEKQDAEKYAEMHKNRLEAAGVKDIRVRIFNINEKLTELNRGYTK

SEQ ID NO: 45630 - protein, 303 aa, Bacillus anthracis
MIYTVTLNPSIDYVVQVNSLDLGAVNRAEKDMKFPGGKGINVSRVLHRLGVENVALGFTGGFTGRFIKDVLQTEGVITNFVQVDGDSRINVKIKGQEETELNGQGPSVTNEQFEQLMKQIESMQKGDYVVLAGSVPASIPTTFYESIAAFGAEKGIRVVVDASGSALQHVVKNKPFLIKPNHHELGELFGVEISTAEDILPYGRKLIEQGVEHVIVSMAGDGALLFTAEGIYEATVPKGVVINSVGAGDSLVAGFVGKYEQTKDIEKAFQYGVATGSATAFSADLCEKEKVEELLSQVIVTKR

SEQ ID NO: 45631 - protein, 249 aa, Bacillus anthracis
LATRIEFTKDRSVRTLDAANLRLVVSIAKRYVGRGMLFLDLIQEGNMGLIKAVEKFDYRKGFKFSTYATWWIRQAITRAIADQARTIRIPVHMVETINKLIRVQRQLLQDLGREPSPEEIGEEMDLAPEKVREILKIGQNPVSLETPIGEEDDSHLGDFIEDQEATSPGNHAAYELLKEQLEDVLDTLTDREEKCLRLRFGLDDGRTRTLEEVGKVFGVTRERIRQIEAKALRKLRHPSRSKRLKDFLE

SEQ ID NO: 45632 - protein, 230 aa, Bacillus anthracis
EQINSLHAKLVTNNQEFPTNQQQQQTFISDLHTKVAKVDSEIEGLEESKGILENQRQAVQKAIEEEKRAEEARKAEEARKQATTSAQKAQAAPTPHDTNIGGFIKPAAGSKTSGFGVRSIDNHKGIDIAASGTVPIIAAADGVVIRSQLSSSYGNVVYLSHRINGKTYTTVYAHMSSRSVSNGQTVKQGTQLGFMGNTGSSTGPDFPLPNFHLGEWNVGKTNAVDPSPYI

SEQ ID NO: 45633 - protein, 793 aa, Bacillus anthracis
MAKQKQRGTKAKARRTIKPTLYYEIVGLTLFALSIITILQLGVVGKSFVLFFRFFFGEWYIIGVLGVIALSVSFVIKRGWPNLLNKRLIGFYLIVLAILMFSHITLFNLLTKDGAVQNTSVIVSTKDNFFLEMKKGPDSVHLGGGMFGALMFATCYFLFDEVGAYIIGIILVILGILCITNKHIGEVLAPVGRILRSQFQVMQGDYKDWRAKRTAEQTEKKKTTRSTRSKRATEQEEIIEPMEEISIDPPIISNFTENYPVNEQEDKRIEVEQEELITSPFIEEAPPVEEPKKKRGEKIVESLEGETQAPPMQFSNVENKDYKLPALDILKFPKNKQVTNENAEIYENARKLERTFQSFGVKAKVTKVHRGPAVTKYEVYPDMGVKVSKIVGLSDDLALALAAKDIRIEAPIPGKSAVGIEVPNSEVSMVTLREVLDSKANNHPEEKLLIGLGRDITGEAVLARLNKMPHLLVAGATGSGKSVCINGIIVSILMRAKPHEVKLMMIDPKMVELNVYNGVPHLLTPVVTDPKKASQALKKVVSEMERRYELFAHSGTRNIEGYNDYIKEHNNQSEAKQPELPYIVVIVDELADLMMVASSDVEDAIMRLAQMARAAGIHLIIATQRPSVDVITGVIKANIPSRIAFAVSSQTDSRTILDGGGAEKLLGRGDMLFIPIGASKPVRVQGAFLSDDEVERVVEYVIGQQKAQYQEDMIPQDVPDTKQEVEDELYDEAVQLVVEMQTASVSMLQRRFRVGYTRAARLIDAMEMNGVVGPYEGSKPREVLINDVQEKSS

SEQ ID NO: 45634 - protein, 739 aa, Bacillus anthracis
MSLMLEPNPTQIKEERIYAEMGLTDEEFAMVEKILGRLPNYTETGLFSVMWSEHCSYKNSKPVLRKFPTTGERVLQGPGEGAGIVDIGDNQAVVFKMESHNHPSAIEPYQGAATGVGGIIRDVFSMGARPVALLNSLRFGELQSPRVKYLFEEVVAGIAGYGNCIGIPTVGGEVQFDPCYEGNPLVNAMCVGLINHEDIKKGQAHGAGNTVMYVGASTGRDGIHGATFASEELSESSEAKRPAVQVGDPFMEKLLIEACLELIQSDALVGIQDMGAAGLTSSSAEMASKAGMGIEMYLDDVPQRETGMTPYEMMLSESQERMLIVVKKGREQEIVDLFEKYGLAAVTMGKVTEDKMLRLFHKGEMVAEVPADALAEEAPIYHKPSKEAAYFAEFQQMKMETPKVENYKETLFALLQQPTIASKEWVYDQYDYQVRTSTVVTPGSDAAVVRVRGTEKGLAMTTDCNSRYIYLDPEVGGKIAVAEAARNIVCSGGEPLAITDCLNFGNPEKPEIFWQIEKSVDGMSEACRTLQTPVIGGNVSMYNERSGEAVYPTPTVGMVGLVHDLKHVTTQEFKQAGDLVYVIGETKAEFGGSELQKMLHGKIFGQSPSIDLDVELKRQKQVLAAIQAGLVQSAHDVAEGGLAVAISESAIGANGLGATVKLDGEATAALFAESQSRFVITVKRENKEAFEKAVEAIQVGEVTNTNEVTIHNEENEVLLTANVDEMRKAWKGAIPCLLK

SEQ ID NO: 45635 - protein, 287 aa, Bacillus anthracis
  MISC_FEATURE (52)..(52): X=any amino acid
  MISC_FEATURE (133)..(133): X=any amino acid
  MISC_FEATURE (185)..(185): X=any amino acid
  MISC_FEATURE (188)..(188): X=any amino acid
  MISC_FEATURE (238)..(238): X=any amino acid
  MISC_FEATURE (254)..(254): X=any amino acid
  MISC_FEATURE (285)..(285): X=any amino acid
MGVQKIVVIGAGQMGSGIAQVCPMARFCVESSRILKQSQIDRRIGFPLRKTXARQVEKRRMKEEEKEATLNRLTVTLDLDCVKEADLIIEAAVEKMDIKKKIFANLDEISPRPRQFLGGNSSFPPNKKIPAYXRSPREKVIGIPFYDSRFRLRNLVEIIRGLATDDAVYETIEDITKEDWKVPVXVKXFPGFVSNRILLPMINEAIYTLYEGVATKEAIDEVMKLGMNQPDGALLARXFYGFRYMVILMGGVAXRLRDKKYRPCPLLRKYRNCGVAWSLTGRGFXRY

SEQ ID NO: 45636 - protein, 454 aa, Bacillus anthracis
  MISC_FEATURE (279)..(279): X=any amino acid
MKKEERMAKEISEQLGGVKNIRGIAHCMTRLRLTLHDESKVNMDLLKKVEGVMGVIEDETLQVVVGPGTVNKVAAEMKVLNGLRIGEVADYHLEDLGQEMKSEIKKKNNTPVKNFLRKNRSILNPLIPGLGCSGIINGVANLAKKRRADPNATWLQMLLLMGGGIFTFLGILVGWNTAKEFGGTPVLGAIAGILIFNPAMANVKLFGEALVPGRGGLFAVIFAAWLMVVVERQVRKAVPNAVDIIITPLITVLVVSIVTMYAIQPVAGFLSEGITNGIXWHFNIGGAFAGAVLAGTFLPLVMVGLHHGLTPIHMEFINQTHVTPLLPVLAMAGAGQVGAAIAIFVKTKNKRLRNVIKGALPVGFLGIGEPLLYGVTLPLGKPFSYSLFGAAVGGAFQAVMKTAALGIGVSGLSLIPLIADNKYLLYFLGLVVAYTFGFIFTYFFGFKEEMAENI

SEQ ID NO: 45637 - protein, 322 aa, Bacillus anthracis
  MISC_FEATURE (126)..(126): X=any amino acid
  MISC_FEATURE (128)..(128): X=any amino acid
  MISC_FEATURE (157)..(157): X=any amino acid
KKVLIFCDPGIDDTMALLLAFFIDEIEIIGIVADYGNVPKKMAVQNAHFLKNETRNRNIKIFGGSERPLTGAPPAFFTEVPTGNKEVGAIILLWGRWITAEREEFLLKGFPPFWSRIKNGNLIPWXVXGRTNLLPPIFIYYVGNQLIGKKFNFFFTXWAGAFYHPGNVTPYSEANFYGDPYCANIVLQSAANMYIYPLNVTQYSRHYPEMAEYIEAKGKVPLVKPLFDHYYYGYYKNALPDLKGSPFHDTMPILALLDNSMFTFHKSPIVVMAESYAQGASIGEFRSLGKPKPFMDWPSHQIAIDFDYNRFFKHFMSLMTGE

SEQ ID NO: 45638 - protein, 802 aa, Bacillus anthracis
MSFNHQEIEKKWQGYWEENKTFRTPDETEKPKFYALDMFPYPSGAGLHVGHPEGYTATDILSRMKRMQGYNVLHPMGWDAFGLPAEQYALDTGNSPAEFTEHNINTFRNQIKSLGFSYDWDREVNTTDPNYYKWTQWIFLKLFEKGLAYVDEVPVNWCPALGTVLANEEIIDGKSERGGHPVERRPMRQWMLKITAYGDRLLEDLDELDWPESLKDMQRNWIGRSEGAEVHFNIDGTDEKFTVFTTRPDTLFGASYCVLAPEHALVADITTADQKEAVEAYINSVKMKSDLERTELAKEKTGVFTGAYAVNPVNGEKLPIWIADYVLATYGTGAVMAVPAHDERDYEFASTFNLPMKEVVKGGDITKEAYTGDGAHVNSAFLDGLNKEEAIAKMIEWLEVTSAGNQKVTYRLRDWLFSRQRYWGEPIPVIHWEDGTMTAVKEEELPLVLPKTENIRPSGTGESPLANIDEWVNVVDPETGKKGRRETNTMPQWAGSCWYYLRYIDPNNSEALVDPEKVKQWLPVDIYIGGAEHAVLHLLYARFWHKVLYDIGVVPTKEPFQQLFNQGMILGENNEKMSKSKGNVVNPDDIVASHGADTLRLYEMFMGPLDASIAWSENGLDGARRFLDRVWRLFVQDNGELSEKITDAPNKDLEKAYHQTVKKVTEDYAELRFNTAISQMMVFINDAYKAETLPKEYVEGFVKMIAPVAPHIGEELWSKLGYNETITYASWPTFDESKLVEDEVEIVVQVMGKVRAKLTMSKDASKDEMEKLALEAIQDQIEGKTVRKVIVVPGKLVNVVAN

SEQ ID NO: 45639 - protein, 111 aa, Bacillus anthracis
MMSNNNQVLKVGDWVRGISNEGEFIVGYVVSLDEVEDVVTVSIVKRYDKYTKNEAILLFSKHVNKLPESNVINKEQILYLIDLALLTGDEEWFIELSSKLNSIKELVNERF

SEQ ID NO: 45640 - protein, 126 aa, Bacillus anthracis
MEKISEVLKVLAHPVRLSLVKIMLAKGPTNVTTMYGDLEMPQSTISQHLSKLKAAKMVTGTRKGLEIYYEVTAQSHKINISMFSLNADIYFKIRNAILFYDFTERIAFFIFKEYLFISLMVIWYYL

SEQ ID NO: 45641 - protein, 1020 aa, Bacillus anthracis
  MISC_FEATURE (63)..(63): X=any amino acid
  MISC_FEATURE (76)..(76): X=any amino acid
  MISC_FEATURE (546)..(546): X=any amino acid
  MISC_FEATURE (581)..(581): X=any amino acid
  MISC_FEATURE (582)..(582): X=any amino acid
  MISC_FEATURE (597)..(597): X=any amino acid
  MISC_FEATURE (600)..(600): X=any amino acid
  MISC_FEATURE (612)..(612): X=any amino acid
  MISC_FEATURE (619)..(619): X=any amino acid
  MISC_FEATURE (620)..(620): X=any amino acid
  MISC_FEATURE (639)..(639): X=any amino acid
  MISC_FEATURE (689)..(689): X=any amino acid
  MISC_FEATURE (698)..(698): X=any amino acid
  MISC_FEATURE (732)..(732): X=any amino acid
  MISC_FEATURE (737)..(737): X=any amino acid
  MISC_FEATURE (845)..(845): X=any amino acid
  MISC_FEATURE (851)..(851): X=any amino acid
  MISC_FEATURE (988)..(988): X=any amino acid
MSPIQRIMTLFGPYNQNEVTDFADLGEHSILAIFGNTVVGKTTIFDANWNGVYGEGSGRRNKXYEHCSPGKLPEGXGKPTAETTFSLKREPFELNTQLGHKKQGNKTITGHAVELYEVIDEEKVPAVDRFHVTDVNKKVEDLIGLSKHQFSQIVMLPQGEFRKLLTSETENKEEILRRIFKTDRYKLMRELLDQKRKQWKDVLQGKAKERELYFRNVFKLPIRDGAILETLVEQEHVNTHQVVEALEQETAVYKAEVEQLQVEQDVQTKQLKDAETRFHAAKSVNGEFLDLQQKNEKYNTLQENRTVIEMKETSFKRAEQAKRLLPFEQWHEEAMQNEQKAESLLKQIIAKKENIMNNFELAQEKYEVVKNKESERENVKKLVQRLEELQPIIASLAEKQLNLQNAEIQIGKLKESMQNLDRQLEEHTNQKQLMTGELQQLEQALEQYVDKVEELTNMREDAKVLKQAYDVWQEKQKFEKEKEAAYSKMQLAVNAYENMERRWLSEQAGILALHLHDGESCPVCGSTTHPKKATEQSGAIDEKGIXNGFKEKRRNYWWKNSPVPFRRRNGIFYPPPIWTKXXKRFRSEGSQCGRISXTIXCAGPKGKPISTXVEYVKSXXRNRVKQIAVKNKKRRRKKXMHFRNKNREVETEQHRIEMDCMQLRTSYEHDKKNIPENLQTVQAWEKFIXPKLCMNSNXWRTNGKKVQEAYSHWQNENIRISARTGRCYYSIXKVQNXRKEGLFTAFYEENWSRSGFYRSISFKKAKLSDGGVEFIQKRIQKLLFFSGSTCENKLEELHVELKDKEYMDITALGEHNKELEINLDIEEEKRQRGQNGVNIYFRSPXKNLGVXWSKFMREKKAFQELVDLYEVMKGDNESRISFERYILIEYLEQIVQIANERLRKLSNGQFYLKRSERVEKRNRQSGLGLDVYDAYTGQTRDVKTLSGGEKFNASLCLALGMADVIQAYEGGISIETMFIDEGIGFIRXGVLTKAVDTLIDLQKSGRFIGVISHVQELKNR

SEQ ID NO: 45642 - protein, 329 aa, Bacillus anthracis
MSFFKKLKEKISKQTDTVTEKFKQGLEKTRNSFADKVNDLVFRYRKVDEDFFEELEEILIGADVGVSTVMELIDQLKEEVQRRNIQDPREVQAVISEKLIEIYKGDSDFTNEVNMQKDGLTVVLFVGVNGVGKTTTIGKMAHKFKSEGKSVLLAAGDTFRAGAIEQLEVWGDRVGVEVIKQGSGSDPAAVMYDAVQAAKARNVDVLLCDTAGRLQNKVNLMKELEKVKRVIEREVPGAPHEVLLVIDATTGQNGLSQAKTFREATNVTGIVLTKLDGTAKGGIVLAIRNEMDVPVKFVGLGEQMDDLQQFDPEQYVYGLFANLVETEEV

SEQ ID NO: 45643 - protein, 312 aa, Bacillus anthracis
  MISC_FEATURE (120)..(120): X=any amino acid
  MISC_FEATURE (169)..(169): X=any amino acid
MRVAQSVSELFGKTPIVKWTRIVESDSADIYLKLEFMNPGSSVKDRIALAMMKDAEKKGLLKEGDTIIEPTSGNTGIGFSMVAAAKGYKAIFSMPETMSVRRRNLLRAYGAELVLTPGPXRMGRSNRQATELAKEHGYFIPQQFKNQSIPEIHSFIQRSEIVDKRGYQXNAFIPQLWYRGNNVGAGKVQKEPYKGFKILARKTWGYFAGFWGRKPGSHIKSKEIGGLVFFPRKHLDVEVYDEIISVKTEQAFEYARRVAKEEGILVGISSGSGYFYAATEVAEKVRVRGKRYLLLIASNGERHVSTPLYQFE

SEQ ID NO: 45644 - protein, 528 aa, Bacillus anthracis
MSTVNVQIGLHELLNGSNAQIQLSVPQLVEKVLMRNEGKLTSTGAVSASTGKYTGRSPKDKFIVKEASVADKIAWGAVNQPISEEHFNKLYTKVLEYLKEKEELFVFKGFAGADRNYRLPIQVINEYAWHNLFVHQLFIRPTEEELTTHESEFTIVSAPNFKADPAVDGTNSEAFIMVSFEKRIVLIGGTEYAGEMKKSIFSIMNFLLPEQDILSMHCSANVGEEGDVALFFGLSGTGKTTLSADPNRKLIGDDEHGWSDNGVFNIEGGCYAKCVNLSHEKEPQIFDAITFGSVLENVIINDQTRIADYNDTTLTENTRAAYPMHAIDNIILPSVAGHPNTIIFLTADASGVLPPISKLSKEQAMYHFLSGYTSKLAGTERGVTSPQATFSTCFGSPFLPLDASRYAEMLGEKIEKHDAKVFLVNTGWTGGEYGVGKRMNLGYTRAMIQAALNGELAKTETAKHDIFGLEVPLHVPGVPDEVLMPEQTWADKAAYKAKAIELANEFKANFKKFDSVSEDIINLGGPIA

SEQ ID NO: 45645 - protein, 303 aa, Bacillus anthracis
MIYTVTFPPFIDYVVQVNSLDLGAVNRAEKDMIFRGEKGINVSRVLHRLGVENVALGFTGGFTGRFIKDVLQREGVITNFVQVDGDSRINVKIKGQEETELNGQGPSVTNEQFEQLMKQIESMQKGDYVVLAGSVPASIPTTFYESIAAFGAEKGIRVVVDASGSALQHVVKNKPFLIKPNHHELGELFGVEFQQAEDILPYGRKLIEQGVEHVIVSMAGDGALLFTAEGIYEATVPKGVVINSVGAGDSLVAGFVGKYEQTKDIEKAFQYGVANGSATAFSADLCEKEKVEELLSQVIVTKR

SEQ ID NO: 45646 - protein, 503 aa, Bacillus anthracis
  MISC_FEATURE (63)..(63): X=any amino acid
  MISC_FEATURE (67)..(67): X=any amino acid
  MISC_FEATURE (299)..(299): X=any amino acid
  MISC_FEATURE (314)..(314): X=any amino acid
  MISC_FEATURE (419)..(419): X=any amino acid
  MISC_FEATURE (466)..(466): X=any amino acid
MSIRAEEISALIKQQIETYQSEIEVSDVGTVIQVGDGIARAHGLDNVMAGELVEFSNGRYGGXHKIXRENNVGYIILGPYTEIREGDEVRRTGRIMQVPVGKELIGRVVNPLGQPVDGLGPINTTNTRPIESPAPGGNDRKSVHEPLQTGIKAIDALVPIGPWAREVIIGGPANGKTAVALDTIINQKDEDMICIYVAIGQKESTVRNVVETLRKHGGIRVHIVVTGICFSTAPLLYLAPYAGVTMGEEFMYNGKHVLVVYDDLSKQAAAYRELSLLIRPPPGRESFPGGGILLPFRLXERAAKLRDAKGGGSXTALLFIETTSRGRISLIPTNVISITDGQIFFTSDLFFSGVRPAIDAGTFGISCRWICQIKAMSKVSGTLRLDLASYRELEAFAQFGSDLDKATQAKLNRGARTGXGIKTRITQPLRVEKNSIILYAFTRGFLDDIPVVDITRFRRKNSMLGXILCDDLLEEIRTTKKLADDDKFAAAINGFKKVFVASE

SEQ ID NO: 45647 - protein, 268 aa, Bacillus anthracis
  MISC_FEATURE (76)..(76): X=any amino acid
  MISC_FEATURE (140)..(140): X=any amino acid
  MISC_FEATURE (193)..(193): X=any amino acid
  MISC_FEATURE (202)..(202): X=any amino acid
MKEMKVIIAGPRGRMGHEAVLLMERTEHFNLVAAVDYKHGGEKISDLPGMPALDATIYADLHTCLEEVEADVCLDXPPPESGKQHVTLAVERGLRSVIGTTGFTEEELKQITETAKEKAVGTIIAPNFAEGAVLMTNYRXMAAKYFQDVEVIELHHDQKLDAPSGTAVKTVELIRQNRESKQPGPPNGSKSTXKGAPGCQMXMGFHIHSVRLPGLIAHQEVMFGGDGQMLTVRHDSFYRASFMSGVKLSIETVMNLDHLVYGLENIID

SEQ ID NO: 45648 - protein, 574 aa, Bacillus anthracis
GEDYVQGIKRYLQFVKPYRWLIAITIMIGLVKFGIPLIMPWLLKYIIDDVIQGAGSLQDKTSQLVTAIGIAFFIFAVLRPPHEYYRQYFAQRIANTILYDLRKHIFGHLQKLSLRYYSNTKNGGDISRVIHDVEQTKDFVITGLMNVWLDTATIAIAIMFMFSMNIKLTFVALLILPIYVVAVKYFFGRLRKLTKERSQALATMQGYLHERIQGMQVTRSFALEEYEGKQFEKRNNEFLTKALTHTSWTARTFSAVNTLTDLGPLLVIGFAAYEVIQGQLTLGTMVAFVGYMDSLYSPLRRLVNSSTTLTQSFASMDRVFELLDEKYDIVNVPSAVQTKKLNGEVIFDNVSFRYNADEKEILHNLLVNYLPGEKVALVGASGGKEVISASLIPRFYDVSSGGSYVDGIDVRKYDMRNLRSHIGIVLQDNLLFSDTIRGKHFIGNPKATEEEVIAAAKAAQIHDFIIELPDGYDTVVGERGVKLSGGQRQRVAIARVFLKNPSLLILDEATPRFRLGKDRYFQEALKTLAADRTTIIIAHRWATITACGYNYLLEEWGTKKTRSPGKIIGKKRNF

SEQ ID NO: 45649 - protein, 600 aa, Bacillus anthracis
MCGIVGFIGEQDAKEILLKGLEKLEYRGYDSAGIAVQAENGVVVYKEKGRIAKLREIVDENVAASVGIGHTRWATHGVPSKVNAHPHQSTSKRFTLVHNGVIENYELVKKEYLQDVTFVSETDTEVIVQLMEQQVSTGLSVEEAFRNTLSLLHGSYAIGLLDAENPNMIYVAKNKSPLLVGVGDNFNVVASDAMAMLQVTDQFIELMDKEIVIVMKESITIKNLQGETIERAPFTAELDASDIEKGTYPHFMLKEIDEQPLVIRNIIQKYQDENGEIELDQDIRNAILDSDRIYIIACGTSYHAGLVGKQFIEKFAKMPVEVHVASEFSYNMPLLTERPFFIYISQSGETADSRAVLVQTNEMGHKALTITNVPGSTLSREADYTLPLYAGPEIAVASTKAYTAQLAVLSILAADIAKAKGEVLGFDLTHELGLVANAMIELCDQKEEMDALAKQFLATTRNCFFIGRSVDFYVGLEGALKLKEISYIQAEGFAGGELKHGTIALIENGTPVIALATQEHVNLGIRGNVKEVVARGANPCIISMKGLEMEGDSFVLPAVHEALAPLVAVIPLQLISYYAALHRECDVDKPRNLAKSVTVE

SEQ ID NO: 45650 - protein, 284 aa, Bacillus anthracis
  MISC_FEATURE (163)..(163): X=any amino acid
  MISC_FEATURE (165)..(165): X=any amino acid
  MISC_FEATURE (173)..(173): X=any amino acid
  MISC_FEATURE (191)..(191): X=any amino acid
  MISC_FEATURE (219)..(219): X=any amino acid
  MISC_FEATURE (224)..(224): X=any amino acid
  MISC_FEATURE (245)..(245): X=any amino acid
  MISC_FEATURE (261)..(261): X=any amino acid
KKEKLRTENISFQYPGAATYALKDVSFSLFEGEWVSVIGQNGSGKSTLAKLLNGLFLPEARTITVNDTQHSVEETVWDFRKQIGMVFQNPDNQFVGTTVQDDVVFGLENIGMPREQMVERLNQALRLVRMEDFLNDEPHSLSGWTKQRVPIAGVLAISALFFXYXEEAAVNAXPPQGRREVSRNGRPTVYXKGYYCVINLRTDLGRSGHNSTCVIIFNXGRRYXRKGLPEQNFQSPSICSKKMGXDVPFSGKMGRILKRKXNFSAKYPSSHGKLVNELWEITFQ

SEQ ID NO: 45651 - protein, 179 aa, Bacillus anthracis; identical to SEQ ID NO: 45329
  MISC_FEATURE (67)..(67): X=any amino acid
  MISC_FEATURE (134)..(134): X=any amino acid
  MISC_FEATURE (154)..(154): X=any amino acid

SEQ ID NO: 45652 - protein, 156 aa, Bacillus anthracis
MPRKGPVAKRDVLPDPMYNSKLVTRLINKMMVDGKKGKSQTILYNAFDIVSERTGKEPMEVFEQALKNIMPVLEVRARRVGGANYQVPVEVRPERRTTLGLRWLVNYARLRGEKTMEERLANEILDAANNAGASVKKREDTHKMAEANKAFAHYRW

SEQ ID NO: 45653 - protein, 335 aa, Bacillus anthracis
MTKITVVEPGSWEPALAMVLADNWHDVRIWGNRSELMDEINTKHENSRYLPGITLPSTIVAYSSLEEALVDVNVVLIVVPTKAYREVLQDMKKYVAGPTTWIHASKGIEPGTSKRISEVIEEEIPEDLIKDVVVLSGPSHAEEVGLRQATTVTSAAKRMEAAEEVQDLFMNSYFRVYTNPDIVGVELGGALKNIIALAAGITDGLGLGDNAKAALMTRGLTEIARLGRKMGGNPLTFAGLTGMGDLIVTCTSVHSRNWRAGNMLGKGHSLEESVRKPMGMVVEGVRTTKAAHELAEKMEVEMPITAALYDVLFNGNNVKDAVGSLMGRVRKHEVE

SEQ ID NO: 45654 - protein, 150 aa, Bacillus anthracis
MKKLIMTLFIAMLALAGCNTNKEEPKKEQKLEAVKVAVQTNPKEIKPGEKTEVQALVTQGKEKVTDADDVKFEVWKAGDEKHEMLEGKHKGKGVYAVEKTFETDGVYHIIAHTNAREMHVMPEVKVAVGNAKVEDAKKENSDHGAGHGDH

SEQ ID NO: 45655 - protein, 466 aa, Bacillus anthracis
MFTMVQKLWLTVVCAVFVTVSFLYFVSLYSYEKLYVDNLKDSLVMEGKRLAAQYDKSEGISTFEEKVRAFDQISSSDVLFVSNPRDLSACLPFDVHHHSLISEGDRQALLDGKTVTKIGYEEHFERNIMGVVIPVLENKKLVGIVYSYIPLKSIKDLIYDMGLILAPLALAITLLTIWIGRKIIIAITRPLSQMERVANHLATGDFSERITISSEDEIGRLGKAFNKMANSLETEDVKRKEFLANVSHELRTPLSYIKGYSEAILDGVAKGPQQEKVTQLIHKEADRMQRLVHDLLDLAQLEGEHFPLQKQPIVFSQLIEDVLDTYEIKFIEKKIRISTNLNPEIIVMIDEDRMQQVLHNVLDNAIRYTNQNGDIMITLRQIDDYCELSIKDTGIGIDTEHLENLGERFYRVDKARSRQHGGTGLGLAIVRQIVHIHDGQWQIESEKGNGTTVSIKLKVQNEESMF

SEQ ID NO: 45656 - protein, 448 aa, Bacillus anthracis
  MISC_FEATURE (325)..(325): X=any amino acid
MKSMKGRLRPGDTVAIGLMLFALFLGAGNLIFPPVLGQQAGENVWVATIGFLVTGVGLPLLAVTAVAFVEGDLKALSSRVHPIFAFVFPLISYLAIGPFFAIPRTGAVSFEMGMKPFLSEALVSEWYMLFLFTIIFFGITWYLSLNPSKLVDWFGKFLTPVLVLIVAVIVGKAIIDPIGEPAAPLAAYKENAFFGGFIQGYLTMDAISALVFGIVVVQVIRSKGIKESNQIAKITVVSGIIAVLGLTLIYLSLAYLGSTSTSLGISENGGLILTNVVNELYGTGGKILLGLVIILACLTTSVGLTSACAGFFTNLFPKLSHKTIXTMVCVFSLIVSNLGLTQLIAVTLPVLMIIYPVAIVLIVLSYFHKWIGKRNTIYIGAILGALLISFFNGLESAKIKIDAISNVLQILPLYNEGIGWLIPSCIGGILGFFFYKSNESSELQKKGA

SEQ ID NO: 45657 - protein, 177 aa, Bacillus anthracis
  MISC_FEATURE (99)..(99): X=any amino acid
  MISC_FEATURE (125)..(125): X=any amino acid
MSRIGKKILEIPAGVTITVAEDNTVTVKGPKGELTRTFNADMLIKIEENTLTVERPSEQKEHRALHGTTRAFYRNMVEGCTEGFARGLSLVGVGYRGSXTGDKLVLSVGYSHPVEMTPEAGLDTXSTAPTKIFIKGIDKQRVGEFAANIRAVRAPEPYKGKGIRYEGEVVRRKEGKN

SEQ ID NO: 45658 - protein, 613 aa, Bacillus anthracis
MKKVGFFQSIHLKFVLIYMLLILIAMQVIGVYFVRELEKSLVQGFRDSLTQQTNLLSYNLKQEFKKSYTKAETESTDETIKTSIRKFASDRKKDIQEVSVFDANRKLLAISDESKQNKVNRTSTDIAVQRVLVQKKPEVKIEKDGRTGHRVQVMITPIMDDNNKDALGAIYVVASMEDVYKQMKDINQIFATGTVIALLVTAVLGILLAQTITRPISDMRRQAIEMAKGNYSRKVKVHSHDEIGQLALSFNNLSKKLQQARSSTESERRKLSSVLSHMTDGVIATDRKGDIILLNDPAEKMLNVSRETALDQSVLEVLGIQEEFTLDHLYEEPDSVLLDFSTRNEPYILRASFSVIQKETGKANGLIAVLYDVTEQERIERERREFVANVSHELRTPLTTMRSYLEALTDGAWQDPNIAPQFLTVIQEETERMIRLVNALLQLSKLDSTEHRLMKEWVDFTDFFNNIIDRFEMSKEQNVSFKRSFSKKSRFIDMDTDKITQVLYNIISNALKYSPEGGTVTYRLRDRGELLEISVSDQGMGIPKENVDKIFERFYRVDKARSRQMGGTGLGLAIAKEMIEAHGGSIWAKSEEGKGTTIYFTLPMAADEEDEWE

SEQ ID NO: 45659 - protein, 303 aa, Bacillus anthracis
MTELGQKLKEARGTKGLSIDQLHEITKIQKRHLVAIEEGNYDVLPGAFYARAFIKQYADAVGLNGEELLVEYQSTIPQSEKRDVPQVSTGQKTQETMQKSSSWPIADHMPKILVALLVIAVGVVIWFVFQALTGKDDEKVPNTQSEKIEVKKAENSPLDTKKDEVKAEEPKKEEPKKEEPKKEEQPAQPTGQQEVKVVGTTGKVSTLEIHNNKTLELEISGKGASYVDVKDDAGNEVLNTTIQDGQTEKRDLSTAKEVRLNIGNATNVEVKLNGQVVAYPLDPEKELHQRLVIKNQGIEQPAQ

SEQ ID NO: 45660 - protein, 280 aa, Bacillus anthracis
  MISC_FEATURE (4)..(4): X=any amino acid
  MISC_FEATURE (100)..(100): X=any amino acid
  MISC_FEATURE (108)..(108): X=any amino acid
  MISC_FEATURE (196)..(196): X=any amino acid
KLKXNMDQFSPAEKKVAMYIMENAEIVPNLPTKEVSTNAGASEASVVRFCKSIGIGSFKAFKIALVRELTIADYNINDFTVMNTEDGPYDLFYKSTYVKXSCNLRRAXRRLIKRELEKPADRIVNADKIIFYGVGGSTNSGGWRGFYNFQGLGIYGNDAIWIFNMMLPLVTNLKGGDYICAISTSGRTKDVLEMGXHCERQGATVIAITKLDQSSPLYKEADIRLCMPDVEQDHRIASIASRMTQLNMIDALYVITFNRIGNKVLDQFMETREKALRLRK

SEQ ID NO: 45661 - protein, 339 aa, Bacillus anthracis
MFGFGGFTRDLGIDLGTANTLVYVKGKGVVLREPSVVALQTDTKQIVAVGSDAKQMIGRTPGNVVALRPMKDGVIADYETTATMMKYYIQQAQKSNGFFSRKPYVMVCVPSGITAVERRAVIDATRQAGARDAYPIEEPFAAAIGANLPVWEPTGSMVVDIGGGTTEVAIISLGGIVTSQSVRVAGDDMDDSIIQYIKKSYNLMIGERTAEALKLEIGSAGEPEGIEPMEIRGRDLVSGLPKTVLIQPEEIADALKDTVDAIVESVKNTLEKTPPELAADIMDRGIVLTGGGALLRNLDKVISEETNMPVLVAEDPLDCVAIGTGKALDNIDLFKTAAR

SEQ ID NO: 45662 - protein, 240 aa, Bacillus anthracis
MSKPKYNRVVLKLSGEALAGEQGFGINPAVIKSVAEQVKEIAELDVEVAVVVGGGNIWRGKIGSEMGMDRAGADYMGMLATVMNSLALQDSLENIGIQTRVQTSIEMRQVAEPYIRRKAVRHLEKKRVVIFAAGTGNPYFSTDTTAALRAAEIEADVILMAKNNVDGVYNADPSIDPTATKYETLTYLDVLKEGLGVMDSTASSLCMDNDIPLIVFSVMEKGNIKRAVLGENIGTVVRGK

SEQ ID NO: 45663 - protein, 386 aa, Bacillus anthracis
  MISC_FEATURE (269)..(269): X=any amino acid
MLEFDTTQDQLANIKVIGVGGGGNNAVNRMIEHGVQGVDFIAVNTDAQALNLSKAETKMQIGGKLTRGLGAGANPEVGKKAAEESKEQIQEALRGADMVFVTAGMGGGTGTGAAPVVAQVAKELGALTVGVVTRPFTFEGRKRATQAASGIAAFKENVDTLIVIPNDRLLEIVDKNTPMLEAFREADNVLRQGVQGISDLIATPGLINLDFADVKTIMSNRGSALMGIGSGNGENRAAEAAKKAISSPLLETSIDGAQGVIMNITGGSXLSLYEVTEAADIVASASNPESKMIFRSGINERIKDDIVVTVIATGFDDSIATPPPKPIIRPNVNHTQQQQQPVAQPPNQREVKREMKREEPGGHERHSDSDSDDIDIPAFLRNRRRR

SEQ ID NO: 45664 - protein, 337 aa, Bacillus anthracis
MEKNTIILGIETSCDETAVAVVKNGTEIIANVVASQIESHKRFGGVVPEIASRHHVEEITVVLEEALKQANITFDDIDAIAVTEGPGLVGALLIGVNAAKAVAFAHDIPLVGVHHIAGHIYANRLVKEVQFPLLSLVVSGGHTELVYMKEHGSFEVIGETRDDAAGEAYDKVARTLSMPYPGGPHIDRLAHEGKPTIDLPRAWLEPDSYDFSFSGLKSAVINTVHNAKQRGIEIAPEDLAASFQESVIDVLVTKASRAADAYNVKQVLLAGGVAANKGLRARLEAEFAQKENVELIIPPLSLCTDNAAMIAAAGTIAYEQGKRATLALNANPGLDIE

SEQ ID NO: 45665 - protein, 428 aa, Bacillus anthracis
MKQPLAHRMRPTNIQEVIGQQHLVGEGKILWRMVQANHFQSMILYGPPGTGKTSIASAIAGSTGTPFRLLNAVTHNKKDMEVVVQEAKMHRHLVLILDEVHRLDKAKQDFLLPHLESGLLTLIGATTSNPFHAINSAIRSRCQIFELHALTEEDLLIGLKRALEDKEKGLGEYDVTVTPEALHHFANASGGDMRSAYNALELAVLSSFTTDDKAAEITLEIAEECLQKKSFVHDKGGDAHYDVLSAFQKSVRGSDVNAALHYLARLIEAGDLQSIGRRLLIMAYEDIGLASPQAGPRTLAAIESAERVGFPEARIPLANAVIELCLSPKSNSAYKALDAALHDLRNGQTGDIPSHLKDSHYKGAEALGRGIGYLYPHDQPNGWVQQQYLPDKIKNKQYYKPKTTGKFEQALSTVYERLQSSNKTKNKG

SEQ ID NO: 45666 - protein, 934 aa, Bacillus anthracis
  MISC_FEATURE (37)..(37): X=any amino acid
  MISC_FEATURE (75)..(75): X=any amino acid
  MISC_FEATURE (157)..(157): X=any amino acid
  MISC_FEATURE (235)..(235): X=any amino acid
  MISC_FEATURE (241)..(241): X=any amino acid
  MISC_FEATURE (265)..(265): X=any amino acid
  MISC_FEATURE (267)..(267): X=any amino acid
  MISC_FEATURE (289)..(289): X=any amino acid
  MISC_FEATURE (352)..(352): X=any amino acid
  MISC_FEATURE (397)..(397): X=any amino acid
  MISC_FEATURE (414)..(414): X=any amino acid
  MISC_FEATURE (435)..(435): X=any amino acid
  MISC_FEATURE (450)..(450): X=any amino acid
  MISC_FEATURE (451)..(451): X=any amino acid
  MISC_FEATURE (455)..(455): X=any amino acid
  MISC_FEATURE (471)..(471): X=any amino acid
  MISC_FEATURE (502)..(502): X=any amino acid
  MISC_FEATURE (505)..(505): X=any amino acid
  MISC_FEATURE (553)..(553): X=any amino acid
  MISC_FEATURE (616)..(616): X=any amino acid
  MISC_FEATURE (636)..(636): X=any amino acid
  MISC_FEATURE (713)..(713): X=any amino acid
  MISC_FEATURE (717)..(717): X=any amino acid
  MISC_FEATURE (766)..(766): X=any amino acid
  MISC_FEATURE (882)..(882): X=any amino acid
VIVVGLMILPSLYAWFNIKAFWESVGNPKEVPIAVSXPRCKALILKEKDIYIPGTKIVNSLEKKQKSLGGEICRXKAKPIYGVDRGDYYASISIPKRLSEKIGTVLDENPQKPELDYYGNEKGNAIAPKNSSKRCIRDFRKKLVKTFVKNAKGENFXIPNGPLNRILKQTFPVFGKVKDLVFKLEAQFPEMNTLMDKALDDATRAEDLVKVAQKELPVVESVINDGPGSVNKFRXVLCKQXSNIAKCTWGRYEIILTPAKNVMGXSXCSLRIFLCFQEINFSCMKRLPXISTAARTFQSGTMKVIKNIARNINQTVNNVLNSARAGTTYGKSVVNGLQNGQFDPEKAKTESXCGFENLKGRTDSIAYLINVFTELQKSATTDFGQSFFQSPCGSLNXSLKRVWKMQTTVLKTLXMLLAHGPEVKKDVTDVANQKXMQQMDLLIQPEKDYXXNHLXQIYKKAVSTVDQAKSXCQRKRMLRVEKLNMISSKMGVKDAKAKHIKXKVXLIRNGQKVSLNDLNGQLQATNNLIGDAIPVLESTNKVLADVNSGKNLXWGGFKNDTKFQNSVPKGYRSHRNKAPPFITQWPEPFKRGWWKVLMTPPQNASSSIRRFLSTIXFRNPFQTLTQQLERTKRMSXNTSPNFKKNRPKSFPNVKKLLEDSSKGLVDGRKKLADIKAEMPATEKKIKELADKIRDFESEEDLKDIIRLLKNDAXEAKXYFANPVNLKENKFIAMPIYVSAMSPFYTVLQLWVGALLMGSLFPGKNTXRSRRLLEACEISSEGFLNFLTMGLSQAFIVSMGDIFLLGTYVVDKFWVVLFSLFIGGVFVCIVYSLVSIFGNVGKSMAIILLVLAVAGSGGTFPIQMTPAFFQAIYRFLTVHIRNXCIRETVGGMLWDIVTRDFTWLKGFRSSKDGCALFLKNPNYPIQVKISLRMQR

SEQ ID NO: 45667 - protein, 295 aa, Bacillus anthracis
MAITAQMVKELREKTGAGMMDCKKALTETNGDMEKAIDFLREKGIAKAAKKADRIAAEGLTFIETNGNDGLILELNSETDFVAKNEGFQTLIKELAAHLLANKPANVEEAMAQTMENGKKVEEHINEAIAKIGEKLTLRRFEIVSKTDADAFGAYLHMGGRIGVLTVLEGSTDEAAAKDVAMHIAAVNPKYIDRDAVTAEEVEHERQVLTQQALNEGKPEKIVAKMVEGRLGKFFEEICLLDQAFVKNPDMKVRQFVESKGGTLKGFVRYAVGEGIEKREDNFAEEVMNQVKGSN

SEQ ID NO: 45668 - protein, 349 aa, Bacillus anthracis
  MISC_FEATURE (3)..(3): X=any amino acid
  MISC_FEATURE (6)..(6): X=any amino acid
  MISC_FEATURE (22)..(22): X=any amino acid
LEXRPXFIMGAGQAGLTMGYYXSQKGYNFYLLRAGNRVGDSWRNRYDSLQLFTPRFYSSLPGMALIGEKNDFPYKDEIATYLEEYARHFQLPVQLQTEVLKIRKEKGIFELHTSTEILQTKKVIIATGGFQQPFIPSVSANLSSHVFQIHSSQYKSPSQIPQGKVLVVGGGNSGMQIAVEFAKTHEVTMSISHPLTFLPLHLFRKSIFNWLDKLGLLYAEVNTKRGKWFQKRKDPIFGFEGKELISYGAIQLQEKVVSASENNIMFQNGETYSAESIIWSTGFIQNYNWIEIEKVVNENGLPNQIKGISPVRGLYYIGLPWQSQRGSALICGVGKDAAYLLSEIKKIDQ

SEQ ID NO: 45669 - protein, 262 aa, Bacillus anthracis
MDKQEADDVETGDVIKTDPVAGRVVKENSKITIYQSGGKKKSKMIDFTGKDLESIRTELEEKYKQVTVYYIEDDRPKGAIVEQIPTSDQMVVEAEQELKIWVSKGPYQIRPGDFSRWTENSVTGYLNERKLTPDIKREYSDTVDKGLVISQSPKPGTPLKEGDKVTIIISEGPKPKVTKTVKVDNISIPYESSIIGEKKPQTIEIYKEDMQQKMDRPIETRTISESATISLEFVIQEDTKGRYKIVRDGVTIIDKEVPYPTQ

SEQ ID NO: 45670 - protein, 425 aa, Bacillus anthracis
MEWKSAMYSPELKGECQLHYFRAHKSIVNEKSLLLDSTTVILKEELRNDEMVSKEFISKYCNEDEYSLLPIHPLQAEWLLHQPYVQDWIEQGVLEYIGPTGKCYMATSSLRTLYHPDAKYMLKFSFPVKVTNSMRINKLKELESGLEGKAMLNTAIGEVLEKFPGFDFICDPAFITLNYGTQESGFEVIIRENPFYSEHADDATLIAGLVQDAIPGERTRLSNIIHRLADLESRSCEEVSLEWFRRYMNISLKPMVWMYLQYGVALEAHQQNSVVQLKDGYPVKYYFRDNQGFYFCNSMKEMLNNELAGIGERTGNLYDDYIVDERFRYYLIFNHMFGLINGFGTAGLIREEILLTELRTVLESFLPYNREPSTFLRELLEEDKLACKANLLTRFFDVDELSNPLEQAIYVQVQNPLVREVAVRS

SEQ ID NO: 45671 - protein, 179 aa, Bacillus anthracis; identical to SEQ ID NO: 45329
  MISC_FEATURE (67)..(67): X=any amino acid
  MISC_FEATURE (134)..(134): X=any amino acid
  MISC_FEATURE (154)..(154): X=any amino acid

SEQ ID NO: 45672 - protein, 475 aa, Bacillus anthracis
MNLETIIGLEVHVELKTNSKIFSASPTEFGAEPNTQTSVIDLGYPGVLPTLNKEAVNFAMKAAMALNCEIATETKFDRKNYFYPDNPKAYQISQFDKPIGENGWIEIEVDGKKKRIGITRLHLEEDAGKSTHTADGSLVDYNRQGMPLIEIVSEPDMRTPEEAYAYLEKLKSIIQYTGVSDCKMEEGSLRCDANISLRPVGQEKFGTKAELKNLNSFTYVQKGLEHEQVRQEKELLSGGIIQQETRRYDEATKKTILMRVKEGSDDYRYFPEPDLVELYIDDAWKEEVRASIPELPDARKARYVAEIGLPAYDAHVLTLTKEMSDFFEAAIADGADAKLTSNWLMGEVLAYLNKQQKELKDVALTPAGLSKMVQLIEKGTISSKIAKKVFNELIEKGGDPEEIVKAKGLVQISDEGTLRKVVTEILDNNEQSIEDFKNGKDRAIGFLVGQIMKATKGQANPPLVNKILLEEINKR

SEQ ID NO: 45673 - protein, 279 aa, Bacillus anthracis
MKTKTDFLKMKEQGEPITMLTAYDYPSAKLAEEAEVDMILVGDSLGMVVLGYDSTVPVTVEDMIHHTKAVRRGAKETFIVTDMPFMSYHVSLQDTMVNARRIVQESGAHALKVEGAGEVISTIHYLTNAGIPVVAHLGLTPQSVGVLGGYKVQGKDAESAKKLIEDAKKCEEAGAIALVLECVPMQLAELISEQLTIPTIGIGAGQKVDGQVLVYHDLISYGVNRVPKFVKQYTSVQEEIVRGISQYVAEVKTRQFPEEKHSFTMKEEECLALYGGKQS

SEQ ID NO: 45674 - protein, 265 aa, Bacillus anthracis
  MISC_FEATURE (74)..(74): X=any amino acid
  MISC_FEATURE (237)..(237): X=any amino acid
MAGSTLAVKGSHVSIDGKEILKGVNLEVKGGEIHAIMGTNGTGNSTLSSGNMGAPKFGGYTKGASFFHRGRCIXNVEVNQAAANQGFSLTMAYSNGNLTGETKADFLRSAINARREGRDENSLRKFIGKLDKNHGFIEMDPEMAQRYLTEGFSGEEKNRNEILQLMMIEPKIAILDEIDSGLDIDALKVVSKGYYENRGEEFGCLMITHYQRLLNYITPDFVHVMMNGRIVKSGGPXACTTLEAEGYDWIKKEIRYERRTTEPES

SEQ ID NO: 45675 - protein, 423 aa, Bacillus anthracis
MKNTWRELREMDRNVWIRFIGETLNGIAMMMLMPFFALYLKDKVDSLLQVGVIMALSPIAASFGSIIGGRIADIYGRKPIMIFSMTSNALLMLGFLFIEGFIPYAILSVFLGLSNSLFHPAASAMVADVTAPEKRTEAYGLLRMGHNIGAAIGPIMGASVVMLSKNLVFIIASSTMLFYALLVFVLIQETMPKSANKEEDNEKESGVVWKIVLRDKALMIYLLAGIIISMGFSQTEGMLPLHFDNEMKDIFGTNNPYPYLMALNGLLVVLFQFQISKWATDKPVGKTMLYGACLFGIGLFFIGWLPKWFGGLDTNATIILIMLLFVYAIYTLGEMIMSPVQMTFVANLAPEHLRGTYMGAASLQWITGNAFGPLLGGFLLDRLLGHFLFTILAIGCVVAGVVYISLDRLVEQRQKGTLTKQSS

SEQ ID NO: 45676 - protein, 122 aa, Bacillus anthracis; identical to SEQ ID NO: 45315
  MISC_FEATURE (106)..(106): X=any amino acid

SEQ ID NO: 45677 - protein, 240 aa, Bacillus anthracis
MKMMDANEIISFIQKSEKKTPVKVYIKGDLKEVTFPETVQAFVNKKSGVLFGEWSEIKTILDENSKYIVDYVVENDRRNSAIPMLDLKGIKARIEPGAIIRDHVEIGDNAVIMMNATINIGAVIGEGSMIDMNAVLGGRATVGKNCHVGAGAVLAGVIEPPSAKPVIVEDDVVIGANVVVLEGVTVGKGAVVAAGAVVTEDVPPYTVVAGTPARVIKEIDEKTKAKTEIKQELRQLNPEK

SEQ ID NO: 45678 - protein, 491 aa, Bacillus anthracis
MKNQDQALIFEVSKEGRIGYSLPKLDVEEVKLEDVFESDYIRVEDAELPEVSELDIMRHYTALSNRNHGVDSGFYPLGSCTMKYNPKINESVARFAGFANIHPLQDEKTVQGAMELMYDLQEHLIEITGMDTVTLQPAAGAHGEWTGLMLIRAYHEANGDFNRTKVIVPDSAHGTNPASATVAGFETITVKSNEHGLVDLEDLKRVVNEETAALMLTNPNTLGLFEENILEMAEIVHNAGGKLYYDGANLNAVLSQARPGDMGFDVVHLNLHKTFTGPHGGGGPGSGPVGVKADLIPYLPKPILEKTENGYHFNYDRPEAIGRVKPFYGNFGINVRAYTYIRSMGPDGLRAVTEYAVLNANYMMRRLAPFYDLPFDRHCKHEFVLSGRRQKKLGVRTLDIAKRLLDFGYHPPTIYFPLNVEECIMIEPTETESKETLDGFIDKMIQIAKEVEENPEVVQEAPHTTVIKRLDETMAARKPVLRYAKPAPVQV

SEQ ID NO: 45679 - protein, 300 aa, Bacillus anthracis
QAQSILLESGTNELEIVTYTVGENLFSINVMKVREIINPFPVTTVPESHHAVEGVVQVRGEILPVINLATALNLKSTKPLDQTKFIISELNQMKVIFRVDEVHRIQRISWEQIDEPASLSMGLEETTSGIVKLDGQIILLLDYEKIVCEISGTGYDNKSLQGLEQKTDRAEKVIYIAEDSAMLRQILEETLSSAGYTKMNFFSNGAEALAQIEKLAKEQGEKMFEHIHLLITDIEMPKMDGHHLTKAVKDSEVMNRLPVIIFSSLITNELFHKGEAVGANAQVSKPDIQELIGLVDKLVL

SEQ ID NO: 45680 - protein, 36 aa, Bacillus anthracis
MSLYYLDDLSLGEIAEEFDVSRQAVYDNIKRTESDA

SEQ ID NO: 45681 - protein, 343 aa, Bacillus anthracis
  MISC_FEATURE (25)..(25): X=any amino acid
  MISC_FEATURE (54)..(54): X=any amino acid
  MISC_FEATURE (191)..(191): X=any amino acid
  MISC_FEATURE (217)..(217): X=any amino acid
  MISC_FEATURE (299)..(299): X=any amino acid
MAERYSRQQLFKPVGGGGPRKVLKXNRFNCRGQAALGKCKVVKSFVRASHWESXRIIDRDYVEWSNYKRHQLYSEEDAREKCQKAIAAKNRLEKLNSEVQIDAFVMDACAENLEGLLESVDVIIDATDNFDIRFIINDLSQKYNIPWVYGSCVGSYGMSYTIMQPRDTCLHCVLKNVSLRGVTWDNAWIYXPTGQIVAAYQVAEALKILVEDFCSKXKNHFLLLIIWSNPNPFIKLGKIKTDDCLSCGLNRTYPYYPFENQTEVAVFVRKKYVQIRTVESRQYNFDDIEKSIKKTGGKXIGIRYLLSCPLKEFRVGNFWKGWVSIHVPKDISKGNQLYFRVFG

SEQ ID NO: 45682 - protein, 605 aa, Bacillus anthracis
  MISC_FEATURE (447)..(447): X=any amino acid
  MISC_FEATURE (495)..(495): X=any amino acid
  MISC_FEATURE (523)..(523): X=any amino acid
  MISC_FEATURE (587)..(587): X=any amino acid
  MISC_FEATURE (594)..(594): X=any amino acid
QKEMLIGDGAVGTIIPFTTVCKSSFEELNISDPDVIISIPKQYVAAWADVILTNTYRSNASELRMYGLENQVTEINRAAVKLAKASVTDRNAILGTIGGMKHIGAVTTTDMEREFMLLEQASALLEEQVDGLLLETFYDEFELLHAVQVLRKETNIPIVAQLALHEAGTTQNGNDVNEILKQLLDYGANVVGLNCQLGPLHMTEAFKMISIPKNGYLSAYPNAGLPNYVEGRYVYEGSPAYFEAMTLKFIEQSIRVFGWLCGTTPEHIESMKRATLNVTPVIEKDTIQRPKGSSYTTRNVSKAHVTLAEKAKNQPAVVVRIRSTETLDTQRFFEGARALKRAGADAITLADNSLASPRISNMAMGALLTKHDIPVLTHLTCRDHNVIGLQSHLLGLSALGMEEVLALTGDPARVGDFPGAHFGKRFTPLGSLFKKFKENDPRGFLFXGKSMAPPPRFFSGGAFNPACKTFKSSVKRMERKIDAGAEYFLNAADLXYRVIEEVYEATKHLEQPIFIGRVYINKXTECRFLHFEVPGITLPEAVRERMDGHETKEAAIEEGIRISQELIDETMKYFNGIYLITPISKIXNLQTFCXICERKAESERR

SEQ ID NO: 45683 - protein, 491 aa, Bacillus anthracis
  MISC_FEATURE (194)..(194): X=any amino acid
  MISC_FEATURE (198)..(198): X=any amino acid
  MISC_FEATURE (211)..(211): X=any amino acid
  MISC_FEATURE (401)..(401): X=any amino acid
MSNLLAFDAGTGSIRAVLFDLHGNQIAVSQKEWIHKSDPLYPGSMNFDVIENWKLVQECTKEVLQKSNTLASSILAISATSMREGFVLYDQDGQEIWACANVDGRASAEVSELKKFGHHLEKDLYTKSGQTFQLGALPPLLWIKKHEPDVYNTIHSFTMLNDWILYKLSRVLQIGPSNGCTSGIFRHTNRRGEXQFRXGGRFFLSLFHQQXKKGGTVIGNVTKECAALTGLCEGIPVVAGGGDAQMASLGTGVVKPNQTLICGGSFWQQEANVTEPIPDPQAAIRINCHVVRNLWQYETIAFFPGLVMRWFRDAFCQEEKKLADKLGVDAYELLEEQAKDVPVGSHSIIPTFSNVMNYISWRHAAPFFFNLKLDADKCGKKKTGFRAIERNAAFRYTWKTXNLIENLTGIFPSEVIFAGGAAKGKLWPQILSDVLGIPVKVPVVKEATAFRTAIASGIGGGLISSLKKPAQHFGHGEAKFQPVPGNPQFLK

SEQ ID NO: 45684 - protein, 307 aa, Bacillus anthracis
MNVQESFVTALDESEIYLRKWLPECEPKGIIQIAHGMTEHAGVYTDFIDALLEAGYGVYAHDHKGHGKTVRREEDYGHFEPDIGWNQAVSDVIFVSEMIKEEQACLLFLLGHSMGSFLSRRAVQLRGELYDGFLISGTGGNPGFVGVVGHKVATIEMKLRGAKTKSPMLNFLSFGNFNSNFKPNRTNFDWLSSDNDQVDKYIADPLCGFICTTSFYRELFSGVLEVNKLEEYKKTPSNLPIHIFSGDRDPVGDMGKGVKEVYENYKKCGVKDVTLRLYENGRHEMFHEVNKEEVFKDLISWLDAHNR

SEQ ID NO: 45685 - protein, 574 aa, Bacillus anthracis
MNWKQEFSRWLSYAELDAELKEQLENMKQDEKKIEDSFYKNLEFGTGGMRGELGAGTNRLNVYTVRKATQGLAKFIEKLGEEAKKRGVVVAYDSRHKSPEFAMEVAATLGAHGITTYVFESLRPTPVLSFAVRHLHTVSGIVLTASHNPPEYNGYKVYGEDGGQLPPKEADELISYVNAVEDELTVEVADVEQLKADGLLHMIGQEVDDAYAAELNNVIINKEMVQKVGKDLKIVFTPLHGTSNLSVRRGLAEVGFTDVTVVKEQELPDPNFSTVKSPNPEEHAAFEYAIRDGEKVGADVLIATDPDADRLGVAVRNHDGEFQVLTGNQTGALMLDYLLSQKKENGTLPENGVVLKTIVTSEIGRTIAKAYGLDTVDTLTGFKFIGEKIKQYEESGQYEFQFGYEESYGYLIRPFCRDKDAVQSVLFACEVAAYYKSQGKTLYDGLLEVFEKYGFFREDLVSLTLKGKDGAEQIQEMMATFRENPPKEVAGLTVVAVEDYKASIITSLQDGHKEEIHLPKSNVLKYQLEDGSWFCLRPSGTEPKIKFYFGVQDNSLQNSEQKLLTIKEDIMNRL

SEQ ID NO: 45686 - protein, 345 aa, Bacillus anthracis
  MISC_FEATURE (142)..(142): X=any amino acid
  MISC_FEATURE (205)..(205): X=any amino acid
  MISC_FEATURE (233)..(233): X=any amino acid
  MISC_FEATURE (240)..(240): X=any amino acid
  MISC_FEATURE (335)..(335): X=any amino acid
LNNRYSRQELFSPIGEEGQQKIRKKHVLIIGAGALGSANAEMFVRAGVGTVTIVDRDYVDWSNLQRQQLYVESDVENNLPKAVAAKKRLEEINSEVRVKALVQDVTAQELEELVTNVNVMIDATDNFEPRFHVNDYGTKIFXFHGFTGACVGSSGFSYTIFHSKTPCLSCLLQSIPLGGANCDTAGDNSPAVSLVVSHQVTEGSXTISGRLRITSRMDLYRFDVREERIFQVXMGKKLWXPLMALWGGRGMHYIPYFNQEKSSQTSQFYARRNTVQIRPPYKEEMDFERYKELLNDRVNDLNVNPYLLSFSVEEKRLVAFKDGRVLVHGTKDIRXAKTSYSSLFG

SEQ ID NO: 45687 - protein, 610 aa, Bacillus anthracis
MKLLDLLSKGIVIGDGAVGTLLHSHGLQSSFEELNISDPDLIISIHKQYVAAGADVIQTNTYGANEAKLRMYGLENQVTEINRAAVKLAKASVTDRNAILGTIGGMKHIGAVTTTDMEREFMLLEQASALLEEQVDGLLLETFYDEFELLHAVQVLRKETNIPIVAQLALHEAGTTQNGNDVNEILKQLLDYGANVVGLNCQLGPLHMTEAFKMISIPKNGYLSAYPNAGLPNYVEGRYVYEGSPAYFEAMTPKFIEQGIRLLGGCCGTTPEHIESMKRATLNVTPVIEKDTIQRPKVVHTHEKRSKAHVTLAEKAKKQTTVVVELDPPKTLDTQRFFEGARALKRAGADAITLADNSLASPRISNMAMGALLTKHDIPVLTHLTCRDHNVIGLQSHLLGLSALGMEEVLALTGDPARVGDFPGATSVYDLSSIELIKMIKEMNDGRSILGKSIGPATRFSVGGAFNPHVRHLKAAVKRMERKIDAGAEYFLTQPIYDIALIEEVYEATKHLEQPIFIGIMPLISKRNADFLHFEVPGITLPEAVRERMDGHETKEAAIEEGIRISQELIDETMKYFNGIYLITPFLKYEITEHLVKYVREKQEVKEGIN

SEQ ID NO: 45688 - protein, 343 aa, Bacillus anthracis
MKRLVYMDWLRVLATIAVVTIHVSAGYVSVLDANNASRWMAGNLFESISRASVPIFVMISGALLLKGTKDISVGEFLQKRASKVIIPFIAWSAIFYAYGAYAGYFPASLKQGIKHFLTDTIGGHLWFLYMIVGIYLITPLLKVFVKNAKKREIEYFLILWLYASVVVNLVKYYYPINFNIELFYVTNYVGYFLLGYYLSNFDISKKWRNISYIGGFVGFISTFFITYFYTVKANGQLEQFWYGYFAPGVVLMAIGLFIFFKYAFQKSERELPLLFRFINQASLGIYILHFFLLNNLLYMVFPKVNNHVHAILAIPINVTITIVLSMVITLVLQRIPVVKKLVP

SEQ ID NO: 45689 - protein, 945 aa, Bacillus anthracis
  MISC_FEATURE (55)..(55): X=any amino acid
  MISC_FEATURE (440)..(440): X=any amino acid
  MISC_FEATURE (487)..(487): X=any amino acid
  MISC_FEATURE (517)..(517): X=any amino acid
  MISC_FEATURE (535)..(535): X=any amino acid
  MISC_FEATURE (773)..(773): X=any amino acid
  MISC_FEATURE (791)..(791): X=any amino acid
  MISC_FEATURE (800)..(800): X=any amino acid
  MISC_FEATURE (833)..(833): X=any amino acid
  MISC_FEATURE (846)..(846): X=any amino acid
  MISC_FEATURE (848)..(848): X=any amino acid
  MISC_FEATURE (853)..(853): X=any amino acid
  MISC_FEATURE (913)..(913): X=any amino acid
  MISC_FEATURE (924)..(924): X=any amino acid
TRKDTTNNPWAKFPGPKLGYVIGKNDLYLTGSRVCLFPELQELFEIFESSFVSRXCRNRGQHSNTFFSSKHRVHIEKILKVVQLVEQIRSFGHTLAHINPMEDAANGQSLLEKAMNELSDADLKAIPAKTVWQDAPEGIHTALDVIHRLKEVYTQSLAYEFSHIQDSEERAWLHQMVESNSLRQPLSNKKRTALLKRLTAVEGFEQILHKTIRGQKRFSIEGRDMLVPGLDEIVLEGAKNGVKDVMIWMGHRRSSKVLAHVLEKPYSHMFAEFKHAKIEGAVANSGWTGDVKYHLGREQVVSNEEVSTRVTLANNPSHLEFVNPVVEGFARAAQENRKKSGLPEQDTSKSFVILVHGDAAFPGQGIVSETLNLSRLNAYQTGRNNSCIANNAVGFTTDSYDSRSTKYSSDLAKGFDIPIVHVNADDPEACLAAANLAIQXEHAVQKRFPIDLIGYRRYGHNEMDDPAVSQTQGLKKDKNPPTVRSIXGRSNSSWVFSKNADEFEQFPHFPQEQIKFXLCTVPAQLIRGDAPISRXKCPRCCCKKYFRQIDTGVELDSLRAIYEGLLSWARRALTYIRKEENSERRKDALEENGKIEWALAESLAFASILQEGTPIRLTGQDSQRGTFAHRHIVLHDTDTNETYSPLHRLPNINASFSVHNSPLSEAAVVGYEYGYNVFAPETLVMWEAQYGDFSNTAQALFDQYVSAGRAKWGQKSGLVLLLPHGYESQGTEHSIARPERFLKVAAENHLTVANFTNGGTKFPYSASASIHPXEKKLVPPLLLMDAEKVIXVPPLPFPCXSVKAKDFPTCFKTQENPWTNPNKVNRSCFKSRXNGDGLSSRNGSGXPXVHLRXNSYRWYETVVPSLAEKVQFYYFNAFKNLEEIYLGFRRSLVIWGAWHYMGSILFELAGIKXKQVHRTSRSLXPIWRRPFAHKAEQELIVSHAL

SEQ ID NO: 45690 - protein, 172 aa, Bacillus anthracis
MTTHIEKCTLKDIHKLQEISYETFNETFKHQNSPENMHHYLEKAFNLKQLEKELSNISSQFFFVYFNDEIAGYLKINTDDAQSEEIGDESLEVERIYIKSSFQKHGLGKYLLNNAIEIAIANNKKNIWLGVWEKNENAIAFYKKLGFVPAGSHSFYMGDDEQVDLIMIKTLI

SEQ ID NO: 45691 - protein, 589 aa, Bacillus anthracis
MLNLVLMMIERVGLIVILGFLLSHIKTFRRLLHKQDGYVDKLKLICIFSVFTIVSNYTGIEIAGNTIMNENWLQGVSSSSTIANTRIMGVGISGLLGGPIVGIGVGSIAGIHRYMLGGTTALSCAISSILAGVITGYIGYIFKKYNRTITPKFSAVLSVFIVSLEMIMILLIVEDGISIVKTIAIPMILVNSFGSFILLSMIQAILRQEENAKALQTHKVLRIADKTLPYFRQGLTEESCKHVAQIIHRFTGTDAVSLTDTEKILAHVGLASDHHIPSHSLITGLSKEVLHTGKIMKAKSREVINCQHEGCPLQAAIVIPLTSHGNTIGTLKLYFKNPNQLSRVEEELAEGLAKIFSTQLELGEAELQSKLLQDAEIKALQAQINPHFLFNAINTVSALCRTDVEKARKLLLQLSVYFRCNLQGARQLLIPLEQELNHVQAYLSLEQARFPNKYEVKMYIEDELKTTLVPPFVLQLLVENALRHAFPKKQPVCEVEVHVFEKEGMVHFEVKDNGQGIEEERLEQLGKMVVSSKKGTGTALYNINERLIGLFGKETMLHIESEVNEGTEITFVIPKKVGEEEQIVKSISS

SEQ ID NO: 45692 - protein, 289 aa, Bacillus anthracis
MLRDLFVKKKKYAAIPSEQVRKDVPDGVMTKCPKCKKIMYTKEVLKNLKVCVNCGYHHPMNAWERLDSILDEGSFREYDKEMVSLNPLEFPNYEEKLESDRKKTELNEAVVTGEGTIDDMLVVVAVMDSRFRMGSMGSVVGEKIARAVEKAYDLQVPFIIFTASGGARMQEGILSLMQMAKTSVALKKHSNAGGLFISVMTHPTTGGVSASFASLGDYNLAEPGALIGFAGRRVIEQTVREKLPEDFQTAEFLLEHGQLDAVVHRDDMRESLRKILEVHQGGEMAVWQS

SEQ ID NO: 45693 - protein, 120 aa, Bacillus anthracis; identical to SEQ ID NO: 45593

SEQ ID NO: 45694 - protein, 331 aa, Bacillus anthracis
  MISC_FEATURE (147)..(147): X=any amino acid
LKHDMNARKQLWIAVICMTFVVILGTLGFMTIEEISLFQAFWMTMITVLTVGYGDAIPVTHAGKVFALLIIPVGVGIVTYAIGVVAAMIIEGNLFHAVRRKKMDKQIAQLQNHIIVCGCGRVGLQVVHELQEKKIPFVVVDKEKAYXRRKNFLYVHGDATEDKVLHHAGISKAAGLVAIVANDAENVFITLTARGLNDAIKIVARAEKPETEDKLKRAGANKVINPSSMAGIHIAKGIANPLTVHYIDTVLYGVEQSFVIEEIAVGKGSILTNKSLLESDVRNQFDVTILAILRNGNVIHNPTGQEKLQEHDMIIVFGSVEKLGQFEKELQ

SEQ ID NO: 45695 - protein, 77 aa, Bacillus anthracis
MAGRKGGRAKRRKVCFFTSNGITRIDYKDVDLLKRFVSERGKILPRRVTGTSAKYQRKLTVAIKRARQMALLPYVGE

SEQ ID NO: 45696 - protein, 343 aa, Bacillus anthracis
MTVTIKDVAKKANVAPSTVSRVIADNPSISEKTKRRVRKVMSELGYHPNLNARNLANQTTKTLGLVMPSSASKAFQNPFFPEVIRGISSFAHVEGYALYMSTGETEDEIFNGVVKMVQGRQIGGIILLYSRENDRIIQYLHKQNFPFVLIGKPYDRKEEITYVDNDNYTAAREVAEYLISLGHKQIAFIGGGSDLLVTRDRLAGMSDALKLADIVLPKEYILHFDFSRESGQQAVEELMGLKQPPTAIMATDDLIGLGVLSALSKKGFVVPKDVSIVSFNNALLSEIASPPLSTVDVNIYQLGYEAAKALVDKVENAESTAKCIIIPHKLLKRQTCDHYATKS

SEQ ID NO: 45697 - protein, 43 aa, Bacillus anthracis
MAKDDVIEVEGTVLETLPNAMFKVELENGHVVLAHVSGKIRMN

SEQ ID NO: 45698 - protein, 133 aa, Bacillus anthracis
  MISC_FEATURE (11)..(11): X=any amino acid
  MISC_FEATURE (19)..(19): X=any amino acid
LQKAVAPMKNXGYKHTGEXEEMLRLFAAHNRYLTAKDVLEHMKDDYPGLSFDTIYRNLTVVAEIGVFRQTEIIGEKHFRFTCSIMEHHHHFICLDCGGTKEITSCPNGFMNKDFNGYEVTGHKFEIYGRCPKC

SEQ ID NO: 45699 - protein, 591 aa, Bacillus anthracis
MAERTHACGKVTVEAVGQTVQLKGWVQKRRDLGGLIFIDLRDRTGIVQVVFNPETSKEALEVAETIRSEYVLHVEGTVVERGEGAINDNMATGRIEVQATKVSVLNAAKTTPIIIADDTDASEDVRLKYRYLDLRRPVMFNTFKMRHDVTKTIRNFLDTEEFLEVETPILTKSTPEGARDYLVPSRVHDGEFYALPQSPQLFKQLLMVGGFERYYQVARCFRDEDLRADRQPEFTQIDIEASFLTQDEILDMMERMMTKVMKDAKGVEVSAPFPRMKYADAMARYGSDKPDTRFEMELTDLSEFAAGCGFKVFTSAVESGGQVKAINAKGAASKYSRKDIDALTEFVKVYGAKGLAWLKVEEDGLKGPIAKFFGEEDASVLMNTLEATAGDLLLFVADKKSVVADSLGALRLRLGKELELIDESKFNFLWVTDWPLLEYDEDADRYFAAHHPFTMPFREDVELLETAPEKARAQAYDLVLNGYELGGGSLRIYERDVQEKMFKALGFSQEEAQEQFGFLLEAFEYGTPPHGGIALGLDRLVMLLAGRTNLRDTIAFPKTASASCLLTEAPSPVAEAQLEELNLKLNVKEEK

SEQ ID NO: 45700 - protein, 470 aa, Bacillus anthracis
MVVGDFPIELDTVVVGAGPGGYVAAIRAAQLGQKVAIIEKANLGGVCLNVGCIPSKALINAGHRYENAMHSDDMGITAENVKVDFTKVQEWKNGVVKKLTGGVEGLLKGNKVEIIRGEAYFVDANTLRVMTEEAAQTYTFKNAVLATGSTPIEIPGFKYSKRVINSTGALSLPEIPKKLVVIGGGYIGMELGTAYANFGTEVTVVEAGDEILAGFEKAMSSVVKRALQKKGNVNIHTKAMAKGVEETETGVKVSFEVKGEIQTVEADYVLVTVGRRPNTQEIGLEQVGVKMTDRGIIEIDEQCRTNVPNIYAIGDIVPGPPLAHKASYEGKVAVEAISGHASAIDYIGIPAVCFTDPELASVGYTKKQAEEAGMTVTVSKFPFAANGRALSLNSTDGFLQLVTRKEDGLLVGAQVAGAGASDIISEIGLAIEAGMTAEDIAQTIHAHPTLGEITMEAAEVALGMPIHIVK

SEQ ID NO: 45701 - protein, 470 aa, Bacillus anthracis
  MISC_FEATURE (306)..(306): X=any amino acid
  MISC_FEATURE (378)..(378): X=any amino acid
KKLGFFPLIALVVGTMVGGGVFSLPHDLAVGANSGSIIIGWCITAMGMIPLALVYQTLARKKPELEGGIYSYARAGFGEYIGFNSAWGYWLAGILGNVATIMLLFSTLGYFFPIFKGGNSVASIVGASLLLWTLHFLILFGIREASIMNVIATIGKLVPIVLFIVVMVTAFRWDTFTQDFWGEGTISVSSILGQVKNTMLVTLWVFIGGEGAVVLSGRAKNSRDVGKATVLGLILVMSIYILISVLSMGAKTRGRTFCLETSSMGPVLEHVVGTWGAVAINIGLVASLVGTLIGWFFTVSENFPTXQGKDWRVPKSLFGKPNKKPTRRNMGIWGSQNGVAQVIFIIVLFSESTYQIMYFIASTSILVPYLLSAYIPIXLVITNELKDAKVKNGSLALIASLYSVWLIYAAGLKNLLLVSIVYGIGIIVYVYARKEKGNRCFTGIERYVMWAIVVAAVTSLYMLLTGNIKM

SEQ ID NO: 45702 - protein, 186 aa, Bacillus anthracis
MTTYTSIANVIKERRSVRTFTDKAVDKELLIELLNDATWAPNHKHREPWNCKLYIGEGRQKLVDAVLNSFTEEERAKRGKILSDRFLSTPAQIVVYINEDPRQIQRDEDYAATCAFMQNFQLLAWERGLGCVWKSGGLNYNPLFIEGLGLTRGQRIVGILHLGYFDKSPEGKARTPITEKMEIIEG

SEQ ID NO: 45703 - protein, 665 aa, Bacillus anthracis
MNKKMEQLKHHVTDNQRKHALTTNQGVKIAEDEFSLKMGLRGPTLMEDFHFREKMTHFDHERIPERIVHARGVGAHGYFQLYESLEAYTKADFLTNPSKKTPVFVRFSTVQGSKGSNDAVRDVRGFATKFYTDEGNYDLVGNNMPVFFIQDAIKFPDFVHAVKPEPHNDIPQGASAHDTFWDFVAHNPESTHMVMWQMSDRAIPRSLRMMEGFGVHTFRLINKEGKAHFVKFHWKPALGVHSLVWDEAQKIAGKNPDFHRQDLYEAIEKGDYPEWELGLQLIPEEDEHTFDFDILDPTKLWPEEEVPVKLVGKMTLNKNVDNFFAETEQVAFHPGHVVPGIDFSNDPLLQGRLFSYTDTQLSRLGGPNFHQTPINQPVCPFHNNQRDGMHQMQIHRGQTSYHPNGLNDNQPATVQAEQGGYEHYQEKIDGHKIRGRSKSFLNFYSQAKLFYNSMSPIEKQHIKEAFCFEVGKCKSDMVKANVIALLNHVDRQLAQEVANIIGAPLPKENHEVNSDAKSPALSMSNTIFKADSKNVAIVLNGDPSVSLLSEWIQAFAQHRINYSIVDNKIYQFNNSIKVTDTYTTTDSSLFDAVLVFSSESAIHPPVLEFAETTFKHFKPIAHVLSNPHALDNSKIKLDGAGIYNLANTSIESFIEGIAQGRFWNR

SEQ ID NO: 45704 - protein, 122 aa, Bacillus anthracis; identical to SEQ ID NO: 45315
  MISC_FEATURE (106)..(106): X=any amino acid

SEQ ID NO: 45705 - protein, 269 aa, Bacillus anthracis
MSIVKNGTLQVIGASIYYEVRGSGPILLLIHGGGGDADKFHNIADHLAKWYTVVTYDRRGHSRSNLVNKNEDYHVHTHSEDAHRLLANLTKEPAYVFGSSSGAVIGLDLCIRHPEQVQLLIPHEPVLLQLLSENELKQAINFLEDLKGNHQNEVMKLLSNIDDSNSEPSKDMLTERLLGNSTYFTEYEIPGILSYTLNIDALKSLLKPASIQVRPAGGSISRETFPYHCAFNLAEHLGTEFAEFPGHHVGYNTVHHKEFAERLHDVIEN

SEQ ID NO: 45706 - protein, 802 aa, Bacillus anthracis
  MISC_FEATURE (262)..(262): X=any amino acid
  MISC_FEATURE (418)..(418): X=any amino acid
  MISC_FEATURE (454)..(454): X=any amino acid
  MISC_FEATURE (472)..(472): X=any amino acid
  MISC_FEATURE (497)..(497): X=any amino acid
  MISC_FEATURE (611)..(611): X=any amino acid
  MISC_FEATURE (615)..(615): X=any amino acid
  MISC_FEATURE (650)..(650): X=any amino acid
  MISC_FEATURE (710)..(710): X=any amino acid
  MISC_FEATURE (712)..(712): X=any amino acid
KKRLVMIGNGMAGIRCMEEILKHDCDSYEITIFGDEPHPNYNRIMLSHVLPGKPIIQDIFMNESSWYEENEIPWYTNERVQSIAGEEKVIMPERIGILTYDKFIIAPGSSAFIFPVEGSILLGVTGFRTIEDTQFMMDTAKEKKKAVVIGGGLLGLEAARGLIDLGMDVHVVHLMPSLMEQQLDTKAASLLREDLEAQGMKFLMEKKTVKILGTNHVEGIQFEDGEVVDCDLIVMAVGIRPNTQIARDAGLIVNSGIVVNDXYATNDESIYAVGECAEHDGIAYGLVAPLYEQGAILAKHISNLQTDGYSGSIVGTQLKVCWLDLFSAGQIYEDDQTTAISIFNECKRSYKKVLIRDNKVLRIVLYGDTADGTRLFSMLKKEGGFQDFPPASILHKAGEESELDVATMSADDTNLWMXWCYEKKPIVQCPFLKQKLTTFEEVKGCTKAAGVLWXMSSAVEQCLSHTLGRCFXCFSPVAGMCGCTPLSRDEVVAANSXKRLKITKEVRNVLGFVHEDGCSKCRPALNYYLRMAIPEEYEDDKASRFVNERMNGNIQHDGTFSVIPRMYGGVTTADDLMKIAEVAKKYDVPLVKITGASRIGLYGVKKQDLPXRMGXLKYDFWYAYSKFFLVMKNQGCGLGFPRFRYEKIHXDLVCSWTIIRNGRYPTYNEEGCNGAVRVTVGSTYERFWRCCVENRIPTLYWWKWWYRSTXSXFVMIVPTEDDVLHIATAYMQYYRETGIYGERTAYWTERLDFDHIKEILQDANMVTKLNERFQTARGTYKEAWGQALETKSLKAMYEVETV

SEQ ID NO: 45707 - protein, 359 aa, Bacillus anthracis
  MISC_FEATURE (239)..(239): X=any amino acid
MRVDGREKTELRHIHIHTNYLKHPEGSVLIEVGDTKVICSATIEERVPPFMRGEGKGWVTAEYAMIPRATEQRTIRESSKGKVTGRTMEIQRLIGRALRAVVDLEALGERTVWIDCDVIQADGGTRTASITGAYVAMVLAFEKLLQAEKVSKIPVKDYLAATSVGIVEEQGVVLDLNYAEDSKADVDMNVIMTGKGQFVEVQGTGEEATFSRAQLNELLDAAEQGIFQLIDIQKEALRXHRISYRVEVENMKQVVVATKNMGKVREFAELFERFDLEVKSLHDFPHIEEVEETGETFEENAILKADSLSRQLNAIVIADDSGLIVDALNGKPGVYSARFAGEPKDDQANIDKVLQELNE

SEQ ID NO: 45708 - protein, 411 aa, Bacillus anthracis
  MISC_FEATURE (185)..(185): X=any amino acid
  MISC_FEATURE (206)..(206): X=any amino acid
  MISC_FEATURE (207)..(207): X=any amino acid
  MISC_FEATURE (218)..(218): X=any amino acid
  MISC_FEATURE (303)..(303): X=any amino acid
  MISC_FEATURE (389)..(389): X=any amino acid
GVGKTAIVEGLAQRIVKKDVPEGLKDRTTHALDMSALVFGAKFRGEFEERTQAVLNEIRKSEGRILLFIDELHTIVGAGITEGAMDAGNMLKPMLARGELHCIVATTLDEYRKYIVEDPALERRFQQVFARRPHLLKDTIFILRCLKRAFKILSRCNIHGPRNCSASVLSDDIISDPFLTRISNXSCDEACATIRTEIDSMPTRLXXSNAAPLAARNXRSALEKEKDFGSQERLKTLQRELSDLKEVASSMRAKWEKEKEDIHKVRDLREHLERLRRELEEAEGNYDLNRAAELFPRKNSCNXKELKEAEEMGANNKQENRLLREEVSEEEIADIVSRWTGIPVAKLVEGEREKLLRLEQILSRQVFWNKRKADSLVFRCVSSCARLLXKPRTVQWFPSSSGTDCCCKHRA

SEQ ID NO: 45709 - protein, 329 aa, Bacillus anthracis
MSVIFSGIQPSGTITLGNYLGAMKQFTELQNEHDCYFCIVNQHAITVPQDPVQLRKNIRSLAALYVACGIDPEKATLFVQSEVPAHAQLGWIMQSVAYVGELERMTQYKDKASGRDSVPAGLLTYPPLMAADILLYNTEIVPVGDDQKQHMELTRDLAERFNKRFREVFTIPEIRIPKVGARVMSLTEPTKKMSKSDPNPKSMISMLDEPKTIEKKIKSAVTDSEGIVKFDKENKPGISNLLTIYSSFSGKTVEEIEAMYEGKGYGDFKGDLAQVVVEAIRPIQDKYNELINSPELDEILDKGAEKANRVAFKQLRKVENAMGLSRKRR

SEQ ID NO: 45710 - protein, 147 aa, Bacillus anthracis
MSLLGRLNDDMKQAMKNKQKEKLTVIRMVKAALQNEGIKLQHTLTEEEELTVLAREVKQHKDSLLEFKKAGREDLVNKLQSEIQILSAYLPEQLTEEELVDIIKQVISEVGATSKADMGKVMTAVMPKVKGKTDGSLVNKLVIQLLA

SEQ ID NO: 45711 - protein, 158 aa, Bacillus anthracis
  MISC_FEATURE (107)..(107): X=any amino acid
MMDQFLWVLFPYIIFAIFIGGHIFRYNYDQFGWTSKSSELLEKKMLRIGSILFHFGIMFVIGGHVMGILIPEAVYRSIGISEHMYHVVAISFGLSAGIASIIGLIIXRSRRCNFKSSLGNSSKGRYIALILLLYRRVAGTFSTFLNIDSKRIGYRKPI

SEQ ID NO: 45712 - protein, 450 aa, Bacillus anthracis
MSNKVPTSFIIIIGLMLFALFFGAGNLIFPPMLGQMAGNNVWIANAGFLVTGVGLPLLAITAFVFSGESDLQSLASRVHPVFGIVFAIVLYLAIGPFYAIPRSGTVSFEIGIKPFLSNDAGPAALTVFTILFFIVTCLLSLNPTKLVDIVGKILTPIKLTVIGMLVVVAFIHPIGRIQAPSEVYASDAFFKGFQEGYLTLDALGAFVFGIIIVNAIREKGATTKKQLMVVCVKATTIAATLLALIYTALSYMGASSVEKLGHLNNGAEVLAKVSDYYFGSYGAIFLGVMIIVACLITSVGLITACSSFFHKLFPKISYKKLAIILSVFSTLVANIGLTQLIKISIPVLITMYPIAITLIFLTFLHSVFNGRFEVYQGSLILTFIFSSLDGLKAAGIESEIIHNFFEHFLPLYSVGLGWGFPAIIGGVCGYVVSVLRKKNTLSSSETQLNK

SEQ ID NO: 45713 - protein, 293 aa, Bacillus anthracis
MTENNDIKMVIITGMSGAGKTVALQSFEDLGYFCVDNLPPMLLPKFIELMADSKGKMNKVALGVDLRGREFFEHLWGALDDLSERTWIIPHILFLDAKDSTLVTRYKETRRSHPLAPTGLPLKGIEIERSLLTDMKARANIVLDTSDLKPKELREKIVHLFSTETEQAFRVNVMSFGFKYGIPIDADLVFDVRFLPNPYYIPHMKPLTGLDEEVSSYVLKFNETHKFLEKLTDLITFMLPHYKREGKSQLVIAIGCTGGQHRSVTLTEYLGKHLKPEYSVHVSHRDVEKRKGH

SEQ ID NO: 45714 - protein, 283 aa, Bacillus anthracis
MRVYEALKWASSFLQENGRDENAGEIVLCHVLKTNRTGLLMNMREEITAEQETSFTEFIHKHVEGIPIQYMIGHEMFYGRSFFVNEEVLIPRPETEELIVGVLERIERHFGDEKLHVADIGTGSGAISITLALENKNLHVYTVDIAQESIEVAKENAKTLGAEVTFYHGDLLSPFYETGQKLDVVVSNPPYIPEEDWRGLSPVVKEHEPKRALVGGEDGLDFYRRFMEELPNVLQKKAIVAFEIGVGQGEDVKGLLQQAFPHAHVEVVFDINGKDRMVFAEIE

SEQ ID NO: 45715 - protein, 393 aa, Bacillus anthracis
MDTLIFEVGTALVLVAFAAILAAKLKFSIIPFLIILGMLVGPHAPDLGLIDLRFIESGEVISFLGRVGVIFLLFYLGLEFSIKKLIKSGKSIAFGGTVHISLNFLLGLLYGYVMGFPLLETLIIAGIITISSSAIVAKVIVDLRRSGNKETELILGIIMFDDIFLAVYLSVVSGLVLGGATSFAGALTSVLIAVGYMLLFFVIARKATPFLNKVLDISSNEIFIIVIFAILFFVAGFSETIHVAEAIGALLLGLVFSETEHSDRIEKLVVPFRDFFGAIFFFSFGLSIDPFSLGGAVWLALGAVFITIIGNFTAGMIAGSKAGLSHKASTNIGLTLVSRGEFSIIVANIGIAGGLMAAIKPFSALYVLILASLGPLLTKESGRIYSLLDKLFK

SEQ ID NO: 45716 - protein, 160 aa, Bacillus anthracis
MTQHKEEQMNEALALFYFAYKTFTEKPDEIIKEYGIQRVHHRILFFIARFPGVSVNELLSLLEISKQALHGPLRQLVEKSLIESNEATHDRRVKQLSLTEKGADLEKKLSDVQRQQMGAIFSKFGESCEENWHQVMNEMAHSRSGFDAWISKREVAFDQK

SEQ ID NO: 45717 - protein, 1097 aa, Bacillus anthracis
  MISC_FEATURE (188)..(188): X=any amino acid
  MISC_FEATURE (413)..(413): X=any amino acid
  MISC_FEATURE (596)..(596): X=any amino acid
  MISC_FEATURE (645)..(645): X=any amino acid
  MISC_FEATURE (658)..(658): X=any amino acid
  MISC_FEATURE (695)..(695): X=any amino acid
  MISC_FEATURE (939)..(939): X=any amino acid
NIQATKSVNKSVAAIGDVLTYTVTIPNTGLLPANNVIFTDILPNGTSFIPGTVTVDNVPQTNANPAAGISLGTINNSASRTVTFQATVVSFSSQKSIFNTANITFQYTPIAGGTTFNGLATSNSAGNTSNLADINGTKSVNKLFTDMGETLTYSIAFSYIGDIAATNVIYTDPIPSGTTFVLRECNCXRSYSGWSKSRYWYINWSIAANSTTTVAFQVFVPSIPQTNPILNSGTTTYQYIPVPNQPAVSGTDTTNIVSTQVNNATVTMAKAVDKNFADIGDTLTYTVSFTSTGNTNANNVIFTDVIPTGTTFVLNSLTIDGTTQGGANPANGVNIGSIPTGTTKNVSFQVVVNTIPALNVVSNGSSASYMYTVNPSQSPVTKNISSNLVFTQINNANLAFNKSTNKQFCHNWXNDKVIQFLITNSGNTAATNVQLTDPLPNGTILTPGSVTLNGVLQNVDSLVALPIGTIPGGATFTLSFPVTVIHITTQNPIINNAFPLLSIYCKSKSAPKLSKTANSNSVTSTIRLANLQATKSVDKTFAEVGDVLTYTFSLTNDGNVAGEQYSTIRFNANGTAFVPNSVTINNVTQQAVHQLXSISSSTTAGTTITASFKLIITSIPNPNPISNSAFYFPILLSLIQTLSLXVRTQLSPLHFTQXMTQILFQQKQWIERPLLVGDVLTYTAVFTKCKKGSAXRPTFVDTNPDGTTFIPNTFLINGVLQNNADPNVGVPLPSIPANGSLTVSYQVTVTSLPTQNPTINSSSTQYSFILNPGDPPTIETSLSNTVSTQINLANVVIVKTGRFNYCDVGQPITYTIALANPGNTPANNVVVTDILPPGTTLVPNSIFIGRGFTTWCGSKCWSSSWYDSAGGFTTIVFQIGANSLPSPNTVQNQAVLQYNFIADPNSPPVVRNSVSKIVTAQINPANNVATKLTKHKFCXCWRVITYATILTNNGNIPASNVTFTDIIPAGTIFLPNTVTINGVPIANANPANGILIGTIGANSSRTVAFQVFVPTIPSANPIANQSSTTFQYTYDPSKPAVMQMVASNTVQTTINNATITSVKSADKQFANVTDIITYTTTLTNNGNTLASNIVFTD

SEQ ID NO: 45718 - protein, 317 aa, Bacillus anthracis
MKKERKPKIVIMGGGTGLSVLLRGLKQYPVDITAVVTIADDGGSSGRLRDELEIPPPGDIRNVLVALSDVEPLVEALFQHRFTTGDGLKGHALGNLLLAGMTSITGDFFHAITETSKVLNVRGRVLPAANQSAVLHAELEDGEIVTGESKIPYFGKKINRVFLTPEDVEPLHETLTEIKRADLLVFGPGSLYTSILPNLVVNKIGDAVLAAKAKKVYVCNVMTQAGETMGYTAFDHVQALHDHLGKPFIDTAIVNNRDIPCELRQLYEEEMSAPVVVDEERFIENNIDVIQDQLAKYDDRVVRHDTLKLASILYSLL

SEQ ID NO: 45719 - protein, 127 aa, Bacillus anthracis
  MISC_FEATURE (24)..(24): X=any amino acid
  MISC_FEATURE (25)..(25): X=any amino acid
MNREELFDVTVIGGGPAGLYSAFXXGLREMKPKIMEFHPHLGGKIHVYPEKMIGDIGGLLPVTGEKLIEQLVQQGLTFQPEVVLNTKIESIIRNKDGIFTLKTSTERTTFSKTVIVATGSGILNPQK

SEQ ID NO: 45720 - protein, 391 aa, Bacillus anthracis
  MISC_FEATURE (125)..(125): X=any amino acid
  MISC_FEATURE (163)..(163): X=any amino acid
  MISC_FEATURE (164)..(164): X=any amino acid
  MISC_FEATURE (306)..(306): X=any amino acid
  MISC_FEATURE (364)..(364): X=any amino acid
MGEENQPNYTISQENWSLHRKGYDDQQRHQEKVQEAIKNNLPDLVTEESSAMSNGKDVVKIPIRFLERNYKIWFQIYDKKPTPLGKENGYSKVGDVFGRDDSGVQKQKGPGKGQGAGDAAGENFXEAEGFILELEQAFFKELELPNLKRKEMDENRIEHVEFXXYRKTGLWGNIDKKRTMISAYKRNAMRGKASSPPIHQEDLKFRTWNEVLKPDSKAVVLAMMDTSGIDGNWEKYMARSFFFWMTRFLRTKYETVDIEFIAHHTEAKVVPEEEFFSKGESGGTICSSVYKKALELIDNKYSPDRXYIYPFPFFRRDNLTSDNARCCKACRRLMKKCNMFGYGEVNQYNRHSTLMSAFKIFKEXNFPIYIFKAKADVFHAMKSFFREESGE

SEQ ID NO: 45721 - protein, 236 aa, Bacillus anthracis
MMSKYEQIYTAISKSIDNKQLKEGCKIPSETELMKQYEASRGTVRKAVDLLQERGYVQKIHGKGVFVLKRKNIEFNFGGIVSFQEENERLGRHCITEVVEIEKIKATKEIAKLLNVKEKTEIDHIKRVRNIDGEKVILDINHFVSEHIPGLTSEIAAGSIYKYIEKELGLHISYSQRVIEVQSCTEDDRKYLDLNGTDYVVVVKNFTHFYDGSQFEYTESRHRLDIFHFSDVARRK

SEQ ID NO: 45722 - protein, 598 aa, Bacillus anthracis
MGNRIPEEVVEQIRTSSDIVEVIGEYVQLRKQGRNYFGLCPFHGENSPSFSVSSDKQIFHCFGCGEGGNVFSFLMKMEGLAFTEAVQKLGERNGIAVAEYTSGQGQQEDISDDTVIMQQAHELLKKYYHHLLVNTEEGNEALSYLLKRGITKEMIEKFEIGYASPAWDAATKILQKRGLSLSSMEQAGLLIRSEKDGSHYDRFRGRVMFPIYTLQGKVIAFSGRALGDDTPKYLNSPETPIFHKSKLLYNFHQARPFIRKRGQVVLFEGYADVLAAVKSGVEEAVATMGTALTEEQAKLLRRNVETVVLCYDGDKAGREATMKAGQLLLQVGCQVKVTSLPDKLDPDEYVQQYGTTAFENLVKSSISFVGFKINYLRLGKNLQDESGKEEYVKSVLKELSLLQDAMQAESYLKSLSQEFSYSMETLLNQLHQYRKEQKVQQKQVKQVSKPSQIVQTKPKLTGFERAEREIIYHMLQSPEVAVRMESHIEDFHTEEHKGILYELYAYYEKGNEPSVGTFLSWLSDEKLKNIITDISTDEFINPEYTEEVLQSHLETLRRHQEKLEKMEIIFKIKQMEKTDPVEAAKYYVAYLQNQKARK

SEQ ID NO: 45723 - protein, 1198 aa, Bacillus anthracis
  MISC_FEATURE (210)..(210): X=any amino acid
  MISC_FEATURE (217)..(217): X=any amino acid
  MISC_FEATURE (220)..(220): X=any amino acid
  MISC_FEATURE (221)..(221): X=any amino acid
  MISC_FEATURE (235)..(235): X=any amino acid
  MISC_FEATURE (398)..(398): X=any amino acid
  MISC_FEATURE (401)..(401): X=any amino acid
  MISC_FEATURE (447)..(447): X=any amino acid
  MISC_FEATURE (514)..(514): X=any amino acid
  MISC_FEATURE (574)..(574): X=any amino acid
  MISC_FEATURE (641)..(641): X=any amino acid
  MISC_FEATURE (684)..(684): X=any amino acid
  MISC_FEATURE (725)..(725): X=any amino acid
  MISC_FEATURE (729)..(729): X=any amino acid
  MISC_FEATURE (736)..(736): X=any amino acid
  MISC_FEATURE (745)..(745): X=any amino acid
  MISC_FEATURE (748)..(748): X=any amino acid
  MISC_FEATURE (757)..(757): X=any amino acid
  MISC_FEATURE (768)..(768): X=any amino acid
  MISC_FEATURE (781)..(781): X=any amino acid
  MISC_FEATURE (799)..(799): X=any amino acid
  MISC_FEATURE (806)..(806): X=any amino acid
  MISC_FEATURE (833)..(833): X=any amino acid
  MISC_FEATURE (840)..(840): X=any amino acid
  MISC_FEATURE (846)..(846): X=any amino acid
  MISC_FEATURE (893)..(893): X=any amino acid
  MISC_FEATURE (895)..(895): X=any amino acid
  MISC_FEATURE (959)..(959): X=any amino acid
  MISC_FEATURE (971)..(971): X=any amino acid
  MISC_FEATURE (975)..(975): X=any amino acid
  MISC_FEATURE (976)..(976): X=any amino acid
  MISC_FEATURE (979)..(979): X=any amino acid
  MISC_FEATURE (983)..(983): X=any amino acid
  MISC_FEATURE (989)..(989): X=any amino acid
  MISC_FEATURE (1004)..(1004): X=any amino acid
  MISC_FEATURE (1005)..(1005): X=any amino acid
  MISC_FEATURE (1007)..(1007): X=any amino acid
  MISC_FEATURE (1109)..(1109): X=any amino acid
  MISC_FEATURE (1137)..(1137): X=any amino acid
  MISC_FEATURE (1138)..(1138): X=any amino acid
VFLKRLEIAGFKSFAERVSVDFVPGVTSVVGPNGSGKSNITDAIRWVLGEQSAKSLRGAKMEDIIFAGSDTRRAVNVAEVTITLNNEDQRLPIEYNEVCVTRRVSRSGDSDFYINKQSCRLKDIIDLFMDSGMGREAFSIISQGKVEEILSSKSEERRGVFEEAGGVLKYKLRKKKAESKLADTQENLNRVQDIIHELSSQVEPLERQAXIAKDYSXKKXXFLYVRTALYVHENXRLHEKWESSLKIIWGHKKKRRRLKCSAAFTKKVKEDLEEISEANLQALDESVISLQEVFLFSSKELEKVRRAAELLKERKQNATTHCAQLEQLIVELTEKATSYDGEIESSTEVLMQFVNHVKELEMKLHDNEQLLATFADNLEEQIENLKGDYIELFNSPSXSSXELSMIEEQSKHQKFQKNERFDEENAKYVEMRMDTKTRRTKLVGKLXTSKRKVAGILSNIQKTEAALGKCKAQYSENETKLYQAYQFVQQARIQKRNARRMQEDYSGFLSGGTXSIKARENRLQRIRGGCCRIANGTEEYEIAMEIALGAAMQHIVVQKEEHARNGNCVFKTKXTWRATFLPQAVMKGRSLSFEQLRIVNQHPSFVGVAAELVQYNNKYENVVSNLLGTVIVAKDLRGGKXVGETNCNTAIHCKHRRDVVNPGGSMTGGAVKQAKSSFIRTSTXARRVDEQLTDMEEKTTKVRKLCLKAVKPEIPEKRSANTRTXGKVXKTEPCRXTRIYEERIXSFXKLEEHRHQXIVYLISHFKDXRILTRSSEDTRAXRRARKDLSDPSSGDYRDXIAKLSLXHNKKSEQHTSKEIVQKEMTEVKVLAAXKATTLIXSKRKSXTIDKEKEETDATPCQNKRGFSILKTRNDIESSGEEQITNMIEKKSVXSXSNFGVIRSRREQRVSLQERVEQLERNLKETTGKHKYILEMLKDQEVKINRLDVELENRFQHFTXNIYDFIESGKNXSIQXXACXGCTXKSETNXTIIEEPRHSKLRGNXXVXACSGASYILLEQKDDLEEAKTTLHQLITGMDEEMKKRFSTTFEGIRMEFQSVFSELLEAGRADLVMTNPEDLLNTGIDIVAQPAREETAKLRFTFRGKSVLXRQFALYFGILKVRPVPFWGLKEGQGPSXXSKRARFAQYLKKFSDETQFIVITHRKGTMEESDVLYGVTMQESGVSKLVSVRLDDGEKLV

SEQ ID NO: 45724 - protein, 622 aa, Bacillus anthracis
QVVLTFDDGPDPKYTPEILDILKENKIKAAFFVLGENAQLNPSIVKRIYDEGHEIGNHTFKHPNVADTSLLRTKVELNTTQRLIQEITGHSTVLFRPPYEADANPDSSNEILPILRAQNMNYTMVAEKVDPEDWATPSTNELVKRALNPVYKGEGNIILLHDAGGNRTHTVEALPIIIKELKKHGYSFVTISDLMNKERDEIMPPVSSEGKQYLLYNKAVFSGAGYFKHILTTIFYIAIGLGIFRFLFLIYFAWKQKRKTLSRTIHSSYQPFVSVVIAAYNEEKVIAKTIRSILDSKYGEFEVIVVDDGSTDGTSKVMQETFYKHPKVRFIQKENGGKSSAMNLGFQQSRGEIIVTLDADTIIAQDAISLMVRHFEDQNVAAVSGNVKVGNRRNLLTTWQHVEYITGFNLERRAFDELNCITVVPGAIGAWRKKNVVESGYLSEDTLAEDTDLTITFLRQGHRIVYEEKAYAFTESPEDVKSLIKQRYRWSYGTLQCLWKHRKALCNSKHKTLGFIALPNMWLFQYVLQFIAPFADILMIIGLFSSDPLKVLGFYFVFFLMDLLASLFAFKLEEENPKPLVWLILQRFIYRQFMTYVVVKSIFSSIRGVAVGWNKLKRVGSV

SEQ ID NO: 45725 - protein, 645 aa, Bacillus anthracis
MIFVSMEQKQMQENSYDESQIQVLEGLEAVRKRPGMYIGSTSGKGLHHLVWEIVDNSIDEALAGYCDEINVSIEEDNSIRVTDNGRGIPVGIQEKMGRPAVEVIMTVLHAGGKFGGGGYKVSGGLHGVGASVVNALSTELEVFVHREGKIHYQKYERGIPVADLKVIGDTDQTGTITRFKPDPEIFQETTVYEFDTLATRMRELAFLNRNIKLTIEDKREHKQKKEFHYEGGIKSYVEHLNRSKQPIHEEPVYVEGSKDGIQVEVSLQYNEGYTNNIYSFTNNIHTYEGGTHEVGFKTALTRVINDYGRKNSILKDADSNLTGEDVREGLTAIVSIKHPNPQFEGQTKTKLGNSEARTITESVFSEAFEKFLLENPNVARKIVEKGTMAARARVAAKKARELTRRKSALEVSSLPGKLADCSSKDPAISEIYIVEGDSAGGSAKQGRDRHFQAILPLKGKIINVEKARLDKILSNDEVRTIITAIGTNIGGDFDIEKARYHKVIIMTDADVDGAHIRTLLLTFFYRYMRQIIEHGYIYIAQPPLFKVQQGKKIQYAYNEKELEKILAELPAQPKPGIQRYKGLGEMNPTQLWETTMDPEVRSLLQVSLQDAIEADETFEILMGDKVEPRRNFIQENAKYVKNLDI

SEQ ID NO: 45726 - protein, 269 aa, Bacillus anthracis
MKLNRAIGVIDSGVGGLTVAKELIRQLPKERIIYLGDTARCPYGPRSREEVRQFTWEMTEHLLDLNIKMLVIACNTATAVVLEEMQKQLPIPVVGVIHPGSRTALKVTNTYHVGIIGTIGTVKSGAYEEALKSINNRVMVESLACPPFVELVESGNFESEMAYEVVRETLQPLKNTDIDTLILGCTHYPILGPVIKQVMGDKVQLISSGDETAREVSTILYHSKMLNEGEEQSDHLFLTTGKIGLFKEIASKWFGQPIENVKHIHLEKE

SEQ ID NO: 45727 - protein, 394 aa, Bacillus anthracis
MKRVWKSMDYSLLLPLVILCVLGVIMVYSSSSIVAISSKYNWPADHFFKKQLVSLAIGTVMLVIVAIVPYKFWRKKIVLAAMGLGGIGLLTAAFLFGKVINGAKGWILGIQPAEFVKIAVIITLASFFAKKQERQTPFLQGIIPPLFVVGGSMVLILLQNDLGTDILIGGTVLIMFFCSGVNVNLWIKRFILTSIVWVPVLYFIGNYKLNNYQKARFSVFLDPFNDPQNDGFQLVNSFIGIASGGLNGRGLGNSIQKYGYLPEPQTDFIMAIISEELGFIGVAIILICLLLIIIIRSFRVAQKCKDPFGSLIAIGIASLIGIQTFVNVGGMSGLIPLTGVPLPFISYGGSSLLANLIAMGILLNIASNVKRQEKEQNEIMKEREQDGPRLVVVK

SEQ ID NO: 45728 - protein, 443 aa, Bacillus anthracis
SVTAFIIGFKIGEYALPIMAVGAILLFFFKNKKVHSLGQVIFGFGMLFFGLELMSTGMKPLRSLESFQELTVSMSDNPILGIVVGTVFTLIVQSSSATIGILQELFGQGAIDLQAALPVLFGDNIGTTITAVLAAIGTSIAARRAALVHVIFNIVGTIIFTILLIPFTNLIQYFQTSLNLNPEMTIAFAHGTFNVTNTIIQFPFIAVLAWIVTKIIRGEDAAIDFEPQHLNPIFIEQSPAIALTEAQQEIIRMAEFSLHGLKEANQFLNTQDKKHVDMATQLEGAINNLDKKITEYLVLLSEKPLSPTDSEKHSVLAGVVGDIERVGDHVENLVELVDFQISNRLSLSNEALAELNEMLELTISTLQDAINALTNFDTELAQTVIAKERKIDQMERVLRKRHVLRLNERSCSGDASIIYVDMVSNLERIGDHAVNIADGVLGE

SEQ ID NO: 45729 - protein, 835 aa, Bacillus anthracis
MIGILKKVFDVNQRQIKRMQKTVEQIDALESSIKPLTDEQLKGKTLEFKERLTKGETVDDLLPEAFAVVREAATRVLGMRPYGVQLMGGIALHEGNISEMKTGEGKTLTSTLPVYLNALTGKGVHVVTVNEYLAQRDANEMGQLHEFLGLTVGINLNSMSREEKQEAYAADITYSTNNELGFDYLRDNMVLYKEQCVQRPLHFAIIDEVDSILVDEARTPLIISGQAQKSTELYMFANAFVRTLENEKDYSFDVKTKNVMLTEDGITKAEKAFHIENLFDLKHVALLHHINQALRAHVVMHRDTDYVVQEGEIVIVDQFTGRLMKGRRYSEGLHQAIEAKEGVEIQNESMTLATITFQNYFRMYEKLSGMTGTAKTEEEEFRNIYNMNVIVIPTNKPIIRDDRADLIFKSMKGKFNAVVEDIVNRHKQGQPVLVGTVAIETSELISKMLTRKGVRHNILNAKNHAREADIIAEAGMKGAVTIATNMAGRGTDIKLGDDIKNIGLAVIGTERHESRRIDNQLRGRAGRQGDPGVTQFYLSMEDELMRRFGSDNMKAMMDRLGMDDSQPIESKMVSRAVESAQKRVEGNNYDARKQLLQYDDVLRQQREVIYKQRQEVMESENLRGIIEGMMKSTVERAVALHTQEEIEEDWNIKGLVDYLNTNLLQEGDVKEEELRRLAPEEMSEPIIAKLIERYNDKEKLMPEEQMREFEKVVVFRVVDTKWTEHIDAMDHLREGIHLRAYGQIDPLREYQMEGFAMFESMIASIEEEISRYIMKAEIEQNLERQEVVQGEAVHPSSDGEEAKKKPVVKGDQVGRNDLCKCGSGKKYKNCCGIGK

SEQ ID NO: 45730 - protein, 418 aa, Bacillus anthracis
  MISC_FEATURE (207)..(207): X=any amino acid
KKALSLLTVSALSIGMLSACGPKDSGKKEESKAKKDYDLLVWEDDKKGVGLEPAVKSFEEKYKVKVKVVEMQMTDQVKKLRLDGPAGTGPDVVTLPHDQIGNAVTEGLLSEVKADDAVKSKFTDSSIEAQTYNGKLYGLPKAIETPVFIYNKKLMPKAPETMDELFNFSKEFTKDGKYGFLALGDNFYFANAFMAGMRGYVFGEKDXKPNASDVGLNNSGAVQGAEYLQKWYKEKLFSKGIIGESGGPAADGLFNEGKAAFFMSAPGVFQALEKDGNWFGGLFQGGNFQMGQPLKTFVGVKGWHVTSFSKQNDLATKFTEWVTNRRTQKIRFEKTKEIPSSKSVMEDPIIKDNEAAKAVATQSENGIPMPNIPEMQEVWKPAGDALQLVVTDKEAPKAALDSAVKQIKGNIEANHSKQ

SEQ ID NO: 45731 - protein, 321 aa, Bacillus anthracis
  MISC_FEATURE (197)..(197): X=any amino acid
GGIMTMNPISSTMNTLIVLTLISFPLLILIAAVGGYFITQRAFRPVQQMSDSASKIGDGQATFRREFISKVHRKDEMYHLAQTFDKMFERLETSFESEKQFTSDASHELRPPTSVIISQCEYAYSQRNNPKEMEESLEVILKQSRKMSALISQLLLLARADQGKDNTFQFECINMSELTEIVVEELSLMVQEARLIXQPHIEEDLFIKADQTLMMRLLMNLLTNAIAYSKANGTVHMQLFRDETNIIGKVSDNGHRHSGATYTKIWDRFYRVDAARTSSNIGNTGLGLSMVKWIVELHGGEITVESGLGEGSTFTFKLPIE

SEQ ID NO: 45732 - protein, 210 aa, Bacillus anthracis
MNKQRIYSIVAILLFVVGGVLIGKPFYDGYQAEKKQTENVQAVQKMDYEKHETEFVDASKIDQPDLAEVANASLDKKQVIGRISIPSVSLELPVLKSSTEKNLLSGAATVKENQVMGKGNYALAGHNMSKKGVLFSDIASLKKGDKIYLYDNENEYEYAVTGVSEVTPDKWEVVEDHGKDEITLITCVSVKDNSKRYVVAGDLVGTKAKK

SEQ ID NO: 45733 - protein, 73 aa, Bacillus anthracis
FRNTRNIGIMAHIDAGKTTATERILYYTGRILKIRETHEGASHMDWMEPEAQRGITINFAGTTAQWKSPPVNI

SEQ ID NO: 45734 - protein, 239 aa, Bacillus anthracis
  MISC_FEATURE (175)..(175): X=any amino acid
  MISC_FEATURE (178)..(178): X=any amino acid
IDKYSPLPIYYQIQECLKQLIEDGEWKPGDKIPSVNELCDKFEVSRMTIRQAINNLVEQGYLYRKRGIGTFVQLPKVEQKLQGMTGFTEDMISRGMNPSSQLLSFRLVPATAKIADRLRIQEGESVYEVRRIRLADDEPIAFETTYLSPALVKDINEEIFCTSLYEHLEKKLGFXLCXALLHQLELSIATDNEAEHLHIPKRAPMLLKRQWSYSEGEVPLEYVKCIYRGDRYKFITNIR

SEQ ID NO: 45735 - protein, 366 aa, Bacillus anthracis
MITLQRTPLFDVYAKYGGKTIDFGGWELPVQFSSIKEEHEAVRTAAGLFDVSHMGEVEVKGVDSLAFLQRVVTNDVSTLKVGGAQYTAMCYENGGTVDDLLIYKRGEEDYLLVINASNIEKDYEWLASHVIGDATVVNVSSEVAQLAIQGPKAEGILQKVVSEDLKEIKFFKFKNDILVDGIPALVSRTGYTGEDGFEIYCKSEDAAKLWEKLLEVGAEEGLKACGLGARDTLRFEATLPLYGQELSKDITPIEAGIGFAVKTNKEADFFGKATLKEQKENGAPRKLVGIEVIERGIPRTHYPVFIGEEKIGEVTSGTQSPTLKKSIGLALIDVKYAAVDTEVEIEIRNKRVKAVVVPTPFYKRSK

SEQ ID NO: 45736 - protein, 465 aa, Bacillus anthracis
MTIHIYNTLTRQKEEFTPLEENKVKMYVCGPTVYNYIHIGNARPPMVFDTVRRYLEYKGYDVQYVSNFTDVDDKLIKAANELGEDVPTIADRFVEAYFEDVTALGCKHATVHPRVTENMDIIIEFIQELVNKGYAYESEGDVYFRTKEFEGYGKLSHQPIADLRHGARIEVGEKKQDPLDFALWKAAKEGEIFWESPWGQGRPGWHIECSAMARKYLGDTIDIHAGGQDLAFPHHENEIAQSEALTGKTFARYWMHNGYININNEKMSKSLGNFILVHDIIKQYDPQLIRFFMLSVHYRHPINFSEELLQSTNNGLERIKTAYGNLKHRMESSTDLTDHNEKWLADLEKFQTAFEEAMNDDFNTANAITELYNVANHANQYLLEEHTSTVVIEAYVKQLETLFDILGLELAQEELLDEEIEALIQKRIEARKNRDFALSDQIRDDLKDRNIILEDTAQGTRWKRG

SEQ ID NO: 45737 - protein, 177 aa, Bacillus anthracis
  MISC_FEATURE (171)..(171): X=any amino acid
  MISC_FEATURE (174)..(174): X=any amino acid
MAQIRIHEVNTRIENEVKVSKFLQEEGVLYEKWNISKLPPHLNENYSLTDENKAEILAVFSKEIADVSARRGYKAHDVISLSNSTPNLDELLINFQKEHHHTDDEVRFIVSGHGIFAIEGKDGTFFDVELEPGDLISVPENARHYFTLQDDRQVVAIRIFVTTEGWVPIYXGSXLNK

SEQ ID NO: 45738 - protein, 650 aa, Bacillus anthracis
  MISC_FEATURE (187)..(187): X=any amino acid
  MISC_FEATURE (297)..(297): X=any amino acid
  MISC_FEATURE (304)..(304): X=any amino acid
  MISC_FEATURE (342)..(342): X=any amino acid
  MISC_FEATURE (343)..(343): X=any amino acid
  MISC_FEATURE (369)..(369): X=any amino acid
  MISC_FEATURE (382)..(382): X=any amino acid
  MISC_FEATURE (387)..(387): X=any amino acid
  MISC_FEATURE (613)..(613): X=any amino acid
  MISC_FEATURE (625)..(625): X=any amino acid
  MISC_FEATURE (630)..(630): X=any amino acid
  MISC_FEATURE (642)..(642): X=any amino acid
FYYPGYVLGIFCGLGVIPILATFILRWGIIPLFLIFCIVLFVVVRFELTFQKNFEKHTTDMITRVKKVSNEAFNQMPIGILLYNKDYGIDWANPYLSSCLGQHALAGWHLYDVSETLLLFIKGETSGEYVSLNNRKVPVFVRKEEKLIYFFDVTEQTELEKNVRDHRTVLAVIYLDNYDESTQGFRXSLRSKYNKSCDIRLNEWAVKYGAYLKRASSERFFVVLNESILAQMEKGKFSILDQVREETSKRNIPLTLSVGVGSGDLPLSELGAMAQSGLDLALGRGGGSVAIKQATGXVKFYGGXTNPVEKRTRVRARVISHALKDLVLESSNVIIMGIKGSXXGRIWCGIGYLKCGQLNERKGIYWLRXKDSDKGIKTFNGXSETKXRVMVFTYYTRTSDGFANDDSLLVVVDTHKLSMVMEEKLLRKIENVVVIDHHRRGEDFIEDPLLVYMEPYASSTAELVTELLEYQPKNLKMTMLEATALLAGIIVDTKSFTFRTGARTFDAASYLRSHGADTVLVQELLKEDMDQYLRVAKAIKNAYIYTNGIAIAKVDSDDYYDQVLIAQSADTLLTMTGIIASFVIAKRGENFIGISGRSLGEVNVQLIMPPLIXGWAFNKCSHTKXKCYQXMKLREAFDLLLXLFTGRHTI

SEQ ID NO: 45739 - protein, 459 aa, Bacillus anthracis
MSNRFAVILAAGKGTRMKSKLYKVLHPVCGKPMVQHVVDQVSQLGLQKLVTVVGHGAEMVQEQLGNVSEFALQAEQLGTAHAVDQAAGVLANEEGTTLVICGDTPLITAETMEALLQQHKEAGAMATVLTAYIEEPAGYGRIVRNENGHVEKIVEHKDANEKELAIKEINTGTYCFDNKALFASLSKVSNDNVQGEYYLPDVIEILKNEGHIVSAYQTEHFDETLGVNDRVALSQAEIIMKNRINRKNMVNGVTIIDPSNTYISADAIIGSDTVLHPGTIIEGNTVIGSDCEIGPHTVIRDSEIGDRTTIRQSTVHDSKLGTEVSVGPFAHIRPDSVIGDEVRVGNFVEIKKTVFGNRSKASHLSYIGDAQVGEDVNLGCGSITVNYDGKNKFKTVIGNGVFIGCNSNLVAPVTVEDGAYVAAGSTITENVPSKALSVARARQVNKEDYVDQLLNKKKS

SEQ ID NO: 45740 - protein, 212 aa, Bacillus anthracis
MNRNWEEFLAPYHQAVAELKVKLKGMRTQFAMLTEHSPIEFVTGRVKSVASIIDKAEKRNVPLDRLREDMQDIAGLRMMCQFVDEIKPVVEYLRKRNDFEIVEERDYVTQKKDSGYRSYHVVISYPVQTIQGEQKVLVEIQIRTLAMNFWATIEHSLNYKYSGRFPEDIKIRLQRAAEAAFLLDEEMSSIRLEIQEAQKAFSRKQETKDSES

SEQ ID NO: 45741 - protein, 88 aa, Bacillus anthracis
MKSMANIKSAIKRAKLSEERRAHNASIKSDMRSAVKTVEALVTNNDLENAKEAFKTASKKLDKAARKGLIHQNAAARQKSRLAKQVNA

SEQ ID NO: 45742 - protein, 200 aa, Bacillus anthracis
MARYTGPAWKLSRRLGISLSGTGKELEKRPYAPGPHGPNQRKKLSEYGLQLQEKQKLRHMYGMTERQFRRTFDQAGKMPGKHGENFMILLEARLDNLVYRMGLARTRRAARQLVNHGHIMVDGARVDIPSYRVKPGQTISVREKSNNLVVVKEAIEVNNFVPEYLTFDADKLEATYTRHAERAELPAEINEALIVEFYSR

SEQ ID NO: 45743 - protein, 366 aa, Bacillus anthracis
  MISC_FEATURE (95)..(95): X=any amino acid
  MISC_FEATURE (129)..(129): X=any amino acid
MLFPDLANKIVREVRRLIKENIIIINIQGVIIASTDIERIGQFHEGALRCAKQKKTVIIYKEDERRLHGVKAGMNLPLLFHDEVIGVIGNTGETXNISPLGEILRKMTELLIHENYFFKQARLKHRSLXSIGLWNGLQNTDWSPSFLDRAKTLGIDLYKKKQLILVSIDQNDTMLQRKIWQHVRHLLNKEHLFGRWGNDRFILFTAMSSKEQTYQFLKRLKQDCETLFSIPLYIGNWTSRYAKNMNLSYEQALQALSVSLATKKIVFNDDLRLEMCLQDISAETREQFLKRTIKNLLSSPELMHTLRLFIDYNQSYKQTAEQLHIHINTLHYRLKKIEEYTGLDPKQFKDLNILYFSLLLLDNHTK

SEQ ID NO: 45744 - protein, 287 aa, Bacillus anthracis
MKFNKDVKEKLLFHVTINVIVIRNMIERLKVGDIMGKIIAIANQKGGVGKTTTSVNLGAGLAQVGKKVLLVDIDAQGNATTGVGIEKSELDQCIYNVLVEDADVQGVIQKTATENLDVLPATIQLAGAEIELVPTISREVRLQRALQPVRDEYDYIIIDCPPSLGLLTINALTAADSVIIPVQCEYYALEGLSQLLNTVRLVQKHLNKNLAIQGVLLTMLDARTNLGIQVIDEVKKYFRDKVYRSIIPRNVRLSEAPSHGKPIMQYDAKSRGAEVYIDLAEEVIAGG

SEQ ID NO: 45745 - protein, 264 aa, Bacillus anthracis
MQQLIIGRYIPGNSLIHQLDPRTKLLIVFLYVFVVFLANNAISYGFLFLYALIALFFAKVPIRYVLSGLKPILWIFLFTFFLHIFTNKEGEVLFQLGWFSIHEKGLEQGIYISIRFFVIILMTTLLTLTTTPIEITDGLETLLKPLKRIKVPVHEIALMMSISLRFIPTLMDETSKIMKAQSSRGIDFAGGPIKDRMKAIISLLVPLFISAFKRAEDLAIAMEARGYQSGEGRTKFRQLRWKTSDTVTIISLLCLACILAWVRS

SEQ ID NO: 45746 - protein, 217 aa, Bacillus anthracis
  MISC_FEATURE (106)..(106): X=any amino acid
LISKGMYRPVTPGEREIKELEKKEVWKELRAEYEKLKNWLKGPDVPVFILLSDSYNRTVQEEYNGRAGLSMRHVIFLFVCGRNSVEELKVLLAHEYHHICRLHQIXDERTEYTLLDTMIMEGLAEQAVTERYSEKNNAPWTTYLSKEEAIYYWKNVVHERISIKRGTREHDILLNGLHSYPKLLGYALGFHIVKDCVTLQGEDTLSLLPIDAKEILN

SEQ ID NO: 45747 - protein, 528 aa, Bacillus anthracis
MTTFRELGLSDSLLQSVESMGFEEATPIQAETIPHALQGKDIIGQAQTGTGKTAAFGLPLLDKVDTHKESVQGIVIAPTRELAIQVGEELYKIGKHKRVRILPIYGGQDINRQIRALKKHPHIIVGTPGRILDHINRKTLRLQNVETVVLDEADEMLNMGFIEDIEAILTDVPETHQTLLFSATMPDPIRRIAERFMTEPQHIKVKAKEVTMPNIQQFYLEVQEKKKFDVLTRLLDIQSPELAIVFGRTKRRVDELSEALNLRGYAAEGIHGDLTQAKRMSVLRKFKEGSIEVLVATDVAARGLDISGVTHVYNFDIPQDPESYVHRIGRTGRAGKKGIAMLFVTPRESGQLKNIERTTKRKMDRMDAPTLDEALEGQQRLIAEKLQSTIENENLAYYKRIAEEMLEENDSVTVVAAALKMMTKEPDTTPIALTSEPPVVSRGGGSKKRGGNGGGYRDGNRNRSRDGRGGDGRNRDRNRDGRNRDGNRDRNREGSRDGNRGRRGEGQGRPGSSNGRGERKHHSRKPQA

SEQ ID NO: 45748 - protein, 471 aa, Bacillus anthracis
  MISC_FEATURE (177)..(177): X=any amino acid
MVQIEKKLGFFPLIALVVGTMVGGGVFSLPHDLAVGANSGSIIIGWCITAMGMIPLALVYQTLARKKPELEGGIYSYARAGFGEYIGFNSAWGYWLAGILGNVATIMSLIITLCYFFPILKGGNSAASIVRASLLLWTLHFLILLGIREASIMNVIATIGKLVPIVLFIVVMVTAFXWDTFTQDFWGEGTISVSSILGQVKNTMLVTLWVFIGVEGAVVLSGRAKNSRDVGKATVLGLILVMSIYILISVLSMGAMTRGELSVLETPSMGHVLEHVVGTWGAVAINIGLVASLVGTLIGWFLLVSEISHVAGKDGVFPKVFTKTNKKQTPHMALWISNGVAQVIFIIVLFSESTYQIMYFIASTSILVPYLLSALFQFKLVITNELKDAKVKNGSLALIASLYSVWLIYAAGLKNLLLVSIVYGIGIIVYVYARKEKGNRCFTGIERYVMWAIVVAAVTSLYMLLTGNIKM

SEQ ID NO: 45749 - protein, 152 aa, Bacillus anthracis
MYIYHNGLIIREGTNGVPAYAIKTLFEDAGWSNENIPSWQIEKFTIAFENSTWAFTIWDEEEMIAMVRVISDGIMVANIVNLVVKCEYRGKGLGKKLVALCLQKLPHGDWFAHTSANNFDFYRSCGFEVRELSRNGTCAYYGYQIAKKEGHR

SEQ ID NO: 45750 - protein, 247 aa, Bacillus anthracis
MDRIKCTVAYDGMHFCGYQIQPQHRTVQQEIEKALQKLHKGELVRVQASGRTDSTVHAKGQVIHFDTPLSLEEWQWSNALNTMLPDDIVITQVEKKTEEFHARYGVERKEYRYRVLVSKTADVFRRNYVYQYPYPLEVNSIRKAIPYFIGTHDFTSFCSAKTDKKDKVRTIYEIELIEQDDELIFRFVGNGFLYNMVRIIVGTLLNVGQGKLDPDSIPEILAKQNRQFAGKMAPGHGLYLWQVNYNN

SEQ ID NO: 45751 - protein, 309 aa, Bacillus anthracis
  MISC_FEATURE (228)..(228): X=any amino acid
EKVLVFGHKNPDTDAICSAIAYAELKKELGMNAEPVRLGEISGETQFALDYFKVEGPRFVETVANEVDNVILVDHNERQQSANDIESVRVLEVIDHHRIANFETSDPIYYRCEPVGCTATILNKMYKENGVTIRKEVAGLMLSAIISDSLLFKSPTCTEQDVTAARELPEIPGVNADKYGLEMLKAGADLKRKNRERINLSLDPKEFPNGKWRKLEFATSKTLVDTKXSFFVHQAELEKVISAVVEEKGFRLFLFVVTDILTNDSVGLAIGKAANIVEKAYNVSLETNTATLKGVVSRKKQIVPVLTEA

SEQ ID NO: 45752 - protein, 713 aa, Bacillus anthracis
  MISC_FEATURE (56)..(56): X=any amino acid
  MISC_FEATURE (58)..(58): X=any amino acid
  MISC_FEATURE (64)..(64): X=any amino acid
  MISC_FEATURE (192)..(192): X=any amino acid
  MISC_FEATURE (328)..(328): X=any amino acid
  MISC_FEATURE (514)..(514): X=any amino acid
MKMLVKELGFTEKQVRHVIQLTEESNTVPFIARYRKEWTGSLDEVQIRTIFKEMAXIXCSLKIXKKKVFLLFDEKGKLTRELPLQIFKATKLQEVEDLYRPYKEKRRTKATIAKEKGLEPLAEWLLLYTKEDPNQKAMEFINAEKEVQSAEEALQGAQDIIAEIVSDEAAYRSWIRNVTFRKVCYVSVVKGXGGRLKGIFWEMVADKENLLQKVVPHRVLAMIRGEKERYLRVSVFPPVDEIVLFLYKKVIRDNDSKSAQYVKLAIEDGYKRLIQSSMKREIRKELTETAEEQAIHIFSETYVNLYLHPPNERKGCVSVDPAYRTGVXISYVDDTGESFIYWMLFIPHPPVRKYEDAKAKVLSIIDKYQVEMIAIGNGTASRESEEFIVDVLQNVKREVFYIIVNEAGASVYSASDLAREEFPDLQVEERSAVSIGRRLQDPLAELVKIDPKSVGVGQYQHDVSQKRLNESLTFVVETAVNQVGVNVNTASVAWWQICYSLIKTCAKKYVAKAXEEGKFTKRTDLKKIPRLGAKTYEQCIGFLRILEGAKSVRPYRIHPEQYKNVELLLKSLGLSKDDVGQPQLQKSLEEVEISKLSEETGIGEPTLVDIIDALISPERDMRDELPKPLLKKGILKLEDLKRGMELEGTARNVVDFGAFVDVGVKQDGLVHISKLSKQYVKHPLDVVSVGQIVKVWVDDIDTKKRSCCIIYVA

SEQ ID NO: 45753 - protein, 168 aa, Bacillus anthracis
MTEVKGKTANESRVFKTSRVFPTDLNDHNTLFGGKILAEMDMVASISATRHARKECVTASMDWVDFLHPVRSSDCVSYESFVIWTGRTSMEVFVKVVAEDLISGEKRIAATSFVTFVALSKENNPVPVPRVIPETEEEKELHRIAVLRAEQRHIRKAESKKVATLLTF

SEQ ID NO: 45754 - protein, 136 aa, Bacillus anthracis; identical to SEQ ID NO: 45595
  MISC_FEATURE (22)..(22): X=any amino acid
  MISC_FEATURE (24)..(24): X=any amino acid
  MISC_FEATURE (129)..(129): X=any amino acid

SEQ ID NO: 45755 - protein, 230 aa, Bacillus anthracis
  MISC_FEATURE (51)..(51): X=any amino acid
  MISC_FEATURE (124)..(124): X=any amino acid
  MISC_FEATURE (127)..(127): X=any amino acid
MAKRGKKYVKAAKLWDRATAYSSTKAVELGKKPNTAKFDATGETAFRLRGXPKKAAQPNPGANCSSHGPGKSQPFFSIPLKGEKAKEAEAAGADFVGDADYIGKIQQGWFDFYVVVATPDMMGXSWXTWQILPPTGLMPNPKKRTVTFDVTKAVNEIKAGKVEYRVDKAGNIHVPIGKVSFEDAKLVENFRTIADTLQKVKPAAAKGTYMKNVTVASTMGPGVRVDVSTL

SEQ ID NO: 45756 - protein, 566 aa, Bacillus anthracis
MKQSMVFSPTLREVPADAEIKSHQLLLRAGFMRQNASGIYSFLPFGLKVLHKVERIVREEMERAGAVELLMPAMQAAELWQESGRWYSYGSELMRMKDRNAREFALGATHEEVITDLVRDEVKSYKKLPLTLYQIQTKFRDEQRPRFGLLRGREFLMKDAYSFHATQESLDEVYDRLYKAYSNIFARCGLNFRAVIADSGAMGGKDTHEFMVLSDVGEDTIAYSDTSDYAANIEMAPVVATYTKSDEAEKELEKVATPDQKAIEEVSAFLNIEADKCIKSMVFKVDEKLVVVLVRGDHEVNDVKVKNVYGASVVELASHEEVKELLNCEVGSLGPIGVNGDIEIIADHAVASIVNGCSGANEEGFHYVNVNPERDFKVSQYTDLRFIQEGDQSPDGNGTILFARGIEVGHVFKLGTRYSEAMNATFLDENGKTQPLIMGCYGIGVSRTVAAIAEQFNDENGLVWPKAVAPFHVHVIPVNMKSDAQREMGENIYNSLQEQGYEVLLDDRAERAGVKFADADLFGLPVRVTVGKKADEGIVEVKVRATGESEEVKVEELQTYIANILK

SEQ ID NO: 45757 - protein, 627 aa, Bacillus anthracis
  MISC_FEATURE (529)..(529): X=any amino acid
  MISC_FEATURE (598)..(598): X=any amino acid
MCGFVGCLCENPREFSETEKHQFENMNTMIFHRGPDDEGYFRDEHVNYCFRRLSIIDLEAGHQPLTYENDRYVIIFNGEIYNYVELREMLLEKGATFATQSDTEVIIALYAHMKEKCVDYLRGMFAFMIWDREEKKLFGARDHFGIKPLYIAQQGDTTFFASEKKSIMHVMEDKGVNPTSLQHYFTYQYGPEPETLTIDVNKIEPGHYFVKEIGKEMEIHRYWEPYFNASSATKEEHIQAIRDVLYDSVKVHMRSDVPVGSFLSGGIESSIIRSIAREMNPNLLTFSVGFEQRGFSEVDVAKETAEKLGVKNHNVFISAKEFMDEFPKIIWHMDDPLADPAAVPLYFVAKEARKHVSVVLAGEGADELFGGYNIYREPNSLKMFSNIPSPGKSVLIALSGALKEGFKGKSFVERGCTPSEERYYGNAKIFRQEERDELMKYYNDSVNYMDISNPLYNEIKDYDDVSKMQYIDMFTWLRGDILLKADKMTMVYSLELRVPFLDKQVFDVAYKIPSEFKIANGTTKAILQXSARGIVPDHVLDRKKLGFPVPIRPWLKYEMHDWAINIIIESNTEHLIDKQYVLNLLEAHCADKGDYRPXIWHCTCFMVWHQIYVEHKYDTNKFHEETK

SEQ ID NO: 45758 - protein, 431 aa, Bacillus anthracis
  MISC_FEATURE (178)..(178): X=any amino acid
  MISC_FEATURE (292)..(292): X=any amino acid
  MISC_FEATURE (333)..(333): X=any amino acid
  MISC_FEATURE (404)..(404): X=any amino acid
MNKDISKDEHVPSQSTTVQSAHLAFSGQTKGLKRLLPFLGPCFIASVAYIDPGNFATNIAAGSQYGYLLLWVILASNLMAVLIQTLSAKLGIATGRNLPEIARENFPKPVSIGLWIQGELVIMGTDLAEFIGAALGLYLLFGIRMLPAALITAAGSFIILEFQRRGFRPLEAIITGGXFYRGIAFWCTVFYAKPELSPLLSGLFIPKFQGVDSILLAAGILGATVMPHAIYLHSRLNTRRVVGTNDEQKKKIFSVWILMNIILRKGLLLEQINAKYVIGVLALFLKNGFACXRSDVPFNQFSNLVGPCISCFIWIGLLSAGLFMFFGRYNSRXYIRQGFHGMPIPLFLRRFITMIPPLVIIALGVNPNLRSSHEPRSLIIRYCLCLVPLIMFTSSKKNYGYTRXSPHNYFIAWIIAVLVIILNIFLLYQTF

SEQ ID NO: 45759 - protein, 503 aa, Bacillus anthracis
MTDFIQTFQERKIELLTALSEHLQISLISLFFAVIIAVPLGILLTRKERMAELIIGTSAVMQTVPSLALLGLLIPLVGIGKIPAVIALVVYALLPILRNTYTGIRELDESLIEAAKAMGMNSWRRLWKVELPLALPIIMAGIRTAMVLIVGTATLAALIGAGGLGKLILLGIDRNDHALIILGAVPAALLALFFDVVLRVLEKPKRSSKRVILTICIVCIMVASPFLWNTEKKDIVIAGKLGSEPEILIQMYKQLIEQDTDLHVQLKPGLGKTAFVFEALKSGEVDIYPEFSGTALSTFVKEEPKSTNRDEVYEQARVGMEKKYNMVMLKPMEYNNTYALAMPKKIADQNNINTISDLGNIAQDTKVGFTLEFADREDGYKGMQKLYNYKFSNVKTMEPKLRYSAIQSGDVNVIDAYSTDSELEQYGLKALKDDKGLFPPYQGAPLLRKETLQKYPELEKVLNKLSGKITDEEMRKMNYEVNVNGKNSEEVAKQFLQKENLLR

SEQ ID NO: 45760 - protein, 170 aa, Bacillus anthracis
LIQMNLKKFEEVINGEGLHESFHHLEIHGVCIDSKNIKEGNVFVPIIRVKDGHEYVKEAMDNGAIASLWKKSYGSPPKGIPIIFVDDTLFALQQLAQFYRREINVKVIGITGSNGKTTVKDIVEGILRSTYRVHKTKGNFNSQIGLPLTILEMKRDTEILILEMGMSEKG

SEQ ID NO: 45761 - protein, 122 aa, Bacillus anthracis; identical to SEQ ID NO: 45315
  MISC_FEATURE (106)..(106): X=any amino acid

SEQ ID NO: 45762 - protein, 466 aa, Bacillus anthracis
  MISC_FEATURE (78)..(78): X=any amino acid
  MISC_FEATURE (92)..(92): X=any amino acid
  MISC_FEATURE (166)..(166): X=any amino acid
  MISC_FEATURE (178)..(178): X=any amino acid
  MISC_FEATURE (252)..(252): X=any amino acid
  MISC_FEATURE (257)..(257): X=any amino acid
  MISC_FEATURE (306)..(306): X=any amino acid
  MISC_FEATURE (317)..(317): X=any amino acid
  MISC_FEATURE (464)..(464): X=any amino acid
MKNTLVKKLYRDTDKYAGQTVQVSGWIRNLRDSKAFGFIEFNDGSFFKRVQIVFLYELDNFKEIAKLPLSSSVKVERXSIATPGAKAPFEIXSRKIDIEGLSDSDYPLQKKRHTFEYLRTIAHLRPRTNALLCNVPRTFYRQHFAIHQFLPRAWIRHVHTPIHPWXGSRGAGRNGPAXQRRFNQVPKRRKTDKVDESKDFFCKETNLTESGQLNAEAYALAFRDVYTFRTYIPCRKLKTTRHAAEFLMGEPXDCICXTRDVNDLYRRYAEICNEIRLEHAPEEMESFTSFVDKTVLERMNNVINFXLRSHHLYRSNXVLQESGADFKYPVEWGIDLQTEHERYLSEEIFKRPVFVTDYPKDIKAFYMRLNDDGKTVAATDLLVPGIGELIGGSQREERMDVLVDRIKELGMNEEDYWWYLELRKYGGTKHAGFGLGFERFLMYITGMANIRDVIPFPRTSRFFXIL

SEQ ID NO: 45763 - protein, 2358 aa, Bacillus anthracis
MPFLNRFTTTVPGAVTFTGNTLGLSPISPAPGNIFGTLAVFTTVNTALQAPGFPAGTTDDWRLNSSSAILNLPAGSSILYAELVWAGTFRTDTEDVLPFLNDNITFTTPAGTFSVTPDPATAQQGSVGNQFYYARSANVTNLVSAGGAGTYTTGAVPATRTSADPTISRSAGWTLEVVYQNASLPLRNLSVYAGQEIIDASSPPVDATISGFATPATGAVTGRVLVTAQEGDSNISGDQLRFGPNANTTVALFGPRNPANNFFQSQICNDSGNLDTSGTFGDLNQPLGVALAVRRQGWDITNVDASSSLVNNQTSATVRFVTNGDGYAAAGFGVQIDATGPIINPVKSVNRTVAGVGDTLTYTITVPNTGTGSAENVVLRDSIPNGTTFVAGSVTVGGVTQPNANPATGINLGTIPNNTQRIVTFQVRITSFPNPNPIPNRAMVSYQFRPFVGSPLITSMSSSNTVQTTVNQATISMQKSVDLQTATLNDVLTYTVNVTNNGNVTANNVIFVDSIPAGTTFVANSVIVNGVARPGANPASSINLGSINASQTTVVRFQVRVTSNPLVNPIPNRASATFTFTPVPGQQPVSGQATSNTVVTTINIADIRTRKIVDRAFATVNDVLTYTVTIENTGNVLATNVVFQDPIPIGTTFITNSVTVDGVSQPGANPATGFTVANISPGGSRTVTFQVRVTSTPSGGTIPNRGNVTANFVVIPNQPPITINRQTNTVVTQVNTGGLNVIKEVNTTQAVVGDTLTYTIAVQNTGNVPLTNVFFQDAISSAVSFVANSVTINGVPQSGLNPNTGFSLPNIPAAQTVVVTFDVLIIQDPENEDILNQANVTASFQVNPSEPPVTINVPSNIVNTTVQSGNFEVVKSVNTDVATVGDVLVYTIEIINAGSVPATNVFFQDSIPQGTLFIENSVFVNGVLQEGADPELGFPLNDLPTGASVIVTFEVLIDEIPLGNNVVNSANVTGDFLVNPTEPPITVTEPSNTVMTVVNSSGLNVIKSVSATEAGVGDTLTYTVRIQNSGTVAATNVSFLDPIPSGTTFVANSVIINGTPQPGLNPTTGFPLANIPVGGMVTVAFQVTITSVPPNRVLPNNANVTADFQVSPLQPPITIVTISNIVVTRVNVGSLNVMKSVNTLQAGVGDTLTYTILIQNTGTVPATNIIFQDPIPSGTAFVANSVTINGVVQQGADPMAGFPVPNIPVGQTATVTFQVTVTSIPSGGNIRNQSNITASFLINPANPPITTVTNSNFVVTQVNTAQLNIQKTSSVQQAALGETYTYSVVIRNNGTVTATNVSFIDPIAPETTFVANSVTINGTPQPGFDPNVGFPLPNIAAGTSLTVTFQVTVIAPSTRGAVLNTASAIATFLLNPLQPPVTTTNSSNTTVVTIPLPPPGEVTATKTVDVAAGAVGDVLTYTVLISNVGIIPVADVFFQDVIPEGTTFVEGSVTIGGVQQLGLNPEIGFTVTPLLIAGGSIEITFQVTITEIPDNEVILNDADVTFTSQPNPQEPPITETILTNLVVTTINIAFVFPLKLVDKEVATVGEILTYDVLIFNFGTVPATNVQYSDVLPSSIAFEPNSVTIDGVLQPGFNPNNGFPLPDINPGESVEVTFQVTVVSVPSNGTIVNTANVTGSFVLVPGEPPVIVTGPSNTTLTTVNRGQFNVIKQVNRAATLVGDVLTYTVQITNTGTVTANDVQFIDTISAGASFVPNSVTINGALQPNLNPITGFGVGDIPVGETVVVTFQATVTNIPASGTITNVANITGSCTLVPGEPPVVVTEPSNTTITSINRGRFSVIKSVNKEATRLGDTLTYSVQVTNTGTVTATNVQFIDVPSPSLEFVPGSVQINGIPQVGLNPFIGFSLPDLAVGDSVLITFAVNVIAVPPSSSIMNTARVTGDFELIPGEPPFTITNSSNTTVTPVNRGSLDMQKEVDNSIVGVGETVTYTVRILNTGTADAMNVQFIDVLSPEAVFVPNSVTVNGVARPGVNPQVGFTIVDIPVGETAIVTYEATITSFPDGGTVVNVAGALAEYILVPGEPPVTVMDTSNTVIVTVNTAILFVAKGANFEVAMVGDVVTYGIAVINDSTVPVTNIVLTDIIDPNTLFINGTVTVNDVALPFANPNTGIPLGDFQPNDAAIINFQVVITGGQINNLVTNTAIANGLAIVNPNELPVVVEGDSNTVVIPFIPQNVSTTVVKTADLQAATIGDVIIFTTVITNTGDTVIQNIRFQDMLDSSVRFVLGSVTVDNTPVPNVSPVSGFLIGNLNPGEARTVSFQVVVQSAPNGSGNYINQASIRFEHQVGTVLPPVTQIVESNIVVIPFVPTIEQICETNLNCLGKIPFQCSPCDHLQIKRK

SEQ ID NO: 45764 - protein, 66 aa, Bacillus anthracis
MSESGLKEQITGKVEKTKGQVKEGIGEVTEDRKLKNEGKWDKTKGTIKEKVGKVKQKISDGLDNKE

SEQ ID NO: 45765 - protein, 202 aa, Bacillus anthracis
  MISC_FEATURE (35)..(35): X=any amino acid
  MISC_FEATURE (51)..(51): X=any amino acid
  MISC_FEATURE (172)..(172): X=any amino acid
  MISC_FEATURE (174)..(174): X=any amino acid
MYKPITFSLKYIFKTSWESEKCKGKEKSYQKGGPXVVACTHTRFYGMYLMXLQGIVPGPEIIYMAKKRLFEGKIQKIGSLKKVNAFPVVRANPGPEYLKIPSRLLKEGKVVGIFPSGTRSTEDVSLKAGAVTIAMRSNVPLIPAAYIGPSSVKELIKGKRAQLIFGDPNSNXCXGPNRSKNSYENDAGSNKMRSLRGFMEAL

SEQ ID NO: 45766 - protein, 794 aa, Bacillus anthracis
MYCNIKWLNRSLIYYGGAMSSMNTNERIVPLLPLRGVLVYPTMVLHLDVGRDKSIQALEQAAMDENIIFLAMQKEMNIDDPKEDDIYSVGTVAKVKQMLKLPNGTLRVLVEGLHRAEVVEFIEEENVVQVSIKTVTEEVEADLEEKALMRTLLEHFEQYIKVSKKVSNETFATVADVEEPGRLVDLIASHLPIKTKQKQEILEIISVKERLHTLISIIQDEQELLSLEKKIGQKVKRSMERTQKEYFLREQMKAIQTELGDKEGKGGEVEELREKIEQSGMPEETMKAALKELDRYEKLPASSAESGVIRNYMDWLLALPWTDATEDMIDLAHSEEILNKDHYGLEKVKERVLEYLAVQKLTNSLKGPILCLVGPPGVGKTSLARSIATSLNRNFVRVSLGGVRDESEIRGHRRTYVGAMPGRIIQGMKKAKSVNPVFLLDEIDKMSNDFRGDPSAALLEVLDPEQNHNFSDHYIEEPYDLSKVMFVATANTLSSIPGPLLDRMEIISIAGYTELEKVHIAREHLLPKQLQEHGLRKGNLQVRDEALLEIIRYYTREAGVRTLERQIAKVCRKVAKIIVTAERKRIVVTEKNVVDLLGKHIFRYGQAEKTDQVGMATGLAYTAAGGDTLAIEVSVAPGKGKLILTGKLGDVMKESAQAAFSYIRSRAEELQIDPNFHEKNDIHIHVPEGAVPKDGPSAGITMATALISALTGIPVSKEVGMTGEITLRGRVLPIGGLKEKTLSAHRAGLTKIILPAENEKDLDDIPESVKENLTFVLASHLDEVLEHALVGVKQ

SEQ ID NO: 45767 - protein, 399 aa, Bacillus anthracis
  MISC_FEATURE (80)..(80): X=any amino acid
  MISC_FEATURE (392)..(392): X=any amino acid
MTLAAPIIFLFLFTGGAIAILEKTGALDGLIYHVINKFRNQQLLFICIVAALFSILGTTGIIRTSVIGFIPIGIIVARTXKWDAIVGVAIIYLGTYAGFNATILSPSPLGISQNIAELPMFSGIGLRTAIYISFLLATILYINWYVKRLKKSNKGSILGDNWFPSNALSSGKEAQKTEVPWTIRHKLILLVSALSLIAFLIGAFRLHWTDAEMTATFSFIAITAGIIGGMKANDIASTFLAGCQNLIYGALIVGMARCISVILEQGKLLDTIVNQLAQSLEGQSPVFGVIGMYVSSAALHFLISSGTGESVIFIPILAPLADFMHITRQVTVQAVMLGEGVVNCLKSTSGVLMGVLAAKRISYGKWNFDLWAPLAFIWVYYLDLFFLNCWGXNIEWGPY

SEQ ID NO: 45768 - protein, 268 aa, Bacillus anthracis
  MISC_FEATURE (117)..(117): X=any amino acid
  MISC_FEATURE (152)..(152): X=any amino acid
  MISC_FEATURE (154)..(154): X=any amino acid
  MISC_FEATURE (237)..(237): X=any amino acid
PNVLREAMAYSLEAGEKRLRPLLLFATLQAFDKEENLGVGAACALKMIHTYSLVHDDLPCMDDDDLKKRKSPQNHKVFGEAMAVLAGDGLLTYAFQVIMAYGQKEISAEKKVRLVPXAAKAAGPRGNVGGQVADMEAEGKQLTIDELEYISXAXTGKLLEFAVLAGSILSDATEEQEEKLLEFAKYIGFSFQNRDGYFRCGGTEEEIGKPIGSDGSNEKNTYTTLVTGNRTKDILKXTIGKSKRCYWFLAIQDEYLLSICDLIAKRNN

SEQ ID NO: 45769 - protein, 223 aa, Bacillus anthracis
  MISC_FEATURE (114)..(114): X=any amino acid
  MISC_FEATURE (172)..(172): X=any amino acid
  MISC_FEATURE (204)..(204): X=any amino acid
LYVTRHGKTILNTNHRAQGWADSPLVEKGVEVATNLGTGLKEIHFMNAYSSGSGPPHETANLVLKYSEQSKLKLEQRKKFTRIKFWYFLKVKNLIICGMRLEKLRALHHQKNFXSFLFKKIFDLIRAADPTKQAGRWELFSTPIKAEIGKINGKTPKRCRRNVLIVPSRGFXLTTLIEMLDSSKTKLGVENASVTKIVYQDGIXYVESAGNMNYVAKGKDNVE

SEQ ID NO: 45770 - protein, 428 aa, Bacillus anthracis
  MISC_FEATURE (81)..(81): X=any amino acid
MFSVVVVGPQWGDEGKGKITDFLSEHAEVVARYQGGNNAGHTIVFGGVKYKLHLIPSGIFYKEKICVIGNGLVVDPKALLXELKYLHDRGVSTDNLRVSNRAHVILPYHLKQDELEEASKGDNKIGTTKKGIGPAYMDKAARIGIRMADLLDREAFKEKLEQNLAQKNRLFEKMYDTEGFSVDEIFEEYFEYGQQIAQYVCDTSVVLNDALDNNHRVLFEGAQGVMLRIDHGTYPFVTSSNPIAGGGNVGTGVGPAKVTRVVGVCKAYTSRVGDGPFPTELHDEIGHQIREVGREYGTTTGRPRRGGGPNSGGGRQARRGRGETEKSKNPNDGQTGNPTPKNGGANQGEGKGNEEVPSKLKHFSKCEPVYEELPGWDRRNTGWRPLKGLPENARKYVERVSELTGIQLPMFLSGTGRNQTNIRSKRIP

SEQ ID NO: 45771 - protein, 301 aa, Bacillus anthracis
MMKRARIIYNPTSGRELFKKSLPEVLQKLEQAGYEASCHATTGPGDATVAARQAADRKFDVVIAAGGDGTLNEVVNGLVGHEHRPKFGIIPVGTTNDFARAIGVPRSIEEAADIICEGKTVPLDLGRANDTYFINIAGGGRITELTYEVPSKLKTVLGQLAYYLKGIEMLPSLHPTYVEIEYDGKLLQEEITMFLITNTRSVGGFEKVAPYASINDGLFDLLVLKKGSIADLIKAATQAQRGEHINNPKVLYTQANRIKVHSPDKLMINLDGEYGGDAPMEFENIYHCLELFVPEHQEDAL

SEQ ID NO: 45772 - protein, 275 aa, Bacillus anthracis
MLKIGSHVSMSGKKMLLAASEEAVSYGATTFMIYTGAPQNTRRKPIEELNIEAGRKHMEQNGIEEIIVHAPYIINVGNTTKPETFQLGVDFLRMEIERTSALGVAKQIVLHPGAHVGAGADAGIQQIIKGLNEVLTPDQTVNIALETMAGKGTECGRSFEEIAKIIDGVKYNEKLSVCFDTCHTHDAGYDMVNNFDGVLNEFDKIVGIDRLQVLHINDSKNVRGAGKDRHENIGFGHIGYKALHHIVHHPQLTHVPKILETPYVGEDKKDKKPPI

SEQ ID NO: 45773 - protein, 811 aa, Bacillus anthracis
MMFGRFTERAQKVLALSQEEAIRIGHNNIGTEHILLGLVREGEGIAAKALIALGLSPEKVQKEVEALIGRGTEASQTVHYTPRAKKVIELSMDEARKLGHSYVGTEHILLGLIREGEGVAARVLNNLGVSLNKARQQVLQLLGSNEASSGHQGGSSTNANTPTLDSLARDLTVVARENRLDPVIGRGKEIQRVIEVLSRRTKNNPVLIGEPGVGKTAIAEGLAQQIVNNEVPETLRDKRVMTLDMGTVVAGTKYRGEFEDRLKKVMDEIRQAGNIILFIDELHTLIGAGGAEGAIDASNILKPSLARGELQCIGATTLDEYRKYIEKDAALERRFQPIHVDEPSLDESTQILKGLRDRYEAHHRVSITDDAIDAAVKLSDRYITDRFLPDKAIDLIDEAASKVRLRSYTTPPNLKELEVKLEEIRKEKDAAVQSQEFEKAASLRDMEQRLREKLEDTKRQWKEQQGKENSEVTVEDIANVVSTWTRIPVSKLAQTETDKLLNLESILHDRVIGQDEAVVAVAKAVRRARAGLKDPKRPIGSFIFLGPTGVGKTELARALAESMFGDEDAMIRIDMSEYMEKHSTSRLVGSPPGYVGYEEGGQLTEKVRRKPYSVVLLDEVEKAHPDVFNILLQVLEDGRLTDSKGRTVDFRNTIVIMTSNVGAEALKRNKHLGFNVQDESRDYSDMKGKVMDELKKAFRPEFLNRIDEIIVFHMLEKKHIQEIVTLMVNQLVNRLKEQEIELHLTEGAISAIADKGFDREYGARPLRRAIQKHVEDRLSEELLKGAIEKGQKVIFDVEGESFVIHSAEKVK

SEQ ID NO: 45774 - protein, 166 aa, Bacillus anthracis
  MISC_FEATURE (72)..(72): X=any amino acid
PFGPFLVFFLKICFATMFPTAVFWKDSIAAPHFFIIVLCFVTVYIVRSKGFIIGLLFGFLFDTVYTELVGIXYFAYPIVAYLVYSAINILQLNLFIVVSIVLASIAALEYYVYGFLTLLGRTHMSAYVFFTDRLLSTLLLNAIFLFIVCFPLRRYLVRLSKAMEEK

SEQ ID NO: 45775 - protein, 326 aa, Bacillus anthracis
  MISC_FEATURE (36)..(36): X=any amino acid
  MISC_FEATURE (286)..(286): X=any amino acid
KVYYEKDVTVNLLKEKEIAIIGLASQGPAHAQNLTXKRIDVVVGLRKGKSGNKAKERWIFVYTVAEAAKQADVVMILLPDELQPEVYEEEIAPNLQAGNSLVFAHGFNVHFDQVKPPVNVDVFLVAPKGPGHLVRRTFSEGGAVPALFAVYQDATGVATEKALSYADGIGATRAGVLETTFKEETETDLFGEQAVLCGGVTALVQAGFETLVDAGYQPELAYFECLHETELIGDLMYEGGLGNMEISVFDTAQWGRLRIRTRVVSADAKIAMGTVLAEIQDGTSAXGWIAEHKAGRPNFYATNEKANDHEIAVVGRKLRGMMPFVQ

SEQ ID NO: 45776 - protein, 367 aa, Bacillus anthracis
  MISC_FEATURE (355)..(355): X=any amino acid
RRTPEEYLEYIRQQNRGKLKLYVGAAPGVGKSYKMLYDAREMKKDGMDIVIGLIETHGRKETEEAIADLEKVPLKEIQYKGKVFYELDVEGIIKRAPQVVVVDELAHSNVLCSKNKKRYMDVQELIDAGISVLSAFNIQHLESVHDIVAQITNVKVRERIPDFILQKANEIQLVDATPGSIKEETIRRERYIKKKKFPQSLQNFFTLNNLGAPRKNYHSREVADDMDEKKIAQTVIEPIGVKEKILVCVQYSSTAEKLIRRGWRMADRLNAELYVLNVEREKIDSLSAGKKQTIEEWKSLTNQFDASFVLEEANGRKPADVIIEVAKRLQVTPILLGQSARNKWDEIRKRSIGNXIYERNESILIFI

SEQ ID NO: 45777 - protein, 993 aa, Bacillus anthracis
  MISC_FEATURE (101)..(101): X=any amino acid
  MISC_FEATURE (463)..(463): X=any amino acid
  MISC_FEATURE (477)..(477): X=any amino acid
  MISC_FEATURE (497)..(497): X=any amino acid
  MISC_FEATURE (564)..(564): X=any amino acid
  MISC_FEATURE (606)..(606): X=any amino acid
  MISC_FEATURE (609)..(609): X=any amino acid
  MISC_FEATURE (611)..(611): X=any amino acid
  MISC_FEATURE (635)..(635): X=any amino acid
  MISC_FEATURE (651)..(651): X=any amino acid
  MISC_FEATURE (763)..(763): X=any amino acid
  MISC_FEATURE (784)..(784): X=any amino acid
  MISC_FEATURE (790)..(790): X=any amino acid
  MISC_FEATURE (797)..(797): X=any amino acid
  MISC_FEATURE (838)..(838): X=any amino acid
  MISC_FEATURE (979)..(979): X=any amino acid
  MISC_FEATURE (983)..(983): X=any amino acid
  MISC_FEATURE (992)..(992): X=any amino acid
GVYSASKLPREFFPSIDNPAVTVTTLSPGLDAEAMTKEVTDPLEKQFRNLKHLGNINSFTHQGTSPFRFPDTFQANIEEAPREVEKALITFNFPKKAPNPXVSHLIPPWIPLRQLASQRQKGFSKAKENQIQKEMDPHPKTFFGLATAMVFWKITSELSIILDPNQLKDKNVTTEQILKVLQGKETSTPAGAVTVNKEEYSLGVVGDIKKVEDIKDITVAPRVKLQDVAQSELKQQYDTISHINGEEGTGINHHEKSQVKMQLQSGKEIDKKIKDISKQYKDQFSIKLLASTHEQVENAVTSMGKESILGAIAATLIILIFLRNFRTTLIAVVSIPLSILLTLFLLHQSNITLNTLTLGGLAVAVGRLVDDSIVVIENIFRRLQKEYFSKDIILDATKEGRRRNTFFYFNTVAVFLPIGLVSGVIGKFSVTYGYSGCIFYTSSFIGALTVGPLMGFFTTPKNXNPKRPGSSHRYGRXIKRGVFPLNSIIQPYLLFNXFPGINGRLMSYYPKANIKSEDDTMLSINMTFPADYALETPKQKAFDFQKKLLSYSEGTDGIFTNGIXRRRCTMGQTTKNNLASIFVVFKKGSDIDQYIKELKKEHNAFXTRXTXLYKKRVISAPGGGNNFAIHGNSPXRKRFLKGCFYSSKQNXKTWNDLSKVKTNLETSKKECKIHVNQAKGRTLGDYPQNSSSTSGIPYEEIPIGEVSINNEKTTIMIEHKKESITKQEDILNTNILSPINGPIPLKDIATISEKQLQTEVFQXRWKRKPFQNSRQKPSNESFKXSRAQKXTKAIPDXILLSGAQSKFSQGAHWNLIQRNFPGFYSRLMGIAIGNCIFXLWLITFGQARVSFCNLVLLAISCVGGILGLITSGTPVDVNSLIGALMLIGIVVTNAIVLIERVQQNREHGMETREALLEAGSTRLPPFFMPGLPPFVGMLPSLFGQFPARKYGIKKSSRCCYRWLAVSTVLTLVVVPSYVXTIRXNREKKTLLXK

SEQ ID NO: 45778 - protein, 453 aa, Bacillus anthracis
MSDVMADRTPPHNIEAEQAVLGAILIDQDALTSASELLVPDSFYRTKHQKIFEVMLGLSDKGEPIDLVMMTSAMADQGLLEEVGGVSYLAELAEVVPTAANVEYYARIIAEKALLRRLIRTATHIVSDGYEREDDVDGLLNEAEKKILEVSHQTNAKAFQNIKDVLVDAYDKIELLHNQKGEVTGIPTGFTELDKMTAGFQRNDLIIVAARPSVGKTAFSLNIAQNVATKTDENVAIFSLEMGADQLVMRMLCAEGNIDAQRLRTGSLTSDDWAKLTMAMGSLSNAGIYIDDTPGIKVNEIRAKCRRLKQEQGLGMILIDYLQLIQGSGKSGENRQQEVSEISRTLKGIARELQVPVIALSQLSRGVESRQDKRPMMSDIRESGSIEQDADIVAFLYREDYYDRETENKNTIEIIIAKQRNGPVGSVELAFVKEFNKFVNLERRFEDGHAPPA

SEQ ID NO: 45779 - protein, 272 aa, Bacillus anthracis
  MISC_FEATURE (235)..(235): X=any amino acid
MSAFLGELIGTALLIVLGGGVCAGVSLKKSFAKDSGWIVITMGWGLAVAVAAYVVGSISGAHLNPALTIGLAFKGAFPWGDVPGYIAAQMIGAIIGAVIVYLHYLPHWEETEYPGTKLGVFATGPAIPNTFANLLSEMIGTFVLVFSILAIGANKFADGLNPFIVGFLIVSIGLSLGGTTGYAINPARDLGPRIAHFFLPIAGKGGSNWEVCMIPVVSIHIRWSLAGFFSSSCIXGKQNAALIYVIIATVIVLAISYMTSKKSGSNTNSRKV

SEQ ID NO: 45780 - protein, 484 aa, Bacillus anthracis
  MISC_FEATURE (244)..(244): X=any amino acid
  MISC_FEATURE (267)..(267): X=any amino acid
  MISC_FEATURE (298)..(298): X=any amino acid
MEQLVEWLVGQVWSIGLVVFALGAGVYFTIATRFLQIRYFKEMIKLLFEGKSSETGISSFQAFCLALSGRVGIGNIAGVATAIAFGGPGAVFWMWVMALLGAASAFVESTLSQIYKSKVENEYRGGTPYFIEKGLNMKWFAVIVAVVVTLSYGVLLPGIQSSSIAVGFENSNGISKYITGILLVVLLAAIIFGGVKRIAGVSQMLVPFMAIGYVIVTCIVLIAKVKEIPSMFALIFSSAFWGEXNSWVGIVGCSPIAWGVKCAVFFXSCLALGEATYNSAAGLNSHPAKQRGMSAFFXYNDTIVVCTATALMILITGMYNVIPEGKSAIVKNIGNVDAGPIYTQQAVETVMTGFGPLFISIAIFFFAFTTLLAYYYIAETTLTYLDRELKHSWLKPVLKIGFLIMVYIGSVESASLLWNLGDLGIGSMAWLNLIAILLLSKIALKVLKDYETQKKEGKDPVFDPKNVGIEGLTFWEERSKEVAR

SEQ ID NO: 45781 - protein, 81 aa, Bacillus anthracis
MKAGIHPDYKKVVFMDTNTGFKFLSGSTKGSNETVEWEDGNTYPLLKVEISSDSHPFYTGRQKFATADGRVDRFNKKYGLK

SEQ ID NO: 45782 - protein, 114 aa, Bacillus anthracis
MQKAGILDAAISLLAAKEDVSKIAVEQLNREPVKNALNNMMGAGEALSSVDPEVTKQITSSLVTGLQFATDELNSGKKTKVMDFFKVLKDPDINRAITFGFSFLKAFGQGLEKK

SEQ ID NO: 45783 - protein, 444 aa, Bacillus anthracis
  MISC_FEATURE (263)..(263): X=any amino acid
  MISC_FEATURE (319)..(319): X=any amino acid
MNGKRNIFTCISIVGIGLASFSNSSFAARVTDNSIQNWNPVVNQPSAAAKEMKPFPQQVNYAGVIKPNHVTQESLNASVRSYYDNWKKKYFKNDLSSLPGGYYVKGEITGDADGFKPLGTSEGQGYGMIITVLMAGYDSNAQKIYDGLFKTARTFKSSQNPNLMGWVVADSKKAQGHFDSATDGDLDIAYSLLLAHKQWGSNGAVNYLKEAQDMITKGIKASNVTNNSRLNLGDWDSKSSLDTRPSDWMMSHLRAFYEFTGEXNWLTVINNLYDVYTQFSNKYSPNTGLISDFVVKNPPQPAPKGFLNESEINNVILLXASRVPLRIVMDYAMYGEKRSKVISDKVSSWILNNTNGNPSKIVDGYQLNGSNIGNYPTAVFVSPFIAASITNSNNQKWVNSGWDWMKNKRESYFSDSYNLLTMLFITGNWWKPIPDNMKTLNQID

SEQ ID NO: 45784 - protein, 421 aa, Bacillus anthracis
  MISC_FEATURE (69)..(69): X=any amino acid
  MISC_FEATURE (86)..(86): X=any amino acid
  MISC_FEATURE (277)..(277): X=any amino acid
  MISC_FEATURE (314)..(314): X=any amino acid
TTVKNEKYLDPKKWHKQDTTCALSLFVTAIGARVLFLPINARSRGLLPVLVITILGYPGMDYSHKAPAXMIYAFNFCRRGDLQVQXENIFGNKASIIFNIVYFVSIYTIVLMYSVALTNTAKRFIVHKCTWPKPQRAILSLVLKIGLNPITKFWGGITCKKKDHGKKPFPWLPNFLLENTLIPQWNTSMLSFSSVSTASTGTGYFGTIWMILPIIVFSFNHSPMISSFVMKQRATYGIDATDAKCAQIQKVCYIMTFAGGMVLVWSSTLSLTPEDLXVGERQNLAILSNLGLRALIPQVIPNCGLLLFAFVGIXKGLSLGLYIGAYEVMRDMIIKSGKKRGKDIGEKTVKTMILTFVVLTRLYVVNTNPRYPWNIDALSGPLVAAILCLLPMYAICKVPVLANYRGENEQMYLNYYGILTV

SEQ ID NO: 45785 - protein, 171 aa, Bacillus anthracis
  MISC_FEATURE (96)..(96): X=any amino acid
ISKDMMINEQIRAREVRLVGQNGDQLGIKSRNDALDLAANLNLDLVLVAPKAKPPVCRIMDYGKFRFEQQKKEKEQRKNQKVISMKEVRLSPTIFXHDFNTKLLNAIKFLEKGDKVKASIRFKGRAITHKEIGQRVLDRFSEACAEVSTIESKPKMEGRSMFLVLAPKNDK

SEQ ID NO: 45786 - protein, 538 aa, Bacillus anthracis
MLTGYTKWPKEFADRYREEGCWLGETFGGVLRERAEKYGDQIAVVSGNTYITYSELDKKVDRLASGLLNLGIKPEDRVVIQLPNVIEFFEMCFALFRIGALPVFALPSHRSSEISYFCEFGEASAYVISDKALGFDYRKLAREVKEKVPTLQHVIVVGEKEEFVNISDLYIDPVLLPEVQPSDVAFLQLSGGTTGLSKLIPRTHDDYIYSLRVSAEICNLSAESVYMAVLPVAHNYPMSSPGTFGTFYAGGKVVLATGGSPDEAFALIEKEKVTITALVPPLAMIWLDAASSRNNDLSSLEVIQVGGAKFSAEVAKRIRPTFGCTLQQVFGMAEGLVNYTRLDDPEEIIIHTQGRPMSALDEVRVVDEYDNDVKPGEVGSLLTRGPYTIRGYYKAEEHNARSFTNDGFYRTGDLVKVNEQGYIIVEGRDKDQINRGGEKVAAEEVENHLLAHDAVHDVAIVSMPDDYLGERTCAFVIARGQAPAVSELKRFLRERGIAAYKIPDRIEFIESFPQTGVGKVSKKELRKVIAEKLVTVKR

SEQ ID NO: 45787 - protein, 132 aa, Bacillus anthracis
QVIMDHYKNPRNHGVLEDSVTVNLNNPTCGDRIQLTMKVEEGIVQEAKFEGEGCSISMSSASMMTQPVKGKKIEEALAASKIFSDMMLGKEYYDSIDLGDIEALQGVCKFPARIKCATLAWKALEKGLNEDK

SEQ ID NO: 45788 - protein, 239 aa, Bacillus anthracis
  MISC_FEATURE (237)..(237): X=any amino acid
MGRKWNIIKDKKASKDANSSRIYAKFGREIYVAAKQGEPDPESNQALRVVLERAKTYNVPRTIIDRAVEKAKGGSEENYDELRYEGFGPNGAMVIVDTLTNNVNRTAADVRAAFSKNSGNMGVNGSVAYMFDATAVIGLEGKTSDEVLEILMEADVDARDILEEEDAVIVYAEPDQFHAVQFAFKGAGVEEFTSCELTNAAQNDVTLPEDAQAQFEKMVDALEDLEDVQQVFHNVDXGE

SEQ ID NO: 45789 - protein, 454 aa, Bacillus anthracis
MKKEERMAKEISEQLGGVKNIRGIAHCMTRLRLTLHDESKVNMDLLKKVEGVMGVIEDETLQVVVGPGTVNKVAAEMEGLTGLRIGEVADYHLEDLGQEMKSEIKKKNNTPVKNFLRKIGSIFIPLIPGLVASGIINGVANFAKNAGADPNATWLQMLLLIGGGIFTFLGILVGWNTAKEFGGTPVLGAIAGILIFNPAMANVKLFGEALVPGRGGLFAVIFAAWLMVVVERQVRKAVPNAVDIIITPLITVLVVSIVTMLAIQPVAGFLSEGITNGINGILNIGGAFAGAVLAGTFLPLVMVGLHHGLTPIHMEFINQTHVTPLLPVLAMAGAGQVGAAIAIFVKTKNKRLRNVIKGALPVGFLGIGEPLLYGVTLPLGKPFLTACLGAAVGGAFQAVMKTAALGIGVSGLSLIPLIADNKYLLYFLGLVVAYTFGFIFTYFFGFKEEMAENI

SEQ ID NO: 45790 - protein, 307 aa, Bacillus anthracis
  MISC_FEATURE (240)..(240): X=any amino acid
MKRMLKIHEMSIITLLLIYIAIVGMINPSFIQFNSLSLMVKSSVILVVLAIGQSFVLFTKNIDVSVGSSMGLSAAVCGMLLTNEYSASLSIFAAITLGAIIGFVKQMGVAKFRVPAIIMTLGMLGIIRGAMLIFTGGKWIEDIPNDFKQLSSIVILGLPITVWFVLIILLLLYFFLRKVPFGRYFYAVGDNEDGARLIGIPVNKVKICAFIISGISAALAMLTFVMNIGFIPNQTGTGLXLQVIAAAVLGGIHLKGGTGSLFGAALGALFLESHKSSLVFLKIPAFWNNAISGFLLLLIIILDSVMK

SEQ ID NO: 45791 - protein, 273 aa, Bacillus anthracis
MTYKMIVLDLDDTLLRDDHTISPRTKEALMTAQEQGVKVVLASGRPTFGMRNVAKELRLEEYGSFILSFNGAKIINCKTNEEIFSSTLSPEIVHNLFEISKTEGVWIHTYIGDDIVTEENNPYTEIEGDITGMPIVVVDDFKAAVKEPVVKVLMNKEAERLVEVEKKLQKQLEGQLSVMRSKPFFLEFTEAGVTKGTSLNQLIQKLGIKREEVIAMGDSYNDQAMIEFAGLGVAMGNAPDDIKEIANYVTDTNMNDGVAKVVEKFVLKREALV

SEQ ID NO: 45792 - protein, 152 aa, Bacillus anthracis
MFKQFKMIIAVFAVLFTFIATLGLQDAKAATKLADGKYNIAFTVWKGDKDESSRMNRYFESPATLTVKNGKQYVSFKVKDSTSIKSFQVEKDGQFVETTVLSENKKDNTRVVEFEVADLSKKLNGKVKINIPIINYNASYDIRFVFDGNSIK

SEQ ID NO: 45793 - protein, 187 aa, Bacillus anthracis
MLLIGTEVKPFKANAYHNGEFIQVTDESLKGKWSVVCFYPADFTFVCPTELEDLQNQYATLKELGVEVYSVSTDTHFTHKAWHDSSETIGKIEYIMIGDPTRTITTNFNVLMEEEGLAARGTFIIDPDGVIQSMEINADGIGRDASILVNKIKQAQYVRNNPGEVCPAKWQEGSVTLKPSPDFVAKI

SEQ ID NO: 45794 - protein, 331 aa, Bacillus anthracis
  MISC_FEATURE (140)..(140): X=any amino acid
  MISC_FEATURE (178)..(178): X=any amino acid
  MISC_FEATURE (195)..(195): X=any amino acid
  MISC_FEATURE (237)..(237): X=any amino acid
  MISC_FEATURE (238)..(238): X=any amino acid
  MISC_FEATURE (239)..(239): X=any amino acid
  MISC_FEATURE (246)..(246): X=any amino acid
  MISC_FEATURE (274)..(274): X=any amino acid
KHLEHQVSLQTALAAIKALNQDKFEILPIYITEQGQWIRGERIEGEVANVEVLKMSGAENAISPLSLSTEIIPSANAEENAIDVIFPLLHGTNGEDGTVQGLLEFNNIPLCREMVFLASGWAGMDKVVYEKHFSQKAGDXKQAKILPSFIRSRMGKRSWKQHMKKVERSIKGYPWASXNPANPWFQGVGEINKWXKSVKKLEKWHLKEAFPIFDRKIICRRRNIIGRGSRKLGVLGXXXNRMVQLXGEIVPKKDFYDYKSKYIDGDTAINIPSXNDREESNVIKRDAIVAFQSLDGAGLTRADFFLTKDGEVYINEVNTMPGFTPFSKFPL

SEQ ID NO: 45795 - protein, 724 aa, Bacillus anthracis
DVESSIALAGAVFTLQDANGTEIAKDLKTDEHGVLVIPDLAPGDYQFIETAAPEHYKLDQTPIKFTIERSQTKHVFVTATNSLTKGSVELIKVDDVEENTTLEGAVFKIVNKDGHDVRTDLTTDKNGRLVVDELPPGDYEFIETKAPTHYDLNETPIKFTVKKGQEKIASVTATNSLTKGAVELSKVDDIDGSTLKDAVFKIVDMNGNDVRTDLTTNKDGKISVSDLRPGDYQFVETKAPTHYDLNQTPINFTVEKSQTATASVTAKNSLTKGAVELTKVDDIDGTTLEGAIFKIVDQNGNDVRTDLTTDKDGKISVSDLRPGDYQFVETKAPTHYDLNQTPINFTVEKSQTATASVTATNSLTKGAVELTKVDDIDGATLEGAVFKIVDMNGNDVRTDLTTDKDGKISVSDLRPGDYQFIETKAPKHYDLNQNPINFTVEKSQTATASVTATNSLTKGAVELMKVDDIDGTTLEGAIFKIVDSNGHDVRADLTTDKDGKISVSDLRPGDYQFIETKAPTGYDLNAKPIPFTITKGQSQVTSVTALNSLTTGSMELTKVDIDHNGTLEGAIFNILDQDGKVVREGLKTDGHGKLIVNDLKPGNYQLVETKAPEGYQLDASPISFTIEKAQASPLQITVSNKKVESSSGGDNKPITPPNKEEKPGKETSEELENGNPKTQTNKQQDDRNTGKELPNTGHKNDSTQTVGIILLLAGLLSVLATKRK

SEQ ID NO: 45796 - protein, 465 aa, Bacillus anthracis
INWTEEVAKRKDDLIRDTQQFLQIKSVWEEESAKEGAPFGEGVEKALSFMLHKGETEGFTSKNLEGYAGHLEMGQGEELVGILCHVDVVPEGDGWTTPAYSADIRDGKIFARGAIDDKGPTMAAYYAMKIVKELGLPLSKRVRMILGTDEESNWKCVDHYFKNEEMPTIGFAPDADFPIINAEKGISDIQVVQNGSEEKKGAYELVSFESGRRLNMVPDFAEAVVTGEDVNALTVAYEEYLQTAKKIGEAIVEGNTVTLQIKGISAHGSTPEKGENAGLLLANFLTTVALDGKANAFATFATETFTGDIFGEKATIAYKDEVSGPLTVNVGRLSYTEKNGGNLGLNVRYPVTTNFEEMIAKLKEYVGTHGFAVADYSNSRPHHVDKDHVLIRTLQRVYEEQTGEKAELLAIGGGTYARSLKAGVAFCPLFPGKEELAHQKDEYIEIEDLLKATAIYAQAIHELAK

SEQ ID NO: 45797 - protein, 200 aa, Bacillus anthracis
MIRIIIAEDQRMLRGALGALLDLEDDIEVIGQAANGEEALKLIESLKPDVSIMDIEMPIQSGLDVAETLKKEKSACKVMILTTFARPGYFERAMKAGVHGYLLKDSPSEDLAASIRNVMKGKREISQDLMFGLWQEQNPLSDREKEVLLLAKEGKTANEIAKALYLSPGTVRNYISEVLTKLDAKNRIEAITIAEEKGWI

SEQ ID NO: 45798 - protein, 119 aa, Bacillus anthracis
  MISC_FEATURE (59)..(59): X=any amino acid
  MISC_FEATURE (84)..(84): X=any amino acid
MPRVKGGTVTRQRRKKVIKLAKGYYRSKNTLFQGANQQGMESLMYAFRDRRSKKRDFRXLWITPIHPTAPMNGLSLSRLMHGSXNAGIQINPQKASDLTCHDKKTFPELTTRCKNTFTN

SEQ ID NO: 45799 - protein, 1207 aa, Bacillus anthracis
  MISC_FEATURE (164)..(164): X=any amino acid
  MISC_FEATURE (213)..(213): X=any amino acid
  MISC_FEATURE (339)..(339): X=any amino acid
  MISC_FEATURE (402)..(402): X=any amino acid
  MISC_FEATURE (407)..(407): X=any amino acid
  MISC_FEATURE (419)..(419): X=any amino acid
  MISC_FEATURE (420)..(420): X=any amino acid
  MISC_FEATURE (427)..(427): X=any amino acid
  MISC_FEATURE (437)..(437): X=any amino acid
  MISC_FEATURE (446)..(446): X=any amino acid
  MISC_FEATURE (676)..(676): X=any amino acid
  MISC_FEATURE (688)..(688): X=any amino acid
  MISC_FEATURE (855)..(855): X=any amino acid
  MISC_FEATURE (859)..(859): X=any amino acid
  MISC_FEATURE (871)..(871): X=any amino acid
  MISC_FEATURE (872)..(872): X=any amino acid
  MISC_FEATURE (917)..(917): X=any amino acid
  MISC_FEATURE (919)..(919): X=any amino acid
  MISC_FEATURE (936)..(936): X=any amino acid
  MISC_FEATURE (974)..(974): X=any amino acid
  MISC_FEATURE (1011)..(1011): X=any amino acid
  MISC_FEATURE (1022)..(1022): X=any amino acid
  MISC_FEATURE (1023)..(1023): X=any amino acid
  MISC_FEATURE (1027)..(1027): X=any amino acid
  MISC_FEATURE (1035)..(1035): X=any amino acid
  MISC_FEATURE (1054)..(1054): X=any amino acid
  MISC_FEATURE (1069)..(1069): X=any amino acid
  MISC_FEATURE (1103)..(1103): X=any amino acid
YYNDLQHPLIASTMTLGHNRYSTNTLSNFFRVHPFSILGHNGEINTIAKLRDQAEMIHVPLTAGGQDSQDLNGTLKTLLVQYGYRLFEAMGYSYSPQFINEIKLYETHLQDLYTYIREAWGHFAQGPAGIISRYKDEAVFSVDSLGLRPVWKVEIESSYIFSFXPGVVFTTEYVAEPNPLAPEEKVAIKWNDQDELVLYEHDDYQTQVYNAFXKESGCYQLSFYIYSIPKTKEIPDACDSMQVETKQYVAFGWDREHIQLLEQMATKGGGAHPVHLGHDSPLCRTGYDRRNIADFIKESVAVVTNPAIDRDREVETSPTERYLESDQSLLSGCEKTHLXLRCFSPHILKESVAPILFAREYPPFTYEPLLETFQHPLALSLTILGNIQSGQKTLQSPFKSNXFGKRXQPVKQWSFPYYXXTMPMLIXMNGYGLIHIXLLLKYIKYXAKINYVETGSLVIARVALRSLHDIVTLHGLGADSINPYLLFATVNDGTKTPITNLYNALNKGLEKDISTIGIHELRGYGRLYSSIGLHEEIANILQITNFLGSNDLAFSLESLAEDAQMRAMIITIRSFRIRKSFHIFPRIWKDPGDVAKGNSYDDYRDKLSELEENNPIAIRHLIQTKETKHVIPTEEVSISIQNHDLPFIISSMSFGSQNEIAFRAYAEAADQLNYDXLNGGRAAKLKIXLEKISTYTWTTSCIWAIGVNAELLNSSNLIEIKMGQGAKPGEGGHLPGSKVTAKIAEARNATIGLRFNFHLLTTMIFISIEDLAQMITEIKTANQLAKVAVKVPVVPNIGTIAVGIAKAGADFINISGFEGWFTGSQDSTHWQQVGLPCRKWVGKPVHNALLRSKIXDIRXKFWADGGYSKCXXCLEKSSSWKPIAIGFGTLSMIAIGCTTCRGCHLDTCHVGIATTNXIXSSGKRTRIPPFRPTANXKVPWAGLLHLFTTFGEELKRLPGKSWLYKLTRNCRAFXFLEQVRGKNFINLMGFTTNDRTSICYKNRTRTRKTIXTHSFPSFKRIXXALVXSNALWAVXNLAIACVVNYMKIQNFEHXHKSIRNGSISWKWNXVPYHSEKFIYTWKIGGAHKKGFVKPSFGGGDFFXPKPKGKKMAYIITVLSEKGIGYGAQKGALYVQGNADARAGIRLSGADMIIGGRMTKPLREKEQGNIGAYSNIKGFAFEYMTNGRALVLGDSWFMDLCWYDWRRL

SEQ ID NO: 45800 - protein, 299 aa, Bacillus anthracis
MEVRLSKEENTSLQTIQTKNTSKWIMSYRKLKRNKMAFIGGIIVLFYIVIAIFAPLLAPYNPFDIQLVNKLQPPSMEHWMGTDDKGRDILSRLLHGTRLSLLVGFSSVFIGALFGIILGIISGYYGGWFDTVIMRIIDIMLAFPGILLALAIVGALGPSLVNVIIAIGFFSIPMFARIVRASTLTVKKLEYIDAIRALGANDFTIIMKHIFPNILSPIIVQATLRLATAILSAAGLSFLGLGAQPPSPEWGAMLSNGRDFLFTAPHIAMFPGIAMSTLVIGLNMFGDGLRDALDPRLKK

SEQ ID NO: 45801 - protein, 326 aa, Bacillus anthracis
  MISC_FEATURE (251)..(251): X=any amino acid
DMLVISAKEQRDLVNMNEVIAYAALALQEFSAERTITPIRTSLPFANEKNTALIMPSVAEGLEVLGLKVVTVVPHNKKIGKKTINGIVMLSDFQTGEPLALLEGSYLTMIRTGALSGVATKYLARHNAKTLCIIGTGEQAKGIAEAVFAVRDIERVMLYNRTEEKAHAFSQYIQKRFNTPTYVHKNANEAISEADIIVTTTSASTPVFSEKLQKGVHINAVGSFRPNMQELPSHAIANANKVVVESKRAAXKKTGDLQVPVREGLFEGSDIHGELGQNYNGEKHAAERDEKITVFKSVGLAVVDIIVAKYLYEKAVERGGGSRIEF

SEQ ID NO: 45802 - protein, 640 aa, Bacillus anthracis
MILLQVNALSKLYGAETILANIKLEVQTKDRIALVGRNGAGKSTLLKIIAGELSHDGGEIIKPKDVSMGYLAQNTGLETSLTIWDEMLTVFTHLQQMETKLRRLEQEMGKEENFSNEATYERLLADYDQLQLDYKDQGGYQYEADIRSILSGLGFPVETHQTTISTLSGGQKTRLALGKLLLTKPDLLILDEPTNHLDIETLTWLEQYLQGYPGAILIVSHDRYFLDKLVTQVYEISNKESRRFVGNYSKYLDLKSALYEQEMKRYEKQQDEIAKLEDFVQKNIARASTTKRAQSRRKQLDRMELLTRPLGDSKSASFHFDIEKQSGNDVLQVKDATIGYDKDPIIEHVTMRLTRGDSVALVGPNGIGKSTLLKSIVNKLPLLHGDVSFGSNVSVGYYDQEQANLTSSKRVLNELWDEYPLQPEKEIRTILGNFLFTGDDVLKPVSSLSGGQKARLALAKLMMQKSNLLILDEPTNHLDLNSKEILENALIDYPGTLLFVSHDRYFINRVTTTVIELSTEGAQEYLGDYDYYVEKKNEMIERAELEQEDETPVQKTVAQEKLNYLEEKERKKLERQRTRKIEELEQNIVQFEEEIATLEDQLCLPEIYADYEKASEITTKKQTLQEQLDACMAEWEELHV

SEQ ID NO: 45803 - protein, 434 aa, Bacillus anthracis
MEKIIVRGGKRLNGTVRVEGAKNAVLPIIAAALLASDGKNVLSEVPVLSDVYTINEVLRHLNAEVVFENNQVTIDASKELNIEAPFEYVRKMRASVQVMGPLLARNGRARIALPGGCAIGSRPIDQHLKGFEAMGAKVQVGNGFVEAYVEGELKGAKIYLDFPSVGATENIMSAATLAKGTTILENAAKEPEIVDLANFLNAMGAKVRGAGTGTIRIEGVDKLYGANHSIIPDRIEAGTFMVAAAITGGDILIENAVPEHLRSITAKMEEMGVKIIEENEGVRVIGPDKLKAVDIKTMPHPGFPTDMQSQMMALLLQADGTSMITETVFENRFMHVEEFRRMNADIKIEGRSVIMNGPNSLQGAEVGATDLRAAAALILAGLVSEGYTRVTELKHLDRGYVDFHKKLAALGATIERVNEKVEEVKEQEVSDLHA

SEQ ID NO: 45804 - protein, 536 aa, Bacillus anthracis
  MISC_FEATURE (369)..(369): X=any amino acid
  MISC_FEATURE (371)..(371): X=any amino acid
  MISC_FEATURE (406)..(406): X=any amino acid
  MISC_FEATURE (420)..(420): X=any amino acid
MNYKVKFEHVTKKYKLYNKPFDKLKDLFFRSKDGEYHYALNNISFEVPEGEIVGIVGLNGSGKSTLSNLIAGVTMPNKGTVDIKGSAALIAISSGLNGQLTGIENIELKGLMMGITKEKIKEIIPEIIDFADIGKFMYQPVKTYSSGMKSRLGFAISVHINPDILVIDEALSVGDQTFTKKCLDKMNEFKEQGKTIFFISHSLSQVKSFCTKALWLHYGQVKEYGDIKEIVDHYDEFLKKYNQMSVEERKDLRKEQISQFQHGLLQEDQTGRERKRKKGKKTSRKFKKKRVLITGVCIALLTGIISTGYYYKNLLPFNSENKYAEKVASKENVTESKQMVKKEKGAAKYIVNSNGISIREEADASSNDXLXQTSGIFLLYLIAIKMRKKMLNGYKLHYQMVKLDGXAQSLLNRLNRIITXSEDAKLADVTALLKRVYGGNMVSAPTYFGKTLNELETTYPQPLNPLPSMTGKTIVKDGNIQFGISQDKVVEVVFQDISMSIAKLHELLGKESLSNDAEKNYFYETKSYYIAARSDQ

SEQ ID NO: 45805 - protein, 137 aa, Bacillus anthracis
LLKGINHLCFSVSNLEDSITFYEKVLEGELLVRGRKLAYFNICGVWIALNEEIHIPRKEIHQSYTHIAFSVEQKDFERLLQRLEENDVHILQRRERDVKDCESIYFVDPDGHKFEFLSGTLQERVYLYRGNKPHMTF

SEQ ID NO: 45806 - protein, 462 aa, Bacillus anthracis
MLQLGWHHGYNTLVPTVQTVEAGVFLFLLRLKQFEEELNMSIQIPRGTQDILPGTVELWQYIEGQAREICRRYNYKEIRTPIFEHTELFLRGVGDTTDIVQKEMYSFQDRGERSLTLRPEGTAPVVRSYVENKMFGDATQPTKLYYIGQMFRYERPQAGRYRQFVQFGIEAIGSNDPAIDAEVIALAVEFYRGMGLKNIKVVLNSLGDAASRQAHRDALIAHFEPRIGEFCSDCQSRLEKNPLRILDCKKDRNHELMGTAPSITEYLNEDSAVYYDKVQELLTMMDVPFEKDPNLVRGLDYYQHTVFEIMSEAEGFGAITTLSGGGRYNGLVQEIGGPEMPGIGFAMSIERLIMALKAENIELPIEHSIDCYVVALGEKAKDHAAKVAFDLRKAGLAVEKDYLDRKMKAQFKSADRLKAKFVAVLGEDELDKGIINLKDMATGEQEEVALDVFASYVAEKLI

SEQ ID NO: 45807 - protein, 634 aa, Bacillus anthracis
LKLIFPDGSVKEFVKGITLEEIAGSISSSLKKKAVAGNVNDELYDLRRNIEENAEVEIITIDSNEGVEIARHSGGTFLAQAVKRLYGNINLGVGACIENGFYYDMDPSSSVNVEDLRKFEKEMKKIINENIKVERVEVSREEAAKLFQEMNDRLKLELLEAIPSGESVTLYKQGEFVDLCRGPHLPSTGYLKVFQLTHVSGAYWRGDSNNQVLQRIYGVAFSSQKELEEYLHFVEEAAKRNHRKLGNELELFMFSEEAPGMPFYLPKGQIIRNELEAFLREIQKEYNYQEVRTPFHDEQEVWERSGHWGHYKDNMYFSEVDNKSFALKTEDCPRAYCNVQKKLHSFWRITDSYCEFGQVHRHEFSGALTGLLRVRTFCQDDAHLFVTPEQIEDEIKSVMAQIDYVYKTFGFEYEVDLSTRPEDSMGDDELWEQAEASLENVLQSLNYKYSLNEGDGAFSGPKMTFHIKDALNRSHQCGTIQLDFQMPEKFDLNYIDEKNEKRRPVVIHRAVLGSLDRFLAILIEHFGGAFPAWVAPVQVKVIPVSNAVHVQYADEVADKLAQAGVRVERDMRDEKLGYKIREAQMQKVPYVLVIGDKEMENGAVNVRKYGEEKSGVIELDMFRGKYERGINNRK

SEQ ID NO: 45808 - protein, 345 aa, Bacillus anthracis
MKAVVVNKNSKANIEVVEKELRPLHSGEALVDVEYCGVCHTDLHVANHDFGNTDGRILGHEGVGIVTKIADDVTSLKVGDRVSIAWMFQSCGRCEYCVTGRETFCREVKNAGYSVDGGMAEQCIVTADYAVKVPEGLDPAQASSITCAGVTTYKAIKVSDIKPGQPIVIYGCGGLGNLAIQYAKNVFGAKVIAVDINDDKLALAKEVGADMTINPISQGPADKIIQEEFGGAYAAVVTAVSKVAFNSAVDAVRACGKVVAVGLPVETMDLNIPRLVLDGIEVVGSLVGTRKDLEEAFMFGAEGKVVPVVQTCSLDKVQNVFEEMEQGRIQGRMVIDFKQNNCDCK

SEQ ID NO: 45809 - protein, 168 aa, Bacillus anthracis
MPLTPLDIHNKEFGRGFRGYDEDQVNEFLDQIIKDYELVIREKKALEEKVAQLEWKLDHFSNIEDTLNKSIVVAQEAAEEVKRNAQKEAKLIVREAEKNADRIINEALVKSRKVAFDIEELKKQAKVFRTRFRMLLETQLEMLNNDDWDKLIELEDEVDELLKKEETV

SEQ ID NO: 45810 - protein, 378 aa, Bacillus anthracis
MRRGWKSMEYSLLLPPAIICGLGVIMVYSSSSIGAISSKYNWAGDHFFKKQLVSLAIGTVMLVIVAIVPYKFWRKKIVLAAMGLGGIGLLTAAFLFGKVINGAKGWILGIQPAEFVKIAVIITLASFFAKKQERQTPFLQGIIPPLFVVGGSMVLILLQNDLGTDILIGGTVLIMFFCSGVNVNLWIKRFILTSIVWVPVLYFIGKYKLNNYQKARFSVFLDPFNDPQNDGFQLVNSFIGIASGGVNGRGLGNSIQKYGYLPEPQTDFIMAIISGELGFYRGAIILICLLLIIIIRSFRVAQKCKDPFGSLIAIGIASLIGIQTFVNVGGMSGLIPLTGVPLPFISYGGSSLLANLIAMGILLNIASNVKRQEKEQNE

SEQ ID NO: 45811 - protein, 153 aa, Bacillus anthracis
MVFEGHLVGTGLKVGVVVGRFNEFITSKLLGGALDGLKRHGVEENDIDVAWVPGAFEIPLIAKKMANSGKYDAVITLGTVIRGATTHYDYVCNEVAKGVASLSLQTDIPVIFGVLTTETIEQAIERAGTKAGNKGYESAVAAIEMAHLSKHWA

SEQ ID NO: 45812 - protein, 299 aa, Bacillus anthracis
MRLVTAKKEEKVFVGIVDEEEEKVLHLREAQRQKGEKVTIPITMLECIERGTECFEKICDIVNWAKENGGTAYYPLTEVKILAPIPRPRKNILCVGKNYREHAIEMGGVESIPENIMIFTKAPTTVIGMDEKINSHPHATNELDYEGELAIVIGKRGKQIKKEKALEHVFGYTIINDITARDIQRKHKQFFLGKSFDTFCPMGPYLIHKSMISTPNALHIETIVNGEVRQTSNTNKMIFSIEEIISTISKGMTLEPGDIIATGTPAGVGKGFTPPKFLHAGDEVVITVEGIGTLRNVVK

SEQ ID NO: 45813 - protein, 892 aa, Bacillus anthracis
  MISC_FEATURE (108)..(108): X=any amino acid
  MISC_FEATURE (371)..(371): X=any amino acid
  MISC_FEATURE (380)..(380): X=any amino acid
  MISC_FEATURE (479)..(479): X=any amino acid
  MISC_FEATURE (604)..(604): X=any amino acid
  MISC_FEATURE (605)..(605): X=any amino acid
  MISC_FEATURE (755)..(755): X=any amino acid
  MISC_FEATURE (773)..(773): X=any amino acid
  MISC_FEATURE (794)..(794): X=any amino acid
  MISC_FEATURE (795)..(795): X=any amino acid
  MISC_FEATURE (801)..(801): X=any amino acid
  MISC_FEATURE (827)..(827): X=any amino acid
  MISC_FEATURE (868)..(868): X=any amino acid
MINQKKYVHFVTMYIIIFSLWIFLIPKDLNIKEIGILFLFCFATLFSCYCLYKAIKKMKRGDKLFWVLVLRTCLCDWPMEITLFLHSLSIYDQVIFSYKAMAFFIVQXILLFFWLGIKFINHSSIRGLAQFSSDSIFIVIMNIYFTLTFILDISSFRMLTTDTGVFNWIFIAQSLVIYAVISLYRREEYSSSRISLIIGFTIILVYGYIHLFQLNAGIKPSSEVSYLIHTASILLIGLSSILYILDKPIQHETKTKYYRFDYVRFILPYFSIIITFSFIIFQPWDDKFMLIGLVLSLILLFLRQLYMWKDNQALIDTYEQLTTQLEGKVEEGASALSKSEQRYKSLGRRSPDAVFSLNMYGIFQQYKYSLXSLITGLLLXSRSYSLLHFIDPKDHDLLQKALQLTKEGSPQTLEVRTKEKEGYYYYLHITLIPTFINKEVVGMFGIARDITTLYEKQKQVEHLAFHDALTGLPNSPQVXKRFKNILNTAQASANDVAVMFLDLDRFKKINDRLGHGIGDLLLIEVAKRLRGCLRSKDVVARQGGDEFTILLPDMYSEKSAAFIAEQILNILNKPFFSKGGELVYYTKNPEWDAPGLGNGGAQNXXKMLIGYVSAKANGKNRFVFFSKEMSIAQNESNFLEGELSKALQQNEFFLEYQPQVGTKTKQIIGFEALIRWKHPKLGIVSPGPIHSSSRGNWIYIELGNWILRTACLEAKRWHNQGFSHLKVGVNLSVVQFNHADLIPTISKVLEGNRGXNPESPRLLKFRKVSPIIXIKSVVAKLDSFQTPRYSNFKXXLWNRLXSLAYLTKYPINTLKIAREFILRNYNXPFRGSDYFFHITLSKELNLEVIAEGVETEEQWKFLYEQKLXPHFKDSLLASPFSSKTFGRLSHKK

SEQ ID NO: 45814 - protein, 60 aa, Bacillus anthracis
MAKKLEITLTRSVIGRPQDQRATVEALGLKKLNSTVVKEETPAILGMINKVSHLVTVKEA

SEQ ID NO: 45815 - protein, 301 aa, Bacillus anthracis
MNRKGYKSGFVSIIGRPNVGKSTFLNRIIGQKIAIMSDKPQTTRNKIQGVYTENDSQVIFIDTPGIHKPKHKLGDFMVKMAQTTLKEVDIVLFMVNAVEGFGRGEEFIIEKLKETKQPVFLVINKIDQVHPEQLLELIDQYRKLHDFAEIVPISALDGNNAEALIGTIKKYLPEGPQYYPDNQVTDHPERFIIAELIREKVLHLTREEVPHSVAVVIDAIQKREGGAVYINATIVVERPSQKGIIIGKQGKMLKEVGKRARFDIEALLGSKVFLEVWVKVQKDWRNKMSQLRDLGFREDEY

SEQ ID NO: 45816 - protein, 297 aa, Bacillus anthracis
MKCRERNCGAEMNCEEEMCSLKWDYDLRCGEYTLNLNEKTLIMGILNVTPDSFSDGGSYNEVDAAVRHAKEMRDEGAHIIDIGGESTRPGFAKVSVEEEIKRVVPMIQAVSKEVKLPISIDTYKAEVAKQAIEAGAHIINDIWGAKAEPKIAEVAAHYDVPIILMHNRDNMNYRNLMADMIADLYDSIKIAKDAGVRDENIILDPGIGFAKTPEQNLEAMRNLEQLNVLGYPVLLGTSRKSFIGHVLDLPVEERLEGTGATVCLGIEKGCEFVRVHDVKEMSRMAKMMDAMIGKGVK

SEQ ID NO: 45817 - protein, 363 aa, Bacillus anthracis
KKTPDFILIIVTLALLTIGMIMVYSASAVWASYKMGDSFFFAKRQLLFAVLGVVAMFFIMKIDYWVWRTYSKVILLVGFILLILVLIPGVGLVRGGARSWIGIGAFSIQPSEFMKFAMIIFLAKFLAERQKLITSFKRGLLPALGFVFLAFGMIMLQPDLGTGTVIVGTCIIMIFISGDKRVFHLPRFGLPGETRIVGLIASAPYRMKRITSYLDPWSDPLGSGFQIIQSLLAIGPGGLFGLGLGQSRQKFLYLPEPQTDFIFAILSEELGFIGGSFVLLLFSLLLWRGIRIALGAPDLYGTFLAVGIVAMIAIQVMINVGVVTGLMPVTGITLPFLSYGGSSLTLMLMAVGVLLNISRHSRY

SEQ ID NO: 45818 - protein, 1189 aa, Bacillus anthracis
MFLKRLEIAGFKSFAERVSVDFVPGVTSVVGPNGSGKSNITDAIRWVLGEQSAKSLRGAKMEDIIFAGSDTRRAVNVAEVTITLNNEDQRLPIEYNEVCVTRRVSRSGDSDFYINKQSCRLKDIIDLFMDSGMGREAFSIISQGKVEEILSSKSEERRGVFEEAAGVLKYKLRKKKAESKLADTQENLNRVQDIIHELSSQVEPLERQASIAKDYLEKKEELEKVEAALIVHEIEELHEKWEALRNQFGHNKNEEAKMSTHLQKGEEELEELRGQLQAVDESVDSLQEVLLLSSKELEKLEGQRELLKERKQNATTHCAQLEQLIVELTEKATSYDGEIESSTEVLMQFVNHVKELEMKLHDNEQLLATFADNLEEQIENLKGDYIELLNQQASHRNELSMIEEQSKQQNSKNERLDEENAKYVEMRMEITAKKTKLVESYEQVKEKVAGILSNIQKTEAALGKCKAQYSENETKLYQAYQFVQQARSRKEMLEEMQEDYSGFYQGVREVLKARENRLQGIEGAVAELLTVPKEYEIAMEIALGAAMQHIVVQKEEHARNAIAFLKQNKHGRATFLPQAVMKGRSLSFEQLRIVNQHPSFVGVAAELVQYNNKYENVVSNLLGTVIVAKDLRGANELAKQLQYRYRIVTIEGDVVNPGGSMTGGAVKQAKSSLLGRQRELEEWTNKLTDMEEKTTKLENFVKAVKQEIQEKEVQIRELRKSVEAERVDEQKLREEINRLELEEHRINDRLSIYDLEIEGFLQDQVKIQGRKEELEKILATLQAEITGLDSKIVALTQQKSEQHTSKEKVQKEMTELKVLAAEKQQRLSNQKEKVERLTKEKEETDATLVKTKEDLAFLKQEMTSNSSGEEQITNMIEKKAYDRNQTSELIRSRREQRVSLQERVEQLERNLKETTGKHKYILEMLKDQEVKINRLDVELENRLQHLRETYTISFEAAKLKYTMMMPAEDARKKVKLIKLSIEELGTVNLGAIDEYERVAERHTFLLEQKDDLEEAKTTLHQLITEMDEEMKKRFSTTFEGIRMEFQSVFSELFGGGRADLVMTNPEDLLNTGIDIVAQPPGKKLQNLGLLSGGERALTAIALLFGILKVRPVPFCVLDEVEAALDEANVARFAQYLKKFSDETQFIVITHRKGTMEESDVLYGVTMQESGVSKLVSVRLDDGEELVASK

SEQ ID NO: 45819 - protein, 239 aa, Bacillus anthracis
MGRKWNNIKDKKASKDANTSRIYAKFGREIYVAAKQGEPDPESNQALRVVLERAKTYNVPRTIIDRAVEKAKGGSEENYDELRYEGFGPNGAMVIVDTLTNNVNRTAADVRAAFSKNSGNMGVNGSVAYMFDATAVIGLEGKTSDEVLEILMEADVDARDILEEEDAVIVYAEPDQFHAVQSALKDAGVEEFTVAELTMLAQNDVTLPEDAQAQFEKMVDALEDLEDVQQVYHNVDLGE

SEQ ID NO: 45820 - protein, 384 aa, Bacillus anthracis
MCVLYADDYKPTFQRRTPEEYLEYIRQQNRGKLKLYVGAAPGVGKSYKMLYDAREMKKDGMDIVIGLIETHGRKETEEAIADLEKVPLKEIQYKGKVFYELDVEGIIKRAPQVVVVDELAHSNVPGSKNKKRYMDVQELIDAGISVLSAFNIQHLESVHDIVAQITNVKVRERIPDFILQKANEIQLVDATPEVLRKRLIDGKIYKEEKIQQSLQNFFTLNNLGALRELSLREVADDMDEKISQTVIEPIGVKEKILVCVQYSSTAEKLIRRGWRMADRLNAELYVLNVEREKIDSLSAGKKQTIEEWKSLTNQFDASFVLEEANGRKPADVIIEVAKRLQVTQILLGQSARTRWDEIRKGSIVNEIMRETKYIDIHIVADQRA

SEQ ID NO: 45821 - protein, 305 aa, Bacillus anthracis
LQKAGLHISKLGLGTNAVGGHNLYADVNEEEGKQLIEEAMGQGITFFDTADSYGFGRSEELVREVLKGKRHEIVLATKGGIQPLLNGEVYINNERSYLRNAVENSLRRLQTDYIDLYYLHFTNPETSYIDSIGELTRLKEEGKIRSIGISNVNVEQLKEANQHGHIDVVQSPYNMLDRTAGEELLPYCIESGISFIPYGPLAFGILGGKYTEDFKLNEGDWRQSVNLFEENTYKSNFKKVEKLKGVAKEEAVEVSHLALAWLLNKKGIDTVIPGGKRAEQIRESVRAVEVSLNENVMKEIESILE

SEQ ID NO: 45822 - protein, 123 aa, Bacillus anthracis
  MISC_FEATURE (110)..(110): X=any amino acid
MQITITNTSKEPIYEQISAQIKKLILLGDLKQGDALPSMRQLAKDLRVSIITTKRAYEELEKDGFINSIVGRGSFVAEQNIETMKEEKLKTVEEKLCEAIQNWKQMDVFXNELKEMFPFLSEE

SEQ ID NO: 45823 - protein, 444 aa, Bacillus anthracis
MARYTKEDIFRLAKEENVKYIRLQFTDLLGVIKNVEIPVSQLTKALDNKMMFDGSSIEGFVRIEESDMYLYPDLDTWVIFPWTAEKGKVARLICDIYNADGTPFEGDPRNNLKRVLKEMEALGFSDFNLGPEPEFFLFKVDEKGNPTLELNDNGGYFDLAPMDLGENCRRDIVLELEEMGFEIEASHHEVAPGQHEIDFKYANAIRSCDDIQTFKLVVKTIARKHGLHATFMPKPLYGVNGSGMHCNLSLFKNGENVFFDQNGDLQLSDDARHFIAGILKHAPAFTAVANPTVNSYKRLVPGYEAPCYVAWSAQNRSPLVRIPASRGISTRVEVRSVDPAANPYLVMATLLAAGLDGIKNKLTPPAAVDRNIYVMTKEEREEAGIVDLPATLAQALVTLQSNEVISNALGDHLLEHFIEAKEIEWDIFRTQVHQWERDQYMSLY

SEQ ID NO: 45824 - protein, 727 aa, Bacillus anthracis
MANEQVLTAEQVLEKASQYLVDEDIELVARAYEYARDAHSEQYRKSGEPYIIHPIQVAGVLVDLHMDPATVSAGFLHDVVEDTEITLEDIEREFNKEIAMLVDGVTKLGKIKYKSHEQQQAENHRKMFIAMAQDIRVILIKLADRLHNMRTLKHLPQEKQRRIANETLEIFAPLAHRLGISTIKWELEDTSLRYLNPQQYYRIVNLMKRKRAEREEYLDEVMTGIREKLDEVAIQPEISGRPKHIYSIYRKMALQNKQFNEIYDLLAVRVVVNSIKDCYAVLGIIHTCWKPMPGRFKDYIAMPKANLYQSLHTTVIGPKGDPLEVQIRTKEMHEIAEFGIAAHWAYKEGKTAETTGTLEKKLTWFRQILEWQNEASNAEEFMESLKIDLFSDMVFVFTPKGDVMELPLGSVPIDFAYRVYSEIGNKTIGAKVNGKMVTLDYKLKTGDIIEILTSKHSYGPSQDWVKLAQTSHAKNKIRQFFKKQRRDENIEKGRELVEKEVRSLEYEMKEVLAPDNLKRVAEKFNFANEEDMFAAVGYNGITASQIVTRLTDKFRKQREEEEIVEVKEVRKPMKIRKWDSGVKVSGADNLLIRLSKCCNPVPGDDIVGYITKGRGVSIHRRDCVNVHTEEAIERLLEVEWEGSPEKEIEYNVDIEISGYDRRGLLNEVLQAVTETKTYISAVSGRSDRNKMATINMSISIRNLQHLKKVVERIKRVPEIYAVRRMMH

SEQ ID NO: 45825 - protein, 118 aa, Bacillus anthracis
  MISC_FEATURE (7)..(7): X=any amino acid
  MISC_FEATURE (22)..(22): X=any amino acid
  MISC_FEATURE (33)..(33): X=any amino acid
HLVEYIXNPIKKSLCQNINSLXVETNIAHPFRXGHGRTTRIWLDLIFKNELHQVVDWNKIDKEDYLLAMERSPIKDIEIKHLLQNALVDEINSREIFMKGINMSYYYEGYTEYDIEDL

SEQ ID NO: 45826 - protein, 49 aa, Bacillus anthracis
MRVNITLACTECGDRNYISKKNKRNNPERIELKKYCPRLKRVSLHRDTK

SEQ ID NO: 45827 - protein, 83 aa, Bacillus anthracis
MGILKSKSATFVWEFMFTKAMYETGDMITQHELLNKVSELLDEGILKTTLNETFTPINAQNVKKAHALLESGSTIGKIVLEKF

SEQ ID NO: 45828 - protein, 521 aa, Bacillus anthracis
  MISC_FEATURE (102)..(102): X=any amino acid
  MISC_FEATURE (108)..(108): X=any amino acid
LAFKYRLFFTRGNSLWPSAPSQVQEPKRLHRMVQMLGINDFHGQLDTVKKINNKDAGGIEYLGAYLRDREKQNPNTLKVHAGDVVGSSTPVSALLPDEPTIXFLKWIXIDGGTIGNHEFDEGVKEMNRPYYGGYHEKTGKFKGAKFPYVAANFYNKSTGRLFLPPFTIKKVQGVPVGFIGVVTTDVPNLVMPTMLKNVEITDEVEAINKSVKQLKKLGVKSIVVLAHNGGTTDGNGVTNGDIVRLANETDPEVDVIFWWASHTYVNGTVNNKLVVQANSYGMAFADVDVKIDRKTQDIVEKKAEIVTTYHKGMEPDKKIKKKMGEYSGQNPPPCYEVVGKSIAPLDRKLNTAGESTLGNLVADAQRATMQSQIALMNPGGIRNDLDAGDITWGEIYGIQPFGNQLIKVNLTGQDIRDILNQQWQKDITRMLQISGIQYTWDANKPNGEKVTSIRLTNGEEIIPSKTYSVVANAFLASGGDGFVSFKNGKDAETGPTDFEALVDYIKKSKEPIQSIIDGRIQ

SEQ ID NO: 45829 - protein, 982 aa, Bacillus anthracis
  MISC_FEATURE (166)..(166): X=any amino acid
  MISC_FEATURE (225)..(225): X=any amino acid
  MISC_FEATURE (235)..(235): X=any amino acid
  MISC_FEATURE (372)..(372): X=any amino acid
  MISC_FEATURE (380)..(380): X=any amino acid
  MISC_FEATURE (428)..(428): X=any amino acid
  MISC_FEATURE (824)..(824): X=any amino acid
  MISC_FEATURE (828)..(828): X=any amino acid
  MISC_FEATURE (829)..(829): X=any amino acid
  MISC_FEATURE (878)..(878): X=any amino acid
  MISC_FEATURE (934)..(934): X=any amino acid
  MISC_FEATURE (968)..(968): X=any amino acid
  MISC_FEATURE (972)..(972): X=any amino acid
VHITIDGKKYTAEPSSTILGVINENGIEHPQICYVPEVDPIQTCDTCIVEVDGKLMRSCSTVVTEGMNIERNSTRAKEAQTEAMDRLLENHLLYCTVCDNNNGNCKLHNTAELMEIEHQKYPYEPKVDVSEVDMTHPFYRYDPNQCIACGQCVEVCQNLQVNETLXIDWEAERPRVIWDEGVSINDSSCVSCGQCVTICPCNALMEKTMLREAGFMNRIKPDILXTDGRLYLRSXTWDIPGFFAVSQMETAMPDTPPKKTKTVCTFCGVGGSFEKWDKGGKILKVQPSSDAPVNAISSLLKGKFGWDFVNSKERITKPLIRKNGTFVESTWGRSLNVVANKLGSIKEEYGKDAIGFISSSKITNEDNYVILXIMLRQSIXNVINIDNCSRYCQSPATDGFIPYDGYGAEMLGTIKDFAANRGQVFNWXVVSNRRLYRVIATRIKRAHKLHGQKLIVADLRKTEMAERSDVFISPKQGTDQVWLMAVTKYMIDQGWHDQQFIDENVNFFEDFKESLTEYTLEYAEEVTGISKETLIQMAEMIRDADGTCILWGMGCNAKYRWSDTSAAISNLLLATGNYRRPGAGAYPLRGHNNVQGACDMGTLPGWLPGYQHVTNDMERAKFEMAYGVKINSEPGLNNIEMLHAIDEGGNESYVSCGEDMALVDSNANHVHEVLSSLDFFVVQDVFLSKTAQYADVVLPAAPSLEKEGTFTNTERRVQRLYQVLPTLGDAKPDWWIVQAIANKLGANWNYSHPSEIFAEMASLSPLFSQANYEVLEGWNSFHWGSFDGTNTPLLFQDGFNFPDKKARFAIADWVRPAEFPAEVXSSHXXRVVCLEHFPEREYDQLIQQVFQRKVAGRFSLKVSPSTCKRTWSGKLVHXSRLVPPLGALKILVLVTDRVKANGVYLPMNSTDIETAINFLTGPAVDTRTNTLALXTDESTYGSTEVDGENPMPKANPRNKKRHPQSGYXGTSXVGTSRVVHLT

SEQ ID NO: 45830 - protein, 436 aa, Bacillus anthracis
MTQQTFTQYDFKPFLIDAVRELRFTEPTGIQQKIFPVVKKGVSVIGQSQTGSGKTHAYLLPTLNRINPGREEVQLVITAPTRELAQQIYEEIVKLTKFCAEDQMITARCLIGGTDKQRSIEKLKKQPHIVVGTPGRIKDLVEEQALFVHKANTIIVDEADLMLDMGFIHDVDKIAARMPKNLQMLVFSATIPQKLKPFLKKYMENPEHIHINPKQVAAGNIEHYLVPSKHRNKIDLVNKMLLQFKPYLAVVFTNTKKMADQVADGLMERGLKVGRIHGDLSPRDRKKMMKQIRDLEFQYIVATDLAARGIDIEGISHVINYELPSDLDFFVHRVGRTARAGHSGIAVTIYDPANEEALDSLEKQRHIEFKHVDLRGDEWADLGERRRRKSRKKPNDELDVMATKVIKKPKKVKPNYKRKLATERDKVKRKYSNKKR

SEQ ID NO: 45831 - protein, 619 aa, Bacillus anthracis
MLFKLSMSGLKSKLKDYIVLLVGLVMSISIFYMFQTLALNEAFLKENSTIGQIGFVFQAGSFLLAIITFFYILYANSFLLSLRQKEFGMYMMLGAKKHKVTLLMFIETIVLGAASLAIGIIVGVGLAEGIGQLLMKQLEFAGKGYKAFYLPSMTVTCIFFFALFVLSAIMNSIKLSRISVLQLVHADAQTERVAVKGKMTGLIAFLAVILLGIGYASMIYMAKLREMGILIALITTTAGTYMLFGSLLPVIIKKLKGNKKRSEKGLNAFTFAQLNFRINSLTKVLATVAMLVALGAGAISGGMAFKNNAIKLSDGLVIYDSVVHNPTAEEKKILDGITFKEKNEYRYKVDDKYVYYVKEDLEKNRPFVKDMTNMKSMKDLVNTKKVSQELPVGAVSREMNEKDANAKEMPEEWNEAFRTIQPFYVHEDHAIKIVDQKLYDTVNGKEGIAFIGKADDFLAYTKEWKKLDELQLDKYKNVKAERLDSKYQTYDMLYGVASGTVFMGFFLGIAFLAMMASCLMFKILSGASKDITRYQMLRKIGVRRELLTKSIYKELFLVFLFPAIVGIAHVLVGMNIFGFILIDPYFRIWVPIVIFVVIYTIYYFITVQLYKGIVLPKED

SEQ ID NO: 45832 - protein, 458 aa, Bacillus anthracis
MEFDTIAAISTALGEGAIAIVRVSGDDAVEKVNRIFKGKDLTEVPSHTIHYGHIVDLDTNQVIEEVMVSIMRAPRTFTRENIVEINCHGGLVSVNKVLQLILAQGVRLAEPGEFTKRAFLNGRIDLSQAEAVMDLIRAKTDRAMNVAINQMEGRLSKLIGRLRQDILETLAHVEVNIDYPEYDDVEEMTHNILIEKATHVRAEIAKILETSKQGKILREGIATAIIGRPNVGKSSLLNSLVQEKKAIVTDIAGTTRDVIEEYVNVRGVPLKLIDTAGIRETEDVVERIGVERSKEMMSQADLVLVVVNYSETLTNEDEELFRAVQGKDFIVIVNKTDLPQAIDMERVIELAAGNRVITTSLIEEQGIDELEKAIADLFFEGTIDSADVTYVSNARHIGLLTQAGKTIGDAIEAIENGVPIDMVQIDLTRTWEILGEITGDTVHESLIDQLFSQFCLGK

SEQ ID NO: 45833 - protein, 332 aa, Bacillus anthracis
MKQVQTKRDWKKLAYDVVEEKMITKEDAIAILEADDTEVLEIMNAAYIIRHHYFGKKVKLNMIINTKSGLCPEDCGYCSQSIISEAPIDKYAWLTQEKIVEGAHEAIRRKAGTYCIVASGRRPTDKEVNHVIGAVKEIRETTDLKICCCLGFLNEDQAGRLAEAGVHRYNHNLNTHANNYESICSTHTYDDRVDTVQKAKQAGISPCSGAIFGMGETIEERAEIAFELQRIDADSIPCNFLVAVKGTPLEGQKELTPVECLKVLAMMRFVNPTKEIRISGGREINLRSVQPIGLFAANSIFVGDYLTTAGQEPTADWGMIEDLGFEIEECAL

SEQ ID NO: 45834 - protein, 174 aa, Bacillus anthracis
MKEYMLKQVDYHAWANIRLFDRIKELPNYEAIFTEQIQSVFPSIKDTFAHIYITDQVWLHILHGKSMNEAIQDRENLRKQIETKSLYELEKLFENMANQYKDFLSTIQDVNAVFVIENPYAGALETSILELVQHVVNHGTYHRGNITAMIRQLGHSSTMMDFVLYLHMVKKQGE

SEQ ID NO: 45835 - protein, 768 aa, Bacillus anthracis
  MISC_FEATURE (114)..(114): X=any amino acid
  MISC_FEATURE (116)..(116): X=any amino acid
  MISC_FEATURE (319)..(319): X=any amino acid
  MISC_FEATURE (348)..(348): X=any amino acid
  MISC_FEATURE (349)..(349): X=any amino acid
  MISC_FEATURE (360)..(360): X=any amino acid
  MISC_FEATURE (371)..(371): X=any amino acid
  MISC_FEATURE (382)..(382): X=any amino acid
  MISC_FEATURE (383)..(383): X=any amino acid
  MISC_FEATURE (479)..(479): X=any amino acid
FPLLPLRGVLVYPTMVLHLDVGRDKSIQALEQAAMDENIIFLAMQKEMNIDDPKEDDIYSVGTVAKVKQMLKLPNGTLRVLVEGLHRAEVVEFIEEENVVQVSIKTVTERSGSXFXKEKALMRTLLEHFEQYIKVSKKVSNETFATVADVEEPGRLVDLIASHLPIKTKQKQEILEIISVKERLHTLISIIQDEQELLSLEKKIGQKVKRSMERTQKEYFLREQMKAIQTELGDKEGKGGEVEELREKIEQSRNAEETMKAALKELDRYEKLPASSAESGVIRNYMDWLLALSVNDATEDMIDLAHSEEILNKDHYGSXESKEARFLGIFRRTRKLANSLKRAFSLGXXGPPGVGKNFVXRVLLPTSYNSXFCPRIPGGGAXXIEIRWSPAYVRWSMPGRIIQGMKKAKSVNPVFLLDEIDKMSNDFRGDPSAALLEVLDPEQNHNFSDHYIEEPYDLSKVMFVATANTLSKYSRSITXPMEIISIAGYTELEKVHIAREHLLPKQLQEHGLRKGNLQVRDEALLEIIRYYTREAGVRTLERQIAKVCRKVAKIIVTAERKRIVVTEKNVVDLLGKHIFRYGQAEKTDQVGMATGLAYTAAGGDTLAIEVSVAPGKGKLILTGKLGDVMKESAQAAFKLYSFSCRRPSIDPNFHEKNDIHIHVPEGAVPKDGTVSRYYDGNGTYSALTGIPVSKEVGMTGEITLRGRVLLLGWFKRKNIKCSPRRLTKIILPAENEKDLDDIPESVKENPYVCACISLDEVLEHALVG

SEQ ID NO: 45836 - protein, 122 aa, Bacillus anthracis; identical to SEQ ID NO: 45315
  MISC_FEATURE (106)..(106): X=any amino acid

SEQ ID NO: 45837 - protein, 203 aa, Bacillus anthracis
MVKIGVLGLQGAVREHVKSVEASGAEAVVVKRIEQLEEIDGLILPGGESTTMRRLIDKYDFMEPLRTFAKSGKPMFGTCAGMILLAKTLIGYDEAHIGAMDITVERNAFGRQKDSFEAALSIKGVGEDFVGVFIRAPYVVDVADDVEVLSTHGDRMVAVKQGPFLAASFHPELTDDHRVTAYFVEMVKESENEKSCISNLQLV

SEQ ID NO: 45838 - protein, 305 aa, Bacillus anthracis
MNMQEVYEYLSTVLPEGHVKQDEMLKNHTHIKVGGKADVFVAPTNYDEIQEVIKYANKYNIPVTFLGNGSNVIIKDGGIRGITVSLIHITGVTVTGTTIVAQCGAAIIDVSRIALDHNLTGLEFACGIPGSVGGALYMNAGAYGGEISFVLTEAVVMTGDGELRTLTKEAFEFGYRKSVFANNHYIILEARFELEEGVYEEIKAKMDDLTFKRESKQPLEYPSCGSVFKRPPNNFAGKLIQESGLQGKRIGGVEVSLKHAGFMVNVDNGTAQDYIDLIHFVQKTVEEKFGVKLEREVRIIGEDKE

SEQ ID NO: 45839 - protein, 137 aa, Bacillus anthracis
MRILGLDVGTKTVGVAISDEMGWTAQGLETIKINEERGQFGFDRISELVKQYDVDKIVVGLPKNMNGTIGPRGEACQQFAENLRELIQLDVVMWDERLSTMAEERLLISADENRKKRKQVIDKMAAVVILQGFLDSK

SEQ ID NO: 45840 - protein, 391 aa, Bacillus anthracis
MGEENQPNYTISQENWSLHRKGYDDQQRHQEKVQEAIKNNLPDLVTEESIVMSNGKDVVKIPIRSLDEYKIRYNYDKNKHVGQGNGDSKVGDVVARDGSGGQKQKGPGKGQGAGDAAGEDYYEAEVSILELEQAFFKELELPNLKRKEMDENRIEHVEFNDIRKTGLWGNIDKKRTMISAYKRNAMRGKASFHPIHQEDLKFRTWNEVLKPDSKAVVLAMMDTSGSMGIWEKYMARSFFFWMTRFLRTKYETVDIEFIAHHTEAKVVPEEEFFSKGESGGTICSSVYKKALELIDNKYSPDRYNIYPFHFSDGDNLTSDNARCVKLVEELMKKCNMFGYGEVNQYNRHSTLMSAYKNIKDENFRYYILKQKADVFHAMKSFFREESGEKMA

SEQ ID NO: 45841 - protein, 467 aa, Bacillus anthracis
  MISC_FEATURE (247)..(247): X=any amino acid
  MISC_FEATURE (307)..(307): X=any amino acid
  MISC_FEATURE (354)..(354): X=any amino acid
RRIAEITENAGGFGLDFYPMRYEICPAEIIYTFGAYGMPTRFSHWSFGKQFFRMKLQYDLGLSKIYELVINSDSCYALFLDTNSLIQNKLIVAHVLAHCDFFKNNIRFSNTKRDMVESMSATAEWVKAYEHKYGKRGGRTFLDAVLAIQEHIDPSLMRPKLAWSIDDLEEEEVEKKKASQYDDLWNLDNRNKKQERSNVRKKKKIPPQPEKDLLLFIEEYSRELEDWQRDILTMMREEMLYFWPQLXTKIMNEGWASFWHQRILREMDLTSDEAIEFAKLNAGGVQPSKNEHLIPTNFGIKMFEDNXRKVTTTPTEKNEADQGGKTRDLGREQNLLEVREIEWDVSFFKNLLKXRSRKEEDMYLFQRQGKEYKVIDKEWEHVRDQLVNMRTNGGFPYLVVEDGDYLKNGELYIKHSYEGIELDLKYLEKVLPYLHQLWGRTVHMESIVESKGVVFSYDGKMVHRKYV

SEQ ID NO: 45842 - protein, 584 aa, Bacillus anthracis
MGQNQFRWSNEQLREHVEIIDGTRSPHKLLKNATYLNSYIREWMQANIWIYDDRIIYVGEKLPEQLHECEVIDCDGKYVVPSYIEPHAHPYQLYNPETLANHAMQFGTTTFINDNLTLFFTLKREESFHLLDEFTKIPASMYWWCRFDGQTELQNGESLFNSEEIIKWLQHEAVLQGGELTAWPKLLHGDDEMLTWVQETKRLQKKVEGHFPGASEATLAKLKLLGTDCDHEAMTGQEALARLMQGYTVSLRNSSIRPDLEVLLKELLELGVKQFDRFIFTTDGSHPSFYENGMTNIMIATAIKKGIPVIDAYQMASYNIARYYNMEHIHGAIATGRIANINILESKENPVPTSVIAKGQWVKRDGVNTHEALHIDWSKCKVTPLSLEWSIEKEDMLFSNKTGIHLLNNVITKPYTSEINIDCDELSIDYDECFLMMIARDGTWRVNTVVKGFAKEIGGLASSYSGTGDIILVGKRKEDMLTAFHRIKELGGGMVIAEKNEVLHEIALPLLGIMSELKMSELIQKEKKMVNLLQERGYVYNDPAFTILFFSATHLPFIRVTFIGLYDVKSGKVVASPVNLIKQY

SEQ ID NO: 45843 - protein, 237 aa, Bacillus anthracis
MKKVSVLPAFIITFVCMLAFLVMPYGNASAKLADGTYDINYVIQKAENDSASMANDYFEKPAKLIVKNGEMRVQVPMNHSAWITEFKAPENGNFVDAKVVSKDESADKRTVEFKVDDLSKPAAVKIHVVVPNANYDHHYTIRFAFDANVKAVGGDNGVAATTKNNDQAKTDTQVKEEKTKVESKETAKEVNKETKNENGKAEKTDNPKTGDEARIGLFAALILISGVFLIRKVKLSK

SEQ ID NO: 45844 - protein, 413 aa, Bacillus anthracis
MKKILMVTQNFYPEIGSASNRMKNIYLELNERGYDVKILTSDPSYPNRNLYKDSSYWYDENIEKDIVRIHPKTRKYTRNLFRRLILYIEVAFRLILAICKDKEKYDYIFVSTPSIFIPVAGMFAKRKMKAKLIVDVRDLWPESLIGIGFFNKNWILKFAYKLEYKIYHAADNIIINSKGFYSYISSTGIAPNRISFMPNSLTEKELSTVPKKNISDQLTVIYTGNIGLAQDIEKLILIAEHLKEYKNISFKIIGYGYQKKELGESIEAKQLPNMQLIEPKNREDTLAEIVDADIAYVSLVEKDVFKKVLPRKVMDYMSMRKPIVADVAGYAKEVIEDAQCGFVTEDRTVAELSDYIIKLAQDKQLRNRLGENGYQYAFRTLRWKTNIETLLKILEERDVTEESVHVCMESLHK

SEQ ID NO: 45845 - protein, 211 aa, Bacillus anthracis
MRNIQIALTKGRLEKHVIPLFEQIGIDCSELKNKGRKLVFQSKNTDISFILVKAVDVATYVEHGVADIGVVGKDILMENEKDIYEMLDLGVGVCKFCVASIPTYNPKSYRKKCIATKYPHITSNYFHNKGEDVEIIKIEGSVEIAPILGLADAIVDIVETGKTLQENGLIVFEEMYSISARMIVNKAALKTKKDEIFSIINMMEQEILSGK

SEQ ID NO: 45846 - protein, 1177 aa, Bacillus anthracis
  MISC_FEATURE (68)..(68): X=any amino acid
  MISC_FEATURE (72)..(72): X=any amino acid
  MISC_FEATURE (234)..(234): X=any amino acid
  MISC_FEATURE (268)..(268): X=any amino acid
  MISC_FEATURE (350)..(350): X=any amino acid
  MISC_FEATURE (365)..(365): X=any amino acid
  MISC_FEATURE (378)..(378): X=any amino acid
  MISC_FEATURE (390)..(390): X=any amino acid
  MISC_FEATURE (529)..(529): X=any amino acid
  MISC_FEATURE (533)..(533): X=any amino acid
  MISC_FEATURE (534)..(534): X=any amino acid
  MISC_FEATURE (535)..(535): X=any amino acid
  MISC_FEATURE (541)..(541): X=any amino acid
  MISC_FEATURE (544)..(544): X=any amino acid
  MISC_FEATURE (547)..(547): X=any amino acid
  MISC_FEATURE (589)..(589): X=any amino acid
  MISC_FEATURE (644)..(644): X=any amino acid
  MISC_FEATURE (649)..(649): X=any amino acid
  MISC_FEATURE (664)..(664): X=any amino acid
  MISC_FEATURE (669)..(669): X=any amino acid
  MISC_FEATURE (705)..(705): X=any amino acid
  MISC_FEATURE (714)..(714): X=any amino acid
  MISC_FEATURE (717)..(717): X=any amino acid
  MISC_FEATURE (736)..(736): X=any amino acid
  MISC_FEATURE (792)..(792): X=any amino acid
  MISC_FEATURE (871)..(871): X=any amino acid
  MISC_FEATURE (883)..(883): X=any amino acid
  MISC_FEATURE (907)..(907): X=any amino acid
  MISC_FEATURE (977)..(977): X=any amino acid
  MISC_FEATURE (1028)..(1028): X=any amino acid
  MISC_FEATURE (1056)..(1056): X=any amino acid
  MISC_FEATURE (1059)..(1059): X=any amino acid
  MISC_FEATURE (1068)..(1068): X=any amino acid
  MISC_FEATURE (1071)..(1071): X=any amino acid
  MISC_FEATURE (1086)..(1086): X=any amino acid
  MISC_FEATURE (1170)..(1170): X=any amino acid
  MISC_FEATURE (1175)..(1175): X=any amino acid
KNEEIQSVINGLEDGLKEQLVSGVGNIFSFVLNGGPNIKKQKKSQLIVTHNLYSAQKVHERLVALLGXKEMXASVPVNELIASETWVASPELKAQRIEVLNRLAAGEHGIIVAPVAGLRRFLPMKELWKQRQIEISLGQEIDLDTFLHTLHHIGYERKSMVEAPGEFSLRGGILDIYPLTEELPFRIEFFDTEVDSIRLFDVDEQRSQDKKESVRFGPTSRFFFFPGRTPIGDXCFLKKFYLRRMQNLSDDKLKAPVLETLSHQIEMXKNGQKYRQMFKYLSIFYNEPASLIDYVTEEWCCILDEISRIQETASHLESEEAEMVYIPSWEGNNYSRFIFSHSFEEFFSSXKRKFLYISRFSKVIXASTSANHCDGDMXTNQDFHGQMQLXKPEIDRWTEGHFTPVVLGTDDERVKKLHHILSDYDIDADIVEGTDILLPGRLQIAVGDLHAGFEMPMQKLVVITEKELFHKKVKKSQRKQKLSNADAIKSYSELKVGGLCSSCKSWYGKFLGIETLEINGVHKDFLEYXISRXXXVIVPNXTNXPEXQKYVGSEGKDPKSYKLGRKRLRKRSKPKVEKSVQNIADDLIXLHAERETFKGLCLFTKNGENNKKLKSSFPYQETEDQLRSIEEIKKGYGTRTSDGXAFLWXCRIWKDGSSYSAAFXSNYGXKTSCNFSADTILAQQHYETIRERFQDYPINIGFIKXIPYEKPAKXNNXGLKRWHGRYCNRNASYFIXRVTYKDLGLLIIDEEQRFGVTHKEKIKQLKANVDVLTLTANPDPAYASYVYAWCTXFIVIETPPENRFPVQTYVVEYNPALMREAIERELARGGQVYFLYNRVDDIERKADEISMLVPDARVTYAHGKMNESELXDWYAIVFRRAAXCSCKYNIIETGVDIPNGKYINCIXCRSYGIIAVVSARGRVGRSNRVAYAYFAYKRDKVLSEVAEKRLQAIKEFTELGSGFKIAMRDLSIPGAGXLVRELDPPGVLLILLGIDFISPNVKKRQLKQREEPAGSWKIQLMLKLIRSXMHFTQMLIFWDSKQKIMMYKQFRVFLRXKIXRVAGRDDRXIWXLPARSWLLITNCKYXSIGNEEQIELIKQNKFEVTILFSEQASQNIDGGKLFMLGNSFGRMIGLGMEGSQLKIFMKTNCLETSKVVNNCLKFIKRAAQMXKKKSXMP

SEQ ID NO: 45847 - protein, 413 aa, Bacillus anthracis
  MISC_FEATURE (212)..(212): X=any amino acid
  MISC_FEATURE (214)..(214): X=any amino acid
  MISC_FEATURE (287)..(287): X=any amino acid
  MISC_FEATURE (327)..(327): X=any amino acid
VIAEVKRASPSKGDINLHVDVRKQVKTYEECGAGAVSVLTDGQFFKGSFYDLQTAREEVAFRFLCKDFIIDKIQIDRAYEAGADIILLIVAALTKEKLKELYSYVLEKGLEADVEVHDEQGLEIAIFINPARYRGLTNRNLNTFEVDLSQPEKLGKRLNEEKFLWISESGIHSKEDIIRVKRAGAKGVLVGEALMTSSSIHTFFEDCKVNIXKXKICGITDMETSKTCLRIRSDALGFVFAESKRKITPGLAKEIIQELPANVLKIGVFVNESVEVIQKITGAIADXHMYNYMGGEDHHSIRRLNIPSIKSLGVTSESDMKNAPGVXTDYILFDSPKEKFHGGNGKTFPWELLAHMPKRITRENDISWWLNTLNIEEAIRNCSPIMVDVSSGVETEGKERCRENKPFIIKAKE

SEQ ID NO: 45848 - protein, 274 aa, Bacillus anthracis
  MISC_FEATURE (111)..(111): X=any amino acid
  MISC_FEATURE (136)..(136): X=any amino acid
  MISC_FEATURE (160)..(160): X=any amino acid
  MISC_FEATURE (261)..(261): X=any amino acid
SDKGRNKTIKVGFSVSTLNNPFFVTLKKGAEKKAKESGIELIAVDAQNDAAKQTNDVEDLIQKGVDVVVINPPDSDAVASAVSAANAAIVPVITVDRVANSGKVVSPIASXNIEGGQMASDYIRELVGEGANVLEXEGIPGSFGPSETWKGFHNVADKSXKVVANQAADFDRAKGIICMEKHFAANGWILSGICHNDEMALGALEALKSAGKTDVVVVGFDATEDAVKAVNDGRMAATVAQKPELIGEKAMQTAKEITPRXKSGKSIPIELELI

SEQ ID NO: 45849 - protein, 255 aa, Bacillus anthracis
  MISC_FEATURE (121)..(121): X=any amino acid
  MISC_FEATURE (136)..(136): X=any amino acid
  MISC_FEATURE (175)..(175): X=any amino acid
  MISC_FEATURE (184)..(184): X=any amino acid
  MISC_FEATURE (202)..(202): X=any amino acid
  MISC_FEATURE (208)..(208): X=any amino acid
  MISC_FEATURE (210)..(210): X=any amino acid
  MISC_FEATURE (225)..(225): X=any amino acid
MGKIIAIANQKGGVGKTTTSVNLGAGWAQVGKKVFLVDIDAQGNATTGVGIEKSELDQCIYNVLVEDADVQGVIQKTATENLDVLPATIQLAGAEIELVPTISREVRLPKGHYSPVRDELXFILLFDCPPVLRGYXRFNALTAAGSVYFPVQCEYYALERVSQLLNTSSTVQKHXNKNLAIQGXLLTMLGCPYNLGIQVINXVEKILXEXRISVQFPPQKVRLRXSTKSGKPIMQYDAKSRGAEVYIDLAEEVIA

SEQ ID NO: 45850 - protein, 333 aa, Bacillus anthracis
MIKLSVLDQSPISDGSTATQAFSHTVTLAQEVEKLGYTRFWVSEHHNSVSLAGSSPEILISHIAAKTERMRVGSGGVMLPHYSPYKVAENFRVLEALYPNRIDLGVGRAPGGMPIATRALQEGKMVSLDQYPEQIADVAMYLHDQVPENHHYANLKATPVIPTSPDMWLLGSSGESAKIAAQQGASFAFAQFINGYGGPEVMEAYQKQFQPSYLGDKPKSIVAIFVICGETNEEAEKIASSLDLSILLLEQGKRTTGTPSIETAQNYSYSTYDLFRIKENRQRMIVGDPSSVKEKIINLSKAYNTEEFMIVTITHRFEDKLNSYRLLANAFNL

SEQ ID NO: 45851 - protein, 344 aa, Bacillus anthracis
  MISC_FEATURE (122)..(122): X=any amino acid
  MISC_FEATURE (177)..(177): X=any amino acid
  MISC_FEATURE (306)..(306): X=any amino acid
  MISC_FEATURE (321)..(321): X=any amino acid
  MISC_FEATURE (325)..(325): X=any amino acid
  MISC_FEATURE (333)..(333): X=any amino acid
  MISC_FEATURE (343)..(343): X=any amino acid
VKDLQVSFDTHAGEVQAVRGVTFDLKKGREPLAIVGEFGFGKSVTSKALMGLIPNPPGRIKNGEIVFEGLGLNEITEKEMQQVRGKDIPMIFPEPMTSFKPTEEQWKIKFMEGLIKPPGDNXAHCPQSAFKLIHPWRYSNPEARLKQYPHQFSGGMRQRVVIAMALACTPKIIDCRXPTTALDVTIQAQILELMKDIQQKTEAAIIFITHDLGVVANVADRVAVMYAGKVVEIGTVDEIFYNPKHPYTWGLIASMPSLDGSEEELFAISWNGSQIIESRQKGDAFAPRNPRRALKIDFEIGPTFNXKLSDYPLCGKLGTSXTSPXKKTPGILXKHLSSNESRXT

SEQ ID NO: 45852 - protein, 429 aa, Bacillus anthracis
MLAKRIPIPVAEAVARVMKYAYQGETEEVSLIESYGRTLGEDVIADHDVPHFDRSPYDGFAIRAEDTKEASSSKPIQFEVIGEIGAGVVFTEEVKAFQAVRIMTGAAIPRGCNAVVMLELTEGFEKSEKTYMTLKRCFAAGDNISFKGEDVKQNTILVKEGTVINPGVAALLATFGYSSVHVVKRPIIGIVTTGSELLEVHEQLKPGKIRNSNSYMIAAQIERAGGVVQYYGKFADDFETCFNTVKKAIKEVDILITTGGVSIGDYDYLPAIYERLQANVLFNKIAMRPGSVTTVAEIEGKLLFGLSGNPSACYVGCELYVRPVIGTYLHRKDPHIYRAEAILQKDFSKANPFTRFVRGRVEFADGQLQVTPVGLDKSSAISSLAEANAFIVLPGGTRGFKAGITVSVLLLESTSGSEWPWKESLRSYK

SEQ ID NO: 45853 - protein, 439 aa, Bacillus anthracis
  MISC_FEATURE (168)..(168): X=any amino acid
  MISC_FEATURE (191)..(191): X=any amino acid
  MISC_FEATURE (195)..(195): X=any amino acid
  MISC_FEATURE (224)..(224): X=any amino acid
  MISC_FEATURE (256)..(256): X=any amino acid
  MISC_FEATURE (392)..(392): X=any amino acid
  MISC_FEATURE (411)..(411): X=any amino acid
MKSSLKFSEMFAIKLMVFALFFGAGNMIFPPALGQGAFHDVWIALFGFIVTGRGLPLLRVIVIAFRGDINELAGRVHPIFALVFITAIYLCLGVFVSVPRTGTVAYVMSVAPVFPSEIAGQSYSLVIFTFIFFAVTFLFSQIPWKLVGRIGKVLSPISLAVLAIIVRXSILLHQIGKFGARTKANMAPLFXGIYXWILTLDGLAALVFGKCCNSCVKEKRHYKXNSIAKVTIFAGFIAALGLLLVYLATCLSWSFXVSLGMGANGRNYFNKCREINLFGSYGTLLLGIAITAACLTTSVGIVAACGDYFSSLLPKLFYQKSVFHFPAYNHLCLTNLGLTQLNALPLPILIANLFQLKSEFIVLSTCWKLRSVFPLPMYVGGIVGAFGISFFXWVTQCKTFKIAALSTNFRXNSLYNGRKLGGLFPGIIGIGFGYIVSKF

SEQ ID NO: 45854 - protein, 219 aa, Bacillus anthracis
MSRISKAEMSKLLSVYFIMGSNNCTKDPLQVLREALEGFITIFQFREKGEGALTGEERICFAKELQAICKEYGVPFIVNDDVELALELDADGVHVGQDDEGITSVREKMGDKIVGVSTHTIEEARWVIENGADYLGVGPIFPTSTKKDTKAVQGTKGLAHFREQGITIPIVGIGGISIENTASVIEAGADGVSVISAISLAESAYESTKKLVEEVSRSL

SEQ ID NO: 45855 - protein, 187 aa, Bacillus anthracis
  MISC_FEATURE (52)..(52): X=any amino acid
  MISC_FEATURE (109)..(109): X=any amino acid
MTTYTSIANVIKERRSVRTFTDKAVDKELLIELLNDATWAPNHKHRFPWKLXYITHWRGRQKLVDAVLNSFTEEERAKRGKILSDRFLSTPAQIVVYINEDPRQFTCRXDYAATCAFMQNFQLLAWERGLGCVWKSGGLNYNPLFIEGLGLTRGQRIVGILHLGYFDKSPEGKARTPITEKMEIIEG

SEQ ID NO: 45856 - protein, 243 aa, Bacillus anthracis
MVKGRIHSVESCGTVDGPGIRYVIFTQGCLLRCQYCHNADTWEIGKGKEITVEEVMQDVTCYLPFIEASGGGITVSGGEPLLQLDFLIELFKKCKEIGIHTTIDSSGGCYSEETEFQNKLDILMEYTDLVLLDLKHIDSKKHRKLTGKPNEHILQFARYLSDKNKPIWVRHVLVPGVTDNEEDLQKLSSFIQSLSNVQKIEVLPYHKLGVYKWEALGHKYPLANVEPPTEKNVEQARHILQAV

SEQ ID NO: 45857 - protein, 354 aa, Bacillus anthracis
  MISC_FEATURE (67)..(67): X=any amino acid
  MISC_FEATURE (75)..(75): X=any amino acid
  MISC_FEATURE (215)..(215): X=any amino acid
  MISC_FEATURE (218)..(218): X=any amino acid
  MISC_FEATURE (338)..(338): X=any amino acid
  MISC_FEATURE (340)..(340): X=any amino acid
  MISC_FEATURE (342)..(342): X=any amino acid
MSTELLDALLVLESEKGISKDIIIDAIEAALFFAYKRNFNPAQNVSWELNPTSGNQSRFLARKDVCXNVFDPRLXIFVEEARQINPNYQDGDVLEIEVTPKDFGRIAAQTAKQVVTQRVREAERGVIYSEFSDREEDIMVGIVQRQDARFIYVSLGKVEALLPVSEQMPNEQYKPHDRIRVFITKVEKTTKGPQIYVSRTHPGLLKRLFRNGSPXIHXWNGLKFVLVHGEAGDRSKISVHAENIDVDPVGSCVGTERTTCQRIVDELKGEKIDIVRWSNDPVEYVANALSPSQVVKVLVDEEEKSNNCCCSDHQLSLAIGKRGQNARLAAKLTGWEKXYXEXVDAKQLGIVTEE

SEQ ID NO: 45858 - protein, 124 aa, Bacillus anthracis
MSKHPMTPLKAMGGEQCIEILVDTFISYVSKHPDLSPIFPDDFTETARKQKLFLTQYLGGPNLYTGRHGHPYVKARPSPVEITSKTSRGLLSCMEQAMDDTGVHGHIREFVFERLALTAQHMVN

SEQ ID NO: 45859 - protein, 786 aa, Bacillus anthracis
  MISC_FEATURE (39)..(39): X=any amino acid
  MISC_FEATURE (90)..(90): X=any amino acid
  MISC_FEATURE (143)..(143): X=any amino acid
  MISC_FEATURE (160)..(160): X=any amino acid
  MISC_FEATURE (175)..(175): X=any amino acid
  MISC_FEATURE (209)..(209): X=any amino acid
  MISC_FEATURE (288)..(288): X=any amino acid
  MISC_FEATURE (317)..(317): X=any amino acid
  MISC_FEATURE (342)..(342): X=any amino acid
  MISC_FEATURE (344)..(344): X=any amino acid
  MISC_FEATURE (377)..(377): X=any amino acid
  MISC_FEATURE (378)..(378): X=any amino acid
  MISC_FEATURE (393)..(393): X=any amino acid
  MISC_FEATURE (580)..(580): X=any amino acid
VLQPKTRWKEKEYNGERVSELASKLQLSPLLSFRLFPRXRIKFRRIRFLDFLNTENQEFHDPFLLEGMDRTVERVNKAIQMGEQISIYWXYDADGLSSTTVLYLALQKIGADVEFYIPNRFTEGYGPNEEAFRWAHRGQDFPXIIPVETCIARRTWKGKXRREPGMILIIQDPQXARTGMAESTGDYHPKLDGGVYPFHYLAGRWCCVXSAHALLGRVPEHLLEIAVIGTVADLVSLRGANRLLVKRGLKHMRMTNNIGLKALFRVANVSPSVIPEESIGFSIAPPYXCSWDRRKCYPGCHLFIFRRIRKKGKELGXRNLMNWTKLEKRYCKSKIQKEAYRXGXKIFSPPEENKGIVAGKRRAGIQGVNWNCRFLNXXNVLNVQELYYALILXRNCKGSARSIAGFDLFANLSDCRELLPHFGGHPMAAGMTLHMNDVDELRRRLNEQAEEILTEEDFIPITAVDAFCKVEDVTLAAIEDMQKLAPFGVGNPKPRIAVKDAELESIRAIGSDGSHLKMALRDGQATLDTIGFGFGAYAKEISPVAKVSVIGEASINEWNNFKKPQLNGERYCCRGMANIXWRSMRNVEANVAELPKEKITMVYFSKEVLHKFSLEDYKEHMMHASEVTELDEQYIVLLDLPKGTDELRDLCKVGFPSRIYTLFYQENNHLFSTVPTRDHFKWYYSFLSQKSPFSLRQYGEQLCQHKGWSKDTVNFMTQVFFELEFVTIKDGVIFMADKKQKRDLIESNTYREKMNHLQLEKELVYSTYQQLYTWFETIRNHKEVEQ

SEQ ID NO: 45860 - protein, 276 aa, Bacillus anthracis
MPELPEVENVRRTLENLVTGKTIEDVIVTYPKIVKRPDDAEIFKEMLKGETIENIKRRGKFLLLYVTNYVIVSHLRMEGKFLLHQEDEPIDKHTHVRFLFTDGTELHYKDVRKFGTMHLFKKGEEMNQMPLADLGPEPFDAELTPQYLHERLQKTNRKIKVVLLDQRLLVGLGNIYVDEVLFRSQIHPEREASSLTAEEIERIYEATVTTLGEAVKRGGSTIRTYINSQGQIGSFQELLNVYGKKGEPCVTCGTILEKTVVGGRGTHYCPICQPRI

SEQ ID NO: 45861 - protein, 242 aa, Bacillus anthracis
MRLDKLLANMGYGSRKEVKKLLKDGVVKIDGISVKDAKVHVNVEEQEVMIHGEVVEYKEFVYLMMHKPQGVISATEDDNHETVIDLLELEDAIFNPFPVGRLDIDTEGFLLITNDGKLSHQLLSPKKHVPKKYYAHVAGVVTEEDVKEFAKGVILDDGYETKPGALTILKSDDISEIELVITEGKFHQVKRMFEAVGKKVVYLKRTEMGPLVLDEELELGQYRELTDEEVEMLKTYQVDNEK

SEQ ID NO: 45862 - protein, 633 aa, Bacillus anthracis
  MISC_FEATURE (75)..(75): X=any amino acid
  MISC_FEATURE (76)..(76): X=any amino acid
  MISC_FEATURE (84)..(84): X=any amino acid
  MISC_FEATURE (91)..(91): X=any amino acid
  MISC_FEATURE (98)..(98): X=any amino acid
  MISC_FEATURE (102)..(102): X=any amino acid
  MISC_FEATURE (115)..(115): X=any amino acid
  MISC_FEATURE (119)..(119): X=any amino acid
  MISC_FEATURE (189)..(189): X=any amino acid
  MISC_FEATURE (218)..(218): X=any amino acid
  MISC_FEATURE (221)..(221): X=any amino acid
  MISC_FEATURE (549)..(549): X=any amino acid
  MISC_FEATURE (565)..(565): X=any amino acid
  MISC_FEATURE (568)..(568): X=any amino acid
  MISC_FEATURE (579)..(579): X=any amino acid
  MISC_FEATURE (597)..(597): X=any amino acid
  MISC_FEATURE (614)..(614): X=any amino acid
FSDKKIDASLFLQMENLMYALLKEDDAYLEYGYKAYYDEIEKKVFISPLWGRLENKGDPVIGLKRRKCFLKPLCXXTLLGQGLXFVPLCNXITRITLXKSFXHNLFVLLEDLRGXGNRXKTYAPGTKHGFKRKKEMDRNNFSSTNEINRGRNYSRGTANFGHGIFPLTSEKYEMCNNGYFEAIESYSAXNISKLRNTEDIMYIVEKIRYRLEELLKRXYAXNYFGTCSALLSVIADEKHSRPEKLTNDDTQIVDDENKIKMNESFSTWHRENKNNENENFLRFELESGTKTNMMGDTARESEDGDQALGSVQGTSQKSTQSNFDGADTEEARASSASSQNDGAYGKYNVGASHTFKEARKSTPDEKKDYQAIKSVVNKDVKELKKIIEKTIENKTNANSDKYYGRLRKKFLRIYTEKQPRMFYKKGQESQELDVAFQLLVDCSGSMYNKMEETKKSVVLFHEALKSLKIPHAISGFWEDASSAKPEDKPNVIHEVVTYKNSTLPNVGPEIMQLREEEDNRDGYIIRIVSEKLAKRPEKHKFLLVFTGRXPFCFDYQTSRFFRFRXSRXTPRVKSGNGSXSGIFIEEGEGERSNFINXLKTFLLPSLSLVANHPXRIIRLKIKPLLKKLLLKTI

SEQ ID NO: 45863 - protein, 441 aa, Bacillus anthracis
  MISC_FEATURE (248)..(248): X=any amino acid
  MISC_FEATURE (259)..(259): X=any amino acid
  MISC_FEATURE (263)..(263): X=any amino acid
  MISC_FEATURE (307)..(307): X=any amino acid
  MISC_FEATURE (315)..(315): X=any amino acid
  MISC_FEATURE (395)..(395): X=any amino acid
IIDVYAREVLDSRGNPTVEVEVYTESGAFGRAIVPSGASTGEHEAVELRDGDKSRYLGKGVMNAVNNVNEAIAPEIVGFDVTDQAGIDRAMIELDGTPNKGKLGANAILGVSMAVAHAAADFVGLPLYRYLGGFNGQTLPTPMMNIINGGVHADNNVDFQGSSRFLPRGCSTFQRINSVMGAEVFHALKAVLHDKSLNTAVGDERGIAPKPLVLTVEALEVIIRAIEKSWYKAGRDRILRKWTVASSXVLQPKKLGKYXPCRXKAVLGLPSARMGGILTKAFAKTFPIFSYPKMGLERKRLGMSTNXLTDRIRGXRTIKWGRFIRTNPPKLAGRIQKGVFLTSSLIKVTTTGTFNWEFSNLPKWAKNVPGYTAVVSHRSGDTRDATIADIVTHNXALAKSKLGSMSRTDRIAKYNQLLRIEDELGEIAVYDGIKSFYNINR

SEQ ID NO: 45864 - protein, 1176 aa, Bacillus anthracis
MIGLLEQFYKNEEIQSVINGLEDGLKEQLVSGMATSSRSFLMAALYKKTKKSQLIVTHNLYQAQKVHEDLVALLGEKDVWLYPVNELIASELGVASPELKAQRIEVLNRLAAGEHGIIVAPVAGLRRFLPMKELWKQRQIEISLGQEIDLDTFLHTLHHIGYERKSMVEAPGEFSLRGGILDIYPLTEELPFRIEFFDTEVDSIRLFDVDEQRSQDKKESVRFGPATEFLFSQEELKSGIKHLEEGLTKTMQKLSDDKLKTTVLETVSHEIEMLKNGQSIEQMFKYLSIFYNEPASLIDYLPEDGVVILDEISRIQETASHLESEEAEWYISLLGEGTIIQDLSFSHSFEEFLHHKKRSFVYLTLFLRHIAHTHPQNIVNVTCKTMQDFHGQMQLLKTEIDRWNEGHFTTVVLGTDDERVKKLQHILSDYDIDADIVEGTDILLPGRLQIAVGDLHAGFEMPMQKLVVITEKELFHKKVKKSQRKQKLSNAERIKSYSELKVGDYVVHVNHGIGKFLGIETLEINGVHKDYLNIKYQGNDKLYVPIEQIDQVQKYVGSEGKDPKVYKLGGNDWKKVKTKVEKSVQDIADDLIKLYAEREASKGYAYTPDTAEQQEFESSFPYQETEDQLRSIEEIKKDMERGRPMDRLLCGDVGYGKTEVAIRAAFKAIMDEKQVAILVPTTILAQQHYETIRERFQDYPINIGLLSRFRTRKQQNETIKGLKDGTVDIVIGTHRILSKDVTYKDLGLLIIDEEQRFGVTHKEKIKQLKANVDVLTLTATPIPRTLHMSMLGVRDLSVIETPPENRFPVQTYVVEYNPALMREAIERELARGGQVYFLYNRVEDIERKADEISMLVPDARVTYAHGKMNESELESVMLSFLEGQHDVLVSTTIIETGVDIPNVNTLIVFDADRMGLSQLYQLRGRVGRSNRVAYAYFAYKRDKVLSEVAEKRLQAIKEFTELGSGFKIAMRDLSIRGAGNLLGAEQHGFIDSVGFDLYSQMLKDAIEQRRGTDGVENTVNVEIDLEVDAYLPDAYISDSKQKIMMYKQFRGVSAIEDIEELQEEMIDRFGDYPQEVGYLLQIANIKVLAMKEQIELIKQNKFEVTILFSEQASQNIDGGKLFMLGNSFGRMIGLGMEGSQLKIVMKTNGLETSKWLTIAENLLKGLPDVKKEVINA

SEQ ID NO: 45865 - protein, 160 aa, Bacillus anthracis
MAAPIKMIQKQELTEEEVKQQKLDDVKELLANNEDALNQMFNIVGELNDIGMLEAANSMLKAKEPIAKIVLGQVTREPVTNLINNMMGAAGALTELDPELTKKLIGSLLVGLEKGNEHLESNKKVGVFDLMKVLKDPDINRAIGFGLHFLKGMGKGLKEE

SEQ ID NO: 45866 - protein, 93 aa, Bacillus anthracis
  MISC_FEATURE (70)..(70): X=any amino acid
LASETVSNLLEKALPLLQRDAEKILKLIKVQMDHLTMPQCPLYEQVLDTQMFGASREVDFAVRLGLIAEXQGKVMLGELERELSALHEAFTNK

SEQ ID NO: 45867 - protein, 550 aa, Bacillus anthracis
MSDSKFLRGTLIVTLGTFLVKFLGMIYVFPFHALVGTEGGTLYTYGYIPYTIFLSIATAGVPLAVSKFVSKYNALGDYKTSRRMFRSGMVMMIVTGVLSFLVLYMTAPLFAEAMLGKQSVHSNIGEVTTIIRLVSFALIVVPAASLIRGYFQGHQSMGPTTVSQIIEQIIRIVFLLAGSFIVIKVLGGTVATAVGVATFAAFVSAVGALGVLIWYWLKRKKHLDQYLIEQTVPESTVSTVQLFKELFAYAIPYVVIGLTIPLYQQIDTLTFNSIMQAIGQGDIAERALGIFTMWTHKLIMIPVSLATAFSLTLVPAITKSFTEKQYRYLKLQITQTFQANMFLTLPAVVGISSLAYPIYTAFYDSDPLGGQVLMWYAPVALLFALFTVTAAILQGINQQKHAIIALIMGVILKFVCNVIFIRYFGTVGAILATAVGFLASVWYTNQQIKKYAHYSFGVVYKRTFQIAVLTLVMVVTVKLSQWILSFMISPDSRIGALITVAICAGLGGLVYGLLAIRTGVLERVFGGEALEKIQRKLGNRFKIKLKSKGA

SEQ ID NO: 45868 - protein, 633 aa, Bacillus anthracis
MNRIFRNTIFYLLIFLVVIGIVSYFNGSTQKTTSVSYDKFITKLEKGEVRNVQLQPKNGVFEVKGQFNNSSQGEQFVTYAPNTEELQKKINDKAQGAEVKYQPAEETSAWVTFFTSIIPFVIIFILFFFLLNQAQGGGSRVMNFGKSKAKLYNDEKKKVRFRDVAGADEEKQELVEVVEFLKDPRKFAEVGARIPKGVLLVGPPGTGKTLLARAVAGEAGVPFFSISGSDFVEMFVGVGASRVRDLFENAKKNAPCIIFIDEIDAVGRQRGAGLGGGHDEREQTLNQLLVEMDGFGANEGIIIIAATNRPDILDPALLRPGRFDRQITVDRPDVNGREAVLKVHARNKPLDENINLRAIATRTPGFSGADLENLLNEAALVAARQDKKKIDMSDIDEATDRVIAGPAKKSRVISEKERNIVAFHEAGHTVIGVVLDEADVVHKVTIVPRGQAGGYAVMLPKEDRYFMTKPELLDKITGLLGGRVAEEIVFGEVSTGAHNDFQRATGIARRMVTEFGMSDKLGPMQFGSSQGGQVFLGRDFHSEQNYSDAIAHEIDMEMQTIMKECYARAKQILTDNRDKLDLIAKTLLEVETLDAEQINHLCDYGRLPERPTSSADVKVNINMKKDDEESEDK

SEQ ID NO: 45869 - protein, 1875 aa, Bacillus anthracis
  MISC_FEATURE (96)..(96): X=any amino acid
  MISC_FEATURE (221)..(221): X=any amino acid
  MISC_FEATURE (258)..(258): X=any amino acid
  MISC_FEATURE (332)..(332): X=any amino acid
  MISC_FEATURE (333)..(333): X=any amino acid
  MISC_FEATURE (374)..(374): X=any amino acid
  MISC_FEATURE (475)..(475): X=any amino acid
  MISC_FEATURE (484)..(484): X=any amino acid
  MISC_FEATURE (512)..(512): X=any amino acid
  MISC_FEATURE (513)..(513): X=any amino acid
  MISC_FEATURE (555)..(555): X=any amino acid
  MISC_FEATURE (589)..(589): X=any amino acid
  MISC_FEATURE (645)..(645): X=any amino acid
  MISC_FEATURE (652)..(652): X=any amino acid
  MISC_FEATURE (656)..(656): X=any amino acid
  MISC_FEATURE (688)..(688): X=any amino acid
  MISC_FEATURE (697)..(697): X=any amino acid
  MISC_FEATURE (702)..(702): X=any amino acid
  MISC_FEATURE (708)..(708): X=any amino acid
  MISC_FEATURE (730)..(730): X=any amino acid
  MISC_FEATURE (761)..(761): X=any amino acid
  MISC_FEATURE (771)..(771): X=any amino acid
  MISC_FEATURE (809)..(809): X=any amino acid
  MISC_FEATURE (812)..(812): X=any amino acid
  MISC_FEATURE (818)..(818): X=any amino acid
  MISC_FEATURE (870)..(870): X=any amino acid
  MISC_FEATURE (879)..(879): X=any amino acid
  MISC_FEATURE (881)..(881): X=any amino acid
  MISC_FEATURE (883)..(883): X=any amino acid
  MISC_FEATURE (884)..(884): X=any amino acid
  MISC_FEATURE (886)..(886): X=any amino acid
  MISC_FEATURE (894)..(894): X=any amino acid
  MISC_FEATURE (1054)..(1054): X=any amino acid
  MISC_FEATURE (1123)..(1123): X=any amino acid
  MISC_FEATURE (1198)..(1198): X=any amino acid
  MISC_FEATURE (1318)..(1318): X=any amino acid
  MISC_FEATURE (1326)..(1326): X=any amino acid
  MISC_FEATURE (1334)..(1334): X=any amino acid
  MISC_FEATURE (1377)..(1377): X=any amino acid
  MISC_FEATURE (1378)..(1378): X=any amino acid
  MISC_FEATURE (1414)..(1414): X=any amino acid
  MISC_FEATURE (1543)..(1543): X=any amino acid
  MISC_FEATURE (1555)..(1555): X=any amino acid
  MISC_FEATURE (1558)..(1558): X=any amino acid
  MISC_FEATURE (1649)..(1649): X=any amino acid
  MISC_FEATURE (1659)..(1659): X=any amino acid
  MISC_FEATURE (1664)..(1664): X=any amino acid
  MISC_FEATURE (1687)..(1687): X=any amino acid
  MISC_FEATURE (1815)..(1815): X=any amino acid
  MISC_FEATURE (1816)..(1816): X=any amino acid
  MISC_FEATURE (1829)..(1829): X=any amino acid
SIDFQNEKKEKVFTLPKPYMNDSNVDQQSGEAETSDAVRYDIEKEDEGNIIHLTVTADPQWLPAPERKYPVYVDPFIQLKDFDNAYASSAYPTGNXFTKKSFWECLAKMLIHLKVGYYFMAHHGTNFAFIKPDVSNFKGANIESATFNAHTIWHYYTNQPNGVWLDEVTGAWNEGSLNWNNKPGSNNIAHADVTRGQWGEINVTNTVKAWVEGTKQNNGLXLHANGNGQNHWEEIYCAENGTNAPYFRSKVFLRKTEXTKVQTYSNGSGSSSGHFNVQWDAVPGANGYKVAIFNGHEYEEIEVGNVTNWTTKDKKIFPTPRRDCTRPVCGAXXPKRCRSTQPIQGPIFKNAFLYKNPPWEINNNARGKLGFLSXQHTQTVENSPLSDEAIVYIPLEQVKKPRWLSYINATDQTTGYVTLKWDAVPEAAGYKVWIYNGKDYEAFDVGNKTNWTTQNEKIWPTKDEMQKRPILLHSXQKRCRISRXLPSPVYKNSGGIYAGAKKYVVPVVTGIXXSWTMLESGNFHMSLYLDFSQDSGFIGMFDTGASNSGVKCKSXMLQNVTFIMSEKRYYVIRARPGCISERTYNKPKXKGRFIWYGLVSGLEERVWADGNGNLLLISTDGANITFTRTGDNKYQAPFTIYVSDXASIWPIXNKRXRSTVTFYKSGDAQGRIEYTKDKYGNYGGGRVXWAIPFYKNXECSCXRVCSYXFAGNIKQAARVIGPEIQDDSLXLGWRFTCFFTTPEGKVYKYGYDNGGTDIYLXSTTYRCQTIXNIYAYENDRLVKVTDPLGKATTLAYNTGSKEVYLNDPXRTXDCLYVXRCWDPSETSEDVGRLNLTTSYEYNANNLVKTTTPKNQTETATYDGNGEWLLXMVMKLGTGXLXVXXRXWDYKSDRXRRSKTTVAYVGANTEVSQTDQGANTSSVIHHDQYGNPIETSKELSAGGNLIQNPSFEMNGTEKWVKVDTNNSGSISKDATPAPGGLGGESSLKITTKATNNDWGYIAAIQEVTLEPNTTYTLSGMVKTDLVNGAAFFNVQSLNENGAGIKWWVGMILVPXNSRERVIGVNRQRLPLKTPKPTRKVKFLFPSKNGRFCLQTGSACFDKIQIEKRRSFFKVLVPVLNSSSXRKLAGGFVPQWVRSCSQHCDRTDVSDDSFTGHSSIVMERSEYGPNDIGYRNRVILNQKKAETVTLYIASTDLKMXSMSHQINFPKDYAVLAETYYQDGTVVNYYTSFPSGTNDWNRSAAVIPAKKPIQKIEIFLLFRKNNKGKVWFDDINLLEGNALISDEYDNDGNVVATYDEEGQKNTFTYDASGNKKSENRXKGKYKTIXLQQKIIYXQEVTLKNGTSVNYRYDHNGNTTEKSVMFGGKTQTHKYEFGVEXXKIQCYFGCINPVGIENHVRWKFNQDKNKNAKWVLSXSLYMIQLIALLGKSAREKIHLHSNVIKMTSYESERSCQRCRTYETYDKADRVTSATDSRGGKIDWAYHDKANSKTEKLKEQTVTQGGYTNKVSYDYNTLDQNIRVTDGSQTYRFDYDDQGNFCRVYSGXRFRVYLPTKPGXTKXRFCSRFFKNFLLSQRYEYDQSGNRTKIKHEGAGGKVTETNFVYDPINQLLNEVLPNGTTKSYTYDGFGNRTSVKVIENGKETKSITATFQXRKSTCQIRKXIINVXCKWKSYIPDGKYNIHGTKMIKLXLSQNKVRTMHLQLQVDEDNRRIEKNVNGQVTRYFYDGDSINPLYETDGNGTVLRQYVYSADGARLAMKAQGQTLYYHYNPRGDVVAMTNQDKEVVATYEYDAWGNVLTSDRKRYRSRQSIWICGIHVXXRDWHVLSDCALLXPEHGVFLSVDPDPGDEDDPVTMNGYTYADNNPVMMTDPDGKWAWLV

SEQ ID NO: 45870 - protein, 502 aa, Bacillus anthracis
MSIRAEEISALIKQQIENYQSEIEVSDVGTVIQVGDGIARAHGLDNVMAGELVEFSNGVMGLAQNLEENNVGIIILGPYTEIREGDEVRRTGRIMQVPVGKELIGRVVNPLGQPVDGLGPINTTNTRPIESPAPGVMDRKSVHEPLQTGIKAIDALVPIGRGQRELIIGDRQTGKTAVALDTIINQKDEDMICIYVAIGQKESTVRNVVETLRKHGALEYTIVVTASASQPAPLLYLAPYAGVTMGEEFMYNGKHVLVVYDDLSKQAAAYRELSLLLRRPPGREAYPGDVFYLHSRLLERAAKLSDAKGGGSLTALPFIETQAGDVSAYIPTNVISITDGQIFLQSDLFFSGVRPAIDAGTSVSRVGGSAQIKAMSKVSGTLRLDLASYRELEAFAQFGSDLDKATQAKLNRGARTVEVLKQGLHKPLRVEKQVIILYALTRGFLDDIPVVDITRFEEEFHAWLDSNATDLLEEIRTTKKLADDDKFAAAINGFKKVFVASE

SEQ ID NO: 45871 - protein, 326 aa, Bacillus anthracis
  MISC_FEATURE (32)..(32): X=any amino acid
MGHVSHYEDIQLIPAKCIVNTPLKCDTTCSLXGNLNFKFPVVPANMQTIIDERIATYLAENNYFYIMHRFQPEKRISFIRDMQSRGLIASISVGVKEDEYEFVQQLAAEHLTPEYITIDIAHGHSNAVINMIQHIKKHLPESFVIAGNVGTPEAVRELENAGADATKVGIGPGKVCITKIKTGFGTGGWQLAALRWCAKAASKPIIADGGIRTDNDVAKSIRFEKTMGYIGSLFAGHEESPGETIEKDGKLYKEYFGSASEFQKGEKKNVEGKKMFVEHKGSLEDTLIEMEQDLQSSISYAGGTKLDSIRTVDYVVVKNSIFNGDK

SEQ ID NO: 45872 - protein, 187 aa, Bacillus anthracis
MKKTLKKEGIEWIRTILIGVLLAVFFRTFFFSTYVVEGKSMMPTLQDGNMLVVNKVSYHVGDLNRFDVVVFHANKKEDYVKRIIGLPGDHIEYKHDKLYVNGQFVDEPYLETYKKEIDGRQLTGDFKLEELTKEKSVPPGYIFVVGDNRLGSWDSRHFGFVKADTVVGKVDLRYWPIQDVQTNFSKG

SEQ ID NO: 45873 - protein, 150 aa, Bacillus anthracis
MYQAYYESELGLLEITANDKGITSVIFVDERQEEHTNEMIDQCINELDEYFKGNRKEFTVPLSPEGTAFQKNVWDALYTIPYGVSASYLDIAEKVGNTKAVRAIGGANSRNPISIIVPCHRVIGKSGKLVGYAGGLWRKEWLLKHEGILK

SEQ ID NO: 45874 - protein, 200 aa, Bacillus anthracis
MHMEPYAGYFPASLKQGIKHFLTDTIGGHLWFLYMIVGIYLITPLLKVFVKNAKKREIEYFLILWLYASVVVNLVKYYYPINFNIELFYVTNYVGYFLLGYYLSNFDISKKWRNISYIGGFVGFISTFFITYFYTVKANGQLEQFWYGYFAPRCRTDGDWIVYIFQICIPKIGAGNFPLLSRFINQAKPWNLYSSLLLIK

SEQ ID NO: 45875 - protein, 245 aa, Bacillus anthracis
  MISC_FEATURE (106)..(106): X=any amino acid
  MISC_FEATURE (110)..(110): X=any amino acid
  MISC_FEATURE (242)..(242): X=any amino acid
EWYFEYEIHKNRPGLLGDVSSLIGMLGINIVTINGVDNARRGLLLMCDNQEQISRLESILNTMDNITVTKYRPPKLRDKLAVRHGRYIQRDADDKKPISFWGVMNXELLXAFRAEIMKKGSSKLIGIRGMPSCRKTESICCCSVGANKRWVIGIITLIGKNCRSQLIEDEYSDDNIFILDGIVSPKRANERHWQLVREIMRLPATKVVEHPDVFVSQSEYTLDDFDYIIELRNDYDGENPIXLVD

SEQ ID NO: 45876 - protein, 393 aa, Bacillus anthracis
MSKTVILSAARTPVGKFGGSLKDVKATELGGIAIKAALERANVSASDVEEVIFGTVIQGGQGQIPSRQAARAAGIPWEVQTETVNKVCASGLRAVTLADQIIRTGDQSLIVAGGMESMSNSPYILRGARWGYRMGNNEVIDLNVADGLTCAFSGIHMGVYGGEVAKEDGISREAQDEWAYRSHQRAVSAHKEGRFEEEIVPVTIPQRKGDPIVVAKDEAPREDTTIEKLAKLKPVFDKTATVTAGNAPGLNDGGAALVLMSEDRAKQEGRKPLATILAHTAIAVESKDFPRTPGYAINALLEKTGKKIEDIDLFEINEAFAAVAIASTEIAGIDPEKLNVNGGAVAMGHPIGASGARIIVTLIHALKQRGGGIGIASICSGGGQGDAVMIEVH

SEQ ID NO: 45877 - protein, 123 aa, Bacillus anthracis
MDVFLNIAEEKIRQAIRNGDLDNIPGKGKPLQLEDLSMVPPELRMSYKILKNAGMIPPEMELQKDILKIEDLIACCYDEEERKKLQQELTAKTLRFQQVMEKRKIKDSSAFRMYQDKVFHKLR

SEQ ID NO: 45878 - protein, 499 aa, Bacillus anthracis
  MISC_FEATURE (317)..(317): X=any amino acid
  MISC_FEATURE (401)..(401): X=any amino acid
  MISC_FEATURE (404)..(404): X=any amino acid
MSNMQQKTDVILIGAGIMSATLGSLLKELAPEWEIKVFEKLASAGEESSNEWNNAGTGHSALCELNYTSEKSDGSIDISKAVKVNEQFQLSRQFWAYFVKSKLIRNPQDFIMPLPHMSLVQGEKNVEFLKNRFEALSKNPLFQGMEFSDAPETLKKWLPLIMEGRTSNEPMAATKIDSGTDVNFGALTRMLFDYLKTKDVELNYKHSVENIKRTKNGPSGVKVHDMNIGKIEHHTAKFVFIGGGGGCLPLLQKTGIPESKHIGGFPVSGLFMVCKNQKVVEQHHAKVYGKAKVGAPPMSVPHLDTRYIDNKKALLFXPFAGFSPKFLKTGSNLDLIGSVKPNNVLTMLAAGVKEMGLTKYLIQQVMLSHEKTMERIREFISERKKGRLGIVVCWAAWQRIXKYXCWAGKEQLHFGTEVVSAADGIIAALLGCFTGCFTAVHVMLEVLEKCFPSRMVEWEGKIKGNDSFLRISLTEYPGLFQDFHTSTGGTLGLNEKEAV

SEQ ID NO: 45879 - protein, 61 aa, Bacillus anthracis; identical to SEQ ID NO: 45310

SEQ ID NO: 45880 - protein, 193 aa, Bacillus anthracis
  MISC_FEATURE (12)..(12): X=any amino acid
  MISC_FEATURE (132)..(132): X=any amino acid
  MISC_FEATURE (141)..(141): X=any amino acid
  MISC_FEATURE (147)..(147): X=any amino acid
  MISC_FEATURE (160)..(160): X=any amino acid
  MISC_FEATURE (170)..(170): X=any amino acid
HTASVSKDEREXQNGHHSFVIWFTGYPASGKFTRREPVLFLNLLERNYGKFISLMEHSIRHGLKKDLGFSESDRMGNIRRIWRGAEAIVDQGSVVPYSVISPFRVDRKQVRDLLPVDEFIEVVCKMSIEEVXKRDPKRALXKSQKRXILKRLQVIDFPVXGNPRSGNYLXKPIKYSIEECAEQFGEVLTKSRS

SEQ ID NO: 45881 - protein, 372 aa, Bacillus anthracis
  MISC_FEATURE (46)..(46): X=any amino acid
  MISC_FEATURE (59)..(59): X=any amino acid
  MISC_FEATURE (72)..(72): X=any amino acid
  MISC_FEATURE (114)..(114): X=any amino acid
  MISC_FEATURE (135)..(135): X=any amino acid
  MISC_FEATURE (142)..(142): X=any amino acid
  MISC_FEATURE (145)..(145): X=any amino acid
  MISC_FEATURE (156)..(156): X=any amino acid
  MISC_FEATURE (160)..(160): X=any amino acid
  MISC_FEATURE (166)..(166): X=any amino acid
  MISC_FEATURE (188)..(188): X=any amino acid
  MISC_FEATURE (192)..(192): X=any amino acid
  MISC_FEATURE (347)..(347): X=any amino acid
KLKIGITCYPSVGGSGVVDTELGKQLAERGHEIHFIPAGLPFPVKXRVSPTFFFMEGRXNPFFVFQYPPLDXALASKMAEVVTRENLDILQCALAIPHAILCLFAKQMIRRAYXNCYTLHGTDITVLGSDPFAKXFNRFWYXAIXCVTAVSHSFNXQNAXPVKPNXRPFNGYYTFIDQKWFNFKTWYXTPIXRKEYGISESEKILIHISNFRKVKRVQDVVQPFAKIVTEVDAKLLLVGDGPEFCTILQLVKNLHIEDRVLFLGKQDNVAELLAMSDLMLLLSEKESFGLVLLEAMACGVPCIGTRVGGIPEVIQHGDTGYLCEVGDTTGVADQAIQLLKDVRTSPXYGRASKRKCLRAVRSEKIVSQYETI

SEQ ID NO: 45882 - protein, 190 aa, Bacillus anthracis
MKAIGLHEYLPIEEENSLIDMEIERPVATGRDILVKINAISVNPVDTKVRSPKDKKEEVAKILGWDASGVVVQTGESCTLFKEGDEVFYAGSITKQGTYSEYHLVDERIVGKKPKTLSNAESAALPLTAITAWEGLFERLGIDYNKKDTNSFKNILIIGGAGGVGSIAIQLAKWAGLNVITTASRNETIH

SEQ ID NO: 45883 - protein, 185 aa, Bacillus anthracis
  MISC_FEATURE (44)..(44): X=any amino acid
  MISC_FEATURE (72)..(72): X=any amino acid
MKIKEIIVVEGKDDTVAIKRAVDADTIETNGSAIGDHVMDQVKXALQKASGLIFFTDPDLPGERIRKIISRXVLGMKTCFLRKIEALAKRHKGVGIEHASNESIRPCFREYHEEMEAYTSEISWSDLVDAGLVGRRNGKESQRKNGVAIKDWLTNAKQLHKRLQMFQVSKESFAEAYKQVIQEER

SEQ ID NO: 45884 - protein, 272 aa, Bacillus anthracis
MKEKERLIIEMAMKLFATKGVNATSVQEIVTACGISKGAFYLYFKSKEELLLATLRYYYDKIQNKMMDIEKESLLPREKFAKQLHCQFNDIQKHKEFIIMHARENAIPFNKEVEELSERMKLESHAFYRNSLLSIYGDKGMPYLLEFNHMGESNMAVEYLELNNFTSAQKIDLSLRLLRLFLKRVDDLVDGLVKSSEEPVLHEEKLGEFLCKSELIKEQVKEHFLKEIIVFKRTLADQLEDEELLVTLDVLEAEMRLPNPRDSGYQGMLSYL

SEQ ID NO: 45885 - protein, 103 aa, Bacillus anthracis
MHVKKGDKVQVITGKDKGKQGVILVAFPKQNRVIVEGVNIVKKHSKPSQLNPQGGIITKEAPIHVSNVMILDPKTGEPTRVGFKVEDGKKVRIAKKSGELLDK

SEQ ID NO: 45886 - protein, 396 aa, Bacillus anthracis
MIQTKDIIELTDTYGANNYHPLPIVISKAEGVWVEDPEGNRYMDLLSAYSAVNQGHRHPKIINALIDQANRVTLTSRAFHSDQLGPWYEKVAKLTNKEMVLPMNTGAEAVETAIKTARRWAYDVKKVEANRAEIIVCEDNFHGRTMGAVSMSSNEEYKRGFGPMLPGIIVIPYGDLEALKAAITPNTAAFILEPIQGEAGINIPPAGFLKEALEVCKKENVLFVADEIQTGLGRTGKVFACDWDNVTPDMYILGKALGGGVFPISCAAANRDILGVFEPGSHGSTFGGNPLACAVSIAALEVLEEEKLTERSLQLGEKLVGQLKEIDNPMITEVRGKGLFIGIELNEPARPYCEQLKAAGLLCKETHENVIRIAPPLVISEEDLEWAFQKIKAVLS

SEQ ID NO: 45887 - protein, 196 aa, Bacillus anthracis
MVKIGVLGLQGAVREHVKSVEASGAEAVVVKRIEQLEEIDGLILPGGESTTMRRLIDKYDFMEPLRTFAKSGKPMFGTCAGMILLAKTLIGYDEAHIGAMDITVERNAFGRQKDSFEAALSIKGVGEDFVGVFIRAPYVVDVADDVEVLSTHGDRMVAVKQGPFLAASFHPELTDDHRVTAYFVEMVKEAKMKKVV

SEQ ID NO: 45888 - protein, 254 aa, Bacillus anthracis
  MISC_FEATURE (86)..(86): X=any amino acid
  MISC_FEATURE (91)..(91): X=any amino acid
  MISC_FEATURE (101)..(101): X=any amino acid
MLFDTHSHLNAEQFEEDLQEVIARMKEAGVTYTVVVGFDEPRIKKADELARAYDFIYAAAGWHPVDAIDMTEKHLTLVEEHASHPXGVALXRNGLDYHLGXSPKEIQKEVFRKQITLAKKVKLPIIIHNRDATQDIVDILEEENAAEVGGIMHCFSGSVEVAERCVDMNFLISLGGPVTFKNAKKPKEVATEIPLEKLLIETDCPYLTPHPFRGKRNEPSYVKLVAEEIANLKGISYEEVAEITTKNAKALFGV

SEQ ID NO: 45889 - protein, 169 aa, Bacillus anthracis
MSVTEHKKQAPKEVRCKIVTISDTRTEETDKSGQLLHELLKEAGHTVTSYEIVKDDKESIQQAVLAGYHREDVDVVLTNGGTGITKRDVTIEAVSALLHKEIVGFGELFRMISYLEDIGSSAMLSRAIGGTIGRKVVFSMPGSSGAVRLAMNKLILPELGHITFELHRQ

SEQ ID NO: 45890 - protein, 867 aa, Bacillus anthracis
MVVKEKVVNEMQEVKEMIDTLVNNGRKALQALESFTQEQIDNIVHEMALAGVDQHMPLAKLAVEETGRGVYEDKCIKNIFATEYIWHSIKKDKTVGIIHEDPHEEIIEIAEPVGVVAGVTPVTNPTSTTMFKALIAIKTRNPIIFAFHPSAQNCSVAAAKTVYDAAVKAGAPKHCIQWIEKPSVEATKQLMNHEGVALVLATGGAGMVKSAYSTGKPALGVGPGNVPCYIEKSAHIKRAVNDLILSKTFDNGMICASEQAIIVDKEIYDDVKTEMITNDCYFVTEEERRKLEKLVINENTCAVNSDIVGKSAQYIAELVGITVPKNTKMLVAEIQGIGAAYPLSREKLSPVLACVKANSLEEGFTYCEEMLNLGGLGHSAVIHSVNKEVQKQFGLRMKACRLIVNAPSSQGGIGDIYNGFIPSLTLGCGSYGKNSVSQNVTATHLLNIKRLANRKKNMQWFKLPPKIYFEKHATAYLANMPNISRAFIVTDPGMVEHGYVDTVAHYLRKHANDVKVEVFFEVEPDPSDETVFKGAEMMRSFQPDVIIALGGGSAMDAAKGMWLFYEYPETTFYGIKQKFLDIRKRTCKYPELGSKAQFVAIPTTSGTGSEVTPFAVITDKKNNIKYPLADYELTPDVAIVDPQFVMTVPPHVTADTGMDVLTHAIEAYVSVLANDYTDGLALKAIDLVFKYLPRAFKDGHDEEAREKMHNASAIAGMAFANAFLGINHSLAHKIGPEFHIPHGRANAILMPHVIRYNAIKPRKHALFPKYEHFVADERYAHIARMLGLPASSVAEGVESLDKAIIDLGKSLNINMSIAGQGVAKDQFEEVVGLLAERAFEDQCTTANPKLPLISELKEIYMKAYKGE

SEQ ID NO: 45891 - protein, 95 aa, Bacillus anthracis
MTKMEENQITIVDEKGNEHLCEIIFTFDAEKFGKKSYVVFSPIGEVDEDGDQIYDAMAYEQNEEEGGTLLPIESEEEWEMVQEMFNTLADEQEAE

SEQ ID NO: 45892 - protein, 892 aa, Bacillus anthracis
MTQYTPMIQQYLKVKADYQDAFLFFRLGDFYEMFFEDAVKAAHELEITLTSRDGGSSERIPMCGVPYHAAKNYIEQLVEKGYKVAVCEQVEDPKTAKGVVRREVVQLITPGTMMEGRTIDEKENNFLAALTHFEDGSYALACNDLTTGQNTVTLLTGSVEDILLEVYATGSKEIVVDSSFSKDELNKLTETLKMTISYEDATAIPEGLEHLVKNVSQAKLIKAVGRLFNYVIRTQKRSLDHLQPVEIYYTNQFMKIDVHSKRNLELTETLRTKEKTGSLLWLLDKTKTAMGGRMLKQWMERPLIQKERIEERLEMVETFVNDYFLREDLKEKLKEVYDLERLAGKVAFGNVNARDLLQLRRSLLQVPAILEAISLLDNAYAARLIQGADPCESLTELLGRSIQENPPLSIKDGDIIKDGYNDKLDQYRYVSKNGKTWIAELEKRERDITGIKSLKIGYNRIFGYYIEVTKANLGALPEGRYERKQTLANAERFITDELKEKETLILEAEEKIVQLEYDLFTALREEVKVFIPKLQHLAKVISELDVLQSFATVSEEEQFVKPVLTTKREIFIKDGRHPVVEKVLNGKLYVPNDCIMPENMDVFLITGPNMSGKSTYMRQLALVTVMSQIGCFVPATEAVLPVFDQIFTRIGAADDLISGQSTFMVEMLEAKNAIANASERSLILFDEIGRGTSTYDGMALAQAIIEHIHDQIGAKTLFSTHYHELTVLEDSLDQLKNVHVSAIEENGKVVFLHKIQDGAADKSYGIHVAQLAELPDSLIARAKEVLAQLEGQEEIVIPKRVEVKAQEQEVIPEPIVVKEEPIEIEETKVDNEEESQLSFFGAEQSSKKQDKPALDAKETAVLTQIKKIDLLDMTPLEAMNELYRLQKKLKKG

SEQ ID NO: 45893 - protein, 87 aa, Bacillus anthracis
MSERNQRKVYTGRVVSDKMDKTITVLVETYKTHSLYGKRVKYSKKYKAHDEQNQAKLGDIVKIMETRPLSATKRFRLVEIVEEAVII

SEQ ID NO: 45894 - protein, 425 aa, Bacillus anthracis
  MISC_FEATURE (71)..(71): X=any amino acid
  MISC_FEATURE (132)..(132): X=any amino acid
  MISC_FEATURE (197)..(197): X=any amino acid
LFKNGRYMNEEGKIVATDLLVQDGKIAKVAENITAEYAEVIDVNGKVIAPGLVDVHVHLREPGGEHKETIXTGTLAAAKGGFLSIWPMANTKPHFPICRDLLEDCQIRIKEKAPFLLYSLMGAITVRSGRFXNDEFPKPLKNLEPFAFTDDGVGVQDASMMLAAMKRAAKLNMAVIAHCEEKTLINKSCVHERKFSXETGLKRDPLNMGICTYLPRDILLAEAADCHYHVCHVSTKGSVRVIRDAKRAGIKVTAEVTPHHLVLCEDDIPSADPNFKMNPPLRGKEDHEALIEGLLDGTIDMIATDHAPHTAEEKAQGIERAPFGDTGVLNCIPTFYTQTLLKKGFIPLEQLIQFLTEKAADTFGLEARALKEGRTADITIIDLAQRGRDCPQHHCYQKEKIPPFPGWKCQGWPVMTIVGGKIAWQ

SEQ ID NO: 45895 - protein, 263 aa, Bacillus anthracis
MKQRIITGVVAAALFIPIVIYGGVPFTVLVYALASIGLYELIRMNKLTLISVPTVLAALLLWIILIPSSASELFTWIGLGKLEITFVIVLLLLSYTVLSKNTFTFDNASFLLMATTYVAMGFLYLNETRILGIKYVFCALFVIWATDSGAYFVGKALGKRKLWPEISPNKTIEGSLGGIVCGIIVALVYNMFFPVESNVLILIALTIIISIFGQIGDLVQSAFKRHYGVKDSGTILPGHGGILDRTDSWLFVLPILYFLLQYN

SEQ ID NO: 45896 - protein, 371 aa, Bacillus anthracis
MLFPDLANKIVREVRRLIKENIIIINIQGVIIASTDIERIGQFHEGALRCAKQKKTVIITKEDERRLHGVKAGMNLPLLFHDEVIGVIGITGEPENISQYGEILRKMTELLIHENYFLEQLELEHRSYEAFVFDWLQNTDWSPSFLDRAKTLGIDLYKKKQLILFSIDQNDTMLQRKIWQHVRNLLTKEHLFVRWGNDRFILFTAMSSKEQTYQFLKRLKQDCETLFSIPLYIGIGQSVTPSNMNLSYEQALQALSVSLATKKIVFNDDLRLEMCLQDISAETREQFLKRTIKNLLSSPELMHTLRLFIDYNQSYKQTAEQLHIHINTLHYRLKKIEEYTGLDPKQFKDLNILYFSLLLLDNHTKKNDKID

SEQ ID NO: 45897 - protein, 401 aa, Bacillus anthracis
MGATGVASQRKTIEESIERNKEKYIETSHDIHANPEIGNQEFYASRTLSLLLGSAGFQLQHNIAGHETGFIARKSSGKQGPAIAFLAEYDALPGLGHACGHNLIGTISVAAAIALSETLEEIGGEVVVFGTPAEEGGPNGSAKSSYVKAGLFKNIDAALMIHPSGKTATTSPSLAVDPLDFHFYGKTAHAAASPEEGINALDAVIQLYNSINALRQQLPSDVKIHGVITEGGKAPNIIPDYAAARFFIRAATRKRCAEVTEKVKNIAQGAALATDTKVKIHQFQNEIDELLVTKTYNDVVAEELELLGEDVNRKERFGIGSTDAGNVSQVVPTIHPYIKIGPDDLIAHTNEFREAARSELGDKALITSAKALANTAYRLITEEGLLEKVKEEFREAQRNQG

SEQ ID NO: 45898 - protein, 130 aa, Bacillus anthracis
MKRRTARERAMQALYQMDITGELEPKVAVENTLDEGEETNEFLESLVVGFVENKEVIDEAIRQNLKKWKLERISIVDRSILRVAVYEMKYMEGIPPNVTIKEANEMRKTFGDEESRRFINGVLSNIKDTL

SEQ ID NO: 45899 - protein, 282 aa, Bacillus anthracis
  MISC_FEATURE (168)..(168): X=any amino acid
YEALKWASSFLQENGRDENAGEIVLCHVLKTNRTGLLMNMREEITAEQETSFTEFIHKHVEGVFPIQYMIGHEMFYGRSFFVNERRFIPRPENRKLIVGVVKKNQAHFGDEKLHVADIGTGSGAISITLALENKNLHVYTVDIAQESIEVAKENAKTLGAEVTFYHGXFIIPFYETGQKLDGGVSNPPYIPEEDWRGLSPVVKEHEPKRALVGGEDRLYFYRRFMEELPNVLQKKAIVAFEIGVGQGEDVKGLLQQAFPHAHGEVVFDINGKDRMVFAEIEE

SEQ ID NO: 45900 - protein, 415 aa, Bacillus anthracis
  MISC_FEATURE (339)..(339): X=any amino acid
MNEVLAKGKKAKEIARELVLKSTEQKNEALSAIADQLILETAYILEENKKDIEEGKAKGFSDSLLDRLMLNEQRIVDMTEGIKQLIELRDPVGECVSAWERPNGLSIQEMRVPLGVVGMIYEARPNVTVDAATICLKTGNAVILRGSSSAIHSNKAIVAVIHRALKQTSLPQKSVQLIEDTTRDSAKQLFTMNDYLDVLIPRGGKQLIDTVVREASVPVLETGAGNCHVFIDETADKQMAFDIINAKTQRPSVCNAIETIVLHEKWAEQYGSELFSSLKKRGVELRGDQKALAMDSTIVLASEEDWGTEFLSLTPAVKLVSSIEEAIHHINTYGSMHSXSIISENEEKVSKFFVSCDAGALYHNASTRFTDGSEFRIWSRNLVSVTQKLHVRGTMGVPALTFYKIRIPWKWDNSK

SEQ ID NO: 45901 - protein, 257 aa, Bacillus anthracis
MFKNFPFFKGKKDTSFDHLVEEVKKGYIPEHIAIIMDGNGRWAKRRAMPRIAGHHEGMQVVKKITKFASKLNVKVLTLYAFSTENWKRPKKEVDYLMQLPEEFLGTFLPELIEENVQVRVIGQQDRLPTHTRRAMEKAMEETKENTGLILNFALNYGSRDEIVSAVQHMMKDSEEGKVRVEDVSEEMLSSYLMTSSLPDPELLIRTSGELRISNFMLWQIAYSEFWFTDVYWPDFTEEHLLNAITDFQHRGRRFGGV

SEQ ID NO: 45902 - protein, 192 aa, Bacillus anthracis
MREEKLRLRKQIIEHMNSLSKERYTTLSEQIVFSLYEQKEWAEAKTIGITLSMENEVNTYPIIEKAWKEGKRVVVPKCNKETRTMSFRQISNFDQLETVYMNLREPIPALTEEVNADEIDLQIVPGVAYTERGERIGYGGGYYDRYLVHYKGKTLSLAYSFQMVEHIPVEPFDKNVEKIITEKGTMVKNGLV

SEQ ID NO: 45903 - protein, 425 aa, Bacillus anthracis
  MISC_FEATURE (100)..(100): X=any amino acid
  MISC_FEATURE (207)..(207): X=any amino acid
  MISC_FEATURE (208)..(208): X=any amino acid
  MISC_FEATURE (217)..(217): X=any amino acid
  MISC_FEATURE (221)..(221): X=any amino acid
  MISC_FEATURE (226)..(226): X=any amino acid
  MISC_FEATURE (230)..(230): X=any amino acid
  MISC_FEATURE (251)..(251): X=any amino acid
  MISC_FEATURE (261)..(261): X=any amino acid
  MISC_FEATURE (424)..(424): X=any amino acid
NLSIAALENMKLKELYELAKEFRISFYSQFTKKEVILRILKARAEKEGFFFMEGVLEIIQSGRLGFPTSYQLLPSFRRIFYFSRKFRRLDLGKGDKVFWXSTTSKENERYFGLLQVEAVNGGVPGLAKGRVAFSCHNPHIPRSPNEIETEPKKLPTRIMDLIAPVGFGQRGLIVAPPKAGKTSLLKEIAHSVTTNHPEAELIVLLNXXAFRGKYQPXTFLXKEILXAYFXEVPENHINVAELVLERAMRLXEHKKRCYSFXWIVLPVLARAYNLVIPPSGRTLSGGIDPAAFHRPKRFFGAARNIEEGGSLTILATALVDTGSRMDDVIYEEFKGTGNMELHLDRSLAERRIFPAIDIRRSGTRKEDLLIPKEHLDKLWGIRKTMRDTPDFVESFLRKLRQTKTNEEFLQNIVADSKRYVTTKXR

SEQ ID NO: 45904 - protein, 444 aa, Bacillus anthracis
MHILVVSVNYRTAPVEFREKLTFQAAELERAMTTLQNQKSVLENVIVSTCNRTEIYAVVDQLHTGRYYIKKFLADWFQLEIEEVAPYLTIFEQDGAIDHLFRVTCGLDSMVVGETQILGQIKDSFLEAQQVKATGTIFNELFKQVITLAKRAHSETTIGESAMSVSYAAVELGKKIFGELTDCHVLILGAGKMGELALQNLYGSGARKVTVMNRTLSKAEIMAEKYMGHAKPLSELQCALLEADILISSTGASDYVITKEMMTKVEKMRSGRPLFMVDIAVPRDIDPAIDELEGSFLYDIDDLQGVVEANRAERLKEAEKIQFMIEEEIVLFKTWLSTLGVVPLISALRDKALAIQSETMESLERKIPNLSDRERKVISKHTKSIINQLLKDPILVAKEIAAEEGADEKLALFAKIFDLEMEDVESRAEEVEHKRVWTPSVPSL

SEQ ID NO: 45905 - protein, 248 aa, Bacillus anthracis
MMEKQKTFHVAVVGATGAVGEQMLNTLEKREFPIGKLTLLSSKRSAGKKLVFKGEEFTVQEATPESFEGVDIALFSAGGSVSKQLAPEAAKRGAIVVDNTSAFRMTENVPLVVPEVNENDLKEHNGIIANPNCSTIQMVVALEPVRQQYGLKRVIVSTYQAVSGAGAAAIEELHEQSQAILNGEEVKANVLPVSGDKKHFPIAFNAIPQIDKFQDNGFTFEEMKMINETKKIMHMPELEVAATWSSST

SEQ ID NO: 45906 - protein, 633 aa, Bacillus anthracis
NFFTRVKETQSTLLDGLEHRHYDGVNFIRDFTRYHQMTPKAVMPIVFTSMLAGAGAFSWEQLGSLRYIHARTPQVYLDNVVIEKNGELLISWNYVEELFDVDVIEAMFSQFVDLLEQLVKQSDITSLQMKESDQTLIKQYNETTEKIPSTTLYQLFTDQVKRTPDEVAVVFEQEWLTYSELHKRSNQIAHFLKEQGIGLGDKVGLLAKRRVDTIVNMLGILKAGAAYVPIDSDHPLDRQTYILKNSSCKLLLEPSLYEENDLSFYTTEDMPAIAGPEDIAYIIYTSGSTGKPKGVIITHQAVTNTIQDINQKYEVNEDDRIIGISSMCFDLSVYDIFGALSTGAMLVMIRDPRDMQELIRTVERRGITIWNTVPAIMDLALDQVGSHFEHSSLRLVLHSGDWIPLSLPEKIKRHFPIAEVVSLGGATEASIWSIYYPVKQVKSHWNSIPYGMPLANQTYYVLNYEKKMCPVGVIGDLYIGGVGLAKGYLNAEKKTNEAFVSHPDFGLIYKTGDCGKMHSEGYIEFLGRQDYQVKIQGYRVELEEISHCLLTYKQVEHAVVIDQTDENGIKFLVAYVVTEQNISTTELRKHLRDHLPDYMIPSYFVYLDQLPLTPNGKLDRTYLPVSTFPRSYL

SEQ ID NO: 45907 - protein, 751 aa, Bacillus anthracis
MQAYMSMTDRLLNGLNPQQQKAVQTTNGPLLLMAGAGSGKTRVLTHRIAYLLGEKGVAPWNVLAITFTNKAAREMRERIDTLVGPEAEDIWISTFHSMCVRILRRDIDHIGINRNFTILDSGDQLTVVKKIMKERNIDPKKFEPRSILAGISNAKNELLSADKYAKKITIADPYEKLTSDVYTEYQKRLLKNNSLDFDDLIMTTIQLFERVPEVLEFYQRKFQYIHVDEYQDTNKAQYLLVKHLAARFKNLCVVGDSDQSIYRWRGADISNILSFEKDYENAQVILLEQNYRSSQNILNAANAVIERNTNRKPKKLWTDNEVGSKISYYRAATEKDEAYFVAKKIRDDIQMGKRKYTDFAVLYRTNAQSRMVEEIFLKSNIPYKIVGGTKFYDRKEIKDILAYLRLIGNPDDEISFARIINVPKRGIGATSIDKIINYGVQNGISLTAVFDEIEHVGVSAKVTKAVKEFAGLLHNWVNMQEYLSVTELVEEVIEKTGYRDMLKNERTLEAEGRLENLDEFLSVTQTFESQSEDKSLVAFLTDLALVADIDRVDEDPTAGEEVILMTMHSAKGLEFPVVFIVGLEEGIFPHTRSLMEEDEMQEERRLAYVGITRAEEELYLSNAQMRTLFGRTSMNAASRFITEIPTELVESLNETAPKRETSFGAKGRVASSSKTTTTTRSRSAFARPAAKTTGGEQIGWAVGDKASHQKWGVGTVISVKGEGDAKELDIAFPSPIGVKRLLAKFAPVTKQ

SEQ ID NO: 45908 - protein, 383 aa, Bacillus anthracis
MYIEINTTEIRKREAEELVVRVLVSGGGTGGHIYPALALIREIKKLNPEARFLYIGTENGLESTIVPKAGIPFQSIVISGFKRKISLDNVKTVMRFLKGVQDSKRYIRRFNPDIVIGTGGYVCGPVVYAAAKLGIPTIVHEQNSVPGVTNKFLSRYVDKVAVCFEAAAEHFPQSKVVMTGNPRASEVMDQNGMKGKRSVGLSLPKKSVLIFGGSRGARPINDAFVEAIEQFGNKSYEILYVTGEVHYDKVMEAVKQKGNPNNVIIKPFIHNMPEVLTGVDLVVSRAGATTLAELTALGKPSVLIPSPYVTNNHQEKNARSVVDKGAAKMLLEKDLTAETLIRDIDEILLDAQTLQNMKLAAGQLGIPDAANKLYEVMNKLVKK

SEQ ID NO: 45909 - protein, 1288 aa, Bacillus anthracis
  MISC_FEATURE (36)..(36): X=any amino acid
  MISC_FEATURE (113)..(113): X=any amino acid
  MISC_FEATURE (396)..(396): X=any amino acid
  MISC_FEATURE (403)..(403): X=any amino acid
  MISC_FEATURE (426)..(426): X=any amino acid
  MISC_FEATURE (677)..(677): X=any amino acid
  MISC_FEATURE (692)..(692): X=any amino acid
  MISC_FEATURE (844)..(844): X=any amino acid
  MISC_FEATURE (845)..(845): X=any amino acid
  MISC_FEATURE (870)..(870): X=any amino acid
  MISC_FEATURE (873)..(873): X=any amino acid
  MISC_FEATURE (875)..(875): X=any amino acid
  MISC_FEATURE (882)..(882): X=any amino acid
  MISC_FEATURE (885)..(885): X=any amino acid
  MISC_FEATURE (929)..(929): X=any amino acid
  MISC_FEATURE (947)..(947): X=any amino acid
  MISC_FEATURE (950)..(950): X=any amino acid
  MISC_FEATURE (970)..(970): X=any amino acid
  MISC_FEATURE (1016)..(1016): X=any amino acid
  MISC_FEATURE (1051)..(1051): X=any amino acid
  MISC_FEATURE (1055)..(1055): X=any amino acid
  MISC_FEATURE (1082)..(1082): X=any amino acid
  MISC_FEATURE (1160)..(1160): X=any amino acid
  MISC_FEATURE (1164)..(1164): X=any amino acid
  MISC_FEATURE (1176)..(1176): X=any amino acid
  MISC_FEATURE (1190)..(1190): X=any amino acid
MPNSKKFRHSLSSAQSGMWLAQQLDPLNRIYIMGEXCRISGNINQEIFELAVRKVVMEAEALHVRLEEDEIGPWQVIEELQFHMHFIDVRKEENREEAVKVWMKNDLSMPVDXKKDTLFTEALIQVENNRFFWYQRIHHIVMDGYGFSLLSQKVAKEYTSLIEEPNKNEKPFGSLAKIVQEDMEYGESKQFQEDRAFWLEQVWDEPEVVSLAERAPRTSNGFLRETAYLSSSSTKTLLEDINVSLASWPEFIIAVTSIYMHKLTGANDIVLGLPMMGRLGSASIHTPSMVMNLVPLRLTVTPNITLAELLQQVSKEIQDVRRHHKYRHEELRRDLKLLGENQRLFGPLVNVMPFDYGLNFAGNRGITHNLSAGPVDDLSINVYKRFDENELMIQFXCNPEKIXWRGLALHKERFMDGLELVINGLXKRCVDWKINITLPEENQKVLFEWNETFSAEELISLPILFEKQVQKNPNKIAGTWYGIKLTYKELNERANELAHYLVEERIGAKSVVALVFPRSTEMVVSMLAVFKAGAAYLPIDPEYPAGAINYIVNDAKPSVDHPPIPLNSSILVIEDDIKEIELDSEEMTIALNTYSYMNIPLKNDESLLNPAYTIYTSGSTGNPKGVIVPMKALSNFLLAMDDIFSLNENDHLLAVTTFAFDISALEIYLPLISGAGXPIAQKEVIQRPFCGXRHCTRRKSDIMQATPKPLAGVSNGISRKLQGLNVLVGGEDTSSPFSKNIKRIGCTITNLYGPTETTIWSTVMNIDERESGMPPIGKPIWSTAVYVLDAGLQPVPPGVIGELYIAGGRACERIFRKTRVNGERFVAIPYGKTRGNACTVQAIXXNGQRWRLEYMSRADHQIKIRGFRNXTSXNXNGSTTTXKYXQAVVMVREDRPNDKRIIAYIVAEEKETIHLAEIRSYVSESLPNXMVPATFDLLEKFTLTANXKGXLKEIYLLPDYNGMTKERSCXKSGRKKYLCDLFAEVLGVSRISIDDNFFEMGGHSLLASRLMGRNSXNIKCRTKNWETIWIRTGAELAKTLGSSKKCTTSNXESKXTKEVPLSFAQRRLWFLNCLEGPSPYLXYSVSYSFVWKVERGSITGAIHDVVEKHETLRTIFPNVLGSSYQKILDMENLNLEIIKTKTCKDELENVLTQAVRYFSXPRWXTSSSCATFYNEXKPTWNTHFNSTIFXGDGWSLPPLREILQRRIKTMSGNQVHLETLPVQYADYALVQQQLLGDETTPESLISTQLDFLKKRLRRLPDQLELPSDYHRSNGNEVTGKKQFLFLYM

SEQ ID NO: 45910 - protein, 1177 aa, Bacillus anthracis
MTGQLVQYGRHRQRRSYARISEVLELPNLIEIQTSSYQWFLDEGLREMFQDISPIEDFTGNLSLEFIDYSLGEPKYSVDECKERDVTYAAPLRVKVRLINKETGEVKEQDVFMGDFPLMTETGTFVINGAERVIVSQLVRSPSVYYSGKVDKNGKRGFTATVIPNRGAWLEYETDAKDVVYVRIDRTRKLPVTVLLRALGFGSDQEITELLGDNEYLSNTLEKDNTDSTEKALLEIYERLRPGEPPTVENAKSLLVSRFFDPKRYDLANVGRYKINKKLHIKNRLFNQRLAETLVDPETGEILAAEGTILDRRTLDRILPYLEKNIGFKTAKPMGGVVEGDVELQSIKIYAPESEGERVINVIGNANITRDVKHITPGDILASISYFFNLLYKVGDTDDIDHLGNRRLRSVGELLQNQFRIGLSRMERVVRERMSIQDTNAITPQALINIRPVIAAIKEFFGSSQLSQFMDQTNPLAELTHKRRLSALGPGGLTRERAGFEVRDVHYSHYGRMCPIETPEGPNIGLINSLSSFAKVNEFGFIETPYRRVDPETGLVTGHVDYLTADEEDNYVVAQANMKLSEEGEFLDEDIVARFRGENIVTNKERIDYMDVSPKQVVSAATACIPFLENDDSNRALMGANMQRQAVPLMNPESPIVGTGMEYVSAKDSGAAVICKHPGIVERVEAREVWVRRYVEVDGQTVKGDLDRYKMQKFIRSNQGTCYNQRPIVSVGNEVVKGEILADGPSMELGELALGRNVLVGFMTWDGYNYEDAIIMSERLVKDDVYTSIHIEEYESEARDTKLGPEEITRDIPNVGEDALRNLDERGIIRVGAEVKDGDLLVGKVTPKGVTELTAEERLLHAIFGEKAREVRDTSLRVPHGGGGIILDVKVFNREDGDELPPGVNQLVRAYIVQKRKISEGDKMAGRHGNKGVISRILPEEDMPYLPDGTPIDIMLNPLGVPSRMNIGQVLELHLGMAARYLGIHIATPVFDGAREEDVWGTIEEAGMANDAKTILYDGRTGEPFDNRVSVGVMYMIKLAHMVDDKLHARSTGPYSLVTQQPLGGKAQFGGQRFGEMEVWALEAYGAAYTLQEILTVKSDDVIGRVKTYEAIVKGENVPEPGVPESFKVLIKELQSLGMDVKMMSSDDTEIEMRDTEDDDDHQSADKLNVEVETTKE

SEQ ID NO: 45911 - protein, 204 aa, Bacillus anthracis
STYPTLLKATIVTLQLTLTSRSLGSLIGLLFAFFRISNNKFLNSIAHVYMPIIRGTPLIVQIAILYFGITSVGCFTPFWAGAIALAIHNGAYITEIFRGSIQSVDRGQMEAARSLGMPYPLAMRRIVLPQAFRQSLPPLGNQFIIGLKDSSLVAYVGMAELWGSGLSIAASNFQQLDTYIIVWLYYLVLALLFTYLDNLLEKRL

SEQ ID NO: 45912 - protein, 164 aa, Bacillus anthracis
  MISC_FEATURE (51)..(51): X=any amino acid
  MISC_FEATURE (151)..(151): X=any amino acid
MKAIISYETPLEQAHFTAKNNEKDMFYKENTEESVEGSLKYDVLDAVRRIXRSTSAISSCNNISVADEGRRVVENRCKNRAGLIENEPGFQAIRVLRPLRNDTYVILTMWETELNFKDWTESRSFENAHKKRPAQAERTSSIQAHPHADSXKSIFSRPSFVTTF

SEQ ID NO: 45913 - protein, 317 aa, Bacillus anthracis
MNILETTNGWYKVSVNNKVGYVQKDSILLKNKLQSNNQYIVNANALNVRSEPNLESSILDVLPNGKFVTIQEEQGEWYKILHNGKAGYVQKAFVSNDSQPLVKGITVQNNTKYTVATPKLNVRSNASTSSALLGSLQNGTQLQVVETVGTWYKIRFGTGYGYVAKHYVVQNQTQSQTQTAQPTSIPAVFKFPTQGRISSTFDMRWEQMHYGIDIAAQGNVSIQAAAAGKVVKSYYSASYGNVVFIAHQINGKLYTTVYAHMKDRTVQAGDQVQAGQLVGHMGNTGHSYGQHLHFELHNGEWNFEKTNAVNPLPYLVR

SEQ ID NO: 45914 - protein, 397 aa, Bacillus anthracis
  MISC_FEATURE (80)..(80): X=any amino acid
  MISC_FEATURE (82)..(82): X=any amino acid
  MISC_FEATURE (91)..(91): X=any amino acid
  MISC_FEATURE (98)..(98): X=any amino acid
  MISC_FEATURE (219)..(219): X=any amino acid
  MISC_FEATURE (232)..(232): X=any amino acid
  MISC_FEATURE (264)..(264): X=any amino acid
PKIVVLGAGYGGMITTVRLQKALSVNEAEITLVNNHSYPYQATWLHESAAGTLQDEKICLDIQDVIDHKKGDFVPSPRCXNXRLVKNRFIXKDGELEXDSLVIGLGFESETFGITGLKEHAFSIANINATRQIREHMEASFAKYATEKRAMSLVTIVVGGAGFYWYRYVGELANRVPELCERVPMYPREKARNTGGRSGPTALPGFDPALVEYAVKHLXEKGVEIRHRSSNXRPTEEGIIVANGDDTELIKSETVSLGCRCSVXMVLGKSLGFEAMRGRVKVDEYMHAPGYEDVFMVGDAALIINEEINRPYPPTAQIAIQQGYNIAHNLTVLVRGKGEMKKFVFDNKGSVCSLGHDDAMGVVMGKKLTGWKASFMKKVIDNRYLFLLGGPLLVLKK

SEQ ID NO: 45915 - protein, 248 aa, Bacillus anthracis
MKNIDSVQNPRVKQWKKLQTKKERDKKGLFFVEGFHLVEEALKAGVVTELIVSDQTDLPKDWTVNVVEMYIVPEAIVKVLRETETTQGVFAVCEKHESEVALTDGKFLLLDGLQEPGNLGTIIRTADAAGIHAVVLGEGCVDAYNSKVLRSTQGSIFHLPIVKGNLKEWVDKLKENNVPVYGTALENGVPYGEVTPAGSFALIVGIEGNGVRQVILAKTDQNLYIPIYGGAESLNVAVAAGILLYYLQ

SEQ ID NO: 45916 - protein, 552 aa, Bacillus anthracis
MEKVKQTIRAPRGTELQTKGWVQEAALRMLMNNLDPEVAEKPEELVVYGGIGRAARNWESYQAIVDSLKTLESDETLLVQSGKPVAIFKSHEDAPRVLLANSNLVPKWANWDHFRELEKKGLMMYGQMTAGSWIYIGTQGILQGTYETFGEAARQHFGGSLKGTLTLTAGLGGMGGAQPLAVTMNGGVVIAIDVDKRSIDRRIEKRYCDMYTESLEEALAVANEYKEKKEPISIGLLGNAAEILPELVKRNITPDLVTDQTSAHDPLNGYIPVGYTLEEAAKLREEDPERYVQLSKESMTKHVEAMLAMQEKGAITFDYGNNIRQVAFDEGLKNAFDFPGFVPAFIRPLFCEGKGPFRWVALSGDPEDIYKTDEVILREFADNEHLCNWIRMARQQVEFQGLPSRICWLGYGERAKFGRIINEMVANGELSAPIVIGRDHLDCGSVASPNRETEAMKDGSDSVADWPILNALINSVNGASWVSVHHGGGVGMGYSLHAGMVIVADGTEAAAKRIERVLTSDPGMGVVRHVDAGYDLAVETAKEKGVNIPMMK

SEQ ID NO: 45917 - protein, 159 aa, Bacillus anthracis
  MISC_FEATURE (136)..(136): X=any amino acid
LIESLKPDVSIMDIEMPIQSGLDVAETLKKEKSACKVMILTTFARPGYFERAMKAGVHGYLLKDSPSEDLAASIRNVMKGKREISQDLMVGLWQEQNPLSDREKEVLLLAKEGKTANEIAKALYLSPGTVRNYISXVLTKLDAKNRIEAITIAEEKGWI

SEQ ID NO: 45918 - protein, 204 aa, Bacillus anthracis
MKVLKCGVMLLSILFVSQLHVYAEENRWTWPVEGQISDYFGTRHGKHYGIDVAAPIGTPVVAIQDGKVTRSYYSSSYGNVVFIKHGEYEAVYAHLNKRYVNQGDYISKGEKIGEVGNTGESRGAHLHLELHQGRWTMAKKNAMNPLLVLSEQRNEVVSSSLYVVQKGDTLVSIARKFSMTLKEIKEKNGLQQELIYPNQQLYVK

SEQ ID NO: 45919 - protein, 233 aa, Bacillus anthracis
  MISC_FEATURE (180)..(180): X=any amino acid
  MISC_FEATURE (197)..(197): X=any amino acid
ALVTGGSGGIGSAISKQLIQDGYTVYVHYNNSEEKVNELQKEWGEVIPVQANLASSDGAEQLWEQIEHPLDAIIYAAGKSIFGLVTDVTNDELNDMVELQVKSIYKLLSMALPSMIQRRSGKIVLVSSIRGQIGASCEVLYSMVKGAQNSYVKALAKEVSLSGIRVNAVAPGAIETEKCXTFFQKEIRNELAKEFPXGRLGFPERVAKTVSFLVSPGASYIPGQIYRSKWGWH

SEQ ID NO: 45920 - protein, 1029 aa, Bacillus anthracis
MRPIQLIMTAFGPYKQKEVIDFDDLGEHRIFAISGNTGAGKTTIFDAICYVLYGEASGEERSDTSMLRSQFADDNVYTSVELTFQLKGKRYEIKRQLGHKKQGNKTITGHAVELYEVIDEEKVPAVDRFHVTDVNKKVEDLIGLSKHQFSQIVMLPQGEFRKLLTSETENKEEILRRIFKTDRYKLMRELLDQKRKQWKDVLQEKQKERELYFRNVFKLPIRDGAILETLVEQEHVNTHQVVEALEQETAVYKAEVEQLQVEQDVQTKQLKDAETRFHAAKSVNEKFIDLQQKNEKYNTLQENRTVIEMKETSFKRAEQAKRLLPFEQWHEEAMQNEQKAESLLKQIIAKKENIMNNFELAQEKYEVVKNKESERENVKKLVQRLEELQPIIASLAEKQLNLQNAEIQIGKLKESMQNLDRQLEEHTNQKQLMTGELQQLEQALEQYVDKVEELTNMREDAKVLKQAYDVWQEKQKFEKEKEAAYSKMQLAVNAYENMERRWLSEQAGILALHLHDGESCPVCGSTTHPKKATEQSGAIDENELNGLRDKKNIAEKLHVQLEEKWNFYHHQYEQVIEEVKKRGYQSEELVETYSALVQKGKQLATEVNTLKASEETRKQIAVKIKSVEEKVDALQKQKREVETEQHRIEMDCMQLRTSYEHDKKNIPENLQTVQAWKVQFDQAMHELKLMEDEWKKVQEAYQHWQNENIRIQAEQEGATNQFESAKLKKEETFTRFMKELEQSGFTDQSTYKEAKLSDAEMELIQKEIQSYYSFLEVLAKQIEELHVELKDKEYMDITALGEHIKELEINLDIIKEKRQRAQNAVTYISDLHENIRRIDEQIHEEEKAFQELVDLYEVMKGDNESRISFERYILIEYLEQIVQIANERLRKLSNGQFYLKRSERVEKRNRQSGLGLDVYDAYTGQTRDVKTLSGGEKFNASLCLALGMADVIQAYEGGISIETMFIDEGFGSLDEESLTKAVDTLIDLQKSGRFIGVISHVQELKNAMPAVLEVTKQKDGCSQTRFVVK

SEQ ID NO: 45921 - protein, 268 aa, Bacillus anthracis
  MISC_FEATURE (199)..(199): X=any amino acid
  MISC_FEATURE (229)..(229): X=any amino acid
  MISC_FEATURE (242)..(242): X=any amino acid
  MISC_FEATURE (243)..(243): X=any amino acid
  MISC_FEATURE (245)..(245): X=any amino acid
YKMIVLDLDDTLLRDDHTISPRTKEALMTAQEQGVKVVLLSGRPTFGMRNVAKDFRLEEYGSFILSFNGAKIINCKTNEEIFSSTLSPEIVHNLFEISKTEGVWIHTYIGDDIVTEENNPYTEIEGDITGMPIVVVDDFKAAVKEPVVKVLMNKEAERLVEVEKKLQKQLEGQLSVMRSKPFFLEFLLELGVSKRNGAXTQIIQKGLSLKRERSYSQLAHSYNDQAMNXFSCLSVAMGNAPXXYXEIANYVTDTNMNDGVAKVVEKFV

SEQ ID NO: 45922 - protein, 350 aa, Bacillus anthracis
MDINLFDFHLPEELIAQVPLEERETSRLMVLDRETGDIEHKHFTDILSYLHEGDCLVLNETKVMPARLHGVKEDTGAHIEVLLLKQEEGDKWETLVKPAKRVKEGTVISFGEGKLKATCTGTADQGGRQLEFSYDGIFYEILDELGEMPLPPYIKETLEDRDRYQTVYAKEIGSAAAPTAGLHFTEELLEKLKQKGVELAFITLHVGLGTFRPVSADTIEEHHMHAEYYHMSEETAALLNRVKENGGRIITVGTTSTRTLETIATDHDGKLCAASGWTDIFMYPGYEFKAIDGLITNFHLPKSTLIMLVSAFANRDNVLHAYNEAVKEKYRFFSFGDAMFVASHAKMGNK

SEQ ID NO: 45923 - protein, 316 aa, Bacillus anthracis
  MISC_FEATURE (119)..(119): X=any amino acid
  MISC_FEATURE (155)..(155): X=any amino acid
VSFASETKKELTNLEMKECCEKAELSALLRMNGSLSFSNRRLSIDIQTENAAIAVRIYTLCKKRYDVTVELLVRKKMRLKKNNVYIVRLVEKSREILADLHIVRDDFSFIRNISQEFIXKKCCKRSYLRGAFLAGGSVNNPETSSYQFKIFSLYXGTNDAICELMNGFDLNSKTLERRKGYITYLKEAEKITEFLNIIGAHNALLRFEDIRIVRDMRNSVNRLVNCETANLNKTIGAALRQIENIRYIDETVGLDILPDKLREIAQLRRDYQDVTFERVREMVSGGKISKSGINHRLRKIDDIAEKLRAGETVAKK

SEQ ID NO: 45924 - protein, 429 aa, Bacillus anthracis
  MISC_FEATURE (198)..(198): X=any amino acid
  MISC_FEATURE (274)..(274): X=any amino acid
KRVEQKTADLQITKLELEEKQASCYGISKYKSEFLANMSHELRTPLNSILVLSEMLKENHDNHLSDDEIELATVIHSSGKDLLTLINDILDLSKVEAGKLDVIFEATNISDMAASMHQNFLHIAAQKNVEFTVEDSDTIPDLFYTDAKRIEQIIKNLLSNAFKFTEKGSVSLHFDSIETSNLSHDMQSISKDGLQFQXKNPGIGIAKNQHQLIFEAFQQADGATIRKYGGTGLGLSICKEFARLLGGWITLESHVGEGSTFTVIYSQPSKWITXCTVIQFEVAATVDEVIPAEVIEETIVLPEANNVFQEKTIMIVDDDHRNIFALQNALKKQHANIITAQNGLECLEILKNNTNIDLILMDIMMPNMDGYETMEHIRMNLGLHEIPIIALTAKAMPNDKEKCLSAGASDYISKPLNLHQLYSVMSVWL

SEQ ID NO: 45925 - protein, 143 aa, Bacillus anthracis
MSFNNLDTLYRQVIMDHYKNPRNHGVLEDSVTVNLNNPTCGDRIQLTMKVEEGIVQEAKFEGEGCSISMSSASMMTQAVKGKKIEEALQLSKIFSDMMLGKEYDDSIDLGDIEALQGVCKFPARIKCATLAWKALEKGLNEDK

SEQ ID NO: 45926 - protein, 408 aa, Bacillus anthracis
  MISC_FEATURE (30)..(30): X=any amino acid
  MISC_FEATURE (95)..(95): X=any amino acid
  MISC_FEATURE (129)..(129): X=any amino acid
  MISC_FEATURE (245)..(245): X=any amino acid
  MISC_FEATURE (247)..(247): X=any amino acid
  MISC_FEATURE (394)..(394): X=any amino acid
LESPRKILLMVNAGEITDKAMISLVPHPRXKVIFFIDGGNTYFVDTIRRNKRLPEEGINFIGPVVSGGEEGALKGPSIMPRGQKDAYEKVKDMLXNISAKVNNEALCSIIGPNGGRTYVKMVHNGFGVXDMPINLEAYFWKKTNTRFTAEEVHEIFAGWNKGELNSYLIEITADIFQKKNERNWGTIRGCYSLKLRTKGTGKWTSQSALDLGISLPIITESVFARCISALKRRACERKQSFICPXRXNSKGSEKSRLIEAVRQALYMSKICSYAQGFTQLKAASEEYNWNLDFGSISMLWRGGCIIRAAFLQNIKEAYETNTDLPNLLLDPYFKEIVESYQGGLRQIISMAVQQGIPIPAFSAAISYYDSYRTAKLPANLLQAQAGLFGSAYVXRSDKERYIPYKMDI

SEQ ID NO: 45927 - protein, 309 aa, Bacillus anthracis
  MISC_FEATURE (76)..(76): X=any amino acid
  MISC_FEATURE (114)..(114): X=any amino acid
  MISC_FEATURE (132)..(132): X=any amino acid
  MISC_FEATURE (140)..(140): X=any amino acid
  MISC_FEATURE (244)..(244): X=any amino acid
  MISC_FEATURE (248)..(248): X=any amino acid
  MISC_FEATURE (258)..(258): X=any amino acid
  MISC_FEATURE (277)..(277): X=any amino acid
  MISC_FEATURE (278)..(278): X=any amino acid
  MISC_FEATURE (302)..(302): X=any amino acid
  MISC_FEATURE (304)..(304): X=any amino acid
MNMQEVYEYLSTVLPEGHVKQDEMLKNHTHIKVYRKADVFRLRFTNYDEIQEVIKYANKYNIPVTFLGNGSNVIYXDRGNSRGLQVSFISYLPGFTVNKERQFVSTSAGAANIXTVSRIALDHNLTGLELEXGIPRFSCXVCIYMNAGAYGGEISFVLTEAVVMTGDGELRTLTKEAFEFGISIRVFLRTIPFPYFLKGGFELEEGGFMRNLRQKLDDLTFKRESKQPSRISFCGSVFNRPPKXLCWXMDSRIRVTSXANWLEWKFFKTTWIYGKCXXGTAQDYIDLIHFVQKTVEEKIWRXSXSGKLR

SEQ ID NO: 45928 - protein, 308 aa, Bacillus anthracis
MKKWLLILVACMMVITAGCSMEPPEWAKDSSDKGRNKTIKVGFSVSTLNNPFFVTLKKGAEKKAKESGIELIAVDAQNDAAKQTNDVEDLIQKGVDVVVINPTDSDAVASAVSAANAANVPVITVDRVANSGKVVSHIASNNIEGGQMASDYIRELVGEGANVAELEGIPGSSAARERGKGFHNVADKSLKVVAKQAADFDRAKGLSVMENILQANGDIKAVFAHNDEMALGALEALKSAGKTDVVVVGFDATEDAVKAVNDGRMAATVAQKPELIGEKAMQTAKEITQGKKVDKSIPIELELIKKNK

SEQ ID NO: 45929 - protein, 170 aa, Bacillus anthracis
  MISC_FEATURE (66)..(66): X=any amino acid
KKTMGTIKELVSIPSPSGNTEKIIRFIENYVSEWNVETKRNNKGALILTVKGKNDAQQPLLTAQRXTLGADGKEIKPDGRLSLSMIGGFRWNSVEGEYCEIETSSGKTYTGTILMHQTSVHVYKDAGEAKRDEKNIEVRIDERVFSADEVRELGIEVGDFVSFEPRVQIT

SEQ ID NO: 45930 - protein, 339 aa, Bacillus anthracis
  MISC_FEATURE (104)..(104): X=any amino acid
  MISC_FEATURE (266)..(266): X=any amino acid
  MISC_FEATURE (299)..(299): X=any amino acid
MTVTIKDVAKKANVAPSTVSRVIADNPSISEKTKRRVRKVMSELGYHPNFNARNLANQTTKTLGLVMPSSASKVFQNPFLPESIGGISSFPQWERVCLYMSTGXNGKMKFLTGVVKMVQGRQIGGIILLYSRENDRIIQYLHKRNFPFVLIGKPYDRTEEITYVDNDNYTAAREVAEYLISLSHIQIAFLRLRSDFTCNERRLAGMSDALKLADIVLPKEYILHFDFSRESGQPAVVGIMGAKQPPTAIMATDDLIGPGVVKCTFXKRFVVPQRMFSFVSFHQGFIYPEIGESAILTVXCEYIPARYEAAKALVDKVENAESTAKCIIIPHKLLKRQTC

SEQ ID NO: 45931 - protein, 294 aa, Bacillus anthracis
MKEYIAFDIGGTQIKYGIVSETGIVLKHKTVPTEIHLGGEQIIQKLILLSKKLMSEHTISGIGISTAGIVDVNKGVVTGGADHIPGYSTIPIINRLPEGLKVPASIENDVNCAALGRKWNGIGRKKKKFIMLSLGTGIGGASFLYRRVYYRRSYICWWNGGTCLIKREKFLRGRLHFSGEFFLCEIIKKKVIWNGKTIFELYDKGDRESYASQLRFFFKHLAIGISNLAYIFNPETIIIGGGITDRGNQFLKEVKEEVGRYLNKEIYSDCEIELAQNGNRAGLIGCYYPFLTSS

SEQ ID NO: 45932 - protein, 122 aa, Bacillus anthracis
  MISC_FEATURE (25)..(25): X=any amino acid
  MISC_FEATURE (106)..(106): X=any amino acid
MLSALIPSAHSYPAMPLAEQLVHQXCVHPGPLVLRTAPLKFPTPTTDRDRTVSRRFEPSSRTALMGEQPNPWDRLQPQDAMSRHRGAKPPRRCGLLGEISLLSPGXLLSVERWPFHAEPPDH

SEQ ID NO: 45933 - protein, 310 aa, Bacillus anthracis
  MISC_FEATURE (2)..(2): X=any amino acid
  MISC_FEATURE (5)..(5): X=any amino acid
  MISC_FEATURE (20)..(20): X=any amino acid
  MISC_FEATURE (89)..(89): X=any amino acid
  MISC_FEATURE (90)..(90): X=any amino acid
  MISC_FEATURE (136)..(136): X=any amino acid
  MISC_FEATURE (142)..(142): X=any amino acid
  MISC_FEATURE (147)..(147): X=any amino acid
  MISC_FEATURE (148)..(148): X=any amino acid
  MISC_FEATURE (155)..(155): X=any amino acid
  MISC_FEATURE (157)..(157): X=any amino acid
  MISC_FEATURE (164)..(164): X=any amino acid
  MISC_FEATURE (166)..(166): X=any amino acid
  MISC_FEATURE (171)..(171): X=any amino acid
  MISC_FEATURE (187)..(187): X=any amino acid
  MISC_FEATURE (218)..(218): X=any amino acid
  MISC_FEATURE (227)..(227): X=any amino acid
  MISC_FEATURE (299)..(299): X=any amino acid
  MISC_FEATURE (301)..(301): X=any amino acid
  MISC_FEATURE (306)..(306): X=any amino acid
RXRKXSFLGEDFGKKGGRIXRRHRGLYDHLGEDGGIDTPLCRSAFGGGRNGAAKYGNASKSMKMQFADFIHASQKPNLFGGSKNSLPFXXDGTCPITVRAPFGRRVFTEGVPSPSLEAILPNPPWLKNRYPFFPIXSKRAFXSCQRXXRSSIFLXAXTAYRFIXRXSARRXLRITNGKADVKREGEXYFGYHIRIMCSFCLQAAEKLAQVLILCTHSXFTYCISIRXEAIIEAASKTGKVLLVTEDNKEGSIMSEVAAIIAENCLFDLDAPIARLAGPDVPAMPYAPTKKKILYGKSRXSXKSNAXTAEF

SEQ ID NO: 45934 - protein, 399 aa, Bacillus anthracis
MDTLIFEVGTALVLVAIAAVIAGKFKFSVIPFLIVLGMLVGPHAPTIGVIDFKFIESASVISFLGRIGVLFLLFYLGLEFSMKKLIKSGRSIAIGGTIYILINFSLGLLYGFIMGFPLLEILIIAGIITISSSAIVAKVLVDLRRTGNNETELILGIIMFEDIFLAVYLSVVSGLVLGDHASFLGALTSIGIALGYMLLFFIVARKATPLLNKLLNISSDEIFIIVVFASLFFIAGFSETIHVAEAIGALLLGLVFSETEHSDRIEHLVVPFRDFFGAIFFFSFGLSIDPFSLGGAIWLTLGAVLLTIIGNFVAGMIAGRQAGLSHKASTNIGLTIVSRGEFSIIMANIGIAGGLMSVLKPFSALYVLILSILGPLLTKESKNVYKLLNKIFKWDMKKS

SEQ ID NO: 45935 - protein, 494 aa, Bacillus anthracis
MFQVQKELASHEAVVVALFEEEKTSSFVQELDKAFEGQLQVLLEEKELSTKKKAISKVHSLGKTDVKRYYFVGLGKKESYTTETLRSALGKTFKTLQAAKVQDAAILLDSFVTEKLDAIDVAHIAAEVQGLGTYELQTYKSDKKDRVELEKFTAITAEDAQEIEAALTVGYVHGRATNSARTLVNMPPNVLTATKLAEYAVELAEKYDMDYKVLEKEEMEELGMGALLAVNQGSVEPPKMIALIYKGKEEWTDVIGFVGKGITYDTGGYSLKPREGMVGMKGDMGGAAAVLGAMEIIGELRPEQNVIAVIPSTDNVVSGTAFKPDDVITSMSGKTIEVLNTDAEGRLALADGITYAKKLGANYLIDVATLTGGVIVALGNHTTGAMTNNEELFEQVLEASMETDESIWQLPIFDRDKERVRNSKFADLNNSPGREGHAVMAGTFIGEFAEDTPWVHLDIAGTSESSGAHDLGPAGATGAMVRTLATLVERFGEE

SEQ ID NO: 45936 - protein, 225 aa, Bacillus anthracis
MDKRISIAIDGPAAAGKSTVAKVVAKKLSYVYIDTGAMYRTITYAALEQKVDIENEEQLMEVVKNVKIEFQQGENTQLVFLNGQDVSEVIRTPEVTNRVSIVAKHRLVREEMVRRQQELAEKGGVVMDGRDIGTHVLPDAEVKIFMLASVEERAERRHLENMNKGFDSNLEQLKEEIAQRDKLDSEREVSPLKKADDALELDTTSLSIEEVVQKIMGIVLGVFAK

SEQ ID NO: 45937 - protein, 311 aa, Bacillus anthracis
  MISC_FEATURE (21)..(21): X=any amino acid
  MISC_FEATURE (63)..(63): X=any amino acid
  MISC_FEATURE (69)..(69): X=any amino acid
  MISC_FEATURE (134)..(134): X=any amino acid
  MISC_FEATURE (235)..(235): X=any amino acid
  MISC_FEATURE (250)..(250): X=any amino acid
  MISC_FEATURE (265)..(265): X=any amino acid
  MISC_FEATURE (306)..(306): X=any amino acid
WFQWACVIFDYQIYLYGGELXDMQIGYYIEQRIQGLNTFLFEVERGNFPRGFSVSGPEEEFFXRGTKRXSFGLVGLEEASLASSKKVPNGRSSFELRREDKRRFPKESLGWAEEVAVSVSQQLFANVMMSSGYXGQVAGISGTDEKGSGRLLKNMVVNAHSGMRALLSPFRPFQLEVKNLPGGMEDLLPDLFGKHHMKLEWLMDPIQLKKGVEDHLFRMVQEALSNTLRHAIAHXNGKYVYAKLSNMQYXKIIDDGVGFKVGSDXGWFLGLRSMQERVHEIGGTLKVLSFPNKGTQIEVKSSDYDXERGEN

SEQ ID NO: 45938 - protein, 366 aa, Bacillus anthracis
MGLPAGIVGLPNVGKSTLFNAITQAGAESANYPFCTMNPNVGIVEVPDERLNKLTELVEPKKTVPTVFEFTDIAGIVKGASKGEGLGNKFLSHIRQVDAICQVVRCFEDENITHVSGKVDPIDDIETINLELILADLESVDKRIERVAKLARQKDKEPSYEHEILVRLKEAFEEGKPARTVEFTEEQMKIVKGLHLLTTKEMVIVANVSEDDVIDPSENKYVQMVKEFAANENSQVIVVCAKIESEIAELDEEEKKVFLEELGIEESGLDQLIRAAYDLLGLATYFTAGVQEVRAWTFKQGMKAPQCAGVIHTDFERGFIRAETVSYEDLMTNGSMTAAKEAGKVRLEGKEYIVKDGDVMHFRFNV

SEQ ID NO: 45939 - protein, 440 aa, Bacillus anthracis
EELSVKNKAYVWHPFTQMKDYLEEDPVIIERGEGRKLYDVNGNEYWDGVSSIWLNVHGHQVPELDEAIREQLNKIAHSTMLGLANVPSILLAEKIIEVVTEGLKKVFYSDSGSSAVEIAIKMAFQYWQHKGKPKKQRFVTLKEAYHGDTIGAVSVGAIDLFYQVVSTLLFEAIKMPYPYTYRSPYGNDKAEIVKKHLEEMEELLKDKHEEIAAIIVEPLMQGAGGMITMPKGYLRGLRNLCTKYNVLFITDEVATGFGRTGKMFACEHENVTPDILTAGKGLTGGYLPVAITVTTDEIYNAFLRSYEEQKTFFHGHSYTGESLGCAVAIANLELYEKTNLIEEVARKTEYVATQLEELFACKHVGDIRQCGLMVGIELVKNKETKEAFEWTERVGVQVCKRSRELGMILRPLGNTIVFMPPLASTIDEIDEMLRILYKAI

SEQ ID NO: 45940 - protein, 356 aa, Bacillus anthracis
  MISC_FEATURE (167)..(167): X=any amino acid
  MISC_FEATURE (209)..(209): X=any amino acid
  MISC_FEATURE (342)..(342): X=any amino acid
MRMGYPAEIKNNEKRVAMTPAGVVHLIRNNHEVFIQKGAGLGSGFTDAQYVEAGAKIVDTAEEAWNMEMVMKVKEPIESEYKHLQEGLILFTYLHLAPEPELTKALIEKKVVSIAYETVQLEKTVFLPLLAPYEGSVGRMAAQIGAQSLEKNKAGKGILLAGVPRGXTWKVTIIGGGQAGTNAAKIAVWTRCGWTILDLSAERLPPIRXYFRKSSKNFNSNPYNIAEAVKESDLVIGAVLIPGAKAPKLVTEEMIKSMEPGSVVVDIAIDQGGIFETTDRITTHDNPTYEKHGVVHYAVQNMAGGVSTYITSCINNVTVPYAVQIANKGYKKNLAKEPPHYXKGFKPLKGYVPFGA

SEQ ID NO: 45941 - protein, 253 aa, Bacillus anthracis
MKGMKGMDNNAPHGFFGGGSDSYEQMMLMGGAGQQGYGGIPSWMGGSPGGFSTSVAGVQTGMPTSMGGFSTSGAGMPTVTGGFPTSVAGVQTGFPVPGVGVVAGGIGGFPQVIHGHHGHHHHQGHQGHHGHQGHHHHQGHHGHHGHHHHQGHHGHHGHHQQQVHHHGHHHIHPQAILYQTHQGHQGHHDHHGHHGHQGHHGQHSQQHQQHQQYQQYQQQSSPWAGGIGAGAAGAAAGAASISGAAGHAGHVGH

SEQ ID NO: 45942 - protein, 645 aa, Bacillus anthracis
MADVVKITFPDGAVKEFPKGVTTEEIAASISPGLKKKAVAGKLNDEMIDLVTPIEEDGAVSIITLDSEDGLYILRHSTAHLLAQALKRLYKDVKVELGIGPVIENGFYYDIDMEEAITVEDFKKIEKEMQKIVNENLEIVRHEVPRAEAIRRFEEIGDELKLDLINDLPEDAVISIYEQGEFFDLCRGVHLPSTGKIKVFKLLSVAGAYWRGDSNNKMLQRIYGTAFVKKAELDEHLRMLEEAKERDHRKLGKELKLFTNSQKVGQGLPLWLPKGATIRRIIERYIVDKEASLGYDHVYTPVLGSRELYETSGHWNHYRDGMFPSMEMDNEELVLRPMNCPHHMMVYKNDIHSYRELPIRIAELGTMHRYEMSGALSGLQRVRGMTLNDAHIFVRPDQIKEELKRVVNLTLEVYKDFGLENYSFRLSYRDPEDTKKYYADDEMWEKAQGMLKEAMDEMGLDYYEAEGEAAFYGPKLDVQVRTALGKDETLSTVQLDFLLPERFELSYVGEDGKQHRPVVIHRGVVSTMERFVAFLIEEYKGAFPTWLAPVQVQVIPVSPQVHLDYAKKVQDELRRAGIRVELDTREEKIGYKIREAQMQKIPYMLVVGDNEVTENGVNVRKYGEQKSETIALDAFVDMIKVEGKR

SEQ ID NO: 45943 - protein, 185 aa, Bacillus anthracis
MYILAIAAFVVGTVELIIGGTLDLVANDLGVSISAAGQLITIFSVVFALSGPVLLALTGKFERKTLYVGALSIFLIGNIISACSVNYGMLMFSRVICAASGSLIIALSVTLASSVVEPHFRARAIGIIFMGISGSLVLGVPLGLVLGNAYGWRAPFVLISILTVMAIACISLFLTKVTPTSVFHL

SEQ ID NO: 45944 - protein, 238 aa, Bacillus anthracis
MKVTLFVTCLVDMFETKVGKATVEWLEGLSLEIEFPGGQGCLGQPAYNSGHVEAAKEAMKHMIETFEDAEYIVTPSGSCATMFHEYPHVFKDDPKWAKRAQKVADKTYEFTQFIVDVFKVTDVGASLTGNCYIHKSCHMTRMLGVTEAPGDLLSKCKGLTVRELPNVQNCCGFGGTFSVKMTPISEQMVDEKVDSAMETGADYLIGADCGCLLNIGGRIERLGKEIKVMHIAEVLNSR

SEQ ID NO: 45945 - protein, 168 aa, Bacillus anthracis
MPLTPLDIHNKEFGRGFRGYDEDQVNEFLDQIIKDYELVIREKKALEEKVAQLEGKLDHFSNIEDTLNKSIVVAQEAAEEVKRNAQKEAKLIVREAEKNADRIINEALVKSRKVAFDIEELKKQAKVFRTRFRMLLETQLEMLNNDDWDKLIELEDEVDELLKKEETV

SEQ ID NO: 45946 - protein, 261 aa, Bacillus anthracis
  MISC_FEATURE (66)..(66): X=any amino acid
  MISC_FEATURE (82)..(82): X=any amino acid
  MISC_FEATURE (197)..(197): X=any amino acid
VKQRIITGVVAAALFIPIVIYGGVPFTVLVYALASIGLYELIRMNKLTLISVPTGFSCIIIMGLFXFQVVHRELFTWIGLGXLEITLVIGLLLLSYTVLSKNTFTFGMASFLLMATTYVAMGFLYLNETRILGIKYVFCALFVIWATDSGAYFVGKALGKRKLWPEISPNKTIEGSLGGIVCGIIVALVYNMFFPSXIECIDFIALTIIISIFGQIGDLVQSAFKRHYGGKKSGAIFTWHGGILDRTDSWLFVLPILYFLL

SEQ ID NO: 45947 - protein, 280 aa, Bacillus anthracis
  MISC_FEATURE (94)..(94): X=any amino acid
  MISC_FEATURE (125)..(125): X=any amino acid
  MISC_FEATURE (138)..(138): X=any amino acid
  MISC_FEATURE (191)..(191): X=any amino acid
DYLLKALPFDGKVRAYSVRTDTRVSDAHRRHDTWRTASAALGRSLTAGTMMGAMLKGDQKLTIKVEGTCSIGPILVDAHANGDVRGYVTNPTCXFEGTEQGEITCYQAVGTEGFVTVIKDIGYAXRFMVQSPIVQGEXGEDFTYYFAVSEQTPSSVGVGVPCKWRRSILAAGGLSLQIIAGCTGRDNFIHXERLQKIPPVSTLIEQGLSPRRVTVCSPWEDKVKVLETMDVQFNCTCSRERIESVLISLGKTELEQSRRRRRRTRSLCHFCNERYKFSKE

SEQ ID NO: 45948 - protein, 338 aa, Bacillus anthracis
MNKFGFNQKTGIDLPGESKNTLLLNTQIQQVTTSFGQGSTVTPIQLIQAATAIANDGKMMQPYIVDKVVNPTNKQVIMENQPKEIGNPIKKETADKVRDLMERVITSSKGTGTMYKVDGYPIGGKTGTAQIPNPENGRYMEGKENYIFSFLGMAPIDDPELIVYLAIKQPKLKGDEYGAQPLAEIFKPVVKNSLEYLKVRPYTEKQMADATEKSQLKVQNYVNQSMGTVENNVKKEKLQPITLGEGKIIKQYPQSGEVMSEGDRIFLLGKNATMPNLQGWSMRDVMYFSKLLKLDLKTSGTGYVTSQSIKKGQAIQEGDVLELELEPPLQPLTEANTN

SEQ ID NO: 45949 - protein, 198 aa, Bacillus anthracis
MYFLLGYIGASNGNLGQFENGGQLLATVMYHFFGTSGNVLLSIAIIFACLTTAIGVVSAFANYFATVLTNVSYKKLVLYVCIFSFIISNLGLSLLIKITLPVLIILYPITIILIFVSFIDKYTKRKPSVYIGAMIAAFLISCIHALDNVGMIPNFIANIVHTIPFYNLGIGWIIPAIIGGIIGYFIPQTEAEGEVSTK

SEQ ID NO: 45950 - protein, 658 aa, Bacillus anthracis
  MISC_FEATURE (61)..(61): X=any amino acid
  MISC_FEATURE (87)..(87): X=any amino acid
  MISC_FEATURE (183)..(183): X=any amino acid
  MISC_FEATURE (187)..(187): X=any amino acid
  MISC_FEATURE (251)..(251): X=any amino acid
  MISC_FEATURE (267)..(267): X=any amino acid
  MISC_FEATURE (404)..(404): X=any amino acid
  MISC_FEATURE (494)..(494): X=any amino acid
  MISC_FEATURE (556)..(556): X=any amino acid
  MISC_FEATURE (607)..(607): X=any amino acid
MNKKSIRDVDLKGKRVFCRVDFNVPMKEGKITDETRIRAALPTIQYLVEQGAKVYFSKATXGRPKGSSSEEFTSTPVAARLGELSWXDVKKADEAFGPSCTKKWLQAMNESDVLVLENVRFYAGEEKNDAELAKEFAALAGHLRNEAFRGSSTVLWVTTAGMRRLPTKSFCFIKEKRVGSFGXALFXPRKVHSKVIFGGGGRKRKKPGLFRPSIKQRKNFNFRGGELVHNFLKAFGPEIGSFLYGKAAKVXSRLKEFYATSKEKRGXPFSMPGGVCIQGGFSESAPIKLVGMDSIPSNWEGVDIGPKTREIYADVIKNSKLVVWNGPMGVFEMTPFAEGTKAVGQALADAEGTYSVIGGGDSAAAVEKFGMADKMSHISTGGGASLEFMEGKELPGVVCLNDKXVAAKEKGRCKACVNQLSQVTGKMNKTLSEAVSFVEEVKGQIPAASAVDAVVCSPALFLERLVAATEGTDLQVGAQNMHFEKKWCIHWRNXPSSLSDLKVGYVVLGHSERREMFAETDESVTKKLFAAFEHGLTPFVCCGETVDERESGKTIXPSSTSSDKSTAGLTEEQVKATVIAYEPIWAIGTSKSFFFCRCKRNMCALPXSCCRSCFSSCCRAVRIQYGGSVKPENIKEYMAQSDIDGALVGGASLEPCFV

SEQ ID NO: 45951 - protein, 570 aa, Bacillus anthracis
  MISC_FEATURE (332)..(332): X=any amino acid
  MISC_FEATURE (434)..(434): X=any amino acid
  MISC_FEATURE (451)..(451): X=any amino acid
  MISC_FEATURE (475)..(475): X=any amino acid
  MISC_FEATURE (529)..(529): X=any amino acid
  MISC_FEATURE (532)..(532): X=any amino acid
VSYQALYRTWRPQKFEDVVGQKHVTKILQNALLQEKVSHAYLFSGPRGTGKTTIAKVFAKAINCETAPGTEPWNEGPPGLGITQGSISDVLEIDAASNNGVDEIRDIRDKVKYAPSAVEYKVYIIDEVHMGFLWCAFNGRFLKTLEEPPGHVIFILGDTEPHKIPPTIISRCQRFEFRKISVNDIVERLSTGVTNEGTQVEEEGLPIGARALKGGWVKALILMDQGNFIREERVTTEDVLTVNGSVSQQYLGQLSKVYNVKNDVSRALRIIDEMMGKGKDPVRFMEDFIYYYRDMLLYQTSPQLEHMLERVMVDEQFRYVRVKERQPGKLIXGIHFILLGRGQQEMTRGQIIREIFFRSRYVTTCHQFMMQANGADRLQAIMNRMQQLEKELDQVKKNGVPVGLQQEVKETGAAPKPVRTGSMKILVGRVNEVXNQAKRQDLERIKSCVGXVTRKTKAYNKVAFAVLIRKLGTQXQAWEDTYVLAFQYEIRCKMASENREAMDTVEQALFELVSKKLNMIAIPKSEWGXNSXRFFKTEGGSSEESPEKKEDPLIEEAIKLVGQELIEIKE

SEQ ID NO: 45952 - protein, 314 aa, Bacillus anthracis
  MISC_FEATURE (37)..(37): X=any amino acid
  MISC_FEATURE (293)..(293): X=any amino acid
  MISC_FEATURE (302)..(302): X=any amino acid
  MISC_FEATURE (303)..(303): X=any amino acid
  MISC_FEATURE (311)..(311): X=any amino acid
PATIITGFLGSGEKTLFNRNFTKNHVQKFTGDPKLKXGELGSHNHIDMNVEEEIMEMTNGCLCCTVREDLLVALKQLLDVKAEGKMDFDGLVIETTGLANPGPIIQTFFLDPVIQSAYQINGVVTVVDSYHIHKHFEKGLEAKEQIAFADVILVNKLDLIEESEKENLLHELQGINPTAKLIQSTNCDVDIPSLLKIQTFKTKDTLQIYPHKEHNHLEGVKSFVLREERPLDLQKLNEWMSAVVQELGEYLYRYKGILSIDGVDKRIVFQGVHTLFAASYDREWQEGEERVKXKVFIGKRYXXRMVPRTFXGVC

SEQ ID NO: 45953 - protein, 174 aa, Bacillus anthracis
  MISC_FEATURE (64)..(64): X=any amino acid
LMNRVILVGRLTKDPDLRYTPNGVAVATFTLAVNRAFANQQGEREADFINCVIWRKQAENVAHXFKKGSLAGVDGRLQTRNYEGQDGRRVYVTEVSAERVHFLKPRNGGGENVGPFIRQPSRAGFGNPGSNPFGQSNNFGPPRVPRGTLGFPKNDDPFSNVGQPIDISDDDLPF

SEQ ID NO: 45954 - protein, 122 aa, Bacillus anthracis; identical to SEQ ID NO: 45315
  MISC_FEATURE (106)..(106): X=any amino acid

SEQ ID NO: 45955 - protein, 251 aa, Bacillus anthracis
ILDVTSLSLGMETRGGVVTKLIERNNTFHPSKSQVFSTAADNQPAVDIHVLQGERPMSADNKTLGRFQLTDLPPAPRGIPQIEVTFDIDANGIVNVRAKDLGTSKEQAITIQSSSGLSDEEVERMVQEAEANADADQKRKEEVELRNEADQLVFQTDKVVKDLEGKVDAAEVAKATEAKEALQAAIEKNELEEIRAKKDALQEIVQQLTVKLYEQAQAAAGQAEGAEGAQDAGAKKDNVVDAEFEEVKEDK

SEQ ID NO: 45956 - protein, 252 aa, Bacillus anthracis
  MISC_FEATURE (169)..(169): X=any amino acid
  MISC_FEATURE (176)..(176): X=any amino acid
KVIKLQDRVPKLKNQQKKKKKNVNHRLILYISILFLLVLFLIYFRSPLSNIKKISVFGNHYMTDEQVMKESGVTYDTSYFRVTAHKAEENLTKRKEIKAVNVKKRFPNKIDVHIEEYLTIGYINKDGKLQPLLENGKTLDVLPNGKLPVAAPIFEPFKEKKMKELLLSXKIPTTIXRSISEIRYSPTNANEDHLTLYMNEGYEVSTSIKNFAKRMETYPLILKTIEPGKKVLIDLEVGAYTKELGAEEKKNR

SEQ ID NO: 45957 - protein, 144 aa, Bacillus anthracis
MLMPKRVKYRREHRGKMRGRAKGGTEIAFGEFGLQAQAASWITNRQIEAARRAMTRYMKRGGKVWIKIFPSKPYTAKPLEVRMGSGKGAPEGWVAVVKPGKIMFEIAGVSEEVAREALRLAAHKLPVKCKFVKREENGGESNEN

SEQ ID NO: 45958 - protein, 333 aa, Bacillus anthracis
MAEVKEKRHEELGLSDEQVLEMFRTMLLARKIDERMWLLNRAGKIPFVISCQGQEAAQVGAAFALDREKDYALPYYRDMGVVLAFGMTAKELMLSGFAKAGDPNSGGRQMPGHFGQKKNRIVTGSSPVTTQVPHAVGIALAGKMEKKDLVTFVTFGEGSSNQGDFHEGANFAGVHKLPVIFMCENNKYAISIPVEKQLACKNVSDRAIGYGMPGYTVDGNDPLAVYKAVKEAADRGRRGEGPTLIETVSYRLTAHSSDDDDRVYRDKEEVEEAKKNDSIVTFAAYLKEVGVLTEESEKQMLDEIMHIVNEATEYAENAPYAAPEDALKHVYAE

SEQ ID NO: 45959 - protein, 145 aa, Bacillus anthracis
MDELYKKLKAYVDNNGISQVNVYREDTGVSVVIVDNLIFDTGDANVKPEAKEIISQLVGFFQSVPNPIVVEGHTDSRPIHNDKFPSNWELSSARAANMIHHLIEVYNVDDKRLAAVGYADTKPVVPNDSPQNWEKNRRVVIYIKE

SEQ ID NO: 45960 - protein, 221 aa, Bacillus anthracis
  MISC_FEATURE (83)..(83): X=any amino acid
  MISC_FEATURE (87)..(87): X=any amino acid
ENKSFLDEWGKVIWEATIQTFQMTSIALIISILIALPLGVTLVVTRPGGQHENKTGYSIPNTIINIIRSPPFITLLIFHFTLXQNFXWGTSIGVQGVIVPLVVFTAPYIARLMETALLEVDRGVIEAYQAMGVSTIQIIWHVMVKEARPSLVLGLTIATIGLIGATAMAVLVGAGGLGDLAYRFGHLRYEPEVMYATVFILIILVQGLQSLGNGIARRLKK

SEQ ID NO: 45961 - protein, 225 aa, Bacillus anthracis
MNGIRDVVKEEQPRERLLLEGAGSLSNRELLAVLLRTGSKEESVLKLSDKILHHFDGLRMLKDATLEELVSIHGVGVAKATQLIAAFELGRRMVRLEYQNRYSIRSPEDCATYMMEEMRFLQQEHFVCLYLNTKNQVIHRQTIFIGSLNSSIVHPREVFKEAFRRAAASIICLHNHPSGDPAPSREDIEVTKRLVECGRIIGIEVLDHIIIGDHKFVSLKEKGHI

SEQ ID NO: 45962 - protein, 439 aa, Bacillus anthracis
MNGNTAKKIEVQAENTALNNEQYADPKKWHKQDTTWALSLFGTAIGAGVLFLPINAGSGGLLSLLLITLLAYPVMYYSHRALAKMIYASNSADEGITGTIREYFGNKASIIFNIVYFGSIYTIVLMYSVALTNTASSFIVHQLHMPEPPRAILSLVLVLGLIAILNFGQDITVKVMSMLVYPFIVSLLFIAISLIPQWNTSMLSFSAVSTASTGTGYFGTIVMILPIIVFSFNHSPMISSFVVKQRATYGIEATDAKCAQIQKVCYIMTFAVVMFFVWSSALSLTPDDIKMAKEQNLLILSYLANELNSPVITIAAPIIAFVAITKSFLGHYIGAFEVMRDMIIKFGKSRGKDIEEKTIKTIILTFVVLSCWFVAYTNPSILGLIDSLSGPLVAAILCLLPMYAIQKVPVLAKYKGKMSNVFVIIVGVLTVLASIKSLF

SEQ ID NO: 45963 - protein, 337 aa, Bacillus anthracis
MQERYSRQILFSGVGEEGQRKIREKHVLIIGAGALGAANAEAIVRAGVGKITIADRDYVEWSNLQRQQLYTEEDAKQYKPKAVAAAEYLKAINSEVEINPVVTDVTVQEMEELVKDVDLILDATDNFETRLLINDISQKYNIPWIYGGCVGSYGVTYTIVPGKTPCFRCLMEHPASGATCDTAGIIQPAVQLVVAHQITEALKILVEDFEALRETMLSFDLWNNQQMAFKVNRQKKDTCLSCGRLRTYPSLTFEAQTKTEVLCGRNTVQIRPGVRNEFNLEEIKKRLQRSVDVKATPYLVSFLVEEFRFVLFTDGRAFIHGTNDINVAKRLYTRYIG

SEQ ID NO: 45964 - protein, 249 aa, Bacillus anthracis
  MISC_FEATURE (85)..(85): X=any amino acid
  MISC_FEATURE (151)..(151): X=any amino acid
  MISC_FEATURE (189)..(189): X=any amino acid
KERKKKIFFQRILYVVFLSTFFYSVYELSDIFMDYYENRKGMAEAPKFYEKSPMEEQSQDGEVRKQFKGPAAINQEIVGMIFDGXTQINYPIVSSERQDYYLFRNYKGEDMRAGSIFMDYRNDVKSQNRNTILYGHRMKDGSMFGSLKKKXEKEFFMSHRKLYSDTLFEGYVLEVFSVYTPPTDFLLHXNGFSSDTEYTSFLEKIQEKSLYKTDTTVTAGDQIVTLSTCDYALDPEAGRLVVHAKLVKR

SEQ ID NO: 45965 - protein, 178 aa, Bacillus anthracis
MKKRLVMIGNGMAGIRCMEEILKHDCDSYEITIFGDEPHPNYNRIMLSHVLQGKTNIQDIIMNEYSWYEENEITLYTNERVQSIDREEKVIMTEKNRTLTYDKLIIATGSSAFILPVEGSTLPGVTGFRTIEDTQFMMDTAKEKKKAVVIGGGLLGLEAARGLIDLGMDVHVVHLMPS

SEQ ID NO: 45966 - protein, 327 aa, Bacillus anthracis
MTKTWEQLSAIQPIGVKMLMNSIAKERISHAYLLEGEKGTGKFATAIQMAKSFLCSQRNRVEPCHVCTNCKRIDSGNHPNLHIVKPDGLSIKKQQIHDLQEEFSKTGLEANKKVYIIEHADRMTANAANALLKFLEEPSSDTTAILLTEQSHQILNTILSRCQVVTFRPLPTESLIRRLQDEGITVSLSTLAAQLTNSFDEALTLCNDEWFAQARALVIKLCEALEKDKASIFFVQEKWGKHFGEKEQLQQGLDMLLLIYKDLLYVQLGEEDRLVFREQKEMFESFSYAQKRIVSALFNILEAKNRINANVNAQLVFEQLVLRLQEG

SEQ ID NO: 45967 - protein, 233 aa, Bacillus anthracis
  MISC_FEATURE (64)..(64): X=any amino acid
  MISC_FEATURE (96)..(96): X=any amino acid
  MISC_FEATURE (107)..(107): X=any amino acid
  MISC_FEATURE (135)..(135): X=any amino acid
  MISC_FEATURE (181)..(181): X=any amino acid
EKPVNFTISAAASLQDALKEIETKYKEKEPNIKLSFNFGASGALQQQIEQGALADLFFSAAEDXIPKLLLKKDSLMKRKGKNLLGNELVLSRPKRXFSYKNSRFKRXKNKKIALLAHLFSVPLRGKYRKSFFHTXKSLEMTFKIKVIFPKDAPQVLTYVETGNVDAGIVYKSRCSHFRQKXKLGETAATTSHEPIHYPLGVIKESKHKKEATSFYEYLQSKDAQSIFKKYGFT

SEQ ID NO: 45968 - protein, 72 aa, Bacillus anthracis
NKFRVCDDCQATNVKTLIPKLKKLDSCATIEVGCQSYCGPGRKKSFAFVNNRPVAAPTEDELIVKIEAKLNK

SEQ ID NO: 45969 - protein, 203 aa, Bacillus anthracis
MKPLYMTAIAALATFILGLILGLLLFMTAKDNLWENKAVNTAIGAFVNIFRSIPFIILIILLIPFTKILLGTILGASAALPALIIGAAPFYARMVEIALREIDKGVIEASKAMGAKTSTIILKVLIPESLPALVSGITVTTIALVGYTAMAGVVGAGGLGTLAYLEGFQRGNNDVTIVANIWGFTKWIFPSGDWGIREQLPIN

SEQ ID NO: 45970 - protein, 374 aa, Bacillus anthracis
  MISC_FEATURE (248)..(248): X=any amino acid
  MISC_FEATURE (295)..(295): X=any amino acid
  MISC_FEATURE (296)..(296): X=any amino acid
EKKRIEIFPKHMGFIPVMWFVYLLFPIYHLVQASGWKLIIGSGMLIIFNITYPSLYFVQRTFIFFGMIQNDTIFLFALFYNPFMIFFGFFTASAMGFAPSKKVFRVLLCLVVIMLGSIVFCNMKITTPTSLVNIVPMFILMILTPFGMRNFNQKKMLRNQLNEANEQIKDLVKREERQRIARDLHDTLGHTLSLITLKSQLVEKLIVKNPERASTEAKEITQTSRTALKQLRELISDMRMITVEEELXANKSILQAANIRLEIKQETSASSLSPIEQNILGMCLREAVTDCCKAXXATRCTVSVLESQGELILTVEDNGIGLADQNHDGNGIRGMKERIALIDGSVELDMINPGTLLTVKVPVVIRTGKDGVRA

SEQ ID NO: 45971 - protein, 716 aa, Bacillus anthracis
  MISC_FEATURE (145)..(145): X=any amino acid
  MISC_FEATURE (164)..(164): X=any amino acid
  MISC_FEATURE (179)..(179): X=any amino acid
  MISC_FEATURE (190)..(190): X=any amino acid
  MISC_FEATURE (277)..(277): X=any amino acid
  MISC_FEATURE (279)..(279): X=any amino acid
  MISC_FEATURE (281)..(281): X=any amino acid
  MISC_FEATURE (341)..(341): X=any amino acid
  MISC_FEATURE (532)..(532): X=any amino acid
  MISC_FEATURE (563)..(563): X=any amino acid
  MISC_FEATURE (566)..(566): X=any amino acid
  MISC_FEATURE (572)..(572): X=any amino acid
  MISC_FEATURE (650)..(650): X=any amino acid
  MISC_FEATURE (671)..(671): X=any amino acid
NMTKFHTNKGAGYFMILFLLLFLLLLARFFYIQATGSVHNQDLNELAKQKHSKTGVLEANRGTIYDQNGHVLAQDANSYKLVAELKGAKPVEDKEDTAKKIASYSGKDEEKILATLNKEDRSQVEFGKLSNGLVARTKRTNSGLXISPGYLLFTENARVYPKRXFRILMVVSHARTDEXRGCYGAKFGFXKRLDKYLGASHGPSSYTGDRRGVSLVRPKSKRKSTKNGDNVYLTLDQRIQSYLEECNERSSKHYEPESLIGICCGIKNGENLGMSKXPXLXSEQGKYQYFYNDAIANAFVKNHNDVNFHTYSAINEGVYKGQDYYQSGTYPVGEPQNKRSXWRRWMGSITFDEGVRRSSNVAFAILGDQKLVPERFRKYIHSFGLDEKTKIDLPGEGSNTIVFDQQIQQVTTAFWTKVYCNTNFAGPSCHCYCERWGNDENFIPFDKIVDPITEEVKLEHKPEEVGKPVTKETAAQVRQLLERVVTSPKGTGTAYKVDGYSVGGKTGTAQIPDGKGGLYAGEERFIFFVFRXGTYGRSATVVYVAVKKPKLKDDESGATTLGXYFXICNEEXLEYLKIKPIEVKDPKKYVKEHQPAVPDVPEKTMEEAKKAIDKAKLRPIVLGEGKVQQQVPKATEQTLKGGRDFFGGRXPYNAGYSRWALGDVMILAKTXRFTLKLIGPGYVTEPRCPRRNIVATWYRLGVTLVPPLEPQQEAEK

SEQ ID NO: 45972 - protein, 195 aa, Bacillus anthracis
  MISC_FEATURE (46)..(46): X=any amino acid
  MISC_FEATURE (75)..(75): X=any amino acid
  MISC_FEATURE (126)..(126): X=any amino acid
  MISC_FEATURE (127)..(127): X=any amino acid
  MISC_FEATURE (153)..(153): X=any amino acid
  MISC_FEATURE (159)..(159): X=any amino acid
HHHQEVDTVHLLFTLLEEQDGLAVRIFQKMNVDIEALKQGVEKFYXEKSPSVTGKRCRKQVNLYITGAPATTGLXEQEKKQRKLREDYIFSGNMDYLAFTGEKGRYKPNCLQDFLNYERTTYYSLXXQFGGNQEWTSQIPEALYEALEKYGSXFSARRXKQGKIDPCIRRDSEIRRVNRILSRKRKNNPVLIGEP

SEQ ID NO: 45973 - protein, 483 aa, Bacillus anthracis
  MISC_FEATURE (200)..(200): X=any amino acid
  MISC_FEATURE (449)..(449): X=any amino acid
  MISC_FEATURE (450)..(450): X=any amino acid
  MISC_FEATURE (451)..(451): X=any amino acid
KSIASNIFYKILLNTFNIILPVLDGPYAYRTLGATSIGTVNLAETFFNYFFVFAVFGVYQYGLREISLIKNDKKKVSKLFTSLYVINFTTSILALSSFVLFSYIGYGHESLFPVLLIFGFNFISNMFYVEWFNEAYENYDFITKKTVIVRLIYVVLLFSFIHGVDDYKTYAGLLVLSTFLNHSISFVYVKRQVKLDFSDXTIIPHLKPLLLVLIFSNANILYTQLDRLVLGVYVGKEEVAYYVMAFQIMMIINTLMLSVVQVTVPRLSYLSGNASEMEYESLLNKISKVYFITLFPAAIGLMLIAHGAVVIYGGQQFAAAGNTLIVFAFYMITVGIESILSNQIIYVKKKESILVRFLFICGFINLASNIALIFFHVLTPTTAIFTTTIRTGFLITFEYIYVKKKLKVNYTLFDIQKLKYLFYSLTFIPIAFVIDMIVSGQILQVDSEXXXRVGLTYALILFITKDEILFSLLEKILARFKKA

SEQ ID NO: 45974 - protein, 288 aa, Bacillus anthracis
MPQQKNFVTMPAQHQNKQPGIESLMNPLPQFEDPNYKGSEKLKGKNVLITGGDSGIGRAVSIAFAKEGANIAIAYLDEEGDANETKQYVEKEGVKCVLLPGDLSDEQHCKDIVQETVRQLGSLNILVNNVAQQYPQQGLEYITAEQLEKTFRINIFSYFHVTKAALSHLKQGDVIINTASIVAYEGNETLIDYSATKGAIVAFTRSLSQSLVQKGIRVNGVAPGPIWTPLIPSSFDEKKVSQFGSNVPMQRPGQPYELAPAYVYLASSDSSYVTGQMIHVNGGVIVNG

SEQ ID NO: 45975 - protein, 780 aa, Bacillus anthracis
  MISC_FEATURE (174)..(174): X=any amino acid
  MISC_FEATURE (248)..(248): X=any amino acid
  MISC_FEATURE (306)..(306): X=any amino acid
  MISC_FEATURE (370)..(370): X=any amino acid
  MISC_FEATURE (378)..(378): X=any amino acid
VMVDRSLEMIIGMMGILKAGAAYLPIDPNYPTERIEYMLQDSQAKYLLSKRTEEVLPQFAGEVLYLDKEYLFQGEESNLVREHNPNDLAYVIYTSGSTGNPKGVMIEQKSLVHFLNVMREKVKANQSFLFLASVSFDISLLEICLPLTQGSKVVIATEDPVCNKRIGSFSQKTXVDLWESTPSRMEVILSDPEGANFLKDLKSILLAGEAFSIDLVEKIRCISEATISNIYGPTETTICATVKDLSTXKEVTIGKPNPNYHSYILNKYGQLKPFGIPGELCIAGVAVARGYLGKSKLTDEKFVPSXFAAGEMMYHTGDLVRWLPNGELEYLGRMDHQVKIRGYRIELREIETQLREYPEINQVIDDDQVXGNRKLLAXYYVSDNKVSFGEIRKYLSDKLPEFMIPEKMIQVEEIPLNPNGKVDRKRLLDITQTDYVSIPYVAPRNEIEQKLVCAWEKVMEIEGIGIHDNFFALKGESIKALQVINLLRKDCLKISTTDFFKHPTIAQLSSCVKLEHKEENFESRPTHVKDLSNPFSLTEVQIAYMLGRNSQFELSGISPQTYFEYETALDINCLSKSFQKVIHRHPMLRAVILPEGKQQILQSVPDYEIEIVSLIDLDDRNQNARLQEERSRMTNHVFPLGQWPLFELKAFLLKEDKYLLCFRYDALLMDGASMNIVGQDLLHYYYKPNQKLESLSFDFQDYMFIYDEMEQSEEYKTAKDYWTSKLPDFPFAPSLLLKKGPAEIATPKFQSLTKILDNEKWTKLRKLAQEKEVTPSALLC

SEQ ID NO: 45976 - protein, 325 aa, Bacillus anthracis
  MISC_FEATURE (176)..(176): X=any amino acid
  MISC_FEATURE (268)..(268): X=any amino acid
  MISC_FEATURE (317)..(317): X=any amino acid
  MISC_FEATURE (321)..(321): X=any amino acid
KKPWSFLIVTALLIVMTSLSAMKGSLEVGIVELVQGIFTGGNEDVEVIKDLRFPRIIIALFTGAAFAVSGGLFQSVMKNPLADAGVIGISSGASFMTLVIITLFPQFFFWTPVFAFLGGAFACYLVYAFSWKSGLSPLRIILVGIAINAMFTGLNESFITICGYSFRSISQTTTFXITMKTWGRCRIMVTYGTIGLVLALFVGAWCNLLSLQDKTAKNLGLHVTRVRLIISVIAVLLAAGITAMQGLMAFGGILVSSLFKQLVGSESXSINPFSARAGRFIILPAGFDWKVNVPPNQISAATIMAGIWWALLNFLAXKEGXSSWN

SEQ ID NO: 45977 - protein, 152 aa, Bacillus anthracis
MNNTYTNILIAVDGSKEAEKAFKKAIQVAKRNNATLTIAHIVDVKAYSAVEAYSRAIAERANLFAEDLLEDYKKTALEAGLEKIETVLEFGNPKSKISKEIAPNHKVDLIMCGATGLNAVERFLIGSVSEHIIRYAKCDVLVVRGDEEQGEL

SEQ ID NO: 45978 - protein, 89 aa, Bacillus anthracis
MNEFIKRYIKSEINKTFVDWSSSETRGIKTILMIIVIMVESAHKCNFDYVGVPYPVGYLGDEKVLRFNHDKIVEEMHRGYMTESELVEL

SEQ ID NO: 45979 - protein, 299 aa, Bacillus anthracis
MGNQYIYMNGEFVEKEKAVVSVYDHGFLYGDGVFEGIRSYGGNVFCLKEHVKRLYESAKSILLTIPLTVDEMEEAVLQTLQKNEYADAYIRLIVSRGKGDLGLDPRSCVKPSVIIIAEQLKLFPQEFYDNGLSVVSVASRRNTPDALDPRIKSMNYLNNVLVKIEAAQAGVLEALMLNQQGYVCEGSGDNVFVVKDGKVLTPPSYLGALEGITRNSVIELCERLSIPCEERPFTRHDVYVADEVFLTGTAAELIPVVKVDSREIGDGKPGSVTKQLTEEFKKLTRERGVRVPGLAESLL

SEQ ID NO: 45980 - protein, 270 aa, Bacillus anthracis
  MISC_FEATURE (83)..(83): X=any amino acid
  MISC_FEATURE (203)..(203): X=any amino acid
MKLNRAIGVIDSGVGGLTVAKELIRQLPKERIIYLGDTARCPYGSRSREEVRQFTWGNDEHLLDFKIQMVVIAWKTTTWGCFXKNAKQLPIPVVGVIHPGSRTALKVTNTYHVGIIGNDGNGEKWAYEEALKSINNRVMVEKLTGSPFSVKLYKKGNFGKEMGYEVVRETLQPLKNTDIDTLILGCTHYPILGPVIKQSNGRXSTLISSGDETAREVSTILYHSKMLNEGEEQSDHLFLTTGKIGLFKEIASKWFGQPIENVKHIHLEKE

SEQ ID NO: 45981 - protein, 387 aa, Bacillus anthracis
  MISC_FEATURE (32)..(32): X=any amino acid
  MISC_FEATURE (56)..(56): X=any amino acid
  MISC_FEATURE (75)..(75): X=any amino acid
  MISC_FEATURE (109)..(109): X=any amino acid
  MISC_FEATURE (199)..(199): X=any amino acid
  MISC_FEATURE (289)..(289): X=any amino acid
  MISC_FEATURE (296)..(296): X=any amino acid
  MISC_FEATURE (304)..(304): X=any amino acid
  MISC_FEATURE (328)..(328): X=any amino acid
FSIQKAYLVRSVQDVMKAVSFRTTFPILTGIXVVASGKKSPLYQGSHAEISNGNFXPHLKRMGKKIVKVKPSGKXWFLRAKNFSENGKKLPERKWEKFFVENLFYGQKXLFGEIHNFNFKWLDSAEYPLLPQIEEHHVFKIPTDLLKHMIRQTVFAVSTSETRPILTGVNWKVYTSGLNLYCTDSHRLALRKAKIEGMXDDFRPKFVIPGKSLNELSKILDESEEMVDIVITEYQVLFRTKHLLFFSKIVRRKYPDTTRLISCRGVKQDFLVNYQKNFYKAIDSVISVXLENGRNXCCEIYRLXRQAMLEICSEFAGNWGGVEGGSIXKLDGEELKISFSAKYMMDALKALDSTEIKISFTGAMRPFLIRTVNDESIIQLILPVRTY

SEQ ID NO: 45982 - protein, 333 aa, Bacillus anthracis
GIIGAGRIGKLHVDNLQLMPQVKIKAVSDVVIGHLEKWAPNKGISTLTTNYPGLYSEPGKLSSRLICFTNKTHGGKLLKKRALAKKTYFLEKAWLVFSVEETLEALEVVKEQGVSLQVGFNRRFDPNFRKVYDFIQQGEVGQPHILKITSRDPQPPSIEYVRSFRRIVYGHDDSDFDMARYVMNSEVVEVFAYGTTLIDPSIQEVHDVDTAIVTLKFANGALGVIDNSRQAVYGYDQRVEVFGEKGAVAADNCCPTTVQVSKTEGIVKDKPLYFFLERYTQGLHLRSNTIYKSIIEGQAGICSGYDGVTSGANCESAKESLLTGKPVQIEHKQ

SEQ ID NO: 45983 - protein, 398 aa, Bacillus anthracis
  MISC_FEATURE (349)..(349): X=any amino acid
  MISC_FEATURE (378)..(378): X=any amino acid
  MISC_FEATURE (391)..(391): X=any amino acid
LTRWDTLIFEVGTALVLVAIAAVIAGKFKFSVIPFLIVLGMLVGPHAPTIGVIDFKFIESASVISFLGRIGVLFLLFYLGLEFSMEKLIKSGRSMQMAGTIYILINFSLGLLYGLLMGSPLLEILIIAGIITISSSAIVAKVFLYLRRTGNNETYLILGIIMFEDIFLAVYLSVVSRLVLGDHASFLGALTSIGIALGYMLLFFIVARKATPLLNKLLNISSDEIFIIVVFASLFFIAGFSETIHVDEAIGALLLRLVFSETEHSDRIEHLVVPFRDFFGAIFFFSFGLSIDPLSLGGAIWLTLSAVLLTIIGNFVAGMIAGRQAGLSHKGFTNFGFTICFKGEFSIHXWPILVSAGGLMSEPKTFSAPLRGYTIKSXGPLLTKESKECIXIGKKIFK

SEQ ID NO: 45984 - protein, 281 aa, Bacillus anthracis
  MISC_FEATURE (22)..(22): X=any amino acid
  MISC_FEATURE (93)..(93): X=any amino acid
  MISC_FEATURE (189)..(189): X=any amino acid
KQLYGVIGNTIGTFHYSPLMHXRRHLNNLKDGAHYHAFLVKEEVLGEAVRGLKALGISGFNVTTPHKVAIMDYLDEIDPLAKQIGAVNTVVPXGWENGLGSNPDGIGFVRSPAIPLVVEHFKEKRIFITGAGGASRAIYFSLADAGVKEIDVANRTVDRPKDFIAACTATVHSVCFIHGKRHRKDQGNXDIFIQTTTIGMHPRVEHTPLQICWLKKGTIVSDIIYNPFETKILCEAKEQGAIIQNGIDMFVYQGALAFEMWTGCVPNIERMKQLVIRNLEG

SEQ ID NO: 45985 - protein, 284 aa, Bacillus anthracis
  MISC_FEATURE (185)..(185): X=any amino acid
  MISC_FEATURE (226)..(226): X=any amino acid
RIYKVQNYIELHINDSLSIEELADIAGFSKYHFHRIFKGIVDEPLSRYVNRLKLERATNLLTYRSDMTITDITYHFGFTDSAVFSATFKNYYGVSPSQYRNDNSKNCKDVRRISQYNECKKVRRNVEIVTVDNINVAYIRHIGTYEELTIAFPKMIEKLFSYATKQNYPVFGGYEGFTLFPRSPXIYGRTIHLRTSLCSNNFRGIRPLKRNHTGNKGITLPARMPXEHFEIFQDEYKRAWDFIYGEWLPNSGYKPRDSYPFEVYRNDPKQHPKHKHIVDIYVPI

SEQ ID NO: 45986 - protein, 59 aa, Bacillus anthracis
MITLNGLKAMLEEYEEKLVLLQKFKERQRLVAKLKQLISEEEHVNEEMKQVVEAIEKLD

SEQ ID NO: 45987 - protein, 371 aa, Bacillus anthracis
  MISC_FEATURE (136)..(136): X=any amino acid
MGTKTKKTLFNVDEQMKAIAAQFETLQILNEKGEVVNEAAMPELSDDQLKELMRRMVYTRVLDQRSISFNRQGPLGFSATTAGQEVSQLASHFALKAEDFILPRIRDVPQLVWHGFTIYQAFLFSRGTFHGNPNAXEVNALAPQIIIGAQIIQTAGVALGMKLRGKKSVAITYTGDGGASQGDFYEGMNFAGAFKAPAIPSLYENNRYAISTPVEKQSAAKTVAQKSSSSRYYGIQVDGMDPLAVYAATAFARERAVNGEGPTLIETLTFRYGPHTMAGDDPTRYRTKDIENEMGNKKDPLVRFPVILRKPKGLWSQRSERESNRRTQRVYQPANAKADQAPKQKVTDLMEIMYEKMPYNLAEQYEISKKK

SEQ ID NO: 45988 - protein, 753 aa, Bacillus anthracis
  MISC_FEATURE (35)..(35): X=any amino acid
  MISC_FEATURE (54)..(54): X=any amino acid
  MISC_FEATURE (150)..(150): X=any amino acid
  MISC_FEATURE (312)..(312): X=any amino acid
  MISC_FEATURE (323)..(323): X=any amino acid
  MISC_FEATURE (413)..(413): X=any amino acid
  MISC_FEATURE (414)..(414): X=any amino acid
  MISC_FEATURE (416)..(416): X=any amino acid
  MISC_FEATURE (422)..(422): X=any amino acid
  MISC_FEATURE (495)..(495): X=any amino acid
  MISC_FEATURE (520)..(520): X=any amino acid
  MISC_FEATURE (529)..(529): X=any amino acid
  MISC_FEATURE (545)..(545): X=any amino acid
  MISC_FEATURE (551)..(551): X=any amino acid
  MISC_FEATURE (561)..(561): X=any amino acid
  MISC_FEATURE (600)..(600): X=any amino acid
  MISC_FEATURE (632)..(632): X=any amino acid
MTDRLFNGLNPATNKSSTKHERHPLLLMAGAGSGXNTVWLPIRIAYLTWGKREXQPWKGLAYSPFTNKAAREMRERIDTLVGPEAEDIWISTFHSMCVRILRRDIDHIGINRNFTILDSGDQLTVVKKIMKERNIDPKEIGPPLLFGLYXVGEKMPFFRRIGMQENFHLLIHRKNYRADVYPESQKTSLKNNSLDFDDLIMTTIQLFERVPEVLEFYQRKFQYIHVDEYQDTNKAQYLLVKHLAARFKNLCVVGDSDQSIYRWRGADISNILSFEKDYENAQVILVRPKLFRPSQNFLNAAECCFEKNSDSXTEGVMADNGSXKQILRTIVAATEKDEGVLCCRKIRDDIQMGKRKYTDFAGLYRTNAQFGMSEEIFLKSIYSLQNCGGRKFYGGKEIKDIWAYLRLIGNPRXXDXFLRYYXRAKAGIGATSIDKIIKLWCTKWNFFTAVFDEIEHVGVSAKVTKAVKEFAGLLHNWVNMQEYLSVTELVEEVIXKTGYRDMFENERTFKAESRLENLKXVFIWYANIXSPSEDKKPCLHSLTNXHLCTYXSGKWRPNCWXESYYMTMHSAKGVRIPSCLIVVLEGGNIPTYSFSNGRRXKCKKASSCLCRYYSCGRELYLSNAQMRTFIWXNKYECRIAIYYRNPTELVESFNETAPKRETSLCAKRKSGQVAVKRQLQHVLAQLSHVLQLRRQAANKIGWAVGDKASHQKWGVGTVISVKSEGDAKEFRYCVPKPQIGVKRLLAKFAPCDE

SEQ ID NO: 45989 - protein, 255 aa, Bacillus anthracis
  MISC_FEATURE (25)..(25): X=any amino acid
  MISC_FEATURE (41)..(41): X=any amino acid
  MISC_FEATURE (172)..(172): X=any amino acid
  MISC_FEATURE (179)..(179): X=any amino acid
  MISC_FEATURE (225)..(225): X=any amino acid
KMVIIPGISGSGKPVALPSFEDLRXFCVDNLPPMLLPKVIXLMGGSKGKMNKVALGVDLRGREFFEHLWGALDDLSERTWIIPHILFLDAKDSTLVTRYKETRRSHPACTTGLPLKGIEIERSLLTDMKARANIVLDTSDLKPKELREKIVHLFFTETGAAFRVNVMSFGIXSTGISIXCRFSILMFVFFPNPYYISTYESHLTGLDEEVSSYVLKILMRRISFXRKLTDLITFMLPHYKREGKSQLVIANWMYQ

SEQ ID NO: 45990 - protein, 444 aa, Bacillus anthracis
MARYTKEDIFRLAKEENVKYIRLQFTDLLGVIKNVEIPVSQLTKALDNKMMFDGSSIEGFVRIEESDMYLYPDLDTWVIFPWTAEKGKVARLICDIYNADGTPFEGDPRNNLKRVLKEMEALGFSDFNLGPEPEFFLFKVDEKGNPTLELNDNGGYFDLAPMDLGENCRRDIVLKLKKMGFEIEASHHEVLSGQPEIDFKYANAIRSCDDIQTFKLVVKTNCRKHGLHATFMPKPLYGVNGSGMHCNLSLFKNGENVFFDQNGDLQLSDDARHFIAGILKHAPAFTAVANPTVNSLQRLVPGYEAPCYVAWSAQNRSPLVRIPASRGISTRVEVRSVDPAANPYLVMATLLAAGLDGIKNKLTPPAAVDRNIYVMTKEEREEAGIVDFTATLAQALVTLQSKRSISNALGDHLLEHFIEAKEIEWGYLPTQVHQWERDQYMSLY

SEQ ID NO: 45991 - protein, 67 aa, Bacillus anthracis
MNMQGRVKWFNAEKGFGFIEREDGDDVFVHFSAIQQDGYKSLEEGQQVEFDIVDGARGPQAANVVKL

SEQ ID NO: 45992 - protein, 369 aa, Bacillus anthracis
  MISC_FEATURE (109)..(109): X=any amino acid
  MISC_FEATURE (128)..(128): X=any amino acid
  MISC_FEATURE (203)..(203): X=any amino acid
  MISC_FEATURE (204)..(204): X=any amino acid
  MISC_FEATURE (223)..(223): X=any amino acid
  MISC_FEATURE (246)..(246): X=any amino acid
ETIKCIGCGVEIQTEDKNEVGYAPASSLEKEQVICQRCFRLKHYNEIQDVSLTDDDFLRILNGIGKSDALVVKIVDIFDFNGSWLPGLHRFVGNNKVLLVGNKADLIPXSVKHDKGKDWDGAIVQSSXGLKPEDVFLISAAKGQGGLLSQSDASEYYRGGKDVYVVGWTNVRKSTFINRMIKEFRDETGNVISTSPFPGTTLXXIDIPLDEESSLYDTPRIYXHHQMAHYVGKQSFKLITPTKEIXPDGVFQLNEEQTLFFSGLARFDYVSGGRRAFTCHFSNRLTIHRTKLEKADELYKYSRWDLLSPPTPEELENMPELVKYEFNIREPKTDVVFSGLRWGTVNEPRAKIVGLVPKGVSVSLRKSFI

SEQ ID NO: 45993 - protein, 303 aa, Bacillus anthracis
MPYFYVFLLLLTSLLWGGNFVVGKSLVDHASPMTLTSLRWIIAIVCLLPMVWFKEKKIIPPRAAILPLILMGISGVALFNIFQFLALEKTSATNVGLISTLNAISIALFSVLFLKEKVNTLQILSMILSFFGVILVLLKGNFALLFSLHFNSGDLWMIAAVCIWGIYSVCSKWATKTTTPLMATLYSGIFGVILLLPFNIGSFTVTNINTSFITSLLYTGLISTVLCMVFWNIGVQKLGATTSGIFLNFNPIFTAILAFLFLGEELTWIQIVGTMIVMTGCYLFSHFKTVTVQPTGTLLRKHS

SEQ ID NO: 45994 - protein, 459 aa, Bacillus anthracis
  MISC_FEATURE (15)..(15): X=any amino acid
  MISC_FEATURE (76)..(76): X=any amino acid
  MISC_FEATURE (78)..(78): X=any amino acid
  MISC_FEATURE (80)..(80): X=any amino acid
  MISC_FEATURE (108)..(108): X=any amino acid
  MISC_FEATURE (134)..(134): X=any amino acid
  MISC_FEATURE (213)..(213): X=any amino acid
  MISC_FEATURE (259)..(259): X=any amino acid
  MISC_FEATURE (340)..(340): X=any amino acid
  MISC_FEATURE (438)..(438): X=any amino acid
  MISC_FEATURE (446)..(446): X=any amino acid
EYDLVFLGARTGPIXLLAIPAIPTKLLKTALCEKKNLVGPCFTKGCIPNKSPFYRRPESNRNCLKKAKKSGVIGKXVXNXTFAKVPERKEKIVTQLHKGVQHLMKQGXIDVVEGIGRILGPSIFLSDPRDNFSXTCKSGEENECLIPKKCTYCTGSRPNFITTFRLDGEYVMCFRSCPKMETLPSSIIIVGGGVIGIEWASMLADFGVEVTVXEYAKTDTTIRRSDVSKEMQWSIQEKKVLKLYTGCKRYFPETFVKRXWSNNFSLNHNGENKEFKAEKMLVSVGRQANTQNIGLEEIRISVRGKRIHSNKEFYSTKRISYLRNQVMNLVAYSLLRCFSXGIVAVEHIAGKEVTPIDYSMVSKCVYSSPEVASVGLTELLPKEKGYKLKVGKFSFRAIWESTCIRRIRWFRKLVVDEETNDILGVHMIGTTCNRYDFXSRSCKVLXCNTLGSSTYNSSA

SEQ ID NO: 45995 - protein, 324 aa, Bacillus anthracis
MAELEFEKPVVELRNKIRELKDYTKNSQMDFSEEIRILEDKLENLEEDIYGNMKVWDRVQIARHAERPTTLDYIEHLFTDFFECHGDRLFGDDAAIVGGIAKYKGMPVTVIGHQRGKDTKENIRRNFGMPHPEGYRKALRLMKQAEKFNRPIICFIDTKGAYPGKAAEERGQSEAIARNLFEMAGLTVPVICIVIGEGGSGGALGLGVGDYIHMLENSTYSVITPEGAAAILWKDAGKAKEAAEAMRITAADLKELGVIDEIIPEAKGGAHRNVLKQSENIDLMLRKTFEQLNGISKDELIEKRYEKYMKIGQVSFSNASIWIK

SEQ ID NO: 45996 - protein, 564 aa, Bacillus anthracis
MKKILASVAVASVTGSVFISTAQAKNTVIQKEAKHEKPTDVVKYENQVTVNTNALRVRTQPNTSSTIMGRVYEGEVLQVIGEENSWLKINHKGKTGYVSSEFVSENSVSAKTNVSMSRSKTVIANVLRVRTQPNTSSAIMGRVYEGKALQVIGEENGWLKIKHNGKVGYVSSQFVIDGTSNGSDKNNGKVQVASGNYKVNVSSLRVRTGPSTSHTILGSVHKGQIVQVTGEVQDWVKINYSGQTAYISKDYISKNDFNANVDQTNEQQKNITVQTDGTYIVDATSLRVRTGPATYHSVIGGVLNGRILQVTGVENGWLKINHNGRTGYVSSEYVKFVKGNTPSKPETSNPSTGATVGDYYVNVNVLNVRSGAGTNYDVIGALSKGIKVQVLFEQNGWGKINYNGKTGYVSSKFLSKTSETDAEKQRQSQEVNKTNDFIQPAAGRYTSRFEKRGGKMHHGLDIAASGTVPVVAAAEGVITRSYYSTSYGNVVFISHNINGQTYTTVYAHLKSRSVSAGQKVKQGQQLGIMGNTGQSEGQHLHFEIHKGEWNAQKSNAMDPKIYID

SEQ ID NO: 45997 - protein, 95 aa, Bacillus anthracis
MRKYEIMYIIRPGVEEEAQKALVDRIAGVLTTNGAEIINTKEWGKRRLAYEINDLREGFYMILNVNANAEAINEFDRLAKINEDILRHIVVKEEE

SEQ ID NO: 45998 - protein, 135 aa, Bacillus anthracis
MSNTNQKITTFLMFEGKAEEAMNFYTSLFEQSEIVSISRYDENGPGKEGTVIHATFTLHGQEFMCIDSYVNHNFTFTPAMSLYVTCDTEEEIETAFNKLAEDGAVLMPLGAYPFSKKFGWLNDKYGVSWQLTLAE

SEQ ID NO: 45999 - protein, 193 aa, Bacillus anthracis
NLPNKITISRIFLIPIFMVIMLAPFDWGSYTIGDVDLPIQHLVGALIFIVASATDWIDGHYARKYNLVTNLGKFLDPLADKLLVSAALITLVEMQYVPAWIVIIIISREFGVTGFTSLYLAGNKEKGNAGQYQLGKIKTWTQIIAIAAYLLHDVPLNLIHIPVADIFIWIALIFTVISGWDYFWKNRAAFVNS

SEQ ID NO: 46000 - protein, 265 aa, Bacillus anthracis
MGTQVNTAQLNIQKTSSVQQAALGETYTYSVVIRNNGTVTATNVSFIDPIAPETTFVANSVTINGTPQPGFDPNVGFPLPNIAAGTSLTVTFQVTVIAPSTRGAVLNTASAIATFLLNPLQPPVTTTNSSNTTVVTIPLPPPGEVTATKTVDVAAGAVGDVLTYTVLISNVGIYTVADVFFQDVIPEGTTFVEGSVTIGGVQQLGLNPEIGFTVTPLLIAGGSIEITFQVTITEIPDNEVILNDADVTFTSQPNPQDTQTLRKRY

SEQ ID NO: 46001 - protein, 317 aa, Bacillus anthracis
MCTSLTLETKNGQHLFARTMDFTLDMNQEVIIIPRHYQWNNITGEIINTKHATVGMGINHQGRIIMADGVNEAGMTCATLYFPGFATYSQSIDDNTTNLAPFDFVTWSLTTIQFCQEPVKKSVDSITFLDIPLPRFRTYATLHWILADKWGDCIVLDPTSEGLKLYDNPLGVMTNSPEFNWHLQNLRQYIGLKSQPFAPTEWSNLPLSAFGQGSGSMGLPGDFTPPSRFVRAAYGKQNIQGIDSEEEGVSALFHILSNCEVPKGGVITEQGALDNTIYTKRMWMESGTYYYPYLQWRPIIAVHLFPENLDTDENKAY

SEQ ID NO: 46002 - protein, 535 aa, Bacillus anthracis
MTKYIFVTGGVVSSLGKGITAASLGRLLKNRGLNVTIQKFDPYINVDPGTMSPYQHGEVFVTDDGAETDLDLGHYERFIDINLNKYSNVTTGKIYSSVLQKERRGEYLGGTVQVIPHITNEIKERVYRSGRETNADVVITEIGGTVGDIESLPFLEAIRQIKSDIGRDNVMYIHCTLIPYLKAAGEMKTKPTQHSVKELRSLGIQPNIIVVRTEMPVSQDMKDKLALFCDIDTKAVIEARDADTLYAVPLSLQEQNMDQIVCDHLKLDNPAADMTEWTALVEKVRNLSKKTKIALVGKYVELQDAYISVVEALRHAGYSFDTDVEVKWVNAEHVTAENVQELVGDTDGILVPGGFGDRGVEGKIVAIQYARENKVPFLGICLGMQLASIEFARNVLGLEGANSSEINPDTPYAIIDLLPEQKDVEDLGGTLRLGLYPCKLSEETNAYNAYNEPVVYERHRHRYEFNNQFRPDMEKAGFVFSGTSPDGRLVEIIELKDHPWFVAAQFHPELVSRPNRPQPLFHDFVKASLTNKESK

SEQ ID NO: 46003 - protein, 410 aa, Bacillus anthracis
MKEELIERFTRYVKIDTQSNEDSHTVPTTPGQIEFGKLLVEELKEVGLTEVTMDDNGYVMATLPANTDKDVPVIGFLAHLDTATDFTGKNVKPQIHENFDGNAITLNEELNIVLTPEQFPELPSYKGHTIITTDGTTLLGADDKAGLTEIMVAMNYLIHNPQIKHGKIRVAFTPDEEIGRGPAHFDVEAFGASFAYMMDGGPLGGLEYESFNAAGAKLTFNGTNTHPGTAKNKMRNATKLAMEFNGHLPVEEAPEYTEGYEGFYHLLSLNGDVEQSKAYYIIRDFDRKNFEARKNTIENIVKQMQEKYGQDAVVLEMNDQYYNMLEKIEPVREIVDIAYEAMKSLNIEPNIHPIRGGTDGSQLSYMGLPTPNIFTGGENYHGKFEYVSVDVMEKAVQVIIEIARRFEEQA

SEQ ID NO: 46004 - protein, 409 aa, Bacillus anthracis
METIVQKFGGTSVGSVERIQHVANLIIEEYERGHSIVSVVSAMGKSTDELVALANAITENPSKREMDMLLSTGEQVTISLLTMALQAKGYNAISLTGWQAGITTESVHSSARITEINTDRIQSYLTKGTIVIVAGFQGVSEDLEITTLGRGGSDTTAVALAAALNAKKCDIYTDVTGVYTTDPRVVKDAYKLDEISYDEMLELANLGAGVLHPRAVEFAKNHNVILEVRSSMEQENGTIVKGECNMEQQSIVKGIAFEDNITRITVKGLEQGSLSTVFSTLAAAHINVDIIIQSITNEGTVHLSFSIHSNDLRETLAVLEQNQEALHYESVEYENHLAKVSIVGSGMVSNPGVAANMFTTLKEEDIHIKMVSTSEIKVSVVIDRLHLVTGVEALHQSFMAKIEPLVQMS

SEQ ID NO: 46005 - protein, 376 aa, Bacillus anthracis
  MISC_FEATURE (254)..(254): X=any amino acid
  MISC_FEATURE (266)..(266): X=any amino acid
  MISC_FEATURE (278)..(278): X=any amino acid
  MISC_FEATURE (279)..(279): X=any amino acid
  MISC_FEATURE (294)..(294): X=any amino acid
MRYITAGESHGPQLTTIIEGVPAGLSLTADDINEDFPRRQKGYGRGRRMQIETDQVQIVSGVRHGETLGSPIALVVENRDFAHWTKIMGAEPLTEQEEKEMKRKVTKPRPGHADLNGAIKYGHRDMRNVLERSSARETTVRVAAGAVAKKVLAELGITVAGAHVIEIGGVEAKETTYRSIEELKSITEASPVRCLDEEAGNQMIKAIDDAKSNGDSHGGIVEVIVEGMPIGVGSYVHYDRKLDAKLAARHMEHXAFKGVEIGIGFXKQRIGQGREISXXNLGTEEPGYSGGTNXRGLFRRRYDDGMPIVVRGVMKPIPTLYKPLQSVDIDTKEPFTASIERSDSCAVPAASVVAEAVVAWELATALIEQFGLDRTD

SEQ ID NO: 46006 - protein, 224 aa, Bacillus anthracis
MTVQTNLTTVNEAIKQSCARAGRSLQDIKLVAVTKTVGIEKTNEVIEAGIIDLGENRNEGFLQKYEHFGSKVNWHFIGSLQTRKVKEIINEIDYLHSLDRLSLAKEIQKRANKKVKCFIQVKTSSEESKQGLAIEETVSFIQSLQELDKIEVVGLMTMAPFTEEEEEIRRCFKELRMLQKEVQGLELLHAPCKELSMGMSNDYTIAIEEGATYIRLGTILVGKA

SEQ ID NO: 46007 - protein, 225 aa, Bacillus anthracis
MAKDIKFSEEARRSMLRGVDTLANAVKVTLGPKGRNVVLEKKFGSPLITNDGVTIAKEIELEDAFENMGAKLVAEVASKTNDVAGGETTTATVLAQAMIRESLKNVTAGANPMRLPKGFQKAGSWCVEKLKNNFKPTEGKSSIAQVAAISAADEEVGQLIAEAMERVGNDGVITLEESKGFTTELDVVEGMQFDRGYASPYMITDSDKMEAVLDNPYIIITDKKI

SEQ ID NO: 46008 - protein, 260 aa, Bacillus anthracis
MKHKWLYIGLIFSIMMALVPVSALAYTNTPHNWGIPRPKNETVPDAGKLYTDLLQKNGGFYLGDTKKKDIYLTFDNGYENGYTGKILDVLKEKKVPATFFVTGHYIKTQKDLLLRMKDEGHIIGNHSWSHPDFTAVNDEKLREELTSVTEEIKKVTGQKEVKYVRPPRGVFSERTLALTKEMGYYNVFWSLAFLDWKVDEQRGWQYAHNNVMTMIHPGSILLLHAISKDNAEALAKIIDDLREKGYHFKSLDDLVKSNQP

SEQ ID NO: 46009 - protein, 48 aa, Bacillus anthracis
MERLKEIWSRPLTQWVAKTVYYLAILFALLWLYGFHDTNTSTFIYNEF

SEQ ID NO: 46010 - protein, 110 aa, Bacillus anthracis
  MISC_FEATURE (20)..(20): X=any amino acid
DKIKLTAKDILEKEFKTGVXRGYQQEEVDKFLDMIIKDYEAFHKEFEQLKQQNARLKRELEEQKLAATQVPQQPVVQTPVAQPVYNNTNTDILKRLSNLEKAVFGSKLYE

SEQ ID NO: 46011 - protein, 314 aa, Bacillus anthracis
  MISC_FEATURE (60)..(60): X=any amino acid
MKKKFAEYEVGEQVDVFLLIKTATKGIASNGKPFLTVILQDPSGDIEAKLWDVSQQLRIXYVAETIVKVAGDILNYKGRIQLRVKQIRVANENEVTDISDFVEKATVKKEYMVKKIRHHIFEMRTRNIQRLTRHLLNKHQNEFLDYPAATKNHHEFVSGLAYHVVSMLDLAKSYLKFLYPSLDKDLLYAGVILHDLGKVIELSGPISTTYTLEGNLLGHISIMVKRIGKAADELQIDAEEVLILQHIVLSHHGKAEWGSPKPPLVKEAEILHYIDNLDAKMNMMDRALGRTKPGEYTERVFALDNRSFYKPSFH

SEQ ID NO: 46012 - protein, 582 aa, Bacillus anthracis
  MISC_FEATURE (97)..(97): X=any amino acid
  MISC_FEATURE (120)..(120): X=any amino acid
  MISC_FEATURE (148)..(148): X=any amino acid
  MISC_FEATURE (171)..(171): X=any amino acid
  MISC_FEATURE (172)..(172): X=any amino acid
  MISC_FEATURE (187)..(187): X=any amino acid
  MISC_FEATURE (192)..(192): X=any amino acid
  MISC_FEATURE (329)..(329): X=any amino acid
  MISC_FEATURE (378)..(378): X=any amino acid
  MISC_FEATURE (381)..(381): X=any amino acid
  MISC_FEATURE (385)..(385): X=any amino acid
  MISC_FEATURE (504)..(504): X=any amino acid
  MISC_FEATURE (507)..(507): X=any amino acid
  MISC_FEATURE (565)..(565): X=any amino acid
  MISC_FEATURE (566)..(566): X=any amino acid
  MISC_FEATURE (573)..(573): X=any amino acid
  MISC_FEATURE (578)..(578): X=any amino acid
MTWKQEFSRWLSYAELDADLKEQLENMKQDEKKIEDSFYKNLEFGTGGMRGELGAGTNRLNVYTVRKATQGLAKFIEKLGEEAKKTGCVVAYDSRPXHPEFAMEVAATLGAHGITTYVFXKLRPTPSAFFRVRHLHTVRGIVLTAKPXSAEYNGYKVYGEDGGQLPPKRSXXIKRLGNRSRKRLTSXKLLMXSYLKAGGLLHMIAQKVDDAYAAELNNVIINKEMVQKVGKDLKIVFTPLHGTSNLSVRRGLAEVGFTDVTVVKEQELPDPNFSTVKSPNPEEHAAFEYAIRDGEKVGADVLIATDPDADRLGVAVRNHDGEFPSINWXPNRALMLDYLLSQKKENGTLPENGVVLKTIVTSEIGRTIAKAYGFRYRXIRXLGFXIYRGRKINSLKKTGTILKIQYAGYEESYHPLIRPFCRDKDAVQSVLFACEVAAYYKSQGKTLYDGLLEVFEKYGFFREDLVSLTLKGKDGAEQIQEMMAIFRVKILRKEVDCLNSCSSXGLXREHISSLQDGHKEEISLPEIKCVKISIRRWFCFYLVPSGTEPKIKFYFGVQDHLFTKXXTKVTYYXRKILXIVYN

SEQ ID NO: 46013 - protein, 241 aa, Bacillus anthracis
  MISC_FEATURE (184)..(184): X=any amino acid
  MISC_FEATURE (185)..(185): X=any amino acid
  MISC_FEATURE (232)..(232): X=any amino acid
KRTKTNNEVYQTSTMLALLDGIYDGVISFEELKERGDFGIGTFDQLDGEMIAFDNEFYHLRSDGSAEKVEPEETTPFCDVTFFEKEMSYTIERPMNREEVEAHLLHELMPSKNLFYAISNGGTFREVRTRTVPRQEKTVYTLVEVTKSQPIFSFENTEGTLAGFWTPDYAQGIWCSWIHFTLHXXERKRGRTCFDYVVENCTIQIGQKAHMHLALPETADFMAAEFYQRKLXGYIATAEGA

SEQ ID NO: 46014 - protein, 99 aa, Bacillus anthracis
MTTYTSEMRKSLVSEEDVDILKIMAHPIRLQIVNELSTRKTCNVTQLTELLNIPQSTVSQHLSKMKGKVLRAERRGLEIYYHINNLKASKIVNVLGYIN

SEQ ID NO: 46015 - protein, 457 aa, Bacillus anthracis
  MISC_FEATURE (16)..(16): X=any amino acid
  MISC_FEATURE (29)..(29): X=any amino acid
  MISC_FEATURE (44)..(44): X=any amino acid
  MISC_FEATURE (258)..(258): X=any amino acid
  MISC_FEATURE (271)..(271): X=any amino acid
  MISC_FEATURE (275)..(275): X=any amino acid
  MISC_FEATURE (287)..(287): X=any amino acid
  MISC_FEATURE (289)..(289): X=any amino acid
  MISC_FEATURE (323)..(323): X=any amino acid
  MISC_FEATURE (399)..(399): X=any amino acid
  MISC_FEATURE (423)..(423): X=any amino acid
  MISC_FEATURE (431)..(431): X=any amino acid
  MISC_FEATURE (435)..(435): X=any amino acid
  MISC_FEATURE (455)..(455): X=any amino acid
KYKFLSKDKPQHILLXSGRGGPYNIVGIXPTTGNSKGRGKRFLXMKSGEETIKQGNPLDLMPRYMERWKTDYNPEYPPFQGGAIGYFSYDCIRYIEKLPSLAEDDINIPDIFFLLFDDVFVYDQKEKVLWIITHYVDKHEEAKERLNEWKILLGDRSAGSDYTGLRALSKKNEAVAFTEESFMKAVECIQEYIGAGGCVPEKLANRQEKTLQTTPLRNIYSFFGEINPSPIYGYWELGDFSKCKVIRPELLIKKQGNXSKYTDPIAGNEIXKGKXPRDEELARGINXEXKERAEHVMLVDLERNDFRTWFVYMHCRSERSLWXFEKYSHVMHIVSNVRGEVEEDKDAFDLVKAVFPGGTITGAPKIRTMEIIEELEPVRRGIYTGSIGWDGLFWRYRIXICIRTLLAKDGKAHVQAGGGNCHXFKSGKMNXRIRXKRALALWACKKNVAKKTFRXEK

SEQ ID NO: 46016 - protein, 1241 aa, Bacillus anthracis
MMENWPKKPEGSQWTDDQWKAVVATGRDILVAAAAGSGKTAVLVERIIKKIINEENPVDVDRLLVVTFTNAAAQEMKNRIGEALEKVLIDEPGSQHVRKQLSLLNKASISTIHSFCLQVIRGYYYMLDVDPRFRIANQTENELLKEEVLDDILEEEYGIEDNTIFFELVDRYTSDRSDDDLQRMILALHTESRAHPNPEKWLDKLVEAYDVEGKTIEDLVYASYLLEDVKFQLETAEQHIRKATELAMLPDGPAPRIETLQADLALLGTLSAAARESWTSVYEAMQNVSWQTLKRIKKSDYNEDIVKQVDSLRNKAKDEVKKLQEELFSRRPESFLRDFQDMHPVLEKLVQLVKVFTERFQAMKRDKGMVDFTDLEHFCLQILSEQSEDGEMKPSAVALQYRNKFAEVLVDEYQDTNFVQESIIKFVTKDSESEGNLFMVGDVKQSIYRFRLAEPGLFLGKYKRFTQEGLGGGMKIDLAKNFRSRHEVLAGTNFIFKQIMGEEVGEIDYDADAELKLGASYPEGEDVAAELLCIQQTEEEVIDGEEGAEVEKAQLEARLMAQRIKAMVDSGYEVYDRKTDSMRPVKYRDFVILLRSMPWAPQIMEELKLQGIPVYADLATGYFEATEVNIMMNVFRVIDNPMQDIPLAAVLRSPIVGLNDEELATLRAHGKKGSFYEVMSSFLKGAPLEEEKELHDKLEWFYNLLQGWREFARQQSLSDLIWKVYGETGYYDFVGGLPAGKQRQANLRVLYDRARQYEATSFRGLFRFLRFIERILERGDDMGTARALGEQEDVVRIMTIHKSKGLEFPVVFVAGLGRRFNTQDLMKRFLLHKDFGFGSQFIDPRKRIKYTTLSQLAIKRKMKMELIAEEMRVLYVALTRAKEKLILIGTVKDATKEMEKWLDAREHSEWLLPDHVRAGASCYLDWIAPSLYRHRDSEMLLELGQGSIPDEIYGYDTSWKVEVVDGNTLLAPEPVQEEKQELLEALREKKAVPLESERKEEVYDRLMWKYGYGEATSHRAKQSVTEIKRNYQSEEGSDNAFIKKLRAPIQTRPRFMEKKGLTYAERGTAVHAVMQHVDLKKPITVEILQEQIAGMVNKELLTFEQAEEIAIEKVISFFDSDLGKRVLAAKSVEREVPFTMMLAAEEAYQDWQGESGESILVQGVIDCMIEEEDGITLIDFKTDTIEGKFPGGFEQAKPILETRYKVQLSLYAKALEKSLQHPVKEKCLYFFDGNHVIKVEE

SEQ ID NO: 46017 - protein, 170 aa, Bacillus anthracis
MAQIRIHEVNTRIENEVKVSKFLQEEGVLYEKWNISKLPPHLNENYSLTDENKAEILAVFSKEIADVSARRGYKAHDVISLSNSTPNLDELLINFQKEHHHTDDEVRFIVSGHGIFAIEGKDGTFFDVELEPGDLISVPENARHYFTLQDDRQVVAIRIFVTTEGWVPIY

SEQ ID NO: 46018 - protein, 480 aa, Bacillus anthracis
MVNIRGWDKRRRGVDMQRRKSLALSIPYQLDFFKQYKFLSKDKPQHILLESGRGGRYNIVGLNPVAVIRGKGEALHISESGKETIKQGNPLDLMQEYMERWKTDYNPEYPPFQGGAIGYFSYDCIRYIEKLPSLAEDDINIPDIFFLLFDDVFVYDQKEKVLWIITHYVDKHEEAKERLNEWKILWATEAPEVTIPFACPEKKNEAVAFTEESFMKAVECIQEYIGAGDVFQVNLSTRQERTLQTHPLEIYTSLREINPSPYMGYLELGDFQIVSGSPELLIKKQGTEVSTRPIAGTRSRGANEQEDEELARELIENEKERAEHVMLVDLERNDLGRVCKYGTVEVDEFMVIEKYSHVMHIVSNVRGEVEEDKDAFDLVKAVFPGGTITGAPKIRTMEIIEELEPVRRGIYTGSIGWIGYSGDTELNIVIRTLLAKDGKAHVQAGAGIVIDSNPENEYKESLKKAIALWRAKERSEETVR

SEQ ID NO: 46019 - protein, 428 aa, Bacillus anthracis
MSIQNVEAEKTVLGSLLLDGELIKECRLTEQYFSMPVHKSIFQLMRKMEGEGQPIDLVTFTSRVDPNFLKGIGGMEYFIGLMDGVPTTSNFSYYEGLVRGAWKMYQAGVLGHKMGERLIAEKSEKIIGETITALCELEEKDCVCEFDLKDALVDLYEELHQDAKEITGIETGYTSLNKMTCGLQEGDFVVLGARPSMGKTAFALNVGLHAAKSGAAVGLFSLEMSSKQLLKRMASCVGEVSGGRLKNPKHRFAIEDWERVSKAFAEIGELPLEIYDHAGVTVQDIWMQTRKLKRKHGDKKILIIVDYLQLITGDPKHKGNRFQEISEISRKLKLLARELNVCVVALSQLSRSVESRQDKRPLLSDLRETGQIEQDADVIMLMYREDYYDKETMQKEMTEIHVAKHRNGPVGSFKLRFMKEFGRFVEGG

SEQ ID NO: 46020 - protein, 219 aa, Bacillus anthracis
ILSQPEWRIVDQSSLGPTFHALQSFAMDDTLCTSIGKGESAATMRSWVHHNTIVLGIQDSRLPHLEEGISFLKENNFNVIVRNSGGLAVVLDEGVLNVSLLFQETEKGIDIDLGYDTMWHLIQEMLKDYDVTIEAKEIVGSYCPGSYDLSIRDQKFACISQRRIRRVVVAGSNITFCANRKWCLNRAAHRSGIFINLAIPRKKKTPFTYPEIVPSTMAS

SEQ ID NO: 46021 - protein, 464 aa, Bacillus anthracis
MDKNLKKDLKIRHITMISIGGVIGAGLFVGSGAVVHSAGPGSIVSYALAGLLVVFVMRMLGEMAAINPTSGSFATYAREAIGPWAGYTIGWLYWFFWVIVIAIEATAGAGIIQYWIPEIPLWLLSLILTILLTLTNVFSVKSFGEFEYWFSFIKVISIVLFLCLGLAVILGFVPGTEAPGTSNLVGQGGFMPNGISSVLLGITVVIFSFMGSEIVAVAAGESAEPVKAVKTATNSVIWRILVFFIGSIAVVVTLLPWNSANILKSPFVAVLEHIGIPAAAQIMNFIVLTAVLSCLNSGLYTNSRMLFSMAERGDAPKAFLKLNSSGVPVRAVLFGTFFAYIGVVFSYISPDKVFLFLVNASGGIALLVYLVIAISHLKIRKKMGRVEQQNLKVKMWFFPYVTYVTIAAIIAVLIAMLAIESLRSQALLTMLVTVLIIISYFIFNRNKNSTVLNTKSKNEESVRF

SEQ ID NO: 46022 - protein, 237 aa, Bacillus anthracis
  MISC_FEATURE (122)..(122): X=any amino acid
  MISC_FEATURE (136)..(136): X=any amino acid
  MISC_FEATURE (155)..(155): X=any amino acid
  MISC_FEATURE (160)..(160): X=any amino acid
  MISC_FEATURE (189)..(189): X=any amino acid
  MISC_FEATURE (212)..(212): X=any amino acid
MEHTFTETSIVGEIVTQFPKASDLFKSYRIDFCCGGNKPLIDAIHERNLSATEVITELNTPFSLYPNDLNESEIDWKNASYRELIDYVIHKHHRYLNEEFPTVSSLVTKSITFSGSQSTRIXVKIHKLFHDLKWDXEQLLFKEETEDFPLIFKFXKKSNXENYAKVRKVVDDLENEHNHAGNHIKEPPXGTNDFTPPKGLCGTYRLVYNPPXSLESDLFEHIHLENNILFPRAITRA

SEQ ID NO: 46023 - protein, 471 aa, Bacillus anthracis
MSKLLKKKSVTQLLEHNQSKALTKTLGAFDLIMLGVGSIIGTGVLVLTGLVAARDAGPAVIFSFVLAAIICGFIALCYAEIASTLPASGSVYTYSYATIGEFVAHLVGWSLLLIYIVATAAVAAGWTGYFHNLIKGFGLEIPKALVTIPSHGGIVNLPAVIITLILAWMLSRGTRESKRINNIMVLIKIGMILLFITVGIFYVKPMNWIPIAPYGLSGVFTGGAAILFAFTGFDILATSAEEVKDPKRNLPIGIIASLIICTIIYVMVCLVMTGMVSYKELNVPEAMAYVMEVVGQGKVAGAIAVGAVIGLMAVIFSNMYAATRVFFAMSRDGLLPKSFAKVNKKTGAPTFITGLAGIGSSIIAGFIDLKELVNLVNIGSLVTFALVCLSVIILRKSHPNLKRGFMVPFVPVLPCVAIVCCVFLMLNLPLRTWVYFSIWITIGVVIYFLYSIKHSNLNEETISKLHDKIAR

SEQ ID NO: 46024 - protein, 488 aa, Bacillus anthracis
  MISC_FEATURE (119)..(119): X=any amino acid
GTYDRFIFETSAVLITLIILDKLFEAKAKGRSSEAIKKLMGLQAKTATVMRDGTEMKILIEEVVAGDIVYVKPGEKIPVDGEIVEGKSAIDESMLTGESIPVDKTIGDVVIGSTMIKKXFLKVKALKVGRDTALAQIIKVVEEAQGSKALIQRVADQISGIFVPVVVVIAIITFAVWMIFVTPGDFGGALEKMIAVLVIACPCALGLATPTSIMAGSGRSAEYGILFKGGEHLEATHRLDTVILDKTGTVTNGKPVLTDVIVADGFNEEEILRLVGAAEKKSEHPLAEAIVEGIKEKKIDIPSSETFEAIPGFGIESVVEGKQLLIGTRRLMKKFNIDIEEVSKSMEELEREGKTAMLIAINKEYAGIVAVADTVKDTSKAAITRLKKMGLDVVMITGDNTQTAQAIAGQVGIEHVIAEVLPEGKAEEVKKLQAQGKKVAMVGDGINDAPALATADIGMAIGTGTDVAMEAADITLIRGDLNSIADAI

SEQ ID NO: 46025 - protein, 521 aa, Bacillus anthracis
MRFKRGLVSCFIAILCLSVFLAGCSSNAKTGNEGSGSKGTKEGGVLTIARLSDADNLDPHFITNIPSASVVYHKVYENLVQRDKNMDFKPMLAKEWKQIDDLNWEFKLQQGVTFQDGAPFNAEAVKKNFERVLDPKVGSNRATVYSMIQEIKVIDEYTVQFILKYPYSPLLSIFASNEGSILSPKAIDEKGKGLAQHPVGTGPYTFKSWKPGEEIRLEKNKNYWGEKAKVDEVVFKVVPEDATRIGMIETSEAHIAENLPVTEVERVKNSPSMELIENEGLGVEYIGFNVEKKPFDNPLVRQAIAHAIETKGILKGVYNNVGTEINSVMTPKVFGYTKDVKGYKYDINTAKKLLADAGYPNGFKTTIWTNDSKVRMALVEVIQSQLKGIGVDVEIKVMEYGAFLAATNKSEHAMFVGGWGNATGDGDYNQYNLFHSSSHGATGNQFFYSNPEVDKLIEEARKEKDETKRKELYKQLQEIELKDALLVPIRGINHIAATTKNIKGFWIDPSGYLRLEGVELQ

SEQ ID NO: 46026 - protein, 136 aa, Bacillus anthracis; identical to SEQ ID NO: 45595
  MISC_FEATURE (22)..(22): X=any amino acid
  MISC_FEATURE (24)..(24): X=any amino acid
  MISC_FEATURE (129)..(129): X=any amino acid

SEQ ID NO: 46027 - protein, 697 aa, Bacillus anthracis
MMRPVVVKEKRVNESHIHAVEDEVRQAKTMDRDIVKHAMKQSVAKLNPKVMIKNPIMFVVEIGFVITFILSFLPSHSSSIPGWFNITVSLILLFTVLFANFAEALAEGRGKAQADSLKQSKKDVFANVVKENGEIVQVSATDLRKDDVVIVKQGEMIPSDGEVIKGLASVDESAITGESAPVIKEAGGDFCSVTGGTMVVSDEITIVITSNPGKSFIDKMISLVEGAARQKTPNEIALNTVLTSLTLIFLIVVVTLPIFTNYLGFQIDTAVLVALLVCLIPTTIGGLLSAIGIAGMDRVTKFNVLAMSGKAVEAAGDINTIILDKTGTITFGNRMAHTLLPVGNETIEQVGKWAAISSVLDETPEGRSVIEYVQAKSISYNRELAEQGEFIPFKAETRMSGVDLQDGMKVRKGAVGSVIEWVRSQGGTIPKDVNQKADFISKEGGTPLVVAVDNRIYGLIYLKDTVKPGMRERFEQLRQMGIKTVMCTGDNPLTAATIAKEAGVDEFVAECKPEDKIAVIKAEQDKGKLVAMTGDGTNDAPALAQADVGLAMNSGTTAAKEAANMIDLDSNPTKIIEVVGIGKQLLMTRGALTTFSIANDIAKYFAIIPAMFTLAIPQMEALNIMKLTSPLSAILSALLFNAVIIPLLIPLAMKGIAYKPMSSNALLGRNLLIYGLGGVIVPFIGIKVIDIIVGLFI

SEQ ID NO: 46028 - protein, 472 aa, Bacillus anthracis
MRASDDKALQYAIAEITEIATGFGLDFYPMRYEICPAEIIYTFGAYGMPTRFSHWSFGKQFFRMKLQYDLGLSKIYELVINSDPCYAFLLDTNSLIQNKLIVAHVLAHCDFFKNNIRFSNTKRDMVESMSATAEWVKAYEHKYGKEEVETFLDAVLAIQEHIDPSLMRPKLAWSIDDLEEEEVEKKKASQYDDLWNLDNRNKKQERSNVRKKKKIPPQPEKDLLLFIEEYSRELEDWQRDILTMMREEMLYFWPQLETKIMNEGWASFWHQRILREMDLTSDEAIEFAKLNAGVVQPSKTSINPYYLGIKMFEDIEERYNNPTEEMKRRGVKPGSGRDKIFEVREIEWDVSFLRNYLNKDLVMREDMYLFQRQGKEYKVIDKEWEHVRDQLVNMRTNGGFPYLVVEDGDYLKNGELYIKHSYEGIELDLKYLEKVLPYLHQLWGRTVHMESIVESKGVVFSYDGKMVHRKYV

SEQ ID NO: 46029 - protein, 1405 aa, Bacillus anthracis
LILEDGTVLIGTGFGGEIEKSGEVVFTTGMTGYQETLSDPSYCGQIVTFTYPLIGNYGINRDDFESIHPSVNGLIVNEICDHPSNFRNEISLNDYLKERNIPGLAGIDTRKLTRKIRQYGTLRGRLCNMDADVEYIVSQLKATVFTDHVKRVSTKDPYPSPGRGHRVVLVDFGMKHGILRELNKRDCDVIVVPYNTTAEEILRLSPDGIMLSNGPGDPKDVPEAIEMLKDIIGKVPLFGICLGHQLFALASGANTSKLKFGHRGLNHPVKNIATGKVAITSQNHGYAVEEESVENTELEITHVALNDGTVEGLRHKKFPAFTVQYHPEASAGPEDANDLFEDFLTMIENFKKEGEELCQKRLDINTILVIGSGPIVIGQAAEFDYSGTQACQSLKEEGYKVILVNSNPATIMTDTATADKVYIEPLTLEFVSRIIRKERPDAILPTLGGQTGLNMAVELAKSGVLEECGVEILGTKLSAIEQAEDRDLFRTLMQELNEPTPPSEIIHNLDEAYGFVNEIGYPVIVRPAFTLGGTGGGICHNEEELIEIVTSGLKHSPVTQCLLEKSIAGCKEIEYEVMRDSNDNAIVVCNMENIDPVGVHTGDSIVVAPSQTLSDREYQMLRNTSLRIIRALGIEGGCNVQLALDPYSFQYYVIEVNPRVSRSSALASKATGYPIAKLAAKIAVGLTLDEIVNPVTQKTYACFEPALDYVVSKIPRWPFDKFESANRTLGTQMKATGEVMSIGRNLEESLLKAVRSLELGIYHLELDHLKELDKETMKKRIIKADDERLFIVAEAIRQGVTKEEINEWCEMDFFFLQKVENIVNMEREVKANVGNMEVLQTAKEMGFSDHYIAAAWNKTEREIYDMRKENNMTPVFKMVDTCAAEFESATPYYYSTYADENELIVTDRKSVVVLGSGPIRIGQGVEFDYATVHSVWAIKEAGYEAIIINNNPETVSTDFSISDKLYFEPLTIEDVMHIIDLEKPEGVIVQFGGQTAINLAAKLEEHGVKILGTSLEDLDRAEDRDKFEAALTKLGIPQPVGKTATTVEQAVAIAEEIGYPVLVRPSYVLGGRAMEIVYRQEELLHYMKNAVKVHADHPVLIDRYMVGKEIEVDAISDGENVFIPGIMEHIERAGVHSGDSIGVYPPQSLSEKLKEQIIEHTIALGKGLNIVGLLNIQFVVFKDQVYVIEVNPRASRTVPFLSKITGVPMANVATKVILGQDLVEQGYGTGYHPEEKEVYVKAPVFSFAKLRSVDTTLGPEMKSTGEVMGKDLTLEKALYKGLVASGINIPTHGSVIITVADKDKEEAMEIAKRFHEIGYNLLATAGTAQSLTEQNIPVQVVNKIDSEDYNLLDIIRQGKAQFVINTLTKGKQPARDGFRIRRESVENGVACLTSLDTTRAILRVL

SEQ ID NO: 46030 - protein, 119 aa, Bacillus anthracis
MLVAYDSMTGNVKRFIHKLNMPAVQIGEDLVIDEDFILITYTTGFGNVPERVLEFLERNNEKLKGVSASGNRNWGDMFGASADKISAKYEVPIVSKFELSGTNNDVEYFKERVREIATH

SEQ ID NO: 46031 - protein, 299 aa, Bacillus anthracis
KKKILFWVLGILGVLIIGGGIYAYNVYSSVSNTLKEVHQPLKRDQNNSNVGEKVSKSEPVSILLLGADERGEDKGRSDSLMVITLNPKNNSMKTVSIPRDTYTEIVGKGKSDKINHAYAFGGVDMSVATVENFLNVPINYYIEVNMEGFKDIVDAVGGVDVKNDLEFTQDGHHFAKGNIHLTGDQALAFTRMRKQDPRGDFGRQMRQRQVMQGVIKKGASFSSLTGYEDVLSAIQKNVETNLTQDQMFDMQKNYKDCLKNSEDIQIPGDGHKAADGIWYYYVPDAAKQDLTNKLRTHLE

SEQ ID NO: 46032 - protein, 327 aa, Bacillus anthracis
MNKKTWSFLIVTALLIVMTSLSAMKGSLEVGIVELVQGIFTGGNEDVEVIKDLRFPRIIIALFTGAALAVSGVLFQAVMKNPLADAGVIGISSGASFMTLVIITLFPQFFFWTPVFAFLGGAFACYLVYAFSWKSGLSPLRIILVGIAINAMFTGLNESFITICGYFIKSIKQTTTSNITMKTWGDVEIMVTYGTIGLVLALFVGAWCNLLSLQDKTAKNLGLHVTRVRLIISVIAVLLAAVSTAIAGVIAFVGLLVPHISRQLVGSDHKVLIPFSALAGALLILTADTIGRLIVPPNEIPAATIMAVIGGPFLIFLLRKSDKVHGN

SEQ ID NO: 46033 - protein, 114 aa, Bacillus anthracis
  MISC_FEATURE (103)..(103): X=any amino acid
VAKKVIKMVKLQIPAGKANPAPPVGPALGQAGVNIMGFCKEFNARTADQAGLIIPVEITVFEDRSFTFISKTPPAAVFLKKEAGIESGSGEPTGNKVPTCKAXKVREIAETKMP

SEQ ID NO: 46034 - protein, 451 aa, Bacillus anthracis
MNTVSKKHIFFTGLMLFSLFFGAGNLIFPPMLGQNAGENFWPAMIGFLLTGVGLPLLTVIAISLSGNGMQQLASHVHPLFGIFFTVVVYIAIGPSMGIPRVANVAYEMGVSSFLPETIRSSSLVLFVYTIIFFAIVFWLSLNPSKLVDRIGNILTPILLLSIFLLFVKSVFTPLGQSGPAMQEYQTFPIFKGFMEGYLTMDTISALAFGIIVVNAIRSKGVNDRKSIAIATAKAGLIAATGLVLVYGALGWLGTTSVSLGYAKNGGQLLTVIVQQLFGPYGLLLLALIVTLACLTTCVGLVSACSQYFSTLLTKFSYKTFASIICALGLLVANLGLTKIIAISVPILLVVYPIAIVLVLLSLLHKYFGGYRSVYVGALIGAAIVSVFDGLKQGGISVSFITSYFEFIPLYNEGIGWLVPALTGALIGLTIAKLSGAKKVPLLTESREVKAS

SEQ ID NO: 46035 - protein, 157 aa, Bacillus anthracis
MYQVNFYQITSETDAEKQRQSQEVNKTNDFIQPAAGRYTSRFEKRGGKMHHGLDIAASGTVPVVAAAEGVITRSYYSTSYGNVVFISHNINGQTYTTVYAHLKSRSVSAGQKVKQGQQLGIMGNTGQSEGQHLHFEIHKGEWNAQKSNAMDPKIYID

SEQ ID NO: 46036 - protein, 395 aa, Bacillus anthracis
MAKAKFERSKPHVNIGTIGHVDHGKTTLTAAITTVLAKAGGAEARGYDQIDAAPEERERGITISTAHVEYETETRHYAHVDCPGHADYVKNMITGAAQMDGGILVVSAADGPMPQTREHILLSRQVGVPYIVVFLNKCDMVDDEELLELVEMEVRDLLSEYGFPGDDIPVIKGSALKALQGEADWEAKIIELMAEVDAYIPTPERETDKPFLMPVEDVFSITGRGTVATGRVERGIVKVGDVVEIIGLAEENASTTVTGVEMFRKLLDQAQAGDNIGALLRGVAREDIQRGQVLAKSGSVKAHAKFKAEVFVLSKEEGGRHTPFFANYRPQFYFRTTDVTGIIQLPEGTEMVMPGDNIEMTIELIAPIAIEEGTKFSIREGGRTVGYGVVATIVE

SEQ ID NO: 46037 - protein, 172 aa, Bacillus anthracis
LKEYMLKQVDSHAWANIRLFDRIKELPNYEAIFSEQIQSVFPSIKDTFAHIYITDQVWLHILHGKSMNEAIQDRENLRKQIEPKSLYELEKLSENMANQYKDFLSTIQDVNAVFVIENPYAGALETFIFELVQHVVNHGTYHRGNIYSMIPSLGHFSTMMDFVLYLHMVKKQ

SEQ ID NO: 46038 - protein, 73 aa, Bacillus anthracis
MSFKWKPQPAILIGLSALGAVTGNGLIVSRTIEGVARQLELKGALQTIMFIGVALVEALPIIGVIIAFIVMNK

SEQ ID NO: 46039 - protein, 91 aa, Bacillus anthracis
MRLDKFLKVSRLIKRRTLAKEVADQGRISINGQVAKASSDVKVADELTIRFGQKIVTVKINELKETTKKEDAANMYSLVREEKVKAEEGLF

SEQ ID NO: 46040 - protein, 289 aa, Bacillus anthracis
  MISC_FEATURE (26)..(26): X=any amino acid
  MISC_FEATURE (233)..(233): X=any amino acid
LVSIMGRPNVGKFPFFNPIIGQKICXMSGQGNNPSCNKFQGRISRKNDSQVIFIDTPGIHNPKHKLGDFMVKMPQTTLKEVDIVLFMVNAVEGFGRGEEFIIGEVKETKQPVFLVINKIDQVHPEQLLELIDQYRKLHDFAEIVPISALDGNNAEALIGTIKKYLPGRTTIYPDNQVTDHPEEIYYCRAIREKVLHLTREESAHFCSWWYRGIQKREGRSGLYQCNDCVERPXRKRDYYRKTGKMLKEVGKRARFDIEALLGSKVFLEVWVKVQKDWRNKMSQLRDPGF

SEQ ID NO: 46041 - protein, 255 aa, Bacillus anthracis
  MISC_FEATURE (6)..(6): X=any amino acid
  MISC_FEATURE (106)..(106): X=any amino acid
  MISC_FEATURE (167)..(167): X=any amino acid
  MISC_FEATURE (169)..(169): X=any amino acid
LIFIGXFQSYRKGDRIGFWVLWMEGVRHLILRWLGVPDSERTLLLPLLSGIYFYVGLWITMSLVINRFMRIDFLVFFTNVVAFGVSAFSIFTPLGKDVAGYLQKNXISELGTELAGRAFISYATFTVSFIFSIMYLLQYRLLKKKKWNARLRRLGNFPKAESMSSGXNXFSVPFFYLAILLGCIWGYTKWDNSHWYDTKVIGSFVVLFVYGAGLYLRAADVLPRKKIVQWTMGAFLVMLINIFLLSSLSNFHFWY

SEQ ID NO: 46042 - protein, 251 aa, Bacillus anthracis
MKAILYICHGSRLKAAKEEAVAFITSCMNRVEVSIQEICFLELASPTIDEGFRTCVKRGATEIIVIPVFLLAAGHVKKDIPFELEKLNNQYPSIKVTYGNPFGVSEALIKSVYSGSGIEQENKNEVTLLLVARGSSDPEVLRDINWIASLFQKEEKIKKVEVCYLAAAEPKFEEKLKEVVERKEKNIVVLPYLLFTGLLMKHIEKEVRQYELDEIKISPYLGKNEAFQYMLIQKTKKLLKGDQYVSTYSAS

SEQ ID NO: 46043 - protein, 105 aa, Bacillus anthracis
MDTIETKAFHLILHGGNARSCSMEAIDCAKRGEFTEAEAKLQEALEELKEAHRVQTDLIQKEAGGEKTEVTLLMVHAQDHLMNAITVKELASEFVELYRKMSVTE

SEQ ID NO: 46044 - protein, 320 aa, Bacillus anthracis
  MISC_FEATURE (48)..(48): X=any amino acid
  MISC_FEATURE (108)..(108): X=any amino acid
  MISC_FEATURE (200)..(200): X=any amino acid
  MISC_FEATURE (209)..(209): X=any amino acid
KYLNSNLKVFSLKLLIRESCWSNIAKAPLGVGLGKNFLVDRFSDGEVXINIGRKYPVGCDVFISISTSFPVNDHIMELLIMIDALKACFCKTINIVIPYYGYARPRPXARFREPITSKLGANLLGNSRCTRVITLDLHAPQIQGFFDIPIDHLMGVPILSDYFETKRLKDILILAPDHRGITPAKKMGKPLKTPIPNNDXPPPPSNRFXGLTLIGIIEGKTEILIDDTTVQDWYNTLAANALVENGASEVYACCTHPVSNKSERIERIQNSNIKELVVTNSIVLPEEKKIDKVHELSVAPLIGEAIIRVYEEESVSVLFN

SEQ ID NO: 46045 - protein, 317 aa, Bacillus anthracis
  MISC_FEATURE (56)..(56): X=any amino acid
  MISC_FEATURE (93)..(93): X=any amino acid
  MISC_FEATURE (96)..(96): X=any amino acid
  MISC_FEATURE (97)..(97): X=any amino acid
  MISC_FEATURE (225)..(225): X=any amino acid
  MISC_FEATURE (227)..(227): X=any amino acid
  MISC_FEATURE (254)..(254): X=any amino acid
  MISC_FEATURE (267)..(267): X=any amino acid
  MISC_FEATURE (295)..(295): X=any amino acid
EKVQGKGISIVLPEGTDERILGAAERLAKEELVKPILVGNKEENWRKKLLAMNFNXEAVGILQSTYIPKKKDAMVASFVGRRKRKSTEEDARXILXXENYFGTMLVYMGKAHGLVSGAAHLTGDTVRPALQIIKTKPRRYKTSGVFIMVREEEKYVFADCAINIAPNSQDLAEIGIESAKTAELFGIDPASCYLSFSTKGCGNFPETRKVVEATWHCKRNGFQNXLXDGEFQIGCSIRPSVAEKKAPRFYNKGXANVFVFPKFRSWXYRVTKSSTFRYLEAVGPILQGFKHACKXPISGCNEEEVYKLALITAAQAL

SEQ ID NO: 46046 - protein, 309 aa, Bacillus anthracis
  MISC_FEATURE (123)..(123): X=any amino acid
EFKQGIEKTRNSFADKVNDLVFRYRKVDEDFLGELEEILIGADVGVSTVMELIDQLKEEVQRRYLSRPQREVQSFLFSEKIKWKFFKGGRRFLLKKVNMQRGCLHSCLLLGVNGVGKPTTNWXMAHKFKSEGKSVLLAAGDTFRAGAIEQLEVWGDRVGVEVIKQGSGSDPAAVMYDAVQAAKARNVDVLLCDTAGRLQNKVNLMKELEKVKRVIEREVPGAPHEVLLVIDATTGQNGLSQAKTFREATNVTGIVLTKLDGTAKGGIVLAIRNEMDVPVKFVGLGEQMDDLQQFDPEQYVYGLFANLVE

SEQ ID NO: 46047 - protein, 265 aa, Bacillus anthracis
MNMEWLEQLLGKEWSLVPAGGVTGDAYIAQNGQQKLFLKRNTSPFLAVLSAEGIVPKLLWTRRVTNGDVISAQKWLPGQKLEPEDMKLERVAKLLKKIHSSKALVQMIQRLGKQPLHAQELLQQLQLVLRGDIRDEETIQQGLQYLMDSLKDIEYNEFVVCHCDVNHNNWLLSDEDELFLIDWDGAVIADPALDLGMLLYWYIPRQEWSEWLGYYDIEMDESLLKRMRWYVIAQTILSIQWHTTKKQQAEAEYWHQYLQQLLASE

SEQ ID NO: 46048 - protein, 475 aa, Bacillus anthracis
MQQTTNEKLHRTMKSRHLFMIALGGVIGTGFFLGSGYTINQAGPGGAILSYLVGGFIMYLTMLCLGELTVAMPVSGSFQKYATKFIGPGTGFMIGWLYWLGWAVTVGLELTSIGLMMKRWFPNVDVWVWCLVFGVILYASNAISAKSYAELEFWFSSIKVITILAFVVLGGSALLGFISYDGKEAAPLFSNFVSEGGLFPNGLAAVLLTMITVNFSFQGTELIGIAAGESENPEKTIPRAIRNTVWRIMLFFILTMTILVGLISWKEAGVIESPFVVVFDKIGIPYAADIMNFVIITALLSVANSGLYAATRILWSLANEGMAPTSFQKVNKRGIPITALVVTIAVAGLSLFTSFLAEDTVYMYLLSIAGLSAVSSWIIIALSQLRFRSQYIKGGGKLEDLKYRTPLYPIVPILALITNSIVVISLAFIPEQRMALYCGIPFIIFCYIYYYINKKRQKPMKVEMEKANETNNQTR

SEQ ID NO: 46049 - protein, 340 aa, Bacillus anthracis
MTKITVVGAGSWGTALAMVLADNGHDVRIWGNRSELMDEINTKHENSRYLPGITLPSTIVAYSSLEEALVDVNVVLIVVPTKAYREVLQDMKKYVAGPTTWIHASKGIEPGTSKRISEVIEEEIPEDLIKDVVVLSGPSHAEEVGLRQATTVTSAAKRMEAAEEVQDLFMNSYFRVYTNPDIVGVELGGALKNIIALAAGITDGLGLGDNAKAALMTRGLTEIARLGRKMGGNPLTFAGLTGMGDLIVTCTSVHSRNWRAGNMLGKGHSLEEVLESMGMVVEGVRTTKAAHELAEKMEVEMPITAALYDVLFNGNNVKDAVGSLMGRVRKHEVEAIPDLL

SEQ ID NO: 46050 - protein, 180 aa, Bacillus anthracis
MGNFHATTKFAVHHNGKCAMAGDGQVTNGNAGGMKHTARKSRKLFQGKVLAGFAGSVADAFTPFEMFEGKLEEYNGNLQRAAVEMAKQWRGDKMLRQLEAMLIVMDKTTMLPCFGTGEVIEPDDGILAIGSGGNYALSAGRALKQYASEHLTAKQIAKASLEIAGDICVYTNHNIIVEEL

SEQ ID NO: 46051 - protein, 315 aa, Bacillus anthracis
  MISC_FEATURE (186)..(186): X=any amino acid
  MISC_FEATURE (187)..(187): X=any amino acid
  MISC_FEATURE (194)..(194): X=any amino acid
MRKIIVGSRKSKLALTQTNWFIDQLKALGLPYEFEVKEIVTKGDVILDVTLFKISRKGVGCEKRLTQRSFRKDIDMAGHKMKDMPAVLPEGLMIGCTPKRVDPRDAFISKSGASYKELARGVIFSFGVVLRCRAPVASLARPDLQVKGGFGGNMDYPVFGQIKRRKFSDPIILSDGGNYKRMGWDXXSISRPFXMRRLCVPAVGQGALAIECREDDKDLLQLLAHINDAVTEKTVAAYTSILHKLEGGCQVPIAGYATITENDAIELTALVGSMDGSVLLKETVVGTDPEKVGLEAADRLIKQGAKELILAANKG

SEQ ID NO: 46052 - protein, 101 aa, Bacillus anthracis
MGESKAVNSLQNSLPKSEMLRLPGRNGARKTTTIQMLLRIITPNESSIYWGWKKILGLWGVPKDTYPKKRGVFPQSGGIKPPGGIFGKLKGKGEKRSRSCY

SEQ ID NO: 46053 - protein, 316 aa, Bacillus anthracis
  MISC_FEATURE (189)..(189): X=any amino acid
  MISC_FEATURE (199)..(199): X=any amino acid
  MISC_FEATURE (200)..(200): X=any amino acid
  MISC_FEATURE (261)..(261): X=any amino acid
  MISC_FEATURE (269)..(269): X=any amino acid
  MISC_FEATURE (311)..(311): X=any amino acid
  MISC_FEATURE (314)..(314): X=any amino acid
MNVQESFVTALDESEIYLRKWLPECEPKGIIQIAHGMTEHAGVYTDFIDALLEAGYGVYAHDHKGHGKTVEGEEGLGHFEPDIGWNQPVYDVIFVSEMIKEEQACLLFLLGHSMGSFLSRRAVQLRSELYDGFLISGTGGNSGVVRIVGHKVTTIEMKLRGAKTKRPMLNFLSFGNLNSNFKPNRTNFXMLSSDNDESXXYIGESLCGIIWTTNFFRELFFCVLQMDKFRRIPEEGQAILPIHIILWETRDLVGEMGKKGXKKCVENLXKCGVKDVTLRLFENERHEMVHEVNKEEVFKDLISWLDAHNRXESXAQ

SEQ ID NO: 46054 - protein, 232 aa, Bacillus anthracis
  MISC_FEATURE (53)..(53): X=any amino acid
  MISC_FEATURE (54)..(54): X=any amino acid
  MISC_FEATURE (62)..(62): X=any amino acid
  MISC_FEATURE (63)..(63): X=any amino acid
  MISC_FEATURE (81)..(81): X=any amino acid
  MISC_FEATURE (102)..(102): X=any amino acid
  MISC_FEATURE (115)..(115): X=any amino acid
  MISC_FEATURE (179)..(179): X=any amino acid
PLVSVLIPTYNRPHYFEKALCSVLEQTYPNVEIIIGDDSTNDETEKVFSKVFXXQHSKYFSXXKNWSIFWHNLENAPLCYXIRANGEIKNFLDGGGLFSGKXNSKKGGNSFKMFXIKELKLEPSHRQVNDGERHLIADVYSTMPLFDTDTIIEGIQLGNLVITNQKNYIGEPTTVLFPXSDLTEPYGMFDQRRYLCNVDVASWVIPLSKGKPVYKRNTPGHFGFHSNQQLNK

SEQ ID NO: 46055 - protein, 299 aa, Bacillus anthracis
MNVKKLLQLFVGYLQIERNYSKYTIASYQNDLEHFVQFMEREGISSFLDITYADVRLYLTTLHDEKLARKSVARKVSSLRSLYRFLMREGYRKDNPFALASLPKKELSIPKFLYAEELEELFEVSDTETPLGQRNQALLELMYATGIRVSECVNLQLTDIDFAVGTILVMGKGKKQRYIPFGSYAQDALITYIENGRKQLAEKTEEQSHMVFLNAKGTPLTSRGVRYVLNELIKKASLTMRISPHILRHTFATHMLDEGADLRTVQELLGHENLSTTQIYTHVSKERLRSVYMKHHPRA

SEQ ID NO: 46056 - protein, 906 aa, Bacillus anthracis
MNWYGMRAHEVEESTNTNVKVGLTEKEAEGRIKKFGTNELEEAKRPSALMVFLAQFKDFMVLVLFGATIVSAFLGEYIDSIAIVAIVIINGILGFFQERKAEKSLEALKELAAPQVTVLRNGKWVKAPSKALVLGDVIKFSSGDRIGADVRLVEASSLYIEESALTGESVPVQKKVEALQGQDVSIGDQKNMAFMGTMITRGSGTGVVVATGMNTAMGQIANMLQNAEQMETPLQRRLEQLGKILIIVALVLTALVVLAGVYQGNEVYHMFLAGVSLAVAAIPEGLPAIVTVALSLGVQRMIKKRAIVRKLPAVETLGCASVICSDKTGTMTQNKMMVTHMWSGGELWKVTGQGYEPNGSFMKGEKEINAAKTKALYQLLTFGSLCNNANIIQKKKAYVLDGDPTEGALVAAAMKAGITREALKGKFEIIRELPFDSTRKMMSVIVRDREGKKFVVTKGAPDVLLQMSQTILWGDKQQPLSELYRKEVQAAIHSLGSQALRTIAVAFKPLKVTDSIEHERDVEKDFMLVGIQGMIDPPRPEVKQAVKECREAGIRTVMITGDHKVTAMAIAEQLSILPQGGRVVEGVELASMDVEELENVVEDTYVFARVSPEHKLKIVKALQNKGHIVAMTGDGVNDAPAIKTADIGIAMGITGTDVAKEASSLVLLDDNFATIKSAIKEGRNIYENIRKFIRYLLASNVGEILVMLFAMLLALPLPMVPIQILWVNLVTDGLPAMALGLDKAEGDVMKRTPRHPKEGVFARGLAWKIISRGFLIGAVTLVAFIIAYNQHPNELKYAQTVAFATLVLAQLIHVFDCRSEHSVFHRNPFGNVYLVGAVIISLLLMLVVIYYPPLQPIFSTMPIQARDWLLIGGLSSIPTFLLVGSLLTGKKGKKKPILYKKGLNLK

SEQ ID NO: 46057 - protein, 550 aa, Bacillus anthracis
  MISC_FEATURE (215)..(215): X=any amino acid
  MISC_FEATURE (328)..(328): X=any amino acid
  MISC_FEATURE (364)..(364): X=any amino acid
  MISC_FEATURE (370)..(370): X=any amino acid
  MISC_FEATURE (383)..(383): X=any amino acid
  MISC_FEATURE (388)..(388): X=any amino acid
  MISC_FEATURE (398)..(398): X=any amino acid
  MISC_FEATURE (452)..(452): X=any amino acid
  MISC_FEATURE (460)..(460): X=any amino acid
  MISC_FEATURE (475)..(475): X=any amino acid
  MISC_FEATURE (506)..(506): X=any amino acid
  MISC_FEATURE (519)..(519): X=any amino acid
EKVKTTIRAPRGTGVQTKGWVQEAALRMLMNNLDPEVAEKPEELVVYGGIGRAARNWESYQAIVDSLKTLESDETLLVQSGKPVAIFKSHEDAPRVLLANSNLVPKWANWDHFRELEKKGLMMYGQMTAGSWIYIGTQGILQGTYETFVKAARQHFGGSLKGTLTLTAGLGGMGGAQPLAVTMNGGDVIAIDVDKRIIDRRIEKRYCDMYTESLXEALAVANEYKENKEPISICFLGNAAEILPELVKRNITPDLVTDQTSAHDPLNGYIPVGHALRRGAKLREEDPERYVQLSKESMTKHVEAMLAMQEKGAITFDYGNNIRQVAFXRKLKKCIRFPRIGPPLIPPINLRGKGPFRWVALFWXPRRFLXTRRKVFFRVLREXGPFMXLEPHGSAASXFQGLPSRICWLGYGERAKLGRIINEMVANGELSAPIVIGRDHLDCGSVASPNPXNRSDERRXDSVADWPILNALINXCTRCQLGYLSTTLVAFGMVIHFAQKCYCCSXTRARHQTCLSVYXLLTWYGCCSSRDAGYDLAVETAKEKGVNIPM

SEQ ID NO: 46058 - protein, 459 aa, Bacillus anthracis
MKGSPFIRGTIFLTMATMISKMLGFIYVIPFTAMVGTSGYVLYTYAYRPYTIMLSIATMGLPLAVSKMVSKYDQLNDYHTVKRVLKSGIVFMFIMGVISCFTLYMLAPHLAKLVIDGNDQTGNSVAAVTTNIQIVSFALILVPVMSLLRGFFQGFQSMGPSALSVVVEQFFRVLTILIGSFVVLYVLKASVSLAVGISTFGAFMGAIGGLTVLSAYYIRRRKHLKKKEMASIPQTTKSFFSLYKELFTYSIPFVVVGLAIPLYQTIDTFTINKLLIQIGYMQGEAEKINAIIGLVQMVVLIPVSVATAFSMSLVPEMTKAYTAGNVKLLYKHFTRTNLLVVGITVPAAIGMMVLAKPVYTLLFGAGNDPEMGRVILQYYAPACILFSLFTVTAAMLQGINQQQKTVLGLVIGIIVKIVLNIVLLPYFDYVSFIISTYAGYTISVGFNLWMLSKYVIKAT

SEQ ID NO: 46059 - protein, 119 aa, Bacillus anthracis; identical to SEQ ID NO: 46030

SEQ ID NO: 46060 - protein, 807 aa, Bacillus anthracis
MTVAEFRKLCAEYAYEQVERQREQFKRLGVRADWDNPYITLEPAYEAQQIKVFGDMAKKGYIYKGQKPVYWSPTSESALAEAEIEYQDKKSASIYVAFSVKDGKNVLEGDEKYIIWTTTPWTLPANLGISVHPELEYAIVKVNDEKYIIASELFETVAKTLEWENAEVVKTVKGSELEYTVAKHPFYDRDSLVMLGDHVTTDAGTGCVHTAPGHGEDDFIVGKKYGLEVLCPVDDKGVLTEEAPGFEGLFYDKANKPITEKLEEVGALLKLTFITHSYPHDWRTKKPIIFRATAQWFASIEAFRKELLEAVAETKWVPAWGETRLHNMVRDRGDWCISRQRAWGVPIPVFYAENGDPIITDETINHVADLFREHGSNVWFEREAKDLLPEGFTHPGSPNGEFRKETDIMDVWFDSGSSHQAVLEERDDLQRPADLYLEGSDQYRGWFNSSLSTAVAVTGKAPYKGVLSHGFVLDGEGRKMSKSIGNIVVPKKIMDQLGGDILRLWVSSVDYQSDVRISDDILKQVAEVYRKIRNTFRFLLGNLDDFKPSENTVAVAELREVDRYMLVKLNDLITKVKEAYETYDFAAVYHAIHNFCTIDLSSFYLDFAKDILYIEGANHEDRRAIQTVLYDVLVALTKLVTPILPHTADEVWPYIPGVTEESVQLTDMPEAVQLDDAEALKTKWDAFMTLRDDVLKALEVARNEKVIGKSLNASITLYPTAEMKAMLESINEDLKQLFIVSEYKLGGMMEEAPADAPKYEHTAVVVAQATGETCERCWVVSETIGKDAEHETLCERCATVVKENYVK

SEQ ID NO: 46061 - protein, 400 aa, Bacillus anthracis
MRLMFYYGCLVYFIEGIIHVCIGSLIPSLIQYYGRTPDQLGVLIFFQFTGFLFGVLSSPILVRKYHYFKTITLGVLVMSIVLGGFIYIKEWAYLSVICFVLGYGAGLLETTVGSFIISAERNSAAKFSILEVWFGVGALGFPLLVNYIIKFYEWYFILYGILLFFIFTLFVWYVFGRTKFLNFSPQNNEKGGASLSSFTLKFKSEKITVILFISLFAFLYAGIETNLANFLSTIMILTNNELISSVSISCFWLAIVIGRILVGKLAHKFNYWTYITSSCFTLVILLSLFPFVRGTGMYLFIIFIIGLVIAGVFPITLILASRIMENNIDQVTSLFIASASLGGALVSFLISWSLSLNTITVTFGIFSLFALSLGCIILKMRKISTYSNESAKKVESMKNL

SEQ ID NO: 46062 - protein, 324 aa, Bacillus anthracis
MLHLTRYNNMNRVGIQMNKPKIGMIGLGSIAQKAYLPTLTKETNWNFVGAFTPNAEKRKQICQQYRIQDFHSIETLASECDAIFVHSSTASHYEIVSELLKKGIDVYVDKPLAATVEQAEKLVELSEKYNRKLMVGFNRRFVPMYVAAKEQAHHISWIRIEKHRTNKIGPYTYDFTMLDDYLHIVDTARWLANDELNVVHNMMQINEKNELLYGHHTYTTANGLLLSTAMHRHAGTNLEQIELVTAGKIIRVKNMNTFEVEQENSVSQSGSPSWETTLKQRGFEDAVHHFIDCVHGDTKPLVDGLEGLKTQQMLQSLLNDINKN

SEQ ID NO: 46063 - protein, 109 aa, Bacillus anthracis
MAYLLQVDFPFEGPFGEEMEKGFWDLAKSINEEEGFHWKIWTENQETKEAGGIYVFEEKQDAEKYAEMHKNRLEAAGVKDIRVRIFNINEKLTAKESWVYEIIPKVRQA

SEQ ID NO: 46064 - protein, 202 aa, Bacillus anthracis
MKIDRPKISPELSLKSFHDIFYEEDPTLEMCEIIDSTFENESVDRVRLYSAVIKNCKFTNTDFSNIDITDVCFENCDLSNVNLSNSSVHRVEFKNSKLIGVNFTESSLGNVEFSTFGNSKLEKIIFNEASLNNADFFDCKLKKVEFDSCSLNEANFDQPSLKGIDISSSTFDTLTVSVNDLRGCKVSPYQAIQFASLLGLII

SEQ ID NO: 46065 - protein, 428 aa, Bacillus anthracis
  MISC_FEATURE (39)..(39): X=any amino acid
  MISC_FEATURE (59)..(59): X=any amino acid
  MISC_FEATURE (117)..(117): X=any amino acid
  MISC_FEATURE (187)..(187): X=any amino acid
  MISC_FEATURE (190)..(190): X=any amino acid
  MISC_FEATURE (195)..(195): X=any amino acid
  MISC_FEATURE (228)..(228): X=any amino acid
  MISC_FEATURE (232)..(232): X=any amino acid
  MISC_FEATURE (237)..(237): X=any amino acid
  MISC_FEATURE (240)..(240): X=any amino acid
  MISC_FEATURE (241)..(241): X=any amino acid
  MISC_FEATURE (328)..(328): X=any amino acid
TISEALHKEALEHIVGGVNRPSRTFKTAGGGASYAMERXKSAYFWDVERNKYIDLFAAXRTYITGHGHPTLPKAITTAAEKWCTFRNTNSLEVKFAKMVKESMPALDKVRFRKLWYXNVMTTISGRSWLTQPHKNIEICWVGTIAIPDLITEATGIGPFLTMETLEFTRGTTNIPPRNYFLFHLIMXKLXRSIRXWGHEVAAILVEPIVGNFGYGRAENLAFLEKSEXTVSXNWGIXNLXXSLFPLSRSCTVGAQDLLGGPPDLTRLGKVIRGGQPIGAYGGKKEIMGTVAPLDLHIQLVQWGKSCFYGIWIALSRSSFNRRGFIENXMSLVACLEKEFRASCKTNIDITLNRLKGALTVYFTTNTIEDYDAAQDTDGEMFGKFFKLMLQEGVNLAPSKYEAWFLTTEHTKEDIEYTIEAVGRAFAAL

SEQ ID NO: 46066 - protein, 449 aa, Bacillus anthracis
  MISC_FEATURE (258)..(258): X=any amino acid
  MISC_FEATURE (327)..(327): X=any amino acid
  MISC_FEATURE (410)..(410): X=any amino acid
GRCENGRYTYSSPNIAKPFFMGHLRSTMIGNSLKHISEKCGYEVVGINYIGDWGTQFGKLITAYKKWGNEAVVKEDPIRELFKLYVQFHEEVKDDEELEEEGRAWFKKLEEGDEEAVELWNWFRHESLKEFSRIYELLGVEFTNFQGEAFYNNLMEDFIGILEEHDLLEESEGALVVNLEEEGMPPCLIRKSDGATIYATRDLTAALYRQNTFGFDKALYVVGPEQSLHFNQFFTVLKKLGYTWGDGMEHVPAGFLFXDGKKMSTRKGRVILLEEVLEEAIELAKQNFGGKNSNLKPERRVAKQGGRWAVIFPGLKKGAYAQIEFSXENMLKFEGENRPVRTYTHARAGSILRKESVEFETCTFALKDDHSWSVVKLLNKFPQVIEIAFNKKEPSVIFEIRIRCSPILKXILRECAYFGGEWKENARSPGHWFMLGRLVLKGGVTFPWG

SEQ ID NO: 46067 - protein, 237 aa, Bacillus anthracis
  MISC_FEATURE (25)..(25): X=any amino acid
  MISC_FEATURE (109)..(109): X=any amino acid
RAVLVSLSLLLVFVLSGCSNATPNXCHIVREFWDSFYFVYPISFMIQFVAHHIPGASFGIAIIIMTLVIRSAMIPLAVSQYRSQAKMKKMQPELQKLKQKYGNVSKDLXKTKTVSKRNVRTNEIQPLGIHLAVCWAHLIQMPNFPPWNYAISRTEEIRTSTFLWVNLGHADPLSYFRIIAALTPFIQMKVFQSRSKCWRQVQMLKMQQIMMPAMILFMGYCAPSGTLWWNGITGDLF

SEQ ID NO: 46068 - protein, 902 aa, Bacillus anthracis
  MISC_FEATURE (30)..(30): X=any amino acid
  MISC_FEATURE (215)..(215): X=any amino acid
  MISC_FEATURE (222)..(222): X=any amino acid
  MISC_FEATURE (543)..(543): X=any amino acid
  MISC_FEATURE (549)..(549): X=any amino acid
  MISC_FEATURE (556)..(556): X=any amino acid
  MISC_FEATURE (594)..(594): X=any amino acid
  MISC_FEATURE (597)..(597): X=any amino acid
  MISC_FEATURE (635)..(635): X=any amino acid
  MISC_FEATURE (649)..(649): X=any amino acid
  MISC_FEATURE (659)..(659): X=any amino acid
  MISC_FEATURE (663)..(663): X=any amino acid
  MISC_FEATURE (687)..(687): X=any amino acid
  MISC_FEATURE (693)..(693): X=any amino acid
  MISC_FEATURE (711)..(711): X=any amino acid
  MISC_FEATURE (718)..(718): X=any amino acid
  MISC_FEATURE (732)..(732): X=any amino acid
  MISC_FEATURE (737)..(737): X=any amino acid
  MISC_FEATURE (809)..(809): X=any amino acid
  MISC_FEATURE (810)..(810): X=any amino acid
LMPKTRDSQWRGNLTKTWSLQCQKKWGRNXIIYETGPKTFEKGRPLNIVLHDGPPYANGDIHMGHALNKVLKDFIVRYKSMTGFCAPYVPGWDTHGLPIEQALTNKGVKRKEMTVAEFRKLCAEYAYEQVERQREQFKRLGVRADWDNPYITLEPAYEAQQIKVFGDMAKKRYIYKGQKPSFTGHPTSESAFSGKLKLNTHDRKSASIYVAFSVXDGKERIXKGDEKYIIWTTTPWTLPANLGISVHPELEYAIVKVKEEKYIIAFGLWETVAKTLEWENAEVVKTVKGSELEYTVAKHPFYDRDSLVMLGDHVTTDAGTGCVHTAPGHGEDDFIVGKKYGLEVLCPVDDKGVLTEEAPGFEGLFYDKANKPITEKLEEVGALLKLTFITHSYPHDWRTKKPIIFRATAQWFASIEAFRKELLEAVAETKWVPAWGETRLHTMFRDRGDWCISRQRAWGVPIPVFYAENGDPIITDETINHVADLFREHGSNVWFEREAKDLLPEGFTHPGSPNGEFRKETDIMDVWFDSGSSHQAVLEEARXLQSPGXLYFRGIXQYRGWFNSSLSTAVAVTGKAPYKGVLSPWLRIRGERTXNEXVIGNIVVPKKIMDQLGGDILRLWVSSVDYQSDVPYFRXYFKQVAKVYRKNPXHISVSYMETXTTFXPSENTVAVAELREVDRYMLVKFKXLNLQKXRRHMSHCDFAAVYHANPXLLYKLIXFILLRFCKRHFIHXRCEPXRRRAIQTVLYDVLVALTKLVTPILPHTADEVWPYIPGVTEESVQLKDMPEAVQLDDAEALKTKMESIYDIAXXRIKSVRVARNEKVIGKSLNASITLYPTAEMKAMLESINEDLKQLFIVSEYKLGGMMEEAPADAPKYEHTAVVVAQATGETCERCWVVSETIG

SEQ ID NO: 46069 - protein, 166 aa, Bacillus anthracis
MSKVIETKQQVVTEIADKLRASKSTIVVDYRGLTVSEATELRKQLREAGVEFKVYKNSLTRRAAESAEMAELNEFLTGPNAIAFSNEDVVAPAKVLNDFAKDHEALEIKAGVIEGKLVTLDEVKAIATLPSREGLLSMLLSVLQAPIRNLALATKAVADQKEEQGA

SEQ ID NO: 46070 - protein, 127 aa, Bacillus anthracis
MSTTWIILLAVIVAFIGYTVWMYFYQKKLITTLSEEEFRAGYRKAQLIDIREADEYTAGHILGARNIPLSQIRLRHKELRKDQPVYLYCQSGFRTGRAAQYLKKQGYKDFYQLQGGFKTWTGKIKKK

SEQ ID NO: 46071 - protein, 428 aa, Bacillus anthracis
MEQMKNERIEKLQESWELDTRWKGITRPYSAEDVIRLRGSIDIEHTLARRGAEKLWASLHTEDYINALGALTGNQAMQQVKAGLKAIYLSGWQVAADANLSGHMYPDQSLYPANSVPAVVKRINQTLQRADQIQHMEGSGDTDYFVPIVADAEAGFGGQLNVFELMKGMIEAGASGVHFEDQLSSEKKCGHLGGKVLLPTQTAVRNLISARLAADVMGVPTIIVARTDADAADLITSDIDPVDKAFITGERTPEGFYRTKAGLDQAIARGLAYAPYADLVWCETSEPNLEDAKRFADAIHKEHPGKLLAYNCSPSFNWKQKLDEKTIASFQKEIASYGYKFQFVTLAGFHSLNYGMFELARGYKERGMAAYSELQQAEFAAEKHGYSATRHQREVGTGYFDEVAQVITGGTSSTTALKGSTEEAQFTK

SEQ ID NO: 46072 - protein, 317 aa, Bacillus anthracis
  MISC_FEATURE (67)..(67): X=any amino acid
  MISC_FEATURE (167)..(167): X=any amino acid
  MISC_FEATURE (176)..(176): X=any amino acid
  MISC_FEATURE (277)..(277): X=any amino acid
  MISC_FEATURE (308)..(308): X=any amino acid
VKLIHLTHPHEQNKLELPPTVMALGFFDGIHLGHQCVIRTAKQIADEKGYKSAVMTFYPHPSGCLGXKKEAHAEYITPMCDKEKIVESLGIDILYVCKFDESFAGAMPQQFVDDYIIGLNVKHVVAGFDYSYGRLGKGKMETLPFSCKRGFTQTVIEKSEFQGRGKXSSTAFRKVXFEIGKMEQIPIYFRRSIYGREERLYHGDKRGRQIGFPHQLMRFSDEYLLPPVGVYAVRLQVHGEWYDGVCNIGYKPTFKEDERPIYLLKVHLFEINQRHIXSKCYGRVAYRIREEKKFNGIDELVEQNRKRXENSQEYFAN

SEQ ID NO: 46073 - protein, 78 aa, Bacillus anthracis
  MISC_FEATURE (77)..(77): X=any amino acid
LSRPGLVLRDLPERPEGIEAGTLKLAGTVEETIFSLADELLSDKEAHDKMSKASNPYGDGRASERIVEAILKHFNKXK

SEQ ID NO: 46074 - protein, 313 aa, Bacillus anthracis
MLGVTGMRVAQSVSELIGKTPIVKLNRIVESDSADIYLKLEFMNPGSSVKDRIALAMIEDAEKKGLLKEGDTIIEPTSGNTGIGLAMVAAAKGYKAILVMPETMSVERRNLLRAYGAELVLTPGPEGMGGAIRQATELAKEHGYFIPQQFKNQSNPEIHRLTTGPEIVEQMGDQLDAFIAGIGTGGTITGAGEVLKEAYKDIKIYAVEPADSPVLSGGKPGPHKIQGIGAGFVPETLDVEVYDEIIQVKTEQAFEYARRVAKEEGILVGISSGAVIYAATEVAKKLGKGKKVLVIIPSNGERYLSTPLYQFES

SEQ ID NO: 46075 - protein, 458 aa, Bacillus anthracis
  MISC_FEATURE (28)..(28): X=any amino acid
MINRTLKQVEQMINGTGLAEQYEGITIXGVSIDTRKIEKGNLYVPIQGERFDGHAFVDKAVENGAVATLWVKDVANPPENLPVIFVEDTLSALQMLAKNYRDQLDVKVIGVTGSNGKTSTKDIVTSLLATKFKVQKTEGNFNNHIGLPLTILNLEENTEVAVLEMGMSSRGEIEFLSKLARPNAAIITNIGEAHLMDLGSREAIAEAKLEIVTGLQEGGVFVYNGDEPLLTNRVPEMNLIAETVTFGDARANDYYPTTVTLQATGTHFKMNREENISFYLPVLGKHNVYNTLASMAIAKYFGVTWEEMKEGLVTLQMTGMRMEIVKTDSGLTIINDAYNASPTAMEAAFHLMNGLDGFSKKIVVLGDMLELGDQEVQFHYEVGKLIDPAKISYVFTYGKLGAQIAEGAKINFPNERVKAYDNKEELVKELQAVVDTKDVVLVKASRGMKLEEVITMLK

SEQ ID NO: 46076 - protein, 377 aa, Bacillus anthracis
MNLDFNNNPFIVIWELTRACQLKCLHCRAEAQYHRHPLELTFEEGKKLIDDIYEMENPMLVFTGGDPLMRPDVYDIAEYAVKKGVRVSMTPSATPNVTKETIQKAKEVGLARWAFSLDGPTAEIHDHFRGTEGSFQLTMNAIRYLHELKIPIQINTVVSNYNVDALEEMAVLIEELECVLWSIFFLVPIGRGKEKDMISPAQHERVFRWLYQLSKKVSFDIKTTAGQHYRRVVIQEKMKEHKKEKQVIQYQDVLMNGMTGRVNGLGRAPKGVNDGNGFVFISHIGDVYPSGLLPIRTGNIRTNSLAEIYRNSPVFQNLRNPDKYKGKCGVCEFRYVCGGSRSRAYAMTGDYMESEPFCVYVPKALRKQKKNIKKGHE

SEQ ID NO: 46077 - protein, 807 aa, Bacillus anthracis
MQAEKFHDLPLEDVLGDRFARYSKYIIQDRALPDARDGLKPVQRRILYSMYVEGNVHDKAFRKSAKTVGNVIGNYHPHGDSSVYEAMVRLSQTWKVRNVLVEMHGNNGSVDGDPAAAMRYTEARLSPIASELLRDLDKETVEFVSNFDDTSEEPVVLPAAFPNLLVNGSTGISAGYATEIPPHHLGEVIDATMMRIDKPNSTVDDLLTVMKGPDFPTGGIIQGIDGIKKAYETGKGKIIIRGKAEVETVRGGKQQIVITEIPYEVNKANLVKKMDELRLDKKLDGIAEVRDETDRTGLRIVVELKKEANSEGILNYLYKNTDLQIPYNFNMVAINNRRPTLMTLPKILDAYIGHQKEVVTRRSQYELRKAENRQHIVEGLKKALSILDQVIETIRASKDKRNAKDNLSAKFGFTEAQAEAIVSLQLYRLTNTDITALQQEADELNKKIIELQAILQSEKRLLQVIKTDLKRVKKTYSDDRRAIIEDQIEEIKIDVEVMIPQEDVIVTVTKEGYVKRTGWRSHNASNGKDFGMKEGDILLERFDTNTTETVLLFTNKGNYIYLPVYEMPDIRWKDLGQHVANIVSLDRDETIIWATVVPNFEEEKRFIVFVTKNGMIKKTELNQYKVQRYSRAFVAVNLKKDDEVVDIFATDGTSDIVLATHGAYALIFHEDEVSPVGVRAAGVKAINLKEDDYVASGKPLNADKDQLILVTQRGAVKRLKASEIEKSTRAKRGLVIFKELKRNPYRIVGIEIVRDDELVYMKTEKHIVEEIDPKAYRNKDRYSNGSLVLDVNDTGEVIETWTKKRPE

SEQ ID NO: 46078 - protein, 370 aa, Bacillus anthracis
MTDQEYMRIALQLAEGTCGQTSPNPMVGAVVVKDGNIVGMGAHLRAGEEHAEVHALHMAGDKAKGATVYVTLEPCSHFGKTPPCCELLIKKEVKRVVIATLDCNPLVSGNGKRKLEEAGIEVTTGVLEAEAVLLNRYFFHYMKTKRPFVTIKTAMSLDGKTATVTGESKWITGEKARADVHQYRHTHDAILVGVNTVIADNPHLTTRIPNGGQNPIRVILDTHLRTPPSSHVITDSLAPTWIIVGTDVNQEKIASYESKNIAIFQMKTKQIEIQDVLHLLGEKQILSLFVEGGQTVHASFLQTKYFNEIVTYISPKLIGGSKAPTLFGGNGFSTLQDALSLEIQEMKQIGDDIKIVAHARNEVTKCLQEL

SEQ ID NO: 46079 - protein, 728 aa, Bacillus anthracis
  MISC_FEATURE (4)..(4): X=any amino acid
  MISC_FEATURE (264)..(264): X=any amino acid
  MISC_FEATURE (436)..(436): X=any amino acid
  MISC_FEATURE (447)..(447): X=any amino acid
  MISC_FEATURE (448)..(448): X=any amino acid
  MISC_FEATURE (462)..(462): X=any amino acid
  MISC_FEATURE (470)..(470): X=any amino acid
  MISC_FEATURE (472)..(472): X=any amino acid
  MISC_FEATURE (527)..(527): X=any amino acid
  MISC_FEATURE (539)..(539): X=any amino acid
  MISC_FEATURE (564)..(564): X=any amino acid
  MISC_FEATURE (599)..(599): X=any amino acid
  MISC_FEATURE (605)..(605): X=any amino acid
  MISC_FEATURE (607)..(607): X=any amino acid
  MISC_FEATURE (653)..(653): X=any amino acid
  MISC_FEATURE (684)..(684): X=any amino acid
  MISC_FEATURE (707)..(707): X=any amino acid
  MISC_FEATURE (708)..(708): X=any amino acid
  MISC_FEATURE (710)..(710): X=any amino acid
KPLXSLKKPSVAPKNFAGYWKGDKKGNGYLEGSKYIVTWALGHLVTLADPESYDVKYKKWNLEDLPMLPERLKLTGIKQTGKPFNGVKNQLPKKEGNEILGTTKPGPERELVAPWNIDKGPFTNPIKRLWISSVTDKAIKDGFANLKPGKAYDNLYASAVARSEADWYIGLNATRALTIRFNAQLNCGRVQTPTGAMIANREDENKNFKAQTYYGIEALTTNHFKTYWADANGKNPHFNIRKKGWGLLKSVKKTIMLPGFKIGXKNKKSLSLPGLFELTELQRDANKKFGYSAKETLNIMQKLYDYHKVLTYPRTDSRYISSDIVGTLPERLKACGVGEYRPLAHKVLQKPIKANKSFVDDSKVSDHHAIFPTEGYVTFSAFTDKERKIYDLVSKRFYKLFIPQPLEYGPITVPPKGSAKETFIATGKDKFTIPVXKEVYENRFEGXXLTDDVKEQLFPSHXKRRIHYLXSXLCKHQFKRKPPARFYRSDFLSAMENPTKYMDTQNKQLADTLKSFRGLGTVATRCXYYRQLFISFLIXKTRGKIFPLLQKPGQLLDLVPRRVXNSPSINVGGGTKNEGQLAKGKPKKCCFPSEKEDLXERICFXNXVGGIKNYTLASFSTNVCPRWREPNVRGNGKKGKNASLPKTVNVSSXKCISYTNACCPQCKKKLELRGEGCRTNLCMXMWLSEKLSTFQERRKKEFWKQSXXAXVQKYMKQQKKEEEPFNNP

SEQ ID NO: 46080 - protein, 310 aa, Bacillus anthracis
MKKVLFLGDPGIDDSLAIMYGLLHPDIDIVGVVTGYGNVTQEKATSNAAYLLQLAGREDIPIINGAKIPLSGDITTYYPEIHGAEGLGPIRPPKNLSPNIRPFCEFFDILEKYKGELIIVDAGRSTTLATAFILEKPLMKYVKEYYIMGGAFLMPGNVTPVAEANFHGDPIASQLVMQNAKNVTLVPLNVTSEAIITPEMVKYITKHSKTSFNKLIEPIFTYYYKAYRKLNPKITGSPVHDVVTMMVAANPSILDYVYRRVDVDTVGIAKGESIADFRPQPDAKALKNWVRIGWSLHYKKFLEDFVKIMT

SEQ ID NO: 46081 - protein, 137 aa, Bacillus anthracis
MNLTEALRLMKDKGYKHTGKREEMLRLFAAHNRYLTAKDVLEHMKDDYPGLSFDTIYRNLTVFAEIGVLEQTELNGEKHFRFTCSIMEHHHHFICLDCGGTKEITSCPMDFMNKDFNGYEVTGHKFEIYGRCPKCAK

SEQ ID NO: 46082 - protein, 314 aa, Bacillus anthracis
MGKLAFLFPGQGSQAVGMGKQLAENNKEVANVFAKADEVLQDSLSEVIFEGSQEKLTLTTNAQPALLTTSFAILTALKEYDITPDFVAGHSLGEYSALVAAGALTFEDAVYAVRKRGEYMEEAVPGGEGAMAAILGADPHMLKRVTEEVTGEGYAVQIANMNSTKQIVISGTKQGVEIASQRAKENGAKRAIPLKVSGPFHSALMKPAAEKFQSVLNEITIQDTNIPVIANVTADVITSGAHIQEKLIEQLYSPVLWYPSIEYMVNQGVDTFIEIGPGKVLAGLMKSIDSSVKAYAIYDEETLKDTISNLRGEN

SEQ ID NO: 46083 - protein, 432 aa, Bacillus anthracis
MKFTKSEALHKEALEHIVGGVNSPSRSFKAVGGGAPIAMERGKGAYFWDVDGNKYIDYLAAYGPIITGHAHPHITKAITTAAENGVLYGTPTALEVKFAKMLKEAMPALDKVRFVNSGTEAVMTTIRVARAYTGRTKIMKFAGCYHGHSDLVLVAAGSGPSTLGTPDSAGVPQSIAQEVITVPFNNVETLKEALDKWGHEVAAILVEPIVGNFGIVEPKPGFLEKVNELVHEAGALVIYDEVITAFRFMYGGAQDLLGVTPDLTALGKVIGGGLPIGAYGGKKEIMEQVAPLGPAYQAGTMAGNPASMASGIACLEVLQQEGLYEKLDELGAMLEKGILEQAAKHNIDITLNRLKGALTVYFTTNTIEDYDAAQDTDGEMFGKFFKLMLQEGVNLAPSKYEAWFLTTEHTKEDIEYTIEAVGRAFAALADNK

SEQ ID NO: 46084 - protein, 396 aa, Bacillus anthracis
MSSKTLAKFLEENLEDLKSKGLYNVIDPLESSNGPIITIGGKEYINLSSNNYLGLATDSRLQEAAIGAIHKYGVGAGAVRTINGTLDLHIKLEETIAKFKHTEAAIAYQSGFNCNMAAISAVMDKNDAILSDELNHASIIDGSRLSKAKIIVYKHSDMEDLRQKAIAAKESGLYNKLMVITDGVFSMDGDVAKLPEIVEIAEELDLMTYVDDAHGSGVLGKGAGTVKHFGLSDKVDFQIGTLSKAIGVIGGYVAGKQNLIDWLKVRSRPFLFSTAVTPADAAACMRSIEILMESTELHDRLWENGRYLKQGLKELGFNIGESETPITPCIIGDEVLTQEFSKRLNEEGVYAKSIVFPTVAKGTGRVRNMPTAAHTKEMLDEAIRKYEKVGKEMGII

SEQ ID NO: 46085 - protein, 814 aa, Bacillus anthracis
MEITLFLHSLSIYDQVIFSYKALPFFIVQYILLFSGFAIKFIKHYSIRGLAQFSFDSIFIVIMNIYFTLTFILDISSFRMLTTDTWVLIGYFIAQSLVIYAVISLYRREEYSSSRISLIIGFTIILVYGYIHLFQLNAGIKPSSEVSYLIHTASILLIGLSSILYILDKPIQHETKTKYYRFDYVRFILPYFSIIITFSFIIFQPWDDKFMLIGLVLSLILLFLRQLYMWKDNQALIDTYEQLTTQLEGKVEEGASALSKSEQRYKSLFEDHPDAVFSLNMYGIFQQSNTACESLFTAYYCEVESYSLLHFIDPKDHDLLQKALQLTKEGSPQTLEVRTKEKEGYYYYLHITLIPTFINKEVVGMFGIARDITTLYEKQKQVEHLAFHDALTGLPNRRKFEKDLKNILNTAQASANDVAVMFLDLDRFKKINDRLGHGIGDLLLIEVAKRLRGCLRSKDVVARQGGDEFTILLPDMYSEKSAAFIAEQILNILNKPFFIKDEELSITPSIGIAMYPDCGTDVTELMKNADMAMYRAKANGKNRFVFFSKEMSIAQNESNFLEGELSKALQQNEFFLEYQPQVGTKTKQIIGFEALIRWKHPKLGIVSPAQFIPLAEETGFIIELGNWILRTACLEAKRWHNQGFSHLKVGVNLSVVQFNHADLIPTISKVLEETELKPEALDIEITESIAINQNQSVVAKLEQLQNLGIQISIDDFGTGYSSLAYLTKYPINTLKIAREFICGITTSPLEEAIISSIITLSKELNLEVIAEGVETEEQWKFLYEQNCDHIQGFFISKPVSSKDVWRLLHKKTTV

SEQ ID NO: 46086 - protein, 159 aa, Bacillus anthracis
VSFMVAMDENRVIGKDNNLPWRLPSELQYVKKTTMGHPLIMGRKNYEAIGRPLPGRRNIIVTRNEGYHVEGCEVAHSVEEVFELCKNEEEIFYFGGAQIYDLFLPYVDKLYITKIPSRAFEGDTFFPEMDMNKLEEVFVEKGLTDEKNPEYVLLHVYEK

SEQ ID NO: 46087 - protein, 262 aa, Bacillus anthracis
MNILVVKTPEELAEAGYKLIEEVVKTKENPTLGMATGSSPLGIYAEMRKNKLDTSRVTTVNLDEYVNLPHEDKNSYHYFMQEQLFDHLPFKQTYVPNGMASDLEEECKRYEGILAANPVDLQILGIGENGHIGFNEPGTPFNSPTNIVELTESTRQANLRFFEKEEDVPTHAITMGIGSIMKAKQILLVAMGSKKAEAVKELLQGAYSEACPATVLQRHPNVTVIADQEALSLCSEAIADEHRQVFTISDLLSDSRVGETAN

SEQ ID NO: 46088 - protein, 206 aa, Bacillus anthracis
MEKVLVFGHKNPDTDAICSAIAYAELKKELGMNAEPVRLGEISGETQFALDYFKVEGPRFVETVANEVDNVILVDHNERQQSANDIESVRVLEVIDHHRIANFETSDPIYYRCEPVGCTATILNKMYKENGVTIRKEVAGLMLSAIISDSLLFKSPTCTEQDVAAARELAEIAGVDADKYGLEMLKAGADLSGKTMEQLISLDAKE

SEQ ID NO: 46089 - protein, 231 aa, Bacillus anthracis
  MISC_FEATURE (125)..(125): X=any amino acid
  MISC_FEATURE (207)..(207): X=any amino acid
MKRLQKVIAQAGIASRRKAEELIQQGKVKVTGKIVKELGTKVTPQDKVEVNNIPLEKEEPVYFLLYKPTGVISSVSDDKGKKCVTDFFPEITQRLFPIGRLDYDTSGVLLMTNDGDFANVLMHPXIKVEKTYVAKIKGPLTGEKIRMLERGVTLEDGKTAPARVKIISWDKRKEMAIVQLTIHERRNRQVRRMFEALDCKVVKTKPXRYAFFKSGSLPPGDGKRFTPLEVE

SEQ ID NO: 46090 - protein, 333 aa, Bacillus anthracis
  MISC_FEATURE (125)..(125): X=any amino acid
LNTDKKRAITVTTIFGCIGIAVILISLNTGTLSIAPLKVIQTLFGYGDFESATVLYDYRMPRIIITMLAGIGLGISGAILQGLSRNALADPGILGLHSGASFGLIVFVTFFHSINENASIFNSRXFTLGGGVLAAFLIILLARIRSKGFLPIRLILEWIAVSAGFSAISLFFSLKLNDETYTFASRWLVGNVWGRDWIHVLALLPWIFILTPYAWLKSKTLNALSLGDSVAAGLGVSVQKERLLLLATAVGLSCGSVAMAGGIGFIGLVAPHIARKLVGTTYQHFLPLAGIIGMIILVLADTIGRSIFEPNSIPAGVVVAALGAPYFLYLLTK

SEQ ID NO: 46091 - protein, 253 aa, Bacillus anthracis
MTTIDLNCNLGESFGAYKMGNDDEILPFVSSINVACGFHAGDPSVMRQTVEKAMQHNVAIGAHPGFPDLIGFGRRNMNVSANEVYDYVLYQIGALDAFVKAAGGKMQHVKPHGALYNMAATNPEIADAIAKAIYHMNSSLSLYGLANSEAFIQAAEKYNITLVQEAFADRTYKEDGTLTSRTEENALIKNEDEAIKQVLQMVKEGYVNSVNGEKVAVQAQTICLHGDGEKAVQFARKIYRTFEHNKISICAPK

SEQ ID NO: 46092 - protein, 230 aa, Bacillus anthracis
MFEIFMSTYPTLLKATIVTLQLTLTSLVLGSLIGLLFAFFRISNNKVLNSIAHVYIAIIRGTPLIVQIAILYFGITSVVVFTPFWAGAIALAIHNGAYITEIFRGSIQSVDRGQMEAARSLGMPYPLAMRRIVLPQAFRQSLPPLGNQFIIGLKDSSLVAYVGMAELWGSGLSIAAGNFQQLDTYIIVGLYYLVLVLLFTYLVNLLEKRLQRKETNSVQVSAKKKKEVSL

SEQ ID NO: 46093 - protein, 236 aa, Bacillus anthracis
KAILYICHGSRLKAAKEEAVAFITSCMNRVEVSIQEICFLELASPTIDEGFRTCVKRGATEIIVIPVFLLAAGHVKKDIPFELEKLNNQYPSIKVTYGNPFGVSEALIKSVYSGSGIEQENKNEVTLLLVARGSSDPEVLRDINWIASLFQKEEKIKKVEVCYLRGCRPKFEEKLKEVVERKEKNIVVLPYLLFTGLLMKHIEKEVRQYELDEIKISPYLGKNEAFQYMLIQKTKK

SEQ ID NO: 46094 - protein, 654 aa, Bacillus anthracis
MAKHQFQYNEDAIQVLEGLEAVRKRPGMYIGSTDSRGLHHLVYEIVDNSVDEALAGFGDEISVVIHKDNSISVIDKGRGMPTGMHKLGKPTPEVILTVLHAGGKFGQGGYKTSGGLHGVGASVVNALSEWLVVTIKRDGNIYEQRFENGGVPVTTLEKIGKTKESGTTMHFKPDTTIFSTTNYNYETLCERLRESAFLLKGMKISIKDERNDLEDVFHYETGIEAFVSYLNEEKDSIHPVVYFTGEQNGIEAELAFQFNDGYSENILSFVNNVRTKDGGTHEAGFKTAMTRVFNEYARKVALLKEKDKNLEGTDIREGVAAIVSVRVPEEVLQFEGQTKGKLGTSEARSSIDAIVSEHLAYFLEENPDVATLLVRKAIKAAQAREAARKAREEARTGKKKKKSEGTLSGKLTPAQSRNPQKNELYLVEGDSAGGSAKQGRDRRFQAVLPLRGKVINTEKAKLADIFKNEEINTIIYAIGGGVGNEFDVEDINYDKVVIMTDADTDGAHIQVLLLTFFYRYMKPLIEAGKVFIALPPLYKVSKGKGKSEVIEYAWSDEELDSVTKKVGKGYMLQRYKGLGEMNADQLWETTMNPETRTLIRVKIDDAARAERRVTTLMGDKVEPRRKWIERNVQFGMQEEGNILENEMIMETEVE

SEQ ID NO: 46095 - protein, 268 aa, Bacillus anthracis
ALETKRLTLSYGETIIIDELNLEIPKGEITIFIGSNGGGKSTLLSSLPTLLQPTTGDVLVYNQAVLSMTNEAIARQMAILPQGPQAPEGLTVLQLVKQGRYPYQTWLKQWSEKDEEMVQNALAATGMTEFAERDVHATSGGTTPTGLIAMTLAQDTDIILLDEPTTYLDMTHQIEVLVSIIRLNETEQRTIVMVLHDLNLACRYADNIVAIKDKQIYAQGKPEEVVDEKLVRDVFRMECQISTDPLFGTPLCIPHGKGRRVRKEVAHA

SEQ ID NO: 46096 - protein, 1064 aa, Bacillus anthracis
  MISC_FEATURE (38)..(38): X=any amino acid
  MISC_FEATURE (109)..(109): X=any amino acid
  MISC_FEATURE (151)..(151): X=any amino acid
  MISC_FEATURE (153)..(153): X=any amino acid
  MISC_FEATURE (154)..(154): X=any amino acid
  MISC_FEATURE (247)..(247): X=any amino acid
  MISC_FEATURE (262)..(262): X=any amino acid
  MISC_FEATURE (313)..(313): X=any amino acid
  MISC_FEATURE (331)..(331): X=any amino acid
  MISC_FEATURE (353)..(353): X=any amino acid
  MISC_FEATURE (540)..(540): X=any amino acid
  MISC_FEATURE (586)..(586): X=any amino acid
  MISC_FEATURE (648)..(648): X=any amino acid
  MISC_FEATURE (650)..(650): X=any amino acid
  MISC_FEATURE (762)..(762): X=any amino acid
  MISC_FEATURE (770)..(770): X=any amino acid
  MISC_FEATURE (782)..(782): X=any amino acid
  MISC_FEATURE (790)..(790): X=any amino acid
  MISC_FEATURE (840)..(840): X=any amino acid
  MISC_FEATURE (934)..(934): X=any amino acid
  MISC_FEATURE (939)..(939): X=any amino acid
  MISC_FEATURE (953)..(953): X=any amino acid
  MISC_FEATURE (996)..(996): X=any amino acid
  MISC_FEATURE (998)..(998): X=any amino acid
  MISC_FEATURE (1019)..(1019): X=any amino acid
  MISC_FEATURE (1049)..(1049): X=any amino acid
  MISC_FEATURE (1061)..(1061): X=any amino acid
MPKRLDINTILVIGSGPIVIGQAAEFDYSGTQACQSLXEEGYKVILVNSNPATIMTDTATADKVYIEPLTLEFVSRIIRKERPDAILPTLSGQTGLNMAVELAKSGVLXECGVEILRTKLSAIEPAEERDLFRTLMAEVNGPTPPSGIISXLXXNILDWLTKMGNPESVRQAFTLGGTGRRICHNEEELIEIVTSGLKHSPVTQCLLEKSIAGCKEIEYEVMRDSNDNAIVVCNMENIDPGGGHTGXFYLVAPSQTLSDREXHMVRYTSLPNFSALRIEGGCNVQLALDPYSFPILCNKKNHAVSRSSGLTSXTNGYPLGKLTPQKWRRAXILKEYVDPPKPQNFILAFSPHXNNVGFKNSPAGHFIKFESANRTLGTQMKATGEVMSIGRNLEESLLKAVRSLELGIYHLELDHLKELDKETMKKRIIKADDERLFIVAEAIRQGVTKEEINEWCEMDFFFLQKVENIVNMEREVKANVGNMEVLQTAKEMGLSDHYIAAALEQNGAEIYHMRKENNMTPVFQMGDTCGTKFGSATTDXFRTFAGENQFIGTDRKNGIIPRSGTIPIGPGGEFDYATSHSVWAIXKTWYETNFIYHYPETGSTEFQNFLTNYTFGHLTSENGMALPPILKKPKGGFPFPSGGTNGIXPXRPKLEEHGVKILGTSLEDLDRAEDRDKFEAALTKLGIPQPVGKTATTVDQAVAIAEEIGFPSISKTILRTRWTAMEIVYRQEELLHYMKNAVKVHADHPVLIDRYMGWVRKXSRCNFGWXKCIHSRYYGNIXTRWRSLWXLNWSISTTSLSEKLKEQIIEHTIALVKRIKHCWITKYPVVVFKDSSVRNXSKSTCKPYSTVLSKITGVPMANVATKVILGQDLVEQGYGTGYHPEEKEVYVKAPVFSFAKLRSVDTTLGPEMKSTGEVMGKVLTVGKSLIKRVXFFLEXTSQARLSNHYCSGXRYREAMEIAKRFHEIGYNLLATAGTAQSCTEQNIAVQVGNKNXFXRLQLTRYYPSRKSPCCYHILXQGGNHPGGGRFPAIRRESVEKGCSLLTFPXNRETILGIIRIXGIF

SEQ ID NO: 46097 - protein, 580 aa, Bacillus anthracis
  MISC_FEATURE (249)..(249): X=any amino acid
  MISC_FEATURE (421)..(421): X=any amino acid
  MISC_FEATURE (440)..(440): X=any amino acid
  MISC_FEATURE (445)..(445): X=any amino acid
  MISC_FEATURE (463)..(463): X=any amino acid
  MISC_FEATURE (484)..(484): X=any amino acid
  MISC_FEATURE (562)..(562): X=any amino acid
  MISC_FEATURE (563)..(563): X=any amino acid
KFLITCLLLGIVGLVGGVATFFVMIKDAPKLEKAKLVNPLSSKIYDKNGDLVYEYGKEKRTNVTYDQIPKLVENAFLATEDARFYEHSGVDFKGTARAVLVSLKGDYGSQGGSTITQQVIKNYFLSMEKTSKRKIQEIYLAYKLEQQYSKHEILEMYLNKINLGNRSYGIATAAQNYYGKELKELTLPEVAMLAGLPKAPNNYDPTKTENVQRATERRNVVLKLMNRHGYITKAEMEEASKVKVTDGLXTATVQANAIPGIYGCGLEKKVKKDCPDGNIVSAGLEIYYHFSHSRPEGLADRILDANIIHYPNDKFQSAFAFMDTHTGEVRAIGSGRGENKAVFKGHNMAIELDRAAGSTMKPIFDYGPAIEYLKWATYHQIDDSPFKYSTGQEVRNADRSHLRIITMRERFKMSRNVPGSXSCNKKEGLNKAKGNSLKNXGFTPXVSSKNLPAIGTHASITNXNAGAYATFGNGWKVCKTHFCXKSSLSRTASHKFLDKNQKNSIADSTAYMITDMLRSVVTSGTGTAANISSLDVAGKTGTTNYDSKQLAKFNIPGSANSXXLGLQVIRPQYTMAVWTG

SEQ ID NO: 46098 - protein, 122 aa, Bacillus anthracis; identical to SEQ ID NO: 45315
  MISC_FEATURE (106)..(106): X=any amino acid

SEQ ID NO: 46099 - protein, 182 aa, Bacillus anthracis
MTCQNCNIRPATLHYTKVINEKKAEVHLCEQCAEQSGYTSFFQSSQSNFSFHDLFAGLLHGESTMFEEGKNGFSNTSILRCPDCKMTYEQFTKVGRFGCASCYDTFKEHLKPLLKRLHGGHTDHCGKIPERIEGNIHLKKELDELKLILKQYVQKEEFEKAAEVRDKIRNLENQLSEYREGE

SEQ ID NO: 46100 - protein, 428 aa, Bacillus anthracis
  MISC_FEATURE (7)..(7): X=any amino acid
  MISC_FEATURE (58)..(58): X=any amino acid
  MISC_FEATURE (70)..(70): X=any amino acid
  MISC_FEATURE (264)..(264): X=any amino acid
MLGLAPXLEAGVLVLTGLVAAGDAGPAVIFSFVLAANICEFLAFMLAEIAFPSPGRLXVYIRTPYATIWXVVSHLVGVSFLFNIYGATAAVAAGWTGYFHNLIKGFGLQIPKALLTIPSHGGIVNLPAVIITLILAWMLSRGTRESKRINNIMVLIKIGMILLFITVGIFYVKPMNWIPIAPYGLSGVFTGGAAILFAFTGFDILATSAEEVKDPKRNLPIGIIASLIICTIIYVMVCLAMTGMVSYKELNVPEAMAYVMEVVXLRIVAGAIAVRAVIGLMAAICSICMRQHRVFFAMSSDGLLPKSFAIVNKKTGAHTSIHGLPGIGSSIIDGFIDLKELVNLVNIGSLVTFALVCVSVIILGKSHPNLKRGCMVPFVPVLPGVAIVCCVFLMLNLPLRTWVYFSIWITIGVVIYFLYLIILSNLNE

SEQ ID NO: 46101 - protein, 243 aa, Bacillus anthracis
MTKSMEFLYPEKWLSKASTGDRVASELRMRIIAGVIESGTILSENKIAADFSVSRSPVREALKLLVSENIIRLERMGAVVIGLTEKEIEEIYDVRLLIETFIFERLGKMDTNDLVRELNKIMEMMKIAIKYHDSDEFSYQDLLFHETIIRTIEHSYILMIWNNLKPVMESLILLSMRTRFKEKYEDFERIIKNHELYIKAIESKDRALMIEALHQNFDDVQGKVEDLWMSQQMLSKGVEQGHE

SEQ ID NO: 46102 - protein, 264 aa, Bacillus anthracis
  MISC_FEATURE (60)..(60): X=any amino acid
  MISC_FEATURE (168)..(168): X=any amino acid
  MISC_FEATURE (236)..(236): X=any amino acid
  MISC_FEATURE (246)..(246): X=any amino acid
  MISC_FEATURE (255)..(255): X=any amino acid
LTLNEKTLIMGILNVTPDSFSDGGSYNEVDAAVRHAKEMRDEGAHIIDIGWESTRPGFCXEYSAEEEIRRVVPMIHAVSKEVRLPISNRHDKGEVAKPAIEAGAHIINDILGKRRADPKFAEVAAHYDVLIILMHNRDNMKYSQFNGDMIADLYDRIKIAKDAGVPKXEYILDPGIGFAKTPEQNLEAMRNLEQLNVLGYPVLLGTSRKSFIGHVLDLPVEERLEGTGATVLAWYXKRCEVCSRSXCEEMSRMGXDDGCDDGKG

SEQ ID NO: 46103 - protein, 1027 aa, Bacillus anthracis
  MISC_FEATURE (207)..(207): X=any amino acid
  MISC_FEATURE (219)..(219): X=any amino acid
  MISC_FEATURE (222)..(222): X=any amino acid
  MISC_FEATURE (238)..(238): X=any amino acid
  MISC_FEATURE (244)..(244): X=any amino acid
  MISC_FEATURE (257)..(257): X=any amino acid
  MISC_FEATURE (270)..(270): X=any amino acid
  MISC_FEATURE (304)..(304): X=any amino acid
  MISC_FEATURE (305)..(305): X=any amino acid
  MISC_FEATURE (317)..(317): X=any amino acid
  MISC_FEATURE (320)..(320): X=any amino acid
  MISC_FEATURE (333)..(333): X=any amino acid
  MISC_FEATURE (355)..(355): X=any amino acid
  MISC_FEATURE (362)..(362): X=any amino acid
  MISC_FEATURE (375)..(375): X=any amino acid
  MISC_FEATURE (397)..(397): X=any amino acid
  MISC_FEATURE (418)..(418): X=any amino acid
  MISC_FEATURE (443)..(443): X=any amino acid
  MISC_FEATURE (479)..(479): X=any amino acid
  MISC_FEATURE (481)..(481): X=any amino acid
  MISC_FEATURE (510)..(510): X=any amino acid
  MISC_FEATURE (558)..(558): X=any amino acid
  MISC_FEATURE (562)..(562): X=any amino acid
  MISC_FEATURE (582)..(582): X=any amino acid
  MISC_FEATURE (651)..(651): X=any amino acid
QTMEYMKEHDYYYNVLDEYNLEEVEEVYNIAYGENFEFQSYMAASNFYKDYALKTNDQKQYLESYEDRVAIVSLYLGRGDVAKAKQFASMIVKQNYQPATPTFLNAGRSRRGEMVSCFLLEMDDSLNSIGFNINTAMQLSKIGGGVALNLSKLRARGEQIKGIDNAASGVVPVMKLLEEFVSYANQLGQRKGAGAVYLNIFHWDIIXIPGLIGSPSTQXCVXENLVNLTHRGVALAAXRYQVKXGGKEKEPREEADXEKPTVPCKWKTRXYRRPALKEILPWVEREILLFPGRGKFPEHGGIIXXLIRENRKFFNWXFQXFLRAILKILENNXMLIRLLRNHFQAAPGNFIVEKXILSLKGXLNYQMIRTFFIRXSKVYYVNIIGKQYCYFYSSYRXRWGAHWGKEPYVLGKPTQRKXKNFFLKLILGLIIIGMINLNIWRIXDLRLLNDFMVENILMKQKKKCLDLVKVKSIQKKHVXRXVKLKKINIIQVEKNKKSQLLLMTFTMSLXQKPDERLMYLLIRINIEYYPITFPNYQYFQEGVRDYRTRVIKRKLVKXAGKXVPLQMQGNQLQVDDIVQPSXKYEDELTKKINADEKSRIQSLSIGISVPSKFFELAEKNEPFPCFAPYTVYKIRGSHLDDIDIDEMYDEXWSIPKVRRKPLDISARDMLIKIAMIQLESGYPYLMFKSNANNQHPLKDIGTVKMSNLCTEIFQLQETSEINDYGTDDIIRRDINCNLGSLNIVNVMENKEIREAVHAGMEALTAVSDMTIIPNAPTVKKANDELHSVGLGAMTLHGYLAKNKNRLESEEAKEFARTFFMMLNYYSIEKSMEIAKEKGETFKDFDKSDYANGTYFEKYETTDYSPVLRKRAAIFEGIHIPTKEDLTSLKEQVQKNGLYNSYRLAIAPTQSISYVQNATSSVMPIVSQIESRTYANATTYYPMPYLSKDTFWYYKSSYDMNQFKLIDLIAEIQEHIDQGISTILYVNSDISTRELARYYIYAHKKGLKSLYYTRTRKLSVEECVACTV

SEQ ID NO: 46104 - protein, 617 aa, Bacillus anthracis
  MISC_FEATURE (147)..(147): X=any amino acid
  MISC_FEATURE (153)..(153): X=any amino acid
  MISC_FEATURE (416)..(416): X=any amino acid
  MISC_FEATURE (562)..(562): X=any amino acid
  MISC_FEATURE (592)..(592): X=any amino acid
  MISC_FEATURE (595)..(595): X=any amino acid
  MISC_FEATURE (602)..(602): X=any amino acid
FGFFLFAVILFWLKTYAAYVTEFNLGISNTIQKFLLFFNPLSSAVLFLGLALFAKGKRSYIWLIVINLLLSILLYANVVYYRFFSDFITFPTLTQTNNFGDLGGSIVALLHLFDSAYFLDTITVMMLLATRFANPKSIRVRNVKYHXYCSRYXLFSVILGLAESDRRELLSRTFDRNSIVKYLGAYNYTIYEGIQSAKASTERALADGDNMTEVDNYLSSTYASPNREYFGKGKGMNVIYIHVESFQNLLIDYKLNGQEVTPLLNSFTKDANTLYFDNLFHQTGQGKTCDAEFMLENSMFGFPQGSVFTSKYHNTYQSAPAILGQQGYTSAVFHGNYKTFWNRDDIYTSFGFNKFFDASYYDMNEKDVVNYGLKDKPFFNESIPLLETLKQPVYTKFITLSKSFPYPIDKGEATIXTPDTSGLIVDTDFPTARLFKPPVKGFFPLLEASGLYDNSIIVMYGDHYGISDNHNAAMSKVMGKEINSFENAQLQRVPLIVRVPGVKGGVQHQYGGEIDVLPTLLHLLGTDTKNYVQFGSDLLSPDHKQVVAFRNGNFVSPTVLHXNGKYYDTTTGKPGKFSDEINQMNKMVQTRXIIXPVVNGDXYDSTTGRDLPHKTVS

SEQ ID NO: 46105 - protein, 365 aa, Bacillus anthracis
  MISC_FEATURE (359)..(359): X=any amino acid
KQPLAHRMRPTNIQEVIGHQHLVGEGKILWRMVQANHFQSMILYGAPRHGKKSIASAIVRKYPEPPFRPIKRLVTPNKKRNGRLVVQKNKDHRHLVLILDEVHRLDKAKQDFLLPHLESGLRSLKGATTSNPFHAIKSAIQNRWQIFELHALTEEDLSIVLKTSTWRNEKSLGEYDVTGTPEALHHFAKCEQAEIMRSAYNALELAVLSSFTTDDKAAEITLEIAEECLQKKSFVHDKGGDAHYDVLSAFQKSVRGSDVNAALHYLARLIEAGDLQSIGRRLLIMAYEDIGLASPQAGPRTLAAIESAERVGFPEARIPLANAVIELCLSPKSNSAYKALDAALHDLRNGQTGDIPSHXKISFFQ

SEQ ID NO: 46106 - protein, 566 aa, Bacillus anthracis
  MISC_FEATURE (77)..(77): X=any amino acid
  MISC_FEATURE (89)..(89): X=any amino acid
  MISC_FEATURE (118)..(118): X=any amino acid
  MISC_FEATURE (120)..(120): X=any amino acid
  MISC_FEATURE (282)..(282): X=any amino acid
  MISC_FEATURE (297)..(297): X=any amino acid
  MISC_FEATURE (304)..(304): X=any amino acid
  MISC_FEATURE (329)..(329): X=any amino acid
  MISC_FEATURE (331)..(331): X=any amino acid
  MISC_FEATURE (398)..(398): X=any amino acid
  MISC_FEATURE (410)..(410): X=any amino acid
  MISC_FEATURE (413)..(413): X=any amino acid
  MISC_FEATURE (441)..(441): X=any amino acid
  MISC_FEATURE (449)..(449): X=any amino acid
  MISC_FEATURE (564)..(564): X=any amino acid
MKRKENESVKVFALGGVGEIGKNMYCVEIDSEIFIVDAGVIVPGGEMFGIEYRYSDITYLRGKPERVKGLFITHGSXRSYGGIVYVLRXIIYSSYATKLTVGLIQEKLVQTRYVMPRXLXKQIDSNSTVEFNTTTVSFFGTTHSIPDSVGVCFHTSKRAIVYTGDFTFDQTPIGNSGADLGKMASIGDEGVLCLLSDSTNAERPGYTRSDTEVGVEISIVFYGAEGRIIGASCASNVHRIQRVFDAAAATRLSVSDVRRSIVKAVNIARRLGLFRCSTKDGXFPYKKVHNFPKEKGXLFLQTGXPSGTDGQPFSRMGETKLAKQNFNSXRXYGIIAASPIPGNEISVSKIIDLLFRAGAEVVYYGERKVHVSGHGSQEELKLMLNLMKPKYFVPVHGXGSYAKSTCILYXKMXVFAEKISLSYKKAKELGFGDNETTLFWXKATGPMQXIDGLGVGDVGNIVLRDRKMLSQDGILVVVVTLGKDEKKIISGPEIISRGFVYVRESEALIDRSTEIVRMIVEQSIKEYSIEWSMLKQNIRELLGQFLYEETKRKPMILPIIMEVXKK

SEQ ID NO: 46107 - protein, 340 aa, Bacillus anthracis
  MISC_FEATURE (2)..(2): X=any amino acid
  MISC_FEATURE (232)..(232): X=any amino acid
  MISC_FEATURE (313)..(313): X=any amino acid
IXMHENMKDSLKRPLQDLRISVIDRCNFRCTYCMPAEVFGPDYAFLQEECLLTFDEIERLARLFISMGVNKIRLTGGEPLLRKDLPKLIARLAKLEGLKDIGLTTNGIHLAKQAKALKEAGLKRVNISLDAIEDRVFQKINGRHVSTKPVLKGIEAAKEAGLEVKVNMVVKKGMNDSQILPMAQYFKEQEIQLRFIEFMDVSSTNGWNFEQVVYEGQLIEKINRVYPIEPVXTRYFGESGELYRYVENHAESGFITSVSESFCSSCTRARISADGKFYTCLFGEKGTDLRSLLPKKIFEALHQKIPPQPGEVXTDPIFQRKHTGESTNKRQKVEMSYIGG

SEQ ID NO: 46108 - protein, 338 aa, Bacillus anthracis
MRTSVLTKKNVSVLTILVGLIVTVFLVSLNTGTFKIPPMDVLKSLVGLGAEDQSVILFEFRMPRMVIAILVGSALAMSGAILQGLSRNPLADPGIIGINAGAGLTVVIFVYFFFGKVGTGTFLSVFILPFFALVGAILAAVIIYLLAWKDGVSSTRLILVGIAVAAGFGAVSLIFSMKMTSNDFRFATIWLAGSLWGTDWKFVLSVLPWMVIFLPLAISKAHILNVMNLGDSTAVGLGVNVEKERRKLLFIAVCLAGASVAVAGGIGFIGLMAPHLARRLVGGKHQIMLPTAALIGTFLLLFADVISRSVLPTSEIPVGLVISVIGAPYFIYLLMRTK

SEQ ID NO: 46109 - protein, 296 aa, Bacillus anthracis
MENKQSRNEYLQRIYKVQNYIELHINDSLSIEELADIAGFSKYHFHRIFKGIVDEPLSRYVNRLKLERATNLLTYRSDMTITDITYHFGFTDSAVFSRTFKNYYGVSPSQYRNDNSKNCKDVRRISQYNECKKVRRNVEIVTVDNINVAYIRHIGTYEELTIAFPKMIEKLFQYATKQNYHVFEDTKVLTIYHDHHEFTEDNHLRTSLCITIPGESAIETNDIGIMVIPSGKYAVGHFEIFQDEYKRAWDFIYGEWLPNSGYKPRDSYPFEVYRNDPKQHPKHKHIVDIYVPIEPF

SEQ ID NO: 46110 - protein, 397 aa, Bacillus anthracis
MVPNTVRTPNKKKKWIIIGVIALIVIVAAVNIFVMQGKKKGASTSADAVSFEKVTERKLNNTKLISGQVKPGNIESFYADPAKGKVKDIEVKEGQEVEKGAKLFSYDNEEINLQMKQADLDQKMADMRYDQGKKKIDSLKKEIKKAKDSGAGKEVTDPMEEQVSELEMAQKTTDLEKEKGKLQKEELSKKQKELTIYSNFAGVVQKLDKDAAQSSSQALGGQGKAFLQVASKDPFQIQGTLTELQKSQIQKDQTFTVTAKANNKKKWTGKITEVSEFPTSAEMAQAGGMGEATQNMSQYTYKASLDSQDGLSPGYHVSLQVNLENKTMVAVPTKSIVEKDDDAFVYVEDKGKLRKQNVKKGSTDGDWTEITEGVTVGQKVVKNPSDDVYDGMEVKEK

SEQ ID NO: 46111 - protein, 628 aa, Bacillus anthracis
  MISC_FEATURE (20)..(20): X=any amino acid
  MISC_FEATURE (109)..(109): X=any amino acid
  MISC_FEATURE (115)..(115): X=any amino acid
  MISC_FEATURE (155)..(155): X=any amino acid
  MISC_FEATURE (168)..(168): X=any amino acid
  MISC_FEATURE (180)..(180): X=any amino acid
  MISC_FEATURE (200)..(200): X=any amino acid
  MISC_FEATURE (202)..(202): X=any amino acid
  MISC_FEATURE (234)..(234): X=any amino acid
  MISC_FEATURE (428)..(428): X=any amino acid
  MISC_FEATURE (433)..(433): X=any amino acid
  MISC_FEATURE (466)..(466): X=any amino acid
  MISC_FEATURE (475)..(475): X=any amino acid
GYMPGSYDVIVIGARHARIXKLVLPEPPMGSKTLMVTINLNMVTVMPWNPSGGGTTKRNGGPEIDALAGEMGAQPLIKTPYSMRMLNTGKGPNCRAPLTKADKFSLPAXLKKTIXRKPQLTLVPGNGETFNVEDGECKGVITQAGAEYTAKTLWXLPPGRFFTWGRLXGGDLKFWRGSKXSPTHLFFSGTFRGGWISSVXIXNRYTPRVNSNTIDYSKPEIQPGDDKTTELSLXKTPNFIMDQFPCWLTYTSTETHRLIDENLHRSAMYSGMIKGTGPRYCPSIEDKVVRFNDKPRHQIFLEPEGRNTQEVYVQGLSTSLPEDVQRDMLRTIPGLENVEMMRTGLCISNMMQLCQRSMANLETKKIKNLYTAGQINGTSGYEEAAGQGLMAGINAACRSLGKKEVILGREDAYIGVLIDDLVTTRNEXHQYRXLTSRAEYRLLLRHDNADLRLTEVGHEIGLITVXSAMNGIYKXKITNEQEKERLSSIIIKKRPEVQELIRNIGGSELKDGIRASDLLRRPEMTYEHIHLLVPSEVESSDEVKEQVEIQIKYEGYIEKSLQQVERMKKMENKKIPVDIDYDAISSLASEARQKLKECSSAFHGGKLHVYLRKSSGHFHFLVYIEQGK

SEQ ID NO: 46112 - protein, 1302 aa, Bacillus anthracis
LDWMKKLFNKEEEQTAMNKEVPKQVESQPKIPRVNHHTEAREAQMASRNAGKCRFPLVPDNGFDEEDVIETGHFEEQPVQAVTYENEPIQRGIKVERSRRQYVEKVVSTYEEPEMQYEPEREPVVKKASTPAQESNRRPFRPTEMISPIYGYNRPSVEKKEEKQEEVKEREDLEISVEGKSVVDAWLEKKGYTLSDFSEGQAPTSSSHRAANEQGERQYEESKKEEKSVVDQWLEKNGYEIERQEPIVEEKEVVQEMSAPQEVPAAELLHETIAERMEGAKQESDVVDKNILQEELVDSKVEHEDTILSEEIKRSTEIEQPTIEVEKQAPEESVIVKAEEKLEETIVVEIPEEVEVIAEAEEPEEVEVIAETEESEEVEVIAETEESEEVEVIAETEELEEVEVTAETEELEEVEVVAETEELEEVEVIAETEKLEELEEVEVIAETEESEEVEVIAETEAPEEVEPVALEEMQQEMVLNEAIEQKNEFIHVAVADEQTKKDVQSFADVLIAEEQSVVEETPIVEEQPVAEEAPVVEEQSVVEETPIVEEAPVVEGQSVVEEAPIAEEQPVAEETSVVEEQPVAEETSIVEEQPVAEEAPVVEEQPVVQKEEPKREKKRHVPFNVVMLKQDRARLMERHASRTNGMQSSMSERVENKPVHQSRRTTTSGRKANATSSSGATSGRETNAASSGATSGRKTNATSSSGTTSGRKTNATSSSGATSGEKPMQQVVVEPQVEEKPMQQVVVEPQVEEKPMQQVVVEPQVEEKPMQQVVVEPQVEEKPVQQVVEPQVEEVQPVQQVVAEQVQKPISSTEVEEKAYVVNQRENDVRNVLQTPPTYTIPSLTLLSIPQQAALDNTEWLEEQKELLDTTFNNFHVGAHVINVSQGPAVTRFEVQPDPGVKVNKITNLSDDIKLSLAAKDIRIEAPIPGKSAIGIEVPNKESKPVFLREILRSPVFTKSESPLTVALGLDISGDPIVTDIRKMPHGLIAGATGSGKSVCINAILTSILYKAKPHEVKLMLIDPKMVELAPYNSVPHLVAPVITDVKAATAALKWAVEEMERRYELFAHAGARDLTRYNTIVSGREIPGETLPYIVIVIDELADLMMVAPGDVEEAICRIAQKARACGIHLLVATQRPSVDVITGLIKSNIPTRIAFTVSSQVDSRTIIDIGGAEKLLGRGDMLFLGNGTSKPVRVQGVYVSDDEIEKTVDHVKKQMKPNYLFKQEDLLAKTEQAESEDELFLDACQFVVEQGGASTSSVQRKFRIGYNRAARLIEEMESQGIISEGRGTKPRDVLISEDEF

SEQ ID NO: 46113 - protein, 199 aa, Bacillus anthracis
MADHYFSNDPSSKSDRKRWEFTLRGSRFTFLSDRGVFSKNEVDFGSRLLIEAFQVPDIKGDILDVGCGYGPIGLSLAKEFQDRKVHMVDVNERALELAKENAANNRIGNVHIFQSSVYENVDGMYAAILSNPPIRAGKDIVHEILEKAVEHLVPGGELWIVIQKKQGAPSALKKLEEVFSEVEVVEKKKGYYIIKSKKR

SEQ ID NO: 46114 - protein, 221 aa, Bacillus anthracis
MDKLLTNVDWNQMLEATGETLYMTAIAALATFILGLILGLLLFMTAKDNLWENKAVNTAIGAFVNIFRSIPFIILIILLIPFTKILLGTILGASAALPALIIGAAPFYARMVEIALREIDKGVIEASKAMGAKTSTIILKVLIPESLPALVSGITVTTIALVGYTAMAGVVGAGGLGTLAYLEGFQRGNNDVTIVATICVLLVVFFIQWIGDRVTTRIDKR

SEQ ID NO: 46115 - protein, 119 aa, Bacillus anthracis
MTKEQIIEAVKSMTVLELNDLVKAIEEEFRVTAAAPGPVAGGAGKPAAEKNEFDVGLNNAGGPKIKVIKVVREITGLGLKEAKELVDNTPKVIKEAAAKEEAEEIKAKLEEVGAAVEVK

SEQ ID NO: 46116 - protein, 476 aa, Bacillus anthracis
MQLQTEVKKQPSKRKFKMPDAYVLLFFIALLCAIATYFVPAGEFKRVTNGTVTTTIPGSYHSVPQSPVGFVSFFTAIEKGMTLAAPIIFLILFTGGAIAILEKTGALDGLIYHVINKFRNQQLLFICIVAALFSILGTTGIIVNSVIGFIPIGIIVARTLKWDAIVGVAIIYLGTYAGFNATILSPSPLGISQKIAELPMFSGIGLRTAIYISFLLATILYINWYVKRLKKSNKGSILGDNWFPSNALSSGKEAQKTEVPWTIRHKLILLVSALSLIAFLIGAFRLHWTDAEMTATFSFIAITAGIIGGMKANDIASTFLAGCQNLIYGALIVGMARCISVILEQGKLLDTIVNQLAQSLEGQSPVFGVIGMYVSSAALHFLISSGTGESVIFIPILAPLADFMHITRQVTVQAVMLGEGVVNCLNPTSGVLMGVLAASGISYGKWIRFMAPLAFIWFIIGLIFLIVGVNIEWGPY

SEQ ID NO: 46117 - protein, 136 aa, Bacillus anthracis; identical to SEQ ID NO: 45595
  MISC_FEATURE (22)..(22): X=any amino acid
  MISC_FEATURE (24)..(24): X=any amino acid
  MISC_FEATURE (129)..(129): X=any amino acid

SEQ ID NO: 46118 - protein, 894 aa, Bacillus anthracis
  MISC_FEATURE (424)..(424): X=any amino acid
  MISC_FEATURE (536)..(536): X=any amino acid
  MISC_FEATURE (544)..(544): X=any amino acid
  MISC_FEATURE (548)..(548): X=any amino acid
  MISC_FEATURE (564)..(564): X=any amino acid
  MISC_FEATURE (566)..(566): X=any amino acid
  MISC_FEATURE (669)..(669): X=any amino acid
  MISC_FEATURE (822)..(822): X=any amino acid
MNWYGMRAHEVEESTNTNVKVGLTEKEAEGRIKKFGTNELEEAKRPSALMVFLAQFKDFMVLVLFGATIVSAFLGEYIDSIAIVAIVIINGILGFFQERKAEKSLEALKELAAPQVTVLRNGKWVKAPSKALVLGDVIKFSSGDRIGADVRLVEASSLYIEESAFTGESVSVQKKVEALQGQDVSMGDQKKYAFMGTMITRGSGTGGRCATGMNTAMGQIANMLQNAEQMETPLQRRLEQLGKILIIVALVLTALVVLAGVYQGNEVYHMFLAGRVASVAAIPEGLPAIVTVALSLGVQRMIKKRAIVRKLPAVETLGCASVICSDKTGTMTQNKMMVTHMWSGGELWKVTGQGYEPNGSFMKGEKEINAAKTKALYQLLTFGSLCNNANIIQKKKAYVLDGDPTEGALVAAAMKAGDNPWGPXRGKLKFFGELPFDSTGKNDEVIVRDREGKKFVVTKGAPRFPSAKSQAILGGDRQQLLSELYRKGSTGGYSSLGSQALRTIAVAFKPLKVTDSIEHERDVEKDFMLVGDPRNXLSAQAQSXASQXKSAEKLAIRTVMITGXPXSDCNGDCGQLSILPQRWTRCRGGRSRSMDVEDLENVVEDPYVFARVSPDHKLKIVKALQNKGHIVAMPGDGVNDALAIKTADIGIAMGITGTDVAKEASSLVXLVDNFVTIKSAITEGRNISENIRKFIRYLLASNVGEIFSHVICDVACITTPMVPIQILWVNLVTDGLPAMALGLDKAEGDVMKRTPRHPKEGVFARGLAWKIISRGFLIGAVTLVAFIIAYNQHPNELKYAQTVAFATLVLAQLIHVFDCREXAFCFPSQSVWKCYLVGAVFISYLLMLVVIYYPPLQPIFSHDANTRREIGLLIGGFIINSDFLISRLFINREK

SEQ ID NO: 46119 - protein, 138 aa, Bacillus anthracis
  MISC_FEATURE (90)..(90): X=any amino acid
IKISTKGRYGLTIMIDLAKKFGEGPISLKSIAQAHDLSEHYLEQLISPLRNARLVKSTRGAYGGYVLSDQPANITAGDVIRVLEGPISVXKMIEKRTPAQRPLWMRVRDAVQEVLDSTTLEDLVRYEEENHGGYMFYI

SEQ ID NO: 46120 - protein, 95 aa, Bacillus anthracis
MASETVSNHQEKALALLQADAEKILRLIKVQMDHLTMPQCPLYEEVLDTQMFGLSREVDFAVRLGLIAEEQGKVMLGELERELSALHEAFTNKQQ

SEQ ID NO: 46121 - protein, 318 aa, Bacillus anthracis
  MISC_FEATURE (298)..(298): X=any amino acid
  MISC_FEATURE (300)..(300): X=any amino acid
  MISC_FEATURE (303)..(303): X=any amino acid
  MISC_FEATURE (311)..(311): X=any amino acid
  MISC_FEATURE (314)..(314): X=any amino acid
GYVYLVGAGPSDEGLITKKAIEWLKRADIVLYDRVLNPFFVSYTKQTCELMYRGIMPKNHIMRQEMINHTILQFAQEGKNVVGLKGGDPSIFGRVGEEAETLAAANIPYEIVPGITSSTAASSYAGIPLTHRNYSNSVTLLTGHAKGSLTDHGKYNSSHNSDTIAYYMGIKNLPTICKNLRQAGKKEDTPVAVIEWGTTGKQRVVTGTLSTIVSIVKNENISNPSMTIVGDVVSLRDQIAWKEHKPLHGNKVLFTSATNKTSVMKQQLQEAGAEYYQIPTFKKEEYTLTLEQIIENSXRXSPXFFVQLTVXKCXCHHV

SEQ ID NO: 46122 - protein, 347 aa, Bacillus anthracis
MKTLLEVKDLQVSFDTHAGEVQAVRGVTFDLKKGETLAIVGESGSGKSVTSKALMGLIPNPPGRIKNGEIVFEGRDLTKLTEKEMQQVRGKDIAMIFQDPMTSLNPTMTIGNQIMEGLIKHQGMSKADARKVALELIDLVGIPNPEARLKQYPHQFSGGMRQRVVIAMALACNPKLLIADEPTTALDVTIQAQILELMKDIQQKTEAAIIFITHDLGVVANVADRVAVMYAGKVVEIGTVDEIFYNPKHPYTWGLIASMPSLDGSEEELYAIPGTPPDLLKPPKGDAFAPRNPQALKIDFEMDPPLFKVSDTHYAATWLLHEQAPEVRPPAVVEKRILQMKAGEQHD

SEQ ID NO: 46123 - protein, 669 aa, Bacillus anthracis
MRLFGRFKTMTEENKSFYITTPIYYPSGKLHIGHAYTTVAGDAMARYKCMQGYNVHYLTGTDEHGQKIQKKAEELNVTPQAYVDNIVAGIKELWEKMDISYDDFIRTTEDRHKDVVEKIFKQLVDQGDIYLDEYEGWYSVQDETFYTEHQLVDPIMEGDKVVGGKSPDSGHDVELVREESYFFRMGKYVDRLLKFYEDNPHFIQPESRKNEMINNFIKPGLEDLAVSRTSFDWGVRVPGNPKHVIYVWVDALSNYITALGYGTENEEMYKKFWPADVHLVGKEIVRFHTIYWPIILMALDLPLPKKVFAHGWILMKDGKMSKSKGNVVDPVILIDRYGLDALRYYLLREVPFGSDGVFTPEGFVERINFDLANDLGNLLNRTVAMIDKYFNGEIPAFKANVTEFDETLVTFAKDTLKKVEEAMENMEFSVALSSIWQLVSRTNKYIDETQPWVLAKDEDDREKLASVMAHLAEVLRQTGIMLMPFLTVAPSKMFAQLGLTDEAHTSWGSLSTIGCIPAGTKVEKGQPIFPRLEMDVEVAYIKEQMKASAPKVEEKKEEEPKAEEITIDDFFKVELRVAEVLSAEPVKKADKLLKIQLDLGTEKRQVVSGIAKFYSPEDLKGKKVICVTNLKPVKLRGELSQGMILAGEENGVLSLASIDQNIPNGTKIK

SEQ ID NO: 46124 - protein, 569 aa, Bacillus anthracis
MAFDGLFTRAITHEIANSLYTGRISKIYQPSKYEILLHIRANGKNQKLILSAHPTYARLHLTNQNYDSPALPPMFCMLLRKHLEGGFIEKIEQIDLERIIQITVRSRNEIGDESLKTLVIEIMGRHSNIILVDTKTNNILDSLKHVSLAVNRHRTVYAGAEYIAPPVQHKINPLQIETNDEFIRPLDFLSGNMDKQLVGTFTGISPLFAKEVVKKAGMVNEKALADAFFSIQKPLLTHTYSPTMTTSNGKEFFYLFPLAHLAGENKTFSSVSELLDRFFFGKAERDRVKQQAHDLERFMQNEKNKNEKKLIKLEKTLQDAGKADKYQLFGELLTANMYALKKGDKDIEVVNYYDENGGTVKIALDPLKTPSENAQRYFQKYQKAKNSIVVVEEQIEKTKEEILYFDSLLQQMEAASSKDIEEIREELAEEGYMRNRKTKNAKKKPTKPVLDKYVASDGTEIFVGKNNKQNDYLTTKFARRDEIWLHTKDIPGSHVVIRSLEPAEETLLEAAKIAAYYSKAKESSSVPVDFTKIRHVKKPSGAKLGFVTYDNQQTVYVTPDADTVMKLKA

SEQ ID NO: 46125 - protein, 100 aa, Bacillus anthracis
MDHKEHEAVTHRSEKEKEQIINRLKRIEGQVRGIQNMIENDRYCVDILVQISAINAAMKKVGMGVLKNHTSHCVSGAIKDGNGDEAIEELMTVFERFSKA

SEQ ID NO: 46126 - protein, 199 aa, Bacillus anthracis
MLCLQRKNTAKSKQFKKILLSADLITADGIGVIIGSKILKGTLKERVTGADITHDLIKHCNENGCRVFLFGAAPESNKKALEKLNEQFPGAQFKGQHGFVNGEEIEEVKMKIKQFKPDLLLVGLGSPKQEEFIYENLQTLNIPLSIGIGGMIDIISGTVKRAPKIMRDTGTEWLYRLLSQPKRIKRQLVLPKIFNFQLW

SEQ ID NO: 46127 - protein, 381 aa, Bacillus anthracis
  MISC_FEATURE (64)..(64): X=any amino acid
MVEKMNEEVMDSKELQVGDVVTGSVTKVEEKQVLVNVGYKTDGVIPSNELANVHMKKAGDVVEXIHPLELKVIKLEENDLVLSKRAVDAEKAWVELQEKFNSGHVFDVTVKDIVNGGLVVTLGVRGFIPASLVEVHYVEDFTDYKGKTLAVKIVELDREKNRVILSHKAVVELELDSKKKEAISSLKEGDVVEGTVQRLTDFGAFVNVGGVDGLVHISQISHERVEQPSEVLEQGQKVKVKVLSVDADTQRISLSIKAFSPGPWENVGCEVKAGDIREGVVKRLVTFGAFVEILPGVEGLVHVSQIANRHVKNPNEVLEMGQEVKVKVLEVHVAEKRISLSIKEALEENNVTEDYSQYEPNADSATFQLSDIIGEQLKKLK

SEQ ID NO: 46128 - protein, 303 aa, Bacillus anthracis
MKRWQMEWLLVSVALVWGANYTIGKYGVAYMSSIQFNSLRFLVASPVLLLITFLMERSLRIERKDWLRLVAVGIVGTTMYQTMFMLSVKYTSATNASLLIAMSPIFTGILAVLHKQERFSMKVQIGSIVAFIGAAFVLLTGHTGGATYEYAWLGNIIGLVAAIAWGWYPILAQPLITKYSAMRVTSWSTLIGIVPLVIYCLFNVNSLTWPVDTLSWGSLAYSIIFATIFGLAMWYVGISQIGSTKVMVYMYLVPLFAVIFAAVTIGEQINMMQLVGGLIIFVGLYVVKKGGIKKPALNLKKVS

SEQ ID NO: 46129 - protein, 208 aa, Bacillus anthracis
  MISC_FEATURE (4)..(4): X=any amino acid
  MISC_FEATURE (140)..(140): X=any amino acid
  MISC_FEATURE (146)..(146): X=any amino acid
  MISC_FEATURE (162)..(162): X=any amino acid
MKGXFETFEGPEGSGKTTLIQSLLPYFEQKEQKVMATREPGGIAISEDIRTILHKQEYTMMEARTEALLYAAARRQHLVEKVMPALNEDYLVLCDRFIDSSLGFPGYAKGVLVWNKVIKINRFATRGILALSLPIYLRYXTQRLSXPGLPKDAGREVNRLNXERFFFHKPVRGGYLPSVERFSDRIVLVNADQPMEKLIEEVIQVIED

SEQ ID NO: 46130 - protein, 40 aa, Bacillus anthracis
MGGSLGLSSEVMKRSNESLSFSKMTLPHQLMRLVLLETSV

SEQ ID NO: 46131 - protein, 290 aa, Bacillus anthracis
MKRFKFYMISGIVLVLLIVCNFVDKPIAKVGEVKDTVMMKLNTKESMAQIDGQTIYFKKIGEGKPPLLMLHGFGGSSDGFSDIYPELARDHTIIAVDILGFGRSSKPIDFEYSFPAQVNLYYKLMKKLGYDQFAVLGHSMGGEMSLNLAYLYPDAVTHLILADSTGIESFQQKESYEVPPLSTDLQTVTEITDYNKNEVKNSRDDKGHYDQLTKMRERRIAMEADKIKVPTLIIWGRHDKSVSWKNGELYHGLFANSTFHIIEKGYHAPFRQEPIEFMEYVQAFFAKNPQ

SEQ ID NO: 46132 - protein, 290 aa, Bacillus anthracis
MRFDEAYSGKVFIKSHPSFEESEVVIYGMPMDWTVSYRPGSRFGPARIREVSIGLEEYSPYLDRELEEVKYFDAGDIPLPFGNAQRSLDMIEEYVSKLLDAGKFPLGLGGEHLVSWPIFKAMAKKYPDLAIIHMDAHTDLRESYEGEPLSHSTPIRKVCDLIGPENVYSFGIRSGMKEEFEWAKEVGMNLYKFDVLEPLKEVLPKLEGRPVYVTIDIDVLDPAHAPGTGTLEAGGITSKELLDSIVAIANSNINVVGADLVEVAPVYDHSDQTPVAASKFVREMLLGWVK

SEQ ID NO: 46133 - protein, 217 aa, Bacillus anthracis
MNQFRRMVIINIITLIVLVGGGIGGYYYYNQAENYLKTDNAKIDGKVIPIASPVAGKLTDWKAEVGKNYNENDKLGAVTVAAANGEQTVDVTIPQNATVVQSNATTNAFVGAGSPIAYAFDMNNLWVTANIEETDVDDVQKGQDVDVYVDAYPDTTLTGKVEQVGLTTANTFSMLPSSNATANYTKVTQVVPVKISLDHSKSVNIVPGMNVTVRIHK

SEQ ID NO: 46134 - protein, 216 aa, Bacillus anthracis
MNLILMGLPGAGKGTQAEQIVAKYNIPHISTGDMFRAAMKAETEMGLQAKSFIDKGALVPDEVTIGIVRERLSQEDCVRGFLLDGFPRTVAQASALEEIMKDLGKKIDYVLNINVDSGLLLKRLTGRRICKECGATYHLEFNAPAKADVCDKCGGELYQRSDDNEETVANRLDVNIKQTKPLLDFYEELGYLQSINGEQDINKVFADIDVLIGGLA

SEQ ID NO: 46135 - protein, 314 aa, Bacillus anthracis
MKKKIAEYEVGEQVDVFLLIKTATKGIASNGKPFLTVILQDPSGDIEAKLWDVSPEVEKQYVAETIVKVAGDILNYKGRIQLRVKQIRVANENEVTDISDFVEKAPVKKEDMVEKITQYIFEMRNPNIQRLTRHLLNKHQNEFLDYPAATKNHHEFVSGLAYHVVSMLDLAKAISNLYPSLDKDLLYAGVILHDLGKVIELSGPISTTYTLEGNLLGHISIMVNEIGKAADELQIDAEEVLILQHIVLSHHGKAEWGSPKPPLVKEAEILHYIDNLDAKMNMMDRALGRTKPGEYTERVFALDNRSFYKPSFHN

SEQ ID NO: 46136 - protein, 823 aa, Bacillus anthracis
MSDNQQQARIREINISHEMRTSFLDYAMSVIVSRALPDVRDGLKPVHRRVLYAMNDLGITADKAYKKSARIVGEVIGKYHPHGDSAVYETMVRMAQDFSQRYMLVDGHGNFGSVDGDSAAAMRYTEARMSKISMELIRDISKNTIDYQDNYDGSEREPIVLPARFPNLLVNGTTGIAVGMATNIPPHQLGEVIDGVLALSHNPDITIAELMECIPGPDFPTAGLILGRSGIRRAYETGRGSIILRAKVEIEEKSNGKQSIIVTELPYQVNKARLIEKIAELVRDKKIEGITDLRDESDRNGMRIVMEVRRDANANVLLNNLYKHTALQTSFGINMLSLVNGEPQVLNLKQNLYHYLEHQKVVIRRRTAYELEKAEARAHILEGLRIALDHLDEVITLIRSSKTAEIAKQGLMERFGLSEKQAQAILDMRLQRLTGLEREKIEQEYQDLMKLIAELKAILADEEKVLEIIREELTEVKERFNDKRRTEITIGGMESIEDEDLIPEQNIAITLTHNGYIKRLPASTYKTQNRGGRGVQGMGTNDDDFVEHLLTTSTHDHILFFTNKGKVYRTKGYEIPEYSRTAKGIPIINLLGVDKGEWINAIIPIREFGDDEFLFFTTKQGISKRTPLSSFANIRTNGLIAISLREEDEVISVRLTSGDKDIIVGTSNGMLIRFNEQDVRSMGRNAAGVKAITLGEEDQVVGMEIVEEDVNVLIVTKNGYGKRTPIDEYRLQSRGGKGLKTCNITDKNGKLVAVKSVTGEEDIMLITAAGVIIRMPVDQISQMGRNTQGVRLIRLEDEQEVATVAKAQKDDEEETSEEVSSEE

SEQ ID NO: 46137 - protein, 634 aa, Bacillus anthracis
  MISC_FEATURE (5)..(5): X=any amino acid
  MISC_FEATURE (63)..(63): X=any amino acid
  MISC_FEATURE (67)..(67): X=any amino acid
  MISC_FEATURE (81)..(81): X=any amino acid
  MISC_FEATURE (106)..(106): X=any amino acid
  MISC_FEATURE (229)..(229): X=any amino acid
  MISC_FEATURE (237)..(237): X=any amino acid
  MISC_FEATURE (251)..(251): X=any amino acid
  MISC_FEATURE (299)..(299): X=any amino acid
  MISC_FEATURE (318)..(318): X=any amino acid
  MISC_FEATURE (323)..(323): X=any amino acid
  MISC_FEATURE (332)..(332): X=any amino acid
  MISC_FEATURE (340)..(340): X=any amino acid
  MISC_FEATURE (367)..(367): X=any amino acid
  MISC_FEATURE (373)..(373): X=any amino acid
  MISC_FEATURE (393)..(393): X=any amino acid
  MISC_FEATURE (427)..(427): X=any amino acid
  MISC_FEATURE (473)..(473): X=any amino acid
  MISC_FEATURE (486)..(486): X=any amino acid
  MISC_FEATURE (490)..(490): X=any amino acid
  MISC_FEATURE (497)..(497): X=any amino acid
  MISC_FEATURE (502)..(502): X=any amino acid
  MISC_FEATURE (540)..(540): X=any amino acid
  MISC_FEATURE (594)..(594): X=any amino acid
  MISC_FEATURE (607)..(607): X=any amino acid
FLQTXKWKVSKRKDRIALVGTKMGAGKSTLLKIIAGELSHDGGEIITRKDVSMGILSSKYRVXKHLXQFWDEMLTVFTHCXQMETKLRRLEQEMGKEENFSNRGTXERLLADYDQLQLDYKDSGWLSVRSQISVSILSGLGLPSETHQTTISTLSGGQKNTISLGKLLLTNPVLFFLDEPTNHLDMEPLPWLEQYLQGYPGAILIVSHARYFLDNLVTQVYEISNKGRXPIGWTFRXIFSLKISPYGTRKXNVIEKQQDEIAKLEDFVQKNIARASRNKACTKRRKPFRPMGIINKTTXGSLSQPSSTFDIEKQNGQXLFYKXRMQPFGFGXRSHYLNMXPRPLNSAEKNVCLYFGPKWELGNPPLXKSIAEXVTTITGDVSFGIHVFRWVLXSGNANLTSFKRVFNELWGQYTVQPEKRNSHDIRXLLFTGDDVLKPVSSLSGGQKARLALAKLMMQKSNLINSRRGYKPSXLNSKEIFGKGFNXLSWXPSICFTXPLLYXRVTTTVIELSTERGTGILQRLRFLVKKKNEMIERAELXQEDETPGSKDSCTRKIKLPGKKKRQKNWKRQRPGKIEEPRTKHCTILKKKLLRXKINFAYQNICRLXKGLVKLHRSIKPLQEQLDACMAEWEEL

SEQ ID NO: 46138 - protein, 398 aa, Bacillus anthracis
  MISC_FEATURE (302)..(302): X=any amino acid
MFHRIEEALEDLKQGKVVIVCDDENRENEGDFIALAEYITPETINFMITHGRGLVCVPITEGYAERLQLEPMVSHNTDSHHTAFTVSIDHVSTTTGISAHERATTIQQLLNPASKGKDFNRPGHIFPLIAKEGGVLRRAGHTESCFDLAQFCGAEPAEVIWEIINGDGTMARVPDLLQCAKQFDIKMITIEDLIAYRRHHETLVTREVEITLPTDFGTFQAIGYSNSLDTKEHIALVKGDISTGEPVLVRVHSECLTGDVFGLVRCDCGPQTPCALAQIETEKKKRVLFFCKQKGRGHWPPXNFPAYKLQEEGFDTVEAKRKTWVPADFRDYGIGAQILKDFRVTTFTLLTNNPRKIAGLQGYDLTVTERVPLQMPAKEENKTYLQTKVNKLGHLLNL

SEQ ID NO: 46139 - protein, 192 aa, Bacillus anthracis
MTQEIEIEFKNIVTEEEFHALCKSFSIEVFTKQVNHYFETPNFSLKEAGSALRIRHKGETYTLTLKQPAEVGLLETHQVVTENEAKMMMETNVIISGAVMNQLCKLQIPVSALTYMGSLTTERAETLFEGGTLVFDHSFYYNHDDYEIEFEVQDEETGKAAFIHLLKQHNIPIRHTNNKVKRFFLAKQNKAR

SEQ ID NO: 46140 - protein, 326 aa, Bacillus anthracis
  MISC_FEATURE (239)..(239): X=any amino acid
  MISC_FEATURE (262)..(262): X=any amino acid
  MISC_FEATURE (264)..(264): X=any amino acid
VLEQGLLVTAGVAFLISVALSPIVIPFLRKLKFGTSIRDEGPKFTQKKSRDPRPMGGMFIYVSMMVTSLIMAIKVNHLGAEVSLLLLVTFGYGLIGFLDDYIKVVKKRNLGLTSKQKLVGQLVIAIAFFFIEKGQAFHTYIMIPGTDVKFELGWAYFVLVLFMLYGWINAVNLTDGLDGLLSGNSCYCFGAFSIIAVAQEQFGGGDILYAVVGAVLWIFSIQGNPAGSVYGRYRSLAFXGGKALLPQPVAQILLKQEIATLXSXAEYRNETLSVIIQVISFKTTGKRVFKMSPLHHHYELCGWSEWRVVVTFWSVGFLLAVLGIYI

SEQ ID NO: 46141 - protein, 325 aa, Bacillus anthracis
  MISC_FEATURE (133)..(133): X=any amino acid
  MISC_FEATURE (149)..(149): X=any amino acid
  MISC_FEATURE (240)..(240): X=any amino acid
  MISC_FEATURE (244)..(244): X=any amino acid
  MISC_FEATURE (280)..(280): X=any amino acid
KNPLLRIENLQTSFRIQDQYHAAVDDVSLTVHENEIVAIVGESGCGKSALALSIMRLHNEANTKSQGQDNYRDKDLLTMSAAEMNKVRGSNIGMIFQEPLTALDPLMTVGKQIEGILDSHTAFSKVERKDGPXELFYQVGIPKPELTLXPSPPDLSGEMRQRIVIAIAIACSPALIIADEPTTALDVTIQATIFRLLKSIQEQTKMGIILNRSGLGVVAETAVCIVVMYAGQVVETGKVXRDFXQPSHPYTRSLLNSIPSAYAEKEKLHVIQGVGTDVSXVPRTGCRFQARIPWIRPDQHEENPILHEVKPNHWVRCTCYKHFNF

SEQ ID NO: 46142 - protein, 458 aa, Bacillus anthracis
  MISC_FEATURE (32)..(32): X=any amino acid
  MISC_FEATURE (45)..(45): X=any amino acid
  MISC_FEATURE (46)..(46): X=any amino acid
  MISC_FEATURE (203)..(203): X=any amino acid
  MISC_FEATURE (274)..(274): X=any amino acid
  MISC_FEATURE (278)..(278): X=any amino acid
  MISC_FEATURE (297)..(297): X=any amino acid
  MISC_FEATURE (313)..(313): X=any amino acid
  MISC_FEATURE (316)..(316): X=any amino acid
  MISC_FEATURE (330)..(330): X=any amino acid
  MISC_FEATURE (345)..(345): X=any amino acid
  MISC_FEATURE (369)..(369): X=any amino acid
  MISC_FEATURE (390)..(390): X=any amino acid
  MISC_FEATURE (392)..(392): X=any amino acid
  MISC_FEATURE (393)..(393): X=any amino acid
  MISC_FEATURE (442)..(442): X=any amino acid
KVITKLKDTFVEKVDDFVRQHDVLKGRFTIVXGVSWGPDSLALPXXFIREEEQQNSLKMVMGPGGIYMFRGDESHEDLQFVQDLCKGLGVICETIRINVSQYQKQYGMNAQVAARECRYAFFGKIMKKYDARYVAPWTHGDDQVETILMRLVRGSTPKRYAGIAVKRPFSNGDLIRPLLGVTKEKIVIYWNELKIIPPIDPQXQKEVYTRNRLRKYVLPHLKEENPQVHEKFQKFSMQMQEDEAYLQELAFEKMNKVITKKSDKQISLSIPSLXNPVXSLYKGRGISTYYKLFFRNXRFPSFLFFNHYGQVDXVFXRGPHLSGPLDFPRXFENLSPVQRGTFGFXQGIGFPFLTRLISAGDNSVMDREXIGNEVSEDIPSDMNETVCGGXVXXYSYPIRIRSRENGDRMSIQGMNGTKKIKAIFIEAKVPREKRGDGPGRLXCKREYIWLPLLKRSAF

SEQ ID NO: 46143 - protein, 433 aa, Bacillus anthracis
MFRTISNFMRVAEIRRKILFTLAMLIVFRIGTFIPVPFTNGDVLKAQDQLNALGILNTFGGGALKNFSIFAMGIMPYITASIIVQLLQMDVVPKFSEWAKQGEMGRRKLTQFTRYFTIVLAFIQGFGMSIGFNGMVGGQLILNPGWSTYLYIATVLTAGTAFLMWLGEQITAKGVGNGISILIFGGIAAAIPSVISQVYQQQFQNIGDQLFMSIVKVALILLAVLAVIVGVIFIQQAVRKIPIQYAKRVTGGNGGYAGAQNTHLPLKVNSAGVIPVIFAVSFLITPPTIAQFFPKHDVSQWIIANFNYSHPVGMIIYVALIVAFTYFYAFVQVNPEQMSENLNKQGGYVPGIRPGKNTEQYLTKILYRLTFVGSIFLAAIAILPVIFTKLGNLPPSAQIGGTSMLIVVGVALETMKQLESQLVKRHYKGFIKQ

SEQ ID NO: 46144 - protein, 198 aa, Bacillus anthracis
  MISC_FEATURE (9)..(9): X=any amino acid
  MISC_FEATURE (15)..(15): X=any amino acid
  MISC_FEATURE (24)..(24): X=any amino acid
  MISC_FEATURE (28)..(28): X=any amino acid
  MISC_FEATURE (43)..(43): X=any amino acid
ETFPNLELXPPLILXWGILGIRFXIRVXTMIAITFFENCLIFXKVVYNRAITLFQSLHATEDDIYIVVDVNDYADGESFKHKLNIFSKYVKAKSDLFKLQKNTIPYVFPEDDEDGVYKMHRYILKCKVSDLKYIPMLKAICNQDMGIKPRIVHRVYFINSNKNTIFHVYDDRGCDVLATSPNTIRDIYHTYNDWILEY

SEQ ID NO: 46145 - protein, 131 aa, Bacillus anthracis
MYHLVYWMPLTIHLSPFVTTLISDILSFILWILVGILIAVLMRPKREAMIWTIIEPIQKIAKGDFSVKIRNEEKYDGEIGVLVKSINDMTDELNAMEKMRQEFVSNVSHEIQSPLTSIKGFARALQDTNSS

SEQ ID NO: 46146 - protein, 393 aa, Bacillus anthracis
MYIDLNRFKTINDTMGHSIGDSVLKEVAKRFRTCLSPSIPLARIGGDEFAVLVHNHTEQQLLDLCENLFRITEKPFVVNQHSFYLSLSIGIAVYPFGGINTTTLLQHADIAMYSAKEKGNNAVCMYDETLSQKITRRLQLEQDLPNAIENNELFLLYQPQVDSKAGKVIGAEALIRWQHPELGLISPFEFIPIAEETSQIISIGKWTLQEACQQLKEWHSAGYSNLKMGINLSAIEFEQKGFVQTVISIIEEVGVPANSIDLELTERIAMVDEKETLSKLKALKSYGVHLSIDDFGTGYSSLAYLPLYPIDTLKIPREFVNRIGTSNDGDEIIQTIISLAHTLNMKVIAEGVETKEQLTVLQQNACYLIQGYYYSKPVNEDEFINFLNTTQNK

SEQ ID NO: 46147 - protein, 347 aa, Bacillus anthracis
  MISC_FEATURE (14)..(14): X=any amino acid
  MISC_FEATURE (18)..(18): X=any amino acid
  MISC_FEATURE (248)..(248): X=any amino acid
  MISC_FEATURE (259)..(259): X=any amino acid
  MISC_FEATURE (263)..(263): X=any amino acid
  MISC_FEATURE (272)..(272): X=any amino acid
  MISC_FEATURE (310)..(310): X=any amino acid
LFPWIERGRGPEFXNWVXISRIPLASNFKKKQFSTMQNEEETKQIQELFKKEFINKTVEPFGEFELLKMNELTPLQRRVFFRKHLISPNLAGTEYGACLLSESEHISVMLNEEDHIRIQGLIFRNGVIQRPFKGPIQIKNWIEKEVEYAFDESLGYITSCPTNVGTGLRASVMIHLPGLVLTKRISRIIQVIQKLGLVVGGNIGEGSEALGNIFQVSNQMTLGKSEEDIIADLKSVIQQIIQQEKNGXRINLYKISSNXTERXKLRLLMGYXPNSRFNFYLPEAANCLSDLRLSIDLGYIQGDEEKLFDXANVLTQPGILQQYAGGPLGPEERDYRRATLIRERLRM

SEQ ID NO: 46148 - protein, 60 aa, Bacillus anthracis
MGTKGNTLLVYLWGYQSYETYVEHMKKHHPEEEVVCQKQFFAEAQEARFNAKGGKISRCC

SEQ ID NO: 46149 - protein, 239 aa, Bacillus anthracis
MEHGKLVEFLGLTFDLSSVMMVTVAAVIVFLIAVIGTRSLALRPTGMQNFMEWVFDFVKGIINSTMDWKTGGRFLTLGVTLIMFIIVSNFLGLPFMYSTVEAGEHIAWWRSPTSDPAVTLTLAVMVVTLTHYYGIKMKGTKEYVKGYFQPMKFLFPLKVIEEFANTLTLGLRLFGNIYAGEILLGLLAKLGGATFLGALGALVPMLAWMGFSVFVGSIQAFIFVMLTMVYMAHKVSHDH

SEQ ID NO: 46150 - protein, 122 aa, Bacillus anthracis; identical to SEQ ID NO: 45315
  MISC_FEATURE (106)..(106): X=any amino acid

SEQ ID NO: 46151 - protein, 134 aa, Bacillus anthracis
KEKVKNVPDGYANNFLLKQGLAAEATNSSMKTLEAQKRKEEKDAAAELESAKQLKETLEKLTVELKAKSGEGGRLFGSITSKQIVDAMQKSHKIKLDKRKFEMDDAIRALGYTNVTVKLHPQVTATVKVHVSEQ

SEQ ID NO: 46152 - protein, 96 aa, Bacillus anthracis
MLETFQKEIELYESNAELLKVLAHPVRLCIVKGLIERGPSNVSTMYTGLNMPQSTISQHLAKLKSAKIVSSERKGLEIYYKVENETIIQLVRVLLG

SEQ ID NO: 46153 - protein, 558 aa, Bacillus anthracis
MDYKTQFAESLSNIFTNELTQQQILDLIETPKQDEFGDAAFPCFSLAKQYKKSPAIIAKEVAEKLSDPFFTKVEAVGPYVNVFFNRDTVSDAVLKTILAEKEEYGKNYFGCEKTVVIDYSSPNIAKPFSMGHLRSTMIGNSLKHIAEKCGYEVVGINYIGDWGTQFGKLITAYKKWGNEAVVKEDPIRELFKLYVQFHEEVKDDEELEEEGRAWFKKLEEGDEEAVELWNWFRHESLKEFSRIYELLGVEFTNFQGEAFYNNLMEDFIGILEEHDLLEESEGALVVNLEEEGMPPCLIRKSDGATIYATRDLTAALYRQNTFGFDKALYVVGPEQSLHFNQFFTVLKKLGYTWVDGMEHVPFGFILKDGKKMSTRKGRVILLEEVLEEAIELAKQNIEEKNPNLKQKEEVAKQVGAGAVIFHDLKNERMHNIEFSLENMLKFEGETGPYVQYTHARACSILRKESVEFETCTFALKDDHSWSVVKLLNKFPQVIEIAFNKNEPSVISKYVLDVAQSFNKYYGNVRILEESEEKDSRLALVYAVTVVLKEGLRLLGVEA

SEQ ID NO: 46154 - protein, 606 aa, Bacillus anthracis
  MISC_FEATURE (82)..(82): X=any amino acid
  MISC_FEATURE (100)..(100): X=any amino acid
  MISC_FEATURE (104)..(104): X=any amino acid
  MISC_FEATURE (118)..(118): X=any amino acid
  MISC_FEATURE (224)..(224): X=any amino acid
  MISC_FEATURE (325)..(325): X=any amino acid
  MISC_FEATURE (331)..(331): X=any amino acid
  MISC_FEATURE (353)..(353): X=any amino acid
  MISC_FEATURE (371)..(371): X=any amino acid
  MISC_FEATURE (376)..(376): X=any amino acid
  MISC_FEATURE (382)..(382): X=any amino acid
  MISC_FEATURE (386)..(386): X=any amino acid
  MISC_FEATURE (388)..(388): X=any amino acid
  MISC_FEATURE (468)..(468): X=any amino acid
  MISC_FEATURE (475)..(475): X=any amino acid
  MISC_FEATURE (477)..(477): X=any amino acid
  MISC_FEATURE (534)..(534): X=any amino acid
  MISC_FEATURE (544)..(544): X=any amino acid
MCGIVGFIWRARMQEEILLKGLEKLEYRGYDSAGIAVQAENGVVVYKEKGLYAKLREIVDENVAASVGIGTHRLGYHGVPKXSNRASAQSTSKQLYTSSXGCIXNYEFSEKGIFSRMXRSEEETDTEGILHPIGTTSSTGLSVEEAFRNTLSLLHGSYAIGLLDAENPNMIYVAKNKSPLLVGVGDNFNVVASDAMAMLQVTDQFIELMDKEIVIVMGRSITIXKLTRVKTIETCTRLQRELDASDIEKGTYPHFMLKEIDEQPLVIRNIIQKYQDENGEIELDQDIRNAILDSDRITFIACGTSNHAGLCWKTMYREVAKMPTXSAWSKXILYNMPLVTERPFFIYISQRWXNRLIARAVLVQTNESGSXSINDXNVPWVXHFSXSXLYLPLYAGTRKRSCINKSFFQHSVQYFSILAADIAKAKGEVLGFDLTHELGLVANAMIELCDQKEEMDALAKPILATTWXLFLNRTXRXLLRGLEGALKLKEISYIQAEGFAGGELKHGTIALIEKRYTRYRTCFPRKPNLWNSWXRERSSSTRSXPCIISMKGLEMEGDSFVLPAVHEALAPLVAVIPLQLISYYAALHRECDVDKPRNLAKSVTVE

SEQ ID NO: 46155 - protein, 239 aa, Bacillus anthracis
MNIEQFQSMLEEKGITLSSRQLEQFEIYFETLVEWNEKMNLTAITEKEEVYLKHFFDSITAAFYYDFSKPFSICDVGAGAGFPSIPLKICFPHLKVTIVDSLQKRINFLNHLAQKLELSDVAFCHDRAETFGKKEGVREAYDIVMARAVARLSVLSELCLPLVKVGGTFIAMKGAAANEEIENGKYALEVLGGDLKEMSTFQLPFEESERNILLIEKKRKTPKKYPRKPGTPNKLPIEK

SEQ ID NO: 46156 - protein, 522 aa, Bacillus anthracis
MSETLLVIISILLLLLLLLIVFFIITFFIKKRTHHSILKLHPYLGRMRYLLEKIGPEFRQYWFDHDTDGKPFSRYDFQSVMFLAKYRSEILGFGSKRDFEASGYYIANTLFPVLTEELSVNVTPEREGKKYVIHKEGLFSRREKLTADTTNLWLYEEDDAIIIGENRKYPWKLYGMFGASATSYGSIGENYILASGFGAKMAGGSWINTGEGGVIPEHLHTGANIVAQIGPGLFGYRDEDGNFSMEKFMGKAKESNIKAFELKFGQGAKIRGGHLEGQKVNEKIAFVRNVREGETINSPNRFSFLNNAAETLYFIQQLQENGGKPVGMKIVIGQQEPLENLFKTMKELNIYPDFITIDGSEGGSGATYKSMADSMGMPLIPALLTFIDTANHYDIRDKFKVFAAGKLITPDKVAIALAIGADAVNSARGFMMASGCIMALQCNSGQCPSGVATTNPHYQKALDPYEKKWRVMNYIVSMRYSLFSLAAAAGVKSPRHLKRDHIVFKDEMGRVVPLSELFPTSK

SEQ ID NO: 46157 - protein, 171 aa, Bacillus anthracis
MNDILIVDGYNIIGAWGDLKKLRDVDLQSSRDALIDKMADYQGYTGTKVMIVFDAYTVHGIEKKMKQSRVEVIFTRKNQTADEKIEQLAIELRNINTQIYVATSDYTEQWVIFAQGALRKSARELELEVQAMEQQVRKASPQPQKEKPLAMRKIFSKDITEKLEKLGRGER

SEQ ID NO: 46158 - protein, 273 aa, Bacillus anthracis
MQKALETKRLTLSYGETIIIDELNLEIPKGEITIFIGSNGCGKSTLLRSLARLLKPTTGDILLDNQAIQSMQTKQIARQMAILPQGPQAPEGLTVLQLVKQGRYPYQTWLKQWSEKDEEMVQNALAATGMTEFAERDVHALSGGQRQRAWIAMTLAQDTDIILLDEPTTYLDMTHQIEVLDLLFELNETEQRTIVMVLHDLNLACRYADNIVAIQDKQIYAQGKPEEVVDEKLVRDVFRMECQISTDPLFGTPLCIPHGKGRRVRKEVAHAMR

SEQ ID NO: 46159 - protein, 312 aa, Bacillus anthracis
  MISC_FEATURE (169)..(169): X=any amino acid
KPYRVLLYYMYTTIENPEEFAAEHLEFCNSLELEGRILVAKEGINGTCFGSVGQTGKFLEGMEQRSRFDGIVFKIDEAEWSCFKKMHVRPRPELVTLRLEDDINPHEITGKYLEPKDFYEAMKQEDTVIIDARNDYEFDLGHFKGAIKPDIESFRELPDWIRENKEVLXRQKILTYCTGGIRCEKFSGWLVREGYEDVSQLHGGIVTYGKDPEVQGELWDGQCYVFDERIAVPVNQKEHVIVGKDHFTGEPCERYVNCANPECNKKILCSEENEAKYLRACSHECRVSPRNRYVIHHDLPEGPSSCALEKIE

SEQ ID NO: 46160 - protein, 160 aa, Bacillus anthracis
MTQHKEEQMNEALALFYFAYKTFTEKPDEIIKEYGIQRVHHRILFFIARFPGVSVNELLSLLEISKQALHGPLRQLVEKSLIESNEATHDRRVKQLSLTEKGADLEKKLSDVQRQQMGAIFSKFGESCEENWHQVMNEMAHSRSGFDAWISKREVAIDQK

SEQ ID NO: 46161 - protein, 204 aa, Bacillus anthracis
  MISC_FEATURE (13)..(13): X=any amino acid
  MISC_FEATURE (23)..(23): X=any amino acid
  MISC_FEATURE (74)..(74): X=any amino acid
  MISC_FEATURE (77)..(77): X=any amino acid
  MISC_FEATURE (127)..(127): X=any amino acid
  MISC_FEATURE (145)..(145): X=any amino acid
LCKKLQPQFVFFXLQIMDGNWIXICEFIKGVNCYAKFIFMGEDIEESITAFRFSSFYYLLRPFREDKIKKRFIXNGXRARRESKELFAKTTPKKPATNSGYFFRDKLYYVMPQIRENKTGSIYTTKXIGIFPTYYTFRELEKKTXRAYEFFTGGHKSYLINMSYVQELKPYYNGTYNLYLDKYDEQPIPVSRNYVKRLRNKIEL

SEQ ID NO: 46162 - protein, 120 aa, Bacillus anthracis
MITKADKNATRKKRHARVRAKLTGTAERPRLNVFRSNQHIYAQVIDDVNGVTLVSASTLDKDLALNGTSNIEAATKVGESVAKRAVEKGVKEVVFDRGGYLYHGRVKALAEAAREAGLQF

SEQ ID NO: 46163 - protein, 1194 aa, Bacillus anthracis
  MISC_FEATURE (3)..(3): X=any amino acid
HYXSNNNKNIVNTDIFTANVALVKTVDKTIATIGDTITYTITATNQAPLAANNVIITDIPPAGTTFVPGSVTVNGTPTTNNPATGINIGTIAANGNATITFQVQVTSLPAQNPIRNSASSSFQYNPPGQPPINRTSTSNIVETLINAAIINPSKTANQQIVNIGDIITYTITIPNNGNTSATNVSITDPIPTGTTFIPNSVTVNGTIQTGITPTNIPIGTVAAGQTTTVTFQVQVTSLPANGTITNEANVTYTSQPNPTEPPTTTTTTPPPTNTSVRTAIVNPTKTVSPQVADIGDIITYTITLPNTGNISATNVIVTDPIPAGTTFIPNSVTINGVSQPNINPAGGIQVGTINAGSTTTVTFQVQVTSLPQNGVIRNIGNTTFTYQPDPTKPTITTTNPTPPTTVPINTAIINPIKTADKTAVDIGDIITYTITFNNDGTVPATNVIFTDSIPAGTTFIPNSVVLNNNPVPNSNPALGITVGTLNPGETKTLSFQVRVTQIPAGGTITNEASTTYTYQPDPTLPPVTTTEPTPPTSVTVNTATVNPTKSADRAFADIGDIITYTISLQNNGTVPATNIILTDPIPNGTTFIPNSVTINGISQPNTNPSTGITVGTLDPTEAATISFQVQVISVPPHGLVENQGTVSFTHIVNPNEPPVTKTSPTPKTETAVNTIISTPTKTADKQLADIGDTITYTITFRNGGTVPATNVTLIDSTPSGTTFIPDSVTINGVTSPGSNPALGIQLGTVAVGETKTITYQVLVTNFPPNGIIENQASFTYQYQPNPNEPPVTSTTPTPNVNVSINNPNPTTTKSADLQIADIGDIVTFTVTFQNKGTVPATNVTVQDSLPQGVSFVPGSVVINGISQLGENPEIGIPIGTVNPGQSITVTFQGIVNSIPPGGVIRNKANITFTYEPSPNEPPVTTTITTPETETTVNTATLEPQKTVNRSFVTLNDIITYTLSFQNVGTVSATNVTITDSIPAGTTFIPDSVTINGVPQAGINPASGIPIGTLTPTERVTITFQVQVINIPPSGTINNQGSATFNYQTDPTLPPVTKTETTPETNTPIQTAVISPTKTANLTFAEIGNTVTYTITFTNQGTIPATNVTITDALPPGTSFVTNSVTVNNVTQPGASPVTGILVGTVNPGETVTVTFQIQINAIPPSGKIENTASVTYTSQPNPNEPPITTTETTP

SEQ ID NO: 46164 - protein, 85 aa, Bacillus anthracis
MFAPGVHIYTATHPLHPVERNSGKEYGKPVKIGNNVWVGGGAIINPGVSIGDNAVIASGAVVTKDVPNNVVVGGNPAKVIKTIEE

SEQ ID NO: 46165 - protein, 371 aa, Bacillus anthracis
MTERLKVMTIFGTRPEAIKMAPLVLELQKHPEKIESIVTVTAQHRQMLDQVLSIFGITPDFDLNIMKDRQTLIDITTRGLEGLDKVMKEAKPDIVLVHGDTTTTFIASLAAFYNQIPVGHVEAGLRTWDKYSPYPEEMNRQLTGVMADLHFSPTAKSATNLQKENKDESRIFITGNTAIDALKTTVKETYSHPVLEKLGNDRLVLMTAHRRENLGEPMRNMFRAIKRLVDKHEDVQVVYPVHMNPVVRETANDILGDHGRIHLIEPLDVIDFHNVAARSYLMLTDSGGVQEEAPSLGVPALVLRDTTERPEGIEAGTLKLAGTDEETIFSLADELLSDKEAHDKMSKASNPYGDGRASERIVEAILKHFNK

SEQ ID NO: 46166 - protein, 196 aa, Bacillus anthracis
MLDAIIGSDTVLHPGTIIEGNTVIGSDCEIGPHTVIRDSEIGDRTTIRQSTVHDSKLGTEVSVGPFAHIRPDSVIGDEVRVGNFVEIKKTVFGNRSKASHLSYIGDAQVGEDVNLGCGSITVNYDGKNKFKTVIGNGVFIGCNSNLVAPVTVEDGAYVAAGSTITENVPSKALSVARARQVNKEDYVDQLLNKKKS

SEQ ID NO: 46167 - protein, 431 aa, Bacillus anthracis
MSTIIDVYAREVLDSRGNPTVEVEVYTESGAFGRAIVPSGASTGEHEAVELRDGDKSRYLGKGVMNAVNNVNEAIAPEIVGFDVTDQAGIDRAMIELDGTPNKGKLGANAILGVSMAVAHAAADFVGLPLYRYLGGFNAKQLPTPMMNIINGGSHADNNVDFQEFMILPVGAPTFKESIRMGAEVFHALKAVLHDKGLNTAVGDEGGFAPNLGSNREALEVIIEAIEKAGYKAGENVFLGMDVASSEFYNKETGKYDLAGEGRTGLTSAEMVDFYEELCKDFPIISIEDGLDENDWDGHKLLTERIGDKVQLVGDDLFVTNTQKLAEGIEKGISNSILIKVNQIGTLTETFEAIEMAKRAGYTAVVSHRSGETEDATIADIAVATNAGQIKTGSMSRTDRIAKYNQLLRIEDELGEIAVYDGIKSFYNIKR

SEQ ID NO: 46168 - protein, 494 aa, Bacillus anthracis
MESMTFVLFGATGDLAKRKIYPALYNLYRDQKLPKQISVIGLGRREVSHVDFQKRIKESIETFSRHREEGTPELEGFLDNFRYCPLDVSKPEDYERLLQVVREREEELHIKGNRMFYLSGAPEFFETIALNIKESGLDKTDGWKRLMIEKPFGHDLTSARELNDKLSRTFEEDEIYRIDHYLGKPMIQNLEALEFANPVLQSIWNKEHIANVQITASETVGVEERAGYYDQAGAIRDMVQNHMLQILMMTAMNLPEKVNACEIREEKRKVMEALRKVKKEDVQNHIIRGQYGAGEINGGQVVAYKEEPGVNPSSNIDTFIAARLWIDNPFWTGVPFYIRTGKRMKEKSTRIVIEFKNTLKQQYQDSNPNAAPNLLIIEISPGENVSLQLNSKNPLKNGEIEPIRINFTCEQADVGVPEAYERLIHDAVSGDATFFAHWREVELSWEWVQPILEAFEENLLPLHEYESGSYGPEASNELLQESGFKWWLDQETKK

SEQ ID NO: 46169 - protein, 467 aa, Bacillus anthracis
  MISC_FEATURE (27)..(27): X=any amino acid
  MISC_FEATURE (237)..(237): X=any amino acid
  MISC_FEATURE (264)..(264): X=any amino acid
  MISC_FEATURE (265)..(265): X=any amino acid
  MISC_FEATURE (266)..(266): X=any amino acid
  MISC_FEATURE (270)..(270): X=any amino acid
  MISC_FEATURE (356)..(356): X=any amino acid
  MISC_FEATURE (418)..(418): X=any amino acid
  MISC_FEATURE (419)..(419): X=any amino acid
  MISC_FEATURE (422)..(422): X=any amino acid
MTIHIYNTLTRQKEEFTPLEENWVKMXVGGPPVLSYIHIGNARPPMVFDTVRRYLEYKGYDVQYVSNFTDVDDKLIKAANELGEDVRTIADRFVEAYFEDVTALGCNHATVHPRVTENMDIIMKFIQELVNKGYAYESEGDVYFRTKEFEGYGKLSHQPIADLRHGARIEVGEKKQDPPDFALWKAAKEGEIFWEKPWGSGPPKWHIECSGNGPKYLKGIHLIFMPGGQDLAISSSXNEIAQSEALTGKTFARYWMHHGYINIXXXEKWXVTWEFILVHDIIKQYDPQLIRFFMLSVHYRHPINFSEELLQSTNNGLERLKTATGILNHGMESSTDLPDHNENGLVDLEKIPNCIXRSMNDDFNTANAITELYNVQNHANQYLLEEHTSPVVMKAYVKQLETLFDILGFRISARKSCXXKKXGHLFKKRIEARKNRDFALSDQIRDDLKDRNIILEDTAQGTRWKRG

SEQ ID NO: 46170 - protein, 283 aa, Bacillus anthracis
  MISC_FEATURE (35)..(35): X=any amino acid
  MISC_FEATURE (47)..(47): X=any amino acid
  MISC_FEATURE (67)..(67): X=any amino acid
  MISC_FEATURE (85)..(85): X=any amino acid
  MISC_FEATURE (93)..(93): X=any amino acid
  MISC_FEATURE (257)..(257): X=any amino acid
  MISC_FEATURE (263)..(263): X=any amino acid
KMALLAMVLVVTSVLFAACSNKEKKKADAKDAKDXERTVQHAKGEIXIPCKSKEKLLTLSGSPEELXFLGMKPIITANTSQEKNXCTYLKRNXKDVKPVGSAWGDKINIEAVAAAKPDLILVNNRQEKIYDQLSKIAPTVMLKTPLDQWRPKFEEVGQIFGKEKETKEWFKQYDEKASKLHDKIVGETGDAKFLKNGCLSKWLSGYMGTTGTGTKSFIDLKLPAVKGTPTDKPLVQVQKEALIDYNPELLIRIYDWXTVLSAXKNSKKNQFWKNMNAVKNNHV

SEQ ID NO: 46171 - protein, 101 aa, Bacillus anthracis
MMEQKQEIHATVSINNVQYEVIKNFRDGFSEEAFKERYAEILNKYDYIVGDWGYEQLRLRGFFDDSNQRATYDTKISTLSEYLYEYCNFGCAHFVLRKVKK

SEQ ID NO: 46172 - protein, 179 aa, Bacillus anthracis; identical to SEQ ID NO: 45329
  MISC_FEATURE (67)..(67): X=any amino acid
  MISC_FEATURE (134)..(134): X=any amino acid
  MISC_FEATURE (154)..(154): X=any amino acid

SEQ ID NO: 46173 - protein, 585 aa, Bacillus anthracis
  MISC_FEATURE (579)..(579): X=any amino acid
LFTKAQELLASYSGYSSFRRGQDETIKNVLDGKDTVCIMPTGGGKSICYQIPALVFEGTTLVISPLISLMKDQVDTLVQNGISALYINSSISITEANQRIQLAKQGHYKLFYVAPERLDSMEFVDQLIDMKIPMIAIDEAHCISQWGHDFRPSYLHIHRILDYLPEEPLVLALTATATPQVRDDICNTLGINQENTIMTTFERENLSFSVIKGQDRNAYLADYIRQNQKESGIIYAATRKVVDQLYEDLMKAGVSVSKYHAGMSDHDRNEQQELFLRDEVSVMVATSAFGMGIDKSNIRYVIHYHLPKNLESYYQKAARAARDGLDSACICGYASQDVQVQRFLIDQSIRESRFFMNLENLQILTDYCHTEQCLQSFILQYFGEEPKEDCGRCGNCTDNRESIDVTRESQMVLSCMIRTNQRFGKQMIAQVLTGSKNKKVIEFNFHTLPTYGLLSNRSVKEVSEFIEFLISDELIAVEHGTYPTLKVTEKGKEVLLGKENVLRKERVETRQIVQDHPLFEVLREVRKENAQGRGGPPFVIFSAQPLKDMGAKMRQSDSELLTVKGLETHKLVKYGSHFXQAVQHF

SEQ ID NO: 46174 - protein, 307 aa, Bacillus anthracis
  MISC_FEATURE (46)..(46): X=any amino acid
  MISC_FEATURE (174)..(174): X=any amino acid
  MISC_FEATURE (200)..(200): X=any amino acid
  MISC_FEATURE (222)..(222): X=any amino acid
RILIDPIPMEVIKWGRKNFIVRIDTSDFIHDLGMEWQGFFTYYPSXSRAAFLERRTFNFFDTLTSDQKQERMKALCTEETPCIIVTRNQDVPDELLQASRESGMPLLRSSQTTTRLSSRLTNYLEGKLAPTTAGHGVVVDIYRGGVLITRQNGVRKSETALEPVKNGHPLVAEXKMKKFPKRLKTCYSEAPHNLLDHFFXIPGLWFINVLTVFRARSTGKIXTGLTLFFNLQNLGQKKNYDRLGLDEEKMKIIDTELTKITLPVRPGRNLAVIIEVAAMNFRLKRMGVNAAQQFSERLMSAIELGNQ

SEQ ID NO: 46175 - protein, 371 aa, Bacillus anthracis
MTVIRGLEGVVATTSSVSSIIDDTLTYAGYNIDDLAENATFEEVVYLLWHRKLPNEQELAKFNEIVSEYYKVPGEILAYLKQVDLKIAHPMSVLRTAISMLSLYDESAEIMDEKSNYLKAVKLQAQVGTLVAAYARIRKGLDVVEPRNDLSLAANFLYMLNDREPNEVEIEAFDKALVLHADHELNASTFTARVCVATLSDVYSGITAAIGALKGPLHGGANENVMKMLTEIGEEENVESYIHNALQNKVKIMGFGHRVYEQGDPRAKHLREMSKRLCVLLGEEKWYNMSIKIEDIVTKEKGLPPNVDFYSASVYHCLGIDHDLFTPIFAISRMSGWLAHILEQYENNRLIRPRADYNGPTHQVYVPIAQR

SEQ ID NO: 46176 - protein, 413 aa, Bacillus anthracis
MGYYDGPNLNEEHSETREVRKSGSKKGYFFTGLVGAVVGAVSISFAAPYMPWAQNNGATVSSFSSDSKVEGTVVPVVNKAKNETDLPGMIEGAKDVVVGVINMQQSIDPFAMQPTGQEQQAGSGSGVIYKKAGNKAYIVTNNHVVDGANKLAVKLSDGKKVDAKLVGKDPWLDLAVVEIDGANVNKVATLGDSSKIRAGEKAIAIGNPLGFDGSVTEGIISSKEREIPVDIDGDKRADWNAQVIQTDAAINPGNSGGALFNQNGEIIGINSSKIAQQEVEGIGFAIPINIAKPVIESLEKDGVVKRPALGVGVVSLEDVQAYAVNQLKVPKEVTNGVVLGKIYPISPAEKAGLEQYDIVVALDNQKVENSLQFRKYLYEKKKVGEKVEVTFYRNGQKMTKTATLADNSATKNQ

SEQ ID NO: 46177 - protein, 266 aa, Bacillus anthracis
MKEMKVIIAGPRGRMGHEAVLLMERTEHFNLVAAVDYKHGGEKISDLPGMPALDATIYADLHTCLEEVEADVLLDLTTPEVGKQHVTLAVERGLRSVIGTTGFTEEELKQLTETAKEKAVGTIIAPNFAIGAVLMMKFSQMAAKYFQDVEVIELHHDQKLDAPSGTAVKTVELIRQNRESKQQGHPNEVEQLEGARGANVDGIHIHSVRLPGLIAHQEVMFGGDGQMLTVRHDSFNRASFMSGVKLSIETVMNLDHLVYGLENIID

SEQ ID NO: 46178 - protein, 582 aa, Bacillus anthracis
  MISC_FEATURE (293)..(293): X=any amino acid
  MISC_FEATURE (452)..(452): X=any amino acid
  MISC_FEATURE (458)..(458): X=any amino acid
  MISC_FEATURE (541)..(541): X=any amino acid
  MISC_FEATURE (548)..(548): X=any amino acid
  MISC_FEATURE (554)..(554): X=any amino acid
  MISC_FEATURE (563)..(563): X=any amino acid
SAKAKGEIEESFLQIALSRWLDSQSFHMPRETAERFCQEALKLERLPSSLLSSPELNKLAEEINYVNTGSMKDSSMQPISSLIENQNGDNLSDILNYHIIKWCKLYLDDPRASWAMPNREKGFYRAWQHLITFDPALSKTEPKVLKDWPEDALIALTKALSELGISESNMQAYLEGHLLSLLGWAGMIRWRSQQSIEEQELLIEYLAVRLSMELAIVKPYLPLKNQKVEKKVSIVPLIASWIYWGDISIEKWLQMSATEQSELLAFAYRFEEKFSQRNFWLEAWEPDAFRAIXGRKICFLGNGQIHDKKACSRSIKHFGIDVRSRNRFVATLEKLGPFENVWIAGFFGLPIATTELGSNDSHPSLPVILKPKHQIKELTDENECKSYEQRKMVGSSVRYTFKTMKQNVLTSMLLPEVSGPLLGLQMVTRSFVPRRVGGLISYLRKNMLPKAXTTFLAXSCHDTNCEIRIGFTKEEKVNYVRQTLKMVGINRRFRPLVVMCGHSSQSTNNPYAATLECGACGGSPGRNLCKVFATLMNLPKXKRVFCLXGLNFPXTHFLPTLKXKTRDELKGNLVSQILENGQ

SEQ ID NO: 46179 - protein, 315 aa, Bacillus anthracis
MKKSITLFTAILSIFFLLIGCSAKGDEKASATKTEKGKEKIEVTDLSGRKVTFDKVPESFATLSMGDMNIIHALGGKIVGRPDAKITLPEDIKKIQVIGNAHQPNFEQIASLKPDVLIANNGFQKNIPTVEGQGTKVMISSANSVQDIQKNIELYGTIMKKEDKANELNQKINVQMKKYEKKSDVKALLVYGAPGTYLAALPTSLSGDILEKTGGKNIAADFPEMKEYPQYAQLSVERIIEANPDVIYLITHGDPNSVKKAFEGEMMKNEAWKNLDAVKQNRVVILPPDLFGSNPGTKVTEAMDFMYKSIQDVRK

SEQ ID NO: 46180 - protein, 441 aa, Bacillus anthracis
  MISC_FEATURE (6)..(6): X=any amino acid
  MISC_FEATURE (15)..(15): X=any amino acid
  MISC_FEATURE (19)..(19): X=any amino acid
  MISC_FEATURE (31)..(31): X=any amino acid
  MISC_FEATURE (51)..(51): X=any amino acid
  MISC_FEATURE (53)..(53): X=any amino acid
  MISC_FEATURE (74)..(74): X=any amino acid
GGNIFXRYSGYTPLXKPQXEYDSPLPAGLGXKGEFSHFKNITGGPIGFFLXEXKARIAAVMFAGHNRNIKFRPXNGDKVLVKGEISVYEGEWSYQIYIQDMQPDGIGNLHLAYEQLKVRLEEEGLFSQVYKKTIPPYAKTIGVITSPTGAAIRDIITTIKRRYPIGNVIVFPVLVQGESAAPSIVQAIRTANEMEEIDVLIVGRGGGSIEELWAFNEEMVARAIFKSEIPIISAVGHETDFTIADFVADLRAPTPTAAAELAAPNIIELQEKVLQTNFKIQRAMRELVHKKEEKLQVLQKSYAFRYPRQVYEQKEEQLDRALEQLVLAKEAIFDKKVNQLKQLSFYFREAPPSQKIMQTKVAVETLQKQLQREMQTLLQAKEFAFVRAAQKLEALSPLKVMMRGYGLVYDEEKQVLKSVKDVSLGRCCFSSLQDGILDCSV

SEQ ID NO: 46181 - protein, 1185 aa, Bacillus anthracis
  MISC_FEATURE (50)..(50): X=any amino acid
  MISC_FEATURE (82)..(82): X=any amino acid
  MISC_FEATURE (105)..(105): X=any amino acid
  MISC_FEATURE (204)..(204): X=any amino acid
  MISC_FEATURE (301)..(301): X=any amino acid
  MISC_FEATURE (366)..(366): X=any amino acid
  MISC_FEATURE (372)..(372): X=any amino acid
  MISC_FEATURE (449)..(449): X=any amino acid
  MISC_FEATURE (480)..(480): X=any amino acid
  MISC_FEATURE (483)..(483): X=any amino acid
  MISC_FEATURE (499)..(499): X=any amino acid
  MISC_FEATURE (504)..(504): X=any amino acid
  MISC_FEATURE (507)..(507): X=any amino acid
  MISC_FEATURE (584)..(584): X=any amino acid
  MISC_FEATURE (598)..(598): X=any amino acid
  MISC_FEATURE (603)..(603): X=any amino acid
  MISC_FEATURE (609)..(609): X=any amino acid
  MISC_FEATURE (663)..(663): X=any amino acid
  MISC_FEATURE (688)..(688): X=any amino acid
  MISC_FEATURE (691)..(691): X=any amino acid
  MISC_FEATURE (705)..(705): X=any amino acid
  MISC_FEATURE (710)..(710): X=any amino acid
  MISC_FEATURE (714)..(714): X=any amino acid
  MISC_FEATURE (725)..(725): X=any amino acid
  MISC_FEATURE (744)..(744): X=any amino acid
  MISC_FEATURE (777)..(777): X=any amino acid
  MISC_FEATURE (786)..(786): X=any amino acid
  MISC_FEATURE (792)..(792): X=any amino acid
  MISC_FEATURE (853)..(853): X=any amino acid
  MISC_FEATURE (857)..(857): X=any amino acid
  MISC_FEATURE (940)..(940): X=any amino acid
  MISC_FEATURE (1031)..(1031): X=any amino acid
  MISC_FEATURE (1041)..(1041): X=any amino acid
  MISC_FEATURE (1058)..(1058): X=any amino acid
  MISC_FEATURE (1060)..(1060): X=any amino acid
  MISC_FEATURE (1080)..(1080): X=any amino acid
  MISC_FEATURE (1090)..(1090): X=any amino acid
  MISC_FEATURE (1114)..(1114): X=any amino acid
  MISC_FEATURE (1115)..(1115): X=any amino acid
  MISC_FEATURE (1124)..(1124): X=any amino acid
  MISC_FEATURE (1128)..(1128): X=any amino acid
  MISC_FEATURE (1157)..(1157): X=any amino acid
  MISC_FEATURE (1161)..(1161): X=any amino acid
  MISC_FEATURE (1167)..(1167): X=any amino acid
  MISC_FEATURE (1183)..(1183): X=any amino acid
LTGQLVQYGRHRQRRSYARISEVLELPNLIEIQTSSYQWFLDEGLREMFXDISPIEDFTGNLSLEFIDYSLGEPKYSVDECXERDVTYAAPLRVKVRLINKETGXVRKQNVFMGDFPLMTETGTFVINGAERVIVSQLVRSPRRYYSGKVDKNGKRGFTATVNPNRGAWLEYETDAKDVCICAIAPYGKLPVTVLLRASRVWLXQEITELLGDNEYLSNTLEKDNTDSTEKALLEIYERLRPGEPPTVENAPEATLCLFSRSKAYDLANVGRYKINKKLHIKNRLFNQRLAETLVDPETGXNFSGRRNNLDRRTLGSHFTLLREKLGFQTRETKWVSGRKVMLSLQSIKIYALESEGERVINVIGXCKHYSXCKTHHPRDILASIRYFFNLLYQVGDTDDFGPLGNLSLRFCWRLITKSFRYRLSRKERVVRERISIQDTNAITPPGIXLNIRPGYCSLLRGSSEVLSYSQFMGPNKSHXQSXLTNEDICIRTWGVYAXARRLXSTXRSLLSLGRMCPMKTTRGTQHRVDLTHYLPFPKQMRSGFIENTLPSCCTPKTGLVTGHVDYLTADEEDNYVVAPSEIXKYLKKENSLMKISXLFPWXKHCHKXRTHRLHGCITKTSSVAATACIPFLENDDSNRALMGSEHATSGGSVNESGIPGLXVPVMIRIQQKASSAASNSVTPWLLXSAXKPVKFGGTSLCRKXRSKQXKATXIATKCKNSFFXPRKLATTNSNRKCWEMKLXKVKILAGWSFYELGELALGRNVLGGFHDLGRLXLRGCDHYEXAPCKRXCVHFIHIEEYESEARDTKLGPEEITRDISKRWGRCITQTWTSAGSFPGGAGSKRWKITVWXSNAXRCNEITSLKNVYYMAIFGEKAREVRDTHYVYPHGGWRYYLRTVKVFTREDGDELPPRRESTCTCIYRQKRKFLKVTRGRTSRXQRCYLSYFTREDMPYLPDGTPIDIMLNPLGVPSRMNIGQGLKLSLGIGSKDTLGIPIANPVFQGCSWRKKVGGHIGKTWDWPNDPQTNLDXQDLLGETIRXPCICWCHVYDQLAHMVXRXTSCSFYWTILTCNAAASWRXSSVRWTAFRXDGGLGTLSLRCCLYSPRNLPSEVXXCYWTCKDVXSNCXRRKCFQDPGFPEPIKVLIKEAAKFRLGRXNDVXRRYRNXKCVIRKMTMIIRTAEXIN

SEQ ID NO: 46182 - protein, 568 aa, Bacillus anthracis
  MISC_FEATURE (121)..(121): X=any amino acid
  MISC_FEATURE (425)..(425): X=any amino acid
  MISC_FEATURE (518)..(518): X=any amino acid
  MISC_FEATURE (519)..(519): X=any amino acid
  MISC_FEATURE (521)..(521): X=any amino acid
  MISC_FEATURE (524)..(524): X=any amino acid
MAFDGLFTRAITHEIANSLTRGRISKIYQPSKYEILLHIRANGKNQKLIVSAHQTYARLHLTNQNYDSPALPPMFCMLLRKHLEGGFIEKIEQIDLERIIQITVRSKKENGDEPLKTFIIXIMGRHSNIILVDTKTKQILDSLNTFSLAVNRHRTVYAGAEYIAPPVHIKINPLQIEHNDEFIRPLDFLSGNMDKQLVGTFTGISPLFAKEVVKKAGMVNEKALADAFFSIQKPLLTHTYSPTMTTSNGKEFFYLFPLAHLAGENKTFSSVSELLDRFFFGKAERDRVKQQAHDLERFMQNEKNKNEKKPHYPEKPFQDAGKADKYQLFGELLTANMYALKKGDKDIEVVNYYDENGGTVKIALDPLKTPSENAQRYFQKYQKAKNSIVVVEEQIEKTKEEILYFDSLLQQMEAASSKDMKENSXGIAEEGYMRNRKTKNAKKKPTKPVLDKYVASDGTEIFVGKNNKQNDYLTTKFARRDEIWLHTKDIPGSHVVIRSLEPAEETLLENCQKLLLLXXAXRVXFCTCDFTKNTPCEKTEWAKLGFVTYDNQQTVYVTPDADTVMKLK

SEQ ID NO: 46183 - protein, 866 aa, Bacillus anthracis
MDLNQMTTKTQEAIMSAQSLAVSHHHQEVDTVHLLFTLLEEQDGLAVRIFQKMNVDIEALKQGVENLIKKKPSVTGSGAEAGKLYITGALQQLLVRAGKEAEKLQDDYISVEHVLLAFTEEKGDISQLFTRFHITKDNLLQSLMTVRGNQRVTSQNPEATYEALEKYGRDLVAEVKAGKIDPVIGRDSEIRRVIRILSRKTKNNPVLIGEPGVGKTAIVEGLAQRIVKKDVPEGLKDRTIFALDMSALVAGAKFRGEFEERLQAVLNEIKKSEGRILLFIDELHTIVGAGKTEGAMDAGNMLKPMLARGELHCIGATTLDEYRKYIEKDPALERRFQQVLAEEPTVEDTISILRGLKERFEIYHGVNIHDRAIVAASVLSDRYISDRFLPDKAIDLVDEACATIRTEIDSMPTELDEVTRRIMQLEIEEAALGKEKDFGSQERLKTLQRELSDLKEVASSMRAKWEKEKEDIHKVRDLREHLERLRRELEEAEGNYDLNRAAELRHGKIPAIEKELKEAEEMGANNKQENRLLREEVSEEEIADIVSRWTGIPVAKLVEGEREKLLRLEQILSERVIGQEEAVSLVSDAVLRARAGIKDPNRPIGSFIFLGPTGVGKTELAKTLAQSLFDSEEQMIRIDMSEYMEKHAVSRLIGAPPGYVGYEEGGQLTEAVRRKPYSVILLDEIEKAHPEVFNILLQMLDDGRITDSQGRTVDFKNTVIIMTSNIGSAHLLDGLEEDGSIKEESRELVMGQLRGHFRPEFLNRVDEIILFKPLTTNEIKGIVDKIVKELQGRLADRHITVKLTEAAKEFVVEAGFDPMYGARPLKRYVQRQVETKLARELIAGTITDNSHVVVDVENNELVVHVK

SEQ ID NO: 46184 - protein, 505 aa, Bacillus anthracis
MCGITGWVDWKEDLSNQHVILKKMANRIQHRGPDAEGFWFSPRAAFAHRRLIVIDPEGGAQPKTFRAGDYTYALTYNGEIYNFRELREQLQKCGHTFETHSDTEVLLHAYLEWKEDCVQHLNGIFAFALWDDQKQRLFLARDHLGVKPLFYTERNDSIIFGSEIKALLAHPSVPAEIDADGINEIFGLGLFRTPGCGVFKHIEEVRAGHSITFTRDKKVVTKYWNLESKVHTDSIEDTSSHILSILSDTVKRPLIADVPLVCMVSRGIESSGISALAGKEFAAENKTLHTYSVDFVNSAKDFELTFARTGLDAPWVKRVSEHVGTSHHDIIVNAEELANHLFVPLRAKDLPSAGEMETSLYLLFCEMKKDATVALSGESADEVFSGYPWFHQEELLYVDKFPWLTNWKNTSPLLLHEISNQCNLENYIDTRFQEAILEVPTLEGESKKSAKQRQMFYLFLTRFLPFLLDRKDRMSMAVGFGVRVPFCDYRLVEYLWNVPFQHKKH

SEQ ID NO: 46185 - protein, 191 aa, Bacillus anthracis
LNVLIVYAHPSPSSFNAAILKHVQKGLQETNHSVTVLDLYKEQFNPVLVFNEEKKRRDLVNEEETARYRALVEEADTLLFIYPIWWWGMPAILKGFIDRIFVAGFAYKYEGALPICVLKGKKAWGINTLDSPLWYVALLYRSADWIIMKRGVLRFCGIRDIKRSVFQSVKTSKREKREKWLLQIEEKARTL

SEQ ID NO: 46186 - protein, 602 aa, Bacillus anthracis
  MISC_FEATURE (254)..(254): X=any amino acid
  MISC_FEATURE (259)..(259): X=any amino acid
MNMELWAATFFAFCRITSFLYFLPFFSGRSIPAMAKVTFGLALSITVADQVDVSHIKTVWDVAAYAGTQIVIGLSLSKIVEMLWNIPKMAGHILDFDIGLSQASLFDVNAGSQSTLLSTIFDIFFLIIFISLGGINYFVATILKSLQYTEAISKLLTTSFLDSLLATLLFAITSAVEIALPLMGSLFIINFVLILIAKNAPQLNVFMNAYVIKITCGILFIAMSVPMLGYVFKNMTDVLLEEYTKLFNFFLTKXGDAMXKDNKTEKATPQKRKKSREEGNIARSKDLNNLFSILVLAVVVYFFGDWLGFEIANSVSVLFDQIGKNTDSTEYFYMMGILLLKVSAPILILVYAFHLFNYMIQVGFLFSSKVIKPKASRINPKNYFTRLFSRKSLVDILKSLFYMGLIGYVAYVLFKKNLEKIVSMIGFNWTASLTEIIRQIKFIFLAILIILIVLSIIDFIYQKWEYEQDIKMKKEEVKQEHKDNEGDPQVKGKRKNFMHAILQGTIAKKMDGATFIVNNPTHISVVLRYNKHVDAAPIVVAKGEDELALYIRTLAREQEIPMVENRPLARSLYYQVEEDETIPEDLYVAVIEVMRYLIQTNE

SEQ ID NO: 46187 - protein, 316 aa, Bacillus anthracis
MKKAKGIAKSVAVASVIMSGSLGLQATSAFADSKGTVENLQNGGKVYNSFKTTYDMKQNIKNSIKVSFIEDPYADKKIAIVTTDGSNIDAKYTINGGYYNAGLKWPSAYHTEAEITSGDSAQFHKAAPVNTMTSAKVTSEVGYTLGGSVKVGVNDKGPNADASITGSFAWKESVSYDQVDYKTVLETHTDKKLNWKVGFQSFNFPEWGIYNRDSFNTFYGNQLFMKSRSYNEGTNNFVSKDTVPALTGYGFSPNVVAVITADKTESTSDLKITNRRISDQYNIEWVSSKWWGTNNKDTYNEFFTNNYKLDWKNHQV

SEQ ID NO: 46188 - protein, 438 aa, Bacillus anthracis
  MISC_FEATURE (304)..(304): X=any amino acid
MAKQKQRGTKAKARRTIKPTLYYEIVGLTLFALSIITILQLGVVGETRFVLFFRFFFGEWYIIGVLGVIALSVSFVIKRGWPTLLNKRLIGFYLIVLAILMFSHITLFNLLTKDGAVQNTSVIVSTKDNFFLEMKKGPDSVHLGGGMFGALMFATCYFLFDEVGAYIIGIILVILGILCITNKHIGEVLDPVGRILRSQFQVMQGDYEDWRAKRTAEQTEKKKTTRSTRSKRATEQEEIIEPMEEISIDPPIISNFTENYPVNEQEDKRIEVEQEELITSPFIEEAPPVEEPKKKVEKKSLNHXRVKTQAPPMQFSNVENKDYKLPALDILKFPKNKQVTNENAEIYENARKLERTFQSFGVKAKVTKVHRGPAVTKYEVYPDMGVKVSKIVGSSDDLALALAAKDIRIEAPIPGKSAVGIEVPNSEVSMVTLREVLD

SEQ ID NO: 46189 - protein, 378 aa, Bacillus anthracis
  MISC_FEATURE (19)..(19): X=any amino acid
  MISC_FEATURE (29)..(29): X=any amino acid
  MISC_FEATURE (70)..(70): X=any amino acid
RIKIIFWKLMDEGMDVKIXPSDLSYPNRXLIQRIGVIWYDENYRKDISAYPSKTRKLSKKSFWRVILVPXEVPLRLILAICKDKGEFWLYICFAHTSILYTCAGMFAKRKMKAKLIVDVRDLWPESLIGIGFFNKNWILKFAYKLEYKIYHAADNIIINSKGFYSYISSTGIAPNRISFMPNSLTEKELSTVPKKNISDQLTVIYTGNIGLAQDIEKLILIAEHLKEYKNISFKNIGYGYQKKELGESIEAKPLSNMQLTSPKNREDTLVAIVDADIAYVSLVEKDVFKKVLPRKVMDYMSMRKPIVADVAGYAKEVIEDAQCGFVTEDRTVAELSDYIIKLAQDKQLRNRLGENGYQYAFRTLRWKTNIETLLKILE

SEQ ID NO: 46190 - protein, 572 aa, Bacillus anthracis
MKVETLPVIKGENNLPNYDEAYANFNWEEVNKNFTWNEAGRVNMAYEAIDKHAKSDRKNKVALYYQDGSRKEKYTFKEMKDFSNKAGNVLKNYGDVEKGDRVFIFMPRSPELYFALLGAVKLGAIVGPLFEAFMEGAVRDRLEDSEAKVLITTPELLERVPLNDLPALKTVFLVGDHVEEGGKTVAFNPLFEQASKELHIEWLGREDGLILHYTSGSTGKPKGVLHAQNAMVQHYQTAKWVLDLKEDDVYWCTADPGWVTGTAYGIFAPWLVGASNVILGGRFSPEAWYEALQDYGVTVWYSAPTAFRMLMGAGQDAIKKYDLSQVRHVLSVGEPLNPEVIRWGMNAFGLRIHDTWWMTETGGQVICNYPCMEIRPGSMGKPIPGVKAAIVDNEGNEVPPYTMGNLAIGKGWPAMMRGIWNNKQKYESYFMPGDWYVSGDSAYMDEDGYFWFQGRIDDVIMTSGERVGPFEVESKLIEHAAVAEAGVIGIPDPVRGEIIKAFIALRAGYEPSEELKEEIRQFVKKGLAAHAAPRQIEFRDKLPKTRSGKIMRRVLKAWELNLPTGDLSTMED

SEQ ID NO: 46191 - protein, 255 aa, Bacillus anthracis
MLFDTHSHLNAEQFEEDLQEVIARMKEAGVTYTVVVGFDEATIKKAIELAEAYDFIYAAVGWHPVDAIDMTEEHLAWLEELASHPKVVALGEMGLDYHWDKSPKEIQKEVFRKQITLAKKVKLPIIIHNRDATQDIVDILEEENAAEVGGIMHCFSGSVEVAERCVDMNFLISLGGPVTFKNAKKPKEVATEIPLEKLLIETDCPYLTPHPFRGKRNEPSYVKLVAEEIANLKGISYEEVAEITTKNAKALFGVE

SEQ ID NO: 46192 - protein, 403 aa, Bacillus anthracis
MVKTPKIVVLGAGYGGMITTVRLQKALSVNEAEITLVNNNSYHYQATWLHESAAGTLQDEKICLDIQDVIDTNKVNFVQDTVVEIKAAEKRIILKDGELEYDYLVIGLGFESETFGITGLKEHAFSIANINATRQIREHMEASFAKYATEKRDELVTIVVGGAGFTGIEYVGELANRVPELCKEYNVPREKARIICVEAAPTALPGFDPALVEYAVKQLEKKGVEFRIGTAIKEATEEGIIVANGDDTELIKSETVVWAAGVRGNGIVEESGFEAMRGRVKVDEYMHAPGYEDVFMVGDAALIINEEINRPYPPTAQIAIQQGYNIAHNLTVLVRGKGEMKKFVFDNKGSVCSLGHDDAMGVVMGKKLTGWKASFMKKVIDNRYLFLLGGPLLVLKKGKLKFF

SEQ ID NO: 46193 - protein, 264 aa, Bacillus anthracis
FEWVYSEDLLALGVQPVGMADIKNYNKWVNTKTKPSKDVVDVGTRQQPNLEEISRLKPDLIITASFRGKAIKNELEQIAPTVMFDPSTSNNDHFAEMTETFKQIAKAVGKEEEGKKVLADMDKAFADAKAKIEKADLKDKNIAMAQAFTAKNVPTFRILTDNSLALQVTKKLGLTNTFEAGKSEPDGFKQTTVESLQSVQDSNFIYIVADEDNIFDTQLKGHPAWEELKFKKENKMYNLKGDTWIFGGPESATSLATQVADVMT

SEQ ID NO: 46194 - protein, 197 aa, Bacillus anthracis
  MISC_FEATURE (40)..(40): X=any amino acid
  MISC_FEATURE (173)..(173): X=any amino acid
NQNVHFIKNTLTKAYILVGDYSYYDAKMGETLEDRVLHHXEFLGDPPIIGKFCCIASGVTFIMNGANHRMDGFSAYPFNIFGNVGRREYTPNLSDLPYKGDTVIGNDVWIGMDATIMPGIKIGDGAIIAAKSVVTRDVAPIYIVGGNPANKIRERFSNAIIEGIIQIQWVAFXIEKITENIGAIVQGNIEPLRKLKR

SEQ ID NO: 46195 - protein, 115 aa, Bacillus anthracis
MPTVRLNTTSTNHIPLQAGAQTKNASVTGAQSTAQQANGVSASTQKTPGIMDKDDFLKLFLASFQHQDPFNAMDMTEMMSQQHQLSFMEHVQNMTKAVDKLQSSMYSTALDGGMK

SEQ ID NO: 46196 - protein, 264 aa, Bacillus anthracis
YLFIDPLGKECWETEAFIIKLWLEYGKYFSIRHIVTGKVDGTNASSHKWNKPANIRFVWEKTTSLHGFSYDGKVHMQEASSTPYLVSMAIKAAELQGRKAGSKFLLKLQEYIFSLKMYQIPTANYLLACAKDSDIDVEEFKKDLYSASAKKAFQCDLKFTNEMHITEIPSLVFFHANSDEESIKIAGTYSYDVYVQLLKELVKCEIEPEPLPSLEVLLEATQFISSKEVAFIYDCSKQEIERELKKLQLKRKGQMIDVKCERYW

SEQ ID NO: 46197 - protein, 341 aa, Bacillus anthracis
  MISC_FEATURE (74)..(74): X=any amino acid
  MISC_FEATURE (76)..(76): X=any amino acid
  MISC_FEATURE (80)..(80): X=any amino acid
  MISC_FEATURE (143)..(143): X=any amino acid
  MISC_FEATURE (153)..(153): X=any amino acid
  MISC_FEATURE (181)..(181): X=any amino acid
  MISC_FEATURE (182)..(182): X=any amino acid
  MISC_FEATURE (188)..(188): X=any amino acid
  MISC_FEATURE (219)..(219): X=any amino acid
  MISC_FEATURE (240)..(240): X=any amino acid
  MISC_FEATURE (243)..(243): X=any amino acid
  MISC_FEATURE (280)..(280): X=any amino acid
  MISC_FEATURE (282)..(282): X=any amino acid
  MISC_FEATURE (288)..(288): X=any amino acid
  MISC_FEATURE (300)..(300): X=any amino acid
LKELKQKTLKLLKKPKNLKGLNDVRVAYLGKKGPITEVLRGMGKLSAEERPRMGAFSNEVREAIQTRLDEQIQXLXKKQXIEAKLATETIDGTFASRPVETRLSPTVKRLWWNQLEELFIGSVYESSGRTEVRKSLLPSWKHXTFRKDPPAPXYARTFFISEETLLRTHTSSVQARTMEKXXRKRPNXNYLSWKVYPRDDDDATHSHPVHANLKVCNRXKHRMSDLKGTLQVFVKKMFRXRSXKSVFVKFLPIHEPSVETDIYGCMCPGKGCGTCKGTRXDXYYRRRXCSHECTRNGWLXFKRIQGFAFGYGRRAYRNVEIRRRDIRHFYTNDVRFLQQFK

SEQ ID NO: 46198 - protein, 461 aa, Bacillus anthracis
  MISC_FEATURE (11)..(11): X=any amino acid
  MISC_FEATURE (55)..(55): X=any amino acid
  MISC_FEATURE (103)..(103): X=any amino acid
  MISC_FEATURE (109)..(109): X=any amino acid
  MISC_FEATURE (117)..(117): X=any amino acid
  MISC_FEATURE (187)..(187): X=any amino acid
  MISC_FEATURE (197)..(197): X=any amino acid
  MISC_FEATURE (208)..(208): X=any amino acid
  MISC_FEATURE (280)..(280): X=any amino acid
  MISC_FEATURE (302)..(302): X=any amino acid
  MISC_FEATURE (313)..(313): X=any amino acid
  MISC_FEATURE (327)..(327): X=any amino acid
  MISC_FEATURE (334)..(334): X=any amino acid
  MISC_FEATURE (364)..(364): X=any amino acid
  MISC_FEATURE (374)..(374): X=any amino acid
  MISC_FEATURE (385)..(385): X=any amino acid
  MISC_FEATURE (403)..(403): X=any amino acid
  MISC_FEATURE (426)..(426): X=any amino acid
  MISC_FEATURE (455)..(455): X=any amino acid
KMVRDLAEPVXGEFTIQGGVYLIRSTLEKRKPYMSRFKGERFDGHAFVDKAVEKXSVATLWVKNVANPPENLSGYFVEDTLSALQMLAKNYRDQLGVKSDWVXQGSNGXNLLKRILXQVFLALKFKGPKTGRKLQYHIRGYLFLFLTLEGKSRSGCIENGCSSRREIGISYLRLARPNAAIITNIGXSQFNGLGLSXGICGSKIRNSXQDFQKGGVFVYNGDEPLLTNRVLEMNLIAETVTFGDARANDYIPTTVTLQATGTHFKMNREENIFILSTRNXGNTNVYNYPCLLWQIAKLLLVXPGEKNEKKFNXPLSNDGACRIENLXKTDKGNXPIPQWMAYNASPTAMEAAFHPNEWFRWILXKIVVLGDMLXLVRSRSAGFFXVGELICSTKILPCVHIWXIGGSNWGGGGKFISHHQAGKGFXIFKEDLLKRVPGSGGYEGRFHHKKHLAVXNGKKVI

SEQ ID NO: 46199 - protein, 397 aa, Bacillus anthracis
MFHRIEEALEDLKQGKVVIVCDDENRENEGDFIALAEYITPETINFMITHGRGLVCVPITEGYAERLQLEPMVSHNTDSHHTAFTVSIDHVSTTTGISAHERATTIQQLLNPASKGADFNRPGHIFPLIAKEGGVLRRAGHTEAAVDLAQLCGAEPAGVICEIINEDGTMARVPDLLQCAKQFDIKMITIEDLIAYRRHHETLVTREVEITLPTDFGTFQAIGYSNSLDTKEHIALVKGDISTGEPVLVRVHSECLTGDVFGSCRCDCGPQLHAALAQIEREGKGVLLYMRQEGRGIGLLNKLRAYKLQEEGFDTVEANEKLGFPADLRDYGIGAQILKDLGLQHLRLLTNNPRKIAGLQGYDLTVTERVPLQMPAKEENKTYLQTKVNKLGHLLNL

SEQ ID NO: 46200 - protein, 426 aa, Bacillus anthracis
MEYDIDDEILNAKASNQPLTVAHEQSEPSAFSTWWKKNKKRILIIGSTVVVVIGGSTLFYFYTTNAKYQKFMEQARQAYDNKKYTKAEEAVGHAIAVKGKDEAYLQLATIYVAEGKNKIAIDYITKLIKDREIDKENNEAAYLLASANFRIGKYQEAVQNFEQALANNAKGIEPYKKDAMRDLAVSHMKMKEFEKAEDVIVKMSTKTNEDKAIVSYLKGQLSTATVQLEKAESFFKEAIMQDSKNSIYTIELSNLYVLWNKTNLIDSAKKEMNYQQASHILQVAIQKDMKNIELLNQLGIVYYEAGQFYETRDGAKSTAAYQQALEAYNRVVSSGTRDINTLVNIGILYDKVGQGNEAEKLFTEAYSQNDENPHVNFAFGMFKIKQKKYEEASRFLRKTVQANENESEVRAAQEKLTEMKTNGWIQ

SEQ ID NO: 46201 - protein, 305 aa, Bacillus anthracis
KGDTKLENVLCCDQIKCFCGKTQTQVRKLVAGPGVYICDECIELCTEIVQEELAKDEEVEFKDVPKPVEIREILDEYVIGQDNAKKALAVAVYNHYKRINSNSKIDDVELAKSNIALIGPTGSGKTLLAQTLARILNVPFAIADATSLTEAGYVGEDVENILLKLIQAADYDVEKAEKGIIYIDEIDKVARKSENPSITRDVSGEGVQQALLKILEGTVASVPPQGGRKHPHQEFIQIDTTNILFICGGAFDGIEPIIKRRLGEKVIGFGSEKKNADVNEKHVLSHVLPEDLLRFGLIPEFIEER

SEQ ID NO: 46202 - protein, 43 aa, Bacillus anthracis
MDKRISIAIDGPAAAGKSTVAKVVAKKLSYVYIDTGAMFRTIH

SEQ ID NO: 46203 - protein, 427 aa, Bacillus anthracis
  MISC_FEATURE (288)..(288): X=any amino acid
MEKIVYEQLKETLYYEKLPNGLDVYILPKQGFNKTFATSTTKYGSVDNTFVPLGKEEMIRVPDCIAHFLEHKLFEKEDHDAFQLFSKQGASANAFTSFTRTAYLFSCTSHVEQNLNTLVNFVQEPYFSEKTVEKEKGIIGQEIQMYQDNPDWRLYFGLIDSLFVKHPIKIDIAGTIESISKITKDLLYECYETFYHPSNMLMFVVGAIDPEKTMDLVHENQAKKDYKNQPENVRSFEKTPDEVNEKKKIFPMPVQTQKCLVGIKATNLKEKGEAFLKPEIALTLLLEXLFGKSSAHYESLYNEGLIDDTFSYDYTEENNFGFAMGWGDTKQPDELEERLKSILLNTNYNQLDEAALERVKKKKIGGFLRSLNSPEYIANQFTRYAFNESSLFDALTVLESLTVQDLQEVAQLLLSEEKMSVCQVFTE

SEQ ID NO: 46204 - protein, 264 aa, Bacillus anthracis
MRILFVGDVVGSPGRGMIQQYVPALKKKYTPTVTIINGENAAGGRGITEKIYRNFLECGAQAVTLGNHAWDNREVFEFIDDAKYLARPANFPEGTLGKGLIFVNCNGTEVAVINLQGRTFLPPIDCPFRKVDELIDIAKKRTNIIFVDFHAETTSEKQALGWYVDGRATAVVGTHTHVPTADNRILPSGTAYITDVGMTGPYDGILGMDREAVLKKFLTNLPVRFEVTNGRTQLSAVLIDVDPNTGKAKKIERILINDDQPFFE

SEQ ID NO: 46205 - protein, 214 aa, Bacillus anthracis
MKRYRHLYLLSFTLLICFVVLSLSYHTACIEKFDNIVAHFIQSFRNDYLTTYFTWMSFIGSKRIYFPLLIILVMYFLVRKKLLSALLLTINYYGSRYLNSMLKLWYERARPDVTQLVTATGYSFPSGHTMNATGFFRIFWISSQLPKERITLPNKIGGLFLKPQLGWIHLISVSRIYLGVHYPSDILAGWAAGGSWLVLCVIFHKTFIKKEPMS

SEQ ID NO: 46206 - protein, 88 aa, Bacillus anthracis
MFFEVFKPYDRSFYLADTLLTQPLQIIVGSKQGAFGSYKDGHELYEKAASEKKDLLVVEGASHYDLYDQPEPVKIAVEKLTSFYNDNL

SEQ ID NO: 46207 - protein, 276 aa, Bacillus anthracis
MESTIGIDAGGTLTKIAYLNKKMQLAFEKVYSNEQNKIIDWLKNQTGIKQICITGGKAKQLQQLLSASYKIVELNEFEATLVGVRYILKKEKYDINNFVLTNIGTGTSIHYIYNDQYIRAGGTGVGGGTIMGLSKLLTNIDHFEDVIPLTKVGSRKELDITVGDIYGGILSPIDNSLTASNFGKAAITDSNYNSSDILATIQGLVGEVVTALSLQFAETKNIDHIIYIGSTLCNNIHLQNIISSYTKYQNKTPIFLRDGGNSGAIGALLYATNKKS

SEQ ID NO: 46208 - protein, 80 aa, Bacillus anthracis
MNGMADVLERVTKIIVDRLGVEETEVVPAASFKEDLGADSLDVVELVMQLEDEFEMEISDEDAEKIATVGDAVTYIESHL

SEQ ID NO: 46209 - protein, 452 aa, Bacillus anthracis
MEKQYLTVTALTRYIKTKIEYDPHLQSVWLKGEISNFKNHSRGHMYFTLKDENARIAAVMFAGHNRNIKFRPENGMKVLVKGKISVYEASGSYQIYIQDMQPDGIGNLHLAYEQLKVRLEEEGLFSQVYKKTIPPYAKTIGVITSPTGAAIRDIITTIKRRYPIGNVIVFPVLVQGESAAPSIVQAIRTANEMEEIDVLIVGRGGGSIEELWAFNEEMVARAIFKSEIPIISAVGHETDFTIADFVADLRAPTPTAAAELAAPNIIELQEKVLQRTLRLQRAMRELVHKKEEKLQVLQKSYAFRYPRQVYEQKEEQLDRALEQLVLAKERYIDKKVNQLKQLSFYLEKHHPSQKIMQTKVAVETLQKQLQREMQTLLQAKEFAFVRAAQKLEALSPLKVMMRGYGLVYDEEKQVLKSVKDVSLGDAVSVQLQDGILDCSVSGIEERELNNGK

SEQ ID NO: 46210 - protein, 377 aa, Bacillus anthracis
MRIGVPAEIKNNENRVAMTPAGVVHLIRNNHEVFIQKGAGLGSGFTDAQYVEAGAKIVDTAEEAWNMEMVMKVKEPIESEYKHFSEGLILFTYLHLAPEPELTKALIEKKVVSIAYETVQLENRSLPLLAPMSEVAGRMAAQIGAQFLEKNKGGKGILLAGVPGVKRGKVTIIGGGQAGTNAAKIAVGLGADVTIIDLSAERLRQLDDIFGNQVKTLMSNPYNIAEAVKESDLVIGAVLIPGAKAPKLVTEEMIKSMEPGSVVVDIAIDQGGIFETTDRITTHDNPTYEKHGVVHYAVANMPGAVPRTSTLALTNVTVPYAVQIANKGYKEACLGNSALLKGINTLDGYVTFEAVAEAHGVEYKGAKELLEAETVSC

SEQ ID NO: 46211 - protein, 337 aa, Bacillus anthracis
  MISC_FEATURE (82)..(82): X=any amino acid
  MISC_FEATURE (91)..(91): X=any amino acid
  MISC_FEATURE (112)..(112): X=any amino acid
  MISC_FEATURE (146)..(146): X=any amino acid
  MISC_FEATURE (153)..(153): X=any amino acid
  MISC_FEATURE (191)..(191): X=any amino acid
MKAIGLHEYLPIEKENSLIDMEIERPVATGRDILAKINAISVNPVDTKVRSPEDKKEEVAKILGLDASGVVVQTGESCTLFXESDELFYAXSITKQGTYSGIHLIDERIGGXKPQTVSNAESPATSVNAITAWGSLFETLGIDFIXKDTNSLXNILIIGRAGGVGSIAIQLAKWAGLNVITTASRNETIHXVEKFGADYIINHHQPLQDQILEFGIKDVDYIFCLNNTDQHWQAICELIKPQGKICSIVENEHPLEMGILKSKSATFVWEFMFTKAMYETGDMITQHELLNKVSELLDEGILKTTLNETFTPINAQNVKKAHALLESGSTIGKIVLE

SEQ ID NO: 46212 - protein, 170 aa, Bacillus anthracis
MNDILIVDGYNIIGAWGDLKKLRDVDLQSSRDALIDKMADYQGYTGTKVMIVFDAYTVHGIEKKMKQSRVEVIFTRKNQTADEKIEQLAIELRNINTQIYVATSDYTEQWVIFAQGALRKSARELELEVQAMEQQVRRRTQDTKEKQPAMRKIFSKDITEKLEKLRRGER

SEQ ID NO: 46213 - protein, 307 aa, Bacillus anthracis
  MISC_FEATURE (130)..(130): X=any amino acid
  MISC_FEATURE (233)..(233): X=any amino acid
  MISC_FEATURE (242)..(242): X=any amino acid
  MISC_FEATURE (272)..(272): X=any amino acid
EELNIYSWADNFDEQVLRDFEKKYNVKINYDKYASNEEMLAKLQAGGAKYDLIQPSDYMVKTMAKMDLLAPLDKKNIPNIENMVSNFKTPAFDPENKYSLVYTWGCKLGLHNIKSMLKEAPTSWTDLWEXEYKGHCTLFNDSREVLGMGLKKKRFSNSTKDDAQLKTAATDLQKLLPNLLAFDTDNIKPKFITEDAWIGTIWSGDAAFIAKDNKDVESVVPKKGRHNLGLIPXQFPKGAKKXELAEKFMNYLLDEKVSVKNYESIGYSNPKXKAHPLHSKEYRENHMIFLTKEELDRTEWLVDVDDK

SEQ ID NO: 46214 - protein, 254 aa, Bacillus anthracis
  MISC_FEATURE (16)..(16): X=any amino acid
  MISC_FEATURE (131)..(131): X=any amino acid
  MISC_FEATURE (137)..(137): X=any amino acid
  MISC_FEATURE (231)..(231): X=any amino acid
KFFFKVLPKFEGVRSXLFSGMPRNWTVIYVQDSRLGLARIREVSIGLEEYSPYLDRELEEVKYFDAGDIPIPFGNAQRSLDMIEEYVSKLLDAGKVPLSLRRDNLLSWAIFKAMAKKYPDFSIHPYGAHTXLRESEXRGAFSHSTPIRKVCDLIGPENVYSFGIRSGMKEEFEWAKRSRYELYNFDVLETLKEVLPKLEGRPVYVTIDIDVLDPASASRNRNVKSWWDPIXRILESIVANAHSKYKGGGGRLIK

SEQ ID NO: 46215 - protein, 268 aa, Bacillus anthracis
MNTKEISKVVDLVRESNPLVHNITNVVVTNFTANGLLALGASPVMAYAKEEVAEMASIAGALVLNMGTLRPDEVEAMLLAGKSANRNDVPVLFDPVGAGATSYRTEVARHIPAEIELAIIRGNAAEIANVINEKWEIKGVDAGAGNGNVVSIAKQAADELNTVAVITGKEDVVTDGERTIVIRNGHSILTKITGTGCLLTSVIGAFVAVEKDYVKAAVAALTFYGVAAELAAAKTVEKGPGSFQIEFLNQLANTTSGDIEKYGKIEVI

SEQ ID NO: 46216 - protein, 626 aa, Bacillus anthracis
MPSLMEQQLDTKAASLLREDLEAQGMKFLMEKKTVKILGTNHVEGIQFEDGEVVDCDLIVMAVGIRPNTQIARDAGLIVNRGIVVNDYMLTNDESIYAVGECAEHDGIAYGLVAPLYEQGAILAKHISNLQTDGYSGSIVGTQLKVAGCDLFSAGQIYEDDQTKAISIFNECKRSYKKVLIRDNKVVGIVLYGDTADGTRLFSMLKKEEDIQEYTPASILHKAGEESELDVATMSADDTICGCNGVTKGTIVHAILEQELTTFEEVKGCTKAAGSCGKCRPLVEQVLSHTLGDAFDASAQSAGMCGCTPLSRDEVVAAIHEKGLKSPKEVRNVLGFVHEDGCSKCRPALNYYLRMAIPEEYEDDKASRFVNERMNGNIQHDGTFSVIPRMYGGVTTADDLMKIAEVAKKYDVPLVKITGASRIGLYGVKKQDLPNVWADLNMTSGYAYSKSLRNVKSCVGSRFCRFGTKDSLGLGMLLEQSLEMVDTPHKMKMGVTGCPRNCAEVLTKDFGVVCVENGYQLYIGGNGGTEVREADFVMIVPTEDDVLHIATAYMQYYRETGIYGERTAYWTERLDFDHIKEILQDANMVTKLNERFQTARGTYKEAWGQALETKSLKAMYEVETVK

SEQ ID NO: 46217 - protein, 435 aa, Bacillus anthracis
MISRYTRPEMGAIWTEENKFKAWLEVEILACEAWAELGDIPKEDVKKIREHASFDIDRIYEIEKETRHDVVAFTRAVSETPALGEERKWVHYGLTSTDVVDTALSYILKQANEIILKDLENFVSILANKAKEHKYTIMMGRTHGVHAEPTTFGLKLGLWYEEMKRNVERFKQAANTVRVGKLSGAVGTYANIDPFVEKYVCENLGLEAAPISTQTLQRDRHAHYMSTLALIATSIEKMAVEIRGLQKSETREVEEAFAKGQKGSSAMPHKRNPIGSENMTGLARVIRGYMMTAYENVPLWHERDISHSSAERVILPDATIALNYMLNRFGNIVKNLTVYPENMKRNMTRTYGLIYSQRVMLTLIDKGMVREEAYDIVQPKAMEAWETQVQFKELVEADERITSKLTQEEINECFNYEHHMQHVDTIFERLGLNEA

SEQ ID NO: 46218 - protein, 309 aa, Bacillus anthracis
MDFKQLENKFEKKKVNTFLVYQKGELTTEYYKTPECANNLYKINSITKSIVSILIGIAIDKGYINDIHTPITEWIENVSEEKQDLTLYHLLTMTTGEDWKEFGNGVVFPNDFVESDNWVQYILEKPMIEEPATKMNYNSGSSHLLSYIIQKATGMPTEQFAKKYVFDPLEITEYEWQQDPQGIHVGGFGMKMKSKDLLKLGILCLQNGYWQENEIISSKWLEESSTALFETYEHVGAYGYHWWVLNNERFHIPYCMYFAMGYGGQYIIIIPQLELVAVISSHMPKRGLVPLKLFIEHIQENCNFQQGHK

SEQ ID NO: 46219 - protein, 101 aa, Bacillus anthracis
MDAMAKEYAKKFYKSTAWKKCRDSYFKFRYGLCERCKGTGKIVHHKDYITPENINNPEITLSFHNLELLCQDCHNREHHEKNSPVVEGVMFDENGDLIQKE

SEQ ID NO: 46220 - protein, 248 aa, Bacillus anthracis
  MISC_FEATURE (84)..(84): X=any amino acid
  MISC_FEATURE (87)..(87): X=any amino acid
  MISC_FEATURE (93)..(93): X=any amino acid
  MISC_FEATURE (94)..(94): X=any amino acid
  MISC_FEATURE (160)..(160): X=any amino acid
  MISC_FEATURE (206)..(206): X=any amino acid
MLKGKVALVTYNTRGIGRAIVIDLAIQGAKVVVNYAGNEQKANEVVDEIKILGSDAIASRADVANAEDVPNMVKQTVDVFGTSXYSXLDDAWXXRKYNLLMRMKEEEWDTVINTNLKGVFLCTKAVSRFMMRQRHGRIVNIASVVGVTGKSRQANYVAAXTRGNGINKTSGKRVSERNITVNAIAPGFIATDMTDVLDENIKAEMXNLFPAAQLGKAQDFANGGTFFAFEQSKYIPGQTLNVDGVRVM

SEQ ID NO: 46221 - protein, 892 aa, Bacillus anthracis
  MISC_FEATURE (83)..(83): X=any amino acid
  MISC_FEATURE (189)..(189): X=any amino acid
  MISC_FEATURE (276)..(276): X=any amino acid
  MISC_FEATURE (279)..(279): X=any amino acid
  MISC_FEATURE (293)..(293): X=any amino acid
  MISC_FEATURE (342)..(342): X=any amino acid
  MISC_FEATURE (406)..(406): X=any amino acid
  MISC_FEATURE (412)..(412): X=any amino acid
  MISC_FEATURE (433)..(433): X=any amino acid
  MISC_FEATURE (498)..(498): X=any amino acid
  MISC_FEATURE (499)..(499): X=any amino acid
  MISC_FEATURE (501)..(501): X=any amino acid
  MISC_FEATURE (506)..(506): X=any amino acid
  MISC_FEATURE (515)..(515): X=any amino acid
  MISC_FEATURE (521)..(521): X=any amino acid
  MISC_FEATURE (539)..(539): X=any amino acid
  MISC_FEATURE (556)..(556): X=any amino acid
  MISC_FEATURE (560)..(560): X=any amino acid
  MISC_FEATURE (595)..(595): X=any amino acid
  MISC_FEATURE (685)..(685): X=any amino acid
  MISC_FEATURE (688)..(688): X=any amino acid
  MISC_FEATURE (693)..(693): X=any amino acid
  MISC_FEATURE (696)..(696): X=any amino acid
  MISC_FEATURE (745)..(745): X=any amino acid
  MISC_FEATURE (822)..(822): X=any amino acid
  MISC_FEATURE (873)..(873): X=any amino acid
MSDNYRSRTERNPVKNQKQETNKEKKPKKKGSFFKKFLIGCLLLGIVGLVAGVSRFLVWVKDAPKFSQIKTLSSLIYQKFLEXDRELFSMNTGAKKRPPVTYDQIPKLVENAFLATEDSRFYDHNGIDFKRTTKAVMENVTGGFGSQGGSTITQQVVKNYFLTMDKTAKRKVQEWYLSYKLEQQYSKPXDLEMYLNKINLGTRSYGIATSSAKIFWIKIGKLCKLQEAAMLAGLPQGPNIYDPTKKENVERATNRRNVVLSLMNRHGYITKGGNEXRSXDPSNRGSSTVFKKXVVMKYQAFLDAVVKEVEKEYPDVNIGSEWFNDFIRTLDQDAQDYGEKNXGGQFYKVPKRTISKGHLVFMDTPTGGKPPTRSWGVKEVSLLSKGHNMAPRFKTPSRFTMKPNFXLRPSNXKISWSTYHQLNDSEYTYSNGXKVRKSTKLFPRGTFPYRKALEKVIKHPSFKNSPKAVGLPKSQAFAEGLGMTFKDGKTFESTAIWXXRXSPLQXAGAYAAFWXWWGLQXTHFRKRKYLPRMGKEKFXTEEQRAMQDYTAYMVHXRYSXCGKTWFGGTGPTAYVSGVDVAGKPRTTKLWMQTLXKEYGHSTLMQNRDSWFAGYTAAIYNGSMDWVRKNGSENYISDRYTRICTANVPSNDEQIRYDKTRFERPSSVQEINGELYVKGAKKDANXTNXSRCTXWSXCHFDGASTVTLNWSGPTEVDAYAASYKATDGSSGSLSVKGTTATPGGIXTRRYFSFLCITEKSTWNNPCQLELPSLRLGGTPKPKKAGEEAKKKAEEEAKKKADEEAHKKANEDKLKQEEATKKSXKKKLGNNQNNNVNSKKKLKRKLEKEARKKAEKESYEKRRKRLQKKAEEESXKKSCRKKLKNNKSISSKNN

SEQ ID NO: 46222 - protein, 643 aa, Bacillus anthracis
  MISC_FEATURE (84)..(84): X=any amino acid
  MISC_FEATURE (91)..(91): X=any amino acid
  MISC_FEATURE (170)..(170): X=any amino acid
  MISC_FEATURE (249)..(249): X=any amino acid
  MISC_FEATURE (265)..(265): X=any amino acid
  MISC_FEATURE (531)..(531): X=any amino acid
  MISC_FEATURE (543)..(543): X=any amino acid
  MISC_FEATURE (584)..(584): X=any amino acid
  MISC_FEATURE (620)..(620): X=any amino acid
  MISC_FEATURE (624)..(624): X=any amino acid
  MISC_FEATURE (628)..(628): X=any amino acid
  MISC_FEATURE (639)..(639): X=any amino acid
MNRIFRNTIFYLLIFLVVIGIVSYFNGSTQKTTSVSYDKFITKLEKREVRNVHFQREKWCLEVKGPFNTSSQGEQFCYLAPNTXGITKENXWIKAQGAEVKYQPAEETSAWVTFFTSIIPFVIIFILFFFLLNQAQGGGSRYHELWKSKAKLYNVNIEKSRFRDVSRSGXRETELVEVVEFLKDPRKFAEVGARIPKGVLLVGPPGTGKTLLAHIRWRLGRRSHLSISGSDFRRDGRRCRCSRVRGFIXKRQKKGPWNHFIEENXCGTGVTWRRALGGGHDERGQKVKTITWFKRRGFGANEGIIIIAATNRPDILDPALLRPGRFDRQITVDRPDVNGREAVLKVHARNKPLDENINLRAIATRTPGFSGADLENLLNEAALVAARQDKKKIDMSDIDEATDRVIAGPAKKSRVISEKERNIVAFHEAGHTVIGVVLDEADVVHKVTIVPRGQAGGFAVFASERRSLLHDKPELLDKITGLLGGRVAEEIVFGEVSTGAHNDFQRATGIARRMVTEFGMSDKLGPMSIWXLTRWSSVLRRLXPFRNKTIVMRLPHESIWKANDYERMSPSCHPPLLLPIVINXFLFAKTLLEVRNVRCRANQSFCDYGRFARTSNIFSXCGKXTITXKRTMKNQKDKXEMKE

SEQ ID NO: 46223 - protein, 283 aa, Bacillus anthracis
MGVQKIVVIGAGQMGSGIAQVCAMAGYDVKVQDLKQEQLDRGLAITTKNLARQVEKGRMKEEEKEATLNRLTVTLDLDCVKEADLIIEAAVEKMDIKKKIFANLDEIAPEHAILATNTSSLPITEIAAVTKRPEKVIGMHFMNPVPVMKLVEIIRGLATDDAVYETIEDITKKIGKVPVEVNDFPGFVSNRILLPMINEAIYTLYEGVATKEAIDEVMKLGMNHPMGPLTLADFIGLDTCLYIMEVLHEGLGDSKYRPCPLLRKYVNAGWLGRKTGRGFYVYE

SEQ ID NO: 46224 - protein, 319 aa, Bacillus anthracis
  MISC_FEATURE (25)..(25): X=any amino acid
  MISC_FEATURE (138)..(138): X=any amino acid
  MISC_FEATURE (198)..(198): X=any amino acid
KPAIPFPGPGSQAVGMGKQLPEKLXRSLAMFFAKTTMKCLPQSLFTENFLKGRRKKLSVTNKCGNPALLTTSFAILTAFKEDDITPRLCSQGHRLSEDNALVATGALNFEDAVYAVRKRGEYMEEAVPGGEGAMTTIXLSDPHLLKRVSDEVTGEVVCVQISNMNSTKQIVISGTKQGVEIASQRAKENGAKRAIPVXSKWEPFHSGGYEPSSGENSKVSLNEITIQDTNIPVIANVTADVITSGAHIQEKLIEQLYSPVLWYPSIEYMVNQGVDTFIGIGTWKSTCWTYKSIDSSVKAYAIYDEETLKDTISNLRGEN

SEQ ID NO: 46225 - protein, 442 aa, Bacillus anthracis
  MISC_FEATURE (376)..(376): X=any amino acid
  MISC_FEATURE (383)..(383): X=any amino acid
RQNVRELALDGLIQVEKSGAYSNLLLNNLIEKSTIDRKDIGLLTEIVYGTIQRRDTLDYYLQPFLKKKVEAWVRVLLRLSLYQMIYLDRVPERAAIHEAVEIAKRRGHKGIAGMVNGVLRSIQREGVPSVDEIKDPVERLAIATSHPRWLVQEVTAEYGLETAEKMCEVNMLPPVPTARVNVDKITVEEAITLLASEGIEAKRGDLSDDAIQIEKGNVAHTLDIKKGFLSIQDESSMLVARALEPDEGDVILDSCAAPGGKTTHIAERLKGTGQVMSLDLHAHKVRLIKQQAERLGLENVETKALDARKVQEHFANETFDKILVDAPCSGFGVIRRKPDIKLGKDKGDSERLSMIQFAILEKNAPLLKQGWSLCLXYVTMGKXEIDQVLDGFFQEHPKLSWNTTIKKRMPEKLSPYMNEGQLQIFRHYLAPDAFNMVGLRRK

SEQ ID NO: 46226 - protein, 242 aa, Bacillus anthracis
  MISC_FEATURE (56)..(56): X=any amino acid
  MISC_FEATURE (198)..(198): X=any amino acid
  MISC_FEATURE (227)..(227): X=any amino acid
MSKPKYNRVVLKLSGEALTGEPGFGINPSCIKSVAGPVKEIAQLDVKVAVVVGGPXQWPGKIGNEMGMDRAGADYMGMLATVMNSLALQDSLENIGIQTRVQTSIEMRQVAEPYIRRKAVRHLEKKRVVIFAAGTGNPYFSTDTTAALRAAEIEADVILMAKNNVDGVYNADPSIDPTATKYETLTYLRCNKKKVLGXMDFSSFFSMYGIMIFPLIVFSVMEKGKYXTCRFVENIGTVVRGK

SEQ ID NO: 46227 - protein, 890 aa, Bacillus anthracis
  MISC_FEATURE (104)..(104): X=any amino acid
  MISC_FEATURE (291)..(291): X=any amino acid
  MISC_FEATURE (294)..(294): X=any amino acid
  MISC_FEATURE (435)..(435): X=any amino acid
  MISC_FEATURE (454)..(454): X=any amino acid
  MISC_FEATURE (519)..(519): X=any amino acid
  MISC_FEATURE (534)..(534): X=any amino acid
  MISC_FEATURE (657)..(657): X=any amino acid
MSNTEKNLPTKYDHMSVEEGLYQWWLEGKYFESTGDEKKPPDTMVIPPPNVTGKFPLGHAWGNTLLQNILTPTKRIAGYDVLWASGMGHAGIATQAIVEGNFSXEGISRYDLGREKFLEKGLGWKEEYASHIRQQWGKVGLGLDYSRERFTLDKGLSDAVNKVFVQLYEKGLIYRGEYIINWDPATRTALSDIEVIHKEVQGAFYHMNYPLTDGSGHIRLATTRPETMLGDTAVAVHPEDDRYKHLIGKNQFTLPNWRSEISGFWRKRYEKKGFGTRCGKNYTATWPECLXSRXGHDFPTLFSNDRRGSMNEKSCKVYRHGSFECRKALVKDLQEAGVLVENRGSYAFNRHNERNGASVGPLLCHHNGFVKMASTCRKKQLSFHQKEEREVTFVPDRFENTYLRLDGKYPPTGCILVHYGGGHAFSLGNHKENWXSIRRVQKAPADIWKRNSRXPTVLDTWFSSALWPFSTLGWPNEDAADFKRYYSTDALVTGYDIIFFWVSRMIFPGFRVYRRASIXRCINHGLVRDEQGTXMSKSLWYGIDPMDVIEKYGADAMRLILSTGSAPGQDLRFSMEKVESTWNFINKIWNASRFVLMNMDDMKYEEIDLTGEKSVADKWILTRLNETIESVTRNMDKYEFGESWSFIIHFHLGRFLXLVHKMAKLPLYGEDEAAKKTTRSILAYVLDQTMRLLHPFMPFVTEKIWQHLPHEGESITVAAWPTVREDLQDTEAAAEMHLLVDIIRSVRNIRAEVNTPMSKKVQMQIKAKDEAVLAQLTKNSSYIERFCNPSELTIQTDLQAPEKAMTAIVTGAELFLPLADLINLDEERARLEKELEKFDKEVERVPEGNFQTQGFVAKAPAAVIEGERAKEQDYLEKREAVRQRLADLEK

SEQ ID NO: 46228 - protein, 339 aa, Bacillus anthracis
MNNRYSRQELFSPIGEEGQQKIRKKHVLIIGAGALGSANAEMFVRAGVGTVTIVDRDYVDWSNLQRQQLYVESDVENNLPKAVAAKKRLEEINSEVRVKALVQDVTAEELEELVTNVNVMIDATDNFETRFIVNDIAQKYSIPWIYGACVGSYGLSYTILPSKTPCLSCLLQSIPLGGATCDTAGIISPAVSLVVSHQVTEALKLLVEDYESLRDGLVSFDVWKNEYSCMNVQKLRKHNCPSCGENALYPYLNKENTSKTAVLCGRNTVQIRPPYKEEMDFERYKELLNDRVNDLNVNPYLLSFSVEEKRLVAFKDGRVLVHGTKDISEAKTVYHRYFG

SEQ ID NO: 46229 - protein, 119 aa, Bacillus anthracis
MIVGIGIDIIELNRIEKMLDGKLKFMERILTENERNVAKGLKGSRLTEFVAGRFAAKEAYSKAVGTGIGKEVSFLDIEVRNDDRGKPILITSTEHIVHLSISHSKEFAVAQVVLESSSS

SEQ ID NO: 46230 - protein, 1170 aa, Bacillus anthracis
MSLRFVIGRAGSGKSTLCLHEVQEELKQRPRGETILYLVPEQMTFQTQQALIGSEDVRGSIRAQVFSFSRLAWKVLQEVGGASRLHIDEAGVHMLLRKIVESRKDGLSVFQKAAEQNGFFEHLGSMIAEFKRYNVTPSNVYEMWQQLDAHSSSAEQKLLANKVYDLQLLYDDFERALIGKYLDSEDYLQLLVEKLPQSEYVKGAEVYIDGFHSFSPQELEIVRQLMICGARVTITLTIDEKTLAQPVNELDLFYETTLTYEKIKQVAREEKIEIEKTIPLMEQPRFHSPALAHLEMHYEARPNEKFHGEASVTIHTAANLRAEVEGVAREIRRLVAEENYRYRDIAVLLRNGESYYDVMRTLFTDYNIPHFIDEKRPMSHHPLVECIRSALEIISGNWRYDAVFRCVKTELLYPLDVRKETMREEMDEFENYCLAYGVQGKRWTSEDPWMYRRYRSLDDTNGMITDSEREMEEKINRLRDVVRTPVIRMQKRLKRAGTVMQMCEAVYLFLEELDVPKKLEALRIRAEENGDFLFATDHEQVWEEVMSLLDTFVEMLGEEKMSLSMFTDVMSTGLEALQFANIPPSLDQVLIANIDRSRLSNVKATFVIGVNEGVIPAAPMDEGMLSDEERDVLSAAGIELAPTTRQTLLEEQFVMYQMVTRATEKLYISCPLADEEGKTLLASSFIKKIKRMFPDVKDTFITNDVNDLSRLEQISYVATPEVTLSYVMQQLQTWKRYGFEGNLDFWWDVYNFYVTSDEWKQKSSRVLSSLFYRNRAQKLSTAVSRDLYGDKIKGSVSRMELFNRCAYAHFAQHGLSLRERDIFKLDAPDIGELFHAALKRIADRLLRENRTWADLSIKECEHLSAVVIEEIAPLLQRQILLSSNRHFYLKQKLQQIIFRTSIILREHAKSSGFVPVDLEVPFGMGGTGSLPPMEFSLPNGVKMEVVGRIDRVDKAEDENGTFLRIIDYKSSSKALDLTEVYYGLALQMLTYLDVVTSNAQTWMKKGGTASPAGVLYFHIHNPIVEVKGDASEAEIEKEILKKFKMKGLVLGDADVVRLMDNKLSTGSSDIISAGLKKDGSFSARSSIASEQEFNVLQKYVHHTFENIGKDITEGVIDIAPYKKGNKAACTFCNFKSVCQFDESLEDNQFRTLKDMKDSEAWRKLERRLAE

SEQ ID NO: 46231 - protein, 287 aa, Bacillus anthracis
  MISC_FEATURE (163)..(163): X=any amino acid
  MISC_FEATURE (266)..(266): X=any amino acid
KDIATPNRTKDIVEKYGFSFKKSLGQNFLIDTNVLNRIVDHAEIGSESGAIEIGPGIGALTEQLAKRAKKVVAFEIDQRLLPILDETLAPYGNVTVIHKDVLKADVHEGFSEQFEEGQDVMVVANLPYYITTRNLFKLLEKKLPVRGFVGMMQKEVGGSFAGXPLTKEDRSLIHCLFGLIRKVETVMTVPRTVFVPQPNGDSAIISPPKASKPVVEVTDETFFFEVVRASFAQRRKTLMNNLSNNLNGFPERKRALDRIFTPSRNXFKRRRETLSIEKVCDIKVWLY

SEQ ID NO: 46232 - protein, 310 aa, Bacillus anthracis
MFNHVTVLLKETVDGLDIKPDGTYVDCTLGGGGHSSYLLSQLTEGGRLIAFDQDEIAIQNAKEKFSSYGEQFITVKSNFRYLSEKLQELGITEVDGILFDLGVSSPQLDTPERGFSYHHDAPLDMRMDQDAPLTAYDVVNSWSYEQLVRIFFQYGEEKFSKQIARKIEAYRENKAIETTGELVELIKEGIPAPARRTGGHPAKRVFQAIRIAVNDELKVFEEALESAIEMVKPGGRVSVITFHSLEDRICKTTFKRNSTTPQLPPGLPIIPDEFKPKLKLITRKPILPSDIELEENNRARSAKLRIAEKR

SEQ ID NO: 46233 - protein, 366 aa, Bacillus anthracis
  MISC_FEATURE (170)..(170): X=any amino acid
VRVLVSGGGTGGHIYPALALIREIKKLNPEARFLYIGTENGLESTIVPKAGIPFQSIVISGFKRKISLDNVKTGMRFLKGVQDSKRYIRRFNPDIVIGTGGYVCGPVVYAAAKLGIPTIVHEQNSVPGVTNKFLSRYVDKVAVCFEAAAEHFPQSKLVLTRKPRAATINXTKNGNERETGPIGLFPFPKKSVLIFGGSGWGRPINDAFVEAMTQFENKSYEILYVPGEVHYDKVMEAVKQKGNPNNVIIKPFIHNMPEVLTGVDLVVSRAGATTLAELTALGKPSVLIPSPYVTNNHQEKNARSVVDKGAAKMLLEKDLTAETLIRDIDEILLDAQTLQNMKLAAGQLGIPDAANKLYEVMNKLVK

SEQ ID NO: 46234 - protein, 175 aa, Bacillus anthracis
SNEKMEKAVAAYSRELATVRAGRASASVLDKVQVDYYGAQPPVVQLANITVPEARLLVFQPYDKTSIGDIEKAILKADLGLNPSNDGTVIRIAFPALTEERRRDLVKVVKKYAEEAKVAVRNVRRDGNDDLKKLEKAGEITEDDLRGYTEDIQKETDKYIAKVDEIAKNKEKEIM

SEQ ID NO: 46235 - protein, 295 aa, Bacillus anthracis
MTNVTGTERVKRGMAEMQKGGVIMDVINAEQAKIAEEAGAVAIMALERVPADIRAAGGVSRMADPTIVEEVMGAVSIPVMAKCRIGHLVEARVLESLGVDYIDESEVLTPADEVYHLNKRDYTVPFVCGCRDIGEAARRIAEGASMLRTKGEPGTGNIVEAVRHMRQVNAEIRQVASLREDELMTYAKNTGAPYEVLLEIKRLGRLPVVNFAAGGVATPADAALMMQLGADGVFVGSGIFKSENPAKFARAIVEATTHYEDYELIASLSKGLGNAMKGIEISTLLPEQRMQERGW

SEQ ID NO: 46236 - protein, 136 aa, Bacillus anthracis; identical to SEQ ID NO: 45595
  MISC_FEATURE (22)..(22): X=any amino acid
  MISC_FEATURE (24)..(24): X=any amino acid
  MISC_FEATURE (129)..(129): X=any amino acid

SEQ ID NO: 46237 - protein, 77 aa, Bacillus anthracis
MVCFLAHQINGKLYTTVYAHMKDRTVQAGDQVQAGQLVGHMGNTGHSYGQHLHFELHNGEWNFEKTNAVNPLPYLVR

SEQ ID NO: 46238 - protein, 644 aa, Bacillus anthracis
MKLDEFFVTGDPIIYGADASIVLVTLAIIFVLTKYKKWKWLWDEWLTTVDHKKIGAMYIISAVIMLFRGGMDGLMIRAQLTFPETTYLNAEHYNGIFTTHGTVMILFMAMPFVMGLMNLVVPLQIGARDVAYPFLNALSFWLFFVGAMLFNIAFVIGGSPDAGWTSYFPMAGTEFTSGVGNNYYAIALQISGLGTLMTGINFLVTILKMRTPGMTLMRMPMFTWSILITTIIIIFAFPVLTVALALMTFDRLFDAHFFTMASGGMPMLWANLFWVWGHPEVYIVILPAFGIFSEIISTFSRKRLFGYSAMVYSMVAISLLSFVVWLHHFFTMGAGPAVNSFFSISTMAISIPTGVKIFNWLFTLYKGRIRFTVPMLWSLAFIPNFVVGGVTGVMLGMAAADYQYHNSYFLIAHFHYVLIAGTVFAMLAGFTFWYPKMTGHMLNERLGKWTFWIFMSGFNICFFPMYFLGLDGMTRRMYTYSESLGWGWLNQIASVGAVMMGIGFLLLCYNVIWSARHGERDTTGDPWDGRTLEWATQSPVQHYNFAKLPEIKEADAFWYMKKRGETVTPAAEDIKPIHMPSNSGVPIIASGFFGLAGFALVFSWFWLAAIGGIGILACLIYRSFDYDEGYYISVDEIKKSEHVA

SEQ ID NO: 46239 - protein, 557 aa, Bacillus anthracis
MRSDMIKKGFDKAPHRSLLKATGLKDEDFDKPFIAICNSFIEIIPGHKHLNEFGKLVKEAVRAAGMVPFEFNTIGVDDGIAMGHIGMRYSLPSREIIADSVETVVNAHWFDGMICIPNCDKITPGMMMAALRINIPTVFVSGGPMAAGKTSKGDVVDLSSVFEGVGAYQSGKISEEELKDIEDHGCPSCGSCSGMFTANSMNCLCEVLGLALPGNGSILAIDPRREELIKQAAEKLKILIERDIKPRDIVTEEAIDDAFALDMAMGGSTNTVLHTLALAQEAGLDYDMNRIDAVSRRVPHLCKVSPASNWHMEDIDRAGGISAILKEMSRKEGVLHLDRITATGQTLRENIAHAEIKDKEVIHSLENPHSEEGGLRILKGNLAKDGAVIKSGATEVKRFEGPCVIFNSQDEALAGIMLGKVKKGDVVVIRYEGPRGGPGMPEMLAPTSAIAGMGLGADVALLTDGRFSGASRGISVGHISPEAAAGGTIALLEQGDIVCIDVEERLLEVRVSDEELGKRKKEWKRPEPKVKTGWLGRYAQMVTSANTGAVLKIPNFD

SEQ ID NO: 46240 - protein, 544 aa, Bacillus anthracis
MKHIKLYDKQLQLKAYLENAFKIKYSPPLNELWTAGFSLPFTDPKREEIETFDYVEIFDNGKRIGLFRIMDSEEEREVSQKIITYDCEHVLSTLMDSVLFGYHERINLTTRENIEYLLSKQRIKHWKLGQCDFVKYFQYSWENEDTILGPIYSIAKPFDEKFQWTWDDTSYPWTLNLVKYSDEITGELRYRKNMKGIKRKVEAKDVMTRIYPLGYGEGVNQLNIKSVNNGLPYIDAPDFVRELQDGFDYIWVDRRFEDPKTLYASAKAMLLKACMPKVTYEIDAIDYELIDPYKIEKYETGKLVRLYDEDFNISVDLRVMDRSKDDVTGNPLDVKLVLENKVTDIGTIQADIEKRQKVNEVYSQGTTNIDSQPFQDNCDPDHPAIIRFQIPNDVKNVNQLILTFETLRFRAYERAIKGGGAVVASTSAGGANVSSTSSGGGTVGSTSSGGSSVQASSSGGGTVKASSSGGDHVHKMFHGGGIVPAEPSTIGLYTAFSDPGRNTSASFYAKGTGSSFYTYGSSGNHTHDISIPNHTHSININHKI

SEQ ID NO: 46241 - protein, 478 aa, Bacillus anthracis
  MISC_FEATURE (357)..(357): X=any amino acid
  MISC_FEATURE (467)..(467): X=any amino acid
  MISC_FEATURE (470)..(470): X=any amino acid
MMQPLTMERMLHIINVGLVKTKNPKQIIIVGAGISGLVAASLLKEAGHKVTILEANNRIGGRIYTIREPFSRGLYFNAGPMRIPDTHKLTLAYIRKFKLPLNLFINKTASDIIYTNNIKKRLSIFEKNPSILGYPILEREKGKTAEELMLEVLEPILNYIKKDPNKNWSIVEKKYKAYSLGTFLTEYYSDGAIDMIGVLLDMEAYMGMSLIEVLREMVFFTSTTKYYEITGGMDALPKAFLSQLNENIFMRYKVEKIIQENSKVMIQVNHEQTIERFMVTGDVAIVTIPFSALRFVEIQPYNLFSYYKRRAIRELNYIAATKIAIEFKSRFWEKAGQYGGKSITDLPIRFTYYPSYXIHTPGAATVLASYTWADEALTWDSLPDRERIRYALKNLAEIYGEIVYSEFVTGTSFSWSKNPYSCGAFTAFEPGQELELFPYITSPSGKVHFAGEHTTLTHGWMQGAIEXGIXVAHEVNEK

SEQ ID NO: 46242 - protein, 256 aa, Bacillus anthracis
  MISC_FEATURE (108)..(108): X=any amino acid
  MISC_FEATURE (211)..(211): X=any amino acid
  MISC_FEATURE (213)..(213): X=any amino acid
MLEQGLDYVVKLAKSKKQILDANPMQYFIRAALAGIYIGFIIVLCFKLGNFFHIADSPATYLAASMFFGIALVLIIYGGAEIFTGKQMYFPGTTLFEKKTPYSDTLLXLGLFVYARKLYGGLYIFALLFYYNWIFEAIDHGHLMNKVVEGKMNTPTMQLFFKAILCNWLVCLACFLPSQVRGDTASIMIMMLLVFTFFLSGYDHSIANLYXIXSIFKYRRIPETISFAGAIHTNFPVTIGNILGGSVFVGMVYHYL

SEQ ID NO: 46243 - protein, 651 aa, Bacillus anthracis
MRGRAMTKVHQRLISILEEFLEEKSMLNRAFLASRLHVSTKTIQKDIKLLNDILEENGAKIESQRGTGYELEIIQTKKFEEFCVSLFQKQTEKIPTSYEERIAYILQRILTTEGYVKLSQLAEEIYVSKSTVNLIMKDVTDICGRYQLQIEKRPYYGIRIVGEEFHIRSCLSQYGLPRYDHTPFHEQFEQSDTYVSLPHIPLIRSVILKYIEGGTIYLSDIEIDNLVIHIAIALKRCEDQHYMKGLNEEQAELIIKKEYAIAKQIVGDLEKELHLSFPEEEVLYVTMHLLSTAVTSKDRYENVEELLGKDLYAFMQHILFKVAEERNLVFYYDEELLFGFGVHLKTLLNRLKYKLNTRNPLLAEVKKNYPYAFEIAVLVGDIIGEYTGESIPESEIGYIAIHFGGAMSRLQEQNQKKRCLLVCATGQGSAQLLKYKILSQFRDKLEIVGITGYYQLKVEDLYKEKIDCIISTIHIPSGLPVPIIKVNSIFDDKEIKSIGQQLFTHVNNSVQQYMKEDLIFLNHSASTKEEVIQFLCEKAAEKNYVPEHFYDSVMERENTSPTAVGNLVAIPHPMQLLSAETFLMFCTLEKAVDWGDKKVQVIILFSVKRNNNEDLQRLYDFLYDIMSSQSTIEKLTHAEGIEDFQEVLLSI

SEQ ID NO: 46244 - protein, 222 aa, Bacillus anthracis
  MISC_FEATURE (2)..(2): X=any amino acid
  MISC_FEATURE (90)..(90): X=any amino acid
  MISC_FEATURE (206)..(206): X=any amino acid
MXKYILSLDQGTTSSRAILFNKKGEIVHSAQKEFTQHFPKPGWGEHNAQEIWGSILAVIATCLSEADVKPEQIAGIGITNQRETAGVWGXTTGKPIYNAIVMASRQTAEICDELKEKGYSEMVREKTSLLIDAYFSGTKVKWILDNGESAREKQKNGDLLFGTIDTWLVWEISCGKAHVTDYSMAHVTLMVNTPDIRWDDELLDMXTYKEACFQSTFHHLKG

SEQ ID NO: 46245 - protein, 544 aa, Bacillus anthracis
MAKDIKFSEEARRSMLRGVDTLANAVKVTLGPKGRNVVLEKKFGSPLITNDGVTIAKEIELEDAFENMGAKLVAEVASKTNDVAGDGTTTATVLAQAMIREGLKNVTAGANPMGLRKGIEKAVVAAVEELKTISKPIEGKSSIAQVAAISAADEEVGQLIAEAMERVGNDGVITLEESKGFTTELDVVEGMQFDRGYASPYMITDSDKMEAVLDNPYILITDKKISNIQEILPVLEQVVQQGKPLLIIAEDVEGEALATLVVNKLRGTFNVVAVKAPGFGDRRKAMLEDIAILTGGEVITEELGRDLKSATVESLGRAGKVVVTKENTTVVEGVGSTEQIEARIGQIRAQLEETTSEFDREKLQERLAKLVGGVAVIKVGAATETELKERKLRIEDALNSTRAAVEEGIVAGGGTSLMNVYTKVASIVAEGDEATGINIVLRALEEPVRQIAINAGLEGSVVVERLKGEKVGVGFNAATGEWVNMLETGIVDPAKVTRSALQNAASVAAMFLTTEAVVADKPEPNAPAMPDMGGMGMGGMGGMM

SEQ ID NO: 46246 - protein, 476 aa, Bacillus anthracis
  MISC_FEATURE (3)..(3): X=any amino acid
  MISC_FEATURE (89)..(89): X=any amino acid
  MISC_FEATURE (122)..(122): X=any amino acid
  MISC_FEATURE (138)..(138): X=any amino acid
  MISC_FEATURE (354)..(354): X=any amino acid
  MISC_FEATURE (367)..(367): X=any amino acid
  MISC_FEATURE (371)..(371): X=any amino acid
  MISC_FEATURE (378)..(378): X=any amino acid
WFXKGISLLLACMLFMSATLTEKNTTRGILPFANDAKETLTNYAINVKYDEEKYIVSGIPAEGVKVKLEGPKAAVATAKAKKQFDIPSXFDHILKKGTYEVSLKTTGLPDDVKGTVSPSTNXSLLHEKAKKNCSWKIXNYPNGGSNANRGLFSKKSSLKPDTVQVVGTKEEIESISSAKAYVDLKGVNKTVTKTPEVTLYNKEGKTFKCRTSPSKISVTLNVATQATANNTEKTVPIAYTKKGSLPEGLAVTNISVEPREVTIAGPKDILEYIQSIEGVEVDLSQLTESTTFDTSVLLPKGVTSAKTNQVKVSVSVPKTKPTKTRTIDGYIIPKNGLSKETYRPVTFAPKMGRXAVDISGENSLVKXIISXSKYSRGXILQNVVSWDEGDVAIQVSGPSNISIEPKQKSAKVTIVKKENPDKKSYRVMVTTPNSNNNQDNQDNQTEKPKNPEPEPNPDPDPEKEKEPEQNKDKETS

SEQ ID NO: 46247 - protein, 316 aa, Bacillus anthracis
  MISC_FEATURE (14)..(14): X=any amino acid
  MISC_FEATURE (18)..(18): X=any amino acid
  MISC_FEATURE (274)..(274): X=any amino acid
  MISC_FEATURE (310)..(310): X=any amino acid
LKIEKPKIETVELXRDAXYGKFVIETLERGYGTTLGNSLRRILLSSLPGVAVTAIQIDGVLHEFSTVEGVVEDVTTIILNLKKLALKIYSEEEKTLEIDVQGEGIVTAADITHDSDVEILNPDLHIATLAKDGAFRVRLTGKAGPGVYATDANKSEDLPIRRNSHGFIYTSRITGDYQGGKNTWSDKGANFEKPTPFCFGGLEPSRPKKAFSFWGAKSLPGILKIFVGLTDEAQNAEIMVEKEEDQKEKVLEMTIEELEPFCSVFIIAKTCRKXTVPEACDKTEEDMMKSRNLGRNPLEKVKPNFEELGXGLRKDD

SEQ ID NO: 46248 - protein, 177 aa, Bacillus anthracis
MEKSWYVVHTYSGYENKVKANLEKRVESMGMQDKIFRVVVPEEVEVEMKNGKEKLMKRKVFPGYVLVELIMTDDSWYVVRNTPGVTGFVGSSGSGSKPSPLLEEEVVTIMKHMGMDNEVVDFDFELHETVRVNEGPFADYTGAIEEIDVEKKKVSVLVDMFGRETPVELDFHQIEKL

SEQ ID NO: 46249 - protein, 458 aa, Bacillus anthracis
MAKKKTKFTCQECGYQSPKYMGKCPGCGQWNTLVEEMEPVVSSRRLNYANAIQTEVTKPRRLTEVETKSEARIETKFQEFNRVLGGGIVDGSLVLIGGDPGIGKSTLLLQISSQLADSSYDVLYISGEESAKQIKLRADRLHVNGSNLFVVSETDLQRIATHIEEMNPAFVVIDSIQTIHLPEVTSAPGSVAQVRECTAELMKLAKTKGIPIFIVGHVTKEGAIAGPRMLEHMVDAVLYFEGDRHHTYRILRAVKNRFGSTNEMGIFEMKELGLAEVLNPSEIFLEERPVGVAGSTVVASMEGTRPVLVEIQALISPTSFGNPRRMATGIDHNRVSLIMAVLEKRTGLLLQNQDAYLKVAGGLKLDEPAIDLAVALSIASSFRDKSTAPTDAVIGEVGLTGEIRRVSRIEQRVQEAAKLGFQRAIIPRKNLGGWTIPDGIEVVGVSNLGEALRLTLGG

SEQ ID NO: 46250 - protein, 565 aa, Bacillus anthracis
  MISC_FEATURE (72)..(72): X=any amino acid
  MISC_FEATURE (311)..(311): X=any amino acid
  MISC_FEATURE (360)..(360): X=any amino acid
  MISC_FEATURE (486)..(486): X=any amino acid
  MISC_FEATURE (501)..(501): X=any amino acid
MIDYVWLIPLFPLVSFLLLIIFGKKIREGSSYLVFSRLFSPLIGAVLVLIERLFDSTSESIKWGWLITGRYXISVWFEVTALGALMLFIVTLVSLLVHVYSKGYMKSEEKITNFYAYLGLFTFAMLGLVISPNLLQLYIFWELVGLGSFLLIGFYFFKEEARAAAKKAFIMTRIGDIGLFIGMILIFWHAGSFEYDAIFRAIHTGDLTPTMITITAILIFIGAMSSIRSFPLHTWLPDAMEGPTPVSALIHAATMVAAGVYLVATMFPLFSASAVAMQTVAIVGAFTAIFAASIGLVQPDIKGSACLYYSXSAGYMMLALGSAGYVAGVVPFNDTRLFLSVAIFGGRKCHSCRATQNINXNGRPYRRKMKVTAALFLIGTPCNKWCAAPFRFFSKDEILAATWMNGNYVLFILAVIAAFLTAFYMVRLYFSSSLRGEAKTKVDVHESPRIMTYPMIVPWRPGSRGRLYNTPVFGNFSPKVGFGKMXHFKVQEAHRPSLGIXWLRRSFLLAGIALAYFIYGKKSIARDWAGGEEAPLYKIFAEKYYVDELYNMTVIPITKGIAHVL

SEQ ID NO: 46251 - protein, 250 aa, Bacillus anthracis
  MISC_FEATURE (178)..(178): X=any amino acid
  MISC_FEATURE (209)..(209): X=any amino acid
  MISC_FEATURE (215)..(215): X=any amino acid
  MISC_FEATURE (224)..(224): X=any amino acid
  MISC_FEATURE (241)..(241): X=any amino acid
SSQEQRKQKKDRDEIMKKAILKALRFRTRKNRAREIKMSLASQFQVVYNLKSIRRSMKKYEIVCPVRKANPYKKMLKATKEHRKIPNQLNREFKQNTPGKPLLTDITYLVYGKIQKAYLSTILDGQSNEILAYYVLEQDDDIRTTPLLKLKRNQRILLTQGGWIHSNQGAHYSSPTYXKLVKKLNLGQSMSREGNRWDKVLQESFLVIXKMKRIXNLVHPFLSXNQEIKKYMTYYNHYRYXMKLKKMTPV

SEQ ID NO: 46252 - protein, 219 aa, Bacillus anthracis
MSNKLETGIQYMQEGNWEEAAKNFTEAIEENPKDALGYINFANLLDVLGDSERAILFYKRALELDDKSAAAYYGLGNVYYGQEQFAEAKAVFEQAMQAGLQSADVTFMLGITHVQLGNDRLALPFLQRATELDENDVEAVFQCGLCFARLEHIQEAKPYFEKVLEMDEEHADAYYNLGVAYVFEENNEKALALFKKATEIQPDHFLAGNGVRLLEQEAE

SEQ ID NO: 46253 - protein, 793 aa, Bacillus anthracis
MFQIKKAAVLGSGVMGSGIAAHLANIGIPTLLLDIVPPALTKEEEAKGLTLEHKSVRNRFSNTAVQKLLKQKPAPLTVKGNLALIEAGNLEDDLERLADVDWIIEVVVENLDIKKKLFEKVDAVRKPGSIVSSNTSGISVEKMAEGRSDDFQKHFLGTHFFNPPRYLKLLEVIPTKKTDPQVLSFMKLFGEDVLGKGVVIAKDTPNFIGNRIGTYGLLVTLQEMVKRGYSIGEVDSVTGPLIGRPKSATFRTLDVVGLDTFVYVANNVYENVQEKERDVFKVPAFMHDMLDKKWLGSKTGQGFFLKQGKEILELNPETMEYEARKKLKAASIELSKQEKGLSNKLKALVYAKDRAGELLWNIITPTLLYSAKLHKEIADDIVAIDQAMKWGFGWEQGPFEVWDAIGVEKSVQKMEESGAVIPAWVKEMLEKGFTTFYKHDNGDSYYYDNGEYKLIECNKKAISLKQLKAKNGVLKKNSGASLIDLGDGILCLEFHSKSNAIGMDITQMINYAVDEVEKNYKGLVIGNQSKNFCVGANLAMILMEAQDDNYFEIEWVVKNFQDAMMKIKYSSKPVVAAPYGMTLGGGTEVCLPAASIQASSETYMGLVEVGVGLIPGGGGNKELYIKHLNKMANGVEFDLQKVANKVFETVAMAKVLTSGQEAVSHNFLGDKDGISVNGDHLLYDAKQKALALYEAGYKAPIRKKIPVVGETGYATLALGAEAMHLSGYISEYDLHIAKKLAYVIAGGKVPYGTEVDEQYLLDVEREAFISLVSEMKSQARMQHMLVKGKPLRN

SEQ ID NO: 46254 - protein, 116 aa, Bacillus anthracis [sequence omitted]

SEQ ID NO: 46255 - protein, 577 aa, Bacillus anthracis
LASYFGYSSFRRGQDETIKNVLDGKDTVCIMPTGGGKSICYQIPALVFEGTTLVISPLISLMKDQVDTLVQNGISATYINSSISITEANQRIQLAKQGHYKLFYVAPERLDSMEFVDQLIDMKIPMIAIDEAHCISQWGHDFRPSYLHIHRILDYLPEEPLVLALTATATPQVRDDICNTLGINQENTIMTTFERENLSFSVIKGQDRNAYLADYIRQNQKESGIIYAATRKVVDQLYEDLMKAGVSVSKYHAGMSDHDRNEQQELFLRDEVSVMVATSAFGMGIDKSNIRYVIHYQLPKNMESYYQEAGRAGRDGLDSACILLYASQDVQVQRFLIDQSIGESRFSNELEKLQNMTDYCHTEQCLQSFILQYFGEEPKEDCGRCGNCTDNRESIDVTRESQMVLSCMIRTNQRFGKQMIAQVLTGSKNKKVIEFNFHTLPTYGLLSNRSVKEVSEFIEFLISDELIAVEHGTYPTLKVTEKGKEVLLGKENVLRKERVETRQIVQDHPLFEVLREVRKEIAQGEGVPPFVIFSDQTLKDMCAKMPQSDSELLTVKGIGEHKLVKYGSHFLQAVQHF

SEQ ID NO: 46256 - protein, 275 aa, Bacillus anthracis
  MISC_FEATURE (36)..(36): X=any amino acid
  MISC_FEATURE (70)..(70): X=any amino acid
  MISC_FEATURE (78)..(78): X=any amino acid
  MISC_FEATURE (266)..(266): X=any amino acid
LNVYNGVPQLVTPVCTDSEKASPGVKKIVSEKEGWXEVYWLRGAGELGGIYGLYKGPYYPLGGEPPEIPXYVGNGEEXADLMMVASSNVEDAIMLLAQMARAAGIHLIIATQRPSVDVITGVIKANIPSRIAFAVSSQTDSRTILDGGGAEKLLGRGDMLFIPIGASKPVRVQGAFLSEEKVERVVEYVIGQQKAQYQEDMIPQDVPDTKQEVEDELYDEAVQLVVEMQTASVSLLPRGFGVGFTPCCPLIDAMEMNGVGGPVRGXVPPRVLHSR

SEQ ID NO: 46257 - protein, 349 aa, Bacillus anthracis
MVRAKRKLDHIEYALSTGQSRTHGFHDIEFVHQSLPNSSYETITCETKIGELSLSSPIFINAMTGGGGEKTLHINEQLAYVAKHHNLAMAVGSQMAALKDESEAASYKIIRKVNPNGIFFANLGSEATVEQAERAVDMVGANALQIHLNVIQELTMPEGDRDFTGVLQRIEEIVLNSKVPVIVKEVGFGMSKETMQQLASVGVTAIDIGGQGGTNFAAVENERRQRMLSYFNNWGIQTATSIIEATSTNNNLSFIASGGIQTALDVAKAIALGANTTAFAGYFLRILMEDGIEKLVDEIDLLHTDLKFIMTALGAKTIEELQSVPLVIKGETYHWLTQRGIDTTHYSRR

SEQ ID NO: 46258 - protein, 243 aa, Bacillus anthracis
MLTPQQINQFKSVLEKQKQELEQTIQTHENEDRASERESVGELSSYDNHPADMATELYERQKDFGLIELWHKQLEDTKHALQKIEAGTYGICEVSGEEIPFERLEAMPTATTCIQHTTNKLNMETRPVEEEVLSPSFHKHDEDHSVEYDAEVAWQDVANYGTSETPSDLERQDSKNYNGMYVNSEENVGYVEDFENFIGTDMYGKNPQVFATEEHEEYEQMLDDFEERTFKGELSSNESSSKE

SEQ ID NO: 46259 - protein, 729 aa, Bacillus anthracis
MAKSVVIAEKPSVARDIARVLKCDKKGNGYLEGSKYIVTWALGHLVTLADPESYDVKYKKWNLEDLPMLPERLKLTVIKQTGKQFNAVKSQLLRKDVNEIIVATDAGREGELVARWIIDKVRINKPIKRLWISSVTDKAIKDGFANLKPGKAYDNLYASAVARSEADWYIGLNATRALTTRFNAQLNCGRVQTPTVAMIANREDEIKNFKAQTYYGIEAQTTNQLKLTWQDANGNSRSFNKEKIDGIVKGLDKHNATVLEIDKKQKKSFSPGLYDLTELQRDANKKFGYSAKETLNIMQKLYEQHKVLTYPRTDSRYISSDIVGTLPERLKACGVGEYRPLAHKVLQKPIKANKSFVDDSKVSDHHAIIPTEGYVNFSAFTDKERKIYDLVVKRFLAVLFPAFEYEQLTLRTKVGNETFIARGKTILHAGWKEVYENRFEDDDVTDDVKEQLLPRIEKGDTLTVKLIMQTSGQTKAPARFNEATLLSAMENPTKYMDTQNKQLADTLKSTGGLGTVATRADIIDKLFNSFLIEKRGKDIHITSKGRQLLDLVPEELKSPTLTGEWEQKLEAIAKGKLKKEVFISEMKNYTKEIVSEIKSSDKKYKHDNISTKSCPDCGKPMLEVNGKKGKMLVCQDRECGHRKNVSRTTNARCPQCKKKLELRGEGAGQIFACKCGYREKLSTFQERRKKESGNKADKRDVQKYMKQQKKEEEPLNNPFAEALKKLKFD

SEQ ID NO: 46260 - protein, 313 aa, Bacillus anthracis
  MISC_FEATURE (117)..(117): X=any amino acid
  MISC_FEATURE (186)..(186): X=any amino acid
  MISC_FEATURE (199)..(199): X=any amino acid
  MISC_FEATURE (218)..(218): X=any amino acid
  MISC_FEATURE (234)..(234): X=any amino acid
  MISC_FEATURE (243)..(243): X=any amino acid
  MISC_FEATURE (260)..(260): X=any amino acid
  MISC_FEATURE (280)..(280): X=any amino acid
  MISC_FEATURE (295)..(295): X=any amino acid
  MISC_FEATURE (302)..(302): X=any amino acid
MFNHVTVLLKETVDGLDIKPYGTYVDCTLGGGGHSSYLLSQLTEGGRLIAFDQDEIAIQNAKEKFSSYGEQFITVKSNFRYLSEKLQELGITEVDGILFDLGCFSPQLDTPRKRGFXLPIIDAPVDMRMDQDAPLTAYDVVNSWSYEQLVRIFFQYGEEKFSKPNSRKIEAYRENKAIETARGNWXNLLKRVIPGSAWXNGVTSLRGECFQANRLWRXMMELKVFEEAVGICNXDSKPGRKSXCYNIHSLERPYLQNDVXRNSTTPQLPAGIPIIPDEFXPKLKLITKKNDFTFXYRLGGKXSSAFCEIRIAE

SEQ ID NO: 46261 - protein, 371 aa, Bacillus anthracis
MNKLPHETRVVIGMSGGVDSSVAALLLKEQGYDVIGIFMKNWDDTDENGVCTATEDYNDVIEVCNQIGIPYYAVNFEKQYWDKVFTYFLDEYRAGRTPNPDVMCNKEIKFKAFLEHAIALGADYVATGHYARVAYMDGEYKMLRGVDDNKDQTYFLNQLSQEQLSKTMFPLGELKKPQIREMAKEAGLATAAKKDSTGICFIGERNFKDFLSNYLPAQPGVMQTLSGEVKGKHDGLMYYTIGQRHGLGIGGNGDPWFAVGKNLKENILYVDQGFHNELLYGDEVIATNVGWVSNEAKEKEFKCTAKFRYRQEDNKVTVQIVDENTVRILCDEPIRAITPGQAVVFYDGDECLGGATIDEVYRSGKKLDCLG

SEQ ID NO: 46262 - protein, 611 aa, Bacillus anthracis
  MISC_FEATURE (122)..(122): X=any amino acid
  MISC_FEATURE (185)..(185): X=any amino acid
  MISC_FEATURE (233)..(233): X=any amino acid
  MISC_FEATURE (436)..(436): X=any amino acid
  MISC_FEATURE (462)..(462): X=any amino acid
  MISC_FEATURE (507)..(507): X=any amino acid
  MISC_FEATURE (522)..(522): X=any amino acid
  MISC_FEATURE (528)..(528): X=any amino acid
  MISC_FEATURE (532)..(532): X=any amino acid
  MISC_FEATURE (542)..(542): X=any amino acid
  MISC_FEATURE (593)..(593): X=any amino acid
  MISC_FEATURE (601)..(601): X=any amino acid
MCGITGWVDYKRSLEGERDVVTKMAETLAKRGPDDNKVWIKGNVAFGHKRVIVVIPEGCKQPMTCLKDEANYAICYSGDLFTRGPFRKGLFRRRIYVQRSLLIREVCLASYIDGKKECVDHXTGIYAFAVWDEQKGQVFIARDRLGGKTTFINYDSGDLLLGSELKGDYGPPRWEGGKHVRRLFXNIWPWPYRTPGHGYLYCNKRIRPGHEEDIFEEPVYVMEIFGMEKEKAXEFFVETREKKRLFISRCDYKAARFDVPLCTFLSGGVDSSAITAIAAKEYEKSGKGQLHTYSVDYEDNDKYFKANAFQPNSDAPFIHLMTETCQTIHHRCVISNEQLAQYLTEAVLVRDLPGMADIDSSLLWFCREIKQDFVVGLSGGCADEIFGGYPWFYREDDLQSRGISRGCVLQKRREQVLKKEWRNELNFTPYVQPRLXRILSESSYVRWGKSPRKQKDANYFIXIWYWFMTTLLDRKDRMSMGASLEVRVPFADQRLVEYAWKYSLGKXKCIKPAKKVYCVKRXRVTSQXQSIXKKKPVSKNTXSALYESSNSMDQDLLTDKGSILHELFDKEQLSGLIESGGSAFQTPWYGANXMSETHSFXAHFSNKVHVW

SEQ ID NO: 46263 - protein, 116 aa, Bacillus anthracis
  MISC_FEATURE (113)..(113): X=any amino acid
KKVQEFNDMIRKLRKELFGKRPKRIHTGFAENMAIATLYGNLTPTEKFISSTMDGAEMVHMARTKMIQEVYAANSREHLEELVGAKLVNLFSDMKVEEDIAVSRFVFDKNITXEKD

SEQ ID NO: 46264 - protein, 102 aa, Bacillus anthracis
MYAIIETGGKQIKVEAGQAIYIEKLDVEAGETVTFDKVLFVGGENVKVGSPVVEGATVTAKVEKQGRAKKIIVFKYKAKKNNRKKQGHRQPYTKLVVEAINA

SEQ ID NO: 46265 - protein, 429 aa, Bacillus anthracis
MEKLLIEGGRALNGTIRVSGAKNSAVALIPATILADTPVTIGGVPNISDVKMLGDLLEEIGGRVTYGQEEEMVVDPSNMVAMPLPNGKVKKLRASYYLMGAMLGRFKKAVIGLPGGCHLGPRPIDQHIKGFEALGAHVTNEQGAIYLRADELRGARIYLDVVSVGATINIMLAAVRAKGRTVIENAAKEPEIIDVATLLTSMGARIKGAGTDVIRIDGVDSLHGCHHTIIPDRIEAGTYMILGAASGGEVTVDNVIPQHLESVTAKLREAGVQVETNDDQITVNGDRRLKVVDIKTLVYPGFPTDLQQPFTTLLTKAHGTGVVTDTIYGARFKHIDELRRMNAQIKVEGRSAIVTGPVLLQGAKVKASDLRAGAALVIAGLMADGITEVTGLEHIDRGYENIVDKLKGLGANIWREQMTKQEIEEMKNA

SEQ ID NO: 46266 - protein, 1213 aa, Bacillus anthracis
  MISC_FEATURE (75)..(75): X=any amino acid
  MISC_FEATURE (125)..(125): X=any amino acid
  MISC_FEATURE (177)..(177): X=any amino acid
  MISC_FEATURE (187)..(187): X=any amino acid
  MISC_FEATURE (193)..(193): X=any amino acid
  MISC_FEATURE (255)..(255): X=any amino acid
  MISC_FEATURE (275)..(275): X=any amino acid
  MISC_FEATURE (297)..(297): X=any amino acid
  MISC_FEATURE (300)..(300): X=any amino acid
  MISC_FEATURE (311)..(311): X=any amino acid
  MISC_FEATURE (319)..(319): X=any amino acid
  MISC_FEATURE (328)..(328): X=any amino acid
  MISC_FEATURE (340)..(340): X=any amino acid
  MISC_FEATURE (354)..(354): X=any amino acid
  MISC_FEATURE (371)..(371): X=any amino acid
  MISC_FEATURE (378)..(378): X=any amino acid
  MISC_FEATURE (379)..(379): X=any amino acid
  MISC_FEATURE (387)..(387): X=any amino acid
  MISC_FEATURE (396)..(396): X=any amino acid
  MISC_FEATURE (495)..(495): X=any amino acid
  MISC_FEATURE (508)..(508): X=any amino acid
  MISC_FEATURE (514)..(514): X=any amino acid
  MISC_FEATURE (612)..(612): X=any amino acid
  MISC_FEATURE (617)..(617): X=any amino acid
  MISC_FEATURE (631)..(631): X=any amino acid
  MISC_FEATURE (691)..(691): X=any amino acid
  MISC_FEATURE (694)..(694): X=any amino acid
  MISC_FEATURE (731)..(731): X=any amino acid
  MISC_FEATURE (738)..(738): X=any amino acid
  MISC_FEATURE (739)..(739): X=any amino acid
  MISC_FEATURE (781)..(781): X=any amino acid
  MISC_FEATURE (795)..(795): X=any amino acid
  MISC_FEATURE (811)..(811): X=any amino acid
  MISC_FEATURE (822)..(822): X=any amino acid
  MISC_FEATURE (840)..(840): X=any amino acid
  MISC_FEATURE (843)..(843): X=any amino acid
  MISC_FEATURE (851)..(851): X=any amino acid
  MISC_FEATURE (866)..(866): X=any amino acid
  MISC_FEATURE (869)..(869): X=any amino acid
  MISC_FEATURE (910)..(910): X=any amino acid
  MISC_FEATURE (918)..(918): X=any amino acid
  MISC_FEATURE (924)..(924): X=any amino acid
  MISC_FEATURE (926)..(926): X=any amino acid
  MISC_FEATURE (930)..(930): X=any amino acid
  MISC_FEATURE (939)..(939): X=any amino acid
  MISC_FEATURE (1074)..(1074): X=any amino acid
  MISC_FEATURE (1110)..(1110): X=any amino acid
  MISC_FEATURE (1120)..(1120): X=any amino acid
  MISC_FEATURE (1126)..(1126): X=any amino acid
NVIPFEYMKNGTCFSPDKKSSWFIGEVKKPETINYRTLKPEKDGLFCERIFGPQKDWECLLRKYKRVRYKGCSLXRSGVKLRRGKVRRERMVHMELAAPVSHIWYFKGIPSRMGLVLDMSPSRAXRVIYFEYLCCILESGNVYPLDKKQLLSEKEYRAYRDRYGSTFQAAMGCRSDXKFIPALGLRXRKMSSXKENLKPGTRPTRFGGIKLFRSLKAFRTLENEPSGMFLDVLPVIPTRTTTHGTLDGWTFCYFXLKDLYRRVINRNNRLRASNXDLGAPQPYSFITEKTYVTRKQXAQXIDNDSRGPSKXLDRGNGHXISISQAKRXNRGRFRQNLLRXAWLTTSGRVLNPLXDRTLDVSMWDNEKKGAXTVQTFFXXKELVEKDXHTTLRVETXNERVQPEVWDVLESVIKEHPVLLNRGTNISPFWVSRRLNLSLVELRAIRLSPLVCTEIQRGTLTCLNFTVHRTFIIRSQAEARLLMLAAQNILNPKDRXTSGYSISGYGIRXLLLNTXAEGAIGEGMVFKDANEALLAYQNGYVHLHTRVAVAASAVNNVTFTEEQKNMLLLTTVGKLIFNEILPESFPYINEPTNSNLEKETPAKYFVEKGCEHXRDYCXSRRSGTIQQENPWXIIAEVFKRFKITETSRMLDRMKNLGFKYSTKAGITVGVSDILVLGEKDGNLPRSTSKSRXCNXTIPSRFNHGEERYDRVISIWSNAKDVIQGKTDEVLEXTQPNLSXXVIPVPVVTHRLYSACWYAWSDGPSLMVVSFELPIKSSFRKGXPVLEYFIFTHGGAXRSCRYSTENSMILVTXHVVCLTLHKMXSFVKMIVEQIAFINWCDXRGXMRLWSIIXSSCWTFCKKNCKTSXNRXSISAENQLITEDIAHIVENSGVETVNIRSAFTCNTRPWCMXEVLQVVTXQLEQTXKXGRRXVLSQLNYRXARYTVNMRTFHTGGVAGDDITQGLPRIQEIFEARNPKGQAVISEIDGVVQAINDVKDRQEVVVQGEVEARTYAIPYGARLKVIPGQKISHGKELTEGSIDPKELLKVTDITAVQEYLLREVQKVYRMQGVDFVDXHVEVMVRQMLRKVRVSDAGETDVLPRNITRYPSVYXCECEGVTARXTTSNSXTCSTWYTKASLETDSFLSAASFQETTRVLTDAAIKGKRDELLGLKENVIIGNFVPAGTGMNRYRKVDLVKTTQDDMNVENDEVYVEQ

SEQ ID NO: 46267 - protein, 362 aa, Bacillus anthracis
MKLGARILKTGIAITLALFACILLNLPSPVFAGISAIFAVQPSVYRSYLTALEQIQANVIGAVFAIAFATAFGHNPFIIGLTCILVIALTLQLRLENTISIALVTVIAIMEYQGEDFFSFALLRFATIMVGIIAASLVNLVFMPPKYETKLYHRIVDNTEEIVKWIRMNSRQASDFTTLKTDIDRMKEKMIKLNHYYLLYKEERSYTKKVQFAKIRKLVLFRQMLATTSRALSTLKSLHRTENELRYMPEEFQESIQNELDSLTHYHEQVLLKFIGKAKKQQSVEMLDEVETGKQELIDIFMEYQNKDDEEAYKTWLHLFPLISAIINYSEEVEHLDLLVDSFYTYHKPEAELKIDDKKEDE

SEQ ID NO: 46268 - protein, 345 aa, Bacillus anthracis
MKLTKRLAGAAISFSLVAGCGEKKEELNIYSWADNFDEQVLRDFEKKYNVKINYDKYASNEEMLAKLQAGGAKYDLIQPSDYMVKTMAKMDLLAPLDKKNIPNIENMVSNFKTPAFDPENKYSLVYTWGVTGIAYNKKYVKEAPTSWTDLWNEKYKGHVTLLNDSREVLGMGLKKNGFSNSTKDDAQLKTAATDLQKLLPNLLAFDTDNIKQKFITEDAWIGTVWSGDAAFIAKDNKDVEYVVPKEGGTIWADTLAIPKGAKNKELAEKFMNYLLDEKVSVKNYESIGYSNPNEKAHPLHSKEYRENHMIFLTKEELDRTEWLVDVDDKLKDYDRYWTELKTKGK

SEQ ID NO: 46269 - protein, 428 aa, Bacillus anthracis
  MISC_FEATURE (15)..(15): X=any amino acid
  MISC_FEATURE (141)..(141): X=any amino acid
  MISC_FEATURE (344)..(344): X=any amino acid
RLISPSPVGGFMFFXPVTINGAPPIIMDLIEPGIRTPVPTAVPNYPLLVIIMGAIYPFYTKKWNVSLVDICFSILKVVGVVLGVLYCLKKGPTWVSFPPHIGPFLYEKLVISVSYLVHNAWAFLALLVGVRFLEFIGYVLXAPIMSPLWKTRGRSAIDAVASFVGSYSLALLITNRVYKEGKYTTKEAAIIATGVSTVSATFMIIIAKTLDIMHLWNVYFWTTLVVTFIVTAITVRIPPLSRKPDTYVTEEGFPEPVYKEKMLERAWEDALEVSKSAPGIMKNIAVNFKRWDLLDNGNFPIYYVSRFNGVSSRQKIHANILMWISYIFSILYPWVLPITRKQAXLLKQHPVGYLRKMFYPSLLVVSAPLVTKFVYCGGFGIIYLFFSASIPCILSTDIPLKVSELIILYVQRTILTLLIITPIAYLLL

SEQ ID NO: 46270 - protein, 300 aa, Bacillus anthracis
MSVLVNKDTKVIVQGITGSQGLFHTKQMIEYGTKIVGGVTPGKGGTDIEGVPVFDTVEDAVKATGANASVVYVPPAFAADAIMEAVDAEIDLVVCITEGIPVLDMVNVKRYMAGKHTRLLGPNCPGVITPDECKIGIMPGYIHKKGHVGIVSRSGTLTYEAVHQLTQEGIGQSTAVGIGGDPVNGTDFIDALKAFNEDEETHAVIMIGEIGGTAEEEAAEWVKANMTKPVVGFIGGQTAPAGKRMGHAGAIISGGKGTAAEKIKTMEACGIKVAETPAVMGETLISVLKEKGLFETCKNY

SEQ ID NO: 46271 - protein, 152 aa, Bacillus anthracis
KVKYFFFDTPEEKEAAQYSYEKEQTDMKKQQDPPEQQDVTFPKAQPKQNVVSIETAKQSSKVVYLEPRTYSEAQGIADHLKGRRAVVINLQRMSTDQAVRIVDFLSGTVYAIGGDIQKIGPKTFMCTPENVDIVGAISELFGEEDDTNIKRW

SEQ ID NO: 46272 - protein, 468 aa, Bacillus anthracis
  MISC_FEATURE (140)..(140): X=any amino acid
  MISC_FEATURE (328)..(328): X=any amino acid
  MISC_FEATURE (387)..(387): X=any amino acid
  MISC_FEATURE (392)..(392): X=any amino acid
MMNQNQGLKRELKSRHIFMIALGGVIGTGLFLGSGYTIHEAGPEGAIVAYLVGGFVMYLTMLCLGELAVAMPDAGSYQTYATKPISPAAGYVVGWMSWLNWSATIGIELIAVSILMKRWFPRCPSWIWCVVFAGTAFAYXGVSPESFAEGGILFASIKVITIIAFIILGGGSNVWFLDMKGNEPAPMFSSFTDYGGLFPNGLSAILITMIAVNFSFQGTELVGIAAGESENPEKTIPKAINNTVWAYTRGSCIIYFILAGIIPLATGGSNRKSIVVVFDKIGIPYAADIINFVIITAVLSVANSGLYATSRMLWSMSNQGMINPIFWXLSKNGVPIYALIVSTIVRLPFITITIYAEDTVYLWLLFYAGVGAILVWGIYWSILLIYXKGLYXSRAGKVKNLKFKTPLYPFVPLLGISIKCNSNCWYGFIPEQRMALYCGIPFMIVCLLFYRATRNKAHKVEHIEKTDT

SEQ ID NO: 46273 - protein, 452 aa, Bacillus anthracis
  MISC_FEATURE (104)..(104): X=any amino acid
  MISC_FEATURE (230)..(230): X=any amino acid
  MISC_FEATURE (237)..(237): X=any amino acid
  MISC_FEATURE (350)..(350): X=any amino acid
  MISC_FEATURE (397)..(397): X=any amino acid
  MISC_FEATURE (405)..(405): X=any amino acid
FFHTKDIHSHFENWPQISRFVQGEKKRRQEAGETVLTVDIGDHVDRFHSISEATNGLGNTKLLNEALYDYVTIGNNGGITLAKEHLNHLYDDAEFEVLVANLFXKEGVRPEWAKPYKLHTTTDGITIAFIGLTVAYPEFYQMLDWHIEDPIEHLESILKEVREKNSYNVVLSHLGKSMDEHMSGSYDIDVILWAHTHHLFDRGVLMNNTYLGGGKNGGRFCWALPFSGEXKNKKTCXKRTVERLKTDRLGAYSKPLSTIEALQEESTHIMEDPVVHLKESLPVDWFHETAFLSHVSNALITWWRCRDWHGNAGVLLEGLDEGVVTRGDISQNWSTSNNPCLLKVPGENRXEEVFYKGPVARIMETPGVKGIRVRGESEGKNDLRWVEVIPDTIPGEXNFTRRCKXLVGEYAGLDVYIYSRNIDMFTFGYLYPELSTLSNKQYYMPELLRDVL

SEQ ID NO: 46274 - protein, 979 aa, Bacillus anthracis
MKNNMVHITIDGKKYTAEPSSTILGVINENGIEHPQICYVPEVDPIQTCDTCIVEVDGKLMRSCSTVVTEGMNIERNSTRAKEAQTEAMDRLLENHLLYCTVCDNNNGNCKLHNTAELMEIEHQKYPYEPKVDVSEVDMTHPFYRYDPNQCIACGQCVEVCQNLQVNETLSIDWEAERPRVIWDEGVSINDSSCVSCGQCVTICPCNALMEKTMLGEAGFMTGLKPDILEPMVDLIKEVEPGYSGIFAVSEVEAAMRDTRTKKTKTVCTFCGVGCSFEVWTKGRKILKVQPSSDAPVNAISTCVKGKFGWDFVNSKERITKPLIRKNGTFVESTWEEALNVVANKLGSIKEEYGKDAIGFISSSKITNEDNYVIQKLARQVFETNNIDNCSRYCQSPATDGLFRTIGMGGDAGTIKDIAQSGLVIIVGCNPTEGHPVLATRIKRAHKLHGQKLIVADLRKTEMAERSDVFISPKQGTDQVWLMAVTKYMIDQGWHDQQFIDENVNFFEDFKESLTEYTLEYAEEVTGISKETLIQMAEMIRDADGTCILWGMGVTQNTGGSDTSAAISNLLLATGNYRRPGAGAYPLRGHNNVQGACDMGTLPGWLPGYQHVTNDMERAKFEMAYGVKINSEPGLNNIEMLHAIDEGEMKAMYLVGEDMALVDSNANHVHEVLSSLDFFVVQDVFLSKTAQYADVVLPAAPSLEKEGTFTNTERRVQRLYQVLPTLGDAKPDWWIVQAIANKLGANWNYSHPSEIFAEMASLSPLFSQANYEVLEGWNSFHWGSFDGTNTPLLFQDGFNFPDKKARFAIADWVRPAEFPAEFDLHINNGRMLEHFHEGNMTNKSTGIQTKVPGVFVEVSPALAKERGVKTGSLVRLVSPFGALKLRVLVTDRVKANELYLPMNSTDNETAINFLTGPAVDTRTNTPAYKQTKVRMEVLEVDGENPMPKANPRNKKRHPQSGIEVHRKWARPGYVHLTDK

SEQ ID NO: 46275 - protein, 170 aa, Bacillus anthracis
MTTIDLNCNLGESFGAYKMGNDDEILPFVSSINVACGFHAGDPSVMRQTVKKAMQHNVAIGAHPGFPDLIGFGRRNMNVSANEVYDYVLYQIGALDAFVKAAGGKMQHVKPHGALYNMAATNPEIADAIAKAIYHMNSSLSLYGLANSEAFIQAAEKYNITLVQEAFADR

SEQ ID NO: 46276 - protein, 391 aa, Bacillus anthracis
  MISC_FEATURE (370)..(370): X=any amino acid
FKKASSIIETLKQQGHEAYFVGGSVRDLIIDRPIGDIDIATSALPEEVMAIFPRHVPVGLEHGTVIVVENGEPYEVTTFRTESEYEDFRRPSSVQFVRSLEEDLKRRDFTMNAIAMTEEGEMVDLFAGQEAIQKREIVTVGNAADRFQEDALRMMRGIRFVSTLGFSLETKTKQAIETYGHLLEHIAIERITVEFEKLLTGTYCVKGLKELVETKLFSHLPYLQMSEERLLKATQYNWDSFETDIEAWAFFLYCIGEEHPSVFLRQWKFSNKKIKDYRRSFINESVRERRKDGIQSFFIKREFHIAEMAERVYEAMIESYDHTSVERVQTLFQALPIKSRQEMDVTGNDLLNWASKKPGSWVAEMISKIXGAIVQGNVVNEKECIREWLQE

SEQ ID NO: 46277 - protein, 285 aa, Bacillus anthracis
MPLVSMKEMLNKALEGKYAVGQFNMNNLEWTQAILAAAEEEKSPVILGVSEGAARHMTGFKTVVAMVKALIEEMNITVPVAIHLDHGSSFEKCKEAIDAGFTSVMIDASHHPFEENVETTKKVVEYAHARNVSVEAELGTVGGQEDDVIAEGVIYADPAECKHLVEATGIDCLAPALGSVHGPYKGEPNLGFAEMEQVRDFTGVPLVLHGGTGIPTADIEKAISLGTSKINVNTENQIEFTKAVREVLNKDQEVYDPRKFIGPGRDAIKATVIGKIREFGSNGKA

SEQ ID NO: 46278 - protein, 448 aa, Bacillus anthracis
  MISC_FEATURE (51)..(51): X=any amino acid
  MISC_FEATURE (103)..(103): X=any amino acid
  MISC_FEATURE (127)..(127): X=any amino acid
  MISC_FEATURE (131)..(131): X=any amino acid
  MISC_FEATURE (159)..(159): X=any amino acid
  MISC_FEATURE (202)..(202): X=any amino acid
  MISC_FEATURE (234)..(234): X=any amino acid
  MISC_FEATURE (268)..(268): X=any amino acid
  MISC_FEATURE (292)..(292): X=any amino acid
  MISC_FEATURE (312)..(312): X=any amino acid
  MISC_FEATURE (437)..(437): X=any amino acid
RLDYSKALSFHRGNMEFTYFRDAGKVTHHAIPEKNGAGNDFLGWVDLRLQXDKGRFVRIQKCRRKKLKMPRTFYLVVGIGWSYPRTTCSIEIVNPSFLHSAIXRPTVKLPQVLFVGQNISSTYMKDXWDVXKGKDSSINVFSKSGTATEPALAFPYFPXLLEEKYEKEEARKRIYATTDKARGALKTLADNEGYVNIRYSEXCWRTFLVLTPDWFITNRSSGLNIEEMMQRCRXLVVMLRSIQVLEENPAYQYAVVRNALYNKGKTNXKCLLTYEPSTFNTFAEWWKTVIWXKVKEKIKKGIFPIFSKFLNXLTLIRSIRSRGRRDLFETVLKVGKSTHELTIESEENDLDGLNYLAGETVDFVNTKAYEGTLLAHSDGGVPNLIVNIPELNEYTFGYLVYFFEKACAMSGYLLGVNPFDQPGVEAYKKNMFAFPWXTPDLEELKARI

SEQ ID NO: 46279 - protein, 858 aa, Bacillus anthracis
  MISC_FEATURE (177)..(177): X=any amino acid
  MISC_FEATURE (197)..(197): X=any amino acid
  MISC_FEATURE (266)..(266): X=any amino acid
  MISC_FEATURE (267)..(267): X=any amino acid
  MISC_FEATURE (542)..(542): X=any amino acid
  MISC_FEATURE (574)..(574): X=any amino acid
  MISC_FEATURE (684)..(684): X=any amino acid
  MISC_FEATURE (688)..(688): X=any amino acid
  MISC_FEATURE (708)..(708): X=any amino acid
  MISC_FEATURE (756)..(756): X=any amino acid
  MISC_FEATURE (759)..(759): X=any amino acid
  MISC_FEATURE (770)..(770): X=any amino acid
  MISC_FEATURE (775)..(775): X=any amino acid
  MISC_FEATURE (776)..(776): X=any amino acid
  MISC_FEATURE (827)..(827): X=any amino acid
  MISC_FEATURE (834)..(834): X=any amino acid
  MISC_FEATURE (847)..(847): X=any amino acid
KEKVVNEMQEVKEMIDTLVNNGRKALQHFRKFTQEQMTTMFHEMALAGVDQHMPLAKLAVEETGRGVYEGKCIKNIYATEIYWHSIKKDKTVGIIHETLHENKIEFAEPVGVVAGVPPVTNPTSTTMFKALNSDKTRNPNYFRFHLSAQNCSVAAAKTVYDAAVKAGAPKHCIQWNXKAFVEATNHLWTLKGLPLFXQPGRAGMVKSAYSTGKPALGVGPGNVPCYIEKSAHIKRAVNDLILSKTFDNGMICASEQAIIVDKGNLXXCKTEMITNDCYFVTEEERRKLEKLVINENTCAVNSDIVGKSAQYIAEISGITVPKNTKMLVAGNTRHRSAYPLSREKLSPVLACVKANSLEEGFTYCEEMLNLGGLGHSAVIHSVNKEVQKQFGLRMKACRLIVNAPSSQGGISVTYIMDLFPSLTVWCAFLREKLGFKNVTGTHLLNIKRLANRKKNMQWFKLPPKIYFEKHATAYLANMPNISRAFIVTDPGMVEHGYVDTVAHYLRKHANDVKVEVFFEVEPDPSDETVFKGAEMMRCLSAXCHHRTWGGSAMDAAKGMWLFYEYPETTFYGNXTEVFRYKKTTCKYPELGSKAQFVAIPTTSWNRIRSDTICGITDKKNNIKYPLADYELTPDVAIVDPQICNDSKNHINSRTGMDVLTHAIEAYVSVLANDYTDGLALKGHXSRIXIFTKSIKDGHGWRSTRKKAXCFLQCQGWDFANASLGLITVLALKFGPEFPYSAWTCECYSYAARKSLXWYXSQKTCICSQIXALCGXXTLCTYARMARATSKFGGRRCRITRQAIIDLGKSLNINMSIAGQGVAKDPIXRRCWDYXQKRAFEDPMYTSXSEITSHFRAER

SEQ ID NO: 46280 - protein, 195 aa, Bacillus anthracis
MPALFLSGSMTTNYVLRKPWRWLTISKDMMINEQIRAREVRLVGANGDQLGIKSRNDALDLAANLNLDLVLVAPNAKPPVCRIMDYGKFRFEQQKKEKEQRKNQKVISMKEVRLSPTIDEHDFNTKLRNAIKFLEKGDKVKASIRFKGRAITHKEIGQRVLDRFSEACAEVSTIESKPKMEGRSMFLVLAPKNDK

SEQ ID NO: 46281 - protein, 652 aa, Bacillus anthracis
  MISC_FEATURE (299)..(299): X=any amino acid
  MISC_FEATURE (338)..(338): X=any amino acid
  MISC_FEATURE (354)..(354): X=any amino acid
  MISC_FEATURE (609)..(609): X=any amino acid
VHQRLISIFRGVFRREIDVKSSFFASRLHVSTKTIQKDIKLLNDILEENGAKIESQRGTGYELEIIQTKKFEEFWVSPFQKQNGKNPHFLMKKAIAYILQRILTTEGYVKLSQLAEDIYVSKSNCKFNYERMLQHICGRLINYKCGNRDQLLCVYRYCGRGGFHIRFLVYHNMVYRVMTILRFMSNLSRVIHMYRYLIYRFIRSVILKYIEGGTIYLSDIEIDNLVIHKGIALKRCEDQHYMKGLNEEQAELIIKKEYAIAKQIVGDLEKELHLSFPEEEVLYVTMHLLSTAVTSKIRXEKCGRTIRGKILYAFLRTIFFLKEAEGPESLFFIMMKNXYLGFGVHLKNVIKPRXKYKFNYENTFFWRSKKNYPYAFEIAVSRWGYNGEYTGESIPESEIGYIAIHFGGAMSRLQEQIQKKRCLLVCATGQGSAQLLKYKILSQFRDKLEIVVCYRLLSLKVEDLYKEKIDCIISTIHIPSGLPVPIIKVNSIFDDKEIKSIGQQLFTHVNNSVQQYMKEDLIFLNHSASTKEEVIQFLCEKAAEKNYVPEHFYDSVMERENTSPTAVGNLVAIPHPMQLLSAETFLMFCTLKKAVDWGDRKVQSYYFIXCKAAIIMRILQRLYDFLYDIMSSQSTIEKLTHAEGIEDFQEVL

SEQ ID NO: 46282 - protein, 206 aa, Bacillus anthracis
  MISC_FEATURE (39)..(39): X=any amino acid
  MISC_FEATURE (166)..(166): X=any amino acid
  MISC_FEATURE (170)..(170): X=any amino acid
MLKRYVFRIMMTCLLANCIMRTMECFHRSFFIRDVPEVXGNECKKKYMQQKLREMFAPSKEVINALEQANDWSKYRSIEMTATGYTSGIESTGKKPGHPEYGITYSGVKAKRDFISPISTADLGVFPNGTILFVPSYGLGCSADKGRCIKGNCLILYYDTGKRCLXQWGXEKSKVYVVKIGNGKFSEEELTMLNQDETIAVVSRTY

SEQ ID NO: 46283 - protein, 314 aa, Bacillus anthracis
MKRKLFILFTIMLVVLSIVGCSSQKEESKAKEQPKTKVVKHAKGEATIPVNPKRIVDLSGSTEELLLLGHKPVGTANTYKDKIQKHLTEKLDGVKAVGWYWAPKVDLEAVTALKPDLIILNNRQLKIYDQLEKVAPTVVLETNLEDWRGKFKEVGKLFDEEKKADKWIADYDKKADSLSKKIKEKTKDDSFMFVAVTPQNFRVYGSFGYGDIIFNDLKLPATKGTDLKQTMAQVSLEGLVAFQPDQMFIVNFGGEADKVYEDYKNSAVWKDNKAVKNNHVYEVSNEVFNTKAFNPIGKDMLIDEIAKEILAKNK

SEQ ID NO: 46284 - protein, 250 aa, Bacillus anthracis
MNALAGKTVLITRAQHQAKQMSVAVKEKSGIPLEIPLLRMEGMFHRQIQHIAGQLHSYDWVIFTSKNGVAFFLDCLGKKLPVTTKIAAVGVKTKLELEKRGYHVDFVPTSFVAEAFAEEFVKRLSGNERILFPKGNLAREVIPVALREIGVSLDELIVYGTKVNIEKKQELIAALKLGKVDIITFTSPSTVTSFVRLLEGTNWREWTKKCTIACIGPITEKEASLYFPHVIMPKEYTVEALLQCVCESIK

SEQ ID NO: 46285 - protein, 412 aa, Bacillus anthracis
MEKKRVVITGLGAVTPVGTDVETAWENIKKGVSGIGRLTRIDPELFPAKVAAEINDFEVEKYIDKKEARRMDRFTQYAVAAAKMAVADAKLEITEENGPRIGVWIGSGIGGMETYEEQFKIFTEKGPRRVSPFFVPMMIPDMAAGQVSIATGAKGINTCSVTACASGANSIGDAFKAIQRGDADAMITGGAEAPLTSMAFAGFSSAKALTFNEDPATACRPFDKNRSGFVMGEGSGILILEELEHALARGAHIYAEIAGYGATGDAFHITMPAPGGEGGVRAMRQALADAGLQPEDIDYINAHGTSTDANEKYETMAIKETFGEHAYKVAISSTKSMTGHLLGAAGAVEAIFSIKSITDGVIPPTINYETPDPECDLDYVPNNARHQEVNAVLSNSLGFGGHNAVLVFKSYK

SEQ ID NO: 46286 - protein, 288 aa, Bacillus anthracis
  MISC_FEATURE (43)..(43): X=any amino acid
  MISC_FEATURE (114)..(114): X=any amino acid
  MISC_FEATURE (280)..(280): X=any amino acid
YIRMKRKLFILFTIMLVGLSIVGCSSQKEESKAKEQPENKKLXNTLKGEATIPVNPKRIVDLSGSHRRNITFLDTNLVVRPILTKIKSQSIWKKKLKGSKSSKVGTGAPLKLIXKLGTALKPDLIILNNRQLKIYDQLEKVAPTVVLETNLEDWRGKFKEVGKLFDEEKKADKWIADYDKKADSLSKKIKEKTKDDSFMFVAVTPQNFRVYGSFGYGDIIFNDLKLPATKGTDLKQTMAQVSLEGLVAFQPDQMFIVNFGGEADKVYEDYKNSAVWKDKXAVKNNHVY

SEQ ID NO: 46287 - protein, 302 aa, Bacillus anthracis
MIIVAVMIPAAQWPFQRWLIESAVAPTPVSAIMHAGLVNAGGIMLTRFSPLFHDDIAQIILLIFSSISVLIGTGISLVQVDYKRQLVGSTIAQMGFMLIQCALGAYLAAVIHLILHGLFKATLFLQAGSSVQRVEVVKQSNKKMSNLWMIVGRVLGLFIAIAFWFITSGEGYQLVSALILGWSLYFSWKQLVVFGEGRMGRIAGLIVLIGFSLIYFTVHNSLYKWLHTDMYQSVQPSAPAVIFVICILLFSSVICTFVTRNQSSTLSAVLYLWSVRVGEARRKSVESHPSYLKHDVSKGGNS

SEQ ID NO: 46288 - protein, 558 aa, Bacillus anthracis
  MISC_FEATURE (127)..(127): X=any amino acid
  MISC_FEATURE (159)..(159): X=any amino acid
  MISC_FEATURE (241)..(241): X=any amino acid
  MISC_FEATURE (330)..(330): X=any amino acid
  MISC_FEATURE (400)..(400): X=any amino acid
  MISC_FEATURE (405)..(405): X=any amino acid
  MISC_FEATURE (498)..(498): X=any amino acid
  MISC_FEATURE (548)..(548): X=any amino acid
KMRSDMIKKGFDKAPHRSLLKATGLKDEDFDKPFIAICNSFIEIIPGHKHLNEFGKLVKEAVRAAGMVPFEFNPIEVDDGIAMGHIGMRYSLSKPKIIGESIKTGGNGPWVEGMNCLPNWNKFPPGXRRVALLITFPLVLVSGGPMPVEKPPKGNVVNXSPVFKEEGANHPGKFLKENLRGLENHACPIWGVLVLDRFTANSMNLLYGKGKVYPLPGNGRNFGYVFKNPENLINQAAEKIXNFYLERNFKPRDIVTEEAIDDAFALECSNGGSTNTSVAYLALAQEGWIRLDMNRIDAVFKTCTTLCKVKPCFQLHMEDMIRAAGISAIXKEMSRKEGGTSFRPYYCTGQTLRENIAHAEIKDKEVIHSLENPHSEEGGLRILKGNLAKDGAVIKSGGNXSKTIXRTLCIFNSQDEALAGIMLGKVKKGDVVVIRYEGPRGGPGMPENVSTNVSDCWMGLGADVALLTDGRFSGASRGYSVGHISPEAAAGRTIALLXTRGYRLYRVEERLLEVRVSDEELGKRKKEWKRPEPKVKTGWAWTLCTKWXHRRYRCSPKI

SEQ ID NO: 46289 - protein, 208 aa, Bacillus anthracis
MSDRQAALDMALKQIEKQFGKGSIMKLGEQAERKVSTVSSGSLALDVALGVGGYPRGRIIEIYGPESSGKTTVSLHAIAEVQRQGGQAAFIDAEHAMDPVYAQKLGVNIDELLLSQPDTGEQGLEIAEALVRSGAVDIIVIDSVAALVPKAEIEGDMGDSHVGLQARLMSQALRKLSGAINKSKTIAIFINQIREKVGVMFGNQLQVA

SEQ ID NO: 46290 - protein, 448 aa, Bacillus anthracis
MGKYFGTDGVRGVANKELTPELAFKIGRFGGYVLTKDTDRPKVIIGRDTRISGHMLEGALVAGLLSTGAEVMRLGVISTPGVAYLTKALDAQAGVMISASHNPVQDNGIKFFGSDGFKLTDEQEAEIEALLDKEVDELPRPTGTNLGQVSDYFEGGQKYLQYIKQTVEEDFSGLHIALDCAHGATSSLAPYLFADLEADISTMGTSPNGMNINDGVGSTHPEVLAELVKEKGADIGLAFDGDGDRLIAVDEKGNIVDGDQIMFICAKYMKETGQLKHNTVVSTVMSNLGFYKALEANGITSDKTAVGDRYVMEEMKRGGYNLGGEQSGHIILLDYITTGDGMLSALQLVNIMKMTKKPLSELAGEMTKFPQLLVNVRVTDKKLALENEKIKEIIRVVEEEMNGDGRILVRPSGTEPLIRVMAEAPTQEVCDAYVHRIVEVVKAEVGAE

SEQ ID NO: 46291 - protein, 122 aa, Bacillus anthracis
MIQQESRLKVADNSGARELLTIKVLGGSGRKYANIGDIIVATVKQATPGGVVKKGDVVKAVVVRTKSGARRPDGSYIKFDENAAVIIKDDKSPRGTRIFGPVARELRDSNFMKIVSLAPEVL

SEQ ID NO: 46292 - protein, 432 aa, Bacillus anthracis
MDTRFTICSKVRKKKGSLFVKQVKFIHAADLHLDSPFKGMEMNVPQSVWERMKQSTFESFERIIDKAIQERVDFVLLAGDLYDAETRSLRAQVFVREQMKRLSQYDIPVFIIHGNHDHLGGSWAAIEFPENVHVFTEPYVEEKSFYKNGELLASIYGFSYLQQAVTDNMTAQYTKMSDAPFHIGMLHGSVEGDAEHNRYAPFQIRELKEKQFDYWALGHIHKREILLEEPYIIYPGNIQGRHRKETGEKGAYLIELTKQGSHCSFFHTADVVWDEIEVNIDGLETVDELMTSVSTAMNECRREEEGTQLTVVFTGQGPLSPYLRDEKRVEEIFHILAAGEERKDFVYTMKWKNETVSFAEIERLKEENHFVGSVLKELEAFTNMDGVLRSIWTSPIARNSIESFTEEEKKEIQKEAENIILEQLFQQERDKK

SEQ ID NO: 46293 - protein, 246 aa, Bacillus anthracis
MLKVLVVDDEMLARDELKYLLERTKEVEIIGEADCVEDALEELMKNKPDIVFLDIQLSDDNGFEIANILKKMKNPPAIVFATAYDQYALQAFEVDALDYILKPFDEERIVQTLKKYKKQKQSQIEMKQEIKGADVTAEMHKLALPIEESIVLVNIEDIVYVGLVDGKVTVKTVRETYVTHDTLVILEKKLPQASFMRVHRSFIANINHITEIQPWFNSTYNLIMKEGSKVPVSRTYAKELKKLLRI

SEQ ID NO: 46294 - protein, 190 aa, Bacillus anthracis
MPTVGLNTTSTNHIPLQAGAQTKNASVTGAQSTAQQANGVSASTQKTPGIMDKDDFLKLFLASFQHQDPFNAMDMNQMMNQTAQLSLMEQVQNMTKAVDKLQSTMYSTALDGGMKFLGKYVRGVSNNGKQVTGQVETVRLAENNDVQLIVDNQVVSLRFIERVSDKPITETNPEDEKKDDIEKNEEVKPD

SEQ ID NO: 46295 - protein, 1433 aa, Bacillus anthracis
MSLTNEQKERFQILLQQLQIPDDLINQYLQGGGIERLVIDKANKSWHFNLQVPRILPTELYELLETKLKQSFSHIARTTFALETENKQFTEEEVRAYWPLCTERITFSPMFAYLKKQLPQVNGVKLLINVNNELESTALKKNVAKPVGDQYEAFGFPRFQLDTHIQQNTEEMQKFREQTQQEDRERVIQAMEEMAKKQAEESSVVHEGPITLGYLIKPDEEITPMREIQDEERRKTVQGYVFHVETKELRSGRTLLTLKITDYTDSIMIKMFSRDKEDIPMLQSLKKGMWVKARGSVQNDTFVRDLVMIANDINEITGPSRKDKAPEGEKRVELHLHTPMSQMDAVTPVSKLVAQAGKWGHEAIAVTDHAVAQSFPEAYSAGKKAGVKVIYGVEANLVNDGVPIAYNEEHRLLADETYVVFDVETTGLSAVYDTVIELAAVKVKGGEIIDRFESFANPHQPLSATIIELTGITDDMLTDAPEVDEVFKKFEEWMGDHTLVAHNASFDMGFINVGFKKAGLEKTKNPVIDTLELARFLFPEMKNHRLNTLCKKMDIELTQHHRAIYDTEATGYLLVKMLKDVIEKGFEYHDQLNDSMGQGDAYKRGRPSHMTLLATSDVGLKNLYKLVSYSHLNYFYRVPRVPRSLLKKYREGILVGTACDKGEVFEAMMQKAPEEVEEIAQFYDYIEVMPPEVLRHLVERELVRDEGQLKTIISNLVKLGETLDKPVVATGNVHYLDPEDAMYRKILVSSQGGANPLNRHSLPPVHFRTTDEMLECFSFLGEDVAKEIVVTNTQKIASLIGDVHPVKDDLYTPKIEGADDETRDMSYKMARSIYGEELPEIVEARLEKELKSIIGHGFAVIYLISHKLVKKSLVDGYLVGSRGSVGSSFVATMMEITEVNPLPPHYVCPKCKQSEFFNDGSVGSGFDLPDKECPTCNIPYVKDGHDIPFETFLGFKGDKVPDIDLNFSGEYQPRAHNYTKVLFGEDYVYRAGTIGTVAEKTAYGYVKGYANDHNLTIRNAEIDRLVAGCTGVKRTTGQHPGGIIVVPDYMDIFDFSPIQYPADSIGAEWRTTHFDFHSIHDNLLKLDILGHDDPTVIRMLQDLSGIDPKTIPTDDPEVMKIFSGPESLGVTEEQINCKTGTLGIPEFGTKFVRQMLEETKPTTFSELVQISGLSHGTDVWLGNANELIYNGTCTLSEVIGCRDDIMVYLIYQGLDPSLAFKIMESVRKGKGVPEEWEEDMKSNNVPGWYIDSCKKIKYMFPKAHAAAYVLMAVRIAYFKVHFALLFYAAYFTVRADDFDVEAMAKGSASIRARIDEIAQKGLDAAPKEKSLLTVLEMTLEMCERGYSFQKVDLYRSHATDFIIDGDSLIPPFNAVPGLGTNAALSIVEARKNGEFLSKEDLQQRSKVSKTIIEYLDSQGCLGDLPDQNQLSLF

SEQ ID NO: 46296 - protein, 449 aa, Bacillus anthracis
MSDVLLLSRFQFAITIFYHFLFVPLTIGLVILVACMETQYARTLNPTYRKMANFWGKLFTINFVMGIITGITMEFQFGTNWSEYSKYMGDIFGSPLAIEALVAFFLESTFMGIWLFGKDKISPKFRAFCMWMVALGTNISALWIITANGFMQNPVGYVVRNGRAELNDFWALVTNPYAWNMFFHTVIGCYIVGAFFVMAISAYHLLRKNEVEFFKKSFKFGLMLGLFAATITPFIGHQSGVSAAKYQPAKGAAMEAVWETGKGQGFSIVQIPDVKNEKNFEFLTIPKLGSFFYTNSFDGEIVGLKDIPKEDRPNVNLVYYSFRLMVALGMFFMALTWYGFYLNRKGKLENSKRYLKITIWSVLLPYIAINAGWIVAEVGRQPWTVYKLMRTAESVSPISVPQIWFSLISLILFYTLLLIADVYLMLKFAKKGPAALEEPATKGGVAHVS

SEQ ID NO: 46297 - protein, 297 aa, Bacillus anthracis
  MISC_FEATURE (167)..(167): X=any amino acid
  MISC_FEATURE (175)..(175): X=any amino acid
  MISC_FEATURE (221)..(221): X=any amino acid
EGNGGKIIGKDLGFQHSRGEIMFTLDADTIMAQDAISSMVRHLKDQNVAAVQGNVKVGIRRTCLSTWQHVKYIPGFKFRRRAFDELNCIPVVPGAIGAWRKKNVVESGYLSEDTLAEDTDLTITFLRQGHRIVYEEKAYAFTESPEDVKSLIKQRYRWSYGTLQCLXKHRKGVMXSKHKTLGFIALPNMWLSQYVLQFIAPFADILMIIGLFSSDPLKSFXDFIFVFFLMDLLASLFAFKLEEENPKPLVWLILQRFIYRQFMTYVVVKSIFSSIRGVAVGWNKLKRVGKCRTFYGT

SEQ ID NO: 46298 - protein, 145 aa, Bacillus anthracis
MRNLFPEITKRQNGIFDFGPSLLEGMTDAFFKPMNMDIFKVDVHEQSDKYTVKADLPGFQKENIQVEFEQDVLTIQATNHNEVEEKNENGTYIRKERSIGSVTRRFSFKQVEEENVRANYKDGVLTIELPKLKEEKNSKTTINIE

SEQ ID NO: 46299 - protein, 77 aa, Bacillus anthracis
MSIPSILRKETLKKKDKNIDLQENNINDLVVSASRVIAPLWPISTFAAHHPWMGLEKQSFEQVANWLKEARNVDIYQ

SEQ ID NO: 46300 - protein, 194 aa, Bacillus anthracis
TKQKVIDAAISLFNTKGYDGTSVRDIAKRADVNVANISYYFAGKQGLLEQLITDFLEGYIHVIETSFEQREYLSAKDVMVQMVRGILRYQFENRELTRFFYRELSLDTTLIREVMTVYFSKERYYIEQMIRQGQMKQEFKKVSFTMFMTQLKGMMNMPFLYPQYISEVLHSFPSETFFLEMYTKEIEQWMEQTL

SEQ ID NO: 46301 - protein, 137 aa, Bacillus anthracis
MRILGLDVGTKTVGVAISDEMGWTAQGLETIKINEERGQFGFDRISELVKQYDVDKIVVGLPKNMNGTIGPRGEACQQFAENLRELLQLDVVMWDERLSTMAAERLLISADVSRKKRKQVIDKMAAVVILQGFLDSK

SEQ ID NO: 46302 - protein, 399 aa, Bacillus anthracis
MTKKRHLFTSESVTEGHPDKICDQISDSILDAILSKDANARVACETTVTTGLVLVAGEITTSTYVDIPKIVRETIQGIGYTRAKYGFDAETCAVLTSIDEQSADIAMGVDQALEAREGQMTDAEIEAIGAGDQGLMFGFACNETQELMPLPISLAHKLARRLTEVRKNDTLSYLRPDGKTQVTVEYDENGKPVRVDTIVISTQHHPDVTWEEIDRDLKEHVIKAVVPAELIDGETKFFINPTGRFVIGGPQGDAGLTGRKIIVDTYGGYARHGGGAFSGKDATKVDRSAAYAARYVAKNIVAAGLAEKAEVQLAYAIGVAQPVSISVDTFGTGKVSEDVLVELVRNNFDLRPAGIIKMLDLRRPIYKQTAAYGHFGRTDVDLSWERTDKAAALKEQAGL

SEQ ID NO: 46303 - protein, 214 aa, Bacillus anthracis
MIVEEIMNQDVVTLRPNDTIETAIRTIRTKGIRHIPIVDQNNHVVGIISDRDVRDASPSILDEQVSLDMLKQPLELIMKHPVMTCHPLDFVEEIATLFFENKIGCLPVTKAGKLVGIISESTVLHTLVKLTGAHQPSSQIEIQVKNEPGILGKVVAIFSELQINIVSVLVYPAKDENDKVLVFRIQTMNPLKVIDALEAEGYRVLWPNIMGMQA

SEQ ID NO: 46304 - protein, 505 aa, Bacillus anthracis
IIVLDFGSQYNQLIARRIREFGVYSELHPHTITAEEIKAMNPKGIIFSGGPNSVYGEGALHCDEKIFDLGLPIFGICYGMQLMTQQFGGTVERANHREYGKAVLKVENESKLYANLPEEQVVWMSHGDLVTGLPEGFVVDATSESCPIAGMSNEAKNLYGVQFHPEVRHSEHGNDLIKNFVFGVCGCSEGWNMENFIEVELEKIRETVGDKKVLCALSGGVDSSVVAVLIHKAIGDQLTCIFVDHGLLRKGEAEGVMKTFSEGFHMNVIKVDAKERFMNKLKGVEDPEQKRKIIGNEFIYVFDDEASKLEGMDFLAQGTLYTDIVESGTATAQTIKSHHNVGGLPEDMQFKLIEPLNTLFKDEVRVLGSELGIPDEIVWRQPFPSPGLGIRVLGEITEEKLEIVRESDAILREEIIKAGLDREIWQYFTALPGMRSVGVMGDERTYDYTVGIRAVTSIDGMTADWARIPWDVLEKISVRIVNEVKHVNRIVYDVTSKPPATIEWE

SEQ ID NO: 46305 - protein, 293 aa, Bacillus anthracis
  MISC_FEATURE (58)..(58): X=any amino acid
  MISC_FEATURE (219)..(219): X=any amino acid
LENLSTDLSHGRGMNLDEMNIIEVSAKMNEEDSNCALAVEKRDEHIEKVVRVVIQSFXRRGPINYIGAGTSGRLCILDAMECPPTFCTDDKMVPGFIAGGIESVYKAVEGAEDREELAEEDLKSIGLNEKDTVIGIAASGRTPYVIGGLKYANSVGASTASISCNKNAEISKYAKLNVEVETGAEILTGSTRLKAGTAQKLVLNMISTASMDWWLESIXNLMVDVQSTNEKLVERSKRIIVEATGVSYEVAAEHYEKAERNVKAAIVMVLLQCEYGEALEKLKQAKGFVKKAL

SEQ ID NO: 46306 - protein, 405 aa, Bacillus anthracis
  MISC_FEATURE (225)..(225): X=any amino acid
  MISC_FEATURE (258)..(258): X=any amino acid
  MISC_FEATURE (264)..(264): X=any amino acid
METIVQKFGGTSVGSVERIQHVANLIIEEYERGHSIVSVVSAMGKSTDELVALANAITENPSKREMDMLLSTGEQVTISLLTMALQAKGYNAISLTGWQAGITTESVHSSARITEINTDRIQSYLTKGTIVIVAGFQGVSEDLEITTLWRGGSDTTAVALAAALNAKKCDIYTDVTGVYTTDPRVVKDAYKLDEISYDEMLELANRRGLVLYHPRCVVEFAKKSXCPFKKVRSSMGNQKMGTIGKRENVTMEQQSIRXKGLAFXRKYSPPSHGKGLEQGSLSTVFSTLAAAHINVDIIIQSITNEGTVHLSFSIHSNDLRETLAVLEQNQEALHYESVEYENHLAKVSIVGSGMVSNPGVAANMFTTLKEEDIHIKMVSTSEIKVSVVIDRLHLVTGVEALHQSF

SEQ ID NO: 46307 - protein, 319 aa, Bacillus anthracis
MATTKPYRVLLYYMYTTIENPEEFAAEHLEFCNSLELKGRILVAKEGINGTCSGTVEQTEKYMEAMNNDPRFDGIVFKIDEADGHAFKKMHVRPRPELVTLRLEDDINPHEITGKYLEPKDFYEAMKQEDTVIIDARNDYEFDLGHFKGAIKPDIESFRELPDWIRENKEVLEGKKILTYCTGGIRCEKFSGWLVREGYEDVSQLHGGIVTYGKDPEVQGELWDGQCYVFDERIAVPVNQKEHVIVGKDHFTGEPCERYVNCANPECNKKILCSEENEAKYLRACSHECRVSPRNRYVIQHELTEEQVAAALEKIEAGK

SEQ ID NO: 46308 - protein, 106 aa, Bacillus anthracis
MADMQTPFALILHGGNARSIALEAIAFARQGDFENASEKMTLASEEISAAHRIQTDLIQEEARGNHAEISLLLVHAQDHLMNAITVKELAEEFITLHKRMEEKVIA

SEQ ID NO: 46309 - protein, 300 aa, Bacillus anthracis
MQKLIVFAIIGFSAQLIDGALGMAYGVTSTSLLLMFGIAPAVASASVHLAEVVTTAASGASHLKFGNVDKYTVSRLTLPGAIGAFVGACFLSNLPGDVIKPYISLFLFTLGVYILLRFIIQKQIVTSNKRMSAKQLVPLGLFAGFVDSTGGGGWGPITTPVLLARGNEARKVIGSVDTSEFPVALAATIGFFISLGWEQVSWFWVFALMLGGIVAAPIAAWLVRIVPSHLLGVLVGGLIIFTNIRTLLTTFKVDPTIISLSYVAVGLVVIISIFIAVRNHSNRSNASTAQYPNDQKQMLP

SEQ ID NO: 46310 - protein, 287 aa, Bacillus anthracis
  MISC_FEATURE (170)..(170): X=any amino acid
EKGVPKNTVVSYERDLKSYVKYLQKVEQAKSFHEVTRLHIVNFLQHLKENGKSSKTLTRHIASIRSVHQFLLRERAVKHESSVHNETRQGEPNYPKYLSFDEKKGLPPTPKKNKGFGGLDKTRLKFLFSKGTSRFPNIIALKLKKGTFNQGEFVPLPRGKGNKEKIIPPXNFSDRNGFQRIFEKGKKKLLGKKKVKCHPFLTIHGNRLSRQGFWKILKRLAKEANIEKELTPHTLRHSFATHLLENGADLRAVQEMLGHADISTTQIYTHVSKTRLKDVYKQFHPRA

SEQ ID NO: 46311 - protein, 349 aa, Bacillus anthracis
  MISC_FEATURE (44)..(44): X=any amino acid
MNREELFDVTVIGGGPAGLYSAFYSGLREMKTKIIEFQPQLGGXIHVYPEKMIWDIGGLLPVTGEKLIEQLVQQGLTFQPEVVLNTKIESIIRNKDGIFTLKTSTGEEHFSKTVIVATGSGILNPQKLSIEGAERFEVSNLNYTVKSLKRFKNKTVIISGGGNSAIDWANELEPIAKKVYLTYRKEELSGHEAQVKQLMNSSAECFFNTSITTLIAGDNHEAIEYVELTNHETGEVSQLAIDEVIINHGYERDITLLENSELDVAIIDNYYIAGNANSESSVDGLYAAGDILKHEGKLHLIAGAFQDAGNAVNKAKQFIQPDASEYGMVSSHNEVFKKRNRELIKQMMK

SEQ ID NO: 46312 - protein, 365 aa, Bacillus anthracis
MTENHYLLLTPGPLTTTKTVKEVMLYDWCTWDVEYNTMVQKVRAKLVSLATKEEEKYTTVLMQGSGTFSVEAVIGSVIPKNGKLLVCTNGAYGKRIVQMAEMLHIDVVVSQTEEWEPTNIVEVEKILQQDKEITHIAVVHCETTTGIINPIVDVCKLGKQYGKVTLVDAMSSFGGIEIDIAELQIDFLISSANKCIQGVPGFGFVIAQRDELLKCKGQARSLSLDLYDQWETMENQNGKWRFTSPTHVVHAFYQALLELEKEGGVRARYNRYYNNQKLLVNRMGEIGFKPLVNEKYQSPIITSFIYPEGNFEFQQLYNELKRYGFVIYPGKISKVDTFRIGNIGDVHEEDINRLVDSIAKGVVIG

SEQ ID NO: 46313 - protein, 250 aa, Bacillus anthracis
MEEVLHIKNVSKVYEGKVPHTALKNINLHVDKGEFVAIMGPSGSGKSTFLNVISTIDSPTSGEVVINGKKPHTFRREKLAVFRRQELGFVFQNFNLLDTLTIGENIVLPLTLDNVPLKEMDKKLDSISTKLGIDHILNKRIFEVSGGQAQRTAVARAVIHHPSLLLADEPTGNLDSKAAIDVMELFTKLNKEEDATILMVTHDPFAASYCNRVIFIKDGELYNELHRGLYREKFYQEILDVLALLGGRRG

SEQ ID NO: 46314 - protein, 345 aa, Bacillus anthracis
  MISC_FEATURE (6)..(6): X=any amino acid
MAFEGXADRLQQTMQKIRGKGKVSEADVKEMMREVRLALLEADVNFKVVKDFVKRVSERAVGQDVMKSLTPGQQVIKVVQEELTELMGGEQSKIAIANKPPTVIMMVGLQGAGKTTTTGKLANLLRKKHNRKPMLVAADIYRPAAIKQLETLGKQLDMPVFSLGDQVSPVEIAKQAIAKAKEDHHDYVLIDTAGHLHIDEELMDELAKVKEVAKPDEIFLVVDAMTGQDAVNVAQSFHEQLGLTGVVLTKLDGDTRGGAALSIKAVTNTPIKFAGMGEKLDALEAFHPERMASRILGMGDVLTLIEKAQATVDEEKAKELEQKMRTLSFTLDDFLEQLGQVRQLG

SEQ ID NO: 46315 - protein, 115 aa, Bacillus anthracis
  MISC_FEATURE (74)..(74): X=any amino acid
RKNIRIKKNDEFQTVFQKGKSGENRQFVVYQLDKEEQPNFRIGLSVSKKIGNAVVRNRIKRMIRQSITELKDRXNSGKDFVIIARKPCAEMTYEELKKSLIHVFKRSGMKRIKSS

SEQ ID NO: 46316 - protein, 699 aa, Bacillus anthracis
MEGARHQMAREFSLENTRNIGIMAHIDAGKTTATERILYYTGRIHKIGETHEGASQMDWMEQEQERGITITSAATTAQWKGHRVNIIDTPGHVDFTVEVERSLRVLDGAVAVLDAQSGVEPQTETVWRQATTYGVPRIVFVNKMDKIGADFLYSVGTIHDRLQANAHPIQLPIGAEDEFNGIIDLVEECAYMYGNDLGTDIQRVEIPEEHKELAEEYRGKLIEAVAELDEEMMMKYLEGEEITVEELKAGIRKATTSVEFFPVICGSAFKNKGVQILLDAVIDYLPSPLDVPAIKGIVPDTDEEVERKSSDEEPFAALAFKIMTDPYVGKLTFFRVYSGVLNSGSYVKNSTKGKRERVGRILQMHANSREEISTVYAGDIAAAVGLKDTTTGDTLCDEKSLVILESMEFPEPVISVAIEPKSKADQDKMGTALSKLSEEDPTFRAHTDQETGQTIIAGMGELHLDIIVDRMRREFKVEANVGAPQVAYRETFRAAAKVEGKFARQSGGRGQFGHVWIEFEPNEEGKGFEFENKIVGGVVPREYIPAVGAGLEDALKNGVLAGYPVVDIKAALVDGSYHDVDSSEMAFKIAASMALKAAVSKCNPVILEPMMKVEVVIPEEYMGDIMGDVTSRRGRVEGMEARGNAQVVRAMVPLSEMFGYATSLRSNTQGRGTFSMVFDHYEEVPKSVSEEIIKKNKGE

SEQ ID NO: 46317 - protein, 114 aa, Bacillus anthracis; identical to SEQ ID NO: 45339

SEQ ID NO: 46318 - protein, 132 aa, Bacillus anthracis
MSKQPMTPFEAIGGEQCIEILVDTFYSYVSKHPDLSPIFPDDLTETARKQKQFLTQYLGGPNLYTEEHGHPMLRARHLPFEITPKRAEAWLSCMEQAMDDTGVHGHIREFVFERLALTAQHMVNTPNETGEI

SEQ ID NO: 46319 - protein, 379 aa, Bacillus anthracis
LFAVQQRMDAMSVWEANANAKSLLTKLGITDFTATVGNLSGGQKKRIAMAQCFIETPDLLILDEPTNHLDHETVEWLEEYLARYTGAVLLVTHDRYFLDRGTERIFELDNGKLYSYEGNYSTFLEAKAFREEQELAQESKRQNLYRRELAWIRRGAKARSTKQKARIQRFEELKGQEGPAAKQSVDIALSGSRLGKKVLELKDVTKKFGDKTVLNNFNHIVKPGDRIGIMGPSGSGKTTLLNLLATIDKQTSGHVLVNGEEINQMRAAKLAEFRRTHLGFIFQDFNLLDTLSIKENIILPLVMAKKSVNEIDAKVLEIAKFLNIEEILNKKVYEVSGGQQQRAAAARAIIHEPTLILADEPTGNLDSKSAKSLMSALQD

SEQ ID NO: 46320 - protein, 391 aa, Bacillus anthracis
GVIKPNHVTQESLNASVRSYYDNWKKKYLKNDLSSLPGGYYVKGEITGDADGFKPLGTSEGQGYGMIITVLMAGYDSNAQKIYDGLFKTARTFKSSQNPNLMGWVVADSKKAQGHFDSATDGDLDIAYSLLLAHKQWGSNGAVNYLKEAQDMITKGIKASNVTNNSRLNLGDWDSKSSLDTRPSDWMMSHLRAFYEFTGDKTWLTVINNLYDVYTQFSNKYSPNTGLISDFVVKNPPQPAPKGFLNESEYTNVYYYNASRVPLRIVMDYAMYGEKRSKVISDKVSSWIQNKTNGNPSKIVDGYQLNGSNIGNYPTAVFVSPFIAASITNSNNQKWVNSGWDWMKNKRESYFSDSYNLLTMLFITGNWWKPIPDNKKTQNQINDAIYEGYDN

SEQ ID NO: 46321 - protein, 262 aa, Bacillus anthracis
  MISC_FEATURE (6)..(6): X=any amino acid
  MISC_FEATURE (59)..(59): X=any amino acid
  MISC_FEATURE (82)..(82): X=any amino acid
  MISC_FEATURE (84)..(84): X=any amino acid
  MISC_FEATURE (87)..(87): X=any amino acid
  MISC_FEATURE (89)..(89): X=any amino acid
  MISC_FEATURE (107)..(107): X=any amino acid
  MISC_FEATURE (227)..(227): X=any amino acid
  MISC_FEATURE (229)..(229): X=any amino acid
  MISC_FEATURE (250)..(250): X=any amino acid
  MISC_FEATURE (253)..(253): X=any amino acid
LQFLGXLPCGGKDNDEKKLVVGASNVPHAEILEKAKPLLEKKGIELEVKNLQDYVVPKXSLADKDLDANYFQHIRYLEKEIXDXKFXFXITRKNSFKPIGGFSPKYXNLKNLPNGPPLILSISFADHGRGLAILQKEGILKIKDGVDPVKATPKDIADNPKNLKFKTVKSALGLLPQVFIHKEGDAVLINSNYGIHTKVNSPKKMQMPLESNDSPYPQPINCFKRGXRXKRIKELVEVLHSKEIEDFIKXRIXRGQLFPVKE

SEQ ID NO: 46322 - protein, 508 aa, Bacillus anthracis
  MISC_FEATURE (11)..(11): X=any amino acid
  MISC_FEATURE (14)..(14): X=any amino acid
  MISC_FEATURE (291)..(291): X=any amino acid
  MISC_FEATURE (349)..(349): X=any amino acid
  MISC_FEATURE (488)..(488): X=any amino acid
  MISC_FEATURE (506)..(506): X=any amino acid
LHYIFKGVIQXVNXAVNLHEKVEKFLQGTKKLYVNGSFIESASGKTFNTPNPATGETLAVVSEAGREDIHKAVVAARMAFDEGPWSRMSTAERSRLMYKLADLMEEHKEELAQLETLDNGKPIRETMAADIPLAIEHMRYYAGWATKIVGQTIPVSGDFFNYTRHEAVGVVGQIIPWNFPLLMAMWKMGAALATRCTNVFKPAEQTPLSALYLAELIEETGFPKSGINIAPGFGESAGTALGNHPLADKNAFYPSTPVGRKIMRQASESLERGYFYNMVGKSPNTIFPDAXFYLRQSRVALSGGLWFNQGQVCSAGSRLFVPKKMYDNVMADLVLYSKKLNQGVGLDPXNDNWSSRFEEQQKRVMGYIEKGIEEGAEVLCGGNNPFDQGYFISPTVFADVNDEMTIPKEKIFRPVNSCHTFFTKLMEVFDRANKSQFGLAAGVWTENVKTAHYVASKVRAGTVWVNCYNVFDTASPFGGFKQYRSRPXNGSYALNNYTEVKSVWAXLK

SEQ ID NO: 46323 - protein, 96 aa, Bacillus anthracis
MSRISVENVKHVAHLARLAITDQEAEKFQKQLDAIVTFAEQLNELDTTDVKPTTHVLTMKNVMREDVPEKGLPVEEVLKNAPDHKDNQIRVPAVLE

SEQ ID NO: 46324 - protein, 349 aa, Bacillus anthracis
MAHHAKETMELIKELVSIPSPSGNTEKIIRFIENYVSEWNVETKRNNKGALILTVKGKNDAQHRLLTAHVDTLGAMVKEIKPDGRLSLSMIGGFRWNSVEGEYCEIETSSGKTYTGTILMHQTSVHVYKDAGEAKRDEKNIEVRIDERVFSADEVRELGIEVGDFVSFDPRVQITESGYIKSRHLDDKVSVAILLKLIKRLQDENVTLPYTTHFLISNNEEIGYGGNSNIPEETVEYLAVDMGALGDGQASDEYTVSICAKDSSGPYHYALRKHLVELAKTNNIEYKVDIYPYYGSDASAAIRAGFDVKHALIGAGIDSSHAFERTHESSIAHTEALVYAYVLSEMIAE

SEQ ID NO: 46325 - protein, 363 aa, Bacillus anthracis
MKKTPDFILIIVTLALLTIGMIMVYSASAVWASYKMGDSFFFAKRQLLFAGLGVVAMFFIMKIDYWVWRTYSKVILLVCFILLILVLIPGVGLVRGGARSWIGIGAFSIQPSEFMKFAMIIFLAKFLAERQKLITSFKRGLLPALGFVFLAFGMIMLQPDLGTGTVMVGTCIIMIFISGARVFHFAMFGLLGVAGFVGLIASAPYRMKRITSYLDPWSDPLGSGFQIIQSLLAIGPGGLFGLGLGQSRQKFLYLPEPQTDFIFAILSEELGFIGGSFVLLLFSLLLWRGIRIALGAPDLYGTFLAVGIVAMIAIQVMINVGVVTGLMPVTGITLPFLSYGGSSLTLMLMAVGVLLNISRHSRY

SEQ ID NO: 46326 - protein, 342 aa, Bacillus anthracis
  MISC_FEATURE (109)..(109): X=any amino acid
  MISC_FEATURE (183)..(183): X=any amino acid
  MISC_FEATURE (229)..(229): X=any amino acid
  MISC_FEATURE (243)..(243): X=any amino acid
  MISC_FEATURE (284)..(284): X=any amino acid
MRSWIQNTKKLLPDLLPVMQTRMQIPQYIRAFQPNWKRNLFSSLGMTERVLRSEKSVFERQNLVSRRFFWMTLTEEGTALILALEDFIKKIPGLTGFKHALWEHLNLVXSFRCPWDSDESPWVKLEMGRACVTCIKDRLTANNIVAVAGGTTLAAVADMMQLDCQDLHMLFVPARGGIGRKGXIKSQYHLCPNGRKTMSNYRLLYVPDHVSSEAYASIVTEPSVKEVLXVIRSSHIVIPWNKXCVNNGPPQKYFTSRLVKIHASESSWRKLSVITLMNKEMWSXRSNGGDANLRIYQMYLTLVAPAWRVFQRAKAIQAVIKQGHTSILITDEGERKTVNKGY

SEQ ID NO: 46327 - protein, 486 aa, Bacillus anthracis
MSGIITILGLGAGELDQLTMGVYRKIKEADHMFVRTKEHPVIEELEKEGIQYTAFDNVYEAHDTFEIVYETIANTLIEKAEGTEIIYAVPGHPLVAERTVQLLLEKGEVANIEVRIEGGQSFLDPMFASLKIDPIEGFQLIDATSFERGQLELRQHLIFCQVYDAFVASDVKLTLMEMLPDDYEVYIVTAAGTSFEQVKKVPLYMLDHETELNNLTSVYVPPVQERASLYQQFDVLREIIADLRGPNGCPWDKKQTHQSLKKYLIEEAYEVLEAIDEEDDDHLVEELGDILLQVMLHAQIGEDEGWFSIDDIIRTLSEKMVRRHPHVFGNTDVDNADEVIANWEEIKKQEKGFVKESVLDGVPKSLPQLLRAYEIQKKAGKVGFDWVDVQPMIEKALEEWQEFQQEVTNMDEAKMLSEFGDLLFAFVNIARHYKIDPEEALHSTNEKFVGRFLYMEAKVAEMNKEMQDLSLEQLDVLWEEAKQTER

SEQ ID NO: 46328 - protein, 420 aa, Bacillus anthracis
  MISC_FEATURE (371)..(371): X=any amino acid
VHILVVSVNYRTAPVEFREKLTFQAAELERAMTTLQNQKSVLENVIVSTCNRTEIYAVVDQLHTGRYYIKKFLADWFQLEIEEVAPYLTIFETDGAIDHLFRVTCGLDSMGSGETQFLGQIKDSFLEAQQVKATGTIFNELFKQVITLAKRAHSETTIGESAMSVSYAAVELGKKIFGELTDCHVLILGAGKMGELALQNLYGSGARKVTVMNRTLSKAEIMAEKYMGHAKPLSELQCALLEADILISSTGASDYVITKEMMTKVEKMRSGRPLFMVDIAVPRDIDPAIDELEGSFLYDIDDLQGVVEANRAERLKEAEKIQFMIEEEIVLFKTWLSTLGVVPLISALRDKALAKKSENMESLERKIPNSXDRERKVISKHTKSIINQLLKDPILVAKEIAAEEGADEKLALFAKIFDLE

SEQ ID NO: 46329 - protein, 87 aa, Bacillus anthracis
MEKIFKVTSDSGIHARPATLLVNTASKFGSDINLEYNGKNVNLKSIMGVMSLGIHQNAEIKITANGDDAAQALAAIEETMKTKGLGE

SEQ ID NO: 46330 - protein, 647 aa, Bacillus anthracis
  MISC_FEATURE (280)..(280): X=any amino acid
  MISC_FEATURE (359)..(359): X=any amino acid
  MISC_FEATURE (416)..(416): X=any amino acid
  MISC_FEATURE (458)..(458): X=any amino acid
  MISC_FEATURE (471)..(471): X=any amino acid
  MISC_FEATURE (493)..(493): X=any amino acid
  MISC_FEATURE (537)..(537): X=any amino acid
  MISC_FEATURE (638)..(638): X=any amino acid
  MISC_FEATURE (641)..(641): X=any amino acid
  MISC_FEATURE (643)..(643): X=any amino acid
KLDEFFVTGDPIIYGADASIVLVTLAIIFVLTKYKKWNMLWDEWLTTVDHKKIGAMYIISAVIMLFRGWYDGLMIRAQLTFPETTYLNAEHYNGIFTTHGTVMILFMAMPFVMGLMNLVVPLQIGCSVTSAYPLLKALSFWLFFVGAMLFHIAFVIGGSPDAGWTSYFPNGRYEFTSGVGNNYYAIALQISGLGTLMTGINFLVTILKMRTPGMTLMRMPMFTWSILITTIIIIFAFPSINSCLALMTFDRLFDAHFFTMASGGMPMLWANLFLGMGSPXSIYRYFPAFGIFSEIISTFSRKRLFGYSAMGILNGCNFLLSFVVWLTHFFTMGAVPAVNSSFSISTMRFSIPPGCKDLXLVVYLYKGRIRFTVPMLWSLAFIPTFAARWSYRGYAGMAAADYQYHNSYFLIAHFHXVIMRRYSIRYALAGFTFVVSKMTGSYVKMTALGKMDILDSLXAEFTIVSSPMYSXGLDVRTCGMDTLSESFWMGEGXTKIASVGAVMMGIGFLLLCYNVIWSARHGERDTTGRSMGRPYTXMGNSISCTHYNFAKLPEIKEADAFWYMKKRGETVYTSSRMTSDQFTCQVTLVCLLLRLDFFGLARFALIFNWFWLAAIGGIGNLTCLIYRSFDYDEGYLYXWCXNXKIRT

SEQ ID NO: 46331 - protein, 436 aa, Bacillus anthracis
MTVYHFVGIKGTGMSSLAQILHDMKHTVQGSDYEKRFFTQTALEKRNISILPFDKSNVKEGQVIIAGNAFPDTHEEIVAAKELNIPVHRYHHFLGDLMNQYTSVAVTGAHGKTSTTGLLAHVMQGAHPTSYLIGDGTGHGVENSKYFVFEACEYRRHFLSYNPDYAIMTNIDFDHPDYFTDINDVFSAFQEMALQVKKGIIACGDDEELQKIQAKVPVIFYGFGEDNDFQARNIQKRTDGTIFDVFVRNTYYDTFKITGYGNHSVLNALAVIALCHYENVDVEAVKHQLTTFEGVKRRFNEKPMGEQVIIDDYAHHPTEINATIEAARQKHPEREIVAVFQPHTFSRTEKFLDEFAESLSKADQVYLCDIFGSARENKGELTIEDLQKRIDGAELITDTTTDVLKKHKNGVLIFMGAGDIQKFEAAYVKEVQVAEK

SEQ ID NO: 46332 - protein, 102 aa, Bacillus anthracis; identical to SEQ ID NO: 46264

SEQ ID NO: 46333 - protein, 288 aa, Bacillus anthracis
  MISC_FEATURE (241)..(241): X=any amino acid
  MISC_FEATURE (270)..(270): X=any amino acid
VREFLKTKGISKAALTDIRFHRGTIEVNGQHCEGRHPVAKWGKKYLSFFPGEEKSEGMIAEDIPLCIVYEDDAVLVINKEANMSTIPSREHPSGSVANALLSHYDKQYLPSTVHIVTRLDRDTSGLMLIAKNRFVHHLLSKQHQQKSCERTYEAIVHGEMVEREGTIDAPIGRKSDSIIERTVCEEGQRAVTHFRVIDSANHKIACILELDTEGTHQIRVHLTHIGHPLLGDNLYGGKREXNFFHSTSQYSFDVLSPLFLEKGNVFSLQXFQSDMPEVFRQTLKGDQN

SEQ ID NO: 46334 - protein, 1478 aa, Bacillus anthracis
MLNKTNTWTPSLFRDYKNAEHDACGIVSVMEKRKIPTKENIDLCIQSLVKMNHRAGFINGEGDGIGIHIDVPKALWNEKLKSSGYNPTIVDHPHFIVGHFFLNKNENIVDLKNHIRTQLNNENFAILFESDNVINSDALGPLGKQEEPLFWQVALIAENEVVNIEQTLFSVTIKIEENEAIHVASLSRDHVVYKVLGAGDTLVAYYNDLQHPLIASTMTLGHNRYSTNTLSNFFRVQPFSILGHNGEINTIAKLRDQAEMIHVPLTAGGSDSQDLNRTLETLLVQYGYSLFEAMDILFPPIINEIKLYETHLQDLYTYIREAWGHFAQGPAGIISRYKDEAVFSVDSLGLRPVWKVEIESSYIFSSEPGVVSPTEYVAEPKPLAPGEKVGLKWNEQDELVLYEHDDYQTQVYNRFKKKVDVTNYHLHLSIPKTKEIPDACDSMQVETKQYVAFGWDREHIQLLEQMATKGVEPIRSLGHDSPLAALDTDRRNIADFIKESVAVVTNPAIDRDREVEHFSTRTILGERPSLLSDAKKPFVVEMLSPIILEGSVAQSIAQELHTITYEQLIELFNTHSSIATISATFSQAETLQCALSRISSEAITAVNDGASLLLIDDADAHLNERLWIDPHLVTAKVHQVLSENKLRRNCSLVIRSGALRSLHDIVTLHGLGADSINPYLLFATVNDGTKTPITNLYNALNKGLEKVISTIGIHELRGYGRLYSSIGLHEEIANILQITNFLGSNDLAFSLESLAEDAQMRADDYNDPKVRIRKSFHIFPRIWKAIGDVAKGNSYDDYRDKLSELEENNPIAIRHLIQTKETKHVIPTEEVSISIQNHDLPFIISSMSFGSQNEIAFRAYAEAADQLNMISLNGEGGEIKDMIGKYPHTRGQQVASGRFGVNAELLNSSNLIEIKIGQGAKPGEGGHLPGSKVTAKIAEARNATIGSDLISPSNNHDIYSIEDLAQMITEIKTANQLAKVAVKVPVVPNIGTIAVGIAKAGADFINISGFDGGTGAARIHALQHVGLPVEIGVKAAHNALLEANMRHNVEIWADGGIRSVNDALKIMLLGANRIGFGTLSMIAIGCTTCRGCHLDTCHVGIATQIESEAQAKEHGLRRFVPRELESAVAGLLHLFTTFGEELKRLTGNLGYTNLQEIVGRSDLLEQVRGKNLLNLCNLLQTIEHPSVIKTEHVLEKQFEPIHSPHSKELVGVGVEQRVMGGLESCYRVRSKLYEDTKLEPLTLKYTNGSIPGNGLGAYNSENLFIHVNGGAQDGIGKTSFGGGIYITKAKGKDGLYYNGSVGKGFGYGAQKGALYVQGNADARAGIRLSGADMIIGGRMTKPLREKEQGNIGAYSNIKGFAFEYMTNGRALVLGDPGPWICAGMTGGVVYLRHDSSLGLTEQALKRRIAKGANVTLQPISKNGVRDVNELLLDYIRVLNEHEQYEEVALLTPLLDDMQQQFFEIIPKKEQADPSISTE

SEQ ID NO: 46335 - protein, 226 aa, Bacillus anthracis
MYTLIIPAAGQGKRMGAGKNKLFLLINEVPIIVHTLRAFEKDKACKNIIMAINEEERPYFEELMQKYPVEKPVQFIQGGAERQDSVYNAIQHTTDVEYVLVHDGARPFVTNKVIQDVLTAAEKYGASICAVPVKDTVKKVEQGVVVETVERSQLKAVQTPQGFSVSLLLEAHRSAKQSCFLGTDDASLVERIGKQVGVVEGSYYNIKVTTPEDLLIAESFLHVQKK

SEQ ID NO: 46336 - protein, 429 aa, Bacillus anthracis
  MISC_FEATURE (54)..(54): X=any amino acid
  MISC_FEATURE (64)..(64): X=any amino acid
  MISC_FEATURE (93)..(93): X=any amino acid
  MISC_FEATURE (144)..(144): X=any amino acid
  MISC_FEATURE (220)..(220): X=any amino acid
  MISC_FEATURE (238)..(238): X=any amino acid
  MISC_FEATURE (278)..(278): X=any amino acid
  MISC_FEATURE (287)..(287): X=any amino acid
  MISC_FEATURE (295)..(295): X=any amino acid
  MISC_FEATURE (298)..(298): X=any amino acid
  MISC_FEATURE (374)..(374): X=any amino acid
  MISC_FEATURE (387)..(387): X=any amino acid
  MISC_FEATURE (413)..(413): X=any amino acid
MEKLLIEGGRALNGTIRVSGAKNSAVALIPATILADTPVTIGGVPNISDVKMLXDLLEGIGREXRMDKKEKMVVDPSTMGAMPFTKSENVKKXRASYYLMGAMLGRFKKAVIWAFTGGCHLGPEAIDQHIKEVCKRIGVSCYEXTRCIYLRADELRGAGIYLDVVSVGVTIRYYVSPVRAKGRTVIENAAKEPEIIDVATLFTSMGARIKGAGTDVIRDXWCGFLARLSSIHPSNLFXRRYVYDLGAASRGERTVDYVIPQHLEALTANLQKTGGPGXNQMMARSQXPWIEIKKXLIXKTLVYSRVSPTDLHQPFTTLLPKAHGTGVVTDTIYGARFNHIDELRRMNAQIKVEGRSAIVTGPCFIARCKSESEXLRACSRTIESQDXWRMEFQKYPGLEHIVGGFENFGGKAXRGWCKPLAGPNAKARN

SEQ ID NO: 46337 - protein, 103 aa, Bacillus anthracis
QSLKVFIALSRVHRSVMDTTNKSIQSNGLNPTEFAVLELLYHKGGPTLQQIGERIFIASGSHTYVVDKLEKKGLEKKFPSPNERRVIYAQLTGPGENFIASIF

SEQ ID NO: 46338 - protein, 234 aa, Bacillus anthracis
MSKYEQIYTAISKSIDNKQLKEGMQIPSETELMKQYEASRGTVRKAVDLLQEEGYVQKIHGKGVFVLKRKNIEFNFGGIVSFQEENERLGRHCITEVVEIEKIKATKEIAKLLNVKEKTEIDHIKRVRNIDGEKVILDINHFVSEHIPGLTSEIAAGSIYKYIEKELGLHISYSQRVIEVQSCTEDDRKYLDLNGTDYVVVVKNFTHFYDGSQFEYTESRHRLDIFHFSDVARR

SEQ ID NO: 46339 - protein, 63 aa, Bacillus anthracis
MGNRIPEEVVEQIRTSSDIVEVIGEYVQLRKQGRNYFGLCPFHGENSPSFSVSSDKQIFHCFG

SEQ ID NO: 46340 - protein, 158 aa, Bacillus anthracis
MFRIGQGFDVHEFAEGRPLIIGGITIPHEKGLIGHSDADVLLHTIADACLGAIAAGDIGKHFPDTDPAFKDADSAVLLQKVWEFVREQGYELGNLDCTIIAQKPKMAPHIESMRKRISELLETSIDNINVKATTTEKLGFTGREEGIASQAVVLLQKK

SEQ ID NO: 46341 - protein, 428 aa, Bacillus anthracis
  MISC_FEATURE (204)..(204): X=any amino acid
  MISC_FEATURE (339)..(339): X=any amino acid
  MISC_FEATURE (343)..(343): X=any amino acid
  MISC_FEATURE (358)..(358): X=any amino acid
  MISC_FEATURE (360)..(360): X=any amino acid
  MISC_FEATURE (364)..(364): X=any amino acid
  MISC_FEATURE (366)..(366): X=any amino acid
  MISC_FEATURE (404)..(404): X=any amino acid
  MISC_FEATURE (405)..(405): X=any amino acid
  MISC_FEATURE (426)..(426): X=any amino acid
MFIDQVKIYVKGGDGGNGMVAYRREKYVPKGGPPGGDGGKGADVVFIVEESLRTLMDFRLQRHFKADRGQHGMSKGQHGRKSEDLLVKVPPGTVVKDEKTGQILADLVTHGQTAVIAKGGRGGRGNSRFRTATNPAPEIAENGEPGQERDVILELKVLADVGLVGIPSVGKSTLFICVSSARPKNCRVHFTTIVPNPWCWLNWXNRSFVMADLLLRIRGRTCVALPLGHQFLRHIQAYTCNRAVIDMSGLEGLDPYEDYVTINNELMEYNLRLTERRQVVVANKMDMPDAEENLQAFKEKVGDEVKIFPISAVTKQGVRDLLFEVSNLIETTPEFPNTXSCGXVDTSVMYKFETEGWXIXYYTXKXGTFVISGYDIEKTFRMTDFSRDESVRRFASPNARNGYXXTPRARGAKDGDIVKILEYEIXFI

SEQ ID NO: 46342 - protein, 231 aa, Bacillus anthracis
MNDRKSIAIATAKAGLIAATGLVLVYGALGWLGTTSVSLGYAKNGGQLLTVIVQQLFGPYGLLLLALIVTLACLTTCVGLVSACSQYFSTLLTKFSYKTFASIICALGLLVANLGLTKIIAISVPILLVVYPIAIVLVLLSLLHKYFGGYRSVYVGALIGAAIVSVFDGLKQGGISVSFITSYFEFIPLYNEGIGWLVPALTGALIGLTIAKLSGAKKVPLLTESREVKAS

SEQ ID NO: 46343 - protein, 941 aa, Bacillus anthracis
MKQIWRIYKTDLRNVAKHWAAIVIVVGLMILPSLYAWFNIKASWDPYGNTKEVPIAVSNQDAGSNLRGKDINIGNEIVDSLKKNKNLGWKFVDEKQAIYGVERGDYYASITIPKDFSEKIATVLDENPQKPELDYYVNEKVNAIAPKITAKGASGITEEISKNFVKTANGEIFKIFNDLGIDLETNLPSIEKVKDLVFKLEAQFPEMNTLMDKALDDATRAEDLVKVAQKELPVVESVINDGQEALTNLDKFFANNDQTLQNAPGTIRNHLTAAKNVMDKANAFTDFLMHPGIDFSGMKGLPEFPARPDLSKLNDEGYKNIARNINQTVNNVLNSARAGTTYGKSVVNGLQNGQFDPEKAKQDLNAVSENLQGRTDSIAYLINVFTELQKSATTDFGQSFFQGRVDRLTKLKSGMENANNGIKDIVNVIGTGQEVKKDVTDVANQKLDAANGLIDQAEKDYNETFVADYKKAVSTVDQAKADANEAYDSVKNEYDKFKNGVEDAKANISNKGVTDLEWAKVSLNDLNGQLQATNNLIGDAIPVLESTNKVLADVNSGKNLNGGIAKLNKIQNSVQKGIDATNKATTLINNGQKPTKEVVESINEATQNASAQLGDFLATYDSEIVPNFNTAIERTKRMSKNTSQILKEADKKLPDVKKLLEDSSKGLVDGRKKLADIKAEMPATEKKIKELADKIRDFESEEDLKDIIRLLKNDVEKQSDYFANPVNLKENKLFAMPNYGSAMSPFYTVLALWVGALLMVSLLTVEVHEEGANYKSHEIYFGRLLTFLTMGLSQAFIVSMGDIFLLGTYVVDKFWFVLFSLFIGGVFVCIVYSLVSIFGNVGKSMAIILLVLQVAGSGGTFPIQMTPAFFQAIYPFLPFTYAISAIRETVGGMLWDIVTRDLLVLSAFVVVMIVAALLLKTPINKSSEKFVENAKGSKIIH

SEQ ID NO: 46344 - protein, 470 aa, Bacillus anthracis
  MISC_FEATURE (14)..(14): X=any amino acid
  MISC_FEATURE (20)..(20): X=any amino acid
  MISC_FEATURE (38)..(38): X=any amino acid
  MISC_FEATURE (46)..(46): X=any amino acid
  MISC_FEATURE (142)..(142): X=any amino acid
  MISC_FEATURE (155)..(155): X=any amino acid
  MISC_FEATURE (175)..(175): X=any amino acid
  MISC_FEATURE (270)..(270): X=any amino acid
  MISC_FEATURE (272)..(272): X=any amino acid
  MISC_FEATURE (275)..(275): X=any amino acid
  MISC_FEATURE (277)..(277): X=any amino acid
  MISC_FEATURE (316)..(316): X=any amino acid
  MISC_FEATURE (323)..(323): X=any amino acid
  MISC_FEATURE (427)..(427): X=any amino acid
  MISC_FEATURE (453)..(453): X=any amino acid
  MISC_FEATURE (459)..(459): X=any amino acid
  MISC_FEATURE (464)..(464): X=any amino acid
IYCLSVFLRGVFIXCENRKXRIEKQRDKGRAGVLTNCXAFRMVNIXDPPFIYQHSFPPSVCYHKVYKNLLQRDKNMDFKPMLAKEWKQIDDLNWEFKLQQGVTFQDGAPFNAEAVKKNFERVLDPKVGSNRATVYSMIQGKXKLFDEYTVQVSYXNTPYSPLFIYFRQVMKEVFXVRKQLMKKGRGLAQHPVGTRPYTFKSWKPGEEIRLEKIKYYKRGKAKVDEVVFKVVPEDATRIGMIETSEAHIAENLPCTEVERVKNSPSMELIXKXRVXVXNILGFYVEEKSPLHHPAFFVKAICTMQLKPKGILKGVIXPMWGLKXTPVMTPKVFGYTKDVKGYKYDINTAKKLLADAGYPNGFKTTIWTNDSKVRMALVEVIQSQLKGIGVDVEIKVMEYGAFLAATNKSEHAMFVWRRGNPTSDGGLXSINLFHSSSHGATGNQFFYSNPGRRXINERSXKRKKXDEEKRI

SEQ ID NO: 46345 - protein, 314 aa, Bacillus anthracis
MIEIEKPKIETVELNEDAKYGKFVIEPLERGYGTTLGNSLRRILLSSLPGAAVTAIQIDGVLHEFSTVEGVVEDVTTIILNLKKLALKIYSEEEKTLEIDVQGEGIVTAADITHDSDVEILNPDLHIATLAKDAHFRVRLTAKRGRGYTPADANKSEDQPIGVIPIDSIYTPVSRVTYQVEKTRVGQVANYDKLTLDVWTDGSIGPKEAISLGAKILTEHLNIFVGLTDEAQNAEIMVEKEEDQKEKVLEMTIEELDLSVRSYNCLKRAGINTVQELANKTEEDMMKVRNLGRKSLEEVKHKLEELGLGLRKDD

SEQ ID NO: 46346 - protein, 554 aa, Bacillus anthracis
  MISC_FEATURE (97)..(97): X=any amino acid
  MISC_FEATURE (127)..(127): X=any amino acid
  MISC_FEATURE (188)..(188): X=any amino acid
  MISC_FEATURE (257)..(257): X=any amino acid
  MISC_FEATURE (261)..(261): X=any amino acid
  MISC_FEATURE (279)..(279): X=any amino acid
  MISC_FEATURE (281)..(281): X=any amino acid
  MISC_FEATURE (298)..(298): X=any amino acid
  MISC_FEATURE (299)..(299): X=any amino acid
  MISC_FEATURE (316)..(316): X=any amino acid
  MISC_FEATURE (326)..(326): X=any amino acid
  MISC_FEATURE (337)..(337): X=any amino acid
  MISC_FEATURE (345)..(345): X=any amino acid
  MISC_FEATURE (405)..(405): X=any amino acid
  MISC_FEATURE (408)..(408): X=any amino acid
  MISC_FEATURE (431)..(431): X=any amino acid
  MISC_FEATURE (432)..(432): X=any amino acid
  MISC_FEATURE (435)..(435): X=any amino acid
  MISC_FEATURE (459)..(459): X=any amino acid
KTKGAVLVVDCLIKQGVTHVSGIPGAKIDSVFDVLQERGPELIVCRHEQNAAFMAAAIGRLTGKPGAYVLELSGPGTSNLATVLVTANAESDPRVAXAGAVPRTDRLKTYHPIYDNAALFEPITKIXRRVEHPDNVPRSISNAFSKCTFTNPSATLVSLPQDVMTAETTVESIGALSKPQLGNRSHTXYTYVVEKIKAAKLPVILLGMRASTNEVTKAVRALIADTELPVVETYQAAGAISRELEDHFFGRVGLFPXPTRXYFTRRSGPCYFYRLDPIXVXSGIPGLTWGTERLIHPXXPLKQISDLDYQPRAGNXIGEIALNGKXHRRKITEKLCXVRNQKQCXNDYARNYQNKQKFPTRDPEGVTHPLQVIRTLRSLISDDTTVTCDIGSHSIGMARCFRFLXPTXIIISNGMQTLGVALSLGQSQLLXXPRXKVVSVSGDGVFLFSAMELETAVRXISPIVHLVWRDGTYDMVAFQQMMKYGRTSATEFGDVDLVKYAESFGATGLRVNTPDELEGVLKSALAADGPVIIDIPIDYRDNIKLSEKLLPNQL

SEQ ID NO: 46347 - protein, 262 aa, Bacillus anthracis
MGIVETAEWLHLYYGRPEKLCEKFTKYIPLPKERLYRFLISKGMYRPVMRGEREIKELEKKEVWKELRAEYEKLKNWLKGPDVPVFILLSDSYNRTVQEEYNGRAGLSMRHVIFLFVCGRNSVEELKVLLAHEYHHICRLHQIETKETEYTLLDTMIMEGLAEQAVTERYSEKNNAPWTTYLSKEEAIYYWKNVVHERISIKRGTREHDILLNGLHSYPKLLGYALGFHIVKDCVTLQGEDTLSLLPIDAKEILNKANTFHI

SEQ ID NO: 46348 - protein, 166 aa, Bacillus anthracis
  MISC_FEATURE (9)..(9): X=any amino acid
  MISC_FEATURE (18)..(18): X=any amino acid
KSRHLDDKXCCDLLNFIXRFQMEMYPFPYPLHFLFSTNEEIGYAGNSIFPEENGKYLAVDMGALGDGQASDEYTVSICAKDSSGPYHYALRKHLVELAKTNNIEYKVDIYPYYGSDASAAIRAGFDVKHALIGAGIDSSHAFERTHESSIAHTEALVYAYVLSEMI

SEQ ID NO: 46349 - protein, 819 aa, Bacillus anthracis
MDRTALRKVKGLIGLLMVFVLAFVSFPWSTSVKAEEKKQEKVPSEKKIVFPVVSDVHIKNSGTDDTFRWKRAIEQLNTLAPKQDAFVIVGDFTDTGSLQQYDRFMQVYNENENKDAVRMNSLGNHDYWNGLSVEGAQKRFLEKTGMESIYYHKVVKGYHFLVMSPENGTTHGYYSDKQINWLKEEMAKAQKDDPEKPIFVFLHQHIKETVYGSHEWGTQDSAKINAVLKEYPQAITFSGHSHYPLDDPRSIHQKDFTSVGTSSISYMEVEGGKVQGNIPPGASTLSQGLLVEVDDEEVTINRRDFHTNSWTGEPWKIKLPAKKETFTHVEDRDKEKPSFSTDAKLSVSNVTENAATVTFPQALDNLLVHSYRVQARDKQTGEIKNKLLAFSEFYRDPVPKDLTFTLAGLDGGKTYTLEVVAIDSFGNESAQPLTAEVTTKKDNIDPNVKVPKADVFDVNFLDGTFKDNSSFGTKGDVKGNVSIAYDKALKTNVMKLNGQANTFGYLPFSAAQKEKVANTFTLETVFSMNEIRGQGILQNTESGGIGFESTGSGNVELWAHIGGSYKRVGVQLEANKTYHLTGTYNGSEVAIYVDGKKANSQPAKGKVSHPNVPFAFGADPDSNGNGGIPLNGQIALARLYSKALSSSEVLAAYNEFSNRTKLEQVNALYEELGKVKEVLAGTYEFGDKPGQYSKEAFQELEKSYNNAKQAFENVGSTGEQIVQTYNELKTANVTFVQSKVVEQPKTPKEKLQINIESAKAVVKKAQDANVTDGSVKALSQKITVAETVVKDVKVKDAQVETMNRTLEYTISLVEKSINK

SEQ ID NO: 46350 - protein, 79 aa, Bacillus anthracis
MSDVEFQTKVEQSLATFSRRSTDDESGVEEFLSTFRYCQLNTANIEDYQDLLSLVKRRETELNIPENRMFYLSVIPKSI

SEQ ID NO: 46351 - protein, 297 aa, Bacillus anthracis
MIPLSIRVPASTANVGPGFDSVGIALSLYLHVVVKEKSDKWQVIHSFEDSIPTDDKNLIVSTACKVCPSLSPHIIEVTSNIPLTRGLGSSASAIVAGIELANQLGKLNLTIDQKVQIATNFEGHPDNVAASILGGTVIGALDGKNVSVVRIESKELGVISLIPNEELNTDESRSVLPDVFPFHEAVKASAISNVLVAALCQKKWKVVGEMMERDHFHEPYRLELVPLLPSIRKCAKEFGAYGTALSGAGPSIFILTPYEKRQEIAEQLARVFTSMKVCELEIDHRGITVNKKEHIGL

SEQ ID NO: 46352 - protein, 77 aa, Bacillus anthracis
MILGMGLYIMEWIGFEKLLDGRLNIMDVILLEIDVIVVKGLKETAFPDFVVESLPEKEGYSKAVGTGIGKEVQFFRY

SEQ ID NO: 46353 - protein, 288 aa, Bacillus anthracis
  MISC_FEATURE (194)..(194): X=any amino acid
  MISC_FEATURE (203)..(203): X=any amino acid
  MISC_FEATURE (220)..(220): X=any amino acid
  MISC_FEATURE (283)..(283): X=any amino acid
RRIGLIMIITGATLWGLSGPMIQWLFQHTNVSSVDFLTIRLLLAGIFILSFLLIKKQNIFQIWENTLDILYNLLFFSILGMLGGPYAFIETVHISNAVTATLFQFSKARFLLPGMSHFEQRKSPCSIQLLAIITALTGTYLIITKRSIENIVLSKEAIIFGLLTAIGFAFYTLHPASLIKECGTICNNGWGDGXSEGMPLAIXNRLALNGTQLSPNFLTXKTFFNAYFLIIISGTLSFLLYIGSLKYLAATETSILSSIEPLVAAIVSIAWLNEILWKPINYXGGLWI

SEQ ID NO: 46354 - protein, 670 aa, Bacillus anthracis
  MISC_FEATURE (357)..(357): X=any amino acid
  MISC_FEATURE (408)..(408): X=any amino acid
  MISC_FEATURE (436)..(436): X=any amino acid
  MISC_FEATURE (440)..(440): X=any amino acid
  MISC_FEATURE (447)..(447): X=any amino acid
  MISC_FEATURE (450)..(450): X=any amino acid
  MISC_FEATURE (452)..(452): X=any amino acid
  MISC_FEATURE (454)..(454): X=any amino acid
  MISC_FEATURE (464)..(464): X=any amino acid
  MISC_FEATURE (480)..(480): X=any amino acid
  MISC_FEATURE (482)..(482): X=any amino acid
  MISC_FEATURE (521)..(521): X=any amino acid
  MISC_FEATURE (585)..(585): X=any amino acid
  MISC_FEATURE (592)..(592): X=any amino acid
ENKSFYITTDNLLSKSGKLHIGHAYTTVAGDAMARYKCMQGYNVHYLTGTDEHGQKIQKKAEELNVTPQAYVDNIVAGIKELWEKMGISYDDFIRTTEDRHKDVGEKIFQQLVDQGDIYLDEYEGWYSVQDETFYTEHQLVDPIMEGDKVVGGKSPDSGHDVELVREESYFFRMGKYVDRLLKFYEDNPHFIQPESRKNEMINNFIKPGLEDLAVSRTSFDWGVRVPGNPKHVIYVWVDALSNYITALGYGTENEEMYKKFWPADVHLIGKEIVRFHTIYWPIILMALDLPLPKKVFAHRWIFMKDGKMSKSKGNVVDPVILIDRYRLYALPYYLLPEDPFRSDGGFTPKRFVERNXFDFSKDFRKLFKIVRDLGFERTFTGEIPCLFKQIVTEFDETLVTFCERYIXKKLKKAMENMGFLCSLSSILAFGLPYQXIFGXKPNPGYXRKXGXSXKLGVCNGLIXQKYFVKRGLCFMPFLXQXHPSKNVLLSLGLYWDESTYIFGGSPIYQIGCISSWEQKXKKGQPIFPRFRNGRGKWRTFKEQNESLLPPKLRKKKEEDPKAEEITIDDFFKVELRVAEVLFCXTCKKGRXVVENQLDLGTEKRQVVSGIAKFYSPEDLKGKKVICVTNLKPVKLRGELSQGMILAGEENGVLSLASIDQNIPNGTKIK

SEQ ID NO: 46355 - protein, 221 aa, Bacillus anthracis
  MISC_FEATURE (44)..(44): X=any amino acid
  MISC_FEATURE (47)..(47): X=any amino acid
  MISC_FEATURE (48)..(48): X=any amino acid
  MISC_FEATURE (57)..(57): X=any amino acid
  MISC_FEATURE (178)..(178): X=any amino acid
  MISC_FEATURE (187)..(187): X=any amino acid
  MISC_FEATURE (198)..(198): X=any amino acid
  MISC_FEATURE (208)..(208): X=any amino acid
KRPQKESPPWMTTFYDLPRLLLTFFVLLVATSKQDAVKLSKFAXKVXXYGASRCKKXWENTIPDISHETNHAKMISKERTDVLYKKLIAYVDNNGISQVNVYREHTGVSVVIVDTFNYLYTGDANVIPVAIEIISQFVGYYQSVPNPIVVEGHTDSRPIHNDKIPFNWGLSSARAAIXFHHLIESVXVDDKRPVPVGXQSPKPVVPKXIHPNLEENPSRVI

SEQ ID NO: 46356 - protein, 279 aa, Bacillus anthracis
MKNLQSKAVLNNGVEMPWFGLGVFKVEEGPELVEAVKSAIKAGYRSIDTAAIYGNEKAVGEGIRAGIEATGISREDLFITSKVWNADQGYEETIAAYEESLKKLELDYLDLYLVHWPVEGKYKDTWRALETLYKEKRVRAIGVSNFQVHHLQDVMKDAEIKPMINQVEYHPRLTQKEVQAFCKEQGIQMEAWSPLMQGQLLDNETLQEIAEKHGKTTAQVILRWDLQNGVITIPKSTKEHRIIANADVFNFELTKEDMEKIDALNQNHRVGPDPDNFDF

SEQ ID NO: 46357 - protein, 204 aa, Bacillus anthracis
  MISC_FEATURE (57)..(57): X=any amino acid
  MISC_FEATURE (103)..(103): X=any amino acid
KKEIASHLLEIGAVFLQPNDPFTWSSGKNPPIFLGNPVNFFFFGKVRQQFAAGLEEXIKEHFPNCEVIAGTATAGIAHAAWVKRLVWISPRCYVRSKAKSQWXRGPNSKEKAEKGQKVVVVEDLISTGGSAITCVEALREAGCEVLGIVSIFTYELEAGKEKLEAANVASYSLSDYSALTEVAAEKGIIGQAETKKLQEWRKNP

SEQ ID NO: 46358 - protein, 277 aa, Bacillus anthracis
MTKQTEYKRKPEWLKIKLNTNENYTGLKKMMRSKNLHTVCEEAKCPNIHECWAVRKTATFMILGAVCTRACRFCAVKTGLPTELDLQEPERVADSVVQMGLKHVVITAVARDDLKDGGAAVFAETVRAVRRKNPCTSIEVLPSDMGGVEENLKMLMDAKPDILNHNIETVRRLSNRVRARAKYDRSLEFLRRAKEMQPDIPTKSSIMVGLGETREDLIEANDDLRANQCGYFISLDNPIQPVKKHFPVFNYFPPAEFAELKRNCHLAKEFSPLEGGP

SEQ ID NO: 46359 - protein, 104 aa, Bacillus anthracis
  MISC_FEATURE (6)..(6): X=any amino acid
  MISC_FEATURE (7)..(7): X=any amino acid
  MISC_FEATURE (94)..(94): X=any amino acid
LYELLXXRINKLIVAEYIGHHYFLPGGHVEVGESAESALIRELQEELGVNCSIKQFLGVIENQWQDKEMLHHEINHIFVHSTRELAYDFSPKSXEPHLTFHWID

SEQ ID NO: 46360 - protein, 255 aa, Bacillus anthracis
MSIVNKKIIFFGDFGIDDAVALIYANKTCKLDILGIVAEYGNVSREIVTENVYFLERYYATEVKIIEGAARPMTAEEPLFFPEIHGEHGLGPIIPPDLRICKRENFCELIKLIEPCPEDIIIVATGRLTTLATLFLLYPNVMDKVCSYYIMGGAFLFPGNVTPVSEANFYGDPIAANIVMKYAKNAHIYPLNVTQEALITPEMVDIINKEGTGQAKLIKPMIDFYYENFYKKEYPWVLLEGPDSMIYFPFIFVYK

SEQ ID NO: 46361 - protein, 612 aa, Bacillus anthracis
MLKKRQDLRNIAIIAHVDHGKTTLVDQLLRQAGTFRANEHVEERAMDSNDLERERGITILAKNTAIHYEDKRINILDTPGHADFGGEVERIMKMVDGVLLVVDAYEGCMPQTRFVLKKALEQNLTPIVVVNKIDRDFARPDEVVDEVIDLFIELGANEDQLEFPVVFASAMNGTASLDSNPANQEENMKSLFDTIIEHIPAPIDNSEEPLQFQVALLDYNDYVGRIGVGRVFRGTMKVEQTSAFIEVDGSVKHFRVNELFGYMGLKRQEIEEAKAGDLVAVSGMEDINVGETVCPVEHQDALPLLRIDEPTLQMTFLVNNSPFAGREGKYITSRKIEERLRSQLETDVSLRVDNTESPDAWIVSGRGELHLSILIENMRREGYELQVSKPEVIIKEVDGVRCEPVERVQIDVPEEYTGSIMESMGARKGEMLDMVNNGNGQVRLTFMVPARGLIGYTTEFLTLTRGYGILNHTFDCYQPVHAGQVGGRRQGVSSSLETGKASQYGIMQVERPWGIFREPRTEVYGWYDWGRTHSENDLTVNVVKMKQQTNIRSATKDQLFTNEKTTLNTLEESLEYLNDDEFCEVTPESIRLRKKILDKSERERAAKKKKSV

SEQ ID NO: 46362 - protein, 402 aa, Bacillus anthracis
  MISC_FEATURE (33)..(33): X=any amino acid
  MISC_FEATURE (42)..(42): X=any amino acid
  MISC_FEATURE (104)..(104): X=any amino acid
  MISC_FEATURE (194)..(194): X=any amino acid
  MISC_FEATURE (226)..(226): X=any amino acid
  MISC_FEATURE (253)..(253): X=any amino acid
  MISC_FEATURE (268)..(268): X=any amino acid
  MISC_FEATURE (288)..(288): X=any amino acid
  MISC_FEATURE (324)..(324): X=any amino acid
  MISC_FEATURE (340)..(340): X=any amino acid
MEEAPFYRDTWVEVDLDAIYKHATHIKEFIPEXWKKFLPLFXGKCLWGPNYVPVAKIALEAGPTKVTSAFLIETLMLRRAGITAPILVLGPSPPRDINVVAEKXCALTVFQKEWVDEAIKLWDGSSTMKYHINFDSGMGRIGIRERKELKGFLKSLEVAPFLQFGGSYSPFGNSREVETSYFDKQYNHIFWSKXIGWKEFRVGSLSLVLPLYKGCNPYLFQRDYIXMAVQNWALPMYRGYLHTVEIRPFFTVXIEPALSLHTKVAPIXTRVIKGMGISYNVTYPNENXRMDCDRAIGYADGLGLEDYKDLRGTCKMGKRGTRLXGRVNDGIKSMIHPSWXSAVLVRKVTLIGKARERNILSLTEGCGKIRGLFIIEIITTISFRVPRIFIRNGKVVEVINYL

SEQ ID NO: 46363 - protein, 110 aa, Bacillus anthracis
MLEKTTRMNYLFDFYQSLLTQKQRSYMSLYYLDDLSLGEIAEEFDVSRQAVYDNIKRTEAMLEEYEEKLVLLQKFQERQRLVAKLKQLISEEEHVNEEMKQVVEAIEKLD

SEQ ID NO: 46364 - protein, 248 aa, Bacillus anthracis
VASTELGLLEMVKSGTTSFSDMFNPIGVDQDAIMETVSRSGMRAAVSRTLFSFGTQEDEKKAIEEAEKYVKRYYNESGMLTTMVAPHSPYTCSTELLEECARIAVENQTMVHIHLSETEREVRDIEAQYGKRPVEYVASCGLFKRPTVIAHGVVLNDNERAFLAEHDVRVAHNPNSNLKLGSGIANVKAMLEAGMKVGIATDSVASNNNLDMFEEMRIATLLQKVFIKMQQRYRLKQLLHLQLKERLK

SEQ ID NO: 46365 - protein, 380 aa, Bacillus anthracis
  MISC_FEATURE (227)..(227): X=any amino acid
QRGLYNVIDPLESSNGPIITIGGKEYINLSSNNYLGLATDSRLQEAAIGAIHKYGVGAGAVRTINGTLDLHIKLEETIAKFKHTEAAIAYQSGFNCNMAAISAVMDKNDAILSDELNHASIIDGSRLSKAKIIVYKHSDMEDLRQKAIAAKESGLYNKLMVITDGVFSMDGDVAKLPENVEIAEELDLMTYVDDAHGSGVLGKGAGTVKHFGLSGKVDFQIRSLYKXSPIGVDRGYVAGKQNLIDWLKVRSRPFLFSTAVTPADAAACMRSIEILMESTELHDRLWENGRYLKQGLKELGFNIGESETPITPCIIGDEVLTQEFSKRLNEEGVYAKSIVSPTVAKGPGRVRNMPPAAHTKEMLDEAIRKYEKVGKEMGII

SEQ ID NO: 46366 - protein, 321 aa, Bacillus anthracis
MFKIGYRTVKTAIGTGAAVFIAQLLGLEFYSSAGILVILCVQNTKRKSLQVSLHRFLACVLSMVFAFCIFETIGYTPLAISVLLLTFIPTAVMLKIQEGIVTSSVIVMHLYSLKQITWLIVGNEIAIFTIGISVALLVNMYMPSSENKLKEYQEKIENNFKTILFEMVVYLRNRESSWSGAELIETEQMLNEARDLSFKKLENAFMREDDYYYRYFNMRMQQFEILERMIPLAASLSWTYEQADMIADVVENIWKAITPSEYRSYFFRQLQEMRELFRDMPLPATREEFEIRAKLVQLVYEMEQYLLIKSRFKGKDNIKEL

SEQ ID NO: 46367 - protein, 301 aa, Bacillus anthracis
MKIAISGGTGFIGTYLSTFFIQKGYTVYILTRKKTTETSHPNLQYVQWTPDLQTFPLSSIDVVINLAGESINSRWTKKQKKIILNSRIQTTKGLIKQLQALPAKPHTFINASAIGYYGTSETESFTEQHVTPGNDFLANTVYSWEQEASKARSLGIRTIYARFGVILGPDGGALPKMLLPYQFYIGGTVGSGKQWLSWIHIDDVASMIDFIIHKKEIDGPLNITAPEPIRMKGFGETIATIMKKPHWLPVPSFMLHALLGEMSILVLEGQHVLPSKAIEHGYQYTFPTIDHALQNILSHTM

SEQ ID NO: 46368 - protein, 394 aa, Bacillus anthracis
MNKKSIRDVDLKGKRVFCRVDFNVPMKEGKITDETRIRAALPTIQYLVEQGAKVILASHLGRPKGQAVEELRLTPVAARLGELLGKDVKKADEAFGPVAQEMVAAMNEGDVLVLENVRFYAGEEKNDAELAKEFAALADIFVNDAFGAAHRAHASTAGIADYLPAVSGLLMEKELEVLGKALSNPERPFTAIIGGAKVKDKIGLIRHLLDKVDNLIIGGGLAYTFVKALGHEIGLSLCEDDKIELAKEFMQLAKEKGVNFYMPVDVVITEEFSETATTKIVGIDSIPSNWEGVDIGPKTREIYADVIKNSKLVVWNGPMGVFEMTPFAEGTKAVGQALADAEGTYSVIGGGDSAAAVEKFGMADKMSHISTGGGASLEFMEGKELPGVVCLNDK

SEQ ID NO: 46369 - protein, 196 aa, Bacillus anthracis
  MISC_FEATURE (154)..(154): X=any amino acid
  MISC_FEATURE (191)..(191): X=any amino acid
MKAVVVNKNSKANIEVVEKELRPLHSGEALVDVEYCGVCHTDLHVANHDFGNTDGRILGHEGVGIVTKIADDVTSLKVGDRVSIAWMFQSCGRCEYCVTGRETFCREVKNAGYSVDGGMAEQCIVTADYAVKVPEGLNPAQASSITCAGVTTYXAIKVSDIKPGSPIVIYGCGGISNLSIPYAKNLFGAKXIALNI

SEQ ID NO: 46370 - protein, 273 aa, Bacillus anthracis
  MISC_FEATURE (25)..(25): X=any amino acid
  MISC_FEATURE (69)..(69): X=any amino acid
  MISC_FEATURE (70)..(70): X=any amino acid
  MISC_FEATURE (84)..(84): X=any amino acid
MTLQEQIMKAFRVHPEMIPKRRNPXTWLIFLKDYVKKTGGKGIVLGISGGQRLTLAGRLAQLAVEEISXXGGNATFIAVRLPYXGQKDEGDAQLAFHLFKADHSVAFDIASTVNAFSNQYENLLDESLTDFNKGNVKARIRMVTQYAIGGQKGLLVIGTDHAAEAVTGFFTKFGDGGADLLPLTGLTKRQGRALLQELGADERLYLKMPTADLLDEKPGQADETELGITYDQLDDYLEGKTVPADVAEKIEKRYTVSEHKRQVPASMFDDWWK

SEQ ID NO: 46371 - protein, 508 aa, Bacillus anthracis
  MISC_FEATURE (344)..(344): X=any amino acid
  MISC_FEATURE (367)..(367): X=any amino acid
MKLLEQIEKWAIETPDQTAFVWRDAKITYKQLKEDSDALAHWISSEYPDDRSPIMVYGHMQPEMIINFLGCVKAGHAYIPVDLSIPADRVQRIAENSGAKLLLSAAVLVGVSAGSHGKGRPSKKIFSYFIRGTLQIPDMRVKGDENFYIIYTSGSTGNPKGVRILYTALVSFTQWAVEDFNLQTGAVFLNQAPFSFDLSVMDIYPSLVTGGTLWAIDKDMIARPKDLFASLEQSDIQVWTSTPSFAEMCLMEASFSESMLPNMKTFLFCGEVLPNEVARKLIERFPKATIMNTYGPTEATVAVTGIHVTEEVLDQYKSLPVGYCKSDCRLLIMKEDGTIAPDGXKKVKIVNCRFPRVSGLDYLGSPXNYQKKPFSYDWRGSALIKTGDAGYVKSVFLFYKGRLDSQFKLHGIRMNLEEIEHHLRACSYVEGAVIVPIKKGEKYDYLLAGCFSRETHSFEKRISITICIQTGPQWRFANYMFPGKFMYHSSIPMTPNGKVDRKKLLSEV

SEQ ID NO: 46372 - protein, 476 aa, Bacillus anthracis
  MISC_FEATURE (18)..(18): X=any amino acid
  MISC_FEATURE (242)..(242): X=any amino acid
  MISC_FEATURE (390)..(390): X=any amino acid
MNCYVSFPMIISLSWYFXMGVYAQRRVQATAPNKFLQEYFLGGRELGGLLLAMTMIATYGSASSFIGGPGIAYNMGLGWVLLSAIQVVTGYIVLTVIGKKFAIIARKMEAITLIDYLKGRYNNKAVVILSAVCIIIFLFSATVAQWVGGGRLIESLTGLSYTTALFLFTFSVLVYVLIGGFRAVALSDTLLGIIMLVGTTIILIATVIAGGGIEKIMQELVQNHSEIYSPHLERMGSLPKSXVTSFWDLLGMGVVGLPQISVRAMSYKNSKAMHQALIIGTIVVGTIMIGMHLTGVFARILLPGNSVPDKVIPLLRNGGLPPWLAGVFLAATDGGIMSTVNSLLLLGKSSIIKDIYVNYINKDAADSTIRKGSLWITAIVGLLVYAAAIXTTRFLIWLNYFSFGGLEAAFIWPIVLGLYWRKGNATGAPCLHFSWSSSYMCIHLFYPNPFGIHTVVFPICFAFIAYILGSMVAVKK

SEQ ID NO: 46373 - protein, 198 aa, Bacillus anthracis
  MISC_FEATURE (18)..(18): X=any amino acid
  MISC_FEATURE (64)..(64): X=any amino acid
  MISC_FEATURE (123)..(123): X=any amino acid
  MISC_FEATURE (154)..(154): X=any amino acid
  MISC_FEATURE (158)..(158): X=any amino acid
  MISC_FEATURE (186)..(186): X=any amino acid
MQERNWEEAAKNFTEAIXENPKDALGYINFANLLDVLGDSEKAILFYKRALEVDDKSAAAYLGXGNVYYGQEQFAEAKAVFEQAMQAGLQSADVTFMLGITHVQLGNDRLALPFLQRARDIRXIDVEAVFQCGLCFARLEHIQEAKPYFEKGYXKMGXKSMRNAYYNLGCAYVVEENKREGLCFIXKATEIQPDHFFS

SEQ ID NO: 46374 - protein, 324 aa, Bacillus anthracis
  MISC_FEATURE (111)..(111): X=any amino acid
  MISC_FEATURE (242)..(242): X=any amino acid
VERSLSMELVRVTEAAALSSARWMGRGKKDEADGAATSAMRDVFDTIRMKGTVVMGEGEMDEAPNLYIGEKLGPEYGPAVAVAIDPLEGTNIVAAGGWNALAVIAIARSRXFFSSSLPSPGIKFAVCPKNRLGPFDIDAPIIDNLRAVAKAKNPRILKMVVATVLNRSTSSSDYEEIRTAGARIKLINDGDVAGAINTAFDRTGVDILFGSGGAPEGVLAAVALKWLGGEIHGRLLPQKRAXIGACKKMGIEDINRMPSHGGLSKGDDAIFAATGVTDGELLRGVQFKGSVGTTQSLVMRAKSGTVRFVDGRHSLNKKPNLVIK

SEQ ID NO: 46375 - protein, 423 aa, Bacillus anthracis
  MISC_FEATURE (37)..(37): X=any amino acid
  MISC_FEATURE (117)..(117): X=any amino acid
  MISC_FEATURE (135)..(135): X=any amino acid
  MISC_FEATURE (145)..(145): X=any amino acid
  MISC_FEATURE (182)..(182): X=any amino acid
  MISC_FEATURE (204)..(204): X=any amino acid
  MISC_FEATURE (219)..(219): X=any amino acid
  MISC_FEATURE (221)..(221): X=any amino acid
  MISC_FEATURE (318)..(318): X=any amino acid
  MISC_FEATURE (323)..(323): X=any amino acid
  MISC_FEATURE (327)..(327): X=any amino acid
  MISC_FEATURE (349)..(349): X=any amino acid
  MISC_FEATURE (361)..(361): X=any amino acid
  MISC_FEATURE (383)..(383): X=any amino acid
MSIQIPRGTQDILPGTVELWQYIEGPSHAKICRRYNXKEIRYTDSLKHTELFLRGVGDTTDFVQKRMYSFQDRGERSLTLRPEGTALVVRSYVETKMFGDAPQPSENYYYIGQMFRXKNRPQAGRYRQFVQFGNXSNGSNDPCIXCRVIAPAGKFYRGHGLKKYKVVLNSLGDAASRQAHRXCVNCTLEPRIGGILVLKGNSGXKRNPFPIFNCKKGPXPXINGNAPSITEYLNEDSAVYYDKVQELLTMMDVPFEKDPNLVRGLGLTTQPPVFGNLWVNQGGFSVRSTTLRRWWPVITDLYKKIGWPENARYSVLRXKLNRXLWRXKLKTPQLQLDLRFHCYLVTPWXKSERPCCKSCVXLRKAGLAVEKRLFRSQNESTIXISRSLKAKFVAVLGEDELDKGIINLKDMGTGRTRRRSFRC

SEQ ID NO: 46376 - protein, 223 aa, Bacillus anthracis
MTSLLKLDKVSKVYGEGNTEVTALHPISLDVKAGEFIGIVGPSGSGKSTLLSIAGALLSPSKGDIYIREQNITKLSEKEMTDIRLKKIGFIFQFANLVPYLNVKEQLLYIAKLKKENKQESEKRADHLLAAFGLGERKNHYPNQLSGGEKQRVAIARAFMNNPDLILADEPTASLDSKRAREVVEMMKREVKESKKAAIMITHDERMLDVCDRILTLRDGQLI

SEQ ID NO: 46377 - protein, 217 aa, Bacillus anthracis
  MISC_FEATURE (195)..(195): X=any amino acid
DTYYNNAIGKTGLELKKELHNIIDDHTKLSYSAVWEALRDTDEDPNNKNNVILLYTGRSQGNSTNGPGVDNWTREHVCAKSHGDFETTAGPGTVLHHLRATNVSVNSSRENLDFDNGGGNHSEAPECKYDSDSWEPRDSVKGDIARMLFYMAVRYEGDNGEIDLELYERGENNKDPIHGQTIVFTKMNETDPGRXIRKESVNEVTFLRNIKHNRESF

SEQ ID NO: 46378 - protein, 179 aa, Bacillus anthracis; identical to SEQ ID NO: 45329
  MISC_FEATURE (67)..(67): X=any amino acid
  MISC_FEATURE (134)..(134): X=any amino acid
  MISC_FEATURE (154)..(154): X=any amino acid

SEQ ID NO: 46379 - protein, 416 aa, Bacillus anthracis
MNEVNQEIYKPVKTNRLWMILVLGTLTAIGPLSIDMYLPSLPKLTDDLQTGASLAQLTLTACLLGLSVGQLFVGSISDIYGRRKPLIIALIIYVASSLLCAVAPSIWTLVLLRFLQGASGSAGIVISRAMVRDMYSGSEMTKFFSLLMLVNGAAPILAPIIGGQLLQFTTWRGVFIVLGAISVFMLISATFVLRETLPPEERETGGLSGTLATYGKLLKDRLFMGYALSQGLVTAAMFAYISGSPFVLQNIYGASPQQFSLFFAINGIGIIIASQVTGRLAGKVNEKTLFVSGIVIAAVGGLSLLLTILLGIGLIGVLCSLFLVVSSVGVVSTTGFSLAMRNQKQAAGTASALLGLLQFISGALVAPLVGIGGSNTALPMGIVIALCEIGAVLCYLFMARRSEKQFELQARQNLEV

SEQ ID NO: 46380 - protein, 272 aa, Bacillus anthracis
MTLQEQIMKALHVQPVIDPKAEIRKRVDFLKDYVKKTGAKGFVLGISGGQDSTLAGRLAQLAVEEIRNEGGNATFIAVRLPYKVQKDEDDAQLALQFIQADQSVAFDIASTVDAFSNQYENLLDESLTDFNKGNVKARIRMVTQYAIGGQKGLLVIGTDHAAEAVTGFFTKFGDGGADLLPLTGLTKRQGRALLQELGADERLYLKMPTADLLDEKPGQADETELGITYDQLDDYLEGKTVPADVAEKIEKRYTVSEHKRQVPASMFDDWWK

SEQ ID NO: 46381 - protein, 367 aa, Bacillus anthracis
  MISC_FEATURE (310)..(310): X=any amino acid
ETRVVIGMSGGVDSSVAALLLKEQGYDVIGIFMKNWDDTDENGVSTAPEVSNDVNEVWTQNGIPYYAVNFEKQYWDKVFTYFLDEYRVVRPQTPRCMCNKEIKFKAFLEHAIALGADYVATGHYARVAYMDGEYKMLRGVDDNKDQTYFLNQLSQEQLSKTMFPLGELKKPQIREMAKEAGLATAAKKDSTGICFIGERNFPDFLSNYLPVQPGVMQTLSGEVKGKHDGLMYYTIGQRHGLGIGGNGDPWFAVGKNLKENILYVDQGFHNELLYGDEVIATNVGWVSYETERKRILVRSRNFRYRQKRQXSTGPKSWRKKQVRIFWEETISGIFPRTKQFVFYDGDECLCGAYIDEVYRTGKKLVLV

SEQ ID NO: 46382 - protein, 235 aa, Bacillus anthracis
MMGKKILVVDDEKPIADILKFNLEKEGFEIVMAHDGDEAIEKATEEQPDMVLLDIMLPGKDGLEVCREIRKSSEMPIIMLTAKDSEIDKVLGLELGADDYVTKPFSTRELLARVKANLRRHQQGGAAEKEENTEMVIGPIVINPNAYSVTKREENIELTHREFELLHYLAKHLGQVMTREHLLQTVWGYDYFGDVRTVDVTVRRLREKIEDNPSHPTLIVTRRGVGYYLRDPEQE

SEQ ID NO: 46383 - protein, 278 aa, Bacillus anthracis
MSKMKWFISLLLSLGLLAGCEEAAVKLEKKVEPKQEEVAKQEEKKDEAKPEEKPEEKQAEQEQNKQDEQKEKQEQKVEEKPKEEKPQAQLEVKKEEKQQEQPKEQPAVNKQPEQQKAQEEKQQQPKAQEVKEEAKVVNQPKETPKQEQKKKPEENNSVPTPPTPVPDPVPPVPDPVIPKPKQVTISVKGNEGYLLGAKKVDVQEGDTVYKVLQRTGLDVDAMGSKDGIYVKGINDLYEKDITATSGWKYRVNGAFPNHSAGVVTVKPGDTIEWVFVLK

SEQ ID NO: 46384 - protein, 256 aa, Bacillus anthracis
  MISC_FEATURE (124)..(124): X=any amino acid
MEILHAKSISKVYKGKVPYKALVDIDLSIQEGEFVGIMGPSGSGKTTLLNMVSTIDSPSSGEILINGTNPFQLSSEDLALFRRKQLGFVFQSFNLLSTLTVKENIVLPMTLDGVSVQEMNKRVXAIAEKLNITDILSKRTFEISGGQAQRTAIARAIVHKPQLLLADEPTGNLDSKSSNDVMEMLDTLNKEEKATMMLVTHDPYAASFCSRVVFIKDGQLYNEIYCGESRQAFYQKIMDVLSLLGGKRHDFSSVRI

SEQ ID NO: 46385 - protein, 505 aa, Bacillus anthracis
MITLTGHTLTIEEMKRLLLEGEGVTACPTSMQKVAECREVVEKIVENGKVVYGITTGFGKFSDVLIQKDDVKALQHNLIQSHACGIGDPFPEEVSRGMLILRANTMLKGVSGVRPLVVNMLLEFVNRKIHPVVPQQGSLGASGDLAPLSHLALILLGEGEVFYKGKRVHAMVALTEEGLEPIELEAKEGLALINGTQAMTAQGVLSYIEAEATAYQAELIASMTIEGLQGIIDAFDENVHKARGYKEQVEVASRIRDILHDSKLTTKQGELRVQDAYSLRCIPQVHGASWQVLNYVKEKLEIEMNAATDNPLIFDGGEKVISGGNFHGQPIAFAMDFLKVGMAELANISERRIERLVNPQLNDLPPFLSPEPGLQSGAMIMQYAAASLVSENKTLAHPASVDSIPSSANQEDHVSMGTIASRHAHQIIQNVRRVLSIEMICAMQAAEYRGIENMSTVTKSFYHQGRQQVPSITNDRIFSTDIENITHWLKTNYSIKERLDVNAAL

SEQ ID NO: 46386 - protein, 181 aa, Bacillus anthracis
MMKILKRAALPLLLLFVFLFENMFATIVPTAVFWKDSIAAPHFFIIVLCFVTVYYSPVQGIYYGLLFGFLFDTVYTELVGIYIFAYPIVAYLVYSVMKILQLNLFIVVSIVLASIAALEYYVYGFLTLLGRTHMSAYVFFTDRLLSTLLLNAIFLFIVCFPLRRYLVRLSKAMEEKEKRIF

SEQ ID NO: 46387 - protein, 295 aa, Bacillus anthracis
NIFRNKRTYVAHFLSSTFSIMVFFTYALLLFHPDLQGELKSTSATMSAYGTMGFTISQGLIFVFSFFFILYSVSSFLKTRKKEFGILMMQGMSMRQFKKLLLIENMLIGLGSICIGIFIGLIFSKLVLLISASVLMINNSLPFYTPVKAVLLTVITFLFLFFIVSLFTFKMVKITELVELIRAEEKPKPEPKSSILLSLLSLISIGYGYFSVFRFISSSSFTTLGMGVLLVIIGTYFLYTQCSVYILHLAKRREYFFLKRTNILTFSELIYRMKDNATMFFIVSIISAVAFTAIG

SEQ ID NO: 46388 - protein, 978 aa, Bacillus anthracis
MAEQTVRVTVDGKEFSASGEKTILQLFNESNLEHPQICHVPEVDPIQTCDTCIVEVDGKLMRACSTQIENGMHIERQSQRAKEAQTEAMDRILENHLLYCTVCDNNNGNCKVHNTVHMMGIEEQKYPYEPKVSACEVDMSHPFYRYDPNQCIACGQCVEVCQNLQVNETISIDWSLDRPRVIWDHGVSINDSSCVSCGQCVTVCPCNALMEKSMLGEAGFMTGLKPDVLDPMIDFVKDVEPGYSSILAVSEVEAAMRKTKVNKTKTVCTFCGVGCSFEVWTKDRHILKVQPVSDAPVNGISTCVKGKFGWDFVNSEDRITKPLIRQGDMFVEASWEEALEVVASNMQHIKSAYGSDAFGFISSSKVTNEENYLMQKLARQIYGTNNVDNCSRYCQSPATDGLFKTVGMGGDAGTVKDIAEAGLVIIVGANPTEGHPVLATRVKRAHKLHEQKLIVADLRKHEMAERADLFIHPRQGTDYVWLAGITKYIIDQDWHDKKFIAENVKNFDEYSKMVEKYTLDYTEKITGISKENLKEMARMVYEADGTCVLWGMGVTQNTGGSTTSAAISNLLLVTGNYRRPGAGAYPLRGHNNVQGACDMATLPNWLPGYQAVSDDTLRAKFEKAYGTTIPKAPGLNNIAMLLAAEEGKLRGMYVMGEEMALVDSNANHVQHILANLDFLVVQDMFLSKTARFADVILPAAPSLEKEGTFTNTERRIQRLYEVLKPLGDSKPDWWILQKVARALGGDWNYESPSEIMDEIASLAPLYSQATYDRLEGWNSLCWGSHDGSDTPLLYVDGFNFPDKLARLSLDEWIPPVVAPDEYDLLLNNGRMLEHFHEGNMTNKSAGILSKVSEVFVEISPELAIERNVKDGGLVELASPFGKIKVQALITDRVTGKELYLPMHATINEEAINILTGTATDLYTCTPAYKQTMVKMRVLREKGNRPLPPSNPRDKNRNPQNGVEIEQKWQRKQYVSLVD

SEQ ID NO: 46389 - protein, 554 aa, Bacillus anthracis
  MISC_FEATURE (211)..(211): X=any amino acid
  MISC_FEATURE (249)..(249): X=any amino acid
MNKTWWKEAVAYQIYPRSFMDSNGDGIGDLQGIIAKLDYLKDLGIDVIWICPMYKSPNEEYCYGTSDYQDYIDEFGTMEDFDALLDEVHKRDMKLIIDLVINHTSDEHPWFIESRSSKDNPKRDWYIWHDGKDGAEPNNWGKYFKWFGWEYDEVTGQYYLHLFSRKQPDLNWENKEVREVLYDTVNLVVDKGIDVFRVDAISHIKKEDGLXDMPNPKRLKVCSIFDKHMNVDGISPFFLGELKGKYLFXSSVIMTLGEANGVKIKNADLLGGKRAGKFNMVFQFEHLSLWDAEKKKILDVVGLKKVLTKWQKGLENKGWNALYIENHDKPRIVSTWGDDKQYWRESATALGAMYFFMHGTPFIYQGQEIGMTNVQFPNIEDYDDVAIKNLYREKIAEGVSHQDMMEIIWASCRDNSRTPMHWDDEINAGFTTGTPWFGMNQNYKEINVAKQKNEENSIFNFYKKMIALKKEHDVLNYGTYDLLLEDDPQIYAYTRTLNDEKIVVISNISKEEAVYNEDLFALERKRLLLNNYEVAEHEQLTTITLKPYETRVYR

SEQ ID NO: 46390 - protein, 1317 aa, Bacillus anthracis
  MISC_FEATURE (22)..(22): X=any amino acid
  MISC_FEATURE (62)..(62): X=any amino acid
  MISC_FEATURE (92)..(92): X=any amino acid
  MISC_FEATURE (257)..(257): X=any amino acid
  MISC_FEATURE (264)..(264): X=any amino acid
  MISC_FEATURE (303)..(303): X=any amino acid
  MISC_FEATURE (473)..(473): X=any amino acid
  MISC_FEATURE (495)..(495): X=any amino acid
  MISC_FEATURE (555)..(555): X=any amino acid
  MISC_FEATURE (591)..(591): X=any amino acid
  MISC_FEATURE (599)..(599): X=any amino acid
  MISC_FEATURE (747)..(747): X=any amino acid
  MISC_FEATURE (787)..(787): X=any amino acid
  MISC_FEATURE (814)..(814): X=any amino acid
  MISC_FEATURE (821)..(821): X=any amino acid
  MISC_FEATURE (825)..(825): X=any amino acid
  MISC_FEATURE (826)..(826): X=any amino acid
  MISC_FEATURE (936)..(936): X=any amino acid
  MISC_FEATURE (942)..(942): X=any amino acid
  MISC_FEATURE (951)..(951): X=any amino acid
  MISC_FEATURE (990)..(990): X=any amino acid
  MISC_FEATURE (1059)..(1059): X=any amino acid
  MISC_FEATURE (1092)..(1092): X=any amino acid
  MISC_FEATURE (1098)..(1098): X=any amino acid
  MISC_FEATURE (1112)..(1112): X=any amino acid
  MISC_FEATURE (1256)..(1256): X=any amino acid
  MISC_FEATURE (1259)..(1259): X=any amino acid
VNKREDFQILLQQLAKYQTTLXINIYKAGGIERLAIDKSDKSWHFNLQVPTYFAYRIIWICXKTSFKHHFLLLKEHLLLKNRRKNNLLKKKXRRFGPLGPEQITFSPRLAILKKQLFAGGWEGNYFLMWKMDVKFPVLRKNVSKPRGGSITQAFGFPRFQLDTHIQQNTEEMQKFREQTQQEDRERVIQAMEEMAKKQAEESSVVHEGPITLGYLIKPDEEITPMRENPDEERKKNGQGYVLHVGNKRLRRGTYGNXLYKKTGXYRNQLRIKMFLTGKKEKNPKAQIPKKRMLVKARGSVQKXYICSDLVMIANDINEITGPSRKDKAPEGEKRVELHLHTPMSQMDAVTPVSKLVAQAGKWGHEAIAVTDHAVAQSFPEAYSAGKKAGVKVIYGVEANLVNDGVPIAYNEEHRLLADETYVVFLIRDDRFIAVTHTVIELACCTSKRWEIIDRFESFCNSPYTIFGNHSLGXPGFTDDYVTGPPRSREGVKKVXEMDGDHPLVVHTASLDRGFINVGFKKAGLEKTEKSGNRYVRACKFLFPENENHRFKYVMXKGWTLINSASPWRFMIRRHGILTSEMLKDVIEKGFXISRSIKRXYGTRGCIKRGRPSHMTLLATSDVGLKNLYKLCFIFSSKLLLPCTASTRSLLKKYREGILVGTACDKGEVFEAMMQKAPEEVEEIAQFYDYIEVMPPEVLRHLVERELVRDEGQLKTIISNLVKLGETLDKPVVATGKRAFLRSQKMQXFAKFLLVRRAGPIPLNRHSLPPVHFRTTDEMLECFLILRXRCSERNCRNEYQKIANINWRCSSSKRXSIHTENXRCRXXNRDMSYKMARSIYGEELPEIVEARLEKELKSIIGHGFAVIYLISHKLVKKSLVDGYLVGSRGSVGSSFVATMMEITEVNPLPPHYVCPKCKQSEFFNDGSVGSGFDLPGXEMSNLXYSICKRWTXHSVRTFLGFKGDKGTRYRFEFLPGNTNHVPITIRKTIRXRLCISCGTIGTVAEKTAYGYVKGYANDHNLTIRNAEIDRLVAGCTGVKRTTGQHPGWYYRCARLYGHFXFLTNTVSSRFNGAEWRTTHFDFHSIHDNLLKAXYTRTRXSDSYSYVTRFKWYXSKNIPTDDPEVMKIFSGPESLGVTEEQINCKTGTLGIPEFGTKFVRQMLEETKPTTFSELVQISGLSHGTDVWLGNANELIYNGTCTLSEVIGCRDDIMVYLIYQGLDPSLAFKIMESVRKGKGVPEEWEEDMKSNNVPGWVYXFMXEDKVHVPKSPCGCLRTYGRAIAYLKVHFALYFYAAYFTFRADDFDVEKDGKRFSIYTC

SEQ ID NO: 46391 - protein, 231 aa, Bacillus anthracis
MRIAVIGAMEEEVRILRDKLEQAETETVAGCEFTKGQLAGHEVILLKSGIGKVNAAMSTTILLERYKPEKVINTGSAGGFHHSLNVGDVVISTEVRHHDVDVTAFNYEYGQVPGMPPGFKADEALVALAEKCMQAEENIQVVKGMIATGDSFMSDPNRVAAIRDKFENLYAVEMEAAAVAQVCHQYEVPFVIIRALSDIAGKESNVSFDQFLDQAALHSTNFIVKVLEELK

SEQ ID NO: 46392 - protein, 218 aa, Bacillus anthracis
  MISC_FEATURE (148)..(148): X=any amino acid
MNLILMGLSGAGKGTQAEQIVAKYNIPHISTGDMFRAAMKAETEMGLQAKSFIDKGALVQKEVTIGIVRERLSQEDCVRGFLLDGFPRTVAQASALEEIMKDLGKKIDYVLNINVDSGLLLKRLTGRRICKECGATYHLEFNAPAKVXGADKMWGEFISRLGWPLREPLANRLRCKLLSNLTLLLDFYEELGYLQSIIGEQDINKVFADIDVLIGGLA

SEQ ID NO: 46393 - protein, 301 aa, Bacillus anthracis
  MISC_FEATURE (223)..(223): X=any amino acid
MSVLVNKDTKVIVQGITGSQGLFHTKQMIEYGTKIVGGVTPGKGGTDIEGVPVFDTVEDAVKATGANASVVYVSPAFAADAIMEAVDAEIDLVVCITEGIPVLDMGNAKRYMGCKHTRLLGPNCPRVITPDECKIGIMPGYIHKKSHVGIVSRSGTLTYEAVHQLTQERMGPSTAVGIGGRPVNRYEFIDALKAFIEDEKTPAGNIDGENRGTTGKKSHLKGXKLILKTPVVGFIGGQTAPCWQTYGHAGAIISGGKGTAAEKIKTMEACGIKVAETPAVMGETLISVLKEKGLFETCKNY

SEQ ID NO: 46394 - protein, 147 aa, Bacillus anthracis
MKVVIASDHGGMNIRKELVSLLEELNIEYIDLGCECEAGSVDYPDFAFPAAEMVANGEVDRGILVCGTGIGMSIAANKVNGIRCALVHDTFSARATREHNDTNMLAMGERVIGAGLARDIAKIWLTTEFEGGRHENRVGKIKTYEAK

SEQ ID NO: 46395 - protein, 247 aa, Bacillus anthracis
  MISC_FEATURE (150)..(150): X=any amino acid
IGVLDSGVGGLTVASEIIRQLPKESIVYIGEKERCPYGPRSVEEGQSFLFEMGEFLKQFPLKGLIVTCNTAAAATLAALQEALSIPGIGVIHLGARTAIKVTKTREIRVIGTVRTIQSNMYQKALRELGTYLKMRSPACPTFNFSVKIDXKISHMSTPQVKQALLSLNKEKIDTLIPWADHYPPFRVLIKKELGEDVTIISSAEETAIELSTILQHKGILADNLNPKHRFFTTRLCFFIEHIAERWL

SEQ ID NO: 46396 - protein, 485 aa, Bacillus anthracis
MEKQVRVRYAPSPTGHLHIGNARTALFNYLFARHQDGKFIIRIEDTDVKRNVAGGEESQLKYLKWLGMDWDEGVDVGGEFGPYRQTERLDIYKKLYEDLLERGLAYKCYMTEEELEAEREGQIARGETPRYAGNHRDLTEAQVKEFEAEGRIPSIRFRVPADRDYTFKDIVKDEVAFHSNDFGDFVIVKKDGIPTYNFAVAVDDHLMEITHVLRGDDHISNTPKQMMIYEAFGWDIPQFGHMTLIVNESRKKLSKRDESIIQFIEQYKELGYLPEAIFNFIALLGWSPVGEEEIFSQEEFIKMFDAARLSKSPALFDSQKLKWMNNQYMKKQDLDTVVELSLPHLVKAGRIGETLSEQEQAWIRDVIALYHEQMSFGAEIVELSEMFFKDHVDYEEEGQEVLKGEQVPEVLRAFAGQVEALEAMEPAAIKAAIKAVQKETGHKGKNLFMPIRVATTGQTHGPELPNAIALLGKEKVLNRLQKVIG

SEQ ID NO: 46397 - protein, 636 aa, Bacillus anthracis
  MISC_FEATURE (164)..(164): X=any amino acid
  MISC_FEATURE (165)..(165): X=any amino acid
  MISC_FEATURE (320)..(320): X=any amino acid
  MISC_FEATURE (330)..(330): X=any amino acid
  MISC_FEATURE (407)..(407): X=any amino acid
  MISC_FEATURE (621)..(621): X=any amino acid
VVKITFLDGAVKEFQKGVTTEEIAASISPGLKKKAVAGKLNDEMIDLVTPIEEDGAVSIITLDSEDGLYILRHSTAHLLAQALKRLYKDVKVELGIGPVIENGFYYDIDMEEAITVEDFKKIEKEMQKIVNENLEFVCLRSVPRAESNLFGFKEIGEEVKIGFXXRFFQKDAVISIYEQGEFLGLCRGVHFPSPGKIKVFKFLSVRGAYWRADSNNKMLQRIYGTAFVKKAELDEHLRMLKEAKERDHRKLGKELKLFTNSQKVGQGLPLWLPKGATIRRIIERYIVDKEASLGYDHVYTPVLGSRELYETSGHWESLPXWMFPSMGNGXEELVLRPMNCPHHMMVYKNDIHSYRELPIRIAGTWNNHRYEMSGALSGVTTCTRMTLNDAHISFRPDQIKEELKRVXNLLLEVYKDFGLENYSFRLSYRDPEDTKKYYADDEMWKKAQGMLKEAMDEMGLDYYEAEGEAAFYGPKLDVQVRTALGKDETLSTVQLDFLLPERFELSYVGEDGKQHRPVVIHRGVVSTMERFVAFLIEEYKGAFPTWLAPVQVQVIPVSPQVHLDYAKESTDEIARAGIRVELDTREEKIGYKIREAQMQKIPYMLVVGDNEVTETGVKRTXITVNKNQKPIALECF

SEQ ID NO: 46398 - protein, 65 aa, Bacillus anthracis
MQGKVKWVYAEKGFGFIEREDGDDVFVHFSAIQQDGYKSLEEGQQVEFDIVDGARGPQAANVVKL

SEQ ID NO: 46399 - protein, 139 aa, Bacillus anthracis
MLQGINHICFSVSNLEKSIEFYQKILQAKLLVKGRKLAYFDLNGLWIALNVEEDIPRNEIKQSYTHMAFTVTNEALDHLKEVLIQNDVNILPGRERDERDQRSLYFTDPDGHKFEFHTGTLQNRLEYYKEDKKHMTFYI

SEQ ID NO: 46400 - protein, 293 aa, Bacillus anthracis
MDVLTKWFNATKQYLLDADRWADIGIAALKICIILTIGAIVVRIARAVVRNAFRMGSRSPIQISERRTVTVAKLLENIVAYVVMFIMLIAILGVFNINASGLLAGAGVIGLAVGFGAQSLVKDVITGLFILLEDQFSVGDYVKIGQFEGVVLEIGLRTTKVKSWTGEIHTLPNGSIVQVTNYSVSNSVAFVDVSISYEADIAKAEQVIEELLEELPAQYEQMVTTPQLLGVQTLAASEVILRVIAEVEPMQHAVIARALRKEIKNRLDLHGIEIPYPRMVLYNREELVSGKAI

SEQ ID NO: 46401 - protein, 429 aa, Bacillus anthracis
  MISC_FEATURE (57)..(57): X=any amino acid
  MISC_FEATURE (246)..(246): X=any amino acid
  MISC_FEATURE (249)..(249): X=any amino acid
  MISC_FEATURE (292)..(292): X=any amino acid
  MISC_FEATURE (300)..(300): X=any amino acid
  MISC_FEATURE (301)..(301): X=any amino acid
  MISC_FEATURE (340)..(340): X=any amino acid
  MISC_FEATURE (344)..(344): X=any amino acid
RYTRPEMGCIWTEENKFKAWVRVEILACEAWAELGDFLPHYEVEIREHASFDIDRIXGNEKETRHDVVAFTRAVSETPALGEERKWVHYGLTSTDVVDTALSYILKQANEIILKDLENFVSILANKAKEHKYTIMMGRTHGVHAEPTTFGLKLGLWYEEMKRNVERFKQAANTVRVGKLSGAVGTYANIDPFVEKYVCENLGLEAAPISTQTLQRDRHAHYMSTLALIATSIEKMAVGDSWFQKEXNTXSEEAFAKGQKGSSAMPHKRNPIGSENMTGLARGIRGYMMTGLXECSIWQEXXYFSLFSRRVILPDATIALNYMLNRFGNIVKNFTGFPGDXERHXARTFGLNLFSARNAYLIDKGMVREEAYDIVPPKSDGSLGNTSTFKELVEADERITSKLTQEEINECFNYEHHMQHVDTIFERLGL

SEQ ID NO: 46402 - protein, 343 aa, Bacillus anthracis
MGEYIMEKNTIILGIETSCDETAVAVVKNGTEIIANVVASQIESHKRFGGVVPEIASRHHVEEITVVLEEALKEANITFDDIDAIAVTEGPGLVGALLIGVNAAKAVAFAHDIPLVGVHHIAGHIYANRLVKEVQFPLLSLVVSGGHTELVYMKEHGSFEVIGETRDDAAGEAYDKVARTLSMPYPGGPHIDRLAHEGKPTIDLPRAWLEPDSYDFSFSGLKSAVINTVHNAKQRGIEIAPEDLAASFQESVIDVLVTKASRAADAYNVKQVLLAGGVAANKGLRARLETEFAQKENVELIIPPLSLCTDNAAMIAAAGTIAYEQGKRATLALNANPGLDIEA

SEQ ID NO: 46403 - protein, 322 aa, Bacillus anthracis
  MISC_FEATURE (202)..(202): X=any amino acid
  MISC_FEATURE (232)..(232): X=any amino acid
  MISC_FEATURE (275)..(275): X=any amino acid
MIQAITDALRVERKNDPNVLVFSEDVGVNGGVFRATEGLQAEFGEDRVMDTPLAESGIGGLAVGLALEGFRPVPENPNFFGFPFYEVNDSISGSLARMRYRSGGPGTCSVNGRSPFGGGVHTPELHADSLEGLVAQQPGLKVVIPSTPYDAKGLLISAIRDNDPVIYLEHMKLYRSFRQDVPEGEYTIDFRQVDIKRRRYRXFFYRFGAMVHVALKAAEELEKEGISLEVCXLTYRQPIGYRNNHRSVEKTGRVVVVQEAQKQAGIAANCVCGSXRPVQLKLRSSSVRVAAADTVFPFSQAESVWLPNHKDIVEAVNKVMNF

SEQ ID NO: 46404 - protein, 400 aa, Bacillus anthracis
  MISC_FEATURE (148)..(148): X=any amino acid
KERVPITVEEAVRKVMEFANEGLKELLPIELAYGRVLAEDLVTTYDVPSFNRSPYDGFAIRAEDTNVASYETPIVFEVVGEIGAGSLFDEKVGPFQAVRIMTGAQIPNGCDAVVMLELTRQYEEAGSKYMELKRSFKSGGDNISFSGXRCSVKERVLAKKGTYINPGISALLATFGYSEVPVARKPVVGLLATGSELLGCNDSLQPGENPNSNTYMILSQIRRAGGRVKYFGKFSDDFHTCFTAVKEALSQVDMLITTGGVSVGDYDYLPAIYEKLGASVLFNKVAMRPGSVTTVAQLNGKLLFGLSGNPSACYVGFELFVRPCIRTYMFSEKAHVKREKALLGEDFLKPNPFTRFVRGKLTYNERTVNRLSVGFDKSSSVSSLAETNIFIVLPRWYERY

SEQ ID NO: 46405 - protein, 231 aa, Bacillus anthracis
MKFCDRLLETVQPVWEMSHNHPFVVGMGDGTLEKDKFQYYIIQDYLYLLDYAKLYAIGVVKATNPQVMGKFAEQIDGILNGEMTIHKQYAKRLGISIEEIESAKPSAKNLAYTNYMMSVSQNGTLAELIAALLPCMWSYWEIGKRLNDIPGARDHEFFGEWIQGYSSEEYGNLCIWLIDLLNEMAVGKSEKELDRLEEIFLYSSRFEYLFWDMSYRKEMWGFEEQEHTTVS

SEQ ID NO: 46406 - protein, 1122 aa, Bacillus anthracis
  MISC_FEATURE (179)..(179): X=any amino acid
  MISC_FEATURE (182)..(182): X=any amino acid
  MISC_FEATURE (291)..(291): X=any amino acid
  MISC_FEATURE (327)..(327): X=any amino acid
  MISC_FEATURE (365)..(365): X=any amino acid
  MISC_FEATURE (444)..(444): X=any amino acid
  MISC_FEATURE (458)..(458): X=any amino acid
  MISC_FEATURE (562)..(562): X=any amino acid
  MISC_FEATURE (621)..(621): X=any amino acid
  MISC_FEATURE (622)..(622): X=any amino acid
  MISC_FEATURE (659)..(659): X=any amino acid
  MISC_FEATURE (660)..(660): X=any amino acid
  MISC_FEATURE (829)..(829): X=any amino acid
  MISC_FEATURE (839)..(839): X=any amino acid
  MISC_FEATURE (840)..(840): X=any amino acid
  MISC_FEATURE (843)..(843): X=any amino acid
  MISC_FEATURE (846)..(846): X=any amino acid
  MISC_FEATURE (921)..(921): X=any amino acid
  MISC_FEATURE (932)..(932): X=any amino acid
  MISC_FEATURE (949)..(949): X=any amino acid
  MISC_FEATURE (966)..(966): X=any amino acid
  MISC_FEATURE (975)..(975): X=any amino acid
  MISC_FEATURE (1002)..(1002): X=any amino acid
  MISC_FEATURE (1027)..(1027): X=any amino acid
  MISC_FEATURE (1048)..(1048): X=any amino acid
  MISC_FEATURE (1054)..(1054): X=any amino acid
  MISC_FEATURE (1063)..(1063): X=any amino acid
  MISC_FEATURE (1071)..(1071): X=any amino acid
  MISC_FEATURE (1105)..(1105): X=any amino acid
  MISC_FEATURE (1114)..(1114): X=any amino acid
KTVAIYSKEDSGSYHRYKADESYLVGEGKKPIDAYLDIEGIIEIAKSNHVDAIHPGYGFLSENIQFAKRCEEEGIIFIGPKSKHLDMFWDKVKARTQAQLAQIPVIPGSDGPVDSLEEVKEFAEKYDYPSYIKAFPWRGGRGMRIVRTSEELRESYYRAKSEAKAAFGNDEVYVEKIRXKTXHIEVQILADEEGNVVHLYERDCSVQRRHQKVVEIAPSVSLSDDLRQRICEAAVKITKNVNYLNARTVEFLVKDDNFYFIEVNPRAPVEHTITEMITGVDIVQSQSCNSXGHALHSNMESVSKQEEVGVHGFCNPISCTTEDPTKXFHARNGENYGLPIRGWVLGVVLIQVNSFQGAVKNTVLXFFTCKVTTWALTFEQAAAKMERNLKEFRIRGYKTNIPFLENVVKHKNFLSGEYDTSFIDASPELFLFPKRKDPRNENVXLHRGSNSKWVSPEXGKKRNNFPGCRIPNVLHSEPIQNGTKQILDERGADGLVKWVQDQKRVFLPDTTFRDAHQSLLATRIRNKNFTSNCRTEHQECYKFISAENGGGGQLLMLHIVSXKEDPWERLLDLREKMPNVLFPMLLRSSNAVGYKNYPDKFIQKVCGVFCSKAGLCVPYFXXLKLGWKYENLRLMLYEIRVKLQKQRCATRGYSRSNAXXIRLKYYKNLAKELEVSGAHILGIKDMAGLLKPNAAYDLVSAFKETVSIPISLHTHDTSGNGILTYTKAIEAGVDIVDVAVSSMAGQTSQPSANTLYYALGGNERQPDVNIDSLEKLSHYWEDVRKYYAPFESGMNAPHTEGYMHQMASGQYSNLPPPAKVGGFRRSLRXSGSNGSRVNXXCWXYWXRYAIHLKLSVIWHYHGSKSLNRTRCFERGHSMDFPGSVVEMFFWSLRTTNMCFSEKSFQEIIFKGEDPLPVRTGXIIRASRFSTRXRKSYSISLDAEVTCLMXLHMHLIQKYLWIRKSCXALWKCICAXYTDILYGMRLGEEIDVEIEQGKTLMGXLSINRRASARWKSCSLSGILRSTTXDCVKDESVKATVAQRVKGNPXNPNHIXRNNARNGYXSSCKRRRXSEKRRFYWHYRKDEKWKRQFKAPFNGKVKKVFVXGWRCKFQRXLTPGIKSL

SEQ ID NO: 46407 - protein, 490 aa, Bacillus anthracis
LKLKELANLLLVKETIGDMNVKITGLEMDSRKITNGNLFICVSGIDGFLEDRHQFVEDAVKNGAVALIVERDVNIEIPKIIVKDARYAMAVIASHFYGYPSNKMKLIGITGTNGKTTTSYLLEKILSDYGYHTGLMGNNGVKVGSKWYPTDINTQEPPTLQRNLQMMKNQNADYCVMEVTSQGLHMERVKGCNFKIAVFTNLTQDHLDYHGTFDEYKHVKSLLFARLGNNLSTIDKKIAVLNADDPSVEYFKKITSAEVITYGIHNGADVQAKNITLSPKGIRFLVSSFNGEIEVSLNLVGRFNVYNALAAITVALVEGIPLTNISDSLSNLKSIEGRMEIIDENQDFLVIVDYAHTPDALENVLSTIREFAKGKIITVFGCGGDRDQKKRSIMGGIAGSYSDFVFITSDNPRSEDPHAIMKDIEKGFSQNNNLNYKVEVDRELAINHAINMASSNDIVLIAGKGHETYQILKDSTIHFDDKEKARQAII

SEQ ID NO: 46408 - protein, 163 aa, Bacillus anthracis
FSYFMVGCLTLTLLVGCSAAEKPVEQVKQVKNTLTAKLATEEKMIEIDGQTIYFKKIGNEKPPLLMIHGFGGSSDGFRKIYSDLAKDHTIISVDALGFGRSSKPMDFYYSFPTHANLYYKLMKKLGYDSFAILGHSMGGEISLNLTYLYPEAVTHLILTDATG

SEQ ID NO: 46409 - protein, 107 aa, Bacillus anthracis
MTRFANQHVENTILEEDVELLKLMAHPMRLKLINELSKHKTLNVTQMTEILNIPQSTVSQHLSKMRRKVLRRNRPRLEIYYSIENQKAEEIMGIIRDPIHKIIKSPI

SEQ ID NO: 46410 - protein, 477 aa, Bacillus anthracis
  MISC_FEATURE (28)..(28): X=any amino acid
  MISC_FEATURE (253)..(253): X=any amino acid
  MISC_FEATURE (291)..(291): X=any amino acid
TVGPKRHPQITSIEADSRIVKEGSLCVXMIGDTVDSHDFAKQAAAQGAAAIGAEKPIDVTFPVVLVKNTFRSLAVLADYFYGRPTTQFTLNRYTGTNGKTPPSHIMDEIMRAHGHKRGLIGTINMKIGDETFEVKNTTPDALTLQQTLPKMVEHGVDSTVMEVSSHALDLGRVHGCDYDVAVFTNLTQDHLDYHKTMEEYKHAKRVAIAHWANSYNHIREKYAVLNNDDAVTVEYMRSTAATVVTYGIDTNKXCYGKDFAIPSGGTTFTLVPPYEKCKVTMKLIGEIKCIXCTAATAGRTVSWCSFGNNHDVIKELAGVPGRFEVVDGGQNYTVIVDYAHTPDSLENVLKTAKQFAKGDIYCIVGCGGDRDRTKRPIMASVATQYATHAIYTSDNPRSEDPAAILDDMVHGANGNNYEVIIDRKEAIHHAITKAKADDIIIIAGKGHETYQIIGKDVHHFDDREVAKEAITERLNNE

SEQ ID NO: 46411 - protein, 328 aa, Bacillus anthracis
  MISC_FEATURE (23)..(23): X=any amino acid
  MISC_FEATURE (87)..(87): X=any amino acid
  MISC_FEATURE (190)..(190): X=any amino acid
  MISC_FEATURE (201)..(201): X=any amino acid
NKKEEVLQVKDLKTHFLYRRRVXVKRVDGLKFSISKGETLRIPSESGCGKSITSLSIMRLIDRESGSKVEGNIFIKGNDFFTTNELXMACNRGNQISMIFQEPMTSLNPVYSVGEQIAEAIRIHQKLSKKEAWNKAVDMLKLVGDSFTEKRAKQEPHELSGGMRQRIMIAMALRLQSRLLIAEEPPTASXCNNSAQILSTXEIISKQLGMGIIMITHDLGVVSEPCDRVAVMYAGKIVEYADIEHIFLVPNHPYTIGLLQSLPSLDTDQKELQTIPGIRTESIPYPSGCRFADRYTHAKELCHNTLPELQLTQDGSEVRCWMFTDLWD

SEQ ID NO: 46412 - protein, 198 aa, Bacillus anthracis
MHYPEPISKLIDSFMKLPGIGPKTAVRLAFFVLDMKEDDVLGFAKALVNAKRDLAYCSVCGHITDRDPCYICNDSHRDQSVVCVVQEPKDVIAMEKMKEYQGVYHVLRGAISPMGGIGPEDINIPQLLKRLHDETVQEVILATNPNIEGEATAMYISRLLKPTGIKVTRIAHGLPVGGDLEYADEVTLSKALEGRREV

SEQ ID NO: 46413 - protein, 404 aa, Bacillus anthracis
MASWKRNLMICWLGCFTTAAGMSLVIPFLSFYIEELGVTGTSSIAQWSGLAFGVTFLMGAIVSPIWGKLGDIHGRKLMLIRASLGMAIIMTLMGFVTDVYQLVALRFLMGAVSGFLSTAMTFIAAETPKEHSGWAISTISTGGVSGSLLGPLLGGYLSELIGMRHVFLVTGAFLFLSFLIVFFFLHEENHSAQAKKVQTKKVWTMVPAKHLIISLFVTTFIIQLANMSVQPIVTLYVKNLVGPQTAHIETIAGAVMSATGLAVILAAPRLGRLSDHIGPQKTLVVALFAAGIIFIPQAFVTSAWQLLILRFLLGIAQAGLLPSVQTLLKQHTPTHVTGRIFGYNQSFQFLGNMIGPILGGQIAAHAGFQYVFFSTSSLLFIACIWVYFHNKNEEVSEKRHLEVS

SEQ ID NO: 46414 - protein, 460 aa, Bacillus anthracis
  MISC_FEATURE (138)..(138): X=any amino acid
  MISC_FEATURE (170)..(170): X=any amino acid
  MISC_FEATURE (177)..(177): X=any amino acid
  MISC_FEATURE (185)..(185): X=any amino acid
  MISC_FEATURE (274)..(274): X=any amino acid
  MISC_FEATURE (283)..(283): X=any amino acid
  MISC_FEATURE (307)..(307): X=any amino acid
  MISC_FEATURE (311)..(311): X=any amino acid
  MISC_FEATURE (318)..(318): X=any amino acid
  MISC_FEATURE (338)..(338): X=any amino acid
  MISC_FEATURE (375)..(375): X=any amino acid
  MISC_FEATURE (387)..(387): X=any amino acid
  MISC_FEATURE (394)..(394): X=any amino acid
  MISC_FEATURE (408)..(408): X=any amino acid
MSDRQAALDMALKTNRELTTGEGSIMKLARQAERKVSTVSSGSLALDVALGVGGYPRGRIIEIYGPESSGKTTVSLHAIAEVQRQGGQAAFIDAEHAMDPVYAQKLGVNIDELLLSQPDTGEQGLRNAESTCRSCGGXYIVIDSVADSCTEAEIERDMGDSPPRVIKSSXCVKTLLXKFLGAVQXNPKQIANLYLTKIFEKNGVMFGNQLRVAVYGKINEFTKGSPLLKISCLKILRTLLPKGDTFHLVANGESHPLFRLYQRQASLRIWGKVXRLPKRNFSXLSRVRQMIGYCWKCKALCKEMKRXSGLXRWKIYRXCQKQLQVVVRLKFYSTVRLXVRRAEQLKQGNDIVGNKTKVKVVKNKVAPPFPCCGSXYHVRQSIFQRRXNLRYGLXLDYLSKNPCLGTSXNEKQLRPGLKKFKQFLKENTDLREEIAFFIREHHGISEDSGAEGMEDPNLLD

SEQ ID NO: 46415 - protein, 295 aa, Bacillus anthracis
MKRVRKAIIPAAGLGTRFLPATKAMPKEMLPIVDKPTIQYIVEEAVKSGIEDIIIVTGKTKRSIEDHFDNAFELEQNLLEKKKYELLEKVQASSKMVDIHYIRQKEPKGLGHAVWCARKFIGDEPFAVLLGDDIVQAEKPCLRQLIEEYDKTLSSVIGVQTVPEDETHRYGIIDPLEQEGRRYQVRNFVEKPAAGTAPSNLAIMGRYVLTPEIFMFLEQQHVGAGGEIQLTDAIQSLNEIQRVFAYDFEGKRYDVGEKLGFVQTTIEMALQHPELRDDMVTMMKKILEEQTNQES

SEQ ID NO: 46416 - protein, 87 aa, Bacillus anthracis
  MISC_FEATURE (17)..(17): X=any amino acid
MSKLLKKKSGTQLLEHXSSKGLTKTLGAFDLFMLGGSSNIGTGVPVVTGLVTARDAGPTVNFSFGLAAIICGIYTLCYAEIASPSRG

SEQ ID NO: 46417 - protein, 351 aa, Bacillus anthracis
MKKQKNISCMYIRYSMLSSVSIALICTIVYVWKSEQQVYDLLWKESIASVPIGLFIMTTSLLIGGIVGYAIGYYIEQRIQGLNTFLFEVERGNFPSDVSFTADDEFHEVERKVIVLARRLEEQAGLFQKVTNERAHWNEEMRQEAISQERHRLARELHDSVSQQLFAMSMMMSAINEQVAEIPETTKKQLQLVENMVVNAQSEMRALLLHLRPVQLEGKKLTEGIEELLTELSRKQHMKIEWLIEPIQLKKGVEDHLFRIVQEALSNTLRHAKAKKTEVRLRKIEQYAILKIIDDGVGFKVGVNKAGSYGLRSMQERVHEIGGTLKVLSFPNKGTQIEVKVPIMIERGGES

SEQ ID NO: 46418 - protein, 132 aa, Bacillus anthracis; identical to SEQ ID NO: 46318

SEQ ID NO: 46419 - protein, 246 aa, Bacillus anthracis
MKKLIMTLFIAMLALAGCNTNKEEPKKEQKLEAVKVAVQTNPKEIKPGEKTEVQALVTQGKEKVTDADDVKFEVWKAGDEKHEMLEGKHKGKGVYAVEKTFETDGVYHIIAHTNAREMHVMPEVKVAVGNAKVEDAKKENSDHGAGHGDHKSDTMIHLMAGDIKANAESTMKVHLKQKEEALTGAEVQLEIWKDGVEKHEFIPAKEGNKGEYETKHTFKENGSYKVKVHVKKGELHEHKEETVEVK

SEQ ID NO: 46420 - protein, 126 aa, Bacillus anthracis
MRIIKEYEERRKEILETAERLFLTKGYTKTTVNDILKEIGIAKGTFYHYFKSKERVMDEIIMRIIKEDVAKAKVIVSNPNITVLEKLFRVLMEPSSKSRDIKDKMIEPFHPTNNAEMYPKRLMQSI

SEQ ID NO: 46421 - protein, 324 aa, Bacillus anthracis
  MISC_FEATURE (22)..(22): X=any amino acid
  MISC_FEATURE (141)..(141): X=any amino acid
  MISC_FEATURE (212)..(212): X=any amino acid
  MISC_FEATURE (213)..(213): X=any amino acid
  MISC_FEATURE (238)..(238): X=any amino acid
  MISC_FEATURE (268)..(268): X=any amino acid
  MISC_FEATURE (296)..(296): X=any amino acid
MKLQLMYSFLPSDINVIEKELXKTVASEQPLVEEAALQLIEAGGKRIPPVFVLLAGKFGDYKLDAIKHVAVALELIHMASLVHDDVIDAAFLRRGSATVNAKWGDRIAMYTGGYLFAKSLECMTNIEIPEAHQALSHTILXICECEIERTIDKYELCHNLKTYLRRIKRQTALLFACKCPLRAIAAGANPDTGNQLISRWAISKGMPNRIFXXHFKLLFHEKKIWKACWLGIIRKKTXPFPAPYALGRSKPFLRNQICTGKFTQRRKXKEIMEAVKISAAMDKAMAFSDGYLHKAXEMIKPLPTWTSASMALQNVAKYIGKRKF

SEQ ID NO: 46422 - protein, 503 aa, Bacillus anthracis
  MISC_FEATURE (430)..(430): X=any amino acid
  MISC_FEATURE (432)..(432): X=any amino acid
FEERVETINEGGAPKYHEQNKAKGKLFVRDRLALLFDNGEYVEDALFANCEETGLPADGVITATGKIHGRTACVMANDSTVKAGSWGARTVEKILRIQETAEKYGVPVFYLIESAWARITDQVEMFPPAPGARRIFSYQGKISWKGSPRRLLFGPSAAGGAYIPAFCDVVMMVEGNASMYLGSPRMAEMVIGEKVTLEEKGGARMHCSISGCGDVLCKTEEDAITQARQYISYFPNNYLEKTPLVTPQEPKQFDKTLEQIIPENQNAPFNMKDLINRVIDEGSFYEVKKLFAQELITGLARIDGKPVGIIANQPRMKGGVLFHDSADKAAKFINLCDAYHIPLLFLADVPGFMIGTKVERAGIIRHGAKMIFCMSESTVPEISIVGRKAYGAGLYAMAGPAFEPDCCLALPTASIAVMGPEAAVNAVPVXKXCSLPEEERDSFIAEKREEYKKDIDIYHLASEMVIDGIVHPNNLREELKGRFEMYMSKYQVFTDRKHPVYPV

SEQ ID NO: 46423 - protein, 714 aa, Bacillus anthracis
  MISC_FEATURE (37)..(37): X=any amino acid
  MISC_FEATURE (68)..(68): X=any amino acid
  MISC_FEATURE (80)..(80): X=any amino acid
  MISC_FEATURE (87)..(87): X=any amino acid
  MISC_FEATURE (141)..(141): X=any amino acid
  MISC_FEATURE (147)..(147): X=any amino acid
  MISC_FEATURE (229)..(229): X=any amino acid
  MISC_FEATURE (449)..(449): X=any amino acid
  MISC_FEATURE (491)..(491): X=any amino acid
  MISC_FEATURE (502)..(502): X=any amino acid
  MISC_FEATURE (529)..(529): X=any amino acid
  MISC_FEATURE (556)..(556): X=any amino acid
  MISC_FEATURE (583)..(583): X=any amino acid
  MISC_FEATURE (587)..(587): X=any amino acid
  MISC_FEATURE (616)..(616): X=any amino acid
  MISC_FEATURE (636)..(636): X=any amino acid
  MISC_FEATURE (654)..(654): X=any amino acid
  MISC_FEATURE (659)..(659): X=any amino acid
  MISC_FEATURE (667)..(667): X=any amino acid
MSQEKQVFSIDLAGAPAYQLTPGQLASKATGPIIVSXGDTAVFFYAPASKEAKNVDFFPLAVNLEERXYAVGKIPGGFIXTEGRPKXKAILAKSFIDRPIRPLFDDGFVNEVQVVNIVMSVDQDSLSEMAAMLRFFIDVIXFQYSIXGPIDGCNSWSYNARIRYQPNSRQQEQSDIHLVVAGTKDAINMVEAGADQVPEETMLEAIMFGHDEIKRLIAFPRRDCTSCRXEKSEVKLYEVDADLNQAVREMAEKDMHSAIQVHEKHAREDAINEVKKRVIEHYEAQEADADTLGQVNEILYKIVKEEVRRLITVEKIRPDGRKGDEIRPLASEVGILSRTHGSGLFTRGQTQALSICTLSALSDVQILDSLGVEEIKRFMHHYNFPSFSVGETRPMRGPSRRENRSRCTMRTCSGTVIPSEKDFPYTVRLVSEVLESNGSTSQASILGMXLKAMNGWLGFPLKGPQCKLLQVGLVKNWGSHSTNLFWIFQGXGKIHLGDIGLXSSQVQHHGCNALQMGHKNSMVYLVKFXKRHTTSEVGRVHILNSYVICMARATHXIISVRSKIITMTINPDKIRDVIGTSGXTIQXNLWKKLGVKFDIQPEWYSISFLQLIQENXPTKAKKIYLRIIVSRNTSRXESTKGKVNVVEEIRCFRXIIQRXRWISAHFXTALERVGKVEDVVKIGDVITVKVIEIDKQGRVNLSRKVLLKEEQEKE

SEQ ID NO: 46424 - protein, 479 aa, Bacillus anthracis
  MISC_FEATURE (300)..(300): X=any amino acid
  MISC_FEATURE (319)..(319): X=any amino acid
  MISC_FEATURE (333)..(333): X=any amino acid
  MISC_FEATURE (422)..(422): X=any amino acid
  MISC_FEATURE (451)..(451): X=any amino acid
FVNWLNNIVWSPALVYLCLGVSLYFSIRTRFLQVRHVRKMVEPDFSGKKSEGGWFSFQAVSTFLYQGALGQGKIPWGASPRIPFWGTRGLLFWMWAVAFFRAGSAYVESTLAQIYKTKHPGQFRGGPAYYIGKRLGVKGYGFSISLQRQILATGPFTTRGWQANSIAVSLETAFGINTTLSGALLVVVLALIIFGGVKRIVNVAQVVVPFMAVGYILVACVIVAMNIEKLPEAFMLIIRSAFALETAFGGIIGLAISWGVKRGIYSYEAGQGTGPPAAAAAEVSHPAKQSLVAGIFVYNXYIYCLFSTAFMMIYYRHVXRIDASGKKLYRNKXNGAQPGPGIYTGSSRICFPWIWKRFRLQSVTILCIYTIMAYYYIAETNIAYLNRDKDRPWLSMVLKFVFLGALFYGGIKQAATAWALRXYRCRNYGMGKIIAILLLQKTCISCIKGLXKAEKEGKDPVFDPGPLGIKNADFWEHEY

SEQ ID NO: 46425 - protein, 759 aa, Bacillus anthracis
DAPKLEKAKLVNPLSSKIYDKNGDLVYEYGKEKRTNVTYDQIPKLVENAFLATEDARFYEHSGVDFKGTARAVLVSLKGDYGSQGGSTITQQVIKNYFLSMEKTSKRKIQEIYLAYKLEQQYSKHEILEMYLNKINLGNRSYGIATAAQNYYGKELKELTLPEVAMLAGLPKAPNNYDPTKTENVQRATERRNVVLKLMNRHGYITKAEMEEASKVEVTDGLKTATVQAMPYPAFMDAVVKEVEKELPDANIGSDGLEIYTTLDIDAQKAADRILDANIINYPNDKFQSAFTFMDTKTGEVRAIGSGRGENKAVFKGHNMAIELDRAAGSTMKPIFDYGPAIEYLKWATYHQIDDSPFKYSTGQEVRNADRSHLGSITMREALKMSRNVPAVKAAKEVGLNKAKEFSEKLGITLKSAPESTAIGTNEVSPTEIAGAYATFGNGGKYAKPHFVKKVVYPDGKSQSFGQKPKQVIADSTAYMITDMLRSVVTSGTGTAANISSLDVAGKTGTTNYDSKQLAKFNIPESATRDSWFAGYTPQYTMAVWTGYMKDGKDEYISSKNTKIAQLIFKEMMSEMATDKSRFKMPSSVIQEGSELRIKGEKRDSSPNTSVPDTTEKPKQDQQQKTEEEKKQEELKKQEELKKQEEEKKQEELKKQEEQKKLEEQKKQEEEKKQNEQNNGNGQGTTPPANNGGGQGTTPPANNGGGQGNTTPPANNGGGQGNTTPPANNGGGQGNTTPPATTQPETGGNAGEAPANNGQ

SEQ ID NO: 46426 - protein, 382 aa, Bacillus anthracis
MKMKTQVVINAKIYTGQEVVENGFIRYAETIKEIGLMAQYVSQENETVLDAAGKIVIPGMIDVHIHGGYDIDAMDANSDGLVTLGKEMLKEGVTTYFPTTMTQAPEAIEAALHAAKEAKEKGAHFEYIHLEGPYVSKKRAGAQPLEHIVPANIEQFKQWQEASGNLIKLVTYAPEEEGALEFEQYLAETGVVGTMGHTDAIDAQLKNRNITHATHLYNQMRGLHHREPGVVGHVLLNPDVMVEVITDGIHIHPDMVKLAYKLKGPKKVSVITDAMRAKGLEDGLYELGGQPVHVKDGSARLEDGTLAGSILKMDQAFRNVIEFTGCSIEDAVLMTSVNQAEEFGLNNKGALAVGKDADFVVMNEDLHVYDTVRLGIHMKEGK

SEQ ID NO: 46427 - protein, 89 aa, Bacillus anthracis
  MISC_FEATURE (67)..(67): X=any amino acid
GSFRPVAGNLHLHRYYISPSLWLRQCPNRYTFRAGRNLPDKEFRYLRTVIVTAAVYWGFSSELRLRXPLSLTFQHRAGVTPYTSPYGFA

SEQ ID NO: 46428 - protein, 99 aa, Bacillus anthracis
MTRFANQHVENTILEEDVELLKLMAHPMRLKLINELSKHKTLNVTQMTEILNIPQSTVSQHLSKMRGKVLRGNRQGLEIYYSIENQKAEEIMGLLGPIQ

SEQ ID NO: 46429 - protein, 277 aa, Bacillus anthracis
  MISC_FEATURE (81)..(81): X=any amino acid
  MISC_FEATURE (131)..(131): X=any amino acid
  MISC_FEATURE (143)..(143): X=any amino acid
  MISC_FEATURE (165)..(165): X=any amino acid
HNYKKISVIVPNYNYEKYLSERVKSILNQTYPLYELIFLDDASTDNSVSIFEKLLSNENKHHLKIQQIINDKNSGSVFKQXIKGVSAATGDYIWIAEADDLCDQTFLEEVIQGFHIDSDVALSYHTIQNNXMTKEIYWLNHYXIYTNDIDKEKWQSSYVRKGDRXNTRWLLIKNTIPNVSSVVFKNIDIKTTAKQLRKFKIASDWFFYVSILKEGNIYFNPKPLNYHRRHKNSVTRAEDSYSHYSEVVQMQNFIKETFTIDDISKKKMYAYRKYLKA

SEQ ID NO: 46430 - protein, 362 aa, Bacillus anthracis
  MISC_FEATURE (202)..(202): X=any amino acid
  MISC_FEATURE (258)..(258): X=any amino acid
  MISC_FEATURE (320)..(320): X=any amino acid
  MISC_FEATURE (321)..(321): X=any amino acid
DILKLLMVAILIGLTAFFVAVEFAIIKVRSSRIDQLVSEKRRGALAAKKVTSNLDEYLSACQLGITITALGLGWLGEPTIKHLLEPLFLKLNLSPAIVATVSFIIAFGSYTFLHVCYWELAPKTFAIQRAEQVSLLLSKPLIGFNRIMYPFIRALNGSTPACRKIIWFTPASEHEVAHSEEELRLILSESYESREINPKGIXNMYLHIFEFDNRVAKGNYGCLYGKLRFILRTNHFETHIKIIAQEKYTRYPVFGERXDETHWMVNVKDLFIRYMDGNRDEECSITPYTRPVIEVLENIPIHDLLLQMQRKHIPLACSVXXIRRYSRNCYIRDILEEIGWRNPEVNSRKGPPAFEHISESGH

SEQ ID NO: 46431 - protein, 598 aa, Bacillus anthracis
  MISC_FEATURE (22)..(22): X=any amino acid
  MISC_FEATURE (36)..(36): X=any amino acid
  MISC_FEATURE (55)..(55): X=any amino acid
  MISC_FEATURE (82)..(82): X=any amino acid
  MISC_FEATURE (90)..(90): X=any amino acid
  MISC_FEATURE (119)..(119): X=any amino acid
  MISC_FEATURE (120)..(120): X=any amino acid
  MISC_FEATURE (144)..(144): X=any amino acid
  MISC_FEATURE (252)..(252): X=any amino acid
  MISC_FEATURE (266)..(266): X=any amino acid
  MISC_FEATURE (273)..(273): X=any amino acid
  MISC_FEATURE (287)..(287): X=any amino acid
  MISC_FEATURE (372)..(372): X=any amino acid
  MISC_FEATURE (404)..(404): X=any amino acid
VAERTHACGKSTVEAVGQQVHXKGWEPNSRDLRGDXSFIELRGSNGIRTSCFNPXTFKRPLEVAETIRKRIPYNTVKGTICXNWVKAHLXHMATGRIEVQATKVSVLNAAKTTPNHYCXXYRCIRKMYVLKYRLFRLTSPVNVXTHFKNASRRNETNSYFFRYRRVLESGNTNFRKSTPEGARDYLVPSRVHDGEFYALPQSPQLFKQLLMVGGFEALLSSSTCFPDEDLRADRQPESTQIDIEAFILNTRXNFRYMERMMNEMLXRDAKRVXKFSATIPLGMKICXCQMAPLRAFDKARYHAFEMEPNQTYSEFAARVVSLKVFTKCCRKRADQVKAIYAKRCCEQILSQRYRCITEFVKLYGAKGLSWVXREEGRLKRNNREIFSVKKMERVNEYIRSYCWXLLLFVADKKSVVADSLGALRLRLGKELELIDESKFNFLWVTDWPLLEYDVDADRYFAAHHPFTMPFREDVELLETAPEKARAQAYDLVLNGYELGGGSLRIYERDVQEKMFKALGFSQEEAQEQFGFLLEAFEYGTPPHGGIALGLDRLVMLLAGRTNLRDSIAFPKTASASCLLTEAPSPVAEAQLEELNLKL

SEQ ID NO: 46432 - protein, 224 aa, Bacillus anthracis
  MISC_FEATURE (138)..(138): X=any amino acid
  MISC_FEATURE (204)..(204): X=any amino acid
  MISC_FEATURE (208)..(208): X=any amino acid
YHCNLRGDVVTITNQDKEVVATYEYDAWGNVVKSDTKGIAVDNPFGYAGYMYDKEIGMYYLIARYYNPEHGVFLSVDPDPGDEDDPVTMNGYTYGDNNPVMMINPDGHLAWVYSSPWTRRRKFLAPHVGSFCWTTIGXTCYNATIKVQEYESSNRVKLLDIPNHGGSPSRLVRNKALGGVTQRPSYIQVKSGKMVIKKIGGTIXFTYXQTVGVLIKRGKIFTPF

SEQ ID NO: 46433 - protein, 586 aa, Bacillus anthracis
MLKEAIYHRPKDNYAYAYDEKTIHIRIRTKRDDVQSTTLIYGDPYEWKDGKWISSSTPMKKTGSTALFDYWFISIEPKFKRLRYGFELKNDTDTLIYAERGFFSTTPNDDVGNFFCFPFIHANDVFKAPSWIKDTVWYQIFPERFANGDHTLNPENTLPWGSAEPTPTNFFGGDFAGIIQNLDYLVKLGISGIYFTPIFKAHSNHKYDTIDYMEIDPQFGTKETFKELVQACHTHGIKVMLDAVFNHSGYFFDKFQDVLQNGEQSAYKEWFHIHEFPIRTEPLPNYDTFAFTPYMPKLNTAHPDVKEYLLEVGRYWVREFNIDGWRLDVANEVDHNFWREFRSEIKALNSEVYILGEIWHDALPWLQGDQFDAVMSYPVTNALLSYFANDSIKANEFMKQITESLHSYSMNVNEAAFHLLDSHDTPRILTTCNGDKNKLKLLYVFHLSFIGSPCIYYGDEIGMDGGMDPDCRKCMVWDTEEQDHTLFTHVQTLISLRKQYKAFGGHGTFQFIEANDEYNYISYTKTYEDETIFFVLNPTNSDITASLPLHVTGKKIINIYTNEEFSAEASVLQVTLPPYGFSILKW

SEQ ID NO: 46434 - protein, 61 aa, Bacillus anthracis
MLRARHLPFEITPKRAEAWLSCMEQAMDDTGVHGHIREFVFERLALTAQHMVNTPNETGEI

SEQ ID NO: 46435 - protein, 279 aa, Bacillus anthracis
NLQSKAVLNNGVEMPWFGLGVFKVEEGPELVEAVKSAIKAGYRSIDTAAIYGNEKAVGEGIRAGIEATGISREDLFITSRVWNADQGYEETIAAYEESLKKLELDYLDLYLVHWPVEGKYKDTWRALETLYKEKRVRAIGVSNFQSHHLQDVMERCPKYNPWFTPWNTHPPFTPKEKQTFLLRPSVFQGEAWSPLMQGQLLDNETLQEIAEKHGKTTAQVILRWDLQNGVITIPKSTKEHRIIANADVFNFELTKEDMGKNRCLNQNHRVGPDPDNFDF

SEQ ID NO: 46436 - protein, 130 aa, Bacillus anthracis
MAQVQYYGTGRRKSSVARVRLVSGEGRVIINGRDFENYIPFAALREVVKQPLVATETLGNYDVLVNVNGGGYTGQAGAIRHGISRALLKADPEYRLTLKRAGLLTRDARMKERKKYGLKGARRAPQFSKR

SEQ ID NO: 46437 - protein, 419 aa, Bacillus anthracis
MKKALSLLTVSALSIGMLSACGPKDSGKKEESKAKKDYDLLVWEDDKKGVGLEPAVKSFEEKYKVKVKVVEMQMTDQVKKLRLDGPAGTGPDVVTLPHDQIGNAVTEGLLSEVKADDAVKSKFTDSSIEAQTYNGKLYGLPKAIETPVFIYNKKLMPKAPETMDELFNFSKEFTKDGKYGFLALGDNFYFANAFMAGMGGYVFGEKDGKPNASDVGLNNSGAVQGAEYLQKWYKEKLFPKGIIGESGGPAADGLFNEGKAASIMNGPWAFQAMEKNGIDYGVAPMPKLPNGQPLKTFVGVKGWHVTSFSKQNDLATKFTEWVTNEENAKIRFEKTKEIPPVKAVMEDPIIKDNEAAKAVATQSENGIPMPNIPEMQEVWKPAGDALQLVVTDKEAPKAALDSAVKQIKGNIEANHSKQK

SEQ ID NO: 46438 - protein, 291 aa, Bacillus anthracis
MWQQKSFQQNEKGVLYLVPTPIGNLEDMTFRAIRILKEADLIAAEDTRQTKKLCNYFEIETPVMSYHEHNKEVSGKKILEKLDEGKTVALVSDAGMPCISDPGYDIVVEAVAEQYHVIPLPGANAALTALIASGLQTKQFYFYGFLQRNKKERKMELEKLRYVQTTMMFYEAPHRLDDTLISMQEVLGNREIVLCRELTKKFEEFIRGTVEEAIEWTKQNEVRGEFCILVAGSTEEPAPEEQWWESISVYNHIEHYINEKGMNSKEAIKTVAKDRDLSKRDVYQIYHVDKK

SEQ ID NO: 46439 - protein, 885 aa, Bacillus anthracis
MNRYTKIIVAMFLMIFTFVSTLQPLAVQAATKLADGEYSIGFKVLKDTSDEESMMNQYSVSPGTLKVKDGKKKVSFTLTNSSWITKFETEKAGKLVATNVISEDKEKDTRVVEFDVEDVEKVLNAKVKVDIDFLNYHHEYDVRIAFDQNSITPIHVEQPNEKEDPANKPDPNEKPDPSQKPDQKPDPDQQPNSNTIKDGEYSIPFKVLKNQTDEESKMNTYMVNPGVLKIENGKKKAIVTLKSSSLIKNFQTEKDGAFVDAKVVSENKEKDTRVVEFEVADLSKKLNTKVFIEMASRNYKQTHDVQLLFEQDKLEQIKNEEKQPEVEKPEVEKPEVEKPEVEKPDENKKTDAETIKDGEYSINFKALKDQTDEISMMNTYTKSPGLLKVKDGKKYVSFTLTNSSWITKFEFEKNGSFVDANVISEDKKADTRVVEVAVDDLSKKLNAKVKVDIDSMNYHHFYDIQFAFDKGSIKPLDNQGGNDNQGGNNNQGGNNNHDDNKTIDPNALKDGEYSIGFKVLKDKTEEISMMNTYTKNPGVLKVKDGKKYVSFTLTNSSWITKFEFEKNGAFVDAKVLGTNKEQDTRVVEVEVADLSKKLNAKVKVDIDSMNYHHFYDIQFAFDKGSIKSLGNQGGDTNQDGNGNQGGNDNQGGSNNQDDNNNQDGTNNLNENPTVDPKNLKDGQYDIAFKVLKDKTEEISMMNQYVVSPARLTVKDGKKYIAMTLKNSEWITKFQTEKNGGFADAKVVSEDKAANTRVVEFEANDLFAKLNAKVKVDIDSMNYHHFYDVQIQFDPTKIGAVGTVKEEPKNEPKNPVITPKVDNVKTIATPDFNRNADGKKKNEATNNDAKKEKNSKTADTAQLGLYMVLLLGSLALLVRKYRAGRL

SEQ ID NO: 46440 - protein, 1038 aa, Bacillus anthracis
MNKIINFSLKNKFAVWLLTIIVTIAGIYSGLNMKLETIPDITTPVVTVTTVYPGATPEEVADKVSKPMEEQLQNLSGVNVVSSSSFQNASSIQVEYDFDKNMEKAETEIKDALANVKLPEGVKDPKVSRVNFNAFPVISLSVASKNESLATLTENVEKNVVPGLKGLDGVASVQISGQQVDEVQLVFKKDKMKELGLSEDTVKNVIKGSDVSLPLGLYTFKDTEKSVVVDGNITTMKALKELKIPAVPSSASSQGSQTAGAGAQMPQMNPAAMNGIPTVTLSEIADIKEVGKAESISRTNGKEAIGIQIVKAADANTVDVVNAVKDKVKELEKKYKDLEIISTFDQGAPIEKSVETMLSKAIFGAIFAIVIIMLFLRNIRTTLISVVSIPLSLLIAVLVIKQMDITLNIMTLGAMTVAIGRVVDDSIVVIENIYRRMSLSEEKLRGKDLIREATKEMFIPIMSSTIVTIAVFLPLGLVKGMIGEMFLPFALTIVFALLASLLVAVTIVPMLAHSLFKKESMREKEVHHEEKPSKLANIYKRILAWALNHKIITSSIAVLLLVGSLALVPIIGVSFLPSEEEKMIIATYNPEPGQTLEDVEKIATKAEKHFQDNKDVKTIQFSLGGENPMSPGQSNQAMFFVQYDNDTKNFEKEKEQVVKDLQKMSGKGEWKNQDFGASGGSNEIKLYVYGDSSEDIKPVVKDIQNIMKKNKDLKDIDSSIAKTYAEYTLVADQEKLSKMGLTAAQIGMGLSNQHDRPVLTTIKKDGKDVNVYVEAEKQTYETIDDLTNRKITTPLGNEVAVKDVMTVKEGETSNTVKHRDGRVYAEVSAKLTSDDVSKASAAVQKEVDKMDLPSGVDVSMGGVTKDIEESFKQLGLAMLAAIAIVYFVLVVTFGGALAPFAILFSLPFTIIGALVALLISGETLSVSAMIGALMLIGIVVTNAIVLIDRVIHKENEGLSTREALLEAGATRLRPILMTAIATIGALIPLALGFEGSGLISKGLGVTVIGGLTSSTLLTLLIVPIVYEVLSKFKKKKAK

SEQ ID NO: 46441 - protein, 340 aa, Bacillus anthracis
RAKRKLDHIEYALSTGQSRTHGFHDIEFVHQSLPNSSYETITCETKIGELSLSSPIFINAMTGGGGEKTLHINEQLAYVAKHHNLAMAVGSQMAALKDESEAASYKIIRKVNPNGIFFANLGSEATVEQAKRAVDMVGAYALQIHLNVIQELTMPEGDRDFTGVLQRIEEIVLNSKVPVIVKEVGFGMSKETMQQLASVGVTAIDIGGQGGTNFAAVENERRQRMLSYFNNWGIQTATSIIEATSTNNNLSFIASGGIQTALLLTESNALGANTTAFAGYFLRILMEDGIEKLVDEIDLLHTDLKFIMTALGAKTIEELQSVPLVIKGETYHWLTQRGID

SEQ ID NO: 46442 - protein, 491 aa, Bacillus anthracis
MKLHTLVSCLHDFPVVPKENPEITSIEADSRKVKEGSLFVCMKGYTVDSHDFAKQAAAQGAAAIVAERPIDVDVPVVLVKNTFRSLAVLADYFYGQPTHKLHLIGITGTNGKTTTSHIMDEIMRAHGHKTGLIGTINMKIGDETFEVKNTTPDALTLQQTFAKMVEHGVDSTVMEVSSHALDLGRVHGCDYDVAVFTNLTQDHLDYHKTMEEYKHAKGLLFAQLGNSYNHNREKYAVLNNDDAVTVEYMRSTAATVVTYGIDTTSDVMAKDIAMTSGGTTFTLVTPYESVNVTMKLIGKFNVYNVLAATAAGLVSGVSLETIIDVIKELAGVPGRFEVVDGGQNYTVIVDYAHTPDSLENVLKTAKQFAKGDVYCIVGCGGDRDRTKRPIMASVATQYATHAIYTSDNPRSEDPAAILDDMVHGANGNNYEVIIDRKEAIHHAITKAKADDIIIIAGKGHETYQIIGKDVHHFDDREVAKEAITERLNNEE

SEQ ID NO: 46443 - protein, 91 aa, Bacillus anthracis
MKEQKEMFEEISEVLKVLAHPVRLSLVKIMLAKGPTNVTTMYGDLEMPQSTISQHLSKLKAAKMVTGTRKGLEIYYEVTDNRTKSILACLV

SEQ ID NO: 46444 - protein, 215 aa, Bacillus anthracis
MKFNKDVKEKLLFHVTINVIVIRNMIERLKVGDIMGKIIAIANQKGGVGKTTTSVNLGAGLAQVGKKVLLVDIDAQGNATTGVGIEKSELDQCIYNVLVEDADVQGVIQKTATENLDVLPATIQLAGAEIELVPTISREVRLQRALQPVRDEYDYIIIDCPPSLGLLTINALTAADSVIIPVQCEYYALEGLSQLLNTVRLVQKHLSSTLASWSV

SEQ ID NO: 46445 - protein, 747 aa, Bacillus anthracis
MIWNWLRKKKKLNTTEKNETDNSEQKPNNQEDDNKEQTRSTKHNKSNNSEQKKEEHKESSQDKQQNQSNQNQQQSAKQDESSQGQQNHSKQDDSDQGQQQHSKQGNSDQGQQQHSKQGDSNQGQQNHSKQNDSDQGQQQHSKQDESSQEQQNHSKQDDSDQGQQQHSKQDESSQEQQNHSKQDDSDQGQQQHSKQDESSQEQQNHSKQDDSDQDDSFQDTQQSSKQDDLAQDKQQHSKQDNSDQDKQQNSKGNSIYDFSKPEKDRIHSLQDLIEKLKKSSDFVNYHTSDDETMPYWISYYRPSLDGEKLQKYLMPTLLERPNASLEELKEHIPMSGITITNDLQKIEDMVLKGHAIVQVNQQDQKCMLANIAIDNYRAPTPPLNESTVIGPQEGFVEDIDTNINLVRKRLPVLDLQTKEMIVGEFSKTKVVMMYLDNLAEKDNVDFLEESLRALEYDQINDSAYIQELMGEKSIFPLYINTERTDRVTKALIDGKIAIFVDGSPSVLLTPVSYFDFFISPEDYNVSWLYATFSRILRLIAVLFSICATPLYVAVLNYHYELIPSDLLETLILSRAQVPFPPLIEALFLELAIDLLREAGARLPMKVGQTLGIVGGIVIGQASVQAGLTSNILLIIVALSALASFITPIYKMGNAVRLLRFPFLIFAEIGGLFGISLGFIFLFTHLFRLTSLRKPYALFYPTRQQSVKDSWIRFPLTMIDTRDVQARPQHVKKSAKGISTKHRSDFDD

SEQ ID NO: 46446 - protein, 413 aa, Bacillus anthracis
MDHLKRQDEKVFAAIEAELGRQRSKIELIASENFVSEAVMEAQGSVLTNKYAEGYPGKRYYGGCEHVDVVEDIARDRVKEIFGAEHVNVQPHSGAQANMAVYFTILEQGDTVLGMNLSHGGHLTHGSPVNFSGVQYNFVEYGVDAESHCINYDDVLAKAKEHKPKLIVAGASAYPRVIDFKRFREIADEVGAYLMVDMAHIAGLVAAGLHPNPVPHAHFVTTTTHKTLRGPRGGMILCEEQFAKQIDKSIFPGIQGGPLMHVIAAKAVAFGEALQDDFKTYAQNIINNANRLAEGLQKEGLTLVSGGTDNHLILIDVRNLEITGKVAEHVLDEVGITVNKNTIPFETASPFVTSGVRIGTAAVTSRGFGLEDMDEIASLIAYTLKNHENEAALEEARKRVEALTSKFPMYTDL

SEQ ID NO: 46447 - protein, 211 aa, Bacillus anthracis
MRIIKEYEERRKEILETAERLFLTKGYTKTTVNDILKEIGIAKGTFYHYFKSKEEVMDEIIMRIIKEDVAKAKVIVSNPNIPVLEKLFRVLMEQSPKSGDIKDKMIEQFHQPNNAEMYQKSLVQSIIHLSPVLTEILEQGIEEGIFSTSYPQETIELLLSSAQVIFDEGLFQWKPEEMMRRVKAYIKMMEVSVGAKEGSFNYMLEVLMKQR

SEQ ID NO: 46448 - protein, 800 aa, Bacillus anthracis
  MISC_FEATURE (392)..(392): X=any amino acid
  MISC_FEATURE (497)..(497): X=any amino acid
  MISC_FEATURE (515)..(515): X=any amino acid
  MISC_FEATURE (528)..(528): X=any amino acid
  MISC_FEATURE (545)..(545): X=any amino acid
  MISC_FEATURE (551)..(551): X=any amino acid
  MISC_FEATURE (576)..(576): X=any amino acid
  MISC_FEATURE (587)..(587): X=any amino acid
  MISC_FEATURE (598)..(598): X=any amino acid
  MISC_FEATURE (610)..(610): X=any amino acid
  MISC_FEATURE (649)..(649): X=any amino acid
  MISC_FEATURE (741)..(741): X=any amino acid
  MISC_FEATURE (768)..(768): X=any amino acid
  MISC_FEATURE (777)..(777): X=any amino acid
  MISC_FEATURE (788)..(788): X=any amino acid
  MISC_FEATURE (796)..(796): X=any amino acid
  MISC_FEATURE (798)..(798): X=any amino acid
FGRFTERAQKVLALSQEEAIRIGHNNIGTEHILLGLVREGEGIAAKALIALGLSPEKVQKEVEALIGRGTRSFSNVHYTPRAKKVIELSMDEARKLGHSYVGTEHILLGLIREGEGVAARVLNNLGVSLNKARQQVLQLLGSNEASSGHQGVFSTNANTPTLDSLARDLTVVARENRLDPGIGRGKEIQRVIEVLSRRTKNNPVLIGEPGGGKTANAERLAQQIVNNEVPETLRDKRVMTLDMGTVVAGTKYRGEFEDRLKESNDEIRQAGNIILFIDELHTLIGAGGAEGAIDASNILKPSLARGELQCIGATTLDEYRKYIEKDAALERRFQPIHVDEPSLDEITQILKGLRDRYEAHHRVSITDDAIDAAVKLSDPYITDRFLPDKANXFNDEAASKGRLRSYTTPPNLKELEVKLEEIRKEKDAAVQSQEFEKAASLRDMGTRFTEKLEDTKRQWKEQQGKENSEVTVEDICNVVSTWTRIPVSKLAQPETGXLFNFRIHPFHDRGIGSEXAVVAVTKAGSPCXSGYERSQTSIGSIYFSXGQQCRXNGLARALAESMFGDEDAMIFLDMSXVHGRSILLLVXLGLLQGVCWIXRRWPFTEKVSPXAIFSCPIRRVEKAHPDVFYILLQVLEDGRLNRFERAYGXFPQYIVIMTSNVGAEALKRNKHLGFNVQDESRDYSDMKGKVMDELKKAFRPEFLNRIDEIIVFHMLEKKHIQEIVTLMVNQLVNRLKAARNXIAFNRRAISAIADKGFDREYGARPPSXSDSETCRRXTIPRTVKRCYXRKGRKLSXCXRR

SEQ ID NO: 46449 - protein, 224 aa, Bacillus anthracis
RTKEVEIIGEADCVEDALEELMKNKPDIVFLDIQLSDDNGFEIANILKKMKNPPAIVFATAYDQYALQAFEVDALDYILKPFDEERIVQTLKKYKKQKQSQIEMKQEIKGADVTAEMHKLALPIEESIVLVNIEDIVYVGLVDGKVTVKTVRETYVTHDTLVILEKKLPTSKFMRVHRSFIANINHITEISAWFNSTYNLIMKEGSKVPVSRTYAKELKKLLRI

SEQ ID NO: 46450 - protein, 336 aa, Bacillus anthracis
MAKVYYEKDVTVNVLKEKKVAIIGYGSQGHAHAQNLRDNGFDVVVGLRKGKSWDKAKEDGFSVYTVAEAAKQADVVMILLPDELQPEVYEEEIAPNLQAGNSLVFAHGFNVHFDQVKPPVNVDVFLVAPKGPGHLVRRTFSEGGAVPALFAVYQDATGVATEKALSYADGIGATRAGVLETTFKEETETDLFGEQAVLCGGVTALVKAGFETLVDAGYQPELAYFECLHELKLIVDLMYEGGLENMRYSVSDTAQWGDFVSGPRVVTEDTKKAMGTVLAEIQDGTFARGWIAEHKAGKPNFYATNEKENEHEIEVVGRKLRGMMPFVQPRVKAGVK

SEQ ID NO: 46451 - protein, 268 aa, Bacillus anthracis
MKKILLSVVTALSVFTLAACGGKEENKLVVGASNVPHAVILEKAQPILEKKGIKLEIKKFQDYVLPNKALADKEIDANYFQHIPYLDKEIQEKGYKIVNAGKIHLEPMGIYSKRYKSLKDLPDGGTVIMSNNVAERGRMLALLQKGGVIKLKDGVDVVKATVKDVVENPKNLKFKTDVEPGLSPKLYENNEGDALFINSNYAIDAKLNPTKDAIAIEGSDSPYANIIAVRKGDEKKKEIKELVEVLHSKEIQDFINKEYKGAVLPVSE

SEQ ID NO: 46452 - protein, 657 aa, Bacillus anthracis
  MISC_FEATURE (45)..(45): X=any amino acid
  MISC_FEATURE (48)..(48): X=any amino acid
  MISC_FEATURE (199)..(199): X=any amino acid
  MISC_FEATURE (301)..(301): X=any amino acid
  MISC_FEATURE (655)..(655): X=any amino acid
FLGKKYKVVASMGHVRDLPKSQMGIEVKNNFTPKYITIRGRGPVXKDXKSAAKKAKKSYLAADPDREGEAMLGHLAQYVKVDVKSDCRVVFNEITKDAIKESFKHPRAINMDLVDAQQARRILDRLVGYNISPLLWKKVKKGLSAGRVQSVAVRLIIEREREIQSFEPEEFWTIKTEFVKGKDTFEASFYGVDGEKVNXRMKHKVNEIIDQLKDNAFSVENVTRKERKRNPALPFTTSSLQQEAARKLNMRAKKTMMLAQQLYEGIDLGKQGTVGLITYMRTDSTRISETAQTEARTYIYXGGGTGYLGAEKKKENEKSNAQDAHEAIRPTSVMRKPEELKSFLSRDQLRLYKLIWERFVASQMASAIMDTVTARLINNNVQFRASGSVVKFPGINEVYVESKDDGAEEKDKMVATFRSGETVFSKDLEPKQHFTQPPPRYTEARLVRTLEELGIGRPSTYVPTLETIQKRGYVGLDNKRFVPTELGEIVIELILEFFPEIINIEFTANMEQSLDEVEEGNANWVKIVDDFYVGFEPRLEKAEKEMREVEIKDEPAGEDCELCNHPMVFKMGKYGKFMACSNFPDCRNTKPIVKEIGVTCPKCDKGQIIERRSNKKKRLFYGCGTYPECDFVSWDKPIGRKCPKCEGMLVEERIXKS

SEQ ID NO: 46453 - protein, 392 aa, Bacillus anthracis
  MISC_FEATURE (24)..(24): X=any amino acid
  MISC_FEATURE (139)..(139): X=any amino acid
  MISC_FEATURE (150)..(150): X=any amino acid
MASWKRNLMICWLGCFTTAAGMSXVNPFLSFYIGELWVTGTSSIAQWSGLAFGVTFLMGCDVSPIWGKLGDIHARKLMPNSASLGMAIIMTLMGFVNGCVPLRPPKILMGAVSGFLSTAMTFFCSRNLPKEHSGWGDFXHFQWGGGWPRXFGPLLGGYLSELIGMRHVFLVTGAFLFLSFLILFFFFQKENPLCSSKKKSNEKKYGRWFQAKHLIISLFVTTFIIQLANMSVQPIVTLYVKNLVGPQTAHIETIAGAVMSATGLAVILAAPRLGRLSDHIGPQKTLVVALFAAGIIFIPQAFVTSAWQLLILRFLLGIAQAGLLPFRTNSTKTTYPTHVTGRIFGYNQSFQFLGNMIGPILGGQIAAHAGFQYVFFSTSSLLFKLRCIWVYF

SEQ ID NO: 46454 - protein, 1533 aa, Bacillus anthracis
  MISC_FEATURE (9)..(9): X=any amino acid
  MISC_FEATURE (353)..(353): X=any amino acid
  MISC_FEATURE (812)..(812): X=any amino acid
  MISC_FEATURE (860)..(860): X=any amino acid
  MISC_FEATURE (873)..(873): X=any amino acid
  MISC_FEATURE (1095)..(1095): X=any amino acid
  MISC_FEATURE (1115)..(1115): X=any amino acid
  MISC_FEATURE (1121)..(1121): X=any amino acid
  MISC_FEATURE (1474)..(1474): X=any amino acid
  MISC_FEATURE (1516)..(1516): X=any amino acid
  MISC_FEATURE (1529)..(1529): X=any amino acid
ISCLLCIGXKVSFGEIRKYLSDKLPEFMIPEKMIQVEEIPLNPNGKVDRKRLLDITQTDYVSIPYVAPRNEIEQKLVCAWEKVMEIEGIGIHDNFFALKGESIKALQVINLLRKDCLKISTTDFFKHPTIAQLSSCVKLEHKEENFESRPTHVKDLSNPFSLTEVQIAYMLGRNSQFELSGISPQTYFEYETALDINCLSKSFQKVIHRHPMLRAVILPEGKQQILQSVPDYEIEIVSLIDLDDRNQNARFTEERSRMTNHVFPLGQWPLFELKAFLLKEDKYLLCFRYDALLMDGASMNIVGQDLLHYYYKPNQKLESLSFDFQEYMFIYDEMEQSEEYKTAKDYWTSKLPXLSFAPSLLLKKGPAEIATPKSQSLTKILDNEKWTKLRKLAQKKEVTPSALLCTIYGDVLAYWSNQRRLAINLTVFNRYPVHDEVEKIVGDFTSLILLDVDVKPGQNFFTRVKETQSTLLDGLEHRHYDGVNFIRDFTRYHQMTPKAVMPIVFTSMLAGAGAFSWEQLGSLRYIHARTPQVYFGNVLIEKNGELLISWNYVEELFDVDVIEAMFSQFVDLLEQLVKQSDITSLQMKESDQTLIKQYNETTEKIPSTTLYQLFTDQVKRTPDEVAVVFEQEWLTYSELHKTLQSIAPFLKKTKGLGLRGKRGGFFTKKAKVDTIVNMLGILKAGAAYVPIDSDHPLDRQTYILKNSSCKLLLEPSLYEENDLSFYTTEDMPAIAGPEDIAYIIYTSGSTGKPKGVIITHQAVTNTIQDINQKYEVNEDDRIIGISSMCFDLSVYDIFGALSTGAMVGDDFXSQRHSELIRTVRRRGDYHLKYSALQSGFSIGQVRSHFEHSSLRFSLPXWKMESAFFTRKKXTTFSDCRSSFTRRGNRASIWSIYYPVKQVKSHWNSIPYGMPLANQTYYVLNYEKKMCPVGVIGDLYIGGVGLAKGYLNAEKKTNEAFVSHPDFGLIYKTGDCGKMHSEGYIEFLGRQDYQVKIQGYRVELEEISHCLLTYKQVEHAVVIDQTDENGIKFLVAYVVTEQNISTTELRKHLRDHLPDYMIPSYFVYLDQLPLTPNGKLDRTYLPVSTFPRSYLXHATNEPDTNAYFEQTNLGYXGGAGYXTLYSCFQQLVNRYDSLRTIIVQDEQAKPWQAVLYDVQINSEIKNLIEMTKQEQQEFLKQWMNENLSRGFKNDELMTRLCIFQLGNNEHKVIWSSHHLLCDGWSVSILIDELFQLYETTNAGNYVWSYLWVKPFETFIDWTLAQDHEKARHFWRDYLSGYNQKISIPKKKVPSKSEGLNFIFMDLTLDKDLTNQLQTFVTKNNITMNTALLAVWGILLGKFNGTREVVLPNLVSVRPPEVEGIENMFGLFTNVLPIRLAWTETQSFVDFLQKVQLETLKCNEYAYYSFVDIQKQSELKTELTDHLWVFENYPTNPAIFSSNENRHLLSRITKLLKLTPCKVWNYVLPLKKNLQXSLDLIKPYMKAEKIQGILNHIHGLINMILQNPIQAIGDYKLXKMKRRARTRLFKXNRSK

SEQ ID NO: 46455 - protein, 404 aa, Bacillus anthracis
QSAGENVWIANAGFLVTGVGLPLLGVLAFGFSGKDDLQSLASRAHPVFGIVFTTVLYLAIGPLFAIPRTGNVSYEIGLKPFMPEGLGSTPLILFTIVFFSITCFFSLNPAKIVDIVGKILTPIKLTFIGILVIVAFIHPIGEMQAPVEAYTSHAFFKGFQEGYLTMDTLASFVFGIIIINAIKEKGAKTKTQIMVVCAKATIIAASILAIIYTALSYMGASSVAKLGHLENGGEVLAKVSNYYFGSYGGVLLGLMITVACLTTSVGLVSVCSSFFHKLFPNVPYKAIAITLCIFSAIVANVGLTQLIAVSVPVLTAIYPLAIVLIFLTFFHSLFKGRAEVYQVSLTVTFIISLFDGLSAAGVNVEVVSQVFTKFLPMQEVGLGWIFPAIIGGFIGYGISVLKLK

SEQ ID NO: 46456 - protein, 163 aa, Bacillus anthracis
MDNFFGFRIVENLQKMDKDIQRKQLKYHNKRVMVSKEFTFDAAHHLHCYEGKCKNLHGHTYKVVFGISGYVNEIGLAIDFGDIKEIWKNEIEIYLDHRYLNETLPAMNTTAENMVVWIYEKMAEALTKDNRANEYKGARVEFVRLFETPTSYAEVRREWMLDE

SEQ ID NO: 46457 - protein, 341 aa, Bacillus anthracis
KTEKATPQKRKKSREEGNIARSKDLNNLFSILVLAVVVYFFGDWLGFEIANSVSVLFDQIGKKYRSTEYFYMMGILLLKVSAPILILVYAFHLFNYMIQVGFLFSSKVIKPKASRINPKNYFTRLFSRKSLVDILKSLFYMGLIGYVAYVLFKKNLEKIVSMIGFNWTASLTEIIRQIKFIFLAILIILIVLSIIDFIYQKWEYEQDIKMKKEEVKQEHKEYEGDPQVKGKRKNFMHAILAGKHCEEDGWVQRLFVNNPTNISVVLRYNKHVDAAPIVVAKGEDELALYIRTLAREQEIPMVENRPLARSLYYQVEEDETIPEDLYVAVIEVMRYLIQTNE

SEQ ID NO: 46458 - protein, 49 aa, Bacillus anthracis
MSNKVPTSFIIIIGLMLFALFFGAGNLIFPHMLGQMAGNRNEANAASST

SEQ ID NO: 46459 - protein, 307 aa, Bacillus anthracis
MKIFDAHCDVLLQLWSAQGKKDFKHDPQLHITFEQLKRRKESIQCFAIYVPETVAYENRFEVSLQMVDIFYNEILSLPGVKFIQTKDDINMLKQDEIGAILTLEGCEAIGKDAMKLRLLYRLGVRSFGLTWNYANLLADGALETRGAGLTTSGKHVVQELNALHVWTDVSHLNERSFWDVIEIAKNPIASHSNCMKLCQHPRNLNDEQLKALIKRNGMIGVTFVPQFLTNEKQANVADIIRHIEYICSLGGENNIGFGSDFDGILETVVNVSAYRDYENVVNELCKHYAASTVERFLYDNFVEHISF

SEQ ID NO: 46460 - protein, 566 aa, Bacillus anthracis
MSSKTEEKLATGAQLLLEALEKEGVEVIFGYPGGAVLPLYDALYDCEIPHILTRHEQGAIHAAEGYARITGNPGVVIATSGPGATNVITGLADAMIDSLPLVVFTGQVATTLIGSDAFQEADIMGLTMPVTKHNYQVRKASDLPRIIKEAFHIARTGRPGPVVIDLPKDMVVEQGERCSDVQMDLPGYNPNYEPNLLQINKLLQAIQVANKPLILAGAGVLHAKASKELTSFARKYEIPVVHTLLGLGGFPPDDELFLGMGGMHGSYTANMALYECNLLINIGARFDDRLTGNLAYFAKEATVAHIDIDPAEIGKNVPTEIPIVASAKQALQVLLQPEGRKENHHEWISLLKNRKEKYPFSYKRNSESIKPQYAIDMLYEITKGEAIVTTDVGQHQMWAAQYYPLKTPDKWVTSGGLGTMGFGFPAAIGAQIAKPDELVIAIVGDAGFQMTLQELSVLKEHSLPVKVFILNNEALGMVRQWQDEFYNQRYSHSLLSCQPDFVALANAYGIKGVRIDDPLLAKKQLQHAIELQEPVVIDCRVLQSEKVMPMVAPGKGVHQMEGVEKR

SEQ ID NO: 46461 - protein, 199 aa, Bacillus anthracis
  MISC_FEATURE (18)..(18): X=any amino acid
KLSYVYIDTGAMFRTIHXPAFEQKVDIGNEEPANGVVKNVKIEFQQGENTHFVFLNGQDPSEVIRTPEVTNRVSIVAKHRLVREEMVRRQQELAEKGGVVMDGRDIGTHVLPDAEVKIFMLASVEERAERRHLENMNKGFDSNLEQLKEEIAQRDKLDSEREVSPLKKADDALELDTTFFSIEEVVQKIMGIVLGVFAK

SEQ ID NO: 46462 - protein, 67 aa, Bacillus anthracis
MQDLHENHNVSILMVTHDAFSASYCERILFIQDGLLYKELKRQGKRENFYQDILGVLAHMGSAAESK

SEQ ID NO: 46463 - protein, 364 aa, Bacillus anthracis
MITVSNVSLRFADRKLFEGVNIKFTPGNCYGLIGANGAGKSTFLKILSGEIEPSTGDIHITPGERLAVLKQNHFEYEEFPVLETVIMGHTQLYKVMQEKNAIYMKEDFSDEDGMRAAELEGEFAELNGWEAESEAAILLKGLGIGEDLHDKKLSELTGAEKVKVLLAQALFGKPDILLLDEPTNHLDLKAIQWLENFLMNFENTVIVVSHDRHFLNKVCTHMADLDFGKIQLYVGNYDFWHESSQLALKLTQDANKKKEEKVKELQNFIARFSSNASKAKQATSRKKLLDKITLDDIRPSSRRYPFVGFTPEREVGNDLLTVEGLSKTIDGEKVLDNVYFTLNKGDKVAFIGRKHPTAHVRSTG

SEQ ID NO: 46464 - protein, 268 aa, Bacillus anthracis
  MISC_FEATURE (159)..(159): X=any amino acid
MNTKEISKVVDLVRESNPLVHNITNVVVTNFTANGLLALGASPVMAYAKKKVAEMASIAGALVLNMGTLRPDEVEAMLLAGKSANRNDVPVLFDPGGRRASRLEQEVARHIPAEIELAFISRKAAEIAININEKWEIKGGRRWAENGNVVSIAKQGSRXTNTVCGDYWKEDVVTDGERTIVIRNGHSILTKITGNWLFNYFVIRAFVAVEKGYVKAAVTALPFYAVAAELAAAKTVEKGPGSFQIEFLNQLANTTSGDIEKYGKIEVI

SEQ ID NO: 46465 - protein, 66 aa, Bacillus anthracis
MPKQKTHRGAAKRFKKTGSGKLKRSHAYTSHLFANKSTKAKRKLRKAGVVSAGDFKRIRQMLDNLK

SEQ ID NO: 46466 - protein, 131 aa, Bacillus anthracis
MKKHGVLNSEIAAVLASLGHTDTIVIADCGLPIPDGVKRIDLAVEIGKPSFLDVLQVVADDMAIEKVTLAEEVINNNAEVNKEIELKLIEPAFEYVCHEQFKEHTKKAKAIIRTGEATPYANVILHAGVIF

SEQ ID NO: 46467 - protein, 556 aa, Bacillus anthracis
MKRKENESVKVFALGGVGEIGKNMYCVEIDSEIFIVDAGLMFPGDEMFGIDIVIPDITYLVENQERVKGLFITHGHEDHIGGIVYVLRKLSIPVYATKLTVGLIQEKLGEAGMLGRVDLKTIDSNSTVEFNTTTVSFFGTTHSIPDSVGVCFHTSKGAIVYTGDFKFDQTPIGNSGADLGKMAQIGNEGVLCLLSDSTNAERPGYTGSEKEVGVEISKVFYGAEGRIIVASFASNVHRIQQVFDAAAETGRKVAVVGRSMVKVVDIARRLGYLDVPEGMVISLQEVDNFPEKKVAILTTGSQGEPMAALSRMAKQAHKQISIRKGDTVIIAASPIPGNEISVSKIIDLLFRAGAEVVYYGERKVHVSGHGSQEELKLMLNLMKPKYFVPVHGEFRMQKAHAYLAEDVGIARENIFIVEKGDVIGFGDDEANLVGKVQAGNVLIDGLGVGDVGNIVLRDRKMLSQDGILVVVVTLGKDEKKIISGPEIISRGFVYVRESEALIDRSTEIVRMIVEQSIKEYSIEWSMLKQNIRELLGQFLYEETKRKPMILPIIMEV

SEQ ID NO: 46468 - protein, 231 aa, Bacillus anthracis
  MISC_FEATURE (79)..(79): X=any amino acid
  MISC_FEATURE (94)..(94): X=any amino acid
  MISC_FEATURE (101)..(101): X=any amino acid
  MISC_FEATURE (156)..(156): X=any amino acid
  MISC_FEATURE (229)..(229): X=any amino acid
FLLIIKEGEFVGIMGPSGSGKTTLLNVISILDQATGGSVTIAGTNITSMKGNALSDFRVQKLGFIFQDFNLLENLSILXNIALTLFFASGTFKXDYWKRGXRCQKITGLLEILTKYPTAVSGGQKQRTAAARALVHNPAIVLADEPTGALDSKNAXSLLEAMQDLHENHNVSILMVTHDAFSASYCERILFIQRRLLYKELKRQGKRENFYQDILGVLAHMGSAAESKXGA

SEQ ID NO: 46469 - protein, 707 aa, Bacillus anthracis
  MISC_FEATURE (108)..(108): X=any amino acid
  MISC_FEATURE (265)..(265): X=any amino acid
  MISC_FEATURE (273)..(273): X=any amino acid
  MISC_FEATURE (436)..(436): X=any amino acid
  MISC_FEATURE (445)..(445): X=any amino acid
  MISC_FEATURE (454)..(454): X=any amino acid
  MISC_FEATURE (462)..(462): X=any amino acid
  MISC_FEATURE (467)..(467): X=any amino acid
  MISC_FEATURE (493)..(493): X=any amino acid
KKQKQQKKKTHVPFRLNVLFFCVFLMFSAVIVRLGYVQIVRGEGYKNESGKKENSTISNSCTRGKIFDRYGRPVVDNAAVRTITFTKMKGSTAEARLETAKKLADFDXVPTNKLTDRDKKDYWLAIHKEEAKEKITNKDRQEFKDKKIDDKELDERQRNRVTEEEVNQLSAKDLEVLAIKSKMDGGYAMTPTSPIKRDATDQEYAIISENLATITGCRYECDWDRKYIYDDFIPKVYLGGVSTSDEGLPRERLDYYLVRDYNRKXPRRGKLSXAAYEDSLHGNKAEVRNVTDKNGNILETINVSKGQSGNNLNLTIDMELQKRVEEIITKNLLRYKGGQPYLDRAFVVMMNPKNGEVLSMAGKQLVEENGETKSPSFPFGTDAKFFPKGSTVKGATVLTGYQTGAIQPGSVQLDDPIRLRGTPPKFFVKTMGYIKXFNSIKNVFXRYMFKTAEXISQAFNMXEVVRXIIPQKAFDTMRYYFGPVWTWRKNRYXFPNESAGQTGRGNQPGFLLDLSIGQYDTYTPLQLAQYVSTIANGGYRMQPQVVKEIRQPSAKQDEVGKVVHSMEPKVLNRIDMPESQIKRVQEGFRQVFNDSGGTAAKYFTGAPYKAAGKTGTAQTVYGGDKEIGKKANGERKEPYILPLVGYAPLKDPEVAFSVVVPWVDDKSGINGYISRDIMDAYFDLKKVENGEATKDEIDKKNKEQDDE

SEQ ID NO: 46470 - protein, 492 aa, Bacillus anthracis
MFQKIAKECLAGFTVAIVALPLAIAFGIAATGTSEGALVGLYGAIFAGLFAALFGGTPGQVTGPTGPITVIATGVIATHGLEASFIAFMMAGLFQILFGVCKLGSYVRYIPYPVVSGFMNGIALIIILGEMKHVQNSFLLVVLTIIVMIVSGKWIKAIPSSLVALVGVTALLPLFSSALEGLTVKLPVIGNLTLNKVIEKIGTIPEAMPTLHIPSLGGTGIAELVLPALSIALLGSIDSLLTSVVMDNVTGTRHKSNKELVGQGIGNMVSGLFGGLAGAGATVRSIVNIRSGGKTALSACMHSVILFIFIMGLGSVVQYIPLAVLSGILILTGIGMFDWESMKKMHVAPKGDVIVMLVTMIVTVKFDLMIAVAFGILLSFLIYMVKCKERKVSIVKEKEATYKIKGPLSFLTVDRVFYALQDVKSPVVLRMKDARYMDVSGAMALLNFIEQSDKSGLSVTLEQVPVHIKKTLVTMASNEQKDKLLFAEVDVM

SEQ ID NO: 46471 - protein, 509 aa, Bacillus anthracis
  MISC_FEATURE (23)..(23): X=any amino acid
  MISC_FEATURE (42)..(42): X=any amino acid
  MISC_FEATURE (45)..(45): X=any amino acid
  MISC_FEATURE (98)..(98): X=any amino acid
  MISC_FEATURE (105)..(105): X=any amino acid
  MISC_FEATURE (112)..(112): X=any amino acid
  MISC_FEATURE (114)..(114): X=any amino acid
  MISC_FEATURE (115)..(115): X=any amino acid
  MISC_FEATURE (279)..(279): X=any amino acid
  MISC_FEATURE (319)..(319): X=any amino acid
  MISC_FEATURE (364)..(364): X=any amino acid
  MISC_FEATURE (380)..(380): X=any amino acid
  MISC_FEATURE (452)..(452): X=any amino acid
  MISC_FEATURE (468)..(468): X=any amino acid
GESSIPQQLAKNVFLTQGRTYSXKIMEYFLTKKIERTYSKGXIHXKCIWNQIYFCGGAWGNKRAAKSYFDKDVKDLTISEAATIAGLIKAPSGESPYXNFNKATXRTELRIXVXXKRLRICADEQYNKEKESGLVLKRGVDDKYKGKYSQYVDYIVREAMDKYELPQNEILAGGYRIYTELDPKKQQAVYDVVNNDSYFKDSGSDQLMQTGVVLMNPTTGGVPALVGGRGPYQFLQFNHATQLKRQPGSTLKPLAVYVPALEQGYEVYDILKDEPFNLXEYKPPNSDPTFSREGNMDEAVAKSYYCFAGWAIKPIGIEXRIEFFKAIGYPLVTKRSYVSDGLRGMHVGNISICMASAYSTFCKXRCPMESSCIKREYKCXKVKRLEKWYKKENPMTSEKISLKMTYLFKGCLSKREQAKRARYLMLFPPGKTGTTQIVNGPSTGAKDSWLCXDTHQILVRCRFWLGIXLNRIPDLRFPGGSQISAGQVPGYIRKKATANPAPKKHSSYH

SEQ ID NO: 46472 - protein, 275 aa, Bacillus anthracis
MKFRNTKLAMVTLSSFFILGSASLSFTNIIQGEVASASPQEITVKSYDDTYYNNAIGKTGLELKKELHNIIDDHTKLSYSAVWEALRDTDEDPNNKNNVILLYTGRSQGKLTNGSGVDNWNREHVWAKSHGDFGTTAGPGTDLHHLRATDVSVNSSRGNLDFDNGGVNHSEATECKYDSDSWEPRDSVKGDIARMLFYMAVRYEGDNGEIDLELNEKVNNNKDPYMGKLSVLLKWNEQDPVDDLERKRNEVIFTKYQHNRNPFIDHPEWVNKIWN

SEQ ID NO: 46473 - protein, 118 aa, Bacillus anthracis
ILNIFLIFVLILISGFFVASEFAVVKVRKSRIDQLANEGNKQALAARSVISNLDVYLSACQLGITITSLGLGWLGEPTVEHLLRPLFEKINITGTMANTLSFIIAFSVITFFHVVLGE

SEQ ID NO: 46474 - protein, 450 aa, Bacillus anthracis
  MISC_FEATURE (254)..(254): X=any amino acid
  MISC_FEATURE (258)..(258): X=any amino acid
LKALSTDSPRQLQRTLTALDLTFLGIGAVIGTGIFVLTGEVAAKHSGPGIMLSFLIAAFTCACVAFCYAEFASSIPVSGSVYTYAYMTVGEVVAFIVGWCLMLEYLLAVAAVAVGWSGYLQSLLQGFNIHLPAIIASAPGVGKGGLIDLPSVVFLLIIPFLLSFGIRESARINNIMVLIKLAVIIAFIVAGAKYVKPENWTPFIPFGYDGIITGAATVFFAFLGFDAIATAAEETKKPQRDLPIGIIGFPLLIXTVLXMIESFRLTGMVPYTQLDVSDPVAFALHFVGEDTIAGLLAVGAMTGMTTVLLVVMYGQVRVSYAMSRDGLLPKALARVNKRVKIPLLNTWITGVVAALLARLLDLHVLANLVNIGTLTAFTFVCCAGLILRKTHPDLKRGFRTPFVPVLPVVAILCCLYLMINLSKTTWISFAPLAIVGLCFYFFYSRKHSHL

SEQ ID NO: 46475 - protein, 279 aa, Bacillus anthracis
LKTKTDFLKMKEQGEPITMLTAYDYPSAKLAEEAEVDMILVGESSGMVVLGYEFTVPVTVEDMIHHTKAVRRGFQETFIVTDMPFMSYHVSLQDTMVNARRHVQEKWCPALKVEGAGRVISTIHYLTNAGNFCRGHLGVNSSICGVLGGYKVQGKDAESAKKLIEDAKKCEEAGAIALVLECVPMQLADLFSEAITNFQQSGIGAGQKVDGQVLCYHDLISYGVNRVPEFVKAIYVRSRKNLYAGFLQYVAEVKTRQFPEEKHSFTMKEEECLALYGGK

SEQ ID NO: 46476 - protein, 211 aa, Bacillus anthracis
MGATGVASQRKTIEESIERNKEKYIETSHDIHANPEIGNQEFYASRTLSLLLGSAGFQLQHNIAGHETGFIARKSSGKQGPAIAFLAEYDALPGLGHACGHNLIGTISVAAAIALSETLEEIGGEVVVFGTPAEEGGPNGSAKSSYVKAGLFKNIDAALMIHPSGKTATTSPSLAVDPLDFHFLRKTTHAAASPEEGIYALDAGNPPGQQH

SEQ ID NO: 46477 - protein, 283 aa, Bacillus anthracis
MLEQGLDYVVKLAKSKKQILDANPMQYFIRAALAGIYIGFIIVLCFKLGNFFHIADSPATYLAASMFFGIALVLIIYGGAELFTGNTMYFTVATLRKETTISDTLRNWVACYAGNLAGALFFALLFYATGIFEAIDHGHLMNKVVEGKMNTPTMQLFFKAILCNWLVCLACFLPSQVKGDTAKIMIMMLLVFTFFLSGYEHSIANLSLFALSLVSPHPETISFAGAIHNLIPVTIGNIIGGSVFVGMVYHYLTKKVPDVKQEDTELVAAQQEEIIPLQAHMKH

SEQ ID NO: 46478 - protein, 500 aa, Bacillus anthracis
  MISC_FEATURE (387)..(387): X=any amino acid
  MISC_FEATURE (445)..(445): X=any amino acid
FYQTFQERKIELLTALSEHLQISLISLFFAVIIAVPLGILLTRKERMAELIIGTSAVMQTVPSLALLGLLIPLVGIGKIPAVIALVVYALLPILRNTYTGIRELDESFIRAPKAMGMNNSEKHVKVKAPSALTIIMAGIRTAMVLIVGTATWATPLGAGGLRETILLGMIGNDHALNILGAVPSRVTRLFFDVVLRVLESPKRSSKRVILTICIVGIMVASPFLWNTEKKDIVIAGKLGSELEILIQMYKQLIEQDIRCTRTIKTRSGKTAFVFEALKSGEVDIYPEFSGTALSTFVKEEPKSTNRDEVYEQARVGMEKKYNMVMLKPMEYNNTYALAMPKKIADQNNINTISDLGNIAQDTKVGFTLEFADREDGYKGMQKFIYLXVFKVKTMEPKLRYSAIQSGDVNVIDAYSTDSELEQYGLKALKDDKGVIPTIPKVHHYXKRDLQKYPELEKVLNKLSGKITDEEMRKMNYEVMWNVKNSEEVANKFLQKENYFR

SEQ ID NO: 46479 - protein, 413 aa, Bacillus anthracis
  MISC_FEATURE (95)..(95): X=any amino acid
  MISC_FEATURE (100)..(100): X=any amino acid
  MISC_FEATURE (105)..(105): X=any amino acid
  MISC_FEATURE (129)..(129): X=any amino acid
  MISC_FEATURE (150)..(150): X=any amino acid
  MISC_FEATURE (236)..(236): X=any amino acid
  MISC_FEATURE (276)..(276): X=any amino acid
  MISC_FEATURE (348)..(348): X=any amino acid
  MISC_FEATURE (354)..(354): X=any amino acid
  MISC_FEATURE (361)..(361): X=any amino acid
  MISC_FEATURE (374)..(374): X=any amino acid
  MISC_FEATURE (379)..(379): X=any amino acid
DEKGQLKCSFCGKTQTQVRKLVASSGCFHWDEGYRLCTENCPEELAKDEEVEFKDVPETGRKFRKFLDDVCHRQDNAKKALAVAGIYPLKRINFXPAKIXDCRNXGKENMRICWGPAGSGNIFSATKRXARFLNVPFAIADATSLNEAGXVGEDVKNIFLKLIQAADYDVEKAEKGIIYMDEMDKVARKSENPSIPRDVSGEGVQQALSENFRRYCARRSTSKVVVAFAPKSYSNXYNEYLFFWGWSRWMASSPLLTPALVKKELGFGSLKKKNVXCKLKTMFLSHVLPEDLLRFGLIPRVYRSSSSYCEPRATDEDALVDILTKPKNALVKQFQKLLELDDVELEVXRKCTNXNCEKSNXTKTSARGLRSIIXRLMLXVMFELPSRKDIEKCILTKETVADNAAPKLVLQDG

SEQ ID NO: 46480 - protein, 881 aa, Bacillus anthracis
MSNTEKNLPTKYDHMSVEEGLYQWWLEGKYFEATGDEKKQPYTIVIPPPNVTGKLHLGHAWDTTLQDILTRTKRMQGYDVLWLPGMDHAGIATQAKVEGKLREEGISRYDLGREKFLEKAWEWKEEYASHIRQQWGKVGLGLDYSRERFTLDKGLSDAVNKVFVQLYEKGLIYRGEYIINWDPATRTALSDIEVIHKEVQGAFYHMNYPLTDGSGHIRLATTRPETMLGDTAVAVHPEDDRYKHLIGKTVTLPIVGREIPIIADEYVEKDFGTGVVKITPAHDPNDFEVGNRHDLPRILVMNEDGSMNEKAGKYNGMDRFECRKALVKDLQEAGVLVEIEPHMHSVGHSERSGAVVEPYLSTQWFVKMAPLAEKAIELQQKEEEKVTFVPDRFENTYLRWMENIHDWCISRQLWWGHRIPAWYHKETGEVYVGTEAPADIENWNQDNDVLDTWFSSALWPFSTLGWPNEDAADFKRYYSTDALVTGYDIIFFWVSRMIFQGLEFTGERPFKDVLIHGLVRDEQGRKMSKSLGNGIDPMDVIEKYGADAMRFFLSTGSAPGQDLRFSMEKVESTWNFINKIWNASRFVLMNMDDMKYEEIDLTGEKSVADKWILTRLNETIESVTRNMDKYEFGEAGRSLYNFIWDDFCDWYIEMAKLPLYGEDEAAKKTTRSILAYVLDQTMRLLHPFMPFVTEKIWQHLPHEGESITVAAWPTVREDLQDTEAAAEMHLLVDIIRSVRNIRAEVNTPMSKKVQMQIKAKDEAVLAQLTKNSSYIERFCNPSELTIQTDLQAPEKAMTAIVTGAELFLPLADLINLDEERARLEKELEKFDKEVERVQKKLSNQGFVAKAPAAVIEGERAKEQDYLEKREAVRQRLADLEK

SEQ ID NO: 46481 - protein, 128 aa, Bacillus anthracis
MSRISKAEMSKLLSVYFIMGSNNCTKDPLQVLREALEGFITIFQFREKGEGALTGEERICFAKELQAICKEYGVPFIVNDDVELALELDADGVHVGQDDEGITSVREKMGDKIVGVSTHTIEEARWVN

SEQ ID NO: 46482 - protein, 539 aa, Bacillus anthracis
NVQDMIFQFIGGLGIFLFGIKYMGDGLQQAAGDRLRDILDRFTTNPLMGVLAGMLVTVLIQSSSGTTALTVGLVSAGFMTLRQAIGVIMGANIGTTVTAFIIGLKIGEYALPIMAVGAILLFFFKNKKVHSLGQVIFGFGMLFFGLELMSTGMKPLRSLESFQELTVSMSDNPILGIVVGTVFTLIVQSSSATIGILQELFGQGAIDLQAALPVLFGDNIGTTITAVLAAIGTSIAARRAALVHVIFNIVGTIIFTILLIPFTNLIQYFQTSLNLNPEMTIAFAHGTFNVTNTIIQFPFIAVLAWIVTKIIRGEDAAIDFKPQHLNPIFIEQSPAIALTEAQKEIIRMAEFSLHGLKEANQFLNTQDKKHVDMATQLEGAINNLDKKITEYLVLLSEKPLSPTDSEKHSVLAGVVGDIERVGDHVENLVELVDFQISNRVSLSNEALAELNEMLELTISTLQDAINALTNFDTELAQTVIAKERKIDQMERVLRKRHVLRLNERSCSGDASIIYVDMVSNLERIGDHAVNIADGVLGEQ

SEQ ID NO: 46483 - protein, 187 aa, Bacillus anthracis
MLLIGTEVKPFKANAYHNGEFIQVTDESLKGKWSVVCFYPADFTFVCPTELEDLQNQYATLKELGVEVYSVSTDTHFTHKAWHDSSETIGKIEYIMIGDPTRTITTNFNVLMEEEGLAARGTFIIDPDGVIQSMEINADGIGRDASILVNKIKAAQYVRNNPGEVCPAKWQEGSATLKPSLDLVGKI

SEQ ID NO: 46484 - protein, 427 aa, Bacillus anthracis
  MISC_FEATURE (22)..(22): X=any amino acid
  MISC_FEATURE (38)..(38): X=any amino acid
  MISC_FEATURE (42)..(42): X=any amino acid
  MISC_FEATURE (46)..(46): X=any amino acid
  MISC_FEATURE (141)..(141): X=any amino acid
  MISC_FEATURE (149)..(149): X=any amino acid
  MISC_FEATURE (167)..(167): X=any amino acid
  MISC_FEATURE (179)..(179): X=any amino acid
  MISC_FEATURE (197)..(197): X=any amino acid
  MISC_FEATURE (326)..(326): X=any amino acid
  MISC_FEATURE (327)..(327): X=any amino acid
  MISC_FEATURE (331)..(331): X=any amino acid
  MISC_FEATURE (340)..(340): X=any amino acid
LFLIFVLILISGFFVASEFAVXKVRKSRIDQLANEGQXTSLXVCKXVSYSNLDVYLSACQLGITITSLGLGWLGEPTVEHLLRPLFEKINITGTMANTLSFIIAFSVITFFHDCLGELVPKSFAIQKAEAITLKFARPPFXIDTMMSPXIWFLNKNCNLSPKIYSDXKPSKQNDLGHIXKGPRLDTGEKSQSRGFIXNQIEFVNTIFEFDDRVAKEIMVPRTEMICLSTENTLEENMDIVATEKYTRYPYHRKRKDDIIGMINTKEVFHDQTKGIHKPLESYIHSGPNCILKLFPIVKHWYIYIKNRVQMGIVMDEYGGTAWTFNXXRYSXRISWRNSRXFDADESPMIEKRTPKLTVLDGKVLISEVNDMFGLHIDESDLDTIGGWLLSQAVDVNIEAGYSIEYAGFQFKALELDGHQVKKIAVHK

SEQ ID NO: 46485 - protein, 463 aa, Bacillus anthracis
MENTLVKSLYRDTDKYAGQTVQVSGWIRNLRDSKAFGFIELNDGSFFKSVQIVFDTELDNFKEIAKLPLSSSVKVEGKVIATPGAKQPFEIKAEKIDIEGLSDSDYPLQKKRHTFEYLRTIAHLRPRTNAFSATFRVRSIAAFAIHQFFQERGFVHVHTPIITGSDTEGAGEMFRVTTQDLNNVPKGEDGQVDESKDFFGKETNLTVSGQLNAEAYALAFRDVYTFGPTFRAENSNTTRHAAEFWMVEPEIAFAELGDVMNLTEDMLKYAMKYVLEHAPEEMEFFNSFVDKTVLERMNNVINSDFGRITYTEAIKVLQESGADFKYPVEWGIDLQTEHERYLSEEIFKRPVFVTDYPKDIKAFYMRLNDDGKTVAATDLLVPGIGELIGGSQREERMDVLVDRIKELGMNEEDYWWYLELRKYGGTKHAGFGLGFERFLMYITGMANIRDVIPFPRTPGSSEF

SEQ ID NO: 46486 - protein, 338 aa, Bacillus anthracis
MSKNMISRVENISQPQFYNHNKIWTKPFIIAIIVVIILGIISLFTGVYDIRGQEDGMEMFFITRVPRTVALMLTGAAMAMAGLVMQLITQNRFVEPTTTGTIEWSSLGLLFVYLLFPAPTLVQRMTGAIIFSFIGTMIFFLFLRRVKLRSSLIVPIIGLMLGAVISAVSTFLGLLFQMTQSIETWFVGSFANIQVGRYEYLWLIVIVTLLIFMYANRLTLAGLGEDVATSLGVNYNRIVLFGTALISVAVGIVAAVIGNLPFLGLIVPNIVSMFRGDDLRSNLPWVCVIGMGTITACDIISRTIIKPFELPVSLILASVGAVVFITILLRKRKPRRLR

SEQ ID NO: 46487 - protein, 182 aa, Bacillus anthracis
MDSMTFLLFGATGDLAKRKIYPALYKLFSNGNIPQSISIIGIGRRVMSDVEFQTKVEQSLATFSRRSTDDESGVEEFLSTFRYCQLNTANIEDYQDLLSLVKRRETELNIPENRMFYLSVIPKVFDVIALNIKESGLWATKGLNRLIIEKPFGHHVTSAHEFNEKLIEDFDETDIFYIDHYL

SEQ ID NO: 46488 - protein, 636 aa, Bacillus anthracis
  MISC_FEATURE (20)..(20): X=any amino acid
  MISC_FEATURE (602)..(602): X=any amino acid
  MISC_FEATURE (632)..(632): X=any amino acid
IQKISKSQDLLLFSWFQAAXGVCLAHYTDQERVTISIPIIEKNLEQSENLNKLIPLGSEIHPHHTFKQLVNEIEQTTLFGYENQEYPLSELLVKHNLTPFQIVIGMEGLHNENSLEEYAENNLVLWIRRKWNEIHNEFEFQISCKSRSFSSLQQFANSYCYVLKQVSQNPNLALKDICIIAEEEKELLEGLNTFQTGIDLFQSFQDLFEAQVLKTPDQIAVVCNDQSLTYRELNKKANQMASILKSKGVPKESIIGVMVDRSLEMIIGMMGILKAGSSLLPIDPNYPTERIEYMLQDSQAKYLLSKRTEEVLPQFAGEVLYLDKEYLFQGEESNLVREHNPNDLAYVIYTSGSTGNPKGVMIEQKSLVHFLNVMREKVKANQSFLFLASVSFDISLLEICLPLTQGSKVVIATEDQFATKELAHLVKKHKVDLWEITPSRMEVILSIQKGQNFLKDLKSILLAGEAFSIDLVEKIRCISEATISNIYGPTETTICATVKDLSTSKEVTIGKPNPNYHSYILNKYGQLKPFGIPGELCIAGRSGSTRYLGKSKLTDEKFVPSPFAAGEMMYHTGDLVRWLPNGELEYLGRMDHQVKIRGYRIXLREIETQLRENIRINQVIVVDQCMEIGNYXLLLC

SEQ ID NO: 46489 - protein, 629 aa, Bacillus anthracis
MGYNAGSYDVIVIGAGHAGCEAGLAAARMGSKTLMLTINLDMVAFMPCNPSVGGPAKGIVVREIDALGGEMGRNIDKTHIQMRMLNTGKGPAVRALRAQADKFSYQHELKKTIEETPNLTLFQGMVERLIVEDGECKGVITQAGAEYTAKTVVITTGTFLRGEIIMGDLKYSSGPNNQQPSITLSEHLEELGFDLVRFKTGTPPRVNSNTIDYSKTEIQPGDDKPRAFSFETTKFIMDQIPCWLTYTSTETHRLIDENLHRSAMYSGMIKGTGPRYCPSIEDKVVRFNDKPRHQIFLEPEGRNTQEVYVQGLSTSLPEDVQRDMLRTIPGLENVEMMRTGYAIEYDAIVPTQLWPTLETKKIKNLYTAGQINGTSGYEEAAGQGLMAGINAACRSLGKKEVILGREDAYIGVLIDDLVTKGTNEPYRLLTSRAEYRLLLRHDNADLRLTEVGHEIGLITEERYERFTNKKLQIEQEKERLSSIIIKPRPEVQELIRNIGGSELKDGIRASDLLRRPEMTYEHIHLLVPSEVELSDEVKEQVEIQIKYEGYIEKSLQQVERMKKMENKKIPVDIDYDAISSLASEARQKLKDVRPLSMGQASRISGVNPADISILLVYIEQGKIARVSNQ

SEQ ID NO: 46490 - protein, 36 aa, Bacillus anthracis
MVFLIAVIGTRSLALRPTGMQNFMEWVFDFRERDYQ

SEQ ID NO: 46491 - protein, 176 aa, Bacillus anthracis
MSIVNTISLWVIPCVIGFILLYGTIKKVPTYESFVEGGKEGIQIAISILPFMVGMLVSISIFRASGALDAMISVMKPMLDLIHVPAEIVPLALIRPISGSAGLSITTDLIATYGPDSFIGRLASTMQGSTDTTFYILTVYFGAVGIRKMGDALKVGLFADLIGIICSIVFVSLMFK

SEQ ID NO: 46492 - protein, 309 aa, Bacillus anthracis
MPKVRTKDLIEQFQLELISGEEGIHRPIDTSDLSRPGIEMAGFFTYYPADRVQLLGKTELTFFDTLTSDQKQERMKALCTEETPCIIVTRNQDVPDELLQASRESGMPLLRSSQTTTRLSSRLTNYLEGKLAPTTAVHGVLVDIYGVGVLITGQSGVGKSETALELVKRGHRLVADDSVEIRQEDEDMLVGSSPDLIEHLLEIRGLGIINVMTLFGAGAVRNYKRITLVINLEIWDQKKNYDRLGLDEEKMKIIDTELTKITLPVRPGRNLAVIIEVAAMNFRLKRMGVNAAQQFSERLMSAIELGNQE

SEQ ID NO: 46493 - protein, 434 aa, Bacillus anthracis
MFRTISNFMRVAEIRRKILFTLAMLIVFRIGTFIPVPHTNAEVLKIQDQANVLGMLNVFGGGALQHFSIFAVGITPYITASIIVQLLQMDVIPKFSEWAKQGEMGRKKSAQFTRYFTIILAFIQAIGMSYGFNNIAGGQLITDQSWTTYLFIATVLTAGTAFLLWLGEQITANGVGNGISMLIFAGLVAAIPNVANQIYLQQFQNAGDQLFMHIIKMLLIGLVILAIVVGVIYIQQAVRKIPIQYAKAVSGNNQYQGAKNTHLPLKVNSAGVIPVIFASAFLMTPRTIAQLFPDSSVSKWLVANLDFAHPIGMTLYVGLIVAFTYFYAFIQVNPEQMAENLKKQNGYVPCIRPGKSTEQYVTKILYRLTFIGAIFLGAISILPLVFTKIATLPPSAQIGGTSLLIIVGVALETMKTLESQLVKRHYKGFIKKAN

SEQ ID NO: 46494 - protein, 70 aa, Bacillus anthracis
MTKHDHGLKEKVEGAIDKVKGEVKEVVGKVTDNKKLQAEGKWDKVKGTAKDTVGNVKEKVHEYKEHKENK

SEQ ID NO: 46495 - protein, 202 aa, Bacillus anthracis
  MISC_FEATURE (59)..(59): X=any amino acid
  MISC_FEATURE (96)..(96): X=any amino acid
  MISC_FEATURE (104)..(104): X=any amino acid
  MISC_FEATURE (106)..(106): X=any amino acid
  MISC_FEATURE (132)..(132): X=any amino acid
  MISC_FEATURE (148)..(148): X=any amino acid
  MISC_FEATURE (155)..(155): X=any amino acid
MADHYFSNDPSSKSDRKRWEFTLRGSRFTFLSEPGVFSKNEVDFGSRLLIESVQVPEYXGDILDVGCGYGPIGLSLAKEFQDRKVHMVGCEEKGAXLAKEKCRXQXKLEMGTFFQSSVYENVEGMNAGYSIXIFHFVQGKDIVAWNFXKSCKTFXFPGGKDWGIVIQKKQGAPSALKKLEEVFSEVEVVEKKKGYYIIKSKK

SEQ ID NO: 46496 - protein, 123 aa, Bacillus anthracis
MIQTKDKIKVMRAEDLPIQIGKEVQMKGMSIALFRLSNGDIRAVENRCPHKNGPLAEGIVSGEFVFCPLHDWKISLLTGEVQKPDDGCIQTYEVEVINGDIYIYICNLQKEASPLAFLLNKTR

SEQ ID NO: 46497 - protein, 308 aa, Bacillus anthracis
MNNSRRIGLIMIITGATLWGLSGPMIQWLFQHTNVSSVDFLTIRLLLAGIFILSFLLIKKQNIFQIWKHPRYSIQLIIFSILGMLGAQYAFIETVHISNAVTATLFQFLGPVLITMYVAFEQRKSPAPIQLLAIITALTGTYFIITNGSIENIVLSKEAIIFGLLTAIGFAFYTLHPASLIKECGTIVVIGWGMLIGGIALLICNRSFEWTQLSQTFTLKTFSMLILIIISGTLSFLLYIGSLKYLAATETSILSSIEPLVAAIVSIAWLNESFGAYQLLGGLCIVLSVIFLTMPQKENEATFSTEQI

SEQ ID NO: 46498 - protein, 835 aa, Bacillus anthracis
  MISC_FEATURE (13)..(13): X=any amino acid
  MISC_FEATURE (23)..(23): X=any amino acid
  MISC_FEATURE (52)..(52): X=any amino acid
  MISC_FEATURE (187)..(187): X=any amino acid
  MISC_FEATURE (243)..(243): X=any amino acid
  MISC_FEATURE (246)..(246): X=any amino acid
  MISC_FEATURE (251)..(251): X=any amino acid
  MISC_FEATURE (277)..(277): X=any amino acid
  MISC_FEATURE (311)..(311): X=any amino acid
  MISC_FEATURE (542)..(542): X=any amino acid
  MISC_FEATURE (582)..(582): X=any amino acid
  MISC_FEATURE (598)..(598): X=any amino acid
  MISC_FEATURE (605)..(605): X=any amino acid
  MISC_FEATURE (627)..(627): X=any amino acid
  MISC_FEATURE (704)..(704): X=any amino acid
  MISC_FEATURE (705)..(705): X=any amino acid
  MISC_FEATURE (718)..(718): X=any amino acid
  MISC_FEATURE (805)..(805): X=any amino acid
  MISC_FEATURE (822)..(822): X=any amino acid
ISLEISSLPIHPXFLKRQLYIRXSVRLFLFTFFNKLCIRLFYMKSFIPEIYXKSFFMICDIAIMVTAQSTLSYYLLMNEPIHVFTTSYIDILFQLTYPMADLLFLLIGINLLFRPLSLLPKKVGAASRQALLLYATTDAIYAFIKYFTPEYSMFTVTPLYQVTLVLVAIACIIPYKKPLKTKDQFFXPPKLGESIGLSFPNYFCRKGGLFLILVEIRFSHFMLLFGFIKPFSVFLIRHRFSSXTKXIYYYXPQWQFNSDLKNQIDLRTEDLVEQKNXALSYPNKMFKSLYEASSRPIFTLDLYGNFLKSEXCRYGLYSAIKPTIYLIHPFYSLICEEDLEKFITTFHRVKKGHSISLEIRAYHKNRDIYYLHVTAGPIFLKDHISGVYLMIKDITESKQQQEQINFLAYRDTLTELANRRAFHQYVEQAIARSKISKRPFAVMFLDLDRFKIINDTLGHRVGRPPIIAVAKRLERMATPNMKLARLAGDEFTILIENYNKRPDVKRMADTIVEAMNEPLEIENQHLQISPSIGIAIYPEAGXSPIVDSTTCDMAMYEAKNRGKNGSSLYTKELYKKMERKAXIEKDLPLALENTISWXRISTTNXYTTQKDHWLLKALLRWEASTIXAISPRGVYFQLEKETPQVIPLGHWVLQESCRQLTIGHSLRLQRFKHKCNLSAKEFQQDHLIENISQILTDVKVDPKXXPLELPGRIGDVRXKSPLSRAKPFKGIWYSNVPMDDFRTGLFFSRLINLFSYRYIKSPREIYTLADHRPEERAIVSTILSLANTLNLSVVAEGIETEKPFXVSTKEPTVNIARLLFQXPTTSQQFIKFLQK

SEQ ID NO: 46499 - protein, 58 aa, Bacillus anthracis
MSCGHCVNAIESSVKELNGVEQVKVQLAEGTVESTIDSSVVTLKDIVAVIEDQGYDVQ

SEQ ID NO: 46500 - protein, 519 aa, Bacillus anthracis
  MISC_FEATURE (241)..(241): X=any amino acid
  MISC_FEATURE (345)..(345): X=any amino acid
  MISC_FEATURE (415)..(415): X=any amino acid
VAVLSTIIFSSVFAAPPSQTPAEQNRYIDVQILGINDFHGQLDTVKKINNKEAGGVDYLATYLKERKKQNPNTLLVHAGDIVGASPPVSALLQDEPTIEFLNDLKFDVGTIGNHEFDEGIEEMRRLIYGGYHEKTGNFKGADFPYVAANFYNKSTGRLFLPPFTIKMVKGVPVGFIGVVTTDTPNVVMPTMLKNVEITDEVEAINKSAHQLKRLGVKSMVVLAHVGGTTDESGVTNGDLTXIANETDPEVDVILGGHSHTYVNGTVNNKLIVQANSYGTAFSDVDVTIDRKTKDIVKKKAEVVTTYHEGVEPDKQVKKKLDQYKEKIAPLVNEVVGKSTALIGRXTKDAGESTSWNFSGGCPSPQAMQTQIALMIPGAIRNDLDAGDITWGRIYGIQPLETQLIKVDFTGPDNSXHLNQQWQKGAARMLQISGIHYTWDANKPNGGKSYKYTFTSGEELSPSKTYSVVANAFLASGGDGFVSFKNGKNTETGPNDFEALVDYVKQLKEPIQPIIDGRIQ

SEQ ID NO: 46501 - protein, 415 aa, Bacillus anthracis
MNKFVTFLDKNLSGPMARLSEQRHLQAIRDGVISALPFIIVGSFFLIVAFPPLPKDSFISVWALKNQTSILIPYRLTMFIMSLYIAFGIGYNLAKSYKLDALSGAQLAVCSLLLTLTPELIDKKGFMLPMTNLGGHGLFVTMIVSILSVEILRFGKKNNVTIKMPEQVPLSVWRWFEAFIPAAFVIIIIMSVIPVVFKVDVHYVVDKLARPLVKAGDSYFGVIIPVFLITFFWSFGIHGVSVVGTVARPLWDVYLGKNGEAVASGASQFPFIAPEPFYQWFIWIGGSGATLGLVLAMIVFGRSKYSKALSRTCIVPGIFNINEPVIFGLPIVLNPILIIPFVITPLVTATIAYAATAMGFVTPTHIMPPWTLPAPIGAYLATGREWRANVLVLINIAISFLNYLPIFKMYDKNMA

SEQ ID NO: 46502 - protein, 790 aa, Bacillus anthracis
  MISC_FEATURE (72)..(72): X=any amino acid
  MISC_FEATURE (163)..(163): X=any amino acid
  MISC_FEATURE (164)..(164): X=any amino acid
  MISC_FEATURE (182)..(182): X=any amino acid
  MISC_FEATURE (186)..(186): X=any amino acid
  MISC_FEATURE (327)..(327): X=any amino acid
  MISC_FEATURE (401)..(401): X=any amino acid
  MISC_FEATURE (407)..(407): X=any amino acid
  MISC_FEATURE (457)..(457): X=any amino acid
  MISC_FEATURE (601)..(601): X=any amino acid
  MISC_FEATURE (700)..(700): X=any amino acid
  MISC_FEATURE (727)..(727): X=any amino acid
  MISC_FEATURE (742)..(742): X=any amino acid
MFVSYRWLQEYVDIKDVTAQELADKITKSGIEVEGVEVLNKGVKGVVVGHVLEMEKHPEADKLSKCLIDIGXEEPVQNNCGAANIAKRFKKYQLQKSGAVLSWQLKIKKAKLRGEASHGMVCALQELGIDGKLVSKEYADGIFIFPSDAEVGADALEILNFTXXSTELGFNTQPCRLLKYGXCCIXSSCIYGREVKLPAIDLQETAEKTSDYISVSVEAKEKTPLYIAKMGEERKNWSIPMWMQTRLMAAGIRPISNVVDITNYILMEYGQPLHAFDYDKLGSKEIVVRLAKEGEKIETLDDQERTLQSPPPCYYKRQKKRYLLLVXWAEADSEVTNETVNVLIESAYFARPTVRRTSKDLGLPSESSAPFRKRNRPHAYFRKISHCSCVKGKIRWPGKTXRCRRSXQLTVQERSGFGFWWESYPGFRYKISASEKGTMFHKLKVPHFQKLKEHSTXMYQHAVPDITISEDLVEEVGRLYGYDHIPVTLPSGTMTRGKLTAAQTKRRKVRRFLEGAGLYEAITYSLTSADKAKQYMVEPNEKAPVNLALPMSEERSQLRLKLSTATTRSSFIQCRSKNDSVALYEVGSIFIPTEAGELPRXRTTSCRCYDRSCSSPCMAREKKVVDFLVVKRVLQGLFDLHWCFKPNHIWHQQNVKGAPRVVQLESVLNGEVIVSSVNCTPKQKNNLDGKIHWYSNYLLXKYFGTRRQKETLLTQAISPFSHFMTRXMAVVRNERKQNLAKXSKVLLYLVGELLKDVTLVCFIGKGKKREEGQKIPWHFYGISSSKRFVT

SEQ ID NO: 46503 - protein, 247 aa, Bacillus anthracis
MEKVKAILFDKDGTLMDFHSIWIKVAEELVAECINLYELPKSMQPTLLKEIGVEGVFVNPRSAIAAGTSLDVAKGLCKYITSSKEEEMHEWVSEKLFSLMYEHRSYMKMTADLPRILQSLKDRGFILGVVTADDFAPTELFLKQYQLESFFDYVVASDTFPAQKPDKRIVESFCDKFHLDACEVAVVGDTPTDLHLAKNGDCYAIGVLSGTGDRQTLEPLADLVVQSVEDFISHSGEFIWERGKSNV

SEQ ID NO: 46504 - protein, 458 aa, Bacillus anthracis
MYSMEQVVNLAKHRGFVFPGSEIYGGLANTWDYGPLGIELKNNVKKAWWKKFIQESPYNVGLDAAILMNPKTWIASGHVGNFNDPMIDCKKCKARHRADKLIEDALDAKGIEMVVDGLTFDQMADLMKEHEVKCPDCGSEEFTEIRQFNLMFKTFQGVTESSTNEIFLRPETAQGIFVNFKNVQRSMRKKLPFGIGQIGKSFRNEITPGNFTFRTREFEQMELEFFCKPGEDLEWFAFWRETCKNWLLSLGMTEESMRLRDHGEEELSHYSNATTDIEFKFPFGWGELWGVASRTDFDLKRHMEHSNEDFNYIDPQTNERYVPYCIEPSLGADRVTLAFLCDAYEEEQLENDSRTVLRFHPALAPYKAAILPLSKKLSEGATEVFAELAKDFMVDFDETGSIGKRYRRQDEIGTPFCITYDFDSVEDKAVTVRDRDTMEQVRMPISELKGFLEKKIQF

SEQ ID NO: 46505 - protein, 370 aa, Bacillus anthracis
  MISC_FEATURE (20)..(20): X=any amino acid
  MISC_FEATURE (157)..(157): X=any amino acid
VIIIGGGIAGLCAAISLQKXGLDVKVYDKNTEPTVAGAGIIIAPNAMQALELYGISKKIKKFGNESDGFNLVSEKGTTFNKLIIPTCYPKMYSIHRKDLHQLLLSELKEDTVKWGKECVKIEQNEANALKIVFQDGSEALGNILIAADGIHSVIRKXVTQGDNYRYAGYTCWRGVTPANNLSLTNDFIETWGTNGRFGIVPLPNNEVYWYALINAKARDPKYKAYTTADLYNHFKTYHNPIPSILQNASDVDMIHRDIIDITPMKQFFDKRIVFIGDAAHALTPNLGQGACQAIEDAIILAECIKNNAYYRQAFTEFEQKRRDRIEKISNTAWKVGKIAQIESKPLTLVRNEVMKRMPKWVSEKRTHELY

SEQ ID NO: 46506 - protein, 114 aa, Bacillus anthracis
MQAKAVARTVRIAPRKVRLVVDLIRGKQVGGGVSLSLPTHQRTAPSVVEKGLKSAVPNAEHNYEMDITSLVVEKVFVDEGPTLKRFRPRAMGRASQINKRTSHITVVVSEKKEG

SEQ ID NO: 46507 - protein, 294 aa, Bacillus anthracis
  MISC_FEATURE (229)..(229): X=any amino acid
  MISC_FEATURE (237)..(237): X=any amino acid
  MISC_FEATURE (256)..(256): X=any amino acid
  MISC_FEATURE (261)..(261): X=any amino acid
  MISC_FEATURE (267)..(267): X=any amino acid
  MISC_FEATURE (275)..(275): X=any amino acid
TGTERVKRGMAEMQKGGVIMDVINAQQAKIAEEAGAVAIMALERVPADIRAAGGVSRMADPTIVEEVMGAVSIPVMAKCRIGHLVEARVLESLGVDYIDESEVLTPADEVYHLNKRDYTVPFVCGCRDIGEAARRIAEGASMLRTKGEPGTGNIVEAVRHMRQVNAEIRQVASLREDELMTYAKNTGAPYEVLLEIKRLGRLPGVNFAASGVATPADAALMMQLGADGXIVGSGILXSENPAKFCTCIVVATTPYXGLRTXLPSLFXRNKGIAMXRDRKIFTLLPEQRMQERGW

SEQ ID NO: 46508 - protein, 88 aa, Bacillus anthracis
MDGFDKTMKFSIQDEKQSVHVNDVLLTVYDALQEKGYNPINQIVGYLLSGDPAYIPRHKDARSIIRKLERDELIEELVKSYLKHHREE

SEQ ID NO: 46509 - protein, 576 aa, Bacillus anthracis
LGQNQFRWSNEQLREHVEIIDGTRSPHKLLKNATYLNSYIREWMQANIWIYDDRIIYVGEKLPEQLHECEVIDCDGKYVVPSYIEPHAHPYQLYNPETLANHAMQFGTTTFINDNLTLFFTIKAWKESFHLLDEFTKIPASMYWWCRFDGQTELQNGESLFNSEEIIKWLQHEAVLQGGELTAWPKLLHGDDEMLTWVQETKRLQKKVEGHFPGASEATLAKLKLLGTDCDHEAMTGQEALARLMQGYTVSLRNSSIRPDLEVLLKELLELGVKQFDRFIFTTDGSHPSFYENGMTNIMIATAIKKGIPVIDAYQMASNNIARYYNMEINIHGAIATGRIANINILESKRNPVPTSVIAKGQWVKRDGVNTHEALHIDWSKCKVTPLSLEWSIEKEDMLFSNKTGIHLLNNVITKPYTSEINIDCDELSIDYDECFLMMIARDGTWRVNTVVKGFAKEIGGLASSYSGTGDIILVGKRKEDMLTAFHRIKELGGGMVIAEKNEVLHEIALPLLGIMSELKMSELIQKEKKMVNLLQERGYVYNDPAFTILFFSATHLPFIRVTFIGLYDVKSGKVV

SEQ ID NO: 46510 - protein, 536 aa, Bacillus anthracis
  MISC_FEATURE (68)..(68): X=any amino acid
  MISC_FEATURE (82)..(82): X=any amino acid
  MISC_FEATURE (84)..(84): X=any amino acid
  MISC_FEATURE (286)..(286): X=any amino acid
  MISC_FEATURE (290)..(290): X=any amino acid
  MISC_FEATURE (293)..(293): X=any amino acid
  MISC_FEATURE (376)..(376): X=any amino acid
  MISC_FEATURE (388)..(388): X=any amino acid
  MISC_FEATURE (398)..(398): X=any amino acid
  MISC_FEATURE (409)..(409): X=any amino acid
TKYIFVTGGVVSSLGKGITAASLGRLLKNRGLNVTIQKFDPYINVDPGDMSPYQHGEVFVTDEGRQNXLRTLGHMDGFIHIXLXQNTAREPRGKYYPSGLQKKASRGDSSGGDSQVIPHITNEIKERVYRSGRETNADVVITEIGGTVGDIESLPFLEAIRQIKSDIGRDNVMYIHCTLIPYLKAAGEMKTKPTQHSVKELRSLGIQPNIYRERTEMPVSQDMKDQACIFCDIDTRHVVIEARDADTLYAVPLSLQEQNIGQNRLDHLKLDNPAADMTESGLAFVXKSAXPIXENKNRSVGKYVELQDAYISVVEALRHAGYSFDTDVEVKWVNAEHVTAENVQELVGDTDGILVPGGFGDRGVEGKIVAIQYGSXKQSSIFGICLGXATCINGFRTXVIGFEGSYLFXNLLLTHLMAIIDLLPEQKDVEDLGGTLRLGLYPCKLSEETNAYNAYNEPVVYERHRHRYEFNNQFRPDMEKAGFVFSGTSPDGRLVEIIELKDHPWFVAAQFPPELVSRPNRPQPLVHDFVKASLTK

SEQ ID NO: 46511 - protein, 197 aa, Bacillus anthracis
MDTNITWHTASVSKDERRVKNGHHSFVIWFTGLSASGKSTVANAVARKLFEKNIGNYVLDGDNIRHGLNKDLGFSESDRMENIRRIGEVAKLFVDQGAVVLTAFISPFRVDRKQVRDLLAVDEFIEVFVKCPIEECEKRDPKGLYKKARKGDIKEFTGIDSPYEEPEKAELIVETHKYSIEECAEQIVKYLQERSLI

SEQ ID NO: 46512 - protein, 236 aa, Bacillus anthracis
MKGIVYVGHGSRLQESNEQFIHFIQSVMKERNERIQKIAFLELTTPTISDAVTETILEGATEIMIVPVLLFAAAHYKRDIPFEIEKMQKQYPHITFSVVPPFSTHPHMVELVVKRIREAMPMQNSSILLVGRGSSDPQPIHELQQIGVAVEQKLGMRVCCSFLTKGTPSFTAELKTITSTASHVYVMPYLLFTGLLLQKIKLHTKKYDHVTTCNCLQFDTYMKLTLLERMEEYVYV

SEQ ID NO: 46513 - protein, 428 aa, Bacillus anthracis
MNYLFKNGRYMNEEGKIVATDLLVQDGKIAKVAENITADNAEVIDVNGKLIAPGLVDVHVHLREPGGEHKETIETGTLAAAKGGFTTICAMPNTRPVPDCREHMEDLQNRIKEKAHVNVLPYGAITVRQAGSEMTDFETLKELGAFAFTDDGVGVQDASMMLAAMKRAAKLNMAVVAHCEENTLINKGCVHEGKFSEKHGLNGIPSVCESVHIARDILLAEAADCHYHVCHVSTKGSVRVIRDAKRAGIKVTAEVTPHHLVLCEDDIPSADPNFKMNPPLRGKEDHEALIEGLLDGTIDMIATDHAPHTAEEKAQGIERAPFGITGFETAFPLLYTNLVKKGIITLEQLIQFLTEKPADTFGLEAGRLKEGRTADITIIDLEQEEEIDPTTFLSKGKNTPFAGWKCQGWPVMTIVGGKIAWQKESALV

SEQ ID NO: 46514 - protein, 154 aa, Bacillus anthracis
MNRIRMICELFAQHNMYVLLETHPNTLTDTLPSTLELLGEVDHPNLKINLDFLHIWESGADPVDSFQQLRPWIQHYHFKNISSADYLHVFEPNNVYAAAGNRTGMVPLFEGIVNYDEIIQEVRDTDHFASLEWFGHNAKDILKAERRILTNRTF

SEQ ID NO: 46515 - protein, 307 aa, Bacillus anthracis
MEGVVLLHKPKGMTSHDCVFKLRKILREKRIGHTGTLDPDVTGVLPICVGRATKIAQFLTSETKTYEGEVTLGFSTTTEDASGEVVETKYVDRVITRKEVEEALATLTGTIEQMPPMFSAVKVNGKKLYEYARAGQEVERPVRTITIHEFVLLDDREVFEGENISFRFRVTCSKGTYVRTLAVMIGEKLGFPSHMSHLVRTASGEFLLEDCISFEEIEENVQNGTVESIFISIDEALSKFPKMVVDEKQAEKIKNGMFLKNELQITAPFITVFDKNDRCLAIYEHHPKHPGMLKPMKVLVNNQELKL

SEQ ID NO: 46516 - protein, 364 aa, Bacillus anthracis
MFTSRVIDTLQIKYPIIQAGMAGAITTPKLVAAVSNSGGLGTLGAGYMSPEQIREAIYTIRELTDKPFGVNLLLTKEVQIEEEKINLGKGLLSGVNREFGIEEEEQLKLPKSYKEQFQVLLEEKVPVVSFAFQTLEKEEINDLKRSGIKVIGTATHVAEAKVLAELGVDIIVGQGSEAGGHRGTFIGKEQDAMIGTFALIPQLVAAVPHIPIVAVGGVMNGQGLVAAFTLGAEAVQMGSAFLTSEESITHDVYKEAVLHSTDTSTTVTRAFSGKYARGIRNEFIEKHEGKEEGLPMYPVQNVLTSKIRQEAAKQNNGEYMSLWAGQASSLARIESAQHVVERVMEEANNVIEQLQNVYRKRPLE

SEQ ID NO: 46517 - protein, 255 aa, Bacillus anthracis
  MISC_FEATURE (133)..(133): X=any amino acid
ALILSFLLIFSVACTSGDKKEKSTATEGKTVELTISAAASLQDALKEIETKYKEKEPNIKLSFNFGASGALQQQIEQGAPADLFFSAAEDKFQTLVKKGFINEKEGKNLLGNELVLVVPKDSSSYKNSRFKRXKNKKIALGTPESVPAGKYAKASLTHENLWNDVQNKVIFTKDVRQVLTYVETGNVDAGIVYKTDALISDKVKIGETAATTSHEPIHYPLGVIKESKHKKEATSFYEYLQSKDAQSIFKKYGFT

SEQ ID NO: 46518 - protein, 351 aa, Bacillus anthracis
  MISC_FEATURE (111)..(111): X=any amino acid
  MISC_FEATURE (114)..(114): X=any amino acid
  MISC_FEATURE (255)..(255): X=any amino acid
MFTSRVIDTLQIKYPIIQAGMAGAITTPKLVAAVSNSGGLGTLGAGYMSPEQIREAIYTIRELTDKPFGVNLLLTKEVQIEEEKINLGKGLLSGVNREFGIEEEEQLKLPXKLXRTIPSVIRRNKYPVVSFAFQTLEKEEINDLKRSGIKVIGTATHVAEAKVLAELGVDIIVGQGSEAGGHRGTFIGKEQDAMIGTFALIPQLVAAVPHIPIVAVGGVYDGQGAGAAFTLGAEAVQMGSAFLTSGESITHDVVXEAVFHSSDPSTTVTRAFSRKYARRIRNEFIEKHEGKEEGLPDVSVQNVLTSKIRQEAAKQNNGEYMSLWAGQASSLARIESAQHVVERVMEEANNV

SEQ ID NO: 46519 - protein, 210 aa, Bacillus anthracis
MNPNPNVKYPIEGNQNVHFIKNTITKANILVGDYSYYDAKDGETFEDRVLHHYEFLGDRLIIGKFCCIASGVTFIMNGANHRMDGFSAYPFNIFGNGWEKYTPNLSDLPYKGDTVIGNDVWIGMDATIMPGIKIGDGAIIAAKSVVTRDVAPYTIVGGNPANKIRERFSNAIIEELLQIQWWHFDIEKITENIGAIVQGNIEPLRKLKRE

SEQ ID NO: 46520 - protein, 179 aa, Bacillus anthracis
EFASDFEVDEVIDMKGKWVLPGLVNTHTHVVMSLLRGIGDDMLLQPWLETRIWPLESQFTPELAVASTELGLLEMVKSGTTSFSDMFNPIGVDQDAIMETVSRSGMRAAVSRTLFSFGTQEDEKKAIEEAEKYVKRYYNESGMLTTMVAPHSPYTCSTELLEECARIAVENQTMVHIHL

SEQ ID NO: 46521 - protein, 204 aa, Bacillus anthracis
  MISC_FEATURE (50)..(50): X=any amino acid
MNIAKLIDHTILKANTTKEDVMKVIEEAKEYKFASVCINPTWVKLAAEEXAGHDVDVCTVIGFPLGASTTETKAFETKDAIAKGATEVDMVINVGALKDGDNELVEKDIYEVVQAAKGKALVKVIIETCLLTDEGESFRAWELSVKSGADFVKLSTGFSTGGATAEDIALMRKTVGPNVGVKASGGVRTREDAEKMVAAGASRV

SEQ ID NO: 46522 - protein, 279 aa, Bacillus anthracis
MKNLQSTTKLHNGVEMPWFGLGVFKVEEGPELVEAIKSAIKTGYRSIDTAAIYGNEAAVVEGIRAGIEATGISREELFITSKVWNADQGYKETIAAYEESLKKLQLDYLDLYLVHWPVEGKYKDTWRALETLYKEKRVRAIGVSNFQIHHLQDVIQDAEIKPMINQVEYHPRLTQKELQAFCKEQGIQMEAWSPLMQGQLLDNETLQAIAEKHGKTTAQVILRWDLQNGVITIPKSTKEHRIIANADVFNFELTKEDMEKIDALNENHRVGPDPDNFDF

SEQ ID NO: 46523 - protein, 144 aa, Bacillus anthracis
MINFNFFMNDVVRQAREEIVSAGYTELTTPEAVDEAFKRNGTTLVMVNSVCGCAGGIARPAAAHSVHYDKRPNHLVTVFAGQDKEATARAREYFEGYPPSSPSFALLKDGKIVTMVERHEIEGHEPMQVIAKLQSYFEENCEEL

SEQ ID NO: 46524 - protein, 706 aa, Bacillus anthracis
MSKKQKQQKKKTHVPFRLNVLFFCVFLMFSAVIVRLGYVQIVRGEEYKNEVERKENSTISNPVPRGKIFDRYGRPVVDNAAVRTITFTKMKGSTAEARLETAKKLADLIEVPTNKLTDRDKKDYWLAIHKEEAKEKITNKDRQEFKDKKIDDKELDERQRNRVTEEEVNQLSAKDLEVLAIKSKMDGGYAMTPQVIKKDATEQEYAIISENLATLPGVDTNVDWDRKYIYDDLFRSVLGGVSTSDEGLPRERLDYYLVRDYNRNDRVGKSYLEQQYEDSLHGNKAEVRNVTDKNGNILETINVSKGQSGNNLNLTIDMELQKRVEEIITKNLLRYKGGQPYLDRAFVVMMNPKNGEVLSMAGKQLVEENGETKVQDFALGTMTSSYPMGSTVKGATVLTGYQTGAIQPGSVQLDEPIRLKGTPPKSSWKTMGYINDLTALKMSSNVYMFKTAMNIAGVQYVRGGTLDIPQKAFDTMRYYFGQFGLGVKTGIDLPNESAGQTGRGNQPGFLLDLSIGQYDTYTPLQLAQYVSTIANGGYRMQPQVVKEIRQPSAKQDEVGKVVHSMEPKVLNRIDMPESQIKRVQEGFRQVFNDSGGTAAKYFTGAPYKAAGKTGTAQTVYGGDKEIGKKANGERKETYNLTLVGYAPLEDPEVAFSVVVPWVDDKSGINGYISRDIMDAYFDLKKVENGEATKDEIDKKNKEQDDE

SEQ ID NO: 46525 - protein, 251 aa, Bacillus anthracis
MQKIIGLAIIGFSAQLMDGALGMAYGVTSTSLLLMFGIAPAVTSAFVHLTESVTNAAFWASHLKFGNVDKYTVFRAYITKEQFVGICVGHVFLSNLPGRWHLNRKFSLFLFTLGVYILLRFIIQKQIVTSNKRMSAKQLVPLGLFAGFVDSTGGGGWGPITTPVLLARGNEARKVIGSVDTSEFPVALAATIGFFISLGWEQVSWFWEFALMRWGYVAAPIGCWVKPIGPSIYLGELIGGLIILLQYTYTL

SEQ ID NO: 46526 - protein, 149 aa, Bacillus anthracis
  MISC_FEATURE (114)..(114): X=any amino acid
  MISC_FEATURE (120)..(120): X=any amino acid
VFEGHLVGTGLKVGVVVGRFNEFITSKLLGGALDGLKRHGVEENDIDVAWVPGAFQIPLIAKKMANSGKYDAVITVRTAIRGATTHYDYVCNEVAKGVASLSLQTDIPVIFAVXTTETIXPPIGRAGTKACKKSYESAAAGNEMGSLSK

SEQ ID NO: 46527 - protein, 104 aa, Bacillus anthracis
MEILHAKSISKVYKGKVPYKALVDIDLSIQEGEFVGIMGPSGSGKTTLLNMVSTIDSPSSGEILINGTNPFQLSSEDLALFRRKQLGFVFQSFKYISTLHEQEY

SEQ ID NO: 46528 - protein, 686 aa, Bacillus anthracis
MSKIRVHEYAKKHNISSKDLMTKLKEMNIEVSNHMTMLDDEVVNKLDNEYQAEKPSVADEFEVEEKVVRSKKNSNKKKKKGKGNEDKRQENFAGRQQTQTVETPDKITFSGSLTVGDLAKKLSKEPSEIIKKLFMLGIMATINQDLDKDTIELIANDYGIEVEEEVIVSETEFETFIDEQDDEENLKERPAVVTIMGHVDHGKTTLLDSIRNSKVTAGEAGGITQHIGAYQVELNDKKITFLDTPGHAAFTTMRARGAQVTDITIIVVAADDGVMPQTVEAINHAKAAGVPIIVAVNKMDKPAANPDRVMQELTEYELVPEAWGGDTIFVPISAIQGEGIDNLLEMILLISEVEEYKANPNRYATGTVIEAQLDKGKGTIATLLVQNGTLRVGDPIVVGTSFGRVRAMVSDIGRRVKVAGPSTPVEITGLNEVPQAGDRFMAFADEKKARQIGESRAQEALLAQRGEKSKLSLEDLFQQIQEGDVKEINLIVKADVQGSVEAMAASLRKIDVEGVKVKIIHTGVGAITESDIILASASNAIVIGFNVRPDVNAKRTAELENVDIRLHRIIYKVIEEIEAAMQGMLDPEFEEKVIGQAEVRQTFKVTKVGTIAGCYVTDGKITRDSGVRIIRDGVVIFEGQLDTLKRFKDDVKEVAQNYECGITIERYNDLKEGDIIEAYIMEEVKR

SEQ ID NO: 46529 - protein, 716 aa, Bacillus anthracis
MKRNMTKFHTNKGAGYFMILFLLLFLLLLARFFYIQATGSVHNQDLNELAKQKHSKTGVLEANRGTIYDQNGHVLAQDANSYKLVAELKGAKPVEDKEDTAKKIAGVLGKDEEKILATLNKEDRSQVEFGKLGKGLTKEQKEQIEALKLPGISFITENARVYPNGDFASYVVGHARPDDKGIAIGQFGLEKSLDKYLGASHGEVAYTGDRRGVSLDGGKVNVKAPKNGDNVYLTLDQRIQSYLEDAMKEASKHYEPESLIGIVADPKTGKILGMSSKPSYDPNQENNQYFYNDAIANAFEPGSTMKIFTLAAAINEGVYKGQDYYQSGTYPVGNRKIKDHNGGAGWGSITFDEGVERSSNVAFAILGDQKLGPERFRKYIHSFGLDEKTKIDLPGEGSNTIVFDQQIQQVTTAFGQGSTVTPIQLVQAATAIANDGKMMKPYTIDKIVDPITEEVKLEHKPEEVGKPVTKETAAQVRQLLERVVTSPKGTGTAYKVDGYSVGGKTGTAQIPDGKGGYMTGRENYIFSFLGMAPMDDPQLVVYVAVKKPKLKDDESGAQPLADIFKYVTKNSLEYLKIKPNEVKDPKKYVKEQQTAVPDVTEKTMEEAKKAIDKAKLRPIVLGEGKVQQQVPKATEQTLKGDRVFLVGDKPTMPNIQGWALRDVMNLAKTLKLNLKPTGTGYVTEQSVPEGTLLQPGTELGVTLVPPLEPQQEAEKP

SEQ ID NO: 46530 - protein, 213 aa, Bacillus anthracis
MCWKIRLGFVSPNQFIPLAERTGFIIKLDEWVINEVCRQIREWLNKGYEVVPIAVNISARHFRSITLIEMITRALHKYNVSAHLLAIEVTEGALIHKDISKRVLLQLKEQNLKIHLDDFGTGYSSLSYLKTYPIDTLKIDRSFMEGIHVDERDTNITAAIIHLAHTLELDVIAEGVEKAEQIQFLKEKNVKFVQGYYYSRPLSKYDVENVYYK

SEQ ID NO: 46531 - protein, 233 aa, Bacillus anthracis
  MISC_FEATURE (125)..(125): X=any amino acid
  MISC_FEATURE (139)..(139): X=any amino acid
  MISC_FEATURE (219)..(219): X=any amino acid
IKKFGKGWYFVSLTGIFGYNVFFFMGLNYTSTLNGSLIIATMPVFVTLGAILFFKESWSTKVGMSLFLSLIGVIVVITSGSMDTLMSLSFNKGKFFLLITGLNWGGCYIVYQGKNVYEGGLPLCXLTRSMPGIGVLFFXQPFFLYEDGWGKVGAFFSTGWIEMLYMVICGTLIGYIVFNKGVEELGASKASMYLNLTPIVATCISVVFIWSCNLRRKQXLGMFSVLIGVYIAT

SEQ ID NO: 46532 - protein, 250 aa, Bacillus anthracis
MMEATYKTKDVTNKTGIPKHIVRKYSQLLEEHGYMISKTADARIYKLDDLKLLKSIHERAATLQEDISETIPIILKEKEAPPVPVIQDKQEIQPKEKEDGRNFEEFMLKLEMLAQLNEAIIHQNSTLITQNRLKDEKLDELMQQVYVKEGSQEKMLQELVDHAAQTDALQKEKMDLLMNHMYKRESKQEEKMNKLVNQIYNKDSNRDAQLMQVIREIQETKRLVAASKEQSFFQSFRSLFSRTKQEKTTE

SEQ ID NO: 46533 - protein, 390 aa, Bacillus anthracis
MRYITAGESHGPQLTTIIEGVPAGLPLVADDINEELARRQKGYGRGRRMQIETDQVQIVSGVRHGETLGSPIALVVENRDFAHWTKIMGAEPLTEQEEKEMKRKVTKPRPGHADLNGAIKYGHRDMRNVLERSSARETTVRVAAGAVAKKVLAELGITVAGHVIEIGGVEAKETTYRSIEELKSITEASPVRCLDEEAGNQMIKAIDDAKSNGDSIGGIVEVIVEGMPIGVGSYVHYDRKLDAKLAAAIMSINAFKGVEIGIGFEAAHRPGSEVHDEILWNEEHGYTRRTNNAGGLEGGMTTGMPIVVRGVMKPIPTLYKPLQSVDIDTKEPFTASIERSDSCAVPAASVVAEAVVAWELATALIEQFGLDRMDLIRENIEKHNEYARGF

SEQ ID NO: 46534 - protein, 663 aa, Bacillus anthracis
  MISC_FEATURE (338)..(338): X=any amino acid
  MISC_FEATURE (347)..(347): X=any amino acid
NKKEEVLQVKDLKTHFFTDEGVSKAVDGLNFSISKGETLGIVGESGCGKSITSLSIMRLIDRESGSKVEGNILFKGKDLLQQNESEMRAIRGNQISMIFQEPMTSLNPVYSVGEQIAEAIRIHQKLSKKEAWNKAVDMLKLVGIPSPEKRAKQEPHELSGGMRQRIMIAMALACNPDLLIADEPTTALDVTIQAQILSLMKSLQKQLGMGIIMITHDLGVVSETCDRVAVMYAGKIVEYADIEHIFTSPKHPYTIGLLQSLPSLDTDQEELQTIPGSVPSPYHMPSGCRFADRYTHAKELCHNTLPELQLTQDGSEVRCWMFTDLWDKSSSEKLEVLXNVYYYANKXTDLLQVQNLKQYFPIKKGILGRSISYIKAVDDISFTVYEKETVSIVGESGCGKSTTGRAILRLDEATSGKIIFQDKDLLALNNSAMRKVRKDLQVIFQDPFASLNPRQTVGSILEEAMSIQNVCPKGERKAKVIELLGKVGLPPDAVKRYPHEFSGGQRQRIGIARALAVNPKLIICDEAVSALDVSVQAQVLNLLKQLQQQYGLTYLFISHDLAVVRHISDRIIVMYLGTIVEIADKHSLFNNPQHPYTKALLSAIPTISAGTKKERIELKGDLPSPLNPPTGCRFHTRCPYAIEKCATQQPSFQSISKDHKVAC

SEQ ID NO: 46535 - protein, 410 aa, Bacillus anthracis
MGYYDGPNLNEEHSETREVRKSGSKKGYFFTGLVGAVVGAVSISFAAPYMPWAQNNGATVSSFSSDSKVEGTVVPVVNKAKNETDLPGMIEGAKDVVVGVINMQQKHDPICNATTGSRQQAGSGSGVIYKKAGNKAYIVTNNHVVDGANKLAVKLSDGKKVDAKLVGKDPWLDLAVVEIDGANVNKVATLGDSSKIRGGEKAIAIGNPLGFDGSVTEGIISSKEREIPVDIDGDKRADWNAQVIQTDAAINPGNSGGALFNQNGEIIGINSSKIAQQEVEGIGFAIPINIAKPVIESLEKDGVVKRPALGVGVVSLEDVQAYAVNQLKVPKEVTNGVVLGKIYPMKPCEKAGLEQYEYCSSLDNQKVENSLQFRKYLYEKKKVGEKVEVTFYRNGQKMTKTATLADNSAT

SEQ ID NO: 46536 - protein, 147 aa, Bacillus anthracis
MMPTLQDGNMLVVNKVSYHVGDLNRFDVVVFHANKKEDYVKRIIGLPGDHIEYKHDKLYVNGQFVDEPYLETYKKEIDGRQLTGDFKLEELTKEKSVPPGYIFVVGDNRLGSWDSRHFGFVKADTVVGKVDLRYWPIQDVQTNFSKG

SEQ ID NO: 46537 - protein, 442 aa, Bacillus anthracis
MEIFNLVMVAILIAFTGFFVAAEFAIVKVRSSRIDQLVAEGKRGALAAKKVTTNLDEYLSACQLGITVTAMGLGWLGEPTIEKLLHPLFEKWNLNPSISSVLTFGLAFMLMTYLHVVVGELAPKTMAIQKAEKVTLLFAAPLMMFYKVMYPFIWVLNGSARVITGLFGLKPASEHEVAHTEEELRLILSDSYESGEINQAEYKYVNNIFEFDNRIAKEIMVPRTEIVGFYLEDSVEEHMKVIQNERYTRYPIFGEDKDDIIGMVNVKDFFIRYMTEDQKDLSSIRSYMRPIIEVMETTPIHDLLLQMQKKRIPMAVLYDEYGGTAGIVTFEDILEEIVGEIRDEYDEDEAPPIQHVNEQHIIVDGKVLISEVKDLFGLHIEEDDVDTIGGWIMMQNHEIEEGQHVEAEGYEFKVLEKDAYQIKRVEIRKMEEEQEEEKAATV

SEQ ID NO: 46538 - protein, 426 aa, Bacillus anthracis
MTVQEISRVIDGKRVIVKKPELLIPAGNLEKLKVAIHYGADAVYLGGQEFGLRSNAGNFTLEEMAEGVEFAKKYGAKIYVTTNIFAHNENMDGLEEYLKGIEKAGVTGIIVADPLIIETCKRVAPSVEVHLSTQQSLSNWKAAQYWKEEGLHRLVLAREASYEEMKEIKEKVDIEIEAFVHGAMCIAYSGRCTLSNHMTARDSNRGGCCQSCRWDYDLVQTVSQHKDAKELPLFQEEDAHFAMSPKDLNLILSIPKMIEIGIDSLKVEGRMKSIHYVATVATVYRKVIDAYCADPDNFEFKQEWLDELDKCANRDTAPAFFEGVPGHQEQMFGNHSKKTTYDFAGLVLDYNEETGIVTIEQRNHFKPGHEVEFFGPEIENFTQTVEKIWDEDGNELDAARHPLQIVKFKVDQPVYVNNMMRKSILQ

SEQ ID NO: 46539 - protein, 233 aa, Bacillus anthracis
MSVISMKQLLEAGVHFGHQTRRWNPKMKRYIFTERNCIYIIDLQKTVKKVEEAFKVMRDIAAEGGDILFVGTKKQAQAAIKEEATRAGTGLVGQRWLGGTLTNFQTIQKRIKRLKDIERMQEDGTFEVLPKKEVVQLKKELERLEKFLGGIKDMKGLPSALFVVDPRKERIAVAEARKLHIPIIGIVDTNCDPDEIDHVIPANDDAIRAVKLLTSKMADAILEAKQGEETVTA

SEQ ID NO: 46540 - protein, 146 aa, Bacillus anthracis
MNKQVIEVLNKQVADWSVLFTKLHNFHWYVKGPQFFTLHEKFEELYTESATHIDEIAERILAIGGKPVATMKEYLEISSIQEAAYGETAEGMVEAIMKDYEMMLVELKKGMEIAQNSDDEMTSDLLLGIYTELEKHAWMLRAFLNQ

SEQ ID NO: 46541 - protein, 117 aa, Bacillus anthracis
  MISC_FEATURE (14)..(14): X=any amino acid
IAGEKIRQAIRDGXLDNIPCKRKPLQLEDLSMVPPRTRMRYKILKNAGNDPPPNGNFQKDILKIEDLIACCYDEEERKKFHQELTAKTLRFQQVMEKRKIKDSSAFRMYQDKVFHKL

SEQ ID NO: 46542 - protein, 123 aa, Bacillus anthracis
MKKKLGLLAMVVALMAITAGCSEVNQPITPKSTGIWNEYFVYPLSQLITYFANLFGSNYGLAIVVTTLIIRFALLPLMIKQTKSTKAMQALQPEMVKLKEKYSSKDQATQQKLQQEMMPLYQK

SEQ ID NO: 46543 - protein, 287 aa, Bacillus anthracis
  MISC_FEATURE (3)..(3): X=any amino acid
  MISC_FEATURE (242)..(242): X=any amino acid
  MISC_FEATURE (269)..(269): X=any amino acid
  MISC_FEATURE (272)..(272): X=any amino acid
  MISC_FEATURE (280)..(280): X=any amino acid
QWXKNLREKTAPGLWDLKKALTETNVLMREGIDFLREKGIAKAAKKADRIAAEGLTFIETNGNDGLNLRINSETDFVAKNEGFQTLIKELAAHLLANKPANVEEAMGSNNGKYHKSEEHINEAIAKIGEKLTLRRFEIVSKTDADAFGAYLHMGGRIGVLTVLEGSTDEAAAKDVAMHIAAVNPKYIDRDAVTAEEVEHERQVLTQQALNEGKPEKIVAKMVESRLGQFFEEICLLRPSIRXKPDMKVRQFVESKGGTLKGFASLPWWXRIXKTRRQLCXEVMNQVK

SEQ ID NO: 46544 - protein, 616 aa, Bacillus anthracis
  MISC_FEATURE (70)..(70): X=any amino acid
  MISC_FEATURE (77)..(77): X=any amino acid
  MISC_FEATURE (85)..(85): X=any amino acid
  MISC_FEATURE (145)..(145): X=any amino acid
  MISC_FEATURE (173)..(173): X=any amino acid
  MISC_FEATURE (183)..(183): X=any amino acid
  MISC_FEATURE (218)..(218): X=any amino acid
  MISC_FEATURE (223)..(223): X=any amino acid
  MISC_FEATURE (404)..(404): X=any amino acid
  MISC_FEATURE (414)..(414): X=any amino acid
  MISC_FEATURE (535)..(535): X=any amino acid
LQGANGTEIAKDLKTDEHGVLVIPDLLREEYQFIETAAPEHYKIRSNTLLSSQSKEVKRNMSSLQLLTAXRKVVWEXFKSDDVEXNTTLEGAVFKIVNKDGHDVRTDLTTDKNGRLVVDELPPGRLEFIETKSSYHYDFKQTLIXFQVKKGQKKFASVTATISLTICAARTFXVDDIDVFHSXRAVFKIVDMNGNDVRTDLTTNKDGKISVSDLRPGXLSVRXNKARTHYDLKSNSYQLYVKESQTATASVTAKNSLTKGAVELTKVDDIDGTTSEGSIFKIVDQNGNDVRTDLTTDKDGKISVSDLRPGDYQFVETKAPTHYDLNQTPINFTVEKSQTATASVTATNSLTKGAVELTKVDDIDGGYSEGSSFKIVDMNGNDVRTDLTTDKDGKISVSDLRPGXLSVHRNESSXHYDLNQNPINFTVEKSQTATASVTATNSLTKGAVELMKVDDIDGTTLEGAIFKIVDSNGHDVRADLTTDKDGKISVSDLRPGDYQFIETKAPTGYDLNAKPIPFTITKGQSQVTSVTGFKXLTTRFDDVLKVDIDHNGPLEGAIFNILDQDGKVVREGLKTDGHGKLIVNDLKPGNYQLVETKAPEGYQLDASPISFTIEKA

SEQ ID NO: 46545 - protein, 159 aa, Bacillus anthracis
MNISIISIGKLKEKYLKQGIAEYLKRLSAYAKVEVIELPDEKAPENLSEAEMLIVKEKEGIRILDKISDDTHVIALAIEGKQKSSEEFAVSLDRLATYGKSKVAFVIGGSLGLSSEVMKRSNESLSFSKMTLPHQLMRLVLLEQVYRAFRINRGEPYHK

SEQ ID NO: 46546 - protein, 468 aa, Bacillus anthracis
  MISC_FEATURE (99)..(99): X=any amino acid
  MISC_FEATURE (158)..(158): X=any amino acid
  MISC_FEATURE (163)..(163): X=any amino acid
  MISC_FEATURE (190)..(190): X=any amino acid
  MISC_FEATURE (221)..(221): X=any amino acid
  MISC_FEATURE (253)..(253): X=any amino acid
  MISC_FEATURE (283)..(283): X=any amino acid
  MISC_FEATURE (400)..(400): X=any amino acid
VANLFKKKSVTQLLGESKSKTLTKTLGAFDLTMLGIGAIIGTGVLVLTGLVAARDAGPAVIFSFMIAAIVCGFAGLQICRNLHLFFLASRSAVRHIHMXSLCEFIAHLMGWTRIIRYFVTFAAVVGWMTGYFNNLVSGFGCRNPTEPLKIPSPGGGLXFPQPXFITLVLTLVLSRGTKESKRVKIHMGYXLKCVIVILFIAGGAVYVPPQKLDTFAPIRYXRIFAGGATEFFAFLRIGCISLSAEEVKNPQAXFTQLYYCFVSIGHNYLCCSLSVMTGMVFLXRIRCTRSMAYVLEVVGQDKVAGVIAVGAVIGIMAVIFAYIYATTRVFFAMSRDGLLPKSFAKINKKTEAPVFSTWLTGIGSALIAGFIDLKELSNLANIGALLTFAMVGVSAIMSSXNTSNLKTWFMVPLVPTLPLISIACCLFLMFNLPLTTWIYFGIWLAIGVVVYFVYSKKHSHLKDDGSSQ

SEQ ID NO: 46547 - protein, 283 aa, Bacillus anthracis
  MISC_FEATURE (70)..(70): X=any amino acid
  MISC_FEATURE (104)..(104): X=any amino acid
LELKNVCKSYEDFAVKNISFTLPRGYIMGFVGPNGAGKSTTIKMIMKFIKKDSGEIKILGRDIRKPKKKXNNIGFVYDENHYYEDFTCEPMKRIIATLLKKWDXKQYSSYMHRMQVPKYKKIKELSKGMKMKFAIAIALSHHAEFIIMDEPTAGLDPVVRSELLDMLQEIVMEDEVSVLFSTHITTDLERIADYITFINDGEIIFTGEKDDLMENYVIVKGSNDLLDREGKELFVGLRKNKFGFEGLAKDKQTIIDWFGNEVVLEKPTLDEIIVYTAKGRGAY

SEQ ID NO: 46548 - protein, 371 aa, Bacillus anthracis
MGTKTKKTLFNVDEQMKAIAAQFETLQILNEKGEVVNEAAMPELSDDQLKELMRRMVYTRVLDQRSISLNRQGRLGFYAPTAGQEASQLASHFALEAEDFILPGYRDVPQLVWHGLPLYQAFLFSRGHFMGNQMPENVNALAPQIIIGAQIIQTAGVALGMKLRGKKSVAITYTGDGGASQGDFYEGMNFAGAFKAPAIFVVQNNRYAISTPVEKQSAAKTVAQKAVAAGIYGIQVDGMDPLAVYAATAFARERAVNGEGPTLIETLTFRYGPHTMAGDDPTRYRTKDIENEWEQKDPIVRFRAFLENKGLWSQEVEEKVIEEAKEDIKQAIAKADQAPKQKVTDLMEIMYEKMPYNLAEQYEIYKEKESK

SEQ ID NO: 46549 - protein, 179 aa, Bacillus anthracis
MSRIGKKILEIPAGVTITVAEDNTVTVKGPKGELTRTFNADMLIKIEENTLTVERPSEQKEHRALHGTTRALIGNMVEGVTEGFARGLELVGVGYRAQKQGDKLVLSVGYSHPVEMTPEAGLEVEVPAPTKIVIKGIDKQRVGEFAANIRAVRAPEPYKGKGIRYEGEVVRRKEGKTAK

SEQ ID NO: 46550 - protein, 118 aa, Bacillus anthracis
MPRVKGGTVTRQRRKKVIKLAKGYYGSKNTLFKVANQQVMKSLMYAFRDRRQKKRDFRKLWITRINAAARMNGLSYSRLMHGLKNAGIEVNRKMLADLAVHDEKAFAELATVAKNNIN

SEQ ID NO: 46551 - protein, 337 aa, Bacillus anthracis
  MISC_FEATURE (69)..(69): X=any amino acid
  MISC_FEATURE (72)..(72): X=any amino acid
  MISC_FEATURE (170)..(170): X=any amino acid
  MISC_FEATURE (172)..(172): X=any amino acid
  MISC_FEATURE (174)..(174): X=any amino acid
  MISC_FEATURE (175)..(175): X=any amino acid
LDEISSKEKAAILIRTLERRVAAKVIEYMTAKEKEVLLREIAKFRVYKSETVRNVLGEVFVGIKVKRNXPWXLQDKEYYSSHNLKICQKTELEKIIRRFLGITRIIPLNFLNSLTDLEPLLTVLNDESPQTNAIIASYIKPQLASHLFEKLPDLKRGKTVMGDCKAKASXWXIXXIKLGDLLKSKLNNMAFNAINKTDGLKTIVNILNNVSRGVEKTVFLILDEMDYELSEKIKENMFVFEDLLGLEDLALRRVLEEITDNGVIAKALKIAKEEIKEKLFTCMSSNRKEMILEELDGLGPLKMTDAEKAQQTITDTVKKLEKEGRIIVQRGEDDVLI

SEQ ID NO: 46552 - protein, 85 aa, Bacillus anthracis
MVSANTKPLSEFKTGEFVQIEKIQLEGTMKRRLLDLGFIPGATIKVLQRSPLGDPVAYQVSNTTIALRKEESSLIFGVLIGDDFR

SEQ ID NO: 46553 - protein, 229 aa, Bacillus anthracis
MMDQFLWVLFPYIIFAIFIGGHIFRYNYDQFGWTSKSSELLEKKMLRIGSILFHFGIMFVIGGHVMGILIPEAVYRSIGISEHMYHVVAISFGLPAGIASIIGLIILTYRRVTVKRIIATSTKGDYIALILLLIVMLAGLSSTFLNIDSKGFDYRTTIGPWFRSLFIFQPKVEYMTEVPVWFKIHILAGLGLFAVWPFTRLVHVFSAPIKYISRSYVIYRRRIPNELKK

SEQ ID NO: 46554 - protein, 130 aa, Bacillus anthracis
MKRRTARERAMQALYQMDITGELEPKVAVENTLDEGEETNEFLESLVVGFVENKEVIDEAIRQNLKKWKLERISIVDRSILRVAVYEMKYMEEIPHNVTINEAIEIAKTFGDEESRRFINGVLSNIKDTL

SEQ ID NO: 46555 - protein, 510 aa, Bacillus anthracis
  MISC_FEATURE (14)..(14): X=any amino acid
  MISC_FEATURE (189)..(189): X=any amino acid
  MISC_FEATURE (202)..(202): X=any amino acid
  MISC_FEATURE (254)..(254): X=any amino acid
  MISC_FEATURE (268)..(268): X=any amino acid
VIISILLLLLVAFXSPFLLLHFLLKKRTHHSILKLHPYLGKMRLLLEKIGPEFRQYWFDHDTDGKPFSRYDFQSVMFLAKYRYEILGFGSKRDFEASGYYIANTLFPVLTEELSVNVTPEREGKKYVIHKEGLFSRREKLTADTTNLWLYEEDDAIIIGENRKYPWGTVWHVLEHQQLLTGRIGEIIFXRVGLEPKLAGVRXIILRKWRIPDHYHTGQISCNKLPRFIGIWDEDGIFRWRNLWESEEEYYKSIXIEFGQGADIRGAHXTGQKVNEKIALVRNVREGEPINSRNGFSFLNNAAETLYFIHQLQENGGKPVGMKIVIGHQEPLENLFKTMKELNIYPDFITIDGSEGGSGATYKSMADSMGMPLIPALLTFIDTANHYDIRDKFKVFAAGKLITPDKVAIALAIGADAVNSARGFMMASGCIMALQCNSGQCPSGVATGESHYQKALDPYEKKWRVMNYIVSMRYSLFSLAAAAGVKSPRHLKRDHIVFKDEMGRVVPLSEL

SEQ ID NO: 46556 - protein, 198 aa, Bacillus anthracis
  MISC_FEATURE (86)..(86): X=any amino acid
WVPCSAKAHTNKVAIVIDDFGNNMKGTIKMLSLPIPPTGAGMPFLPSTKEDAIAAHKKGHEVIIHMPMEPIKGKKEWLGPKAISNXLKRREITNRLDQAFREYPHAMGMNIHMGSKVTADERIVRLILAADKKHGLFYLDSKTNPKSVVPKIGKELGVPIMKIQLFFDDVYTAAHISKQAQLLIKKLQEKPIMVAIGH

SEQ ID NO: 46557 - protein, 439 aa, Bacillus anthracis
MAVENITMPQLGESVTEGTISKWLVNVGDHVNKYDPLAEVMTDKVNAEVPSSFTGIVKELIAGEGDTLAVGEVVCVIQVEGADEVAATAVEEKTKEEPKAEVNTPEKAPKAKQPTDGKPRFSPAVLKLAGEHNVDLDLVEGTGANGRITRKDILKLVESGNIPQAGAVKKEEAVAAVVEARPEAPKAAPVAQKVEAAKPVSVPTMPGDIEIPVTGVRKAIAANMLRSKHEAPHAWMMIEVDVTNLVSYRNSIKGDFKKREGFNLTFFAFFVKAVAQALKEYPQINSMWAGDKIVQKKDINLSIAVATEDELFVPVIKHADEKTIKGIAREITELAGKVRTKSLKADEMQGGTFTINNTGSFGSVQSMGIINYPQAAILQVESIVKRPVIMENGMFGARDMVNLCLSLDHRVLDGLICGKFLGRVKEILENTSENNTSVY

SEQ ID NO: 46558 - protein, 399 aa, Bacillus anthracis
MRSEVTVKIKPKFIKEIKSGYPLILKDAIQNLNDVQEEGTIIKVVDEKNHFVGKGYYGKQNKGYGWILTRKESEQINQSFFESKIKSALHKRKQFYKSSDTTAFRALNGEGDGLGGLIIDYYDGYYVVSWYSEGIYTFRDEIIAALQKVANFKGIYEKKRFDTKGKYIEGDDFVAGERGEFPLIVKENGVNFAVYLNDGAMVGVFLDQRNVRKQIRDKYAKGRTVLNMFSYTGAFSVFAALGGASKTTSVDLANRSLSKTIEQFSVNEIDYEAQDIIVEDVFLYFKYAAKKKMKFDMVVLDPPSFARSKKYTFSAAKDYKNLLKETIAITENNGIIVASTNCSAFDMKKFKGFIDTAFKEMNGKYKVLEEHSLPEDFRTIDQFKEGDYLKVVFIEKIKG

SEQ ID NO: 46559 - protein, 368 aa, Bacillus anthracis
  MISC_FEATURE (72)..(72): X=any amino acid
  MISC_FEATURE (190)..(190): X=any amino acid
  MISC_FEATURE (215)..(215): X=any amino acid
  MISC_FEATURE (221)..(221): X=any amino acid
  MISC_FEATURE (255)..(255): X=any amino acid
  MISC_FEATURE (273)..(273): X=any amino acid
  MISC_FEATURE (286)..(286): X=any amino acid
  MISC_FEATURE (310)..(310): X=any amino acid
  MISC_FEATURE (335)..(335): X=any amino acid
  MISC_FEATURE (338)..(338): X=any amino acid
  MISC_FEATURE (339)..(339): X=any amino acid
  MISC_FEATURE (348)..(348): X=any amino acid
  MISC_FEATURE (349)..(349): X=any amino acid
  MISC_FEATURE (359)..(359): X=any amino acid
ERLKVMTIFGTRPESIKMAPLVLELAKHPKKIESNGTGTAQHRQMLDPVLSIFGITPDFDLNIMKDRQNFNXYYHRVVYNVMDKVNEEAQPDIVLVPWDTTTTFIASLAAFYKSIPVGHVEGGTRTWDKYSPYPEEMNRQLTGVMADLHFSPTAKSATNLQKENKDESRIFITGNTGDCRIKSAVKRNIXSPVLEKLEKMIVLYLSPASLLGKAXGEPKAXFVSVQLSVLVDKHEDVQSGIPVQKNPCCSGNRKXFLGGFMAAIHLIEAGWMXLDFPKGGRWFHTXWLTDFGGGQEEGSFTWCTGLGLSXYNRAPGSYESRYVKIAGTRRRDNLXSCXXCLSDKRSSXXNVKKHLTVRXWPCIRAIVE

SEQ ID NO: 46560 - protein, 573 aa, Bacillus anthracis
KRYLQFVKPYRWLIAITIMIGLVKFGIPLIMPWLLKYIIDDVIQGAGSLQDKTSQLVTAIGIAFFIFAVLRPPIEYYRQYFAQRIANTILYDLRKHIFGHLQKLSLRYYSNTKTGEIISRVIHDVEQTKDFVITGLMNVWLDTATIAIAIIVMFSMNIKLTFVALLILPIYVVAVKYFFGRLRKLTKERSQALATMQGYLHERIQGMQVTRSFALEEYEGKQFEKRNNEFLTKSVNAYELDGENIFGSKTLTDLGPLLVIGFAAYEVIQGQLTLGTMVAFVGYMDSLYSPLRRLVNSSTTLTQSFASMDRVFELLDEKYDIVNVPSAVQTKKLNGEVIFDNVSFRYNADEKEILHNLSLTMLPGEKVALVGASGGGKSSLASLIPRFYDVSSGAVYVDGIDVRKYDMRNLRSHIGIVLQDNLLFSDTIGANILYGNPKATEEEVIAAAKAAQIHDFIIELPDGYDTVVGERGVKLSGGQRQRVAIARVFLKNPSLLILDEATPALDLENERYIQEALQTLAADRTTIIIAHRLATITHVDTIIYIEDGEIKETGSHEELMKKRGYYYNLYQLQ

SEQ ID NO: 46561 - protein, 358 aa, Bacillus anthracis
MANHELDQLRKQVDEINLQLLHLLNKRGEIVQKIGEQKQVQGTKRFDPVREREVLDMIAENNEGPFETSTVQHIFKTIFKASLELQEDDNRKALLVSRKKKQENTIVDVKGELIGNGTQTFIMGPCAVESLEQVRQVGQAMKDQGLKLMRGGAFKPRTSPYDFQGLGVEGLQILRQVADEFDLAIISEILNPNDVEMALDYVDVIQVGARNMQNFDLLRAVGKVNKPVLLKRGLAATIDEFINAAEYIIAQGNDQIILCERGIRTYERATRNTLDISAVPILKKETHLPVVVDVTHSTGRRDLLLPTAKAALAIGADAVMAEVHPDPAVALSDSAQQMDIPEFHRFMEELKGFKNKLS

SEQ ID NO: 46562 - protein, 213 aa, Bacillus anthracis
MRLNEYMLETFPNLELRPPLFYNGDTGIRFRLGVNYDCNNIYENCLYLEVVYNRAITLFQSLHATEDDIYIVVDVNDYADGESFKHKLNIFSKYVKAKSDLFKLQKNTIPYVFPEDDEDGVYKMHRYILKCKVSDLKYIPMLKAIRNHDMGIKPGIAHRVYFINSNKNTIFHVYDDRGCDVLATSPNTIRDIYHTYNDWILEYDRNKIDKVFN

SEQ ID NO: 46563 - protein, 239 aa, Bacillus anthracis
  MISC_FEATURE (43)..(43): X=any amino acid
  MISC_FEATURE (137)..(137): X=any amino acid
  MISC_FEATURE (174)..(174): X=any amino acid
  MISC_FEATURE (175)..(175): X=any amino acid
  MISC_FEATURE (195)..(195): X=any amino acid
EEVKKGYIPEHIAIIMDGNGKMGEGGEQMLRIAGHHEGIIRMXEKITKFVTKLNVKVLTLLAFSTENWKRPKKEVDYLMQLPEEFLGTFLPELIEENVQVRVIGQQDRLPTHTRRAMYSGHEETKENTGLIPNFRVXYGSRDEIVFCCAHMMKDSEEGKNSVEDGNEEMLSSYXXRSSFTEPELFIRTKPRATHXKFLVWAIAYSEIWVYKVIGPNFTEEHLLNAITDFQHRGRRFGGV

SEQ ID NO: 46564 - protein, 348 aa, Bacillus anthracis
MEKQKTFHVAVVGATGAVGEQMLNTLEKREFPIGKLTLLSSKRSAGKKLVFKGEEFTVQEATPESFEGVDIALFSAGGSVSKQLAPEAAKRGAIVVDNTSAFRMTENVPLVVPEVNENDLKEHNGIIANPNCSTIQMVVALEPVRQQYGLKRVIVSTYQAVSGAGAAAIEELHEQSQAILNGEEVKANVLPVSGDKKHFPIAFNAIPQIDKFQDNGFTFEEMKMINETKKIMHMPELEVAATCVRLPVVSGHSESVYIEVEKEGVTVEELKSLLANAEGIVLQDNPEEQLYPMPATAVGKNEVFVGRIRKDLNNDKGFHLWVVSDNLLKGAAWNSVQIAERLVKLQLV

SEQ ID NO: 46565 - protein, 2234 aa, Bacillus anthracis
MLKIFQRGEFMEAKKWYRYLIQLIVVALIVTSVPLNGLAETAPPFTPSPNSEQSPETEKKEEKELPAPHPDQSKKDKAKAKANPTEIVEERTETEKVFDNNDGTYTKRVYTEPIHIEKDGKLEEVSPKLVEAPNEKIITENTTLEPEFEKATQDGKYVQFKVKNHNIQYKLISANGEKGELKPTPVTATHEKNTVWYKGIFPNIDLKSTTFNENVKEDFVLREYTGHHIFTFALETDLTPSLQEDGSIDFQNEKKEKVFTLPKPYMNDSNVDQQSGEAVTSDAVRYNIEKKDEETYTLTVTADPQWLQAPERKYPVYVDPSIQLKDFDNAYASSAYPTVNYSGGKLWDAGQNAYTLKVGYYDGASGTNFAFIKPDVSNFKGANIESATFNAHTIWHYYTNQPNGVWLDEVTGAWNEGSLNWNNKPGSNNIAHADVTRGQWARFNVTNTVKAWVEGTKQNNGFKLHANGNGQNHWKKFIAAENGTNAPYLEVKYSYAKPNKPRVQTYSNGSGSSSGHFNVQWDAVPGANGYKVAIFNGHEYEEIEVGNVTNWTTKDKKIFPTPEEIAQGRYWVHDDGKGAEAPVNPGPIYKNAFLDKSPYGDYSSARGYWIRIIATYPTGEDSPLSDEAIVYIPLEQVKKPDGSAYINATDQTTGYVTLKWDAVPEAAGYKVWIYNGKDYEAFDVGNKTNWTTQNEKIWPTKDEIAKGQYLLHHDKKGVELAVDPSPVYKNSGGIYAGAKNYWFRVTAYSKVGHAESEISHEFVPRFSQDSGFIGMFDYWASIPVLNGKVNATNGNFIMSEKDITLSGRGPDVSVERTYNSQSKKVGLFGTGWSSGLEERVWADGNGNLLLISTDGANITFTRTGDNKYQAPTGIYLEIKQVSGGYEIKDKDQTVTFYKSGDAQGRIEYTKDKYGNTTTYEYDGASRLSKVKNASGKELVLQYDGNNKKAARVIGPDNKTITFNYDGDLLVSSTTPEGKVYKYGYDNGVLTSIYDPQHTDAKPYKTSYAYENDRLVKVTDPLGKATTLAYNTGSKEVTLTNPKGRKTVYTYNDAGNPVKTVEDVGRLNLTTSYEYNANNLVKTTTPKNQTETATYDGNGNVTSVTDEMGTEKFEYNKDNGIIKATDNEDRKTTVAYVGANTEVSQTDQGANTSSVIHHDQYGNPIETSKELSAGGNLIQNPSFEMNGTEKWVKVDTNNSGSISKDATPAPGGLGGESSLKITTKATNNDWGYIAAIQEVTLEPNTTYTLSGMVKTDLVNGAAFFNVQSLNENGAGIDGGWHDTRHNKVQGTSDWVNRQVTFKTTEQTRKVKIYLQVENGGSATSGSAWFDKIQLEKGEVSSSFNPVLNSSFEENWPDGFVPQWVRSCSQHCERNDVSDDSFTGHSSIVMERSEYGPNDIGYRNRVILNQKKAETVTLTAMSKSENVVNDAPDKLSKDYAVLAETYYQDGTVVNYYTSFPSGTNDWNRSAAVIPAKKPIQKIEIFLLFRKNNKGKVWFDDIRLLEGNALIKNEYDNDGNVVATYDEEGQKNTFTYDASGNKKSETDEKGNTKLYDYNKDNLLTKVTLKNGTSVNYRYDHNGNTTEKSVMFGGKTQTHKYEYDVDNKNTVYIDALNRRIENTYDENANKIKTKMPNGSILESVYDTADRVVGEKRNGKDSFTFERDQNGQVTKVKDLVNGVERTKTYDKADRVTSATDSRGGKIDWAYHDKANSKTEKLKEQTVTQGGYTNKVSYDYNTLDQNIRVTDGSQTYRFDYDDQGNVRTYTAGNGSGSTFNYDQANKIKDLVVGTSNSILLSERYEYDQSGNRTKIKHEGAGGKVTETNFVYDPINQLLNEVLPNGTTKSYTYDGFGNRTSVKVIENGKETKSIAATFNEGNQLVKFGNESLTYDVNGNRTSDGKYKYTWNEDDQIVAITKQGENNAFATYKYDEDNRRIEKNVNGQVTRYFYDGDSINPLYETDGNGTVLRQYVYSADGARLAMKAQGQTLYYHYNPRGDVVAMTNQDKEVVATYEYDAWGNVLTSDTKGIAADNPFGYAGYMYDKEIGMYYLIARYYNPEHGVFLSVDPDPGDEDDPVTMNGYTYADNNPVMMTDPDGKWAWLVPVVIAGAMVAARFGAKYAIRYGAKYGKKAVKSGWDYGKKVAKSGWNKGKSIAQKIPRIHKVGRIKGDNDKGKGYWGVIYSTTKKTGKRTYSSFEFHTPHNGHGYHLQKNKYSKYQGKWNRGKATWRQTIWKAKNW

SEQ ID NO: 46566 - protein, 218 aa, Bacillus anthracis
MTEKMTRMTQFVKEEIANAITHGIGAILSIPALIILIIHASKHGTASAVVAFTVYGVSMFLLYLFSTLLHSIHHPKVEKLFTILDHSAIYLLIAGTYTLFYFITLRGPLGWTLLAIIWTLAIGGYIFTNFFVRRFIKASTLCYIIMGWLIIVAIKPLYENLTGHGFSLLLAGGILYSVGAIFFLWEKLPFNHAIWHLFVLGGSAMMFFCVLFYVLPTA

SEQ ID NO: 46567 - protein, 429 aa, Bacillus anthracis
  MISC_FEATURE (10)..(10): X=any amino acid
  MISC_FEATURE (15)..(15): X=any amino acid
  MISC_FEATURE (162)..(162): X=any amino acid
  MISC_FEATURE (163)..(163): X=any amino acid
  MISC_FEATURE (164)..(164): X=any amino acid
  MISC_FEATURE (250)..(250): X=any amino acid
  MISC_FEATURE (270)..(270): X=any amino acid
  MISC_FEATURE (307)..(307): X=any amino acid
  MISC_FEATURE (390)..(390): X=any amino acid
  MISC_FEATURE (410)..(410): X=any amino acid
IFPYLAVQIXMVFTXKEQTSSFYLITGNVCPLVFVLIRHIIVRMQNKDLTETLKVFNNQLEQKVFQRTADLIKKSNDLVKNQERFKSLYEYHPDPILTIDPNGTVLNINQSGSILLGKDSAALIGKECFSIFLDEDKPELEAALKMGKTCSSSSLQLRVKTXXXEGYIFWYVTIVPIMIEGQTFGSYVMVKDITKMKQQQDKINYLAFHDTVTEIGNRIFFQQELEKSIERAQKTQGEFGLLYIDLNRFXDHIDTMGHSMGDSVLKESCXTFRTCLSPSIPLARIGGDEFAVLVHNPHSTSAIGFMXKSFRITEKPFVVNQHSFYLSLSIGIAVYPFGGINTTTLLQHADIAMYSAKEKGNNAVCMYDETLSQKITRRLQLEHDFPECDXKIMEVFLLYQPPKLIIKGTXRLLGGTRRLITLGHNPQLG

SEQ ID NO: 46568 - protein, 804 aa, Bacillus anthracis
  MISC_FEATURE (62)..(62): X=any amino acid
  MISC_FEATURE (73)..(73): X=any amino acid
  MISC_FEATURE (79)..(79): X=any amino acid
  MISC_FEATURE (135)..(135): X=any amino acid
  MISC_FEATURE (137)..(137): X=any amino acid
  MISC_FEATURE (138)..(138): X=any amino acid
  MISC_FEATURE (228)..(228): X=any amino acid
  MISC_FEATURE (288)..(288): X=any amino acid
  MISC_FEATURE (291)..(291): X=any amino acid
  MISC_FEATURE (292)..(292): X=any amino acid
  MISC_FEATURE (328)..(328): X=any amino acid
  MISC_FEATURE (330)..(330): X=any amino acid
  MISC_FEATURE (366)..(366): X=any amino acid
  MISC_FEATURE (380)..(380): X=any amino acid
  MISC_FEATURE (721)..(721): X=any amino acid
  MISC_FEATURE (744)..(744): X=any amino acid
  MISC_FEATURE (752)..(752): X=any amino acid
  MISC_FEATURE (758)..(758): X=any amino acid
  MISC_FEATURE (773)..(773): X=any amino acid
  MISC_FEATURE (779)..(779): X=any amino acid
  MISC_FEATURE (788)..(788): X=any amino acid
  MISC_FEATURE (790)..(790): X=any amino acid
  MISC_FEATURE (792)..(792): X=any amino acid
  MISC_FEATURE (794)..(794): X=any amino acid
  MISC_FEATURE (798)..(798): X=any amino acid
  MISC_FEATURE (801)..(801): X=any amino acid
QAEKFHELPLGEVLGERFARYSKLIIPDRALPDGRDGLKPVQRRILYSMYVERNVHDKSVPXSAKTVGNVIGXLSPARXFLCIWKDGTFKSKLGKVRKCLVEMHGNNGSGDGDPAAAMRYTESPIITNCSELYTXSXXRNVEFVSNFDDTSEEPGGFTAAFPNLLVNGSTGISRGLCDRKFLASSWRSYDATMMRIDKPNSTVDDLLTVMKGPDFPTGGIIQGIDGIXKGVLKRVKVKYYSREAEVETVRGGKQQIVITEIPYEVNKANLVKKMDELRLDKKLDGNAXSTXXPSSYSFPFFVDLKKEAISEGFFNLFIKNTGFPISIXLXYGSDKNRRPTLMTFPKNFRCIYCPSKKKLLRTFTIXITKGRKRQHIVEGXKKALSILDQVIETIRASKDKRNAKDNLSAKFGFTEAQAEAIVSLQLYRLTNTDITALQQEADELNKKIIELQAILQSEKRLLQVIKTDLKRVKKTYSDDRRAIIEDQIEEIKIDVEVMIPQEDVIVTVTKEGYVKRTGWRSHNASNGKDFGMKEGDILLERFDTNTTETVLLFTNRKKLYIFCQYTKCQIFRWEKLGTPRVLISVSLDRMGTIFGALVVPNFEKKSDLSYLNKERYDKKTELNQYKVQRYSRAFVAVNLKKDDEVVDIFATDGTSDIVLATHGAYALIFHEDEVSPVGVRAAGVKAINLKEDDYVASGKPLNADKDQLILVTQRGAVKRLXASEIEKITRAKRGLGYFQRIKTXSIPHCRYXNRSRRXLVLHEDRETYRRRNXFGKVYXNKGQVIVTXFXCXCXRYWXSYXNVD

SEQ ID NO: 46569 - protein, 573 aa, Bacillus anthracis
MALGTSAAYFYSVYLSIQSIGSSEHMTDLYFETSAVLITLIILDKLFEAKAKGRSSEAIKKLMGLQAKTATVMRDGTEMKILIEEVVAGDIVYVKPGEKIPVDGEIVEGKSAIDESMLTGESIPVDKTIGDVVIGSTMNKNGFLKVKATKVGRDTALAQIIKVVEEAQGSKAPIQRVADQISGIFVPVVVVIAIITFAVWMIFVTPGDFGGALEKMIAVLVIACPCALGLATPTSIMAGSGRSAEYGILFKGGEHLEATHRLDTVILDKTGTVTNGKPVLTDVIVADGFNEEEILRLVGAAEKKSEHPLAEAIVEGIKEKKIDIPSSETFEAIPGFGIESVVEGKQLLIGTRRLMKKFNIDIEEVSKSMEELEREGKTAMLIAINKEYAGIVAVADTVKDTSKAAITRLKKMGLDVVMITGDNTQTAQAIAGQVGIEHVIAEVLPEGKAEEVKKLQAQGKKVAMVGDGINDAPALATADIGMAIGTGTDVAMEAADITLIRGDLNSIADAIFMSKMTIRNIKQNLFWALAYNGLGIPIAAFGFLAPWVAGAAMAFSSVSVVLNALRLQRVKLK

SEQ ID NO: 46570 - protein, 322 aa, Bacillus anthracis
MMDPNRLKGIIMVVIGACLWGLSGTAAQQLFQYDNISTEWLVTIRLLISGIILLIIASFGTSKKEIFGIWKQRSDAYKMILFGLFGMLAVQYTYFASIKEGNAAVATLLQYLAPIFITVYLLFKWNVRPSKIDFISITLSLVGTFLLLTNGSVHNLAVSTPAIIWGILSGLSLAFYSLYSKGLLERWSSSVIVGWGMIIGGIGVTIVHFISTKEFILLSTVKYVKLSTLPLITFVVIFGTLIAFYLYLDSIRYLTPKETTLFGCTEPLAAIISSVLILHVPFQSFQLLGAFCVIVMVLILSQKPDEGKPELKLVHEKKENIQ

SEQ ID NO: 46571 - protein, 428 aa, Bacillus anthracis
MFIDQVKIYVKGGDGGNGMVAYRREKYVPKGGPAGGDGGKGADVVFIVEEGLRTLMDFRYQRHFKADRGQHGMSKGQHGRKSEDLLVKVPPGTVVKDEKTGQILADLVTHGQTAVIAKGGRGGRGNSRFATATNPAPEIAENGEPGQERDVILELKVLADVGLVGFPSVGKSTLLSVVSSARPKIAEYHFTTIVPNLGVVETGDNRSFVMADLPGLIEGAHAGVGLGHQFLRHIERTRVIVHVIDMSGLEGRDPYEDYVTINNELKEYNLRLTERPQVVVANKMDMPDAEENLQAFKEKVGDEVKIFPISAVTKQGVRDLLFEVANLIETTPEFPIHEVVDESDTSVMYKFETEGVKFDITRESDGTFVISGYDIEKTFKMTDFSRDESVRRFARQMRGMGIDEALRARGAKDGDIVKILEYEFEFID

SEQ ID NO: 46572 - protein, 157 aa, Bacillus anthracis
MFSVQPIAFVHNERKEIKDDEWGEVRSCITLTEMYTEESIQGIEDFSHIEIVFYFHKVTDEQIQYVARHPRNNHDYPKVGIFAQRGKNRPNRIGATIVKVIKREGKSIIVEGLDAIDGTPILDIKPIMKEFMPREEIVQPKWATDIMRQYWKGNGVK

SEQ ID NO: 46573 - protein, 613 aa, Bacillus anthracis
MKKRQDLRNIAIIAHVDHGKTTLVDQLLRQAGTFRANEHVEERAMDSNDLERERGITILAKNTAIHYEDKRINILDTPGHADFGGEVERIMKMVDGVLLVVDAYEGCMPQTRFVLKKALEQNLTPIVVVNKIDRDFARPDEVVDEVIDLFIELGANEDQLEFPVVFASAMNGTASLDSNPANQEENMKSLFDTIIEHIPAPIDNSEEPLQFQVALLDYNDYVGRIGVGRVFRGTMKVGQQVALMKVDGSVKQFRVTKLFGYMGLKRQEIEEAKAGDLVAVSGMEDINVGETVCPVEHQDALPLLRIDEPTLQMTFLVNNSPFAGREGKYITSRKIEERLRSQLETDVSLRVDNTESPDAWIVSGRGELHLSILIENMRREGYELQVSKPEVIIKEVDGVRCEPVERVQIDVPEEYTGSIMESMGARKGEMLDMVNNGNGQVRLTFMVPARGLIGYTTEFLTLTRGYGILNHTFDCYQPVHAGQVGGRRQGVLVSLETGKASQYGIMQVEDRGVIFVEPGTEVYAGMIVGEHTRENDLTVNVVKMKQQTNIRSATKDQTSTMKKPRLMTLEESLEYLNDDEFCEVTPESIRLRKKILDKSERERAAKKKKSVEA

SEQ ID NO: 46574 - protein, 253 aa, Bacillus anthracis
MTKPVVDVKNVQKVYGKKGENQSHALKGVSFSIQEGEFVGIMGPSGSGKTTLLNVISTLDKATGGVVEIAGTDITKMKQGELSDFRSQKLGFIFQDFNLLENLSIYENIALPLSLQGVPSRNIGPKVEKVADMLGISAILQKYPSEVSGGQKQRSAAARALVHEPAIILGDEPTGALDSKNATSLLDAMTNLNQEQGVSIMMVTHDPFSASYCQRILFIQDGELYKEIHRGGTREEFYKEILDVLADLGTQKA

SEQ ID NO: 46575 - protein, 103 aa, Bacillus anthracis
MHAQLCDKVQVISGKDKGKQGVILVAFPKQNRVIVEGVNIVKKHSKPSQLNPQGGIITKEAPIHVSNVMILDPKTGEPTRVGFKVEDGKKVRIAKKSGELLDK

SEQ ID NO: 46576 - protein, 367 aa, Bacillus anthracis
  MISC_FEATURE (10)..(10): X=any amino acid
  MISC_FEATURE (93)..(93): X=any amino acid
  MISC_FEATURE (104)..(104): X=any amino acid
  MISC_FEATURE (107)..(107): X=any amino acid
  MISC_FEATURE (226)..(226): X=any amino acid
  MISC_FEATURE (229)..(229): X=any amino acid
  MISC_FEATURE (243)..(243): X=any amino acid
  MISC_FEATURE (286)..(286): X=any amino acid
  MISC_FEATURE (323)..(323): X=any amino acid
MELVEIRQEXEKMAKRLAAFRGVSLTLPTKEKQIAELEEKMMGAGFWDDQQGAQAVINEANALKDMVGKFRQLDETFENLEITHELLKEEYRXRFTSNRLGLKXKVXFQEIMKLKLQLLLSDPYDKNKAILELHPGAGGTESQDWGSMLLRMYTRWAEKRGFKVETVDYLPGDEAGIKSVTLLIKGHTAYGYLRARKGVHLLVQISPLDYTGRPPYSFVSCEVVPXVQXEVELEVRTEALENXYVRASGAGGQHVNTTDSAVRITHTPTNTVVNVSVRASQNKNPXACMKNVKSELYPKNLEEPQAGVRMNFAKKQKKIGWGXSNPVLTDFHPDSLGKDQPSNYGSPLRAKHFLDGEYDPFIDALLR

SEQ ID NO: 46577 - protein, 1194 aa, Bacillus anthracis
ANLNPQKTVDREFASIGDTLTYTITLQNTGNIPATNVIITDSIPTGTTFILGSVTVNGIPQPNLNLETGIPVGTLNPRQIVTVTFEVQVTALPPNGIISNEANVTYTSQPDPTLPPITTTTPTPIAETIVQNAELESAKIVDLPVANIGDALTYTITLENIGNIPMTNVSVIDPPPLGTQFIVDSVTVNGISQPGIDPSIGIPIGTIQPNQIVTITFQVTITNIPPNGVVTNVGSVNFTSQPNPNEPPVTETETTPPVNTEIINSIINPSKTADRNNVDIDDIITYTVTFQNLQTVELTNIIFTDPIPVGTTFIPNSVTINGIPTSDVDPALGIPLGTLNPSQSVVVTFQVRVVSIPPNGIIVNEATITYTFQPNPGEPPVTVTTPTPPTTTNVNTATTNPTKSADKVFALLGDTITYTISLQNTGTVPATNVLVTDPIPAGTTFIPNSVTINDVTQPGIVPSSGILIGTLEPNTSAVVTFQVQVTSIPPTGFIENQGTVSFQYQPDPTRPPVSVTTPTPTTKTQVSEVTINPNKQGNPQTINLGDTVTYTITFQNVGNINATDVIITDPTPAGTTFIPNSVTINGVSSPGANPNSGVNVGTVTPGQIVTLTYQVTVTALPPDGIIKNTATVTYTFQPNPGEPPITITDPTPTVEVSVITPTPNPNKLADKQIVDINEIITYTVTFQNRGSVPATSVIVTDPLANGLTFVPGTVILNGIPDLGANPVEGIPVGTVNPNDTITVQFQARVTSVPPGGIIRNQATVTFTYEPIPGEPPVTITDPTPINTTDVNTAILNPQKTATPETVTLGDIITYTISLQNTGTIPANNILVSDPIPTGTSFIQNSVTINNVSQPTANPETGIQIPTLSPSESATISFHVLVTSIPPSGEIQNQGNVSFQYQPDATKPPVSVTTPTPTTITPVNVGTINPIKTADKSIVSVGDTITFTITFQNEGTIPVTDISVTDSLPAGTSFIPNSVTINNIPVPNANPSTGILVGTLNPLDSVTISFQVQVITLPPNRMIINIAFITSTSQPDPTRPPVTTTITTPPITVEVNPNEPNTFIKTANVNSAHLGDFITYTLTFTNNGAIPANNVLITDPLPPEVTFYPNSVTVNGVARPGTNPTIGILIDTVNPGESVVIRFIVQVTAEPRGGLIRNTARIRYTLRPDPTQPPISVDETSEPNIIPFIGPFVSP

SEQ ID NO: 46578 - protein, 328 aa, Bacillus anthracis
MSQTVETLFSIFDSSAVVLRKELDVTYLEALVETGDNLFEGAILQEELSEAAIERLNREYSTFNEETYKGEEIRKAFQLAILKGMKEGVQANHEMTPDAVGMFMSYLFHKFMQGQNEITVLDPAIGTGNLMTTVFNSAKEGLTMSGFGVEVDEVLIKLALVNANLQKHAIEFFHQDGLAPLYIDPVDAVISDLPIGYYPNEIGASEYKLKADEGMSYAHHLFIEQSVKHTKEGGYLFFLVPNFIFESDQAPKLHAFIKETCFIQGLLQLPVSMFKNEKNAKSIFVLQKKGPSVTMQKQALLVELPKFSNMKAMEDIMDQLNTWFATHK

SEQ ID NO: 46579 - protein, 506 aa, Bacillus anthracis
  MISC_FEATURE (241)..(241): X=any amino acid
  MISC_FEATURE (269)..(269): X=any amino acid
  MISC_FEATURE (281)..(281): X=any amino acid
  MISC_FEATURE (292)..(292): X=any amino acid
  MISC_FEATURE (305)..(305): X=any amino acid
  MISC_FEATURE (310)..(310): X=any amino acid
LDFGSQYNQLLARRIREFGVYSELHPHTITAEEIKAMIPKGIIFSGGPNSVYGEGALHCDEKIFDLGLPIFGICYGMQLMTQQFGGTVERANHREYGKAVLKVENESKLYATLPEEQVVWMSHGDLVTVLPEGFVVDATSESCPIAGMSNEAKNLYGVQFHPEVRHSEHGNDLIKNFVFGVCGCSEGWNMENFIEVELEKIRETVGDKKVLCALSGGVDSSVVAVLIHKAIGDQLTCIFGXHWVTFRKGEPEGVMKNILGKAFPMNVIXVECKETFLVTSXKGVEDPETKTXKLSGNEFFYVIGXEASKXEGWDFFSTRTRYPDIVEGGTATAQTIKSHHNVGGLPEDMQFKLIEPLNTLFKDEVRVLGSELGIPDEIVWRQPFPGPGLGIRVLGEITEEKLEIVRESDAILREEIIKAGLDRENLAILTALPGMRSVGVMGDERTYDYTVGYPCSNIIDGMTADWARIPWDVLEKISVRIVNEVKHVNRIVYDVTSKPPATIEWE

SEQ ID NO: 46580 - protein, 327 aa, Bacillus anthracis
IFDAFSHHVTFVDNKGNITLCNQAAADDFGVVRNDIIGKPIQQLLKLPEEKIKALETLRTGTEIYNEEVLDKNYGILNNRIIRDYNGEIFRVISVFHYLNTERDAEKFSLAGRIAAGIAHEVRNPLTTVRGYLQFLQENVSPSNKELFKNLLIPELDRANSIITKFLSISKTREFTREPFPINTFLREYIQQLLASEVFLHNISIDYNFSTELDDILVHIDRHELVQVFLNLFQNAVDASRRKKLSIQITSYRLDNFVRITFTDNGTGIPPAIQEYIFDPFFSTKDSGTGLGLSVTKKIIQNHNGTLKMTSNEDGTTFTISIPILPK

SEQ ID NO: 46581 - protein, 476 aa, Bacillus anthracis
MKDTFVEKVDDFVRQHDVLKERSTIVVGVSGGPDSLALLYYLLEKRAAKQFEIVVAHVDHMFRGDESHEDLQFVQDLCKGLGVICETIRINVSQYQKQYGMNAQVAARECRYAFLERIMKKYDARYVALGHHGDDQVETILMRLVRGSTPKGYAGIAVKRPFHNGYLIRPLLGVTKEEIVNYCNELKIIPRIDPSNKKEVYTRNRLRKYVLPHLKEENPQVHEKFQKFSMQMQEDEAYLQELAFEKMNKVITKKSDKQISLSIPTFESMSMPLQRRGIQLILNYLYEYKIPSSLSSIHIDKVIEFFKRTQPSGSLDFPGDLKIVRAYEECSFGFKQEIVSPFLQDLSVPGTITLSNGDKLVTEVSEDIPSDMNETVFVAKYNDISYPIRIRSRENGDRMSIQGMNGTKKIKAIFIEAKVPREKREEWPVVCDASGNIIWLPLLKRSAFAISKETAKKDKYMIIHYKSKESSGRIMK

SEQ ID NO: 46582 - protein, 586 aa, Bacillus anthracis
MKTVANYSYFVMIVLRKRLHKISDGMQKERMTMNKTWWKEAVAYQIYPRSFMDSNGDGIGDLQGIIAKLDYLKDLGIDVIWICPMYKSPNDDNGYDISDYQDIMDEFGTMEDFDALLDEVHKRDMKLIIDLVINHTSDEHPWFIESRSSKDNPKRDWYIWHDGKDGAEPNNWESIFNGSAWEYDEVTGQYYLHLFSRKQPDLNWENKEVREVLYDTVNWWLDKGIDGFRVDAISHIKKEDGFKDMPNPKGLKYVPSFDKHMNVDGIQPLLEELKENTFSKYDIMTVGEANGVKIEDAELWVGEEQGKFNMVFQFEHLSLWDAEKKKDLDVVGLKKVLTKWQKGLENKGWNALYIENHDKPRIVSTWGDDKQYWRESATALGAMYFFMHGTPFIYQGQEIGMTNVQFPNIEDYDDVAIKNLYREKIAEGVSHQDMMEIIWASCRDNSRTPMHWDDEINAGFTTGTPWFGMNQNYKEINVAKQKNEENSIFNFYKKMIALKKEHDVLNYGTYDLLLEDDPQIYAYTRTLNDEKIVVISNISKEEAVYNEDLFALERKRLLLNNYEVAEHEQLTTITLKPYETRVYRIS

SEQ ID NO: 46583 - protein, 341 aa, Bacillus anthracis
  MISC_FEATURE (337)..(337): X=any amino acid
MDINLFDFHLPEELIAQVPLEERETSRLMVLDRETGDIEHKHFTDILSYLHEGDCLVLNETKVMPARLHGVKEDTGAHIEVLLLKQEEGDKWETLVKPAKRVKEGTVISFGEGKLKATCTGTADQGGRQLEFSYDGIFYEILDELGEMPLPPYIKETLEDRDRYQTVYAKEIGSAAAPTAGLHFTEELLGKLKQKGVELAFITLHVGLGTFRPVSADTIEEHHMHAEYYHMSEETAALLNRVKENGGRIITVGTTSTRTLETIATDHDGKLCAASGWTDIFMYPGYEFKAIDGLITNFHLPKSTLIMLVSAFANRDNVLHAYNEAVKEKYRFFSFGXCMFV

SEQ ID NO: 46584 - protein, 396 aa, Bacillus anthracis
MKKYILSLDQGTTSSRAILFNKKGEIVHSAQKEFTQHFPKPGWVEHNAQEIWGSILAVIATCLSEADVKPEQIAGIGITNQRETAVVWDKTTGKPIYNAIVWQSRQTAEICDELKEKGYSEMVREKTGLLIDAYFSGTKVKWILDNVEGAREKAENGDLLFGTIDTWLVWKLSGGKAHVTDYSNASRTLMFNIHDLQWDDELLDMLTVPKSMLPEVRPSSEVYGETIDYHFFGQNVPIAGVAGDQQAALFGQACFGEGMAKNTYGTGCFMLMNTGEKAVASEHGLLTTIAWGIDGKVNYALEGSIFVAGSAIQWLRDGMRMFKDASESEVYASRVESTDGVYVVPAFVGLGTPYWDSEVRGAMFGVTRGTTKEHFIRATLESLAYQIKDVLCAMEA

SEQ ID NO: 46585 - protein, 421 aa, Bacillus anthracis
KTKDREISESWELDTRGKGITRPYSAEDVIRLRGSIDIEHTLARRGAEKLWASLHTEDYINALGALTGNQAMQQVKAGLKAIYLSGWQVAADANLSGHMYPDQSLYPANSVPAVVKRINQTLQRADQIQHMEGSGDTDYFVPIVADAEAGFGGQLNVFELMKGMIESGASGVHFEDQLSSEKKCGHLGGKVLLPTQTAVRNLISARLAADVMGVPTIIVARTDADAADLITSDIDPVDKAFITGERTPEGFYRTKAGLDQAIARGLAYAPYADLVWCETSEPNLEDAKRFADAIHKEHPGKLLAYNCSPSFNWKQKLDEKTIASFQKEIASYGYKFQFVTLAGFHSLNYGMFELARGYKERGMAAYCELQQAESAVEKPGYFATRHQREVGTVYLIEVAQVIPGGTSSTTALKGSTEEAQF

SEQ ID NO: 46586 - protein, 287 aa, Bacillus anthracis
MKASTLLFKIESNMDQFSPAEKKVAMYIMENAEIVPNLTTKEVSTNAGASEASVVRFCKSIGIGSFKAFKIALVRELTIADYNINDFSVMNTEDGPYDLFNKVTYVNKAAIEASVTAIDKKELEKAADRIVNADKIIFYGVGGSATPAMDGAYKFTRLGFTAMMLSDFHMMLPLVTNLKEGDIFVAISTSGRTKDVLEMAQYAKRQGATVIAITKLDQSSPLYKEADIRLCMPDVEQDHRIASIASRMTQLNMIDALYVITFNRIGNKVLDQFMETREEALRLRKLK

SEQ ID NO: 46587 - protein, 2385 aa, Bacillus anthracis
MPNSQKVRHSLSSAQSGMWFAQQLDPLNPIYNTGEYVEINGNINQEIFELAVRKVVMEAEALHVRFEEDEIGPWQVIEELQFHMHFIDVRKEENPEEAAKVWMKNDLSMPVDLKKDTLFTEALIQVENNRFFWYQRIHHIVMDGYGFSLLSQKVAKEYTSLIEETNKNEKPFGSLAKIVQEDMEYGESKQFQEDRAFWLEKYGDEPEVVSLAERAPRTSNGFLRETAYLSSSSTKTLLEDINVSLASWPEFIIAVTSIYMHKLTGANDIVLGLPMMGRLGSASIHTPSMVMNLVPLRLTVTPNITLAELLQQVSKEIQDVRRHHKYRHEELRRDLKLLGENQRLFGPLVNVMPFDYGLNFAGNRGITHNLSAGPVDDLSINVYKRFDENELMIHFDANPEVYNGAELALHKERFMNVLELVINDYEKDASIGSINITLPEENQKVLFEWNETKEAEELISLPILFEKQVQKNPNKIAVTCNGIKLTYKELNERANELAHYLVEEGIGPNQFVALVFPRSTEMVVSMLAVLKAGAAYLPIDPEYPAERINYIVNDAKPVCIITHSSVSSILVIEDDIKEIELDSEEMTIALNTYSYMNIPLKNDESLLNPAYTIYTSGSTGNPKGVIVPMKALSNFLLAMDDIFSLNENDHLLAVTTFAFDISALEIYLPLISGASLTIAQKEVIQEPSALTALLQEERVTIMQATPTLWQALVTEYPEKLQGLNVLVGGEALPAHLAKTLKELGCTITNLYGPTETTIWSTVMNIDERESGMPPIGKPIWSTAVYVLDAGLQPVPPGVIGELYIAGGGLANGYLGKPELTAERFVANPYGKPGQRMYRTGDLVKWRKDGVLEYMSRADHQIKIRGFRIELAEIEMVVQRHENIKQAVVMVREDRPNDKRIIAYIVAEEKETIHLAEIRSYVSESLANYMVPAAFVLLEELPLTPNRKVDRKKLPAPDYNGMNNERVARNPKEEILCDLFAEVLGVSRISIDDNFFEMGGHSLLASRLMARIRETLSVELGIGKLFESPTVAELAKQLDQAKNARPAIKKVSRPNEVPLSFAQRRLWFLNCLEGPSPTYNIPLVIRLSGKLNEEALQGAIHDVVEKHETLRTIFPNVLGSSYQKILDMENLNLEIIKTKTCKDELENVLTQAVRYSFNLDGEPAVRVQLFTMSENEHVILILLHHIVGDGWSLQPLTRDLTAAYKARCQGNRVQLETLPVQYADYALWQQQLLGDETTQESLISTQLDFWKKELRGLPDQLELPTDYQRPMETSYQGETIHFHIDASMHSRLVELARKNGVSLFMVLQAGLSALFTRLGAGTDIPIGSPIAGRNDDALSDIVGLFVNTLVLRTNTSGDPSFEELLNRVKRSNLAAYENQDVPFERLVEVLNPVRTRNSHPLFQVMLAFQNTPEATFDAPDIEANLEIQSVGSAKFDLTFEISESNGVDGNPNGLQGLLEFSTDLYKRETAQKLVERYILLLDDAVKHPDQSIGRLEILTLAEKNTVLEKWNGGFQIASEMTLSQLFEKQAHIKPNAIAVVFEDEKLTYEKLNKKSNKLARLLIAKGIGPDQLVALAMPRSLNMVVSLLAVLKAGAGYLPLDPDYPSDRISFMLHDAKPSCVLTNSDVEIECDEELKILIDDIEVIEESEKYSEDNIDEMERMKPLTPSHIAYVIYTSGSTGRPKGVMIPHQNVVRLLGATDHWFQFDADDVWTMFHSYAFDFSVWEIWGPLLYGGRLVVVPHTVSRSPKEFLQLLVKEKVTVLNQTPSAFYQLMQADRENEEIGQKLSLRYVVFGGEALELSRLEDWYSRHPHNAPKLINMYGITETTVHVSYIELDETIVSLRANSLIGCSIPDLKVYVLDNYLQPVPPGVVGEMYVAGAGLARGYLGRAGLTAERFIADPFGKPGTRMYRTGDLARWRHDGTLDYIGRADHQIKIRGFRIELGEIEAVIMKHPKVEQVAVIVREDQPGDKRLVSYIVASNNEMIDTNEMRQFAGGSLPDYMVPYAFVVVNELPLTPNGKLDRKALPAPEFIASASSRGPRTPQEEMLCDLFTEVLSVPQIGIDDGFFDLGGHSLLAVQLMSRMKEALGVELNIGTLFAAPTVAGLAERLEMGNGQSALDVLLPLRSGGDQLPLFCVHPAGGLSWCYAGLMKSLGTDYPIYGVQARGIAKNEELPKSLEEMAADYLKHIREVQPHGPYRLLGWSLGGNVVHAMAAQLQNEGEEVELLVMLDSYPGHFLPNTEAPTEEEALIALLALGGYDPDNMDGKPLTMESAVEILRKDGSALASLEEETILNLKETYVNSVGLLGKYIPKVYNGDILFFRSTVIPDWFDPISPNTWLNYLDGQIVQYDIDCRHKDLCQPGPLTEIGQVLAKYLQNKKGVSTV

SEQ ID NO: 46588 - protein, 642 aa, Bacillus anthracis
  MISC_FEATURE (334)..(334): X=any amino acid
MKNPLLRIENLQTSFRIQDQYHAAVDDVSLTVHENEIVAIVGESGCGKSALALSIMRLHNEANTKLQGQLNYRDKDLLTMSAAEMNKVRGSNIGMIFQEPLTALDPLMTVGKQIEENLDYHTSLSKVEKKERTLELLHQVGIPKPELTYKQYPHELSGGMRQRIVIAIAIACNPALIIADEPTTALDVTIQAQILDLLKSIQEQTKMGIILITHDLSVVAETADRIVVMYAGQVVETGKVEEIFNNPLHPYTRSLLNSIPSAYAEKEKLHVIQGVVPTLAKLPRTGCRFQARIPWIRPDQHEENPILHEVKPNHWVRCTCYKHFNFQDKKGMTXLMALLKVEDLKVHFPIKGGVFGRTLDYVRAVDGVSFELQPGETYGIVGESGSGKSTTGKAIMHLTKATGGSIHFNNRDLTKLSRSELREQRKDIQMIFQDPYSSLNPKKRVMDIIAEPLRNFEKLSPDEERRAVQDYLDKVGLNPESIYKYPHEFSGGQRQRIGIARALTLKPKLIIADEPVSALDVSVQAQVLNFLQDLQSELGLTYLFISHDLGVIRHMCDRIGVMYRGRIVEEATSAEIYNNPQHIYTKRLISAIPDIRPENREQQRKLRREVSAEYEKSYENYFNENGRAYDLKPISPTHRVAL

SEQ ID NO: 46589 - protein, 550 aa, Bacillus anthracis
LKNDQAAVFALGGLGEIGKNTYAVQFQDEIIIIDAGIKFPEDELLGIDYVIPDYTYFVRNEDKIKGLFITHGHEDHIGGIPYLLRQVNIPIYGGKLAIALIKNKLEEHGLLRKAKLYEIQEDDVIKFKKTSVSFFRTTHSIPDSTGVVVKTPQGQVVHTGDFKFDFTPVGEPADLTKMAEIGKDGVLCLLSDSTNSESPNFTMSERRVGDSIQDIFRQVEGRIIFRTFASNIPRLQQVVEAAVENNRKVAVFGRSMEAAIEIGPNLGYIRCPKDTFIDASQLNRLPANKVVILCTGSQGEPMAALSRIANGTHRQIQIIPGDTVVFSSSPIPGNTISVSRTINMLYRAGADVIHGKLSNIHTSGHGGQEEQKLMLRLIKPKYFMPIHGEYRMQRMHMKLANDCGIPEENCFIMDNGDVLALRSDEASVAGKIPSGSVYIDGNGIGDIGNIVLRDRRILSEEGLVIVVVSIDMKEFKVAAGPDIISRGFVYMRESSDLINDAQTLITTHLEKVMETKTTQWSEIKNEITDTLAPFLYEKTKRRPMILPIIM

SEQ ID NO: 46590 - protein, 292 aa, Bacillus anthracis
MKEYIAFDIGGTQIKYGIVSETGIVLKHKTVPTEIHLGGEQIIQKLILLSKKLMSEHTISGIGISTAGIVDVNRGVVTGGADHIPGYSTIPIINRLQEVLKVPVSIENDVNCAALGEKWNGIGREKENFIMLTLGTGIGGAIFIDRELYRGHSYSAGEWGNMLIEGKTFEEVASISGLIHLVRNYKGKGNWNGKTIFELYDKGDREVTQAVEVFFKHLAIGISNLAYIFNPETIIIGGGITDRGNQFLKEVKEEVGRYLNKEIYSDCEIELAQNGNRAGMIGAIYHFLHHHK

SEQ ID NO: 46591 - protein, 626 aa, Bacillus anthracis
MKITELLKRDTVIMNLTASNKEAVIDELVEKLNGANRLNSKAEFKEAILKRESQSTTGIGEGIAIPHAKTKAVKQPAICFGRSVSGINYESLDGQPAHLFFMIAASEGANNTHLETLSRLSTLLMDEGFRKQLLEAKDEEELLRLFDEKENEKENEKENEKEEEVEVAQPEGNEPYVLAVTACPTGIAHTYMAADSLKAKAAELGIAIKVETNGSTGIKNGLTKEDIERATAIIVAADKQVEMNRFAGKHVIQVPVADGIRKTEKLLNRAVKQDAPIFKGIKEDGKTESTEKEKGLGIYKHLMNGVSNMLPFVVGGGILIALAFSFGGIKAEGPLAELFMSIGGGGTGAFLFLVPILAGFIASSIADRPGFMPGVVGGFLAAHANAGFLGGLIAGFLAGYVVLGLKRLFSGLPVQLEGIKPVLLYPVFGLLITGVVMQKVVIPPVVALNEMLTGWLNGLNGTNAILLGLILGAMMAIDMGGPINKAAFTFGIAAIEAQNFGVHSAVMAGGMVPPLAIAFATTFFKSKFTEAERKSGLTNYIMGASFITEGAIPFAAADPVRVIVSCVVGSSIAGALSMLFQITLPAPHGGLFVIALVNKPVLYIFSILIGAVVSALMMGIWKKKVK

SEQ ID NO: 46592 - protein, 234 aa, Bacillus anthracis
MKNRETDSNVVTLYVTRHGKTILNTNHRAQGWADSPLVEKGVEVATNLGTGLKDIHFMNAYSSDSGRAIETANLVLKYSEQSKLKLEQRKKLRELNFGIFEGEKLDNMWDAVGKAAGVTSPEELLKFSIQEVIDLIRAADPTKQAEDWELFSTRIKAEIDKISEEAAKDGGGNVLVVVHGLLITTLIEMLDSSKTKLGVENASVTKIVYQDGIYTVESVGDMSYVAKGKESVEI

SEQ ID NO: 46593 - protein, 107 aa, Bacillus anthracis
MMTTAEQIPFQLILNSGNARSFAMEALQFAKQGENAEADEAMVKAKEAINEAHHFQTELLLSEARGGKTEISVLLIPAQDHLMNAITVKEIAAEFIDLYKKLEAKGG

SEQ ID NO: 46594 - protein, 408 aa, Bacillus anthracis
  MISC_FEATURE (161)..(161): X=any amino acid
  MISC_FEATURE (165)..(165): X=any amino acid
  MISC_FEATURE (180)..(180): X=any amino acid
  MISC_FEATURE (184)..(184): X=any amino acid
  MISC_FEATURE (185)..(185): X=any amino acid
  MISC_FEATURE (303)..(303): X=any amino acid
IAAGVIAASILSYSSSSFAKQKFFPDVQQGPGAEYSINYLAEKGAVTGNEKGMFEPGKEITRAEAATMMAKILNLPIDKNAKPSYADSQKHWATPIIAAVEKAGVVKGTGNGFEPDGKIDRVSMASLLVEAYKLESKVNRFPQPINFKSFKNHKRGKEKRXYFKXSWVFFVGPGGQRGPXENFXXKAEPVHFIKRPDSLKVGNPLVEKVVIIDPGHGGFDPGNPGQGVEESKIVFDTSLRLQKLLEKNTPLKALLTREENGNPGSNKNESLANRVKFGQENNADIFVSIHANSSEKHDGHGFXNYYYKKSKRGEETQIEKDSEVLAKKIQNRVVEALHTRDRKIKDDHSLYVVNNNTVPAVLTELAFIDNDIDNGKLATESGRQIAAEAVYAGILDYYEWKGFDVSKY

SEQ ID NO: 46595 - protein, 114 aa, Bacillus anthracis
MSKKVHEFNDMIRKLRKELFGKGPERIHTVFAENMAIATLYGNLTPTEKFISSTMDGAEMVHMARTKMIQEVYAANSREHLEELVGAKLVNLFSDMKVEEDIAVSVFVFDKNIT

SEQ ID NO: 46596 - protein, 434 aa, Bacillus anthracis
  MISC_FEATURE (5)..(5): X=any amino acid
  MISC_FEATURE (8)..(8): X=any amino acid
  MISC_FEATURE (20)..(20): X=any amino acid
  MISC_FEATURE (36)..(36): X=any amino acid
  MISC_FEATURE (79)..(79): X=any amino acid
  MISC_FEATURE (234)..(234): X=any amino acid
  MISC_FEATURE (235)..(235): X=any amino acid
  MISC_FEATURE (345)..(345): X=any amino acid
  MISC_FEATURE (430)..(430): X=any amino acid
KKVHXPSXEPWVKSSPAHIXRKDVYSFSGPKEFAPXWLESHYSELFRKPLYDLTGAKLAIRFIFPQSQAEGGLFFSPGXPKCSPKMILSLFPPELVNPKNYPFDTFVIGSGNRFAHAASLAVAEAPAKAYNPLFIYGGNLDLKKTHLMHAMAHYVIELFAKCKVVYLSSEKFTNEFINSICDNKAVDFRNKCRNVDVLLIDDIQFLARKEQTQEEFFHTFNALHEESKQIVISXXSATKEIPTLEDRLRSRFEWGLITDITPPDLETRIAILRKKAKAEGLDIPNEVMLYIANQIDSNIRELEGATHPRCSLSSLINKDINADLAAEALKDIIPNSKPKNYLHLXYSKRPVGDVYQVKLEDFKAKKRTKSVAFPRQIAMYLSRELTDSSLPKIGEEFGGRDHTTVIHAHEKISKLLKTDTQLQKQVGRNXRYFK

SEQ ID NO: 46597 - protein, 116 aa, Bacillus anthracis
MLLSTEFYVAGSLEAEEGATEGILRLRHFQGDGRWIVPFFTQMEFCKRCVARKERPLFTIRGKELFGSIEKDATAVLNVGTDNSKTFIPRRNCRYRIWTNFFTIINKRKSVIAFPF

SEQ ID NO: 46598 - protein, 471 aa, Bacillus anthracis
MANLFKKKSVTQLLGESKSKTLTKTLGAFDLTMLGIGAIIGTGVLVLTGLVAARDAGPAVIFSFMIAAIVCGFAALCYAEVASTLPVSGSVYTYSYATIGEFIAHLMGWTLLSVYVVTTAAVAGGWTGYFNNLVSGFGLEIPTELLKIPSQGGIVNLPAVVITLVLTWLLSRGTKESKRVNNIMVLIKIGIVILFIAVGAFYVQPENWTPFAPYGISGIFAGGAAVFFAFLGFDALATSAEEVKNPQRDLPIGIIASLVICTIIYVVVCLVMTGMVSYKELDVPEAMAYVLEVVGQDKVAGVIAVGAVIGIMAVIFAYIYATTRVFFAMSRDGLLPKSFAKINKKTEAPVFSTWLTGIGSALIAGFIDLKELSNLANIGALLTFAMVGVSVIILRKTHPNLKRGFMVPLVPTLPLISIACCLFLMFNLPLTTWIYFGIWLAIGVVVYFVYSKKHSHLKDDGSSQDNLEQAN

SEQ ID NO: 46599 - protein, 188 aa, Bacillus anthracis
  MISC_FEATURE (26)..(26): X=any amino acid
  MISC_FEATURE (32)..(32): X=any amino acid
MNREEALHIVKQQMHEKTFYYPHFGXLEPANXTCLIYGLWRKKKAEVAAIFHDYAKCRAISEMEEIIKSEDLPKDLLCYNKELWHAPVGAYLVEKEVGITGPEILQAITYHTSGHEKMTMLDKIIYVADYLETGRKFSGGEETRKLAYADINQALLFALKRTIQFLMEKNQTIYPLTFQTYNAVIKEE

SEQ ID NO: 46600 - protein, 77 aa, Bacillus anthracis; identical to SEQ ID NO: 45695

SEQ ID NO: 46601 - protein, 309 aa, Bacillus anthracis
MRKIIVGSRKSKLALTQTNWFIDQLKALGLPYEFEVKEIVTKGDVILDVTLSKVGGKGLFVKEIEHALLTKEIDMAVHSMKDMPAVLPEGLMIGCTPKRVDPRDAFISKSGASYKELAEGAILGTSSLRRSAQLLAARPDLQVKWIRGNIDTRLRKLKEEDYDAIILATAGLQRMGWDNEVITEHLDETLCVPAVGQGALAIECREDDKDLLQLLAHINDAVTEKTVAAERVFLHKLEGGCQVPIAGYATITENDAIELTALVGSMDGSVLLKETVVGTDPEKVGLEAADRLIKQGAKELILAANKGQQ

SEQ ID NO: 46602 - protein, 120 aa, Bacillus anthracis
MSNLAVKYKQQAQEEVQIQTPPQQMVQPKAKAKITRIEKLLYVAFIGFLLYACVAFIGNKAGLYQVNVEAATIEQKIVQQQKENQELQAEVEKLSRYERIAEVAKKHGLEINANNVKGLK

SEQ ID NO: 46603 - protein, 59 aa, Bacillus anthracis
MAVGVGGSLDVWAGEVKRAPKWIQAIHLEWFYRLCSNPTRWRRQLVLAEFLKEVMRSKK

SEQ ID NO: 46604 - protein, 669 aa, Bacillus anthracis
MSKEIAKKRIEELRDLLNTFNYQYHVLDNPSVSDAEYDRNMQELIKLEAENPEFMSEDSPSIRVGGTVLDIFEKVTHKSPMLSLGNAFNEGDLRDFDRRVRQGIDDANVRYICELKIDGLAVSLHYEKGRFIQGATRGDGVTGEDITQNLKTIKAIPLRLNEEVTLEARGEAYMPKRSFVKLNEEKEQNGEDVFANPRNAAAGSIRQLDPKIAAKRNLSMFVYGLANVEEKTIPSHSESLDYLGELGFKTNPNRRTCETIEEVIAYVEEWQEKRPHLDYEIDGIVIKVDDVALQESLGTTAKSPRWAIAYKFPAEEVVTRLTGIELSVGRTGVVTPTAELEPVRVAGTIVRRASLHNEDLIREKDIRIGDYVVVKKAGDIIPEVVNVIFDKRTGGEEEYHMPTHCPACESELVRLEEEVALRCINPTCPAQIREGLIHFVSRNAMNIDGLGERVITQLFDADYIRTFADLYSLTKEQLLQLERFGEKSATNLVQAIENSKENSLERLLFGLGIRHVGAKAARTFAEHFETMDALVKATEEELKAINEIGEKMAQSVVAYFDNEDVLELLQQFKEYGVNMTYKGIKIADLQNVESYFAGKTVVLTGKLEVMGRSEAKKKIEALGGKVTGSVSKSTDLVVAGEAAGSKLAQAEKHNVEVWNEERFLQELNK

SEQ ID NO: 46605 - protein, 53 aa, Bacillus anthracis
MLMAILGVFNINASGLLAGAGVIGLAVGFGAQSLVKDVITGLFIFVRRSIFSW

SEQ ID NO: 46606 - protein, 138 aa, Bacillus anthracis
MKISTKGRYGLTIMIDLAKKFGEGPISLKSIAQAHDLSEHYLEQLISPLRNARLVKSTRGAYGGYVLSDQPANITAGDVIRVLEGPISVVEMIEEEEPAQRQLWMRVRDAVQEVLDSTTLEDLVRYEEENHGGYMFYI

SEQ ID NO: 46607 - protein, 791 aa, Bacillus anthracis
  MISC_FEATURE (169)..(169): X=any amino acid
  MISC_FEATURE (171)..(171): X=any amino acid
  MISC_FEATURE (197)..(197): X=any amino acid
  MISC_FEATURE (377)..(377): X=any amino acid
  MISC_FEATURE (380)..(380): X=any amino acid
  MISC_FEATURE (381)..(381): X=any amino acid
  MISC_FEATURE (464)..(464): X=any amino acid
  MISC_FEATURE (468)..(468): X=any amino acid
  MISC_FEATURE (605)..(605): X=any amino acid
  MISC_FEATURE (610)..(610): X=any amino acid
  MISC_FEATURE (711)..(711): X=any amino acid
  MISC_FEATURE (760)..(760): X=any amino acid
LERTLRVLEYNKVKEQLLEHTASSLGRDKVKHLVPSTDFEEIVEMQDTTDEAAKVIRLKGSAPLGGITDIRSNVKRAKIGCMLSPNELLDIGHTMYGSRHMKQFHEDMVEKWCGLPILETHVAQIVSLYDLEKENYNCIGDGGEVFQCPKNNRRGIGLQICTQESGYWXMXETMTRSSNAQKMLSDSIVTIRNERTXIPVNKEYPRRIWRIVHDQSASGQTLFIEPQVIVELNNALQESTCERKTEIERILLMLTEEVAVEADIVLSNVEVVANLDFIFAKAFYAKRIKATKPIVNNERYMDLRQARHPLIDPEVIVPNNIMLGKDFTTIVITGPNTGGKTVTLKTVGICVLMAQSGLHIPVMDESEICVFKNIFCXYRXXAIIEQSLSTFSSHMVNIVDILEKADFESLVLFDELGAGTDPQEGAALAISILDEVCNRGARVVATTHYPELKAYGYNRRASYXCECXFDVNTLSPTHKLLIGVPGRSNAFEISKRLGLSNRVIDQARNHISTDTNKIENMIAKLEESQKNAERDWNEAEALRKQSEKLHRELQRQIIEFNEERDERLLKAQKEGEEKVEAAKKEAEGIIQELSSIVVKHSLATXKITSXIEAKSRLEGAAPELVEETKSKREKYCPKQQLRARDEVKVLTAPSKKVNCLKKVTDTQVERTNWYSEDESKESNMEYINTPKQTGEKSSCHSKRVETSWFPXKLDSSGGTNCKMPWGRGEKILKRSPGWQLSLGDQSIPGKGKGTLPQGGXKILGKTPAGEKKSRFRGTGRREGLAETIVPI

SEQ ID NO: 46608 - protein, 96 aa, Bacillus anthracis
MRKYEIMYIIRPGVEEEAQKALVERFAGVLTNNGAEIINTKEWGKRRLAYEINDLREGFYMILNVNANAEAINEFDRLAKINEDILRHIVVKEEEK

SEQ ID NO: 46609 - protein, 591 aa, Bacillus anthracis
MLWRSVVGKLWMTILLLVSFVLGFVAILLSQFFRTYYVDMSEARLQKVATSVSELIEEGADVKTIENIAYKFSDPLSRIIIVEEGKEISSSPKQEGLVTLTIDDLKEDKELAAVFTDKKEIKNKVRKASNSRKNKNTENDIMIVGKPVQSKNESAVFVYESLQVPIQGMERTTDFIFLSAGIAIILTTFFAFFLSTRITAPLRKMREVAFEVSRGKFDAKAPMVSQDEIGELATALNQMGKQLKFNMNALQQEKEQLASILSSMADGVITLNQEGEVVVINPPAEHFLQVWQEEKEIELSKKLPSELVELFHLVVESEQQQVVGINLQKGNYVVLMTPLYNQTKIRGAVAVLRDMTEERRLEKMRQDFIANVSHELRTPMVMLQGYSEAILDDIVQTKEEINEFVQIIYDESVRLGKLVNELLDLARMESGNVELHIGEVDIHPFVEKIGRKFQGIAKDKEVALTVDFKDSIEQYPFDADRMEQVLTNLIDNAIRHTNAGGHVTLVIDTKNNGLIFEVQDSGAGIPEEDIPFLFDRFYKADKARTRGKKGGTGLGLAIAKNIVQGHGGKISVSSVVGEGTTFSVYLPNRII

SEQ ID NO: 46610 - protein, 309 aa, Bacillus anthracis
MVKIHPKTRIGYVEFKVKDLERQIAFYENVVGLEVMKQEGNKAHLVGKGGKNTLLVLEKLEDGVLQEPRTTGIYHVAFLVPTRETFASALFDVIRNKNVIDSPVEQEGRYTYSNEILPISRFNSASDHTYSEAFYLQDLEGNGIEIYADRPRDQWGDGPGGSTPLDLKELATLVDYEFDGLPANTVVGHVHLRIANVEESHDFYVDTVGFEVQQREDDCLFISAGGYHHHIGANTWNGVNNPHPPAHATGLKVYTIVLPHKEALDEVKERLIEKQHEIHEITNGFTVVDPSGITVQFEIEVASEKRESV

SEQ ID NO: 46611 - protein, 125 aa, Bacillus anthracis
  MISC_FEATURE (76)..(76): X=any amino acid
  MISC_FEATURE (96)..(96): X=any amino acid
LNSEIAAVLASLGHSDSMVIADAVLPIPDGVKRIDLAVEIGKPSFLDVLQVVADDMAIEKVTLAEEVIYNHAEINXEFEVKLIGPAFEYVCHGPFXGPSKEGEGYNCTGEASPFSQVIFQAGGIF

SEQ ID NO: 46612 - protein, 35 aa, Bacillus anthracis
MSEAPSHGKPIMQYDAKSRGAEVYIDLAEEVIAGG

SEQ ID NO: 46613 - protein, 439 aa, Bacillus anthracis
MRATLKPAHILTVSLLLFAVFFGAGNMIFPPLLGLSSGENMWISITGFIITDVGLSLLAIVAVALAGGSFNTLASRVHPKFASNNSLIHYLSFKSGPLFVIPRTGSVSYEIGIAPLFPDQWYSMLIFSAIFFTVVYFLSLNPSKLVDHIGKILTPILLGIIAIMATKAILSPGTFAEPVGDYKEIPFFKGFLEGFLTLDAIGALVLSTIVVNAIRQNGITRRRNQLAKYTIICGSIAALFLTIVYFLLGYIGASNGNLGQFENGGQLLATVMYHFFWTAGNVLLSIATISPCLTTAIGVVSAFANYFATVLTNVSYKKLVLYVCIFSFIISNLGLSLLIKITLPVLIILYPITIILIFVSFIDKYTKRKPSVYIGAMIAAFLISCIHALDNVGMIPNFIANIVHTIPFYNLGIGWIIPAIIGGIIGYFIPQTEAEGEVS

SEQ ID NO: 46614 - protein, 284 aa, Bacillus anthracis
  MISC_FEATURE (36)..(36): X=any amino acid
  MISC_FEATURE (234)..(234): X=any amino acid
  MISC_FEATURE (266)..(266): X=any amino acid
NKAYKFRLYPTEEQAHLIRKTYEVCTAFVYNKMLAXPKDVHENTPSEYTTNLQEHKLFSHLRKYKVEYEWLKEVDSLALANAQLNLQTAYKNFFSGQSDFPTFKSKKSRKSYTTNRVNGNIMLFHGYIKLPKLKMVKLKQHRESPPKTIIKSCTISMTPTGKYYVSILTEYEKEITPKEVERVVGLDFAMDVLYVSSEDEKANYPRLYRQMVQKLTNAQRVLSTTVKGSERWEXTRIPVPKLHEKVANQRKNFLHHKSKELAPSFXTLNIPRLSMKGSGKPFKF

SEQ ID NO: 46615 - protein, 303 aa, Bacillus anthracis
  MISC_FEATURE (198)..(198): X=any amino acid
  MISC_FEATURE (210)..(210): X=any amino acid
MKIFDAHCDVLLQLWSAQGKKDFKHDPQLHITFEQLKRRKESIQGFAIYVPETVAYENRFEVSLQMVDIFYNEILSLPGVKFIQTKDDINMLKQDEIGAILTLEGCEAIGKDAMKLRLLYRLGVRSFGLTWNYANLLADGALETRGAGLTTSGKHVVQELNALHVWTDVSHLNERSFWDVIEIAKNPIASHSNCMKLXQHPRNLNDEPLXSLIKRNGMIGVTFVPQFLTNEKQANVADIIRHIEYICSLGGENNIGFGSDFDGILETVVNVSAYRDYENVVNELCKHYAASTVERFLYDNFVE

SEQ ID NO: 46616 - protein, 392 aa, Bacillus anthracis
MKLFQPSEIVTSLPTQFFASLVAKVNKVVAAGHDVINLGQGNPDQPTPQHIVKALQDAAEKTIHHKYPPFRGHESLKEAVATFYQREYDVVVNPKTEVAILFGGKAGLVELPVCFTNPGDTILVPDPGYPDYLSGVALAKAQFETMPLIAENNFLPDYTKIDDSIAERAKLMFLNYPNNPTGATASKDFFDETIHFANKHNILVVHDFAYGAIGFDGQKPVSFLQADGAKDTGIEIYTLSKTFNMAGWRIAFAVGNESVIETINLLQDHMYVSIFGAIQDAAREALLSSQSCVIDLVNSYESRRNALISACHSIGWNVDIPTGSFFAWLPVPEGYTSEQFSDILLEKAHVAVAPGVGFGEHGEGYVRVGLLHTEDRLREAINRIDKLNFFKK

SEQ ID NO: 46617 - protein, 109 aa, Bacillus anthracis
MKIMDYYIRLRLHAQDQQHIRNSLQELADVLYCSTKNVKILLKKMSEEQLISWTPGRGRGNKTEILFSHNFVEADESYTDELLAQEKLKGRFPPLKEPLPPAPSKKDEN

SEQ ID NO: 46618 - protein, 344 aa, Bacillus anthracis
  MISC_FEATURE (14)..(14): X=any amino acid
  MISC_FEATURE (21)..(21): X=any amino acid
  MISC_FEATURE (23)..(23): X=any amino acid
  MISC_FEATURE (46)..(46): X=any amino acid
  MISC_FEATURE (48)..(48): X=any amino acid
  MISC_FEATURE (61)..(61): X=any amino acid
  MISC_FEATURE (67)..(67): X=any amino acid
  MISC_FEATURE (285)..(285): X=any amino acid
MLGVSIYLSKEDEXRNKKNGXKXRRKTVFLFIFTTTLYPREDDPKXVXKSLFKLLGKTGSXKMKWDXMVMVSQNSLHHLGNDVRKVEELVEWGITWLRNGYGITPKRNRAVSHKMKVALNASTITDSFWKELLSENIRVKKCRSVHNFYPRPETGLAKSFLQKQNEYLHECGIKTMAFIPGDGEKRGPLYEGLPTLEKHRYMRPLEAYLELVQGCGVDKVLIGDISGRVESVQEIASASRGIIPLRYEPLIEKSEVLKMVEQVHTNRLDPARDVILSGESRGGGXVILQPMNAIVRKKGSITIDNELYGRYAGEMQVAIHDLPADEKVYFFGVVLEEDISLLPY

SEQ ID NO: 46619 - protein, 163 aa, Bacillus anthracis; identical to SEQ ID NO: 46456

SEQ ID NO: 46620 - protein, 179 aa, Bacillus anthracis
MNRLKEKFQKEITPALVSKFNYKSVMQVPKIEKIVINTGVGDAVSNSKTLDNAVEELTQITGQKPVVTRAKKSIAGFRLREGMPIGAKVTLRGEQMYEFFDKLVSVSLPRVRDFRGVSKKSFDGRGNYTLGVKEQLIFPEIDYDKVSKVRGMDIVIVTTAKTDEEARELLTQFGMPFQK

SEQ ID NO: 46621 - protein, 194 aa, Bacillus anthracis
  MISC_FEATURE (189)..(189): X=any amino acid
PYSKLIDSFMKLPGIGPKTAFRLAFFVLDMKEDDVLGFAKALVNAKRDLAYCSVCGHITDRDPCYICNDSHRDQSVVCVVQEPKDVIAMEKMKEYQGVYHVLRGAISPMGGIGPEDINIPQLLKRLHDETVQEVILATNPNIEGEATAMYISRLLKPTGIKSNWFCHLVLPGGGDLEYGREVAPFEKPXKVRRE

SEQ ID NO: 46622 - protein, 237 aa, Bacillus anthracis
MQQSKEERVHDVFEKISDKYDVMNSVISFQRHKAWRKETMRIMDVKPGSKALDVCCGTADWTIALAGAVGEQGKVVGLDFSENMLSVGKQKVEALQLKQVELLHGNAMELPFEDNTFDYVTIGFGLRNVPDYMHVLKEMTRVVKPGGKVICLETSQPTMIGFRQGYILYFKYIMPLFGKLFAKSYKEYSWLQESASTFPGMKELANMFEKAGLERVQVKPFTFGVAAMHLGMKPESK

SEQ ID NO: 46623 - protein, 190 aa, Bacillus anthracis
MNILTLILSYLIGSISFALIVGKMFYKKDIRDYGSGNLGATNAYRVLGIKAGVIVAIADILKGTFACLLPLILSSTINPIVCGLLAILGHIFSVFASFKGGKAVATATGVFLFLSPLGVLVGFVVFVLTLLFTKYVSLSSMLAGIALFIYSLIFEDKVIIALSLLIIVSIIILHRQNIKRILNGTENKIV

SEQ ID NO: 46624 - protein, 764 aa, Bacillus anthracis
  MISC_FEATURE (130)..(130): X=any amino acid
  MISC_FEATURE (182)..(182): X=any amino acid
  MISC_FEATURE (253)..(253): X=any amino acid
  MISC_FEATURE (362)..(362): X=any amino acid
  MISC_FEATURE (379)..(379): X=any amino acid
  MISC_FEATURE (440)..(440): X=any amino acid
  MISC_FEATURE (449)..(449): X=any amino acid
  MISC_FEATURE (451)..(451): X=any amino acid
  MISC_FEATURE (473)..(473): X=any amino acid
  MISC_FEATURE (687)..(687): X=any amino acid
  MISC_FEATURE (690)..(690): X=any amino acid
  MISC_FEATURE (722)..(722): X=any amino acid
  MISC_FEATURE (744)..(744): X=any amino acid
  MISC_FEATURE (753)..(753): X=any amino acid
YEKQVEQLKESEEKLAFVRAEKESAEKRKQDYEILAALEPLVIEKRAHEKVLEDESGQFPVNGMARYEAIKAKMEPLQLQVDSLYKKIETVQSEMESIQIDEEFLQKEKLCRRTSYAAYVLRKCTPRKAXCGRGPLPILKKKLPEIEPANRGLLLEKKTVLSFGLRFGTKELFPPAGAKSAXIRNAKNHTLRFVLKVAQGRFEGPGGKLRPVSEGKCLPDKDRHTLNLRKKNPFQDAAFIGMGAERMKRKYVXKSQEQRCKRKNSGKEFVFCYFLLTQAFYFTSLFIDNRLLLFISVIVFVGIVPGFWFYIKNPSSGVTRRASYSSAKCWRETKVKKASLFRFPSRKSGRDSVSYLSGNSIXLQPNGAERRIKFVSFVXEMGKRNVSAMSEQVNVYRKRYTVPEFYTYAHILPAFERMEKMQPIYFGIERTKPRENSSLXERIFAFGTXNXKLLSVVRSIVSCTRHKGRMQKXEKKTAQTCKQSKEKLAEWQEEYALMQEQWKQLLVERDSLWHIAHSTDEEMFLEAGKLAEKREDAEKQVGRLLPQIDLLEQRLTSLSLAEHYEADGYDEKLKQEMTVMQNCLTKEKELTERIAKHRMEIANLEEGSTYGDLLHEWEMKKAQVREQVKKWAAYAAAKTVLTKTKQYYHKVHLPRILQKSEEYFVYLTGGRYSKNLFTVRSRAVYLXNVXWMRFYSHELSQATAEQLYLSLRFALGKTFGAXYPFIMEDSFGPLDAVRAELFDXLYKGNAKGXPSHILSSHGHL

SEQ ID NO: 46625 - protein, 440 aa, Bacillus anthracis
MVTTIDTLLLMIYNIHRERSQTTMKKKFAAFSVLAAGTIFVSPLLSPAYAETNQDKLSNIQSELEGKQNDLQNKSAEKEQIEKEIQELQKKIDDLTTSINKNEAELNDTKKEISKTQQVIAEKKKHIEQLQTNIDTRQEVIKQRLQSMQEKPRTNIITEVLTTSTNIADLVDNMYSVSLILNNDTDIVKKQTTDQNAVTKEKEAVEKKEQELKEAEQKLVHKQQELQTNQQQQQTFISDLHTKVAKVDSEIEGLEESKGILENQRQAVQKAIEEEKRAEEARKAEEARKQATTSAQKAQAAPTPHDTNIGGFIKPAAGSKTSGFGVRSIDNHKGIDIAASGTVPIIAAADGVVIRSELSSSYGNVVYLSHRINGKTYTTVYAHMSSRSVSNGQTVKQGTQLGFMGNTGQSYGQHLHFELHLGEWNVGKTNAVDPSPYIGL

SEQ ID NO: 46626 - protein, 129 aa, Bacillus anthracis
MARKTNTRKKRVKKNIEAGVAHIRSTFNNTIVTLTDTHGNALSWSSAGALGFRGSRKSTPFAAQMAAETAAKAAMEHGLKTLEVTVKGPGAGREAAIRALQAAGLEVTAIRDVTPVPHNGCRPPKRRRV

SEQ ID NO: 46627 - protein, 65 aa, Bacillus anthracis
MSIENHHNIGTGPSKLAHYSEDNIVLEAFTHYFKERALLDRMKFWGIPDHVQIDADYDLPKEGGK

SEQ ID NO: 46628 - protein, 491 aa, Bacillus anthracis
MKIKAQVGMVMNLDKCIGCHTCSVTCKNTWTNRPGAEYMYFNNVETKPGIGYPKQWEDQEKYKGGWELKNGEIQLKSGSKMKRLMNIFHNPDQPTIDDYFEPWNYDYETLTTSPQRKHQPVARPKSAITGEFIDKIEWGPNWEDDLAGGHITGLQDPNVKKMEEEIKTDFENVFMMYLPRICEHCMNPSCVSSCPSGAMYKREEDGIVLVDQNACRAWRFCVSSCPYKKVYVNWQTNKAEKCTMCFPRIEAGMPTICSETCVGRIRYIGVMLYDADKVKEAASVENEKDLYESQLTVFLDPNDPEVVAEAKKQGIPEEWIKAAQESPIYKMIIDWKIALPLHPEYRTMPMVWYIPPLSPIMNMVEGKGSNWQAEEIFPAIDNMRIPIQYLANLLTAGDESHIRLTLKKMAVMRTHMRALQINKEPNEAVLKELGLTKQDVEDMYRLLAIAKYKDRFVIPTSHREQVADLYNEQGSCGLSFAGGPGSCMTIS

SEQ ID NO: 46629 - protein, 262 aa, Bacillus anthracis
  MISC_FEATURE (241)..(241): X=any amino acid
  MISC_FEATURE (244)..(244): X=any amino acid
MKKVLLSIVSGAVLLLGACSAGSDKEVKALDEKKITVGVTGGPHEQIFEKVKEVAAKDGLEIDVKVFNDYVAPNVSLDEKSLDVNSYQTKSYLDVFKAERNMKLTEVFSTVTFPMGVYSKSLKDVKDLKDGDAIAVPNDPTNELRALKLFEKAGVLKVDPKATEKATAKDVIENPKNLKIVELEASQLPTQLSEVKAAAINTNFALGAKLSPAKDSIFREGKDSPYVNWVVVRTENKDDAXCKXIKKAYQSKEVKEFIEKKF

SEQ ID NO: 46630 - protein, 327 aa, Bacillus anthracis
MAVMSYIDAITLAMREEMERDEKVFVLGEDVGKKGGVFKATHGLYDQFGEDRALDTPLAESAIAGVAIGAAMYGMRPIAEMQFADFIMPAVNQIVSEAAKIRYRSNNDWTCPITVRAPFGGGVHGALYHSQSVEAMFANQPGLKIVIPSTPYDAKGLLKAAIRDEDPVLFFEHKRAYRLIKGEVPEDDYVLPIGKADVKREGDDITVITYGLCVHFALQAAEKLAQDGISAHILDLRTVYPLDKEAIIEAASKTGKVLLVTEDNKEGSIMSEVAAIIAENCLFDLDAPIARLAGPDVPAMPYAPTMEKFFMVNPDKVEKAMRELAEF

SEQ ID NO: 46631 - protein, 204 aa, Bacillus anthracis
  MISC_FEATURE (88)..(88): X=any amino acid
IQIALTKGRLEKHVIPLFEQIGIDCSELKNKGRKLVFLSKNTDISFILVKTTDVATYVEHGVADIGVVGKRYFNEKTRKDIYEMVELXVGVGRFCVRFYSYAFIPKSYREEMALGPKYPHITSNYFHNKGEDVEIIKIEGSVEIAPILGLADAIVDIVETGKTLQENGLIVFEEMYSISARMIVNKAALKTKKDEIFSIINMME

SEQ ID NO: 46632 - protein, 57 aa, Bacillus anthracis
  MISC_FEATURE (31)..(31): X=any amino acid
MTSNHHAPYDLGYTRATMDGTKSCKTARWSXSHKTVLSSDCRLQLAYMKLESLVIAD

SEQ ID NO: 46633 - protein, 611 aa, Bacillus anthracis
  MISC_FEATURE (186)..(186): X=any amino acid
  MISC_FEATURE (196)..(196): X=any amino acid
  MISC_FEATURE (221)..(221): X=any amino acid
  MISC_FEATURE (379)..(379): X=any amino acid
  MISC_FEATURE (605)..(605): X=any amino acid
  MISC_FEATURE (608)..(608): X=any amino acid
GKLVERPASVVKELVENSIDANSTSIEIHCKEAGLSKIRIIDNGDAIAEEDCIVAFERHATSKIKDENDLFRIRTLGFRGEALPSIASVSELELITSTGDAPGTHLIIKGGDIIKQEKTASRKGTDITVQNLFFNTPARLKYMKTIHTELGKYTDIVYRIAMSPQEVSLKLFHKKKKLLHTSGNWXCKTSTCIDLXHFKLARKLVPIEAESFRFHTLKGMXHLPEVTRASRNYMSTIVNGRYVRNFVLMKAIQQGYHTLLPVGRYPIGFLSREMDPMLVDVNVHPAKLEVRFSKEQELLKLMERNMQSSIKKIQLIPDAGVTTKKKEKDESVQEQFQFEHAKPKEPSMPEIVLPTGMDEKQEEPQAVKQPNTTVATIHXPIIEEPIQEEKSWDSNEEGFELEELEEVREIKEIEMNGNDLPPLYPIGQMHGTYIFAQNDKGLYMIDQHAAQERINYEYFRDKVGRVAQEVQELLVPYRIDLSLTEFLRVEEQLEELKKVGLFLEQFGHQSFIVRSHPTWFPKGQETEIIDEMMEQVVKLKKVDIKKLREEAAIMMSCKASIKANQYLTNDQIFALLEELRTTTNPYTCPHGRPILVHHSTYELEXHVXRVM

SEQ ID NO: 46634 - protein, 444 aa, Bacillus anthracis
  MISC_FEATURE (175)..(175): X=any amino acid
  MISC_FEATURE (227)..(227): X=any amino acid
  MISC_FEATURE (233)..(233): X=any amino acid
  MISC_FEATURE (235)..(235): X=any amino acid
  MISC_FEATURE (302)..(302): X=any amino acid
  MISC_FEATURE (308)..(308): X=any amino acid
  MISC_FEATURE (309)..(309): X=any amino acid
  MISC_FEATURE (311)..(311): X=any amino acid
  MISC_FEATURE (329)..(329): X=any amino acid
  MISC_FEATURE (339)..(339): X=any amino acid
  MISC_FEATURE (343)..(343): X=any amino acid
  MISC_FEATURE (344)..(344): X=any amino acid
  MISC_FEATURE (353)..(353): X=any amino acid
  MISC_FEATURE (379)..(379): X=any amino acid
MKITIIGTGYVGLITGVGLAFLGHPVTCFDVHDEKYHALVPGDLPIYEAGLYELIHDACENNRLTFTTSKEEAFKDAEFIFIAVGTPSLLDGTADLTYIQNACVDIGTYATKDIIVVTKEYVPVWTNGAMRGWIEETSPNRHEFPFVSNPEILREGSRIYNFFQGKLIVFGAQNXESRTRKVENLYSELHLKTYVTDIKSAEMIKYASNAFLATKISFINEISKYMXKGRSNXSXRALGMGIHPRIGASFLNAGHWFRGIWFFRKIRKGLWPNCRGMWPHDFRLVKNPSLEVINKPPGIIDXESGGKXXLXPKKRICGAGSAIKPESRXYRRCPVPLLXYKRXXNLGGGHKFXYDPKGDFKIRKIIFGETIQYSEMYRXIDSEEPWRLFILTEWRTNSGTYPGRTLTPTPYENEPILFDGRNCYTNEDVKKQGIDYYSVGRESI

SEQ ID NO: 46635 - protein, 243 aa, Bacillus anthracis
MAMKVKEVANLVGISVRTLHHYDEIGLLTPDETTESGYRLYSNENLEMLQQILFFKELGFPLKKIKEIIMSPSFDRKEALQLHKKMLLEKRARLDKVIATIDKTIQHTKGEIEMTNKEKFKGFDFSHNPYEEEARERWGDAAVDKANEYAKGMSKEKQEEFNAIYRNLAALRHGAPDSKEAQEAIKVWYDYLQNFSHYSLDAFKGLGQMYVADERFTKNIDKFGEGLAQFMCDAMEVYADRNK

SEQ ID NO: 46636 - protein, 220 aa, Bacillus anthracis
  MISC_FEATURE (60)..(60): X=any amino acid
  MISC_FEATURE (66)..(66): X=any amino acid
  MISC_FEATURE (90)..(90): X=any amino acid
LKKAIAEFIGTFVLVLFGTGVAVIGGGIEGIGTLGIAMAFGLSIWGMAYSIRTNSGMSLXPPQNQXLWFLIKKNEPYGNIVNLVLTSKFXGGSLRNLPHWVNHFTNPLKTPFRIIRDKMGFGNSWVYPGAFLVEFILTFVFILVIVAVTGKKGSSSLAGLVIGFTLVLVHLLGIPLTGTSVNPARSIAPALFVGGEALSQLWVFIRCPILGGIVAAIVGK

SEQ ID NO: 46637 - protein, 342 aa, Bacillus anthracis
MRSWIQNTKKLLPDLLPVMQTRMQILQYIRLMQPIGRRNLSASLGMTERVLRSEVQVLKEQNLVHVASSGMTLTEEGTALVLALEDFMKEISGLKVLEKQLKETLDLDEVFVVPGDSDESPWVKLEMGRACVTCIKDRLTANNIVAVAGGTTLAAVADMMQLDCKDLHMLFVPARGGIGEGVELEANTICAKMAQNTMSNYRLLYVPDHVSSEAYASIVTEPSVKEVLELIRSSNIVIHGIGDALTMARRRNTSEADWLKIQASEAVGEAFGYYFNEQGNVVHKVRTVGMQLEDLQNVSHVVAVAGGSSKAKAIQAVIKQGHTSILITDEGAAKQLTKGITL

SEQ ID NO: 46638 - protein, 371 aa, Bacillus anthracis
  MISC_FEATURE (20)..(20): X=any amino acid
  MISC_FEATURE (157)..(157): X=any amino acid
  MISC_FEATURE (296)..(296): X=any amino acid
VIIIGGGIAGLCAAISLQKXGLDVKVYDKNTEPTVAGAGIIIAPNAMQALELYGISKKIKKFGNESDGFNLVSEKGTTFNKLIIPTCYPKMYSIHRKDLHQLLLSELKEDTVKWGKECVKIEQNEANALKIVFQDGSEALGNILIAADGIHSVIRKXVTQGDNYRYAGYTCWRGVTPANNLSLTNDFIETWGTNGRFGIVPLPNNEVYWYALINAKARDPKYKAYTTADLYNHFKTYHNPIPSILQNASDVDMIPPGYYRPSRQWKQFLANRIVFMGDAAHSLTPKLGQGACQSNXDAIILAECIKNNAYYRQAFTEFEQKRRDRIEKISNTAWKVGKIAQIESKPLTLVRNEVMKRMPKWVSEKRTHELY

SEQ ID NO: 46639 - protein, 490 aa, Bacillus anthracis
  MISC_FEATURE (80)..(80): X=any amino acid
  MISC_FEATURE (206)..(206): X=any amino acid
  MISC_FEATURE (359)..(359): X=any amino acid
  MISC_FEATURE (367)..(367): X=any amino acid
  MISC_FEATURE (381)..(381): X=any amino acid
  MISC_FEATURE (445)..(445): X=any amino acid
  MISC_FEATURE (468)..(468): X=any amino acid
  MISC_FEATURE (488)..(488): X=any amino acid
MEKQVRVRYAPSPTGHLHIGNARTALFNYLLAAPSRGVSFLLVLKDAEVNPYFGGGEESQLKYLKWLGMDWDEGVDVGGXIRPYGQAGGFRYYKKVIMEDLLGAGLAYKCYMTEEELEAEREGQIARGETPRYAGNHRDLTEAQVKEFEAEGRIPSIRSRVPADRDYTFKDIVKDEVAFHSNDFGDFVIVKKDGIPTYNFAVASRXHLMEITHVLRGDDHISNTPKQMMIYEAFGWDIPQFGHMTLIVNESRKKLSKRDESIIQFIEQYKELGYLPEAIFNFIALLSWSPVGEEEIFSQEEFIKMFDAALSIKIPALFDSQKLKWMNHQYMKKQDLDTVGELSLPHLYESWTIRGNFKXTRKTWDSXWNCVYYGKNELLSXNCRLSEMFFKDHVDYEEEGPRVLKGEQVPEVLRAFAGSVEALEAMEPAANKAAIKSGSKGNRSXGKNLFMPIRVATTGQTHGPRASXCYCTSWKEKVLNRLQKVIGXHF

SEQ ID NO: 46640 - protein, 357 aa, Bacillus anthracis
  MISC_FEATURE (237)..(237): X=any amino acid
  MISC_FEATURE (253)..(253): X=any amino acid
  MISC_FEATURE (263)..(263): X=any amino acid
GIKTYNSAIAVDNDKAEVKTVLEQAKEKGKSTGLVATSEITHATPAAFGAHDISRKSMDAIANDYFDEKIKGKHKVDVMLGGGVKNFVRKDRNLTEEFKKSGYSYVTDRDQLLNDKNDQILGLFAPGGLDKMIDRNEKTPSLEEMTNAAIERLNKNKKGFFLMVEGSQIDWAGHDNDIVGAMSEMEDFEKAFKAAIEFAKKDKKLVYSLQRQDSRLGAGYLLGWEWGSPPLKVDPIXGCKTAPPVFHAKRKMXKGAKCRRTHXKKYIDFTINPLKKLKPLNDIVLSKRCTKIDNAIEDIFNKRSVTGWTTGGHTGEDVNVYAFGPGKYLFSGVQENTNLARRVFDIVGGGDPNKGIR

SEQ ID NO: 46641 - protein, 66 aa, Bacillus anthracis
MKTNDIRELTTAEIETKVKALKEELFNLRFQLATGQLENPTRIREVRKAIARMKTVVREREIGINR

SEQ ID NO: 46642 - protein, 355 aa, Bacillus anthracis
MKITAIHLYAIRLPLRDPFVISYGSYSDMPSIIVKMGTDEGIIGYGEGVADDHVTGESWESTFHILKHTLAPALIGQNPMNIEKIHDMMDNPIYGVPPAKSCDEYCLFWIKGVKKFKPPGYSIKWGDDPMRNFLSLHVLSYRRSRKKCPKKLLLCFRRGYQSFKMKVGTNVKEDVKRIEAVRERVGNDIAIRVDVNQGWKNSANTLMALRSLGHLNIDWIEQPVIADDIDAMAHIRLKTDLPFMIDDRIKGSREMRQIINLDAADKVNIKLNEMGGIYPAVKLAHQAEMAGIECQVGSMVESSVASSAGFHVAFSKKIITSVELTGPLKFTKDIGNLHYDVPFIRLNEKPGLGIE

SEQ ID NO: 46643 - protein, 623 aa, Bacillus anthracis
  MISC_FEATURE (114)..(114): X=any amino acid
  MISC_FEATURE (122)..(122): X=any amino acid
  MISC_FEATURE (146)..(146): X=any amino acid
  MISC_FEATURE (230)..(230): X=any amino acid
  MISC_FEATURE (339)..(339): X=any amino acid
  MISC_FEATURE (357)..(357): X=any amino acid
  MISC_FEATURE (378)..(378): X=any amino acid
  MISC_FEATURE (400)..(400): X=any amino acid
  MISC_FEATURE (457)..(457): X=any amino acid
  MISC_FEATURE (471)..(471): X=any amino acid
  MISC_FEATURE (474)..(474): X=any amino acid
  MISC_FEATURE (475)..(475): X=any amino acid
  MISC_FEATURE (514)..(514): X=any amino acid
  MISC_FEATURE (521)..(521): X=any amino acid
  MISC_FEATURE (530)..(530): X=any amino acid
  MISC_FEATURE (535)..(535): X=any amino acid
  MISC_FEATURE (543)..(543): X=any amino acid
MKKVGFFQSIHFKFGLLYMRLILIAMQVIGVYFVRELEKSLVQGFRDSLTQQTNLLSYNLKQEFKKSYTKAETESTDETIKTSIRKFASDRKERFSKEVRFIGANRKVVRYFRXVKANQGKXKHQLDISLFRRGIGTKKNQEVKNXEGWSYKVTVVQGYITPIMDDNNKDALGAIYVVASMEDVYKQMKDINQIFATGTVIALLVTAVLGNFGAPTITRPISDMRRQANXMAKGNYSRKVKVHSHDEIGQLALSFNNLSKKLQQARSSTESERRKLSSVLSHMTDGVIATDRKGDIILLNDPCGKDLNVSRETALDQSVLEVLGIQEEFTLDHLYERAXFCLLDFSTRNEAYIFTRXFFLVISKETGKSNGFNCRNIXCGLNRTYRKGTPPRFVPNVSPXIKTAINENCQLTYKAFTNGHWPKSQNLHRNFLTVIQEETERMIRLVNALLQLSKLEXSETSFNERMGRLYXLLXXIIDRFEMSKEQNVSFKRSFSKKSRFIDMDTDKISASIVXHYFESIXGFTRRVKQXHIVTXSRRIIRDXVSDQGMGIPKENVDKIFERFYRVDKARSSDKWVGTGLWISNCERNDEGTWWLDWAKSEEGKGTTIYFTLPMAADEEDEWE

SEQ ID NO: 46644 - protein, 620 aa, Bacillus anthracis
MIDYVWLIPLFPLVSFLLLIIFGKKIREGSSVLSIFFVFLSFICAVLVLIERLSTVPVKHKWVWLRTGDIDISFGFEVTALGALMLFIVTLVSLLVHVYSKGYMKGEERLPTFYAYLGLFTFAMLGLVISPNLLQLYIFWELVGLGSFLLIGFYFFKEEARAAAKKAFIMTRIGDIGLFIGMILIFWHAGSFEYDAIFRAIHTGDLTPTMITITAILIFIGAMGKSGQFPLHTWLPDAMEGPTPVSALIHAATMVAAGVYLVATMFPLFSASAVAMQTVAIVGAFTAIFAASIGLVQTDIKRVLAYSTVSQLGYMMLALGSAGYVAGVFHLTTHAFFKALLFLAAGSVIHAVHTQNINKMGGLQKKMKVTAALFLIGTLAISGVPLLSGFFSKDEILAATWMNGNYVLFILAVIAAFLTAFYMFRLYFLVFTGEAKTKVDVHESPRIMTYPMIVLGVLAVVAGYINTPWFGTFLGGWLTKDVAFKVQEAHGPVWIMIVATLVSLAGIALAYFIYGKKSIARDWAGGEEAPLYKILQEKYYVDELYNMTVIPITKGIAHVLHLFEVYVVEGIAVLIGSLVKGVSGVGSRLQNGNVQVYGTVTAVSLAVLFIILLYTGADLR

SEQ ID NO: 46645 - protein, 210 aa, Bacillus anthracis
MKKEIASHLLEIGAVFLQPNDPFTWSSGMKSPIYCDNRLTLSYPKVRQTIAAGLEELIKEHFPTVEVIAGTATAGIAHAAWVSDRMDLPMCYVRSKAKGHGKGNQIEGKAEKGQKVVVVEDLISTGGSAITCVEALREAGCEVLGIVSIFTYELEAGKEKLEAANVASYSLSDYSALTEVAAEKGIIGQAETKKLQEWRKNPADEAWITA

SEQ ID NO: 46646 - protein, 431 aa, Bacillus anthracis
MNKDISKDEHVPSQSTTVQSAHLALSGQTKGLKRLLPFLGPAFIASVAYIDPGNFATNIAAGSQYGYLLLWVILASNLMAVLIQTLSAKLGIATGRNLPEIARENFPKPVSIGLWIQGELVIMATDLAEFIGAALGLYLLFGIPMLPAALITAAGSFIILEFQRRGFRPLEAIITGMIFIVVIAFGVQVFYAKPELSPLLSGLFIPKFQGVDSILLAAGILGATVMPHAIYLHSALTQRRVVGTNDEQKKKIFRFDFIDIIIAMIIAGAINASMLIVAAALFFKNGLHVEDLDVAFNQFSNLVGPVSAALFGIGLLSAGLSSSSVGTMSGDIIMQGFIRMHIPLYLRRFITMIPPLVIIALGVNPTYALVMSQVVLSFGIAFALVPLIMFTSSKKIMGTLVNHRITTFIAWIIAVLVIILNIFLLYQTFVG

SEQ ID NO: 46647 - protein, 291 aa, Bacillus anthracis
MQLKKAFWKLASLLPLSLLLFLGGCDKKLAVLNPQGPVAKAQYDLIVWSFLLMSLIIAIVFILFTVILIRYREKPENMDYEPPEQHGNTLLEIIWTLVPVIIVIALSIPTVKATYASEEVPKESKHIKPVEIYVTSANWKWLFSYPEEKIETVNYLNIPAGVPIQFKLTSVGPMNAFWVPELGGMKYTMDGMIMDLYLQADKPGSYLGRSANFSGEGFTHMEFEVEAKTKEKYDKWVKEVQQTAPKLTEDKYNEIVKPGVVGRMTFSSHHLSYVDPKSLEYCDYNYYKNKK

SEQ ID NO: 46648 - protein, 90 aa, Bacillus anthracis
MNKTDLINAVAEASSLSKKDATKAVDAVFDSILEALKQGDKVQLIGFGNFEVRERAARKGRNPQTGEEIEIAASKVPAFKPGKALKDAVK

SEQ ID NO: 46649 - protein, 297 aa, Bacillus anthracis
MDKQEAKHINMPSPSACEYKSVEAYLFIDPLCKDCWEIEPFIIKLWLEYGKYFSIRHIVTGKVDGTNASSHKWNKPANIRFVWEKTTSLHGFSYDGKVHMQEASSTPYLVSMAIKAAELQGRKAGSKFLRKLQEYIFLENVSNPDCELLLACAKDSDIDVEEFKKDLYSASAKKAFQCDLKFTNEMHITEIPSLVFFHANSDEEGIKIAGTYSYDVYVQLLKELVKCEIEPEPLPSLEVLLEATQFISSKEVAFIYDCSKQEIERELKKLQLKRKVQMIDVKCERYWKWIAKEKDLV

SEQ ID NO: 46650 - protein, 880 aa, Bacillus anthracis
MKQLTGAQIRQMFLDFFQEKGHAVEPSASLVPHEDPSLLWINSGVATLKKYFDGRVIPQNPRITNAQKSIRTNDIENVGKTARHHTFFEMLGNFSIGDYFKEEAITWAWEFLTSDKWIGFDKELLSVTIHPEDEEAFTIWNEKMGVPKERIIRLEENFWDIGEGPSGPNTEIFYDRGEAYGNDFSDPELYPGGENERYLEVWNLVFSQFNHNPDGSYTPLPKKNIDTGMGLERMTSIVQDVPTNFDTDLFMPMIGATETISGEKYRNGDLEKDMAFKVIADHIRTVTFAVGDGALPSNEGRGYVLRRLLRRAVRYSKKLNINRPFMFELVPVVGEVMKDFYPEVLEKKDFIAKVVKNEEERFHETLHDGEAILSEVIAKAKEEKTTVISGVDAFRLYDTYGFPIELTEEYAEEAGMTVDHEGFENEMEKQRERARAARQDVDSMQVQGGVLGEVKVASEFVGYGTVATESNVVALVKNGEYTDSLQVGEEGQLMLDVTPFYAESGGQIADRGCLLADGVKVLVKDVQKAPNGQNLHQVVVEEGTLTKDAAVKAIIDTKNRSSVVKNHTATHLLHQALKDVLGTHVNQAGSLVTSERLRFDFSHFGQVQADELEKIERIVNEKIWESIDVEISQKAIEEAKEMGAMALFGEKYGDVVRVVQVGDYSLELCGGCHVDNTASIGIFKIVAESGIGAGIRRIEAVTGKSAYELMNDQVGLLKEAAGKMKTNPKDILTRVDGLFAEVKQLQKENESLAAKLSNIEAGNLTDSVMTVDGVNVLAAKVNVADMNNLRTMMDDLKNKLESAVVVLASVNDDKVNILAGVTKDLISQGYHAGKLVKEVASRCGGGGGGRPDMAQAGGKNPAQVEEALAFVQEYVKSVSK

SEQ ID NO: 46651 - protein, 722 aa, Bacillus anthracis
MEMVDNRQALMKMLVKELGFTEKQVRHVIQLTEEGNTVPFIARYRKEWTGSLDEVQIRTILERWQYIMQLEDRKEEVLRLIDEKGKLTGELRQQILKATKLQEVEDLYRPYKEKRRTKATIAKEKGLEPLAEWLLLYTKEDPNQKAMEFINAEKEVQSAEEALQGAQDIIAEIVSDEAAYRSWIRNVTFRKGVMSSVVKDEEKDEKNIYEMYYDYEEPLQKVVPHRVLAMNRGEKEDILRVSVVPPVDEIVTFLYKKVIRDNDSKSAQYVKLAIEDGYKRLIQSSIEREIRKELTETAEEQAIHIFSENLRNLLLQPPMKGKVVLAVDPAYRTGCKLAIVDDTGKVLYIDVIYPHPPVRKYEDAKAKVLSIIDKYQVEMIAIGNGTASRESEEFIVDVLQNVKREVFYIIVNEAGASVYSASDLAREEFPDLQVEERSAVSIGRRLQDPLAELVKIDPKSVGVGQYQHDVSQKRLNESLTFVVETAVNQVGVNVNTASVALLQYVSGLSKTVAKNIVAKREEEGKFTKRTDLKKIPRLGAKTYEQCIGFLRILEGANPLDRTGIHPEQYKNVELLLKSLGLSKDDVGQPQLQKSLEEVEISKLSEETGIGEPTLVDIIDALISPERDMRDELPKPLLKKGILKLEDLKRGMELEGTARNVVDFGAFVDVGVKQDGLVHISKLSKQYVKHPLDVVSVGQIVKVWVDDIDTKKGRVALSMLPIE

SEQ ID NO: 46652 - protein, 667 aa, Bacillus anthracis
  MISC_FEATURE (104)..(104): X=any amino acid
  MISC_FEATURE (159)..(159): X=any amino acid
  MISC_FEATURE (313)..(313): X=any amino acid
  MISC_FEATURE (325)..(325): X=any amino acid
  MISC_FEATURE (328)..(328): X=any amino acid
  MISC_FEATURE (383)..(383): X=any amino acid
  MISC_FEATURE (412)..(412): X=any amino acid
  MISC_FEATURE (540)..(540): X=any amino acid
  MISC_FEATURE (544)..(544): X=any amino acid
  MISC_FEATURE (572)..(572): X=any amino acid
  MISC_FEATURE (620)..(620): X=any amino acid
  MISC_FEATURE (625)..(625): X=any amino acid
  MISC_FEATURE (641)..(641): X=any amino acid
  MISC_FEATURE (652)..(652): X=any amino acid
GEALLLLHVFIHIGQGQANISYSMIIDALISPNQSLEHQTLIMLRLPRAVIAILAGGALAASGVILQTLTKNPLAESSTMGIHSGAYFFLVTGYNFLPKGLANXLPSFSHLFGGAITALIGLPKFLVKKKGTPLRMALAGMVVTLMLSAFTGTMELFLXNEKPGLFFWGNWALLIQNNWDGVQFSFPFIIISFLVLLGISRKLNIQIIGDVCCGFYFGEKTAVTRLIAFIAAIFLTAVIVTVVGPIGFVGLVAPHLMRLIGYRQHFTLLLSSFLWGAVLLLGADVAGRLIDPTGCRNFPVGGITEMNGTPLPXLLMNRSEKSKTXMKXKRGEIQLGTSSRYYSYKKVIIISIPLCIGDNCSLWLQSVVTLISKALQMLYQANXHNLIKTDDSPSRLPRMLVAAIAGAMPCKXGGLFPQGILRDPFADPSIIGISSGAGVGALTIRYVFPTLPGFFYPIGAFIGGTTCSWNCPLFSWKSGFSPTALALIGIGISALGSAIIQIFIVKANLNVAAALTWLSGSTYAGGMKSLRKISFYIHRXFLYXLSFFLIKQLDVLVLGDDLATGLGRPSKXNAPCPSCVSNTTASVNIAAVGTIAFLGLVAPHLARIVVGMNHQRLFVXYCTAXEHPVLSIADLLGRTIXYPERNPFRPLXCVLGAPYFLWLMRKS

SEQ ID NO: 46653 - protein, 157 aa, Bacillus anthracis
MFRIGQGFDVHEFAEGRPLIIGGITIPHEKGLIGHSDADVLLHTIADACLGAIAAGDIGNHFPDTDPRFKDADSAVLCKKVWEFVREQGYELGNLDCTIIAQKPKMAPHIESMRKRISELLETSIDNINVKATTTEKLGFTGREEGIASQAVVLLQK

SEQ ID NO: 46654 - protein, 842 aa, Bacillus anthracis
  MISC_FEATURE (71)..(71): X=any amino acid
  MISC_FEATURE (155)..(155): X=any amino acid
  MISC_FEATURE (178)..(178): X=any amino acid
  MISC_FEATURE (179)..(179): X=any amino acid
  MISC_FEATURE (193)..(193): X=any amino acid
  MISC_FEATURE (255)..(255): X=any amino acid
  MISC_FEATURE (331)..(331): X=any amino acid
  MISC_FEATURE (332)..(332): X=any amino acid
  MISC_FEATURE (402)..(402): X=any amino acid
  MISC_FEATURE (403)..(403): X=any amino acid
  MISC_FEATURE (478)..(478): X=any amino acid
  MISC_FEATURE (482)..(482): X=any amino acid
  MISC_FEATURE (494)..(494): X=any amino acid
  MISC_FEATURE (553)..(553): X=any amino acid
  MISC_FEATURE (554)..(554): X=any amino acid
  MISC_FEATURE (573)..(573): X=any amino acid
  MISC_FEATURE (721)..(721): X=any amino acid
  MISC_FEATURE (748)..(748): X=any amino acid
  MISC_FEATURE (785)..(785): X=any amino acid
  MISC_FEATURE (789)..(789): X=any amino acid
  MISC_FEATURE (818)..(818): X=any amino acid
  MISC_FEATURE (836)..(836): X=any amino acid
MIGILKKVFDVNQRQIKRMPETVEQIDALEASIKALPGEQLKGETLEFKERLTKGGTVDDLLPEAFAVVSXAATRVLGMRPYGVQLMGGIALHEGNISEMKTGEGKTLTSTLPVYLNALTGKRFPVVPVNEYLTPRDANEMGQLPEFLGFTRRNXFNSMAREEKQEAYAADITYSTKXXAWFDYLRDTHGSIXEQCVQRPLHFAIIDEVDSILVDEARTPLIISGQAQKSTELYMFANAFVRTLENERVIIHLMXTTKNVMLTEDGITKAEKAFHIENLFDLKHVALLHHINQALRAHVVMHRDTDYVVQEGEIRNVRPIYGRSNERSSLXXRLHPSYRGKRRREIQNESMTLATITFQNYFRMYEKLSGMTGTAKTEEEEFRNIYNMNVIVISNEQTDYSXXRADLIFKSMKGKFNAVVEDIVNRHKQGQPVLVGTVAIETSELIFKMLTRKSVRLKILNGKTHARESGYPLQNLVXKVLXRSRRNMAGAWYXYLAWRRYLNIWFSSYRYRASRKRRIDNQLRGRAGRQGDPGVTQFYLSMEVLTNAPLRFXXYESMMDRLGMDDYQNNRKXNGFSCSRICAKRVEGNNYDARKQLLQYDDVLRQQREVIYKQRQEVMESENLRGIIEGMMKSTVERAVALHTQEEIEEDWNIKGLVDYLNTNLLQEGDVKEEELRRLAPEEMSEPIIAKFIERYHDQEKLMPEEQMRGSRKKWWISVLXIRNGTEHIDAMDHLREGILFRAYGQIXSTFVSIKWKGFAMVQVNDFLLIEKGNFLPTFMKVENXTKLXNRQESCFKGEAVSPHLSDGEESEEKTQLXKGGQSPAATDLCKMGRRXKNIKTC

SEQ ID NO: 46655 - protein, 92 aa, Bacillus anthracis
MARSLKKGPFVDDHLMSKIAKLNETEQKQVVKTWSRRSTIFPQFIGHTIAVYDGRKHVPVYVTEDMVGHKLGEFAPTRTYKGHDADDKKTRR

SEQ ID NO: 46656 - protein, 218 aa, Bacillus anthracis
MDYYENRKVMAEAQNIYEKSPMEEQSQDGEVRKQFKALQQINQEIVGWITMDDTQINYPIVQAKDNDYYLFRNYKGEDMRAGSIFMDYRNDVKSQNRNTILYGHRMKDGSMFGSLKKMLDEEFFMSHRKLYYDTLFEGYDLEVFSVYTTTTDFYYIETDFSSDTEYTSFLEKIQEKSLYKTDTTVTAGDQIVTLSTCDYALDPEAGRLVVHAKLVKRQ

SEQ ID NO: 46657 - protein, 256 aa, Bacillus anthracis
MELLQGKTFVVMGVANQRSIAWGIARSLHNAGAKLIFTYAGERLERNVRELADTLEGQESLVLPCDVTNDEELTACFETIKQEVGTIHGVAHCIAFANRDDLKGEFVDTSRDGFLLAQNISAFSLTAVAREAKKVMTEGGNILTLTYLGGERVVKNYNVMGVAKASLEASVKYLANDLGQHGIRVNAISAGPIRTLSAKGVGDFNSILREIEERAPLRRTTTQEEVGDTAVFLFSDLARGVTGENIHVDSGYHILG

SEQ ID NO: 46658 - protein, 678 aa, Bacillus anthracis
MNNLQHTLRASLVFGGGGALLLLLFFIHIGQGQANISYSMIIDALISPNQSLEHQTLIMLRLPRAVIAILAGGALAASGVILQTLTKNPLAESSTMGIHSGAYFFLVAATIFLPKGLQINSLLFTFIGGAITALFVYRISGEKKGTPLRMALAGMVVTLMLSAFTGTMQLFYENETAGLFLWGAGSLIQNNWDGVQFSFPFIIISFLVLLGISRKLNILLLGDDVAVSLGEKTAVTRLIAFIAAIFLTAVIVTVVGPIGFVGLVAPHLMRLIGYRQHFTLLLSSFLWGAVLLLGADVAGRLIDPTGAELPVGAVTAMIGSPWLIYLVYRMMKSKQYMNDNGANTAGASSRYYSYKKVIIISITLCIVTIALGVTIGSNAYIESITNVISGQLTQFDKNMMMNLRLPRMLVAAIAGACLAISGLVFQGILRNPLADPSIIGISSGAGVGALTIMYVFPTLPGFFLPIGAFIGGLLAVGIVLFFSWKSGFSPTALALIGIGISALGSAIIQIFIVKANLNVAAALTWLSGSTYARGWNHLENIILYPSLILVLIIFFLIKQLDVLVLGDDLATGLGQPVNKTRLALIVLATLLASVNIAAVGTIAFLGLVAPHLARIVVGMNHQRLFVCSALFGAILLSIADLLGRTIAYPKEIPSGLVVAVLGAPYFLWLMRKSGKKVN

SEQ ID NO: 46659 - protein, 461 aa, Bacillus anthracis
MKKFVKKAWPFAVVASLAVTSVATWNFTRSSEVSADENGSNAKIKNVIVLIGDGMGPSYMTAHRYMKDNPKTFEMESTEFDKHLVGTQKTYPEDEHENITDSASAATAMSAGIKTYNAAIAVDNDKAEVKTVLEQAKEKGKSTGLVATSEITHATPAAFGAHDISRKSMDAIANDYFDEKIKGKHKVDVMLGGGVKNFVRKDRNLTEEFKKSGYSYVTDRDQLLNDKNDQILGLFAPGGLDKMIDRNEKTPSLEEMTNAAIERLNKNKKGFFLMVEGSQIDWAGHDNDIVGAMSEMEDFEKAFKAAIEFAKKDKNTLVIATADHATGGLSLGANGEYNFKVDPIKAAKRTPDFMANEIVKGANVEETLKKYIDLQLTPEEIKAVNDIAPSKDVTKIDNAIEDIFNKRSVTGWTTGGHTGEDVNVYAFGPGKYLFSGVQENTNLAKRVFDIVGGGDPNKGRR

SEQ ID NO: 46660 - protein, 457 aa, Bacillus anthracis
MKRLSIKMRVTLWYTGLIVIIMALVLAFILTSSDKVLLFNMKNQLKSTVKESVEDIEYKHGQLKMDDDFETFEDGVNIIIYNKQSELLAGNSPTSFNKKISLKSDEIQIIKDGNKEWIVYDFLHNADGGEQVWVRGIMTMSRLSSTMNTLIVLTLISFPLLILIAAVGGYFITQRAFRPVQQMSDSASKIGDGKDLSKRINLKGSPKDEMYHLAQTFDKMFERLETSFESEKQFTSDASHELRTPTSVIISQCEYALSQRNNPKEMEESLEVILKQSRKMSALISQLLLLARADQGNDNTFQFECINMSELTEIVVEELSLMVQEASIDITTHIEEDLFIKADQTLMMRLLMNLLTNAIAYSKANGTVHMQLFRDETNIIGKVSDNGIGISEQHITKIWDRFYRVDAARTSSNIGNTGLGLSMVKWIVELHGGEITVESGLGEGSTFTFKLPIEKQA

SEQ ID NO: 46661 - protein, 178 aa, Bacillus anthracis
MKHVFQKGKDTSKPVLLLLHGTGGNELDLLPLAEIMDPEASVLSVRGNVLENGMPRFFRRLAEGIFDEEDLIFRTKELNEFLDGAAKTYEFDRNNIVAIGYSNGSNICASFISHTDNALKAAVLHHPMVPRRGTQLPNLAGKSVFIAAGNNDPDLVSAESEEMEGTIRKCERNVTMHW

SEQ ID NO: 46662 - protein, 556 aa, Bacillus anthracis
MNSLEQVKGLIKEEIQAAVLKAELATEEQIPNVVLESPKDKTNGDFSTNMAMQLARVAKKAPRMIAEELVANFDKAKASTEKIEIAGPGFINFYMDNSYLTDLIPTIVNAGEAYGETNTGKGEKVQVEFVSANPTGDLHLGHARGAAVGDTLCNLLAKAGYDVSREYYINDAGNQIHNLALSVEARYMQALGLEKEMPEDGYHGADIIGIGKRLAEEFGDRYAKADEKESYEFYREYGLKYELAKLQKDLESFRVKFDVWFSETSLYKNGKIDQALAVLKERDEIFEEDGATWFRSMTYGDDKNRVLIKNDGSYTYLTPDIAYHRDKLERGFDKLINIWGADHHGYIPRMKAAIQALGYDKETLEVEIIQMVQLYQNGEKMKMSKRTGKAVTLRELMEEVGVDAMRYFFAMRSGDSHLDFDMDLAVSKSNENPVYYAQYAHARVCSILRQGEELGLATGGDVNYKLVTSEKEVELLKKLGEFPAVVADAAQKRLPHRITNYAFELAATLHSFYNAEKVLNQDNLELSKARYELMKAVRTTLQNALAIVGVSAPEKM

SEQ ID NO: 46663 - protein, 255 aa, Bacillus anthracis
MRHIELNNEITQMQDGFYQLHKDKEALEVFMEEARENTVHFNSVAERMEYMKEHDYYYNVLDEYNLEEVEEVYNIAYGENFEFQSYMAASKFYKDYALKTNDQKQYLESYEDRVAIVSLYLGRGDVAKAKQFASMIVKQNYQPATPTFLNAGRSRRGEMVSCFLLEMDDSLNSIGFNINTAMQLSKIGGGVALNLSKLRARGEQIKGIDNAASGVVPVMKLLEDSFSYANQLGQRKGAGAVYLNIFHWDIIEFLD

SEQ ID NO: 46664 - protein, 1788 aa, Bacillus anthracis
KLFNICLIVFVLFSQFISFPYNQAKAETLKETSLFDTVEMKDATDQIIDEAKNPNNLIKIGSTIQVEYAWSIKDQQVVHANDTAVLQIPLALKVSKDLQGDLVTDQKNIGQYFITAKDNKLKLIFNDQVENSKDAKGKIKIDTVFNPTLKTEEKSVQIAFPLGTLVQPITVPIQVEDSKEDGTKQDTNKQVQDQVAKPTTDNPEQNSATKPATDNPEQNPATKPATDNPEQNPATKPATDNPEQNPATKPAADNPEQNLASDPAEITNSGPKQITTNILTGVKLTDKDGKPFTEDNRPSTDSPANIEFTWELLKSMNVKSGDYYIFDLPKHFKIYNTINSPLYDSENNPIGNFTVTKDGKVTMTFNDYVEEHPDVVGNLQLKTEFNKAEIKGTTTQEIPFPIKDKDVSITVDFKPNVQTATNKKGLPDRPINTNEINWTVEMNKTKDTLKNAVFKDNIPQGTSLNKDSIKVYYLEVDVNGNATRGQEADPADYKIISSDGSKLEIAFKDSIKKAYQIEYVTKITDENVKSFQNNVTITSDNQGQQKASSTVTVSRGTHLNKTSKYDPKTQTIEWTITYNGDQRNIKKTDALLKDIFDDTHELDVNSIVVKNASYDDKGRLVTGDTVNNYTVTNKKNGFDLQFNEDINSAYVITYKTKPTNNVIKDGKIKNTVTADNGSSKENEAGFQQQNIIKSNNKAETNYKDKTTTWTITVNNNNYPLNNAIITDTFDHGGLQLKDKKLEIKDGDYTLQAETDYVLDVTDKGFKITLIGTYQSNMTKTLIVKYTTDFDYTKLESGKTSFKNTGNLSWIDAGSNPQSNKVEADFDPDTFTKANGYKYGSYNAQTKEITWIIGFNYNNVEIKDPYVIDVIQDKQKLVPGSIEVRHMILNGSPDNARPGDAVPIEQYELEEPTDKNKNTLQVHFKQSINSPYYIIFKTSLDGELIQNTYKNEAELKDGSKIVNTLKGDAQVNKGGSFVTKKAVQDDNYINWSIAINESQSTIADAVVTDDPTDNQVLVEDSFHLYPTTVDYYGNVTKDTANELKQGTDYKLTITTDNNTGKQHFEIAFLKKIDRAYILEYRSLINADDKEKVSNKAKIAGNQLTVKNTETVETIEVRMSSGSGGGSATNGRGNLEIIKVDNDNKKVPLSGAEFTLYDRTGKTVIRKITTDKDGIAKFNNLKRDKYLLKETKAPEGYVISWDLKQGKIVELGSQETTTYKLANKKFVGKVVLTKSDDLNKNVTLQGAVFTLLDKDKKIISEHEKLTTNDQGQITVDNLKPGTYYLQETTAPEHYKLDSTPIQFTIKEDQTTVINRTATNSLIPGSAILTKVDKDGKTLAGAEFSVRDRHNNVIRGYEKLTTNDQGQIEATNLRPGDYQFVEEKAPKDYDIDKTPIEFTIVKSQKKAVTVTATNHLIKGGVTLTKTDDIDGTALAGAIFKIVDANDEKKVIRENVKTGADGKVTVKDLEPGTYKFIETEAPKDYVLNANPIEFTIDKSQQSFATVTATNSLKTGEVELLKVDEFGDKKPLKGAVFKIVDVNNNDVRTDLTTDADGKTKADKLRPGTYKFIETAAPEHYVLRAEPIEFTIDRSQKETLLVKAENALKPGDVELTKVDDIDGTALAGAVFKIVDANDEKKVIRENVKTGADGKAIATGLRPGNYKFIEVYDKNTSPIKFTITESQTTSATVTAKNSLTKGGIELTKVNAADEKETLEGAVFKIVNRDTNEDARTNLVTNSEGKLVVDDLRPGNYKLIETKAPTYYDVNVEPIEFTIEKGQQTLLPLTFKNSLT

SEQ ID NO: 46665 - protein, 332 aa, Bacillus anthracis
  MISC_FEATURE (236)..(236): X=any amino acid
DKLQRPLKALRISVTDRCNFRCRYCMPEEIFGPEYSLLSNDKILSFDEIERITRIFVSLGVRKLRITGGEPLLRRGLPQLIERLNKVDGVEDIGLTTNGSLLKKFAPDLYKAGLSRVTVSLDSLEEERFFYLNGNRSKVQRVLEGIQAAAEVGMKIKINMVVQKGKNEQDILQMAQYFKENKHILRFIEYMDVGNYNGWELREVVSKQEIVDMIHQVMPLERIEANYAGEVATRVXYIGSDEEIGVISSGTDSFCSSCTRARISAEGKLYTCLFASKGNDLRELLRSDYTDEEITDVVRDIWNNREDRYSDERLSNSNKKAMPTIEMSHIGG

SEQ ID NO: 46666 - protein, 268 aa, Bacillus anthracis
  MISC_FEATURE (54)..(54): X=any amino acid
  MISC_FEATURE (73)..(73): X=any amino acid
  MISC_FEATURE (240)..(240): X=any amino acid
MKKILLSVVTALSVFTLAACGGKEENKLVVGASNVPHAVILKKAQPILEEKGDXIRKLKFPDYVVANKGVTGXGIDGNYFQHIPYFDKEIPKKGFKFVNAGKIHLEPMGIYSKRYKSLKDLPDGGTVIMSNNVAERGRMLALLQKGGVIKLKDGVDVVKATVKDVVENPKNLKFKTDVEPGLSPKLYENNEGKALFINSNYAIDAKLNPTKDAIANGGTDSPYANIIAVPKGDEKKKEIXELVEVLHSKENSDFINKEYKGAVLPVSE

SEQ ID NO: 46667 - protein, 337 aa, Bacillus anthracis
MHENMKDSLKRPLQDLRISVIDRCNFRCTYCMPAEVFGPDYAFLQEECLLTFDEIERLARLFISMGVNKIRLTGGEPLLRKDLPKLIARLAKLEGLKDIGLTTNGIHLAKQAKALKEAGLKRVNISLDAIEDRVFQKINGRHVSTKPVLKGIEAAKEAGLEVKVNMVVKKGMNDSQILPMAQYFKEQEIQLRFIEFMDVGSTNGWNFEQVVTKEQLIEKINRVYPIEPVKPRYFGEVAKLYRYVGNDAEVGFITSVSESFCSSCTRARISADGKFYTCLFGEKGTDLRSLLRENISDASLLKILQHTWEFRTDRYSDERTAESTNKRQKVEMSYIGG

SEQ ID NO: 46668 - protein, 201 aa, Bacillus anthracis
MYKPITFSLKYIFKTAGKVEVQGREKLPEGGPYVVACTHTSFMDVLMLATGMYPTEIHYMAKKELFEGKFKNWFFKNVNAFPVDRANPGPSTLKIPSRLLKEGKVVGIFPSGTRSTEDVSLKAGAVTIAMRSNVPLIPAAYIGPSSVKELIKGKRAQLIFGDPIQIDAEEQIDRKTAMKMMTDQLNEKFEGLKEALQSNQK

SEQ ID NO: 46669 - protein, 374 aa, Bacillus anthracis
  MISC_FEATURE (335)..(335): X=any amino acid
  MISC_FEATURE (339)..(339): X=any amino acid
  MISC_FEATURE (344)..(344): X=any amino acid
FHLCEIVTSLPTQFFASLVAKVNKVVAAGHDVINLGQGNPDQPTPQHIVKALQDAAEKTIHHKYPPFRGHESLKEARATFYQREYDVVVNPKTEVAILFGGKAGLVELPVCFTNPGDTILVPDPGYPDYLSGVALAKAQFETMPLIAENNFLPDYTKIDDSIAERAKLMFLNYPNNPTGATASKDFFDETIHFANKHNILVVHDFAYGAIGFDGQKPVSFLQADGAKDTGIEIYTLSKTFNMAGWRIAFAVGNESVIETINLLQDHMYVSIFGAIQDAAREALLSSQSCVIDLVNSYESRRNALISACHSIGWNVDIPTGSFFVRASVSTMYTSXAILXILLLXKSTRAVAPGVGFGEHGERVTSRCGLLGIQE

SEQ ID NO: 46670 - protein, 94 aa, Bacillus anthracis
MLRLDLQFFASKKGVGSTKNGRDSQSKRLGAKRADGQTVSGGSILYRQRGTKIYPGVNVGRGGDDTLYAKVDGVVRFERLGRHRKQVSVYPVAQ

SEQ ID NO: 46671 - protein, 307 aa, Bacillus anthracis
  MISC_FEATURE (162)..(162): X=any amino acid
  MISC_FEATURE (259)..(259): X=any amino acid
NLLSWGAGTGLSVFLRGLKQISVDITAVVTIADDGGSSGRLRDELEIPPPGDIRNVLVALSDVEPLVEALFQHRFTTRDGLKGHALGNLLLAGMTSITGDFFHAITETSKVLNVRGRVLPAANQSAVLHAELEDGEIVTGESKIPYFRKKINRVFFNSQKMXSPLHENVDWRLNELILLVFGPRKFVTSIFTEFSLLTKIGGRWSLLQKRRRVYVCNVMTPAGETMGYTAFGHVQALHDPFRKPFIQTAIVKNREYSLXITSVIREEMSAPVVVDEERFIENNIDVIQDQLAKYDDRVVRHDTLKLA

SEQ ID NO: 46672 - protein, 955 aa, Bacillus anthracis
MTRKNTTTNPWAKFHGPNLGYVIEQYDLYVTGAGSVDPELQELFEIFGAPSFQDDVVTGDNTATHFSPQNTGNIEKILKVVQLVEQIRSFGHTLAHINPMEDAANGQSLLEKAMNELSDADLKAIPAKTVWQDAPEGIHTALDVIHRLKEVYTQSLAYEFSHIQDSEERAWLHQMVESNSLRQPLSNKKRTALLKRLTAVEGFEQFLHKTFVGQKRFSIEGVDMLVPVLDEIVLEGAKNGVEDVMIGMAHRGRLSVLAHVLEKPYSHMFAEFKHAKIEGAVANSGWTGDVKYHLGREQVVSNEEVSTRVTLANNPSHLEFVNPVVEGFARAAQENRKKSGLPEQDTSKSFVILVHGDAAFPGQGIVSETLNLSRLNAYQTGGTIHVIANNAVGFTTDSYDSRSTKYSSDLAKGFDIPIVHVNADDPEACLAAANLAIQYRMLFKKDFLIDLIGYRRYGHNEMDDPAVTQPQVYKKIKNHPTVRAIYADQLQAAGVLNADEIETITQFTQEQLKSDYAQVPPADTSDATIHVKVPDVVAKGIQPIDTGVELDSLRAINEGLLSWPEGFNVYPKVKKILERRKDALEENGKIEWALAESLAFASILQEGTPIRLTGQDSQRGTFAHRHIVLHDTDTNETYSPLHRLPNINASFSVHNSPLSEAAVVGYEYGYNVFAPETLVMWEAQYGDFSNTAQALFDQYVSAGRAKWGQKSGLVLLLPHGYEGQGPEHSSARPERFLQLAAENNWTVANLTSAAQYFHILRRQASILGTEAVRPLVLMTPKSLLRHPLTLSTANQLSEGRFQPALEQENLGTKPNKVKRLVLSTGKMAIDLAAEIESGRHEYNLDEIHIVRIEQLYPFPAEKVQSIIKRFKNLEEIIWVQEEPRNMGAWHYMAPILFELAGDKVKTGYIGRPDRSSPSGGDPFAHKAEQELIVSHALDVKYNFRQDKLEIEVFSN

SEQ ID NO: 46673 - protein, 232 aa, Bacillus anthracis
LGVPFSTMTMDETIQYLKGQLEVERTHTFQVVTANPEIVMCAKKDEAFYKTLLNTDLITPDGIGVVKASGMLGTPLKERVAGFDLMCNLFAKLSEENKPVSVFLLGAKPHVVQAAADHLTKTYSAVSIVGIQDGYFKQEEEENVVSRIQEAKPDLLLVALGFPRQENFIQTNKYRLETKMAVGVGGSLDVWAGEVKRAPKWFKRIVLEWFYRFCFLPTRWRRQLVLAEFYFQ

SEQ ID NO: 46674 - protein, 525 aa, Bacillus anthracis
  MISC_FEATURE (296)..(296): X=any amino acid
  MISC_FEATURE (364)..(364): X=any amino acid
  MISC_FEATURE (493)..(493): X=any amino acid
VAAGILAASLLSSPVSSFAAAKKFSDVPTWAQQSVDYLVGKKALDGKPDGTFSPSEAVDRGSAAKILAVVLGLPVDPKAKPSFKDAQNHWAAPYIAAVEKAGVINGDGTGKFNPSSQINRASMASMLVQAYSLDKKIIGELPTQFKDLEPHWGKKQANILVALEISKGTGNGWNPEGTVTRAEAAQFIAMAEKKIKQSTSKRMYMTRNVITYHHPSLSSGITDVHHKPQNGKVTEQRADGWVKMLTSKREKWDTSNRKNRNDLMKEFSTYGTASHSSKVLGTYNAQTVTVMEKEWXLIRIRVGAGFQWVDKNQLNPVKQENFLEGKAIIIDPGHGGIDSGNVGYYEKESDTVLDVSLRLKKIIXAKAPFTVMFTRTDNTRPGVNSTDSLKKRVEFAQEHNGDIFVSIHANGSAEKNGQGTETLYYQSARAKVTNPHVEDSKLLAQKISDRLVAALGTKDRGVKHQDLYVTRENTLPAVLTELAFVEYKSDGRXNCYTKQRQAAAEAIYQGILDYYEAKGNNVSSF

SEQ ID NO: 46675 - protein, 366 aa, Bacillus anthracis
MGLTAGIVGLPNVGKSTLFNAITQAGAESANYPFCTIDPNVGIVEVPDERLNKLTELVEPKKTVPTVFEFTDIAGIVKGASKGEGLGNKFLSHIRQVDAICQVVRCFEDENITHVSGKVDPIDDIETINLELILADLESVDKRIERVAKLARQKDKEAVYEHEILVRLKEAFEEGKPARTVEFTEEQMKIVKGLHLLTTKEMLYVANVSEDDVIDPSENKYVQMVKEFAANENSQVIVVCAKIESEIAELDEEEKKVFLEELGIEESGLDQLIRAAYDLLGLATYFTAGVQEVRAWTFKQGMKAPQCAGVIHTDFERGFIRAETVSYEDLMTNGSMTAAKEAGKVRLEGKEYIVKDGDVMHFRFNV

SEQ ID NO: 46676 - protein, 214 aa, Bacillus anthracis
MEDKTLGLLLDVVGELFSDEISIAVSNTKEYIYYRPSKRIDLKISAGDPIKEGTIAHKAMVTNQKTSEFINRDVFGIPYHGMAVPFSNNGKLEGCVTAIYPALTDGKSVVTLKTTDGWVPVPFSKVMYLEAKDKKTYVNAEELTGTHKYSLQEFEYLLPKDSFIRCHRSFIVNVNHIKAIYPDTHSTFVLSMDNGERVPVSQSYASYFRKLLGF

SEQ ID NO: 46677 - protein, 473 aa, Bacillus anthracis
  MISC_FEATURE (346)..(346): X=any amino acid
  MISC_FEATURE (372)..(372): X=any amino acid
  MISC_FEATURE (412)..(412): X=any amino acid
  MISC_FEATURE (422)..(422): X=any amino acid
  MISC_FEATURE (467)..(467): X=any amino acid
MYINGELITLQEQIEVNNPATKEIFATVPKGGVTEAKQAVDAAHEAFKSWSKLTAADRAAKLKKWFTLIDENKEEIAAIMTKEQGKPFAEALGEVNYANSFVEWYAEEGKRVYGEMIPASHPNKRILVMKQPVGVMAAITPWNFPAAMITRKVAPALAAGCTAVVKPASQTPLTALKLAELAHEADIPKGVINIVTGSAKAIADTWMEDGRVCKVSFTGSTEIGKELMASVAQTMKKVSLELGGHAPFIVMNDADLDKAVEAVIGSKFRNAGQTCICTNRVFVQEEVYEAFVEKFEKAVGQLKVGDGFGDGTTVGPLIDENAVSKVQEHIEDAIQKGGTVLYGGQXGCRADGHFMHPTVIGLRNDTMLCMKXRTILTPVQPVRKIKTGERSIERANHTPYGLAAYIFTKDIXSSIPNLLKRXSTVIFGLNDGPPISLPQHPFRRGLKKSGIGRESGHFRIEEYLEIXIYSLGL

SEQ ID NO: 46678 - protein, 64 aa, Bacillus anthracis
MPYMIFHSEKVDETIEENRGKNLVGTHIVEEFVNSLESPRKILLMVNAGEITDKAMISLVPHPR

SEQ ID NO: 46679 - protein, 368 aa, Bacillus anthracis
  MISC_FEATURE (249)..(249): X=any amino acid
  MISC_FEATURE (309)..(309): X=any amino acid
  MISC_FEATURE (312)..(312): X=any amino acid
  MISC_FEATURE (336)..(336): X=any amino acid
  MISC_FEATURE (342)..(342): X=any amino acid
  MISC_FEATURE (344)..(344): X=any amino acid
EMPHGTKTRPVKVGTLTIGGNNELIIQVMPPTKTTDVKPTVAEIKRLEEAGCQVVRVAVPDERAANAIADIKKQINIPLVADIHFDYSPLKKAMKGGIDKVRINPGNIGRRHKVEAVVNAAKERGIPIRIGVNAGSLERHILEKYGYPTADGMVESALHHIKILEDLDFHDIIVSMKASDGNFAIEAYEKAARAFDYPLHLGITESGTLFAGTVKSAAGLGAILNKGIGNTLRISLSADPVEEVKSAAXLLKSIALASNAATFISCPNLWSYEIDLISIANEVEEYISTLQVPIKVARTWVGCVMGPGXSSXKLILVLPGARRRRIIYSVRASCVXRYKKKXWXKKLKKKIDPNCLLKRGAEREKEKE

SEQ ID NO: 46680 - protein, 422 aa, Bacillus anthracis
  MISC_FEATURE (81)..(81): X=any amino acid
  MISC_FEATURE (89)..(89): X=any amino acid
  MISC_FEATURE (111)..(111): X=any amino acid
  MISC_FEATURE (150)..(150): X=any amino acid
  MISC_FEATURE (151)..(151): X=any amino acid
FRDFFFSRIEFAIVKVRSSRIDQLVAEGKRGALAAKKVTTNLDEYLSACQLGITVTAMGLGWLGEPTIEKVLTPLFGEWTXNPSISSEXTLGLAFKCKTYLPLEEGGLTPXTMAIQKAEKVTLLFAAPLMMFYKGMYPFYLGIKWFSSVXXLGVFRFKTRLLDMEVAPTEGRITALFFQNSYESGRNLSSWDTRMVNNIFEFDNRIAKEIMVPRTEIVGFYLEDSVEEHMKVIQNERYTRYPIFGEDKDDIIGMVNVKDFFIRYMTEDQKDLSSIRSYMRPIIEVMGTISHSPIYYFKCRKKRIPNGVLYDEYGGTAGIVTFEDILEEIVGEIRDEYDEDEAPPIQHVNEQHIIVDGKVLISEVKDLFGLHIEEDDVDTIGGWIMMQNHEIEEGQHVEAEGYEFKVLEKDAYQIKRVEIRKM

SEQ ID NO: 46681 - protein, 1239 aa, Bacillus anthracis
  MISC_FEATURE (140)..(140): X=any amino acid
  MISC_FEATURE (143)..(143): X=any amino acid
  MISC_FEATURE (273)..(273): X=any amino acid
  MISC_FEATURE (345)..(345): X=any amino acid
  MISC_FEATURE (355)..(355): X=any amino acid
  MISC_FEATURE (359)..(359): X=any amino acid
  MISC_FEATURE (538)..(538): X=any amino acid
  MISC_FEATURE (720)..(720): X=any amino acid
  MISC_FEATURE (946)..(946): X=any amino acid
  MISC_FEATURE (957)..(957): X=any amino acid
  MISC_FEATURE (979)..(979): X=any amino acid
  MISC_FEATURE (1115)..(1115): X=any amino acid
  MISC_FEATURE (1117)..(1117): X=any amino acid
  MISC_FEATURE (1168)..(1168): X=any amino acid
SQWTDDQWKAVVATGRDILVAAAAGSGKTAVLVERIIKKIINEENPVDVDRLLVVTFTNAAAQEMKNRIGEALEKVLIDDPVSPAVRKQLSLLNKASIQPIHSFCLQVIRGYYYMLNVDPRFRIANQTENDLLKEEGVRXHIXKNEYGIEDNTIFFELVDRYTSDRSDDDLQRMILALHTESRAHPNPEKWLDKLVEAYDVEGKTIEDLVYASYLLEDVKFQLETAEQHIRKQLSSQCFLTVPAPRIETLQADLALLGTLSAAARESWTKRVXKGCKTYRCQTLKRIKKRRLNEDIGKQVDSLRNKAKDESEEYQEELFSRRPESFLRDFQDMHPGIRKARSEKXKYLQSVSDMXKRRXRHGRFTDLEHFCLQILSEQSEDGEMKPSAVALQYRNKFAEVLVDEYQDTNFVQESIIKFVTKDSESEGNLFMVGDVKQSIYRFRLAEPGLFLGKYKRFTQEGLGGGMKIDLAKNFRSRHEVLAGTNFIFKQIMGEEVGEIDYDADAELKLGASYPEGEDVAAELLCIQQTEEEVIDGEXCAGSEKAQLEARLMAQRIKAMVDSGYEVYDRKTDSMRPVKYRDFVILLRSMPGATQNYEELKCQEFPVYADLATGYFEATEVNIMMNVSRVIDNPMQDIPLPAVLRSPIVGLNDEELATLRAHGRKGSFYEVMSSFLKGAPLEEEKELHDKLEWFYNLLQGWRGIPTPTVSFLILIWKVDRXEQGIMPLFGGLTNLEKQRQANLRVLYDRARQYEATSFRGLFRFLRFIERILERGDDMGTARALGEQEDVVRIMTIHKSKGLEFPVVFVAGLGRRFNTQDLMKRFLLHKDFGFGSQFIDPRKRIKYTTLSQLAIKRKMKMELIAEEMRVLYVALTRAKEKLILIGTVKDATKEMEKWLDAREHSEWLFPDSRSARSFCYLDWIAPSLYRHRDSEMLLELGQRKFPRXNLWVMPLAEKXKLLTGTRYLRQNPFRKRNKNCXRHFVRKKAVPLESERKEEVYDRLMWKYGYGEATSHRAKQSVTEIKRNYQSEEGSDNAFIKKLRAPIQTRPRFMEKKGLTYAERGTAVHAVMQHVDLKKPITVEILQEQIAGMVNKELLTFEQAEEIAIEKVISFIXQXPWIKGLLRGEKVLSGKVPFSMILPAEEGYQVLPRGRTGKSILCPRGLSTAXLRGRCYPLMDFKRDPIEGKFPGGFEQAKPIFETRYKVQLSLYAKALEKSLQHPVKEKCLYFFDGNHVIKVE

SEQ ID NO: 46682 - protein, 390 aa, Bacillus anthracis
MNFRVYILAIAAFVVGTVELIIGGTLDLVANDLGVSISAAGQLITIFSVVFALSGPVLLALTGKFERKTLYVGALSIFLIGNIISACSVNYGMLMFSRVICAASGSLIIALSVTLASSVVEPHFRARAIGIIFMGISGSLVLGVPLGLVLGNAYGWRAPFVLISILTVMAIACISLFLTKVPPTSVLSIREQIATLKDKKIVSAQLTSFLFLTGHLTLYAYLTPFLKDVMHVEANWISVFYFIFGIAAVIGGGFGGWLADKWGSKKSIISIIIVFACAIFLLPLMTFSFPLFIIMMGIWSMLSWAISPAQQNYLIEIAPESAGIQQSLNNSALHLGIALGSTVGGVVIEKSSVIYNAWVGGGFIILALLCAIFSITRGRSTQFAKEESIV

SEQ ID NO: 46683 - protein, 93 aa, Bacillus anthracis
  MISC_FEATURE (57)..(57): X=any amino acid
  MISC_FEATURE (84)..(84): X=any amino acid
ISVENVKHVAHLARLAITDLEAEKFLKPLDAIVTFAEQVNGLDTTDVKPHTPVFTMXNVMREDVPEKGLPVEEVLKNARDHKRXQIRVSSRLE

SEQ ID NO: 46684 - protein, 391 aa, Bacillus anthracis
KTVILSAARTPVGKFGGSLKDVKATELGGIAIKAALERAMVHPRDVGEVISGTGIQGGQGQIPSRQAARLRWNPLGEVQTETVNKVCASGARAVTLADQIIRTGDQSLIVAGGMESMSNSPYILRGARWGYRMGNNEVIDLNVADGLTCAFSGIHMGVYGGEVAKEDGISREAQDEWAYRSHQRAVSAHKKGRFEEGIVPVTIPQRKGRSIVVAKDEAPREEYTIEKLAKLKPVFDKTATVTAGHAPLVKRWWAALVLMSEDRAKQEGRKPLATILAHTAIAVESKDFPRTPGYAINALLEKTGKKIEDIDLFEINEAFAAVAIASTEIAGIDPEKLNVIGRRSGDGHPIGASGARIIVTLIHALKQRGGGIGIASICSGGGQGDAVMIEV

SEQ ID NO: 46685 - protein, 202 aa, Bacillus anthracis
MKIDRPKISPELSFKSFHDIFYEEDPTLEMCEIIDSTFENESVDRVRLYSAVIKNCKFTNTDFSNIDITDVCFENCDLSNVNLSNSSVHRVEFKNSKLIGVNFTESSLGNVEFSTFGNSKLEKIIFNEASLNNADFFDCKLKKVEFDSCSLNEANFDQPSLKGIDISSSTFDTLTVSVNDLRGCKVSPYQAIQFASLLGLII

SEQ ID NO: 46686 - protein, 88 aa, Bacillus anthracis; identical to SEQ ID NO: 46508

SEQ ID NO: 46687 - protein, 192 aa, Bacillus anthracis
  MISC_FEATURE (174)..(174): X=any amino acid
MNLPNKITISRIFLIPIFMVIMLAPFDWGSYTIGDVDLPIQHLVGALIFIVASATDWIDGHYARKYNLVTNLGKFLDPLADKLLVSAALITLVEMQYVPAWIVIIIISREFAVTGLRLVLAGTGEVVAANQLGKIKTWTQIIAIAAYLLHDVPLNLIHIPVADIFIWIALIFTXISGWDYFWKNRAAFVNSK

SEQ ID NO: 46688 - protein, 429 aa, Bacillus anthracis
MTSNEIYVSLDIGTSNVKVIIGEMVNDSLNIIGVGHVKSNGLKKGSIVDIDETVRSIKKAIEQAERMVGIHIEQVVVGVNANQVQLLPCHGVVAVSNEDREIGNEDVLRVLDAAQVVSIAPEREFIDVVPRQFIVDGLDEINDPRGDIGVRLEMEGTLITGSRTLLHNLLRCVEKAGLEIVDICLQPLAAATVAISSDEKNRGVALVDMGGGSTTLSIFKDGELQATSVLPLGGDHITKDIAIGLKTSTENADQIKLKYGHAFYDTASEEEMFTVPIMGSDQTEQYSQLELSDIIEARVEEILMFVQDEVRKLGVKQVASGYVLTGGIASMPGVLDLAYDILHENVRIATPDYIRVRLTQYTSGVGLIKHSYQKAKLRGKMVQEKQEHFEPVPAPAPVQQHPAKQKTRNQNNNNQNDDRMMSKVKRVFR

SEQ ID NO: 46689 - protein, 113 aa, Bacillus anthracis
MQAKAVARTVRIAPRKVRLVVDLIRGKQVGEAIAILNHTPKTASPVVEKVLKSAIANAEHNYEMDINSLVVEKVFVDEGPTLKRFRPRAMGRASQINKRTSHITVVVSEKKEG

SEQ ID NO: 46690 - protein, 435 aa, Bacillus anthracis
  MISC_FEATURE (417)..(417): X=any amino acid
  MISC_FEATURE (430)..(430): X=any amino acid
KKIIFFTGLMPISLFFGGGELIFPSMLGQNAGENFWPAMSGFLLTGVGLPLLTVIAISLSGNGMQQLASHVHPLFGIFFTVVVYIAIGPSMGIPRVANVAYEMGVSSFLPETIRSSSLVLFVYTIIFFAIVFWLSLNPSKLVDRIGNILTPILLLSIFLLFVKSVFTPLGQSGPAMQEYQTFPIFKGFMEGYLTMDTISALAFGIIVVNAIRSKGVNDRKSIAIATAKAGLIAATGLVLVYGALCWLGTTSVSLGYAKNGGQLLTVIVQQLFGPYGLLLLALIVTLACLTTCVGLVSACSQYFSTLLTKFSYKTFASIICALGLLVANLGLTKNIAISVPILLVVYPIAIVLVLLSLLHKYFGGYRSVYVGALIGAAIVSVFDGLKQGGISVSFIPSYFDFIPLYKERIGWARSLHXPGALIGLYHSLKXGVGKK

SEQ ID NO: 46691 - protein, 490 aa, Bacillus anthracis
  MISC_FEATURE (93)..(93): X=any amino acid
  MISC_FEATURE (99)..(99): X=any amino acid
  MISC_FEATURE (112)..(112): X=any amino acid
  MISC_FEATURE (124)..(124): X=any amino acid
  MISC_FEATURE (125)..(125): X=any amino acid
  MISC_FEATURE (200)..(200): X=any amino acid
  MISC_FEATURE (225)..(225): X=any amino acid
  MISC_FEATURE (269)..(269): X=any amino acid
  MISC_FEATURE (346)..(346): X=any amino acid
  MISC_FEATURE (407)..(407): X=any amino acid
MKITELLKRDTVIMNLTASNKEAVIDELVEKLNGANRLNSKAEFKEAILKRESQSTTGIGEGIAIPHAKTKAVKQPAICFGRSVSGINYETLXGNLPHXFFMIGCECPGQKXPFLKRIPPYFTXXMDERFPNPFVKNQREEKEPSSSLFVGKKNNEKENEKENEKEEEVEVAQPEGNEPYVLAVTACPTGIAHTYMGCGXFGKQKAAEVGDLPFKVERKWSNQLXKTGLRERGIMKRATVYIVAADNQVEMDCFCWKHVIQVPVAEGDXKTGKLLKSCCKTGCRRFLNAIKEDGRAGSTENDNGLGIYMHLMNGVSNMLPFVVGGGDFNCASVFVGGIKSRRPFSXIVHVYWGGGTGAFLFLVPILAGFIASSIADRPGFMPGVVGGIFSGTCECWAFRGDNWWGSXLDMLSRAKRLFSGLPVQLEGIKPVLLYPVFGLLITGVVMQKVVIPPVVALNEMLYRMVKWFDTVQMLITRSYFRCDMAKDMGG

SEQ ID NO: 46692 - protein, 248 aa, Bacillus anthracis
  MISC_FEATURE (233)..(233): X=any amino acid
MEEVLPIKNVSKLYEGQSPHTALKNINLHVDKGEFVAIMGPSGSGKSTFLNVYSTIDSPISGEVVINGKKPHTFRREKLAVFRRQELGFVFQNFNLLDTLTIGENIVLPLTLDNVPLKEMDKKLDSISTKLGIDHILNKRIFEVSGGQAQRTAVARAVIHHPSLLLADEPPVVMRDSKAAIDVIGVFSKLNKEEDATILMVTHDPFAASYCNRVIFIKDGELYNELHRGLYRXEVLQEILDVLALLGG

SEQ ID NO: 46693 - protein, 293 aa, Bacillus anthracis
MEITFQKVEHRYQYKTPFERRALYDVDVSFPSGGYYAIIGHTGSGKSTMIQHLNGLLQPTNGTVQIGEHFISAGKKEKKLKPLRKKVGVVFQFPEHQLFEETVEKDICFGPTNFGVSEEAAKQKAREAIELVGLEPELLARSPFELSGGQMRRVAIAGVLAMEPEVLVLDEPTAGLDPKGQNELMEMFYKLHKEKGLTVILVTHNMEDAAKYAEQIVVMHKGTVFLQGSAEEVFSHADELEKIGVDLPMSLKYKRAIEEKFGISIPKATLSLEDLTHEVVQVLRKGGHESCSS

SEQ ID NO: 46694 - protein, 737 aa, Bacillus anthracis
  MISC_FEATURE (226)..(226): X=any amino acid
  MISC_FEATURE (281)..(281): X=any amino acid
  MISC_FEATURE (288)..(288): X=any amino acid
  MISC_FEATURE (355)..(355): X=any amino acid
  MISC_FEATURE (394)..(394): X=any amino acid
  MISC_FEATURE (405)..(405): X=any amino acid
  MISC_FEATURE (710)..(710): X=any amino acid
  MISC_FEATURE (711)..(711): X=any amino acid
QIKEERIYSEKGLPDEEFAMFERILGRLPNYTEFRVFSVKWSEHCSDRYSTAVFGKFPTTSERVMQGPGEGAGIVDIGDIKAVVFKMESHNHPSAIEPYQGAATGVGGIIRDVFSMGARPVALLNSASFGELPSPRVKYLFEEVETRIVGIGNWIAFPNCWRGKKRVVPAQEGNPLVNAMCVGLINHEDIKKGPSARAGNTVMYVGASTGRDGIHGAPFAFEELSXELIRKRPAVQVGDPFMEKLLIEACFRTYSIDALCWNSRLGCSWFYHHLSAENGKXSQGWGIXMYLDDVPQRETGMTPYEMMLSESQERMLIVVKKGREAEIVDLFEKYGLASVTMGESNRKTNAFFIPXSEMGSLKCPTDAPCQKKHPFYLKPIQRKHHNFAEIPPRXKWKPPKVENFXENGIPLFYNNPPIASKEWVYDQYDYQVRTSTVVTPGSDAAVVRVRGTEKGLAMTTDCNSRYIYLDPEVGGKIAVAEAARNIVCSGGEPLAITDCLNFGNPEKPEIFWQIEKSVDGMSEACRTLQTPVIGGNVSMYNERSGEAVYPTPTVGMVGLVHDLKHVTTQEFKQAGDLVYVIGETKAEFGGSELQKMLHVTYFRPITKYRLDVELKRQKQVLAAIQAGLVQSAHDVAEGVIAVAISESAIGASGLGATVKLDGGSNSCIICGITSRFVITVKRENKEAFEKAVEAIQVGEVTNTNEVTIPXXRKWSVFFPPNWMKWGKAWKGGHSPCL

SEQ ID NO: 46695 - protein, 1014 aa, Bacillus anthracis
MDRLTKFSLKNRAAVIIMVFLISILGVYSGSKLPMEFLPSIDNPAVTVTTLSPGLDAEAMTKEVTDPLEKQFRNLEHIDNITSSTHEGLSRIDIAYTSKANMKDATREVEKAINTIKLPKDATKPIVSQLNTTMIPLAQIAIQKQNGFSKADEKQIEKEIVPQLESIDGVANVMFFGKSTSELSIILDPNQLKDKNVTTEQILKVLQGKETSTPAGAVTVNKEEYNLRVIGDIKNVDDIKNITVAPHVKLQDVAQIELKQHYDTISHINGEEGTGLIIMKEPSKNAVAIGKEIDKKIKDISKQYKDQFSIKLLASTHEQVENAVTSMGKEVILGAIAATLIILIFLRNFRTTLIAVVSIPLSILLTLFLLHQSNITLNTLTLGGLAVAVGRLVDDSIVVIENIFRRLQKEYFSKDIILDATKEVAVAITSSTLTTVAVFLPIGLVSGVIGKLMLPMVLAVVYSILSSLIVALTVVPLMAFLLLKKIKHKKPSSSPRYVATLKWALSHKFIILLTSFLLFAGSIAAYVLLPKANIKSEDDTMLSINMTFPADYALETQKQKAFDFEKKLLSNSDVTDVILRMGSSAEDAQWGQTTKNNLASIFVVFKKGSDIDQYIKELKKEHNAFEPAELDYIKTSYSSSGGGNNLQFNVTATNETNLKKAATIVETKLKNMDDLSKVKTNLEDSKKEWQIHVDQTKAEQLGLTPELAAQQVAFLMKKSPIGEVSINNEKTTIMIEHKKESITKQEDILNTNILSPINGPIPLKDIATISEKQLQTEVFHKDGKETIQITAEASNEDLSKVSAEVNKAITDLDLPSGAKVNIAGATESMQENFTDLFKIMGIAIGIVYLIMVITFGQARAPFAILFSLPLAAVGGILGLIISGTPVDVNSLIGALMLIGIVVTNAIVLIERVQQNREHGMETREALLEAGSTRLRPIIMTAITTIVAMLPLLFGQSQAGSMVSKSLAVVVIGGLAVSTVLTLVVVPVMYELLDKIGRKRRSRRKINTSTETPDI

SEQ ID NO: 46696 - protein, 125 aa, Bacillus anthracis
  MISC_FEATURE (7)..(7): X=any amino acid
AVEKTMXLVTQLQKAGILDAGISLFAAKEDCSKIGCGALNREPVKNALNNMMGAGEALSSVDPEVTKQITSSLVTGLQFATDELNSGKKTKVMDFFKVLKDPDINRAITFGFSFLKAFGQGLEKK

SEQ ID NO: 46697 - protein, 218 aa, Bacillus anthracis
  MISC_FEATURE (14)..(14): X=any amino acid
MLLPQQINQFKSVXEKQTQDLEQPIQPHENEDRASERESVGELSSYDNHPADMATELYERQKDFGLIELWHKQLEDTKHALQKIEAGTYGICEVSGEEIPFERLEAMPTATTCIQHTTNKLNMETRPVEEEVLSPSFHKHDEDHSVEYDAEVAWQDVANYGTSETPSDLERQDSKNYNGMYVNSEENVGYVEDFENFIGTDMYGKNPQVFASEEHEEY

SEQ ID NO: 46698 - protein, 259 aa, Bacillus anthracis
  MISC_FEATURE (99)..(99): X=any amino acid
  MISC_FEATURE (104)..(104): X=any amino acid
  MISC_FEATURE (242)..(242): X=any amino acid
  MISC_FEATURE (259)..(259): X=any amino acid
LKKKLGLLAMVVALMAITAGCSEVNQPITPKSTGIWNEYFVYPLSQLFTYFANLFGSNYGLAIGVTTLIIYFCIITLMINQTKSTKSNAALPPTNGEVXKRKYXLLRFRHPRQKLPPEIDGGFFQKNGVNPLAGKVTHLWQMPYFIRVLHAIMRTSEISKHTFLWFDLGQADPYYILPVVAAITTFIQQKLAMAGTAGQNPQMANDALVNAIMILIFAINFPAALSLYGVVGNIFGIAQMYXSKGPEIKASKAGGSSKX

SEQ ID NO: 46699 - protein, 419 aa, Bacillus anthracis
MFKFNDEKGQLKCSFCGKTQTQVRKLVAGPGVYICDECIELCTEIVQEELAKDEEVEFKDVPKPVEIREILDEYVIGQDNAKKALAVAVYNHYKRINSNSKIDDVELAKSNIALIGPTGSGKTLLAQTLARILNVPFAIADATSLTEAGYVGEDVENILLKLIQAADYDVEKAEKGIIYIDEIDKVARKSENPSITRDVSGEGVQQALLKILEGTVASVPPQGGRKHPHQEFIQIDTTNILFICGGAFDGIEPIIKRRLGEKVIGFGSEKKNADVNEKHVLSHVLPEDLLRFGLIPEFIGRLPVIANLEPLDEDALVDILTKPKNALVKQFQKLLELDDVELEFEEGALIEIAKKAIERKTGARGLRSIIEGLMLEVMFELPSRKDIEKCILTKETVADNAAPKLVLQDGTVLDTKTSA

SEQ ID NO: 46700 - protein, 439 aa, Bacillus anthracis
  MISC_FEATURE (133)..(133): X=any amino acid
  MISC_FEATURE (138)..(138): X=any amino acid
  MISC_FEATURE (156)..(156): X=any amino acid
  MISC_FEATURE (258)..(258): X=any amino acid
  MISC_FEATURE (287)..(287): X=any amino acid
  MISC_FEATURE (380)..(380): X=any amino acid
  MISC_FEATURE (382)..(382): X=any amino acid
MPKPVIAIVGRPNVGKSTIFNRIVGERVSIVEDIPGVTRDRIYSAGEWLNHEFNIIDTGGIDIGDEPFLTQIRQQAEVAIDEADVIIFMTNGRDGVTAADEEVAKILYRSNKPVVLAVNKVDQSGKRRRDNLXFFMHXGFGEAFPNFGTPRIRFRXLLDEAAQHFPKIEEDGYDEDTIRFSLIGRPNVRKSSLVNALLGQERVIVSNVAGTTRDAVDTPYSKDGKDYVIIDTAGMRKKGKVYESTEKYRVLRALRSEXTFDVVFVRFKRWKRNYLNRLKKSPGYPSXIQDEPVLIRVNKWDAVKKDEKTMKAFEENIRAHFQFLEYAPIVFLSAKTRKRTQTLIPVIDEVNESHSIRIQTNVLNDVIMDAVAMNPTPNAXRXSSEDFYATQVAVKPPTFVVFVNDPELLHFSYERFLKNRLRESFGFVGTPIHIIARAR

SEQ ID NO: 46701 - protein, 165 aa, Bacillus anthracis
MHRIDPSKLELEERVVTINRVPKVVKGGRRFRFAALVVVGDKNGHVGFGTGKAQEVPDAIRKAIEDAKKKLIAVPLVGTTIPHTINGHFGAGESILKPAAEGTGVIAGGPVRAVLELAGVQDILSKSLGSNTPINMIRATVNGLSELKRAEDVAKLRGKSVEELL

SEQ ID NO: 46702 - protein, 442 aa, Bacillus anthracis
MSEIELKRNVIKTGSEKRIILRFILASLVGVFMFFVPVTINGASSIMIDHIVSWIRTSVPSVVPYYALLVMIMGAIYPFYTKKWNVSLVDICFSILKVVGVVFGVLYCLKVGPAWFFAPDVGPFLYEKLVISVSLLVPIGSAFLALLVGYGLLEFIGTFCRPIMRPLWKTPGRSAIDAVASFVGSYSLALLITNRVYKEGKYTTKEAAIIATGFSTVSATFMIIIAKTLDIMHLWNVYFWTTLVVTFIVTAITVRIPPLSRKPDTYVTEEGFPEPVYKEKMLERAWEDALEVSKSAPGIMKNIAVNLKDGFIMTMGILPSIMSVGLIGIVLAKFTPIFDWISYIFYPFTWVLQLPEAGLAAKAASVGIAEMFLPSLLVVSAPLVTKFVIAVVSVSSILFFSASIPCILSTDIPLKVSELIILYVQRTILTLLIITPIAYLLL

SEQ ID NO: 46703 - protein, 629 aa, Bacillus anthracis
  MISC_FEATURE (3)..(3): X=any amino acid
  MISC_FEATURE (96)..(96): X=any amino acid
EGXFMRQIFSDKKIDASLFLQMENLMYALLKEDDAYLEYGYKAYYDEIEKKVVISHFWDDRKEEDTVIGLKSEVFLKALGNKHYSGHDFNSFLCNXITRITLKKVLTQLFVLLEDLRVEEIVKNLRPGTKHVFKRRKEMYRNYFSSQNEINRVRNYHGDRLFCLCYLSLTSDKYEMFNNEYFEQIEAILHETFQARNTEDIMYIVEKIRYRLEELLESDMLNNYFGHAPLYLSVIADEKDSRPEKLTNDDTQIVDDENKNKMNESFSTWHRENKNNENENFLRFELESGTKTNMMGDTARESEDGDQALGSVQGTSQKSTQSNFDGADTEEARASHASSQNDGAYGKYNVGASHTFKEARKSTPDEKKDYQAIKSVVNKDVKELKKIIEKTIENKTNANSDKYYGRLRKKFLRIYTEKQPRMFYKKGQESQELDVAFQLLVDCSGSMYNKMEETKKSVVLFHEALKSLKIPHAISGFWEDASSAKPEDKPNVIHEVVTYKNSTLPNVGPEIMQLREEEDNRDGYIIRIVSEKLAKRPEKHKFLLVFTDGEPSALDYQQDGILDTHEAVKLARKSGMEVIGIFIEEGEAKEATYQLMKNIYNHHFLVANHAEDLRLKIKPLLKKLLLKTI

SEQ ID NO: 46704 - protein, 189 aa, Bacillus anthracis
MNREEALHIVKQQMHEKRYIHTIGVMETAIELAKLYGVDEKKAEVAAIFHDYAKCRAISEMEEIIKSEDLPKDLLCYNKELWHAPVGAYLVEKEVGITDPEILQAITYHTSGHEKMTMLDKVIYVADYIEPGRKFPGVEEARKLAYADINQALLFALKRTIQFLMEKNQTIYPLTFQTYNAVIKEEISK

SEQ ID NO: 46705 - protein, 487 aa, Bacillus anthracis
MTYYKDDSYALHTDLYQINMAYTYWKDGIHNRRSVFDLYFRKLPFENGYAVFAGLEKIVEYIENFSFTESDIAYLAELQFEEEFLHYLQNMKFTGTVRSMQEGEVVFNNEPLLRVDAPLGEAQIIETALLNIVNYQTLIATKAARMKHAANNDELLEFGTRRAHEFDAALWGTRAAFIGGFSSTSNVRAGKRFGIPVAGTHAHSFVQAYRDEYVAFKKYAETHKKCVFLVDTYDTLKSGVPNAIRVAKEFGDRIDFYGIRLDSGDMAYLSKKARKLLDEAGFTNTKIIASSDLDEYTIMHLKSQGAKINVWGVGTKLITSFEQPALGAVYKLVAIEDTDGKLNDTIKISSNPEKITTPGLKRIYRIINRVNDHAEGDYIALDYEEPGKEERLKMFHPVHTYISKFVTNFEARELHKDIFVNGERTYELPSILDIQKYNEQSLSLFWEEYMRTLNPEEYPVDLSQECWDHKMNYIQTVREQVEKNIQK

SEQ ID NO: 46706 - protein, 368 aa, Bacillus anthracis
  MISC_FEATURE (57)..(57): X=any amino acid
  MISC_FEATURE (221)..(221): X=any amino acid
  MISC_FEATURE (328)..(328): X=any amino acid
  MISC_FEATURE (365)..(365): X=any amino acid
MRYITAGDSHGTQLTVILEGVPAGLTLAAEHINKELLRRQKGHGRGSTYQIENEYSXNCSGVRHGLTLGLTHYLIVKNDDFKHWTKVMGAEPISEKESKEMKRTITKPRPGHADLNGAIKYGHRDIRNVLERSSARETTVRVAAGAVAKQILKELGVEIAGHVLEIGGVKAKHISNLSIEEIQIITENSPVRCLDKTVEQEMMDAIDNAKSSGDSIESYSXSHAEGMPIGVGSYVHYDRKLDAKLAGAIMSINAFKGAEIGVGFEAARQPGSKVHDEILWDEETRYTRKTNNAGGLESGMTTGMPIVAKKCNEPIPTLYNTVRQVLIXYERAIQASIERSDCCAVPPTRGINWNCWSMGNLHMHXSNN

SEQ ID NO: 46707 - protein, 73 aa, Bacillus anthracis
MRQKKEQKKQSKKKKTHIPFRLNVLFYIVFLLFSAIIIQLGKVQIIDGETYRNEVNKKEDVTVSTPVPRGKMF

SEQ ID NO: 46708 - protein, 118 aa, Bacillus anthracis
  MISC_FEATURE (7)..(7): X=any amino acid
  MISC_FEATURE (22)..(22): X=any amino acid
  MISC_FEATURE (33)..(33): X=any amino acid
  MISC_FEATURE (75)..(75): X=any amino acid
HLVEYIXNPIKKSLCQNINSLXVETNIAHPFRXGHGRTTRIWLDLIFKNELHQVVDWNKIDKEDYLLAMERSSSXRIEIKHLLQNALVDEIISREIFMKGINMSYYYEGYTEYDIEDL

SEQ ID NO: 46709 - protein, 467 aa, Bacillus anthracis
  MISC_FEATURE (96)..(96): X=any amino acid
  MISC_FEATURE (176)..(176): X=any amino acid
  MISC_FEATURE (184)..(184): X=any amino acid
  MISC_FEATURE (267)..(267): X=any amino acid
  MISC_FEATURE (319)..(319): X=any amino acid
  MISC_FEATURE (321)..(321): X=any amino acid
  MISC_FEATURE (365)..(365): X=any amino acid
  MISC_FEATURE (366)..(366): X=any amino acid
  MISC_FEATURE (380)..(380): X=any amino acid
  MISC_FEATURE (384)..(384): X=any amino acid
  MISC_FEATURE (388)..(388): X=any amino acid
  MISC_FEATURE (420)..(420): X=any amino acid
  MISC_FEATURE (433)..(433): X=any amino acid
  MISC_FEATURE (448)..(448): X=any amino acid
  MISC_FEATURE (452)..(452): X=any amino acid
MEFDTIAAISTALGEGAIAIVRVSGDDAVEKVNRIFKGKSLQRVPSPRIHYVHIVEFETNQVIEEVMVSIMRAPRTFTRENIVEINCHGGTVFGNXVLQLILAQGVRLPEPGEFTKRAFLNGRIDLSQAEAVMDLIPCKTDRAMNVAINQMEGRLSKLNGRLRPDILENVASCLRXNLDFPRNXWMWEEMTHNILIEESYTCFALKLARILETSKQGKDFRGRIVTAIIGRPNVGEVIAIKSLVQGKKAIVTDMAGTTRDVIERVRXCAWVPLKLIDTAGIRETEDVVERIGVERSKEMMSQADLVLVVVNYSENFNEXGXRAFRAVQGKDFIVIVNKTDLPQAIDMERVIELAAGNRCYSNIVXXKTKGLDDLKKGNSXFILXKNNXFCRCNICFNARHIGFFPPSRKTQLGDAIEGGXEKCVFQFDMVAKXFKQEPWENLGEITGXYGSXKALMDSCFSQFCFRK

SEQ ID NO: 46710 - protein, 138 aa, Bacillus anthracis
  MISC_FEATURE (34)..(34): X=any amino acid
  MISC_FEATURE (115)..(115): X=any amino acid
  MISC_FEATURE (129)..(129): X=any amino acid
  MISC_FEATURE (132)..(132): X=any amino acid
LQGINHICFSVSNLEKSIEFYQKILQAKLLVKGXKILAYFDLNGLWIALNVKKDIPRNEIKQSYTHMAFTVTNEALDHLKEVLIQNDVNILPGRERDERDQRSLYFTDPDGHKFXVHTGTLQNRVESFXEEXKPLTFY

SEQ ID NO: 46711 - protein, 442 aa, Bacillus anthracis
  MISC_FEATURE (3)..(3): X=any amino acid
  MISC_FEATURE (7)..(7): X=any amino acid
  MISC_FEATURE (59)..(59): X=any amino acid
  MISC_FEATURE (266)..(266): X=any amino acid
FFXAGIXRKCPHGKSSIEKHYKGALHEPKEQSRSIPDKAGNIIGTEKVPEGKSGNNLMXPVDMELQKKVEGSLEKNLRAFHSAEPMMDRAFVVMMNPKNGQILSMAGKKIVNKDGGMQIEDYALGTMTSSYELGSTVKGATLLAGYQTDTIKPYTHFFDAPMYFKGSSKPKKSWKDFGDIDDLRALQVSSNVYMFNTALKMAGINYVPNNPLDIKQETFNKMRYYFRQFGLGVPTGIDLPNEIRLVRWGRNGLTFPGFFTWINAIXQVRIPYTPVQLAQIYFNPLQTGGYRMKPQIVQEVREATHLGQRYVEKFIRSIDPVILNRVDMNPSYINHVKEGFRRVFQENDGTGTATFKGLPYKPAEKTGTAETVYGGESEIGRDENNNSKKCYNLTLAGYAPYDADPEVAFSVVVPWVNDDKSGINSAIGKEILDAYFELKAKR

SEQ ID NO: 46712 - protein, 147 aa, Bacillus anthracis
  MISC_FEATURE (67)..(67): X=any amino acid
  MISC_FEATURE (134)..(134): X=any amino acid
GSFRPVAGNLHLHRYYISPSLWLRQCPNRYTFRAGRNLPDKEFRYLRTVIVTAAVYWGFSSELRLRXPLSLTFQHRAGVTPYTSPYGFAESCVFAKQSLGPIHCGFSVKKAPLLPKLRGHFAEFLNPEFSRTPXGFSPRLPVSGLRY

SEQ ID NO: 46713 - protein, 267 aa, Bacillus anthracis
  MISC_FEATURE (7)..(7): X=any amino acid
  MISC_FEATURE (62)..(62): X=any amino acid
  MISC_FEATURE (72)..(72): X=any amino acid
  MISC_FEATURE (167)..(167): X=any amino acid
LGGYIMXLLPRENFVVMGVANKKKIAGGNGRSLLNAGAKLIFSYGGEKVKEKSFGEFTGTLXRTESLGIPWXGTKGRKNFRPGFETIKPEIGTIPRGCTPGMAFANRDDLKGEFVDTSRDGFLLCPKIRAFSFTAVARGTKKVMTEGGNYFSVTYFLGGEARLEKTXNVYGVCRKLPLRSEPGKYLANGFRPTTAFAVNAILQGPIWYVICQGVGAFNSILREIEERAPLRRTTTQEEVGDTAVFLFSDLARGVTGENIHVDSGYHI

SEQ ID NO: 46714 - protein, 148 aa, Bacillus anthracis
MKNKFHHIVRAVMIKDKKLIVAEYIGHHYFLPGGHVEVGESAESALIRELQEELGVNCSIKQFLGVIENQWQDKEMLHHEINHIFEIDSEELHIDFIPKSKEPHLAFHWIDYNRDALHTYKIMPAPSVKELLERKLSDELLNCWISNF

SEQ ID NO: 46715 - protein, 57 aa, Bacillus anthracis
MSKTVVRKNESLEDALRRFKRSVSKTGTLAEARKREFYEKPSVKRKKKSEAARKRKF

SEQ ID NO: 46716 - protein, 72 aa, Bacillus anthracis
  MISC_FEATURE (68)..(68): X=any amino acid
  MISC_FEATURE (69)..(69): X=any amino acid
SAANLYFAKKVSQLTLAESAMMAAVVKAPAYYSPAQNYDKAVERRNVVLRLMEKEGYINLLQVDASSXXEIS

SEQ ID NO: 46717 - protein, 513 aa, Bacillus anthracis
MVSSKYMIGVDIGTTSTKSVLFSTDGSVIASHGIEYPLYSPTPETAEQDPEEIFRAVIHTIKETVQTSSVQPHDILCVSFSSAMHSIIAVDEKGKPLTRCITWADNRSASWAEKIKNDMNGHEIYLRTGTPIHPMSPLSKLVWLQNEQAELFAKTYKFISIKEYVFYKLYKEYVIDYSIASATGMFNLKSLKWDEEALHVAGITDDKLSKLVPTTHSLTGLDEELANEMNVLVSTPFVVGASDGILSNLGVNAIDPGVVAVTIGTSGAIRAVTNRPVTDPKGRIFCYALTEDHWVIGGPVNNGGMIFRWARDQLGTSEIELAKRLGKDPYEVLTEIAAKVNPGSDGLLFHPYLAGERAPLWNANARGSFFGLGLHHKKEHLIRAVLEGVIYNLYTVLLALKELIGEPKKIQATGGFARSELWRQMMADIFHQDVYVPESFESSCLGAAILGLYSLGEVDTLHVVSEMVGANFHHEPNMESVEKYKDLTPIYIRLSRQLEEEYESIADYQKKWV

SEQ ID NO: 46718 - protein, 145 aa, Bacillus anthracis; identical to SEQ ID NO: 45449

SEQ ID NO: 46719 - protein, 291 aa, Bacillus anthracis
MICSMTGFGRSKVESDTFQITVEMKSVNHRFLEMSIRLPKQMMVFEDKIRKIIAQQVRRGRIEVSISIAGEGLVERKLSVNWSLLEQYQSIMEDIKGKFQLQDSITLEQLMAMPEVTAIEEVENVNEQFENSLYEAVRQAAHMLKTMRDGEGERLHKDIAYRLQEIHNCVNAIIPHAPIVTKKYRERLENRLKELHNQDLDEQRLLTEVAIFAERCDIHEELVRLQSHLEQFRETLQIEEPVGRKMDFIVQEMHREINTIGSKANDLTISKYVVEMKNNLEKIREQVQNIE

SEQ ID NO: 46720 - protein, 380 aa, Bacillus anthracis
  MISC_FEATURE (366)..(366): X=any amino acid
MSHSIEQLSITTIRTLSIDAIEKANSGHPGMPMGAAPMAYTLWTQFMKHNPNNPTWFNRDRFVLSAGHGSMLLYSLLHLSGYDVTMDDLKNFRQWEGKPPGHPEYGHTAGVDATTGPTGQGYATAVGMAMAERHLAAKYNRDAYNIVDHYTYAICGDGDLMEGVSAEASSLAAHLQLGRLVVLMISNDISLDGDLNRSFSESVEDRYKAYGWQVIRVEDGNDIEAIAKAIEEAKADEKRPTLIEVRTTIGFGSPNKSGKSASHGSPLGVEETKLTKEAYAWTAEQDFHVAEEVYENFRKTVQDVGETAQAEWNTMLGEYAQAYPELANELQAAMNGLLPEGWEQNLPTYELGSKAATRNSCKCCNXCNCRVVPSSSGSSS

SEQ ID NO: 46721 - protein, 73 aa, Bacillus anthracis
MGWLIIVAIKPLYENLTGHGFSLLLAGGILYSVGAIFFLWEKLPFNHAIWHLFVLGGSAMMFFCVLFYVLPTA

SEQ ID NO: 46722 - protein, 471 aa, Bacillus anthracis
  MISC_FEATURE (88)..(88): X=any amino acid
  MISC_FEATURE (100)..(100): X=any amino acid
  MISC_FEATURE (170)..(170): X=any amino acid
  MISC_FEATURE (180)..(180): X=any amino acid
  MISC_FEATURE (249)..(249): X=any amino acid
  MISC_FEATURE (257)..(257): X=any amino acid
  MISC_FEATURE (325)..(325): X=any amino acid
  MISC_FEATURE (372)..(372): X=any amino acid
  MISC_FEATURE (391)..(391): X=any amino acid
  MISC_FEATURE (392)..(392): X=any amino acid
  MISC_FEATURE (470)..(470): X=any amino acid
DKAFEGQLQVLLEEKELSTKKKAISKVHSLGKTDVKRYYFVGLGRKKSFTKEKFTVPVLVKTFKNLPSRQSTRMPQSFLDSFRNKKIXPHDVRPNLGQKXKGLGTYELQTYKSDKKDRVELEKFTAITAEDAPGIEGAFTSGYVHGGPPNSARTLVNMPPKRINATKPCXVAFELAGKVXYGIIKFLRKKRGNELGYGVHYLAVTQGSVGAPKNDALIYKEKEEWTDVIGFVEKGITYDPGGYSLKTTXGYGRYERXMAGAAAVLGAMEIIGELPPRAKCDRVIPSTDNVVSGTAFKPDDVITSMSGKTIEVLNTDAEGRISIGXRVLRMRKNRCKYLIDVCDITRWCNVCTGNHTTGAMTKHEEVVLSKYXRHSMETDDSIWQFTDFESXXRARETSKFADLNNSPGPRRTCVYGRSIHRDCAEDTLWVHLDIAGTSDSSGAHDLGPAGATGAMVRTLATLVERFGEEXD

SEQ ID NO: 46723 - protein, 262 aa, Bacillus anthracis
  MISC_FEATURE (100)..(100): X=any amino acid
  MISC_FEATURE (192)..(192): X=any amino acid
  MISC_FEATURE (224)..(224): X=any amino acid
  MISC_FEATURE (232)..(232): X=any amino acid
  MISC_FEATURE (243)..(243): X=any amino acid
  MISC_FEATURE (247)..(247): X=any amino acid
  MISC_FEATURE (255)..(255): X=any amino acid
LSLLLFLGGCDKKLAVLNPQGPVAKAQYDLIVWSFLLMSLIIAIVFILFTVILIRYREKPENMDYEPPEQHGNTLLEIIWTLVPVIIVIALSIPTVKATXCFAKRFRKSPNLFNQLENYVTSANWKWLFSYPEEKIETVNYLNIPLGVPIQFKLTSVGPMNAFLVTKLGGMKYTMDGMIMDLYLQADKPGSXLSRNANFFWWRITHWEFESESKTKEKYDKWGXEIQQTAPXLTEDKYHENCXNLVXLGRMTFLXPSLSYVD

SEQ ID NO: 46724 - protein, 40 aa, Bacillus anthracis
MGYEVTATGRNKTIGKVLEQNGIKFVHCPLEDREPVVTSL

SEQ ID NO: 46725 - protein, 368 aa, Bacillus anthracis
MTETIKCIGCGVEIQTEDKNEVGYAPASSLEKEQVICQRCFRLKHYNEIQDVSLTDDDFLRILNGIGKSDALVVKIVDIFDFNGSWLPGLHRFVGNNKVLLVGNKADLIPKSVKHDKVKHWMRYSAKQLGLKPEDVFLISAAKGQGIAELADAIEYYRGGKDVYVVGCTNVGKSTFINRMIKEFSDETENVITTSHFPGTTLDLIDIPLDEESSLYDTPGIINHHQMAHYVGKQSLKLITPTKEIKPMVFQLNEEQTLFFSGLARFDYVSGGRRAFTCHFSNRLTIHRTKLEKADELYKNHAGDLLSPPTPEELENMPELVKYEFNIREPKTDVVFSGLGWVTVNEPGAKIVAHVPKGVSVSLRKSLI

SEQ ID NO: 46726 - protein, 438 aa, Bacillus anthracis
  MISC_FEATURE (73)..(73): X=any amino acid
  MISC_FEATURE (80)..(80): X=any amino acid
  MISC_FEATURE (201)..(201): X=any amino acid
  MISC_FEATURE (202)..(202): X=any amino acid
  MISC_FEATURE (282)..(282): X=any amino acid
  MISC_FEATURE (286)..(286): X=any amino acid
  MISC_FEATURE (318)..(318): X=any amino acid
  MISC_FEATURE (319)..(319): X=any amino acid
  MISC_FEATURE (343)..(343): X=any amino acid
  MISC_FEATURE (428)..(428): X=any amino acid
KRKQNFTCQECGYQSPKYMGKCPGMGQWNTLVEEMEPGCIIKTPLIMPMAFQQKVPKPRRLTEVGTKSEARIXNKIPRIXRVLGGGIVDGSLVLIGGDPGIGKSTLLLQISSQLADSSYDVLYISGEESAKQIKLRADRLHVNGSNLFVVSETDLQRIATTHEEMNPAFGVIDSIPTIHLPEVTSAAGECGHSRECTSGNXXNLQKTKGIPIFIVGHVTKEGAIAGPRMLEHMVDAVLYFEGDRHHTYRILRAVKNRFGSTNEMGIFEMKELGLAEVLNPSXNFPXGKPSGGCGINSGCFMEGTRPVLVEIQALNLSXXFWKPRRMATGIDHTRVSLYYGGCXKKEQLIIANQDAYLKVAGGLKLDEPAIDLAVALSIASSFRDKSTAPTDAVIGEVGLTGRNCQSIKNLTTCTRSAKLGFQRAIIPXKKFGRIDIPR

SEQ ID NO: 46727 - protein, 299 aa, Bacillus anthracis
  MISC_FEATURE (126)..(126): X=any amino acid
  MISC_FEATURE (231)..(231): X=any amino acid
  MISC_FEATURE (234)..(234): X=any amino acid
  MISC_FEATURE (285)..(285): X=any amino acid
NVKKLLQLFVGYYKMERNYSKYPIASYQNDLRHFVQFMEREGYISFLDITYADVRLYLTTLPDEKLARKSVARKVSSLRSYNRFLMGGRYRKNNRFALRSLPKKELSNPQSFLYAEELEELFEVSXLRNPVGQRNQALLELMYATGIRVSECVNLQLTDIDFAVGTILVMGKGKKQRYIPFGSYAQDALITYIENGRKQLAEETEETSHMVFLNAKSTPLDSRGVRYVSKXTHXEASLTMRISPHILRHTFATHMLDEGADLRTVQELLGHENLSTTQIKYACLXRKIRSVYMKHHPRA

SEQ ID NO: 46728 - protein, 162 aa, Bacillus anthracis; identical to SEQ ID NO: 45376

SEQ ID NO: 46729 - protein, 156 aa, Bacillus anthracis
MSWSKVKYFFFDTPEEKEAAQYSYEKEQTDMKKQQDPPEQQDVTFPKAQPKQNVVSIETAKQSSKVVLLEPRTYSEAQGIADHLKGRRAVVINLQRMSTDQAVRIVDFLSGTVYAIGGDIQKIGPKTFMCTPENVDIVGAISELFGEEDDTNIKRW

SEQ ID NO: 46730 - protein, 1053 aa, Bacillus anthracis
  MISC_FEATURE (217)..(217): X=any amino acid
  MISC_FEATURE (222)..(222): X=any amino acid
  MISC_FEATURE (286)..(286): X=any amino acid
  MISC_FEATURE (288)..(288): X=any amino acid
  MISC_FEATURE (293)..(293): X=any amino acid
  MISC_FEATURE (300)..(300): X=any amino acid
  MISC_FEATURE (317)..(317): X=any amino acid
  MISC_FEATURE (321)..(321): X=any amino acid
  MISC_FEATURE (346)..(346): X=any amino acid
  MISC_FEATURE (383)..(383): X=any amino acid
  MISC_FEATURE (585)..(585): X=any amino acid
  MISC_FEATURE (593)..(593): X=any amino acid
  MISC_FEATURE (608)..(608): X=any amino acid
  MISC_FEATURE (617)..(617): X=any amino acid
  MISC_FEATURE (624)..(624): X=any amino acid
  MISC_FEATURE (635)..(635): X=any amino acid
  MISC_FEATURE (662)..(662): X=any amino acid
  MISC_FEATURE (666)..(666): X=any amino acid
  MISC_FEATURE (997)..(997): X=any amino acid
  MISC_FEATURE (1011)..(1011): X=any amino acid
  MISC_FEATURE (1036)..(1036): X=any amino acid
  MISC_FEATURE (1042)..(1042): X=any amino acid
MYASFSCNAIGNASAKLADGTYDINYVIQKAENDSASMANDYFEKPAKLIVKNGEMRVQVPMNHSAWITEFKAPENGNFVDAKVVSKDESADKRTVEFKVDDLSNPAVVKFHVVVPKCNYAPPYTFVFAFDANVKAVGGDNGVAATTKNNDQAKTDTQVKEEKTKVESKGNSKEVNKETKNENGKAEKTDNPKTGDEARIGIVCSVNSYFRCFLNSXSEIEXINLLKGDEYMFKQFKMIIAVFAVFITFIATLGLPDAKAATKLADGKYNICFYCMEKAIKNESVXEXIRYFXKAPATIXRFKKWGKQYVSFKVKAXYFYXKFPVEKDGQFVETTVLSENKKDNFXSSRFEVADLVKKLNGKVKINIPINNYNASYDISLCIXWDTVLNNFQKGGVFHLTRLYKKSWLLCFLMIFTFVSTLQPLAVQAATKLADGEYSTWVQSFKRTSDEESMMNQYSVSPGTLKVKDGKKKVSFTLTNSSWITKFETEKAGKLVATNVISEDKEKDTRVVEFDVEDVEKVLNAKVKVDIDFLNYHHEYDVRIAFDQNSITPIHVEQPNEKEDPANKPDPNEKPDFKSEARPKAXPRSTTKFXHNLKMESQHSHLKCXNIQPDEEIXDEYFTWXIPGVLKIGNRXEKSNCYLKKVAPLFKNFQTEKRWCICXRKKXKVKIKKQFQGLVEFEVADLSKKLNTKVFIEMSSRNYKQTHDVQLLFEQDKLEQIKNEEKQPEVEKPEVEKPEVEKPEVEKPDENKKTDAETIKDGEYSINFKALKDQTDEISMMNTYTKSPGLLKVKDGKKYVSFTLTNSSWITKFEFEKNGSFVDANVISEDKKADTRVVEVAVDDLSKKLNAKVKVDIDSMNYHHFYDIQFAFDKGSIKTVRHLQAETTTKGGINNQGGNNNHDDNKTIDPNALKDGEYSIGFKVLKDKTEEISMMNTYTKNPGVLKVKDGKKYVSFTLTNSSWITKFEFEKNGAFVDAKVLGTNKEPDPKSSRSGSSXFIEKVKCKSESGYXFHELSPISMIFQFAFDKRNIKSLWXPRWRYXPRWNGIPGGNA

SEQ ID NO: 46731 - protein, 322 aa, Bacillus anthracis
MFKIGYRTVKTAIGTGAAVFIAQLLGLEFYSSAGILVILCVQNTKRKSLQVSLHRFLACVLSMVFAFCIFETIGYTPLAISVLLLTFIPTAVMLKIQEGIVTSSVIVMHLYSLKQITWLIVGNEIAILTIGISVALLVNMYMPSSENKLKEYQEKIENNFKTILFEMVVYLRNRESSWSGAELIETEQMLNEARDLSFKKLENAFMREDDYYYRYFNMRMQQFEILERMIPLAASLSWTYEQADMIADVVENIGNAISPQSTGVISLRQLQEMRELFRDMPLPATREEFEIRAKLVQLVYEMEQYLLIKSRFKGKDNIKELI

SEQ ID NO: 46732 - protein, 115 aa, Bacillus anthracis
GKVMIEQGNFIKFHVRVKLEVPESLTHPFIGTEDKRFYHHNGLDYIAIIRASVENIKAGGVVQGGSTITQQLSKNAFLTNERTFSRKWKEIFYTKKIERTFTKDKVKKLYVSNIY

SEQ ID NO: 46733 - protein, 307 aa, Bacillus anthracis
  MISC_FEATURE (21)..(21): X=any amino acid
  MISC_FEATURE (28)..(28): X=any amino acid
  MISC_FEATURE (71)..(71): X=any amino acid
  MISC_FEATURE (175)..(175): X=any amino acid
IEGVVLLHKPKGMTSHDCVFXLRKIIAXENKMGPTGTLNPDVTRSIVEFVLGRATKIAQFFTSGTKTYEGXVTLGFFNTTEDASGEVVETKYVDRVITRKEVEEGSATLTGTIEQMPPMFSAVKVNGKKLYEYARAGQEVERPVRTITIHEFVLLDDREVFEGENISFSFTCNVXKGTYVRTLAVMIGEKLGFPSHMSHLVRTASGEFLLEDCISFEEIEENVQNGTVESIFISIDEALSKFPKMVVDEKQAEKIKNGMFLKNELQITAPFITVFDKNDCSLGNFRSTFQSTLVMLKPMKVLVNNQE

SEQ ID NO: 46734 - protein, 291 aa, Bacillus anthracis
MKDYLVKALAFDGEVRAYSVRTTNTVSEAQRRHDTWRTASAALGRSLTAGTMMGAMLKGDQKLTIKVEGNGPIGPILVDAHANGDVRGYVTNPHVDFEGTEQGKLRVYQAVGTEGFVTVIKDIGMREPFIGQSPIVSGELGEDFTYYFAVSEQTPSSVGVGVLVNGDDSILAAGGFILQIMPGAQEETISFIEERLQKIPPVSTLIEQGLSPEELLYAVLGEDKVKVLETMDVQFNCTCSRERIESVLISLGKTELEQVREEEEETEVHCHFCNERYKFSKEDITNLIENL

SEQ ID NO: 46735 - protein, 532 aa, Bacillus anthracis
  MISC_FEATURE (202)..(202): X=any amino acid
  MISC_FEATURE (205)..(205): X=any amino acid
  MISC_FEATURE (219)..(219): X=any amino acid
  MISC_FEATURE (288)..(288): X=any amino acid
  MISC_FEATURE (488)..(488): X=any amino acid
GYTKWGKRILPIAIKKKGWWLGETIGRKCLEERAEKYGDQLAGVRGNNEYNYSELDKKVDRLASGLLNLGIKPEDRVVIQLPNVIEFFEMCFALFRIGALPVFALPSHRSSEISYFCEFGEASAYVISDKALGFDYRKLAREVKEKVPTLQHVIVVGEKEEVGNISDLYIDPVSICRVQPSDVAFLQLFRKGQPGLSNIIPXNGXGLIYSFRVSAEIWXFKCESVYMAVLPVAHNYPMSSPGTFGTFYAGGKVVLATGGSPDEAFALIEKEKVTITALVTALTMIWLXRCIFPYNDLSRPKMDSGGGPNLMLELPKRIRPTFGCTLQQSFGYAARIVNYTRLDDPEEIIIHTQGRPMSALDEVRVVDEYDNDVKPGEVGSLLTRGPYTIRGYYKAEEHNARSFTNDGFYRTGDLVKVNEQGYIIVEGRDKDQINRGGEKVAAEEVENHLLAHDAVHDVAIVSMPDDYLGERTCAFVIARGQAPAVSDXKRFLRERGIAAYKIPDRIEFIESFPQTGVGKVSKKELRKVIAEK

SEQ ID NO: 46736 - protein, 473 aa, Bacillus anthracis
MMNQNQGLKRELKSRHIFMIALGGVIGTGLFLGSGYTIHEAGPGGAIVAYLVGGFVMYLTMLCLGELAVAMPDAGSYQTYATKHISPAAGYVVGWMSWLNWSATIGIELIAVSILMKRWFPDVPSWIWCVVFAVLLFAINALSSRSFAEVEFWFASIKVITIIAFIILGGAAMFGFLDMKGNEPAPMFSSFTDYGGLFPNGLSAILITMIAVNFSFQGTELVGIAAGESENPEKTIPKAINNTVWRILVFFVLSIFILAGLFPWQQAGVIESPFVVVFDKIGIPYAADIINFVIITAVLSVANSGLYATSRMLWSMSNQGMISPIFGKLSKNGVPIYALIVSTIVGCLSLLSGIYAEDTVYLWLLSIAGFGAILVWASIALSNLLARRSYIKQGGDVKDLKFKTPLYPFVPLLALVLNVTVIVGMAFIPEQRMALYCGIPFMIVCLLFYRATRNKAHKVEHIEKTDTTEVDSL

SEQ ID NO: 46737 - protein, 327 aa, Bacillus anthracis
MITLQRTPLFDVYAKYGGKTIDFGGWELPVQFSSIKEEHEAVRTAAGLFDVSHMGEVEVKGVDRFRFDVDVVTNDVSTLKVGGRQYTAMCYENGGTVDDYLIYQTCEERLFLVINASNIEKDYEWLASHVIGDATVVNVSSEVAQLAIQGPKAEGILQKVVSEDLKEIKFFKFKNDILVDGIPALVSRTGYTGEDGFEIYCKSEDAAKLWEKLLEVGAEEGLKACGLGARDTLRFEATLPLYGQELSKDITPIEAGIGFAVKTNKEADFFGKATLKEQKENGAPSQISGIQSNGTWIPRTHYPVFIGEEKIGEVTSGTQSPTLKKSI

SEQ ID NO: 46738 - protein, 303 aa, Bacillus anthracis
  MISC_FEATURE (111)..(111): X=any amino acid
  MISC_FEATURE (188)..(188): X=any amino acid
SVQHLIERNTKQRKKTPRNHRIVPFILKVIASVSIMTTLGILFYAFKMKTIMFFQKIPLQSFLTEKEWLPFFEDPKFRILPLIWGTGPGTASAMVLTIPIGLTGGGFLNEXAFKGARKVLRPMLELLARIPTVCIWFFALTVDTPLFPTDNTGLTVFKCDLSRYVIGFMMIPTIASLSEDAMRSVAKXTKEASVTLGSTPVENVKTSRLPSAFTGMMASNILPASRVIGETHDRCNCSGSTPNVSLDPTESIQTLTAYIVQVSLGDAPHGTITYYSMYAVGATLFLFTFIMNIISQFIMRRFR

SEQ ID NO: 46739 - protein, 635 aa, Bacillus anthracis
  MISC_FEATURE (150)..(150): X=any amino acid
  MISC_FEATURE (185)..(185): X=any amino acid
  MISC_FEATURE (197)..(197): X=any amino acid
  MISC_FEATURE (203)..(203): X=any amino acid
  MISC_FEATURE (210)..(210): X=any amino acid
  MISC_FEATURE (212)..(212): X=any amino acid
  MISC_FEATURE (314)..(314): X=any amino acid
  MISC_FEATURE (318)..(318): X=any amino acid
  MISC_FEATURE (344)..(344): X=any amino acid
  MISC_FEATURE (345)..(345): X=any amino acid
  MISC_FEATURE (364)..(364): X=any amino acid
  MISC_FEATURE (471)..(471): X=any amino acid
  MISC_FEATURE (473)..(473): X=any amino acid
  MISC_FEATURE (547)..(547): X=any amino acid
  MISC_FEATURE (554)..(554): X=any amino acid
  MISC_FEATURE (555)..(555): X=any amino acid
YDESQIQVLEGLEAVRKRPGMYIGSTSGKGLHHLVWEIVDNSIDEALAGYCDEINASIQEDNSIPVTDNGRGIPVGIQEKMGTPAGEAIMTALPPGGKFGGGRNKVSGGLHGGGASVINALFTELEVFVHREGKIHYPKFRKRYSPVRIXKAFGDPDPTGTITRFKPRSPKFFRETTRIPNLLHXPNSYVRNLPIFXSQKLNXPIEDKRXTXAKKEFHYEGGIKSYVEHLNRSKQPIHEEPVYVEGSKDGIQVEVSLQYNEGYTNNIYSFTNNIHTYEGGTHEVGFKTALTRVINDYGRKNSILKDADSNLTVXGRSXTFNCNVSIKHPNPQFERTNEDGNWEXXSETITESVVSRSILKSSYXKNRIVSRKILQKRTMGTPCTCFNQKPLNLTRPRTPLKVSSLPVKLAECSFQKSRNLGKFSFGKGGTPPGGSAKTKGGWSVPFPGFLPPGRGNFLTVEKGKIKKNLLXRXVRYIIYCNWYEHWRDFDIEKARYHKVIIMTDADVDGAHIRTLLLTFLLSLYASNIVPWLIYIAQPPLFKVQQGXKNSICLXXERLEKILAELPAQPKPGIQRYKGLGEMNPTQLWETTMDPEVRSLLQVSLQDAIEADETFENFNGGIKESHVVTLSQENGK

SEQ ID NO: 46740 - protein, 299 aa, Bacillus anthracis
  MISC_FEATURE (218)..(218): X=any amino acid
RLKGIIMVVIGACLWGLSGTAAQQLFQYDNISTEWLVTIRLLISGIILLIIASFGTSKKEIFGIWKQRSDAYKMILFGLFGMLAVQYTYFASIKEGNVSAVATLLQYLAPIFITVYLLFKWNVRPSKIDFISITLSLVGTFLLLTNGSVHNLAVSTPAIIWGILSGLSLAFYSLYSKGLLERWSSSVIVGWGMIIGGIGVTIVHFYFYEKNLFYYQLXNMVKLSTLPLITFVVILGTLYWFYLYLDSIRYLTPKETTLFGCTEPLAAIITLLHLYYMYPFQSFQLLGAFCVIVMVLILS

SEQ ID NO: 46741 - protein, 61 aa, Bacillus anthracis
AGRKQVLQMVKEGYVNSVNGEKVAVQAQTICLHGDGEKAVQFARKIYRTFEHNKISICAPK

SEQ ID NO: 46742 - protein, 462 aa, Bacillus anthracis
MSKLWGGRFTEEAEAWVEEFGASISFDQQLVNQDINGSIAHVTMLAKQGIVTKEEAEKIKIGLQYLLEEAKQNKLHFSVEAEDIHLNIEKMLMEKIGEVGGKLHTGRSRNDQVATDMHLYLKEKVEHIIKAIKQLQTVLVHQAENNIETIMPGYTHLQRAQPISFAHHILAYFWMLERDVNRYEDSLKRINISPLGAGALAGTTFPIDREYSAELLGFNGIYENSLDAVSDRDFILEFLSNSSMLMMHLSRFCEELILWSSQEFQFIEMSDQYATGSSIMPQKKNPDMAELIRGKTGRVYGNLFSLLTVMKGLPLAYNKDLQEDKEGMFDTVKTVEGCLHIMAGMLETMTVNKEKMGQAVTQDFSNATEIADYLANKGLPFRQAHEIVGKLVLHCTQKGIYLIDVPLATYKEMSALFEEDLYEVLSPYAAVKRRNSAGGTGFEQIEKALEKAKGLTKEAIKN

SEQ ID NO: 46743 - protein, 327 aa, Bacillus anthracis
  MISC_FEATURE (307)..(307): X=any amino acid
  MISC_FEATURE (320)..(320): X=any amino acid
MDTLLILTVLVVICALAFDFINGFHDTANAIATAVSTKALKPRHAIVMAAIMNFLGAMTFTGVAKTITKDIVDPFALQNGSLVILAALLAAIAWNLITWYYGIPSSSSHAIIGSIAGAAIAAAGISSLNLKGFIKIIEALIISPIIAFVIGYTVYSIFKVVFKNFNLTKTNKNFRIFQIFTAALQAYTHGTNDAQKAMGIITMALMANNYHTSSDIPFWVQLSCAIAMGLGTSVGGWKIIKTVGGQIMKIRPVNGVAADLSSSLVIFGATFIHLPVSTTHVISSSILGVGASHRVKGVKWGTAKRMXLLGLSHFLFQLHXLLYFTLY

SEQ ID NO: 46744 - protein, 418 aa, Bacillus anthracis
MDRFHSISEATNGLGNTKLLNEALYDYVTIGNNEGITLAKEHLNHLYDDAEFEVLVANLFEKEGVRPEWAKPYKLHTTTDGITIAFIGLTVAYPEFYQMLDWHIEDPIEHLESILEEVRDEAHITVVLSHLGKSMDEHMAEHYDIDVILGAHTHHLFERGVLMNNTLLCCCEKWGRYVGHVQLTVDKKTKKLLKKDGRAIKTDRLGAYSKPLSTIEALQEESTHIMEEPVVHLKESLPVDWFHETAFSHMLANALKTWCGAEIGMVNAGVLLEGLDEGVVTRGDIHRICPHPINPCLLKVPGKTLREVILKARRPNMENLEVKGFGFRGKVMGKMIYAGVEVIPDTIPGNKILLEDVLINGESLELDRIYTVGTIDMFTFGYLYPELSTLSNKQYYMPELLRDVLTDVLITHTSSVKL

SEQ ID NO: 46745 - protein, 136 aa, Bacillus anthracis; identical to SEQ ID NO: 45595
  MISC_FEATURE (22)..(22): X=any amino acid
  MISC_FEATURE (24)..(24): X=any amino acid
  MISC_FEATURE (129)..(129): X=any amino acid

SEQ ID NO: 46746 - protein, 78 aa, Bacillus anthracis
MKKIEVYTQPDCPPCVIVKEFLKHNNVVYEEFDVKKDAAARNRLLYDYDSYSTPTVVINGEVVAGFQIEKLQQLLNIE

SEQ ID NO: 46747 - protein, 191 aa, Bacillus anthracis
MGRKISFNKERALNKAMHLFWEKGYDATYISDLIETMGISRSTLYDSFGDKDALFKLVLEQYKNYGSQKRNLLFSDTNTKESLKSFFYQHIEKCYSDDIPKGCIITNSSLLIGQIDPSIEEILINDFNELEKAFKQVIEEGKKKGEISQEDDTELVAYSLLSLNHSLNLMSMYKKEKKLAYNLVDKAIADL

SEQ ID NO: 46748 - protein, 209 aa, Bacillus anthracis
VEELGTITNMQQSGEAMKLTIHANKILSDVHLGDSIAVNGICLTVTSFTTTSFSTVDAMPETMKSTSLRLLKSHSKVNLERAMAANGRFGGHFVSGHIDGIGTILNKKQHYNAIYYKIAISDELLRYCLHKGSIAVDGTSLTIFDIDESSITISLIPHTVSESVIGEKNAGDIVNIECDMIGKYIERFITKPVKRTGSMTENFLQENGF

SEQ ID NO: 46749 - protein, 439 aa, Bacillus anthracis
MNGNTAKNIEFQVDNTTVKNEKYLDPKKWHKQDTTWALSLFGTAIGAGVLFLPINAGSGGLLSLLLITILAYPVMYYSHRALAKMIYASNSADEGITGTIREYFGNKASIIFNIVYFVSIYTIVLMYSVALTNTASSFIVHQLHMPEPPRAILSLVLVIGLITILNFGQDITVKIMSMLVYPFIASLLFIAISLIPQWNTSMLSFSSVSTASTGTGYFGTIWMILPIIVFSFNHSPMISSFVMKQRATYGIDATDAKCAQIQKVCYIMTFAVVMFFVWSSTLSLTPDDLKVAKEQNLSILSYLANELNSPVITIAAPIIAFVAITKSFLGHYIGAYEVMRDMIIKSGKKRGKDIGEKTVKTMILTFVVLTCWYVAYTNPSILGIIDALSGPLVAAILCLLPMYAIRKVPVLAKYRGKMSNVFVIIIGILTVLASIKSLF

SEQ ID NO: 46750 - protein, 243 aa, Bacillus anthracis
  MISC_FEATURE (28)..(28): X=any amino acid
  MISC_FEATURE (155)..(155): X=any amino acid
  MISC_FEATURE (165)..(165): X=any amino acid
  MISC_FEATURE (195)..(195): X=any amino acid
  MISC_FEATURE (202)..(202): X=any amino acid
  MISC_FEATURE (221)..(221): X=any amino acid
MTKSMEFLYPEKCLSKASTGDPCCKPNXKCPFIARGDLKSGTILSENKIAADFSVSRSPVREALKLLVSENIIRLERMGAVVIGLTRKEIEEIYDVRLLIETFIFERLGKMDTNDLVRELNKIMEMMKIRHKYHDFDEFSNQDLYFHERIIRTHXASSIPDDLKXFKSCYGKLIPFINAYSFQEKIPRTLERIIXNLELFIXSNRIKRSGLLIEGSTSKLXDGQGKVEKPLDVTTNVIKGVEQ

SEQ ID NO: 46751 - protein, 168 aa, Bacillus anthracis
GRKISFNKGVALNKAMHLFWRKGYDATYISDLIETMGISRSTLYDSFGDKDALFKLVLEQYKNYGSQKRNLLFSDTNTKESLKSFFYQHIEKCYSDDIPKGCIITNSSLLIGQIDPSIEEILINDFNELEKAFKQVIEEGKKKGEISQEDDTELVAYSLLSLNHSLNL

SEQ ID NO: 46752 - protein, 235 aa, Bacillus anthracis
MQKVTIQEAEHLLQEIISEEDDRFQILIKDERKGVQKLISKWYKQKELAQKEKEKFLEMSKYENALREKGLTYIAGIDEVGRGPLAGPVVTAAVILPEDFYIPGLNDSKKLSEAKRERFYGEIKAKAIAIGSGIVSPASIDEINIYQATKPAMVDAIANFICTPEYLLIDAMKLPAPIPQTSIIKGDAKSISISAASIIAKVTRDRMMKELGEKYPAYGFEQHMGYGTKQHLEAI

SEQ ID NO: 46753 - protein, 974 aa, Bacillus anthracis
  MISC_FEATURE (68)..(68): X=any amino acid
  MISC_FEATURE (108)..(108): X=any amino acid
  MISC_FEATURE (285)..(285): X=any amino acid
  MISC_FEATURE (459)..(459): X=any amino acid
  MISC_FEATURE (634)..(634): X=any amino acid
  MISC_FEATURE (784)..(784): X=any amino acid
  MISC_FEATURE (786)..(786): X=any amino acid
  MISC_FEATURE (788)..(788): X=any amino acid
  MISC_FEATURE (821)..(821): X=any amino acid
  MISC_FEATURE (823)..(823): X=any amino acid
  MISC_FEATURE (884)..(884): X=any amino acid
  MISC_FEATURE (929)..(929): X=any amino acid
  MISC_FEATURE (954)..(954): X=any amino acid
  MISC_FEATURE (957)..(957): X=any amino acid
  MISC_FEATURE (963)..(963): X=any amino acid
VTVDGKEFSASGEKTILQLFNESNLEHPQICHVPEVDPIPTCDTCIVEVDGKLMRACSTAIENGMHIXKQSQRAKEAQTEAMDRIFKKPLIGIATGWDNNNGKCKGPXYTAYDGGLENTNIPNEPQGKCLWKRKCHIPAYSEWIPNQCICCGQCVEVCQNLQVNETISIDWSLDRPRVIWDHGVSINDSSCVSCGQCVTVCPCNALMEKSMLGEAGFMTGLKPDVLDPMIDFVKDVEPGYSSILAVSEVEAAMRKTKVNKTKTVCTFCGCRWSFEVWTKDRHILXVQPVSDAPGNGYFTCVKGKFGWDFVNSERSHTKPLIRQGDMFVEASWGRSTEVVASNMQHIKSAYGSDAFGFISSSKVTNEENYLMQKLARQIYGTNNVDNCSRYCQSPATDGLFKTVGMGGDAGTVKDIAEAGLVIIAGANPTEGHPGLATRVKRAPKLPQQKLVVADLSLTXNCKAGRIYLFHPRQGTDYLWLAGDYEIYYDQDWHDKKFIAEKRKNFDEYSKMVEKYTLEYTEKITGISKENLKEMARMVYEADRTCVLWGMGVTQKYRRKYNSAAISNLLLVTGNYRRPGAGAYPLRGHNNVQGACDMATLPNWLPGYQAVSGDTLRGKVEKKHMVLLSRKPPGXITMPMLLAARSRKNYGVMYVMGEEMALVDSNANHVQHILANLDFLVVQDMFLSKTARFADVILPAAPSLAKRRNIYETERRIQRLYEVLKPLGDSKPDWWILQKVARALGGDWNYESPSEIMDEIASLAPLYSQATYDRLEGWNSLCWGXSXWXRYTSIIVDGFNFPDKLARLSLDEWIPARVAPRXEXSTFNNGRMLEHFHEGNMTNKSAGILSKVSEVFVEISPELAIERNVKDGGLVELAFTIWKNXSTSTITDRVTGKELYLPMHATINEEAINILTGTATDLYTVYTGLXTNDGKNAVLREKGNRPLPPSNPARXKSXSAKWCXNEQKWQRKQYV

SEQ ID NO: 46754 - protein, 235 aa, Bacillus anthracis
MEHTFTETSIVGEIVTQFPKASDLFKSYRIDFCCGGNKPLIDAIHERNLSATEVITELNTLYHNTKRLNESEIDWKNASYRELIDYVIHKHHRYLNEELPQLSPYVTKVLRVHGANQPHLAKIHKLFHELKMELEQHLIKEETEDFPLILEFEKNPTDENYAKLRKVVDELENEHNHAGNIIKELRKVTNDFTPPEGACGTYRLVYNRLEALESDLFEHIHLENNILFPRAITRA

SEQ ID NO: 46755 - protein, 296 aa, Bacillus anthracis
SILLESGTNELEIVTYTVGENLFSINVMKVREIINPFPVTTVPESHHAVEGVVQVRGEILPVINLATALNLKSTKPLDQTKFIISELNQMKVIFRVDEVHRIQRISWEQIDEPASLSMGLEETTSGIVKLDGKIILLLDYEKIVCEISGTGYDNKSLAGLEQKTDRAEKVIYIAEDSAMLRQILEETLSSAGYTKMNFFSNGAEALAQIEKLAKEQGEKMFEHIHLLITDIEMPKMDGHHLTKAVKDSEVMNRLPVIIFSSLITNELFHKGEAVGANAQVSKPDIQELIGLVDKLV

SEQ ID NO: 46756 - protein, 419 aa, Bacillus anthracis
  MISC_FEATURE (130)..(130): X=any amino acid
  MISC_FEATURE (231)..(231): X=any amino acid
  MISC_FEATURE (233)..(233): X=any amino acid
IGLMLFALFLGAGNLIFPPVLGQQAGENVWVGNNGFLVTGVGLPLLAVTAVAFVEGDLKALSSRVHPIFAFVFPLISYLAIGPFFAIPRTGAVSFEMGMKPFLSEALVSEWYMLFLFTIFFFGITWYLSXTPSKLVIGSENFLPPVLVLIVAVCRGKAIIDPIGEPAAPLAAYKENAFFGGFIQGYLTMDAISALVFGIVVVQVIRSKGIKESNQMQKIPVVSGIMPVLGXRXIYYPLAYLGSTSTSLGISENGGLILTNVVNELYGTGGKILLGLVIILACLTTSVGLTSACAGFFTNLFPKLSHKTIVTMVCVFSLIVSNLGLTQLIAVTLPVLMIIYPVAIVLIVLSYFHKWIGKRNTIYIGAILGALLISFFNGLESAKIKIDAISNVLQILPLYNEGIGWLIPSCIGGILGFFF

SEQ ID NO: 46757 - protein, 153 aa, Bacillus anthracis
MQATRKRCAEVPEKVKNIAQGAALATDTKVKIHQFQNEIDELLVTKTYNDVVAEELELLGEDVNRKERFGIGSTDAGNVSQVVPTIHPYIKIGPDDLIAHTNEFREAARSELGDKALITSAKALANTAYRLITEEGLLEKVKEEFREAQRNQG

SEQ ID NO: 46758 - protein, 485 aa, Bacillus anthracis
  MISC_FEATURE (211)..(211): X=any amino acid
  MISC_FEATURE (222)..(222): X=any amino acid
  MISC_FEATURE (256)..(256): X=any amino acid
  MISC_FEATURE (275)..(275): X=any amino acid
  MISC_FEATURE (321)..(321): X=any amino acid
  MISC_FEATURE (424)..(424): X=any amino acid
  MISC_FEATURE (455)..(455): X=any amino acid
MKNHDQALIFEVSKEDGIGYSLTKLDVEEVNLEDVFESDYIRVGRLQKLPKGILNLIFMRHYTALSNPNPGVDSGFYPLGSCTMKYNPKINESVARFAGFANIHPLQDEKTVQGAMELMYDLQEHLIEITGMDTVTLQPAAGAHGEWTGLMLIRAYHEANGDFNRTKVIVPDSAHGTNPASATVAGFETITVKSNEHGLVDLEDLKRVVNXRTAAFYVTKSXTLGLLKENILENAENVYMQGGKLYYDGANLNAVXAQARPGDMGFDVVHLNLTXNIYGPHGGGGPSSGPLRVKADLIPYLPKPILHKTENGYHFNYDLPXTIGRLKPFYGHFRINVRAYTYMRSMGPYGLRAVTEYAVLNANYMMRRLAPFYDLSFDRHCKHEFVLSSTRLKKLGVRTLDIAKRLLDFGYHSPTIYLPLNVAXCIMIEPTQTESKETLDGFIDEMIQIAQELEXTSEVVQEAPHTTVIIRIDDTMAVRIPVLRY

SEQ ID NO: 46759 - protein, 420 aa, Bacillus anthracis
  MISC_FEATURE (291)..(291): X=any amino acid
  MISC_FEATURE (296)..(296): X=any amino acid
  MISC_FEATURE (299)..(299): X=any amino acid
  MISC_FEATURE (415)..(415): X=any amino acid
EKTGLGSLLLDGELIKECRLTEQYFSMPVHKSIFQLMRKMEGEGQPIDLVTFTSRVDPNFLKGIGGMEYFIGLMDGVPTTSNFSYYEGLVRGAWKMYQAASLGHKMGERLIAEKSEKIIGETITALCELEGEDCVCEFDFEDALVDLYEKLHQDAKEITGYETGYTSLNKMTCGFARKRFLSFFGARPFYGKTAFALNVGLHAAKSGASVGCFPLEMSSKQCLKRDGFLVGEVSGGQTEKSKHRFAIEDLGKLNKGVAGNCELPLEIYDHAGGYGARYLDQTRKLKRKHGXQKRFXLLXITCQLITGDPKHKGNRFQEISEISRKLKLLARELYVCVVALSQLSRSVESRQDKRPLLSDLRETGQIEQDADVIMLMYREDYYDKETDAERDDGDSCGKASEMGPVGEVLKLAVLXREFGS

SEQ ID NO: 46760 - protein, 290 aa, Bacillus anthracis
MKRVGKAIIPAAGLGTRFLPATKAMPKEMLPIVDKPTIQYIVEEAVKSGIEDIIIVTGKTKRSIEDHFDNAFELEQNLLEKKKYELLEKVQASSKMVDIHYIRQKEPKGLGHAVWCARKFIGDEPFAVLLGDDIVQAEKPCLRQLIEEYDKTLSSVIGVQTVPEDETHRYGIIDPLEQEGRRYQVRNFVEKPAAGTAPSNLAIMGRYVLTPEIFMFLEQQHVGAGGEIQLTDAIQSLNEIQRVFAYDFEGKRYDVGEKLGFVQTTIEMALQHPELRDDMVTMMKKILEEQ

SEQ ID NO: 46761 - protein, 348 aa, Bacillus anthracis
MKLFHTADWHLGKLVHGVYMTEDQKIVLDQFVQAVEEEKPDAVIIAGDLYDRAIPPTEAVDLLNDVLQKIVIDLQTPVIAVAGNHDIPDRIHFGSSLMKKQGLFIVGQFQFPYEPIILNDEHGEVHFHLVPYADPSIVRHVLKNEDVRSHDDAMRIFMNELSETMDKEARHVFVGHAFVTSAGEAEENTSDAERPFTVIACEYVNSHYFDKFHYTALGHLHQAHFVRNETIRYSGSPLAYSISEEKHKKGYYIVETNEQGEATIEKRLLTPRRKMRTVEAKIDELLLHPVSEDYVFVKLLDENPVLQPMEKIRSVYPNAMHVERSIQRRGVYRVQMKAPVQRHKTDDF

SEQ ID NO: 46762 - protein, 350 aa, Bacillus anthracis
MKALLWHNQRDVRVEEVPEPTVKPGAVKIKVKWCGICGTDLHEYLAGPIFIPTEEHPLTHVKAPVILGHEFSGEVVEIGEGVTSHKVGDRVVVEPIYSCGKCEACKHGHYNVCEQLVFHGLGGEGGGFSEYTVVPEDMVHHIPDEMTYEQGALVEPAAVAVHAVRQSKLKEGEAVAVFGCGPIGLLVIQAAKAAGATPVIAVELSKERQELAKLAGADYVLNPATQDVLAEIRNLTNSLGVNVSFEVTGVEVVLRQAIESTSFEGQTVIVSVWEKDATITPNNLVLKEKEVVGILGYRHIFPAVIKLISSGQIQAEKLITKKITVDQVVEEGFEALVKDKTQVKILVSPK

SEQ ID NO: 46763 - protein, 375 aa, Bacillus anthracis
MNRYEELDSIEGISSLVVMIGHHLMIFSVFQNYSYEDNKPFVMYLLKETPARLVFSSGNESVIIFFVLSGFVLYESIQKNYDSYRSFLVKRICRIYIPYIVAILIAILCQTTMSEYGISHLSEWFNRSWTIESSLSLIVQHILLVGKYNTDAYNGVIWSLVHEMRISIIFPLVLMVCLRKTLRDSLLTLFSFSICSVAILFLFRSSLTLTSYMLTPHYTVLFLLGALFAKYKNNVIVFYSNRTKNEKIAWFLLAILLYMYEGLIGEIKVLNNFILRDYVVAISACLFVILSLSVSTFSSLLRNKYLLYLGKISYSLYLYHIISLFSLIYMLHEILPLPIILIFSLVFSFIPGDAFVYICRKICIQSRKVCNKASE

SEQ ID NO: 46764 - protein, 249 aa, Bacillus anthracis
MQRYFVEEKYVNETSIRIVGDDVHHIARVMRMSAGDHIYCCVNGRTAVCSIDEITSEFINTAIVEWVEASSELPVFVTIASGLPKREQLELIFQKGTELGAAAFLPFQASRSIVKWDAKKADKKVERLRKIVKEAAEQSHRSEISEVHAPASFKQFASMSGEYDVFLVAYEEEANQREKSNFAKALTMMKPGQKLLIVFGPEGGLAEEEITVLREHNFVPCSLGPRILRTETAPLYALSAASYHFELMG

SEQ ID NO: 46765 - protein, 320 aa, Bacillus anthracis
AVNWNKKEDDFSLMFWKQNIAQFWTEEEIAVSSDKNSWVQLSKEEQIAYKRVLGGLTLLDPKQGGRKGAPLFLVLLENLQTKRGISFPGVLGKKSHGKSISSFFHNVSTEKEIDEIFDWVDTHPLLEKRLGIITSYYRRLLKPEVTKKELYMAMVASVFLESYLFYSGFFYPLYLAGQGKLTASGEIINLIIRDESIHGVFVGILAQQIFAELSAEDQQEVQKETQELLMELYEIEMAYTEEIYTSIGLVEDVNRFVRYNANKGLMNLGLEPKFEEEEINPIVLNGLRTDTKNHDFFSVKGNGYVKATNVEKLSDDDFVF

SEQ ID NO: 46766 - protein, 306 aa, Bacillus anthracis
  MISC_FEATURE (56)..(56): X=any amino acid
MKKRQLGNSDLFVTEMGLGCMSLGTSEAEAMRIIDEAIDLGINFFDTADLYDYGIXRKICWKKALKGKRDQIVLTTKVGNRWTEEKNGWSWDPSKNYIKAEVKESLRRLQTDYIDLYQLHGGTIEDPIDETIEAFEELKKEGIIRHYGISSIRPNVIREYAKRSNIVSVLMEYSLFNRRPEEWFPLLNEHQISVIARGPLAKGILTDNNARKIERVKEKDYLSYSYDELYGTLANVKELFGENFFNRDQVFQFCLQTDLVPSLIPWPSFYKQLGENCTTLVANPLLPPEEFFQFQQIVKCDTYVLH

SEQ ID NO: 46767 - protein, 462 aa, Bacillus anthracis
MHRENSMYSYIFYCIFLCEKEMKITIIGTGYVGLITGVGLAVLGHSVTCFDINDEKIERIKQGDLPIYEAGLYELIHDACENNRLTFTTSKEEAFKDAEFIFIAVGTPSLLDGTADLTYIQNACVDIGTYATKDIIVVTKSTVPVGTNGAMRGWIEETLQNRHELHIVSNPEFLREGSGIYDFFQGDRIVIGADNEEAARKVENLYSELHLKTYVTDIKSAEMIKYASNAFLATKISFINEISNICEKVGANVLDVAKGMGMDKRIGASFLNAGIGYGGSCFPKDTKALVQIAGNVAHDFRLLKAVIEVNNKQQLLLIEKAKKVINMNKKRIAVLGAAFKPNTDDIRDAPSLIMIQELINLGADIVLYDPKAIQNMKNIFGETIQYSECIDESIRGASAAFIMTEWEDIRTYPLENYVQLMREPILFDGRNCYTNEDVKKQGIDYYSVGRESIYKRDFSVIR

SEQ ID NO: 46768 - protein, 357 aa, Bacillus anthracis
MDSQVIYAILASFITVLVVTPLVIKLAFKIGATDKPNARKVHQKIMPRLGGLAIFIGVAVGFVVGGLYEQRMLSITLGAIIIVIIGILDDMYELSAKVKFGGQLLVAIMIVKSGLLVQVLYIPILGDTELGWLAYPITVFWIVGITNAINLIDGLDGLSAGISSIVLATLAYMAFTSPWGTGTAIILPLALIALASTLGFLFYNFHPAKIFMGDTGALFLGYCISVISLLGLYKSVTLFSFIVPVIILGVPVFDTTFAIIRRIVNKKPISAPDKSHLHHRLLAMGFSHRKTVLIIYAFGIFFSVNAIIFSSATLWLSIILLFILIFFTEIIAEVIGLVHERYKPLISFYKKVKKRED

SEQ ID NO: 46769 - protein, 342 aa, Bacillus anthracis
  MISC_FEATURE (10)..(10): X=any amino acid
  MISC_FEATURE (74)..(74): X=any amino acid
  MISC_FEATURE (248)..(248): X=any amino acid
  MISC_FEATURE (279)..(279): X=any amino acid
  MISC_FEATURE (304)..(304): X=any amino acid
  MISC_FEATURE (307)..(307): X=any amino acid
  MISC_FEATURE (308)..(308): X=any amino acid
LGGFPPDLGXNLGTANTLVYVKGKGVVLREPSVVALQTDTKTQIVAVVRDAKTNDLVVHKGNVVGTFPRRKTGXLPDYETTATMVENYLSQVQNPNGILFRKPYVMVCVPIWYTAVERRAVIDATRQAGARDAYPIEEPFAAAIGANLPVWEPTGSMVVDIGGGTTEVAIISLGGIVTSQSVRVAGDDMDDSIIQYIKKSYNLMIGERTAEALKLEIGFCRGTQEGFRTLGEFRGRGFSKGFTKKQGXFNQEKFADALKDSGNGNWKSVKNTLEKTPPXISRQTLGPVVSINHGAEHYYVTLDXSDXXRNKYPVLVAEDPLDCVAIGTGKSIRQYRSFQNCC

SEQ ID NO: 46770 - protein, 272 aa, Bacillus anthracis
DSVRITLSLDLHVVVKEKSDKLQGFPFLGGSIPTDDKNLIVSTACKVCPSLSPHIIEVTSNIPLTRSFGSSAPAIVAGIELANQLGKLNLTMDQKVQIVTNFEVHPDNVAASILGGTVIGALDGKNVSVVRIESKELGVISLIPNEELNTDESRSVLPDVFPFHEAVKASAISNVLVAALCQKKWKVVGEMMERDHFHEPYRLELVPLLPSIRKCAKEFGAYGTALSGAGPSIFNLTPYEKRQEIAEQLARVFTSMKVCELEIDHRGITVNK

SEQ ID NO: 46771 - protein, 144 aa, Bacillus anthracis
MYSTVEAGEHIAWWRSPTSDPAVTLTLAVMVVTLTHYYGIKMKGTKEYVKGYFQPMKFLFPLKVIEEFANTLTLGLRLFGNIYAGEILLGLLAKLGGATFLGALGALVPMLAWMGFSVFVGSIQAFIFVMLTMGYMAHKVSHDH

SEQ ID NO: 46772 - protein, 496 aa, Bacillus anthracis
  MISC_FEATURE (188)..(188): X=any amino acid
  MISC_FEATURE (217)..(217): X=any amino acid
  MISC_FEATURE (239)..(239): X=any amino acid
  MISC_FEATURE (267)..(267): X=any amino acid
  MISC_FEATURE (293)..(293): X=any amino acid
  MISC_FEATURE (312)..(312): X=any amino acid
  MISC_FEATURE (343)..(343): X=any amino acid
VSGIITILGLGAGELDQLTMGVYPKIKEADHMFVRTKEHPVIEEVGERKVYNILPFDNVYGSASIHFKMYYETICNTLIEKAERAEIILLWSKGIPFVTGRTGPLMLEKGEVANIEVRIEGGQSFLDPMFASLKIDPIEGFQLIDATSFERGQLELRQHLIFCPVYDAFVASDVKITFMGDWLPHDYXMYIVTAAGTSFEPVKRVRLYMLDHGNGVXLTLTSVYVPPVQERASLYQQFXFAWRKLLQDLGGTEWFPVGIKAKHINLXRKYFIGERYEGFGTQFDEGGWDSFSXGNWVFLFQIMLHAQIGERXRLVLYDDIIPNFILKNWFVPPPPVFWEIRMXNIADEVIANWEEIKKQEKGFVKESVLDGVPKSLPQLLRAYEIQKKAGKVGFDWVDVQPMIEKALEEWQEFQQEVTNMDEAKMLSEFGDLLFAFVNIARHYKIDPEEALHSTNEKFVGRFLYMEAKVAEMNKEMQDLSLEQIRCFMGRGKQTER

SEQ ID NO: 46773 - protein, 239 aa, Bacillus anthracis
  MISC_FEATURE (15)..(15): X=any amino acid
MAMKVKEVANLVGNXVRTPAHYDEIGLLTPDETTESGYRLYSNENLEMLQQILFFKELSPQYCGIIKEISLSPSFDRKEALQLHKKMLLEKRARLDKVIATIDKTIQHTKGEIEMTNKEKFKGFDFSHNPYEEEARERWGDAAVDKANEYAKGMSKEKQEEFNAILQKFAALRHGAPDSKEAQEAIKVWYDYLQNFSHYSLDAFKGLGQMYVADERFTKNIDKFGEGLAQFMCDAMEVY

SEQ ID NO: 46774 - protein, 128 aa, Bacillus anthracis
MINFLLYLAVTLGLLCIGLLLMEVTTKVKEFKLMAQGNKAVSYVLGGRLLGLAIVLYSTAANSISLFDMVSWGAVGILAQIIVFYLAEWLTPRFNINKSLEEDNQAVGLFLMFLSLSIGIVIAGCITY

SEQ ID NO: 46775 - protein, 222 aa, Bacillus anthracis
MENKSFLDEWGKVIWEATIQTFQMTSISLFISILIALPLGVTLVLTRPGGQHENKIIYSILNTIINIIRSLPFIILLFFILPFTKFLMGTSIGVQGVIVPLVVFTAPYIARLMETALLEVDRGVIEAYQAMGVSTIQIIWHVMVKEARPSLVLGLTIATIGLIGATAMAGLVGAGGLGDLAYRFGHLRYEPEVMYATVFILIILVQGLQSLGNGIARRLKKD

SEQ ID NO: 46776 - protein, 399 aa, Bacillus anthracis
MGKVKEISKRKLLGIAGLGWLFDAMDVGMLSFVMVALQKDWGLSTQEMGWIGSINSIGMAVGALVFGILSDKIGRKSVFIITLLLFSIGSGLTALTTTLAMFLVLRFLIGMGLGGELPVASTLVSESVEAHERGKIVVLLESFWAGGWLIAALISYFVIPKYGWEVAMILSAIPALYALYLRWNLPDSPRFQKVEKRPSVIENIKSVWSGEYRKATIMLWILWFSVVFSYYGMFLWLPSVMVLKGFSLIKSFQYVLIMTLAQLPGYFTAAWFIERLGRKFVLVTYLIGTACSAYLFGVAESLTVLIVAGMLLSFFNLGAWGALYAYTPEQYPTVIRGTGAGMAAAFGRIGGILGPLLVGYLVASQASLSLIFTIFCGSILIGVFAVIILGQETKQRELV

SEQ ID NO: 46777 - protein, 470 aa, Bacillus anthracis
  MISC_FEATURE (43)..(43): X=any amino acid
  MISC_FEATURE (87)..(87): X=any amino acid
  MISC_FEATURE (122)..(122): X=any amino acid
  MISC_FEATURE (178)..(178): X=any amino acid
  MISC_FEATURE (195)..(195): X=any amino acid
  MISC_FEATURE (216)..(216): X=any amino acid
  MISC_FEATURE (229)..(229): X=any amino acid
  MISC_FEATURE (244)..(244): X=any amino acid
  MISC_FEATURE (253)..(253): X=any amino acid
  MISC_FEATURE (271)..(271): X=any amino acid
  MISC_FEATURE (282)..(282): X=any amino acid
  MISC_FEATURE (288)..(288): X=any amino acid
  MISC_FEATURE (296)..(296): X=any amino acid
  MISC_FEATURE (300)..(300): X=any amino acid
KNTWTNSPGAEYMYVNNVETILGIGYPKQWEDQEKYKGVRGNXKTGEIQMKSGWKMKRLMNIFHNPDQRTMDDYFQSVVTMYYENIXQLVPQRKHQPSCRPKSAITGEFIGKIEWGPKLGVXNSGGHITGLQDPNVKKMEEEITTDFENVFMMYLPRICEHCMNPSCVSSCPSGAEVXTGRRWDCSCDQNACRAXRSCVSSRPIKKRVRLPGQRKXSRKKCTIVFPAVXKWYANNCSENMCRGXCGIWSNAIXRDKGKRKRLLWRMKKIIXIPLTGFPKSNXSEVVTXAKKPRISXRMEXKRRKSGQSIKWIIDWKNCSCLLHPKGSYHGRLVWVYPRRLSPNYEHGGREGSNWQAEEIFPAIDNMRIPIQYLANLLTAGDESHIRLTLKKMAVMRTHMRALQINKEPNEAVLKELGLTKQDVEDMYRLLAIAKYKDRFVIPTSHREQVADLYNEQGSCGLSFAGGPGSC

SEQ ID NO: 46778 - protein, 561 aa, Bacillus anthracis
  MISC_FEATURE (97)..(97): X=any amino acid
  MISC_FEATURE (98)..(98): X=any amino acid
  MISC_FEATURE (99)..(99): X=any amino acid
  MISC_FEATURE (104)..(104): X=any amino acid
  MISC_FEATURE (168)..(168): X=any amino acid
  MISC_FEATURE (179)..(179): X=any amino acid
  MISC_FEATURE (227)..(227): X=any amino acid
  MISC_FEATURE (228)..(228): X=any amino acid
  MISC_FEATURE (233)..(233): X=any amino acid
  MISC_FEATURE (237)..(237): X=any amino acid
  MISC_FEATURE (241)..(241): X=any amino acid
  MISC_FEATURE (282)..(282): X=any amino acid
  MISC_FEATURE (286)..(286): X=any amino acid
  MISC_FEATURE (289)..(289): X=any amino acid
  MISC_FEATURE (387)..(387): X=any amino acid
  MISC_FEATURE (391)..(391): X=any amino acid
  MISC_FEATURE (397)..(397): X=any amino acid
  MISC_FEATURE (415)..(415): X=any amino acid
  MISC_FEATURE (466)..(466): X=any amino acid
  MISC_FEATURE (472)..(472): X=any amino acid
  MISC_FEATURE (530)..(530): X=any amino acid
MNSLEQVKGLIKEEIQAAVLKAELATEEQIPNVVLESPKRKTKWDFSTNMGNALARVAKPVYEMIAEEFSCKFDKAKASTEKIEIAGPGYINFLHGXXXVSRAXSRTIVNAGEAYGETNTGKGEKVQVEFVSANPTGDLHLGHARGAAVGDTLCNLLAKAGCDDSREXYINGAGTQIQXLSSFVEARYMQALGLEKEMPEDGYHGADIIGIGKRLAEEFGDLYAKTXXKRKLXFFPXVRFXNMVSKASKDLASFRVKFDVGLSRNHQLYKNRKNRSSSCKSXQRGXNLXRRPVQLGPFNDLRRDKNRVLIKNDGSYTYLTPDIAYHRDKLERGFDKLINIWGADHHGYIPRMKAAIQALGYDKETLEVEIIQMVHLYQNGEKNEDEXRTGXSQLHSXAYGRSRLLTNALLLRNAXRRFSFDFDMDLAVSKSKKNPSILCTIRSCSCMQYPSQGEELRLTTGGKVNXQLCYFXKKNKFLKKLGGISPPEICRMPPQKTSGPTRFTNYAFGLGATLHRFVQCRKSIKARITXKLSKARNEVMKRVRPTLPNALTIVGVPAPRK

SEQ ID NO: 46779 - protein, 520 aa, Bacillus anthracis
  MISC_FEATURE (195)..(195): X=any amino acid
IVLIDNYDSFTYNLYQLLGEYEEEIVVVRNDQITIEQLEEMNPKGIVLSPGPGKPEEAGICIEVIRHFYKNVPILGICLGHQAIISAFGGEIVRAERIKHGKTSRAKHNGTSIFSYVTQPLTAMRYHSLVAAQTSLPQCFDILATAMDDGEIMAVRHNYYPLFGLQFHPESIATEEGGKLIRAFLGEVKEEERVXITILRKLVEGQHLTEEEMYKAGLLLLNENILESEIAAFLVLLKAKGETAEEIYGLVRALREKALPFSNHIQGAMDNCGTGGDGAQTFNISTTSAFVLAGAGVKVAKHGNRAVSSKTGSADLLEELGVNISSTPNEIDYLLEHVGIAFLFAPAMHPALKRIMKIRKELNVPTIFNLIGPLTNPVNLETQFVGIYKRDMLLPVAQVLQKLGRKQALVVNGSGFLDEASLQGENHVVILKDNEIVETSIEPEKYGFSIVKNEEIRGGNSKENAKITLGVLSGEKSVYRDTVLFNAGLALFANGKAKTIEEGITLAAHSIDSGKALAKL

SEQ ID NO: 46780 - protein, 430 aa, Bacillus anthracis
MTTGEKITVTNGVMNVPNNPIIPFIEGDGIGPDIWAAASRVLEAAVEKAYDGEKKIVWKEVLAGEKAFNQTGEWLPEETLNLIREYLIAIKGPLTTPVGGGIRSLNVALRQELDLYVCLRPVRYFEGVPSPVKRPEDTDMVIFRENTEDIYAGIEYAQGSPEAEKVLAFLKEAMGVNKIRFPETSGIGIKPISEEGTKRLVRAAIQYAINEKRSSVTLVHKGNIMKFTEGAFKNWGYEVAEQEFGDKVFTWAEYDRIVEKDGKDAANKAMADAEVAGKIIVKDSIADIFLQQILTRPREFDVVATMNLNGDYISDALAAQVGGIGIAPGANINYVTGHAIFEATHGTAPKYAGLDKVNPSSVLLSGVLLLEHLGWNEAAKLVTASVEKTIASKVVTYDFARLMEGATEVKCSEFANELIKNMDVAIIKNA

SEQ ID NO: 46781 - protein, 354 aa, Bacillus anthracis
MSLDKIMNEAISPWMKGDGPDSDIVLSSRIRLARNFKKYQFSTMQNEEETKQIQELFKKEFINKTVEPFGEFELLKMNELTPLQRRVLVEKHLISPNLAGTEYGACLLSESEHISVMLNEEDHIRIQCLFSGLQLSEALQSANQIDNWIEKEVEYAFDESLGYITSCPTNVGTGLRASVMIHLPGLVLTKRISRIIQVIQKLGLVVRGIYGEGSEALGNIFQVSNQMTLGKSEEDIIADLKSVIQQIIQQEKMARELIVQNSSIELEDKVYRSYGILANSRLIQSAEAANCLSDLRLGIDLGYIQGISRNILTELMVLTQPGILQQYAGGPLGPEERDYRRATLIRERLRIEKN

SEQ ID NO: 46782 - protein, 130 aa, Bacillus anthracis
LAQVQYYGTGRRKSSVARVRLVSGEGRVIINGRDFENYIPFAALREVVKQPLVATETLGNYDVLVNVNGGGYTGQAGAIRHGISRALLKADPEYRLTLKRASLLTRDARMKERKKYGLKGARRAPQFSKR

SEQ ID NO: 46783 - protein, 324 aa, Bacillus anthracis
MLEQGLLVTAGVAFLISVALSPLFIPFLRKLKFGQSIRDEGPKSHQKKSGTPTMGGIVIYVSMMVTSLIMAIKFNHLGAEVSLLLLVTFGYGLIGFLDDYIKVVKKRNLGLTSKQKLVGQLVIAIAFFFIGKGQAFHTYIMIPGTDVKFELGWAYFVLVLFMLIGGSNAVNLTDGLDGLLSGTAAIAFGAFSIIAVAQEQFGVAIFCMAVVGAVLGFLVFNANPAEVFMGDTGSLALGGAIAAVAILLKQELLLVIIGGVFVMETLSVIIQVISFKTTGKRVFKMSPLHHHYELCGWSEWRVVVTFWSVGFLLAVLGIYIGVWM

SEQ ID NO: 46784 - protein, 418 aa, Bacillus anthracis
MGILQDLEFRGLINQQTDAEGLEQLLEKESVKLYCGFDPTADSLHIGHMLPVLMLRRFQLAGHQPIALVGGGTGMIGDPSGKKAERTLNTKDTVAYYTESIKNQLSNFLEFENVENPATMANNYDWLGNLDVISFLRDIGKNFGLNYMLAKDTVASRLETGISFTEFSYMILQSYDFLNLYQHHNCRLQIGGSDQWGNITAGLELIRKSEEDAKAFGLTIPLVTKSDGTKFGKTEGGAIWLDPEKTTPYEFYQFWINTDDRDVVKYLKYFTFLSHEEILELEKQVAEAPEKRAAQKALGAEMTKLVHGEEALEQAIKISAALFSGSVAELTASEIEQGFKDVPSVERTAEDTVLIDLLVESKISPSKRQAREDVTNGAIYVNGERTQALDYVVTEKDRIEGKFTIIRRGKKKYFLIRY

SEQ ID NO: 46785 - protein, 562 aa, Bacillus anthracis
MSYQALYRTWRPQKFEDVVGQKHVTKTLQNALLQEKVSHAYLFSGPRGTGKTTIAKVFAKAINCEHAPVAEPCNECPSCLGITQGSISDVLEIDAASNNGVDEIRDIRDKVKYAPSAVEYKVYIIDEVHMLSMGAFNALLKTLEEPPGHVIFILATTEPHKIPPTIISRCQRFEFRKISVNDIVERLSTVVTNEGTQVEDEALQIVARAAEGGMRDALSLIDQAISYSDERVTTEDVLAVTGSVSQQYLGNLVECIRENDVSRALRIIDEMMGKGKDPVRFMEDFIYYYRDMLLYQTSPQLEHMLERVMVDEQFRMLSEEMQPEVIYEIIHTLSKGQQEMKWTNHPRIFLEVVMVQLCQQFMMQANGADRLQAIMNRMQQLEKELEQVKKNGVPVGVQQEVKETRAAPKPVRTGSMKIPVGRVNEVLKQAKRQDLEQLKAVWGELLGRLKAYNKVAFAVLLENSEPVAASDDTYVLAFQYEIHCKMASENREAMDTVEQALFELLSKKLNMIAIPKSEWGKIREDFLKREGGSSEESPEKKEDPLIEEAIKLVGQELIEIKE

SEQ ID NO: 46786 - protein, 164 aa, Bacillus anthracis
MGRKWNNIKDKKASKDANTSRIYAKFGREIYVAAKQGEPDPESNQALRVVLERAKTYNVPRTIIDRAVEKAKGGSEENYDELRYEGFGPNGAMVIVDTLTNNVNRTAADVRAAFSKNSGNMGVNGSVAYMFDATAVIGLERKTSDEVLEILMEANVDARDILEE

SEQ ID NO: 46787 - protein, 271 aa, Bacillus anthracis
MVATVVNVQVKNEEKIETAPKKVVFDTKNLNLWYGEDHALKDINLSIHENEVTAIIGPSGCGKSTYLKTLNRMVELVPIVRTTGVIEYRERNIFDKSYPVEELRTHVGMVFQKPNPFPKSIYENVAYGPKIHGISDKKTLDEIVEKSLRGAAIWDELKDRLHDNAYGLSGGQQQRLCIARCLAIEPDVILMDEPTSALDPISTLKVEELIQELKKDFSIVIVTHNMQQAARISDKTAFFLSGEVVEYTDTNKLFTTPSDKRTEDYITGRFG

SEQ ID NO: 46788 - protein, 301 aa, Bacillus anthracis
MRRWGIELLILAVVIIWGINFTIAKYGLLEFTAIEFTALRMISAAPLMLLLTFFIEKSVYMERKDIPRLIIVSVVGIVLYQTLFMETVKYTSATNASLLISISPIFTTVFAIFLKQEKFSSRKLIGSIIAFGGAALVLVAGHSLASSFYGNGIGLITSICWGLYPVLAGPLIKKYSALRVTAWSALVGAIPLLLLSGPHVFTMPFHITHGMTLFALLYSIFFVTVFGLVMWYVGVQKIGASHTMVYMYITPRVAVLFAAVWADEYVSFQQIIGGIIIFFGLWFVKSEKVNIHSTAGEPISK

SEQ ID NO: 46789 - protein, 278 aa, Bacillus anthracis
  MISC_FEATURE (191)..(191): X=any amino acid
  MISC_FEATURE (259)..(259): X=any amino acid
MPLVSMKEMLNKALEGKYAVGQINMNNLEWTEAILAAAEEEKSPVILGVSEGAARHMTGFKTVVAMVKALIEEMNITVPVAIHLDHGSSFEKCKEAIDAGFTSVMIDASHHPFEENVETTKKVVEYAHARNVSVEAELGTVGGQEDDVIAEGVIYADPAECKHLVEATGIDCLAPTFGSVHGPYKSEPNLXFAEMEQVRDFTGVPLVLHGGTGIPTADIEKAISLGTSKINVNTEKPIEFTKAVREVLNKDQEVYDPPXFIGTGPDAFKTTVIGKIPE

SEQ ID NO: 46790 - protein, 435 aa, Bacillus anthracis
MERRVPITVEEAVRKVMEFANEGLKELLPIELAYGRVLAEDLVADYDVPSFNRSPYDGFAIRAEDTNVASYETPIVFEVVGEIGAGSLFDEKVGPFQAVRIMTGAQIPNGCDAVVMLELTRQYEEAGSKYMELKRSFKAGDNISFQGEDARKGTVLAKKGTYINPGISALLATFGYSEVPVARKPVVGLLATGSELLDVNDSLQPGKIRNSNTYMILSQIRRAGGRVKYFGKFSDDFHTCFTAVKEALSQVDMLITTGGVSVGDYDYLPAIYEKLGASVLFNKVAMRPGSVTTVAQLNGKLLFGLSGNPSACYVGFELFVRPCIRTYMFSEKAHVKREKALLGEDFLKPNPFTRFVRGKLTYNEGQLIAYPSGFDKSSSVSSLAETNIFIVLPGGTRGYKKDMFVDVLLLEDNEGSEWPWTFYKVRGDSNGTSAI

SEQ ID NO: 46791 - protein, 90 aa, Bacillus anthracis
MPGVLIVEALAQVGAVAMLKKEENRGRLAFFAGIDNCRFKRQVRPGDQLRLEVEMTRVRGAIGKGKAIATVDGEIACETEITFALGDKKE

SEQ ID NO: 46792 - protein, 119 aa, Bacillus anthracis
MTKEQIIEAVKSMTVLELNDLVKAIEEEFGVTAAAPVAVAGGAGEAAAEKTEFDVELTSAGAQKIKVIKVVREITGLGLKEAKELVDNTPKVIKEAAAKEEAEEIKAKLEEVGAAVEVK

SEQ ID NO: 46793 - protein, 436 aa, Bacillus anthracis
MPKPVIAIVGRPNVGKSTIFNRIVGERVSIVEDIPGVTRDRIYSAGEWLNHEFNIIDTGGIDIGDEPFLTQIRQQAEVAIDEADVIIFMTNGRDGVTAADEEVAKILYRSNKPVVLAVNKVDNPEMRSDIYDFYALGFGEPFPISGTHGLGLGDLLDEAAQHFPKIEEDGYDEDTIRFSLIGRPNVGKSSLVNALLGQERVIVSNVAGTTRDAVDTPYSKDGKDYVIIDTAGMRKKGKVYESTEKYSVLRALRAIERSDVVLVVLDGEEGIIEQDKKIAGYAHDSGRAVVIVVNKWDAVKKDEKTMKAFEENIRAHFQFLEYAPIVFLSAKTRKRTQTLIPVIDEVNESHSIRIQTNVLNDVIMDAVAMNPTPTHNGSRLKIFYATQVAVKPPTFVVFVNDPELLHFSYERFLKNRLRESFGFVGTPIHIIARARD

SEQ ID NO: 46794 - protein, 270 aa, Bacillus anthracis
MKKLLLTALISTSIFGLAACGGKDNDEKKLVVGASNVPHAEILEKAKPLLEKKGIELEVKKFQDYVLPNKSLADKDLDANYFQHIPYLEKEIKDKKYEFEVAGKIHLEPIGVYSQKYKSLKELPDGATIIMSNSVADHGRGLAILQKEGILKIKDGVDPVKATPKDIADNPKNLKFKTDIEPGLLPQVYNNKEGDAVLINSNYAIDTKLNPEKDAIAIESNDSPYANVVAVRKGDKDKKEIKELVEVLHSKEIEDFINKEYKGAVVPVKE

SEQ ID NO: 46795 - protein, 316 aa, Bacillus anthracis
MSFASETKKELTNLEMKECCEKAELSALLRMNGSLSFSNRRLSIDIQTENAAIARRIYTLLKKGYDVTVELLVRKKMRLKKNNVYIVRLVEKSREILADLHIVRDDFSFIRNISQELIEKKCCKRSYLRGAFLAGGSVNNPETSSYHLEIFSLYKEHNDAICELMNGFDLNSKTLERRKGYITYLKEAEKITEFLNIIGAHNALLRFEDIRIVRDMRNSVNRLVNCETANLNKTIGAALRQIENIRYIDETVGLDILPDKLREIAQLRRDYQDVTLKELGEMVSGGKISKSGINHRLRKIDDIAEKLRAGETVAKK

SEQ ID NO: 46796 - protein, 712 aa, Bacillus anthracis
MHKLQTNKGARYFMIAFIVLFLIMLLRFFYIQAVGVVHNVNVKDLATEQHNKNGILEANRGTIYDQAGKVLVQDSTTYRVVVNLKGNGKLKNKDETAAQLADALEINKEDVLKNFHEGRTQVEIGKVGRNLTREKKDQIRKLKIPGVSFMPEKARVYPNEDFASYILGFARPDDKGNTEGKFGLEKSLDKYLRSTNGNIEYVGGRGGIPLTNDIGKIEPAKHGNNVYLTLDKQINSFLEEAMNKAQDHYDPSMLLGIIADPKTGKVLAMSSKPSFNPNKGDIEYFLNDPIANAYEPGSTMKVFTLAAAINEGVYNGKEYFQSGKYAVGSSDIKDHNGGFGWGSITFDEGFERSSNVAFSILEDQLLKPNKFKQYMNKFGFNQKTGIDLPGESKNTLLLNTQIQQVTTSFGQGSTVTPIQLIQAATAIANDGKMMQPYIVDKVVNPTNKQVIMENQPKEIGNPIKKETADKVRDLMERVITSSKGTGTMYKVDGYPIGGKTGTAQIPNPENGRYMEGKENYIFSFLGMAPIDDPELIVYLAIKQPKLKGDEYGAQPLAEIFKPVVKNSLEYLKVRPYTEKQMADATEKSQLKVQNYVNQSMGTVENNVKKEKLQPITLGEGKIIKQYPQSGEVMSEGDRIFLLGKNATMPNLQGWSMRDVMYFSKLLKLDLKTSGTGYVTSQSIKKGQAIQEGDVLELELEPPLQPLTEANTN

SEQ ID NO: 46797 - protein, 330 aa, Bacillus anthracis
  MISC_FEATURE (67)..(67): X=any amino acid
  MISC_FEATURE (313)..(313): X=any amino acid
MTKTWEQLSAIQPIGVKMLELNSNSQKKRNYPTPYLLAKERKGQGKVCDSNFKWAKKFPLFSAGIGXSLCHVCTNCKRIDSGNHPNLHIVKPDGLSIKKQQIHDLQEEFSKTGLEANKKVYIIEHADRMTANAANALLKFLEEPSSDTTAILLTEQSHQILNTILSRCQVVTLSTLPTESLIRRLQDEGITVSLSTLAAQLTNSFDEALTLCNDEWFAQARALVIKLCEALEKDKASIFFVQEKWGKHFGEKEQLQQGLDMLLLIYKDLLYVQLGERRSACFFVSRKRCFESFSYAQKRIGSTLFNIIKAKNXINAYVKCATLLFQQILV

SEQ ID NO: 46798 - protein, 354 aa, Bacillus anthracis
MLGVSIYLSKERVKKQEEWLKVAKKNGFLSIFTSLHIPEDDPNTYKELIQILGKQALENEMELMVDVSQKSLHHLGMTYENVEELVEWGITGLRMDYGITPKEIARVSHKMKVALNASTITDSFWKELLSENIRVKNVEAWHNFYPRPETGLAKSFLQKQNEYLHECGIKTMAFIPGDGEKRGPLYEGLPTLEKHRYMRPLEAYLELVQGCGVDKVLIGDISGRVESVQEIASASRGIIPLRYEPLIEKSEVLKMVEQVHTNRLDPARDVIRSVESREEHKVILQPMNAIVRKKGSITIDNELYGRYAGEMQVAIHDLPADEKVNVVGMVVEEDISLLPYVGAGKMFQLFCAIE

SEQ ID NO: 46799 - protein, 181 aa, Bacillus anthracis
MGQKVNPIGLRVGVIRDWESRWFAEKDYATLLHEDIKIREYINVRLKDSAVAKVEIERAANRVNVTIHTAKPGMVIGKGGTEVEALRKAVNQLTGKRVHINILEVKRADLNAKLVGENIARQLENRVSFRRAQKQVITRAMRAGAKGIKTQVSGRLGGADIARAESYSEGTVPLHTLRAGI

SEQ ID NO: 46800 - protein, 368 aa, Bacillus anthracis
  MISC_FEATURE (174)..(174): X=any amino acid
  MISC_FEATURE (214)..(214): X=any amino acid
  MISC_FEATURE (328)..(328): X=any amino acid
MTDQEYMRIALQLAEGTCGQTSPNPMVGAVVVKDGNIVGMGAHLRAGEEHAEVHALHMAGDKAKGATVYVTLEPCSHFGKNPPPWLGICSIKKRKSTGLLIATSEWQSASVSGNGKRKLEEAWIEVTTGVLEAEAVLLNRYFFHYMKTKRPFVNNKTAMSLDGKTATVTGESKXDYREKARADVHQYRHTHDAILVGVNTVIADNPHLTTRFSXRGGKNPIRVILDTHLRTPPSSHVITDSLAPTWIIVGTDVNQEKIASYESKNIAIFPNETEAIEYQDVFYLTRRKTNFLFLFVEGGQTVHASFLQTKYFNGIVTYISPKINWWQXGPTLFGGNGFSTLQDALSLEIQEMKQIGDDIKIVAHARNE

SEQ ID NO: 46801 - protein, 364 aa, Bacillus anthracis
  MISC_FEATURE (44)..(44): X=any amino acid
ENHYLLLTPGPLTDNKRPVKRKFMLSDWGLRGIVNYTRIGQKRXKLNLFRLPRKEEEKYTTVLMQGSGTFSVEAVIGSVIPKNGKLLVCTNGAYGKRIVQMAEMLHIDVVVSQTEEWEPTNIVEVEKIFPPDKGIPHIAVVHCETTTGIINPIVDVCKLGEQYGKSNTVDAMSSFGGIEIDIAELQIDFLISSANKCIQGVPGFGFVIAQRDELLKCKGQARSLSLDLYDQWETMENQNGKWRFTSPTHVGTRFYQALLELEKEGGVRARYNRYYNNQKLLVNRMGEIGFKNTNKEKYQSPIITSFIYPEGISRISQLYNELKRYGFVIYPGKISKVDTFRIGNIGDVHEEDINRLVDSIAKGV

SEQ ID NO: 46802 - protein, 37 aa, Bacillus anthracis
IGNTDRIAKYNQLLRIEDELGEIAVYDGIKSFYNIKR

SEQ ID NO: 46803 - protein, 89 aa, Bacillus anthracis
MALTQERKNEIIAQFRTHETDTGSPEVQIAVLTEQINTLNEHLRTHKKDHHSRRGLLKMVGKRRNLLTYLRNSDITRYRELITKLGLRR

SEQ ID NO: 46804 - protein, 221 aa, Bacillus anthracis
MNPYLHNATRPLILVKKRLLLVQGGSIVKGKPNVVILTIGIRTDSKNVKQAQEENAVQSKQLLDALKQLGIADKDIETISYTITPQYEYVNDKALLQGYRVEHLYEITVLNVQKAGEVYDIAVSNGANVAKGLRFRISHPNKYYEQALIQALQQAVEKARAIASTYNLNINPVPLSFVEESAQLPREVTSYATLHAQAAPPIPSGKFKDHFPQNGRFFTYL

SEQ ID NO: 46805 - protein, 379 aa, Bacillus anthracis
MVKERGNKMTERLKVMTIFGTRPEAIKMAPLVLELQKHPEKIESIVTVTAQHRQMLDQVLSIFGITPDFDLNIMKDRQTLIDITTRGLEGLDKVMKEAKPDIVLVHGDTTTTFIASLAAFYNQIPVGHVEAGLRTWDKYSPYPEEMNRQLTGVMADLHFSPTAKSATNLQKENKDESRIFITGNTAIDALKTTVKETYSHPVLEKLGNNRLVLMTAHRRENLGEPMRNMFRAIKRLVDKHEDVQVVYPVHMNPVVRETANDILGDYGRIHLIEPLDVIDFHNVAARSYLMLTDSGGVQEEAPSLGVPVLVLRDTTERPEGIEAGTLKLAGTDEETIFSLADELLSDKEAHDKMSKASNPYGDGRASERIVEAILKHFNK

SEQ ID NO: 46806 - protein, 109 aa, Bacillus anthracis
MMRGGMGNMNNMMKQMQKMQKEMAKAQEELGEKTVEGTAGGGMITVIANGHKQILEVKVKEEVVDPEDIEMLQDLVLAATNDALKKADELSNSTMGKFTKGLNLPGGMF

SEQ ID NO: 46807 - protein, 316 aa, Bacillus anthracis
MAYNDKSQITFSVQHLIERNTKQRKKTQRINRIVPLLLKVIASVSIMTTLGIIFTLSNETIMFFQKIPLQSFLTEKEWLPFFEDPKFGILPLICGTVLVTAIAMFVAIPIGLACAVFLSEYASNGARKVLKPMLELLAGIPTIVYGFFALTVVTPLLQRIIPDLQFFNAISPGIVIGFMMIPTIASLSEDAMRSVAKGTKEASLALGATRLEMVKQVVFPSAFTGIMAAIILAASRAIGETMIVVIAAGSTPNVSLDPTESIQTLTAYIVQVSLGDAPHGTITYYSMYAVGATLFLFTFIMNIISQFIMRRFRRVT

SEQ ID NO: 46808 - protein, 181 aa, Bacillus anthracis
  MISC_FEATURE (101)..(101): X=any amino acid
  MISC_FEATURE (177)..(177): X=any amino acid
FSEIKKELTTRNWFPATSGNISIKVSHEPLTFLITASGKDKTKTTPDDFLLVDHLGVPVLQTELRPSAETILHTHILYNTNAWAVLHVPTTDTQCITNFIXDAVTLQNQEIIRALDIWGESATIHIPIIEKHAPIPTLWRNFPKHITGDSGAVLIRNHGITEWGPNSSDAKKRSKAXEFLF

SEQ ID NO: 46809 - protein, 526 aa, Bacillus anthracis
  MISC_FEATURE (314)..(314): X=any amino acid
  MISC_FEATURE (358)..(358): X=any amino acid
  MISC_FEATURE (449)..(449): X=any amino acid
  MISC_FEATURE (459)..(459): X=any amino acid
  MISC_FEATURE (476)..(476): X=any amino acid
RKRLWNLWKTITLLVCTVVIFSLLVTDILISHNVERTNGRISQAEKAKTIAHIVANDSIVIDGLIGKADTSAIQTYTNRILKNTGVQFIVVMDMNGIRKSHPNPQKIGHHFIGVDEGPALIGKEHVSVAEGTLGISMRVFVPIFSETGEQLGAVAVGISADNVKERVKESRHIIYIGVGVGVLVGIIGAILLARHIKKSLFRSEPHRIAKILEERNTMLQSVKEGIIAVDKEARVTLINNEAKRLFKKSGLEEDFIGKDVELYMPNSRIKEVLQTGEVQLNEEQNIYGITIVTNWSSFYVKEENSWCIATFSGXTRIRKLAEELTGIRLYAEALRAQSHEFMNKMHVVLGLYTYEPVXRITKYISGMVSEHSYEIGGSYEKNKKPVFAGFLLGKLSYAREKNIKLIISEDSYMPEIDDESITHELITIVGNLIDNALEAVTNCEKKRSXSLDPTMGIYXLLPVQDSGKGYSRKRNXRILFTKGYSTKGDNRGYGLYLVKESIQRINGEIHMHSLVGKGTTITIEIP

SEQ ID NO: 46810 - protein, 192 aa, Bacillus anthracis
MRKICVFAGSNLGERPEFKEQAIALGKMFVENEYELVYGGSCVGLMGEVANEVLRLGGRVTGVMPRDLFRGEIVHTGLTELIEVETMHERKAKMAELADAFIALPGGYGTFEELFEAVCWSQIGIHNKPVGLLNIKDFYGPILQMVERAAEEGFMNPSNKELIVAAETADALIHKIQNYERPVLGTKWKQLS

SEQ ID NO: 46811 - protein, 172 aa, Bacillus anthracis
MTTHIEKCTLKDIHKLQEISYETFYETFKHQNSPENMHHYLEKAFNLKQLEKELSNISSQFFFVYFNDEIAGYLKINTDDAQSEEIGDESLEVERIYIKSSFQKHGLGKYLLNNAIEIAIANNKKNIWLGVWKKNENAIAFYKKLGFVPAGSHSFYMGDDEQVDLIMIKTLI

SEQ ID NO: 46812 - protein, 598 aa, Bacillus anthracis
  MISC_FEATURE (26)..(26): X=any amino acid
  MISC_FEATURE (143)..(143): X=any amino acid
  MISC_FEATURE (146)..(146): X=any amino acid
  MISC_FEATURE (149)..(149): X=any amino acid
  MISC_FEATURE (312)..(312): X=any amino acid
  MISC_FEATURE (336)..(336): X=any amino acid
  MISC_FEATURE (420)..(420): X=any amino acid
  MISC_FEATURE (484)..(484): X=any amino acid
  MISC_FEATURE (518)..(518): X=any amino acid
  MISC_FEATURE (531)..(531): X=any amino acid
  MISC_FEATURE (538)..(538): X=any amino acid
MLNLVLMMIERVGLIVILGFLLSQYXKHSRPLFSISKDGYVDKLKAYFVFFRCFTIVSIYPGMEIAGNSVMNENWLTGCSSSSTIANTRIMGVGISGLLGGPIVGIGVGSIAGIHRYMLGGTTALSCAISSILARRITGYIGXHFXKVXSTITPKFSAVLSVFIVSLENDYEPFIGKEGLTLGKPMAKPWILEITFGSLIFLPRKQPFFRQEKNPKALQTHKELRMANKTLPNFRQGLPKESGRHVAQIIHRFYRNEGGSLTDPEKKLPHVGLASDHHIPSHSLITGLSKEVLHTGENNESEIPEGVNLFTXKVVPLQPAIVIPLTSPGNTKRDIXTYIFKNPNQLSRVEEELAEGLAKIFSTQLELGEAELQSKLLQDAEIKALQAQINPHFLFNAINTVSALCRAKCRKRQESYITAXRYFRCNLQGARQLLIPLEQELNHVQAYLSLEQARFPNKYEVKMYIEDELKTTLVPPFVLQLFGXKCIATRFFKESKPVMEVEGAIFLKKRGMVHFLKXRDIGQRDGGRPFXNKLERWXFSSKKGLETGLYNINERLIGVFGKGTMLHIESESNEGTEITFVIPKKVGEEEQIVKSISS

SEQ ID NO: 46813 - protein, 666 aa, Bacillus anthracis
  MISC_FEATURE (49)..(49): X=any amino acid
  MISC_FEATURE (86)..(86): X=any amino acid
  MISC_FEATURE (96)..(96): X=any amino acid
  MISC_FEATURE (132)..(132): X=any amino acid
  MISC_FEATURE (227)..(227): X=any amino acid
  MISC_FEATURE (229)..(229): X=any amino acid
  MISC_FEATURE (316)..(316): X=any amino acid
  MISC_FEATURE (317)..(317): X=any amino acid
  MISC_FEATURE (322)..(322): X=any amino acid
  MISC_FEATURE (325)..(325): X=any amino acid
  MISC_FEATURE (331)..(331): X=any amino acid
  MISC_FEATURE (469)..(469): X=any amino acid
  MISC_FEATURE (570)..(570): X=any amino acid
  MISC_FEATURE (613)..(613): X=any amino acid
  MISC_FEATURE (622)..(622): X=any amino acid
  MISC_FEATURE (625)..(625): X=any amino acid
  MISC_FEATURE (627)..(627): X=any amino acid
  MISC_FEATURE (647)..(647): X=any amino acid
  MISC_FEATURE (661)..(661): X=any amino acid
VLIGKRLNDRYKLLKMIGGGGMANVYLAHDDILGRDVAVKIIKLAYFKXRRSFINRFPSGKRSLFTTLSHPNFVIMYDVREEDGIXYLVNGGCTEXKHWKAYIIERGMLPIGEALDIMEQLTSAMAHAPSFXNWGRGDLTPAQFFYLEGEGVIKSNRFLKLHQVTRSTTNSHNTNFSSRFGALLSTRTSTGWDSKINIRYLSLGIVMFVVGNRKDNVFFAKPACWLXLXKHLRSEIPSPKRWNENIPQSVENIILKATAKDPFHRYQSANAMKRDIETALYPERINEQPFYIPEDMEATIAIPIIASEQLLRTCYXXNNCFXKDXKWMTRXEKYQPDFSKKKKRSNKWLEILITTFLLLAIGITLALTVIPGFFIPKDVKVPDVAGMKYTTAVNTLFEKGFEGTGTNIVYTDDVETGDVIKTDPVAGRVVKDYLYNYYLSIRWKKKSKMIDFAGEDLVEYRTRVRGEIXPRFQYIILKDDRPKGAIVKQIPTSDQMVVEAEQELKIWVSKGPYQITPGDFSRWTENSVTGILNERKLTPDIKREYSDTVDKGLVISQSPKPGNAVKRRGXSDDYHLRGPKPKVTKTVKVDNISIPYESSIIGEKKPANIEILXERYATENGXTNXNXTISESATISLEFVIREDTKXRYNIVRDGVTIIDXEVPYP

SEQ ID NO: 46814 - protein, 670 aa, Bacillus anthracis
  MISC_FEATURE (86)..(86): X=any amino acid
  MISC_FEATURE (344)..(344): X=any amino acid
  MISC_FEATURE (348)..(348): X=any amino acid
  MISC_FEATURE (377)..(377): X=any amino acid
  MISC_FEATURE (385)..(385): X=any amino acid
  MISC_FEATURE (386)..(386): X=any amino acid
  MISC_FEATURE (410)..(410): X=any amino acid
  MISC_FEATURE (425)..(425): X=any amino acid
  MISC_FEATURE (435)..(435): X=any amino acid
  MISC_FEATURE (437)..(437): X=any amino acid
  MISC_FEATURE (441)..(441): X=any amino acid
  MISC_FEATURE (466)..(466): X=any amino acid
  MISC_FEATURE (503)..(503): X=any amino acid
  MISC_FEATURE (601)..(601): X=any amino acid
  MISC_FEATURE (602)..(602): X=any amino acid
  MISC_FEATURE (612)..(612): X=any amino acid
NKKMEQLKHHVTDNQRKHALTTNQGVKIAEDEFSLKMGLRGPTLMEDFHFREKMTPLDHQRISRKKLFHARGSWALMGYFQLYESXKAYTKADFFTNLSKKTPVFVRFSTVQGSKGSNDAVRDVRGFATKFYTDEGNYDLVGNNMFRYCFIQDAIIFPDFVHAVKPEPHNDIPQGASAHDTFWDFVAHNPESTHMVNVANDDRAIPRNLTMMESFGGHNFRLINKEGKAHFVKFHWKPALGVHSLVWDEAQKIAGKNPDFHRQDLYEAIEKGDYPEWELGLQLIPEEDEHTFDFDILDPTKLWPEEEVPVKLVGKMTLNKNVDNFFAETEQVAFHPGHVVPRNXFFKXPSSQGRILSLYRYNISPLRRPNFHQNPYXPAPMSFSXXSRGWDASNANSRGQTSYHPNGLKXQITSHPCKLNRGGYXHYQEKIDGHXNXGGQXKPSFNFYSPAKIFYKNISPFENRLXKEVFCFEVGKCKSDMVKANVIALLNHVDRQLAQKSRXHYWSSLAKENHEVNSDAKSPALSMSNTIFKADSKNVAIVLNGDPSVSLLSEWIQAFAQHRINYSIVDNKIYQFNNSIKVTDTYTTTEFSPLESSIRVXXGIPHSPPLFXNLQKLLFKHLNRIAHVLSNPHALDNSKIKLDGAGIYNLANTSIESFIEGIAQGRFWNR

SEQ ID NO: 46815 - protein, 179 aa, Bacillus anthracis; identical to SEQ ID NO: 45329
  MISC_FEATURE (67)..(67): X=any amino acid
  MISC_FEATURE (134)..(134): X=any amino acid
  MISC_FEATURE (154)..(154): X=any amino acid

SEQ ID NO: 46816 - protein, 209 aa, Bacillus anthracis
MGKLYVFDHPLIQHKITYIRDKNTGTKDFRELVDEVASLMAFEITRDLPLKDIEIETPVSKATTKVIAGKKLGLIPILRAGLGMVDGILKLIPAAKVGHVGLYRDPKTLQPVEYYVKLPTDVEERDFIVLDPMLATGGSAAEAINSLKKRGAKQIKLMCIVAAPEGVKVVQEEHPDVDIYVAALDEKLNDHGYVVPGLGDAGDRLFGTK

SEQ ID NO: 46817 - protein, 3930 aa, Bacillus anthracis
  MISC_FEATURE (19)..(19): X=any amino acid
  MISC_FEATURE (38)..(38): X=any amino acid
  MISC_FEATURE (3455)..(3455): X=any amino acid
  MISC_FEATURE (3459)..(3459): X=any amino acid
  MISC_FEATURE (3552)..(3552): X=any amino acid
  MISC_FEATURE (3566)..(3566): X=any amino acid
FYRYKHLRWKTGLGHYFHXYFSLFNKFSSVRRNPFNNXRRRIYVEYSRFTNQHKFPNIQATKSVNKSVAAIGDVLTYTVTIPNTGLLPANNVIFTDILPNGTSFIPGTVTVDNVPQTNANPAAGISLGTINNSASRTVTFQATVVSFPSQNPISNTANITFQYTPIAGGTTFNGLATSNSAGTQVNLADINGTKSVNKLFTDIGETLTYSIALANIGNIAATNVIYTDPIPSGTTFVPGSVTVNGVTQAGANPATGISIGSIAANSTTTVAFQVFVPSIPQTNPILNSGTTTYQYIPVPNQPAVSGTDTTNIVSTQVNNATVTMAKAVDKNFADIGDTLTYTVSFTSTGNTNANNVIFTDVIPTGTTFVLNSLTIDGTTQGGANPANGVNIGSIPTGTTKNVSFQVVVNTIPALNVVSNGSSASYQYTVNPSQSPVTKNISSNLVSTQINNANLALTKSTNKQFATIGETISYTILITNSGNTAATNVQLTDPLPNGTILTPGSVTLNGVLQNVDSLVALPIGTIPGGATFTLSFQVTVINITTQNPIINNAFASYLYTVNPSLPPTSKTANSNSVTSTIRLANLQATKSVDKTFAEVGDVLTYTFSLTNDGNVAANNIVLSDSIANGTAFVPNSVTINNVTQPGVTPASINIGSTTAGTTITASFKVLITSIPNPNPISNSASISYNFIVDPNAFPISKNTTSTTTFTQVNDANIISAKTVDRASATVGDVLTYTVVLTNAGSVSADSPTFVDTNPDGTTFIPNTFLINGVLQNNADPNVGVPLPSIPANGSLTVSYQVTVTSLPTQNPTINSSSTQYSFILNPGDPPTIETSLSNTVSTQINLANVVIVKQVDLTIADVGQPITYTIALANPGNTPANNVVVTDILPPGTTLVPNSIFIGGALQLGADPSAGLQVGTIPAGGFTTIVFQIGANSLPSPNPVQNSAVLQYNFIADPNSPPVVRNSASNIVTTQINTANIVATKLTSTNFADVGDVITYATILTNNGNIPASNVTFTDIIPAGTIFLPNTVTINGVPIANANPANGILIGTIGANSSRTVAFQVFVPTIPSANPIANQSSTTFQYTYDPSKPAVMQMVASNTVQTTINNATITSVKSADKQFANVNDIITYTTTLTNNGNTLASNIVFTDAIPSGTSFIPNSVTVNGTTLSNANPANGIAIDPINPNANTIISFQVQVNSIPNPNPIPNQSNTTYQYVVNPNLPPASSNTLSNVITTQINNATIIATKSVNTPNAAIGDIVTYTIAVTNTGNIPASATVLTDGLGPGASFIPNSVTINNVSQPGLDPSLGIHLDDISPEGTTFITFQVKILAIPPSGTLTNNALVNYEYTVNPTETPAVGSTVTNTTVTPIVDATLVINKNASTTFATIGDTITFTSVVTNTGNTTANNIVFTDSIPNGTTFVPNSFKINGVTVPNTNPQNSINIGNLNANASVTLSFQVNITTLPNPNPIPNQSSLQYRFIVDINEPPVSRTVQSNKTFTQVNSASVIATKTASSAFAAVGDTITYTTTLTNSGNTTANTPVFIDILPAELSFVPDSVQINTIPQLGFRPDTGVPLDSIPVGGTITISFQAIVGSIPAINPTLNQSSTTYSIIVDPTQPPVTEIATSNPTLIQINEAIIQATKSVDRLFSDVAPGNSFLTYTVLLENIGNTTATNIIFTDPIPNHTVFIEDSVRVGGILLPGVNPANGIPIGDIIAGDFINITFRVQVVSIPNPIFTIGPGGPNSPVVNGASINYQFMTGPNLPLASRSTTSNPVSTQINSGEIALVKSVDKTFVTIGDTLSYSISLSNPGNVTSQNIIFTDVLPEGITFISGTLTNDSGTQQIGNPATGIQIGNINPGSTATIVINALVTNIPSINPISNFSSVQFAHVVDPSQPSVSQTNLSNTVSTTIKSAILTTTKSADKSVISVGDTITYTTTITNTGNTAAANIKFTSAIPANTTFIPNSVTINGVQQSGVQPALGVNIPNIAPGETVTVTFQVNVLSVPSSSSIMGNDTILYSYTVDPNGTPVTTSTSTNIVTNPVLDAIITMVKSVDQTLVTLGDTITYTILLTNTGNTNATNITFTDLIPNGTTFITDSVTIDGITQIGLNPNTGITIGAIAPNSSISIAFQVTATSTPVQNPIANSATASYTFIADPNAPIVSRTVTSNTVFTTINTATILSLKQVDKSFSRIGDTLTYTVALTNNGNSSAQNVIFTDTVPSGTAFIADTFSINGIPQSGANPVNGVNIGSITAGTTVTVSFQVTVTSLPTENPIVNFSSTSYQLVSPPDAETSISNPVSTQIKEAILSMAKNESLSFANIGQTAFYTTSISNIGNTDATNIVFTDVLPNGVTFVPNTLTVDGVLQPDANPNTGVLLATLPPNEIYSIVFQVTVNSIPPINPAPNTASTTYEFTVDPVNPPVLSAATSNTTLLQINNANIISTKTTDLTFADVGNTITFTLNLPNTGNVTATDVTVIDTLDSNLTFVPNSFTVNGQTILNADLSTGVNIGSINGGTAAIVTFQATVTTLPINNPISNSALTTYRYIVDPDQSPITTSNQSNTTTTQINSAILTAQKSTNVFTVDIGQDIVYSVTITNSGNVNATNVIFTDVIPDGTSFEPNSFTLNGTIIENANIITGVPIGDIAPNESAIVEFHITSNEIPAINPITNQASVSFQHIVNPANPPVSKNITSNSVTTTIESAILTTTKIGDKAFATIGDTITYTTTITNIGNIPANNVIFSDPIPSWTQFVAGSVIVDGTPLPSASITSGIGINTIIPNQTVTIIFQVQIVSNPPTFTPELQNLAFVNFQYNVGNALQAQPGNVETNVFVTAIHSAILSAVKTASTAFANIGDTITYTVLIQNSGNTNATNVNFSDLIPGGTTFVENSFAVNGNTIPGANPNSGVNIGTVSAGSSLTVTFQVIVTSTPPSNPITNVASIQFAFIVDPAAPPVTGTVTSNSASTQINNATVTTLLEADRTIVSIGDIITYTATLTNTGNFPANSVLLINGVPEGALFVPNSVTLNGISLPDASPTLGIPVGIIAPGNSATITFQFLANSIPPQGAIINQALTSYTYIVDPSQPPVTATSSSNTVTTAVVDASLSVIKNTDSIVQSTDGTITYTVVIQNNGNTTANTVTLTDLVPEGTALIPNSVTINSISIPGADPNVGIPLNSIAPSEIVTVTFQVIVQSIPSVNPISNIARIDYTFIADPTAPIVSRTITSNPAFTQISDANVLSLKAVNAQQATTGDILTYTITLENTGNIPATNLIFSDTIPEGTTFVENSFTLNGTAILGANPNVGVTLPNLAANATHLIAFQVLINDPFSQQSITNQSNTTYTIQPDPGQPPITETSTSNIVITNFVQAQLTITKTSNPITVDIGGTILYISEVKNSGNVDAINIIFTDSIPVGTTFVLDSVTINGVLQPDANPENGIPIGTISTKQFQNNTISSTNKXSTYXNRNCKSIFSNLPICKYSYSSTSESLCKFNIVTTSLQNANIISVKSADVTFVSIGQFITYTIHYKISERFQLTIRCSLTTFQKGQYSLKIAYQXIMSFSLVRILKMEXLSARYNQMKQSLFHSKYNLQIYLKTIQSLTSQTLHMEYQIDPSSPIIQRRSLSNTVNTEVRTANVSAIKSANRSITRIGQIITYTIAVTNAGTVPITNTLLIDAIAAGTTFVPDSILVDGIPRPNENPSTGISLNIILPNNTIIVTFQVNVDSIPSQNNMNNIAVIHYEYQPDQSLPPISETTASNSTNIQFIEAILFATKSANTVLANIDETIEYTVLIQNNGSTTTNSIFFTDTIEDGSIFIPGSVIVNNTVLPAADPNIGFSIPNIASGQVATITFQVSVTNLPVANPTPNTANIVYDFIFNPDFAPIQKSTTSNTTFVQINDADIVSLKTVDLTSVTIGDVLTYTTTLTNTGNTDATAVV

SEQ ID NO: 46818 - protein, 227 aa, Bacillus anthracis
  MISC_FEATURE (207)..(207): X=any amino acid
  MISC_FEATURE (220)..(220): X=any amino acid
YGIPSSSSHAIIGSIAGAAIAAAGISSLNLKGFIKIIEALIISPIIAFVIGYTVYSIFKVVFKNFNLTKTNKNFRIFQIFTAALQAYTHGTNDAQKAMGIITMALMANNYHTSSDIPFWVQLSCAIAMGLGTSVGGWKIIKTVGGQIMKIRPVNGVAADLSSSLVIFGATFIHLPVSTTHVISSSILRGGASHRVKSGKGGTAKRMXLLGLSHFLCQLHXLLYVTLY

SEQ ID NO: 46819 - protein, 270 aa, Bacillus anthracis
MDNKIVYVVSDSVGETADLVVRAAMGQFPFAPDIRRVPYVEDTGTLKEVISIAKSNQALICFTLVKPDMRQYLVTEAAKEGVEAYDIIGPLIDQIEEITGQVPRYEPGVVRRLDEEYFKKIEAIEFAVKYDDGRDARGILKADIVLIGISRTSKTPLSQYLAHNKRLKVANVPLVPEVDPPEELYQVAKEKCFGLKITPEKLNHIRKERLKSLGLSDGATYANINRIKEEIDHFENVVSKINCQVIDVSNKAIEETANIIVNAVQNQKMF

SEQ ID NO: 46820 - protein, 377 aa, Bacillus anthracis
MITVKIPVRMDDGTVKIFTGYRAQHNDAVGPTKGGIRFHPNVTENEVKALSIWMSLKCGIVDLPYGGGKGGIICDPREMSFRELERLSRGYVRAISQIVGPTKDIPAPDVFTNSQIMAWMMDEYSRIDEFNSPGFITGKPLVLGGSHGRETATAKGVTICIREAAKKRDIDIKGARVVVQGFGNAGSFLAKFMHDAGAKVIAISDAYGALHDPNGLDIDYLLDRRDSFGTVTKLFNNTISNKELLELDCDILVPAAIENQITEENANDIKAKIVVEAANGPTTLEATKILTDRGILLVPDVLASAGGVTVSYFEWVQNNQGYYWTEEEVEQRLEKVMVRSFDSIYETAQVRKVNMRLAAYMVGVRKMAEASRFRGWV

SEQ ID NO: 46821 - protein, 222 aa, Bacillus anthracis
  MISC_FEATURE (10)..(10): X=any amino acid
  MISC_FEATURE (37)..(37): X=any amino acid
  MISC_FEATURE (206)..(206): X=any amino acid
ICDIRRGMPXISFQEWVIINIITLIVLLAAGIAGYYXLQSSGKITYKPDNAKNDWKRYSPLASPLTSKLTDWKAEVGKNYNENDKLGAVTDITHRNGRTTVDVTIPQNATVVQSNATTKAFVGAGSPIAYAFDMNQLWGNSKIEETDVDDFQKRSRCRVYVDAYPDTTLTGKVEQVRLTTANTFSMLPSNNATPNYTKVTPVVPSXISLDHTKSLNIVPGMN

SEQ ID NO: 46822 - protein, 342 aa, Bacillus anthracis
MTRVAINGFGRIGRMVFRQAIKESAFEIVAINASYPSETLAHLIKYDTVHGKFDGTVEAFEDHLLVDGKMIRLLNNRDPKELPWTDLGVEVVIEATGKFNSKEKAILHVEAGAKKVILTAPGKNEDVTIVVGVNEDQLDITKHTVISNASCTTNCLAPVVKVLDEQFGIENGLMTTVHAYTNDQKNIDNPHKDLRRARACGQSIIPTTTGAAKALAKVLPHLNGKLHGMALRVPTPNVSLVDLVVDVKRDVTVEAINDAFKTVANGALKGIVEFSEEPLVSIDFNTNTHSAIIDGLSTMVMGDRKVKVLAWYDNEWGYSRRVVDLVTLVVDELAKQENVQHI

SEQ ID NO: 46823 - protein, 214 aa, Bacillus anthracis
MFTGIVEELGTITNMQQSGEAMKLTIHANKILSDVHLGDSIAVNGICLTVTSFTTTSFTVDAMPETMKSTSLRLLKSHSKVNLERAMAANGRFGGHFVSGHIDGIGTILNKKQHYNAIYYKIAISDELLRYCLHKGSIAVDGTSLTIFDIDESSITISLIPHTVSESVIGEKNAGDIVNIECDMIGKYIERFITKPVKRTGSMTENFLQENGFL

SEQ ID NO: 46824 - protein, 89 aa, Bacillus anthracis; identical to SEQ ID NO: 46803

SEQ ID NO: 46825 - protein, 122 aa, Bacillus anthracis; identical to SEQ ID NO: 45315
  MISC_FEATURE (106)..(106): X=any amino acid

SEQ ID NO: 46826 - protein, 365 aa, Bacillus anthracis
MELVEIRQELEKMAKRLAAFRGSLDLPTKEKQIAELEEKMMGAGFWDDQQGAQAVINEANALKDMVGKFRQLDETFENLEITHELLKEEYDEDLHEELESEVKGLIQEMNEYELQLLLSDPYDKNKAILELHPGAGGTESQDWGSMLLRMYTRWAEKRGFKVETVDYLPGDEAGIKSVTLLIKGHNAYGYLKAEKGVHRLVRISPFDSSGRRHTSFVSCEVVPEFNDEVEIEVRTEDLKIDTYRASGAGGQHVNTTDSAVRITHTPTNTVVTCQSERSQIKNREHAMKMLKAKLYQKKLEEQQAELDEIRGEQKEIGWGSQIRSYVFHPYSLVKDHRTNTEVGNVQAVMDGEIDPFIDAYLRSRI

SEQ ID NO: 46827 - protein, 829 aa, Bacillus anthracis
  MISC_FEATURE (106)..(106): X=any amino acid
  MISC_FEATURE (135)..(135): X=any amino acid
  MISC_FEATURE (146)..(146): X=any amino acid
  MISC_FEATURE (148)..(148): X=any amino acid
  MISC_FEATURE (189)..(189): X=any amino acid
  MISC_FEATURE (198)..(198): X=any amino acid
  MISC_FEATURE (200)..(200): X=any amino acid
  MISC_FEATURE (231)..(231): X=any amino acid
  MISC_FEATURE (285)..(285): X=any amino acid
  MISC_FEATURE (288)..(288): X=any amino acid
  MISC_FEATURE (290)..(290): X=any amino acid
  MISC_FEATURE (295)..(295): X=any amino acid
  MISC_FEATURE (393)..(393): X=any amino acid
  MISC_FEATURE (400)..(400): X=any amino acid
  MISC_FEATURE (442)..(442): X=any amino acid
  MISC_FEATURE (454)..(454): X=any amino acid
  MISC_FEATURE (467)..(467): X=any amino acid
  MISC_FEATURE (471)..(471): X=any amino acid
  MISC_FEATURE (553)..(553): X=any amino acid
  MISC_FEATURE (599)..(599): X=any amino acid
  MISC_FEATURE (619)..(619): X=any amino acid
  MISC_FEATURE (664)..(664): X=any amino acid
  MISC_FEATURE (667)..(667): X=any amino acid
  MISC_FEATURE (668)..(668): X=any amino acid
  MISC_FEATURE (683)..(683): X=any amino acid
  MISC_FEATURE (698)..(698): X=any amino acid
  MISC_FEATURE (703)..(703): X=any amino acid
  MISC_FEATURE (704)..(704): X=any amino acid
  MISC_FEATURE (735)..(735): X=any amino acid
  MISC_FEATURE (736)..(736): X=any amino acid
  MISC_FEATURE (749)..(749): X=any amino acid
  MISC_FEATURE (760)..(760): X=any amino acid
  MISC_FEATURE (804)..(804): X=any amino acid
  MISC_FEATURE (807)..(807): X=any amino acid
  MISC_FEATURE (813)..(813): X=any amino acid
  MISC_FEATURE (822)..(822): X=any amino acid
  MISC_FEATURE (823)..(823): X=any amino acid
QQQARIREINISHEMRTSFLDYAMSVIVSRALPECRDGLKPVASKVLIAMNGFRITADKAYKKSARIVGGSNRKYHPHGDSAVYETMVRMAQDFSQRYMLVDGPWXLWSVDGDSAAAMRYTEARMSKILYGINTXISKNTIDLSRXLXWFEREADCVSQRGFPNLLVNGYDRVLQFGMGTNNSAASTLXSNGWRIWHXSXSRYYYCRINGVHSQDRFFDGKVNFKKKCYSXKLWNRDAGSIYTSGLKLEIEEKSNGKQSIIVTELPYQVNKARLIEKIAKISSRXENXDXYRFTXESDRNGMRIVMEVRRDANANVLLNNLYKHTALQTSFGINMLSLVNGEPQVLNLKQNLYHYLEHQKVVIRRRTAYELEKAEARAHILEGLRIALGTSGXSYYINSXFENSGIAKQGLMERFGLSEKQAQAILDMRLQRLTGIETRKNXTRISRFNEVNRXLKAILADEEIGSXDYSXRINRSKRALQDKRRTEITIGGMESIEDEDLIPEQNIAITLTHNGYIKEGASFLRTKHRNRGGTWVCGEWGNNDDDFRRAFYXPLLRMTIFYSSLLRESFPVGKDFEFPRSYFRTSEKVSLIIYLFRGXIRGEMDLTPLFPIRELGDRXNFYSSHQNQGSIKRTPTFIIWRIYVQNGLIAFSLGEEDEVILYVXHWXXGYYVGTSQWYANSFXRARCTFYGDVMRLVXKQLHXXRRSSCRYGNCRRGCKCLIVTKNGYGKRTRDXXNIAWKSRGWKRFXRLGNIPDKNGXFEWLLIWSPVRGDFCLFTASGCLFLYASDSNLSNGDVIHKVFVXFDXRMSKKXRQSKSTKGXXGRNSEE

SEQ ID NO: 46828 - protein, 341 aa, Bacillus anthracis
MKINWTEVKGKIRPQISKPSYETWFTNTTVYLEDDILTIYCPNEFARDWLESHYKELVFNTLREMFNTSFEIQFDLCNGEPSNLKDVQKEKLSSWDEVKKALRPKIAEKTFMTWIRNTNATIKDNKVIIFCEDAFHRDLLEGEYKNIISSTVQKITDEEYQIWFEIGSSATSKAQVHHMKNNQRTSGQEESKTIWNKIKDKMQLKISRPSYETWVKETTARINEDSLIIYFENEFQQEWVKKSYKDLISQIAKELTGNTYEIQFELKSNTTSNNEKSTIKDITSELGERFKVSNNSLKYNDVDESNKRIRALEEKIMNLEKVIGTLVEKLDAVELKTQLEK

SEQ ID NO: 46829 - protein, 41 aa, Bacillus anthracis
LENGADLRAVQEMLGHADISTTQIYTHVSKTRLKDVKFCLK

SEQ ID NO: 46830 - protein, 479 aa, Bacillus anthracis
MNWYVIIPMIISFIVVFLIGVYASRRVQATAPNKFLQEYFLGGRELGGLLLAMTMIATYGSASSFIGGPGIAYNMGLGWVLLSAIQVVTGYIVLTVIGKKFAIIARKMEAITLIDYLKGRYNNKAVVILSAVCIIIFLFSATVAQWVGGGRLIESLTGLSYTTALFLFTFSVLVYVLIGGFRAVALSDTLLGIIMLVGTTIILIATVIAGGGIEKIMQELVQINPNLITPFGADGSLTKSYVTSFWILIGIGVVGLPQISVRAMSYKNSKAMHQALIIGTIVVGTIMIGMHLTGVFARVVLPGIAVPDKVMPLLAMEVLPPWLAGVFLAAPMAAIMSTVNSLLLLVSSSIIKDIYVNYINKDAADSTIRKGSLWITAIVGLLVYAAAIKPPDFLIWLNLFSFGGLEAAFIWPIVLGLYWRKGNATGALASILVGVSSYMCIHLFYPNPFGIHTVVFPICFAFIAYILGSMVAVKKNSIG

SEQ ID NO: 46831 - protein, 258 aa, Bacillus anthracis
MKERVLSRVNYHQKVALNPMTKFFYKAIILLLLLSFTLLFIGNVMIEQSDISKLHVPAKLEVPESLTHAFIATEDKRFYHHNGLDYIAIIRASVENIKAGGVVQGGSTITQQLSKNAFLTNERTFSRKWKEIFYTKKIERTFTKDEILKLYVSNIYYGEGAWGIEKAANLYFGKKVSQLTLAESAMMAAVVKAPAYYSPAQNYDKAVERRNVVLRLMEKEGYINHDEYMQAVSEKLVIRHDIKTERSMLNHAREKAVS

SEQ ID NO: 46832 - protein, 1108 aa, Bacillus anthracis
MKFVHLQCQTVFSLLKSACKIDELVVRAKELGYSSLAITDENVMYGVIPFYKACKKHGIHPIIGLTASIFSEEEEKSYPLVLLAENEIGYQNLLKISSSIMTKSKEGIPKKWLAHYAKGLIAISPGKDGEIEQLLLEDKESQAEEVARAYQNMFGNFYMSLQHHAIQDELLLQEKLPAFMNRVNIPVVATNDVRYINQSDALVHECLLSVESGTKMTDPDRPRLKTDQYYLKSSDEMEALFSHVEEAIYNTVEIAERCRVEIPFHVNQLPKFPVPSNETNDMYLRRVCEEGLQKRYGTPKEVHINRLNHELNVISSMGFSDYFLIVWDFMKYAHENHILTGPGRGSAAGSLVSYVLEITDIDPIEYDLLFERFLNPERVTLPDIDIDFPDIRRDEMIRYVKDKYGQLRVAQIVTFGTLAAKAAIRDIARVMGLPPRDIDIFSKLIPSKLGITLKDAYEESQSLREFIQGNLLHERVFEIAKRVEGLPRHTSIHAAGVIMSQEPLTGSVAIQEGHNDVYVTQYPADALEELGLLKMDFLGLRNLTLLENIIKFIVQKTGKEIDIRNLPLQDAKTFQLLGRGDTTGVFQLESSGMRNVLRGLKPNEFEDIVAVNSLYRPGPMEQIPTFIESKHGKRKIEYLHPDLKPILERTYGVIVYQEQIMQIASKLAGFSLGEADLLRRAVSKKNRDILDQERKHFVQGCLQNGYDETSAEKIYDLIVRFANYGFNRSHAVAYSMIGYQLAYLKANYTLEFMTALLSSAIGNEDKIVQYIRETKRKGFHVLPPSLQRSGYNFQIEGNAIRYSLLSIRNIGMATVTALLEEREKKMFEDLFEFCLRMPSKFVTERNLEAFVWSGCFDDFGVSRTNLWKSLKGALEYANLARDLGDAVPKSKYVQGEELSFIEQLNKEKEVLGFYLSSYPTAQYVKLAKELEIPSLAQAMRHKKKVQRAIVYITSVRVIRTKKLQKMAFITFCDQNDEMEAVLFPETYIHFSDKLQEGAIVLVDGTIELRNHKLQWIVNGLYPLEEMDAYEEKKDASVYVKLPSQYEKKLLNQVTKILFDYSGFAKVLIYYEKEHKMVQLSRSLSIHPSEECLGALREIVGEENVVVKI

SEQ ID NO: 46833 - protein, 149 aa, Bacillus anthracis
MNRFWAEKRIELDLDLEKVHITADQESMSQVWINLIHNSIKFTPSSGTISIKLKEYETLVEVRIRDTGSGISEEQKQHIFERFYKADSSRNRAYGGSGLGLAIVKKVLDLHQGEIKVESEEGEWDGCIVCIPIMKENSVRRESLYTISL

SEQ ID NO: 46834 - protein, 267 aa, Bacillus anthracis
MWNYEAEEAKAVIVIVHGAMEYHGRYEAVAEMWNHIGYHVVMGDLPSHGTTSRNRGHIDSFDEYIEEVKLWVKEARKYRLPIFLFGHSMGGLIVIRMMQETKREDVDGIILSSPCLGVLAGPSAPLQAASKILNIIAPKLQFATNLTVEMSTRNHEVRDAMENDSLFLRKVSVRWYSELIKSIEIAHKKIDDFPDVPLLLMQACEDKLVDKTRVRTWFNNVKISDKAFKEWPNCYHELLNEYERDEILNYIQSFTEIRINNIIETNK

SEQ ID NO: 46835 - protein, 148 aa, Bacillus anthracis
MTSNNEREDISQSLKVFIALSRVHRSVMDTTNKSIQSNGLNPTEFAVLELLYHKGGQPLQQIGERILIASGSITYVVDKLEKKGLVKRIPCPNDRRVIYAQLTESGETFIASIFPGHEQVIHQSFEMLTKEEKDELLDLLKKIGKYEK

SEQ ID NO: 46836 - protein, 456 aa, Bacillus anthracis
  MISC_FEATURE (44)..(44): X=any amino acid
  MISC_FEATURE (316)..(316): X=any amino acid
  MISC_FEATURE (358)..(358): X=any amino acid
  MISC_FEATURE (448)..(448): X=any amino acid
LNRGLKERHITLMSLRSAIGRLGLFLGSASAIKLAGPSILLGKXIAGDPLFFFIMRALGEMAIEQPVAGSFSKYAYDYLGPLAGYITGWNYWFLWVVTCMAEITAAGIYMQYWFPDIPRWTWALLALLYNSAFNFLSVKVFGELEFWFALIKIVTIICMIVVGAGIILFGFGNGGIATGISNLWSHGGWFPNGFSGLLLSMQMVLFAYLGVELIGVTAGEAQNPKKTLAKAIDNVFWRILLFYVGALFVMMAIYPWNELGEKGSPFVLTFQQIGIAKAAGIINFVVLTAALSSCNGGLFSTGRMLYTLAQQKKAPXRFGRFNKNGISSQGNVATAIGLLLGGIINYLRPGKGFTWAHXYFHFSGRIWTWGKLYIRPQLKFRKSLPTQNRQKLSYKNALSPLSSYFSLAFLVLVLGIMAVFRRYRIALIVGPIWAIGLSYRVLHKGVSXRDETPNSK

SEQ ID NO: 46837 - protein, 649 aa, Bacillus anthracis
  MISC_FEATURE (211)..(211): X=any amino acid
  MISC_FEATURE (371)..(371): X=any amino acid
  MISC_FEATURE (410)..(410): X=any amino acid
MKQLTGAQIRQMFLDFFQEKGHAVEPSASLVPHEDPSLLWINSGVATLKKYFDGRVIPQNPRITNAQKSIRTNDIENVGKTARHQSFLELGGNLLNRGISSKEEAISWGWEFLTSDKGFGLNKELLSVTIHAEEEEPFTVWKEKRGVPKERIIRIKENFWDIGEGPSGPNTEIFLDRGEAYGNDFSDPELYPGGENERYLEVWNLVFSQIXHNPDGSYTPLRKKNIDTGMGLERMTSIVQEVRTSLDTDLFMPMIGATETISGEKYRNGDLEKDMAFKVIADHIRTVTFAVGDGALPSNEGPWLVLRRLLRRAVRYSKKLNINRPFMFELVPVVGEVMKDFYPEVLEKKDFNRKKLGKNEEGGVFMETLPXWRRRFLSEVIRKKLKKKKTTVISGVDAFGLYDTYGFPNXINREYAEEAGMTVDHEGFENEMEKQRERARAARQDVDSMQVQGGVLGEVKVASEFVGYGTVATESNVVALVKNGEYTDSLQVGEEGQLMLDVTPFYAESGGQIADRGCLLADGVKVLVKDVQKAPNGQNLHQVVVEEGTLTKDAAVKAIIDTKNRSSVVKNHTATHLLHQALKDVLGTHVNQAGSLVTSERLRFDFSHFGQVQADELEKIERIVNEKIGKVLMLEISQKAMNEAKEMGA

SEQ ID NO: 46838 - protein, 242 aa, Bacillus anthracis
MKRLQKVIAQAGIASRRKAEELIQQGKVKVNGKIVKELGTKVTPQDKVEVNNIPLEKEEPVYFLLYKPTGVISSVSDDKGRSVVTDFFPEITQRLFPIGRLDYDTSGVLLMTNDGDFANVLMHPRYKVEKTYVAKIKGPLTGEKIRMLERGVTLEDGKTAPARVKIISWDKRKEMAIVQLTIHEGRNRQVRRMFEALDCKVVKLKRERYAFLEVGSLRPGDARELTPHEVKQLRALASTKPR

SEQ ID NO: 46839 - protein, 399 aa, Bacillus anthracis
  MISC_FEATURE (104)..(104): X=any amino acid
  MISC_FEATURE (253)..(253): X=any amino acid
  MISC_FEATURE (274)..(274): X=any amino acid
IYKPVKTNRLWMILVLGTLTAIGPLSIDMYLPSLPKLTDDLQTGASLAQLTLTACLLGLSVGQLFVGSISDFRGGRNLLIIALIIYVASSLLCAVAPSIWTLGXFRFLQGATGSAGNCISRAMVRDMYSVSEMRKFFSLLMLVNGAAPIWAPIIGGQLLQFTTWRGCLIVLGAISVFMLISATFVLRETLPPEERETCGLSRTLATYGKLFKGSFVMGIPFSQGFSNGRNVCIHFGLTICVANIYGASPQQFXLFLCHQRIRDYYWRSGYRVVXQGKVNEKTLFVSGIVIAAVGGLSLLLTILLGIGLIGVLCSLFLVVSSVGVVSTTGFSLAMRNQKQAAGTASALLGLLQFISGALVAPLVGIGGSNTALPMGIVIALCEIGAVLCYLFMARRSEKQ

SEQ ID NO: 46840 - protein, 314 aa, Bacillus anthracis
MRKIISVLVIFFMTGSIFAGGAVHAKAEGKHEWNKNKFLNIAHRGASGHAPEHTFASYDLVKKMKADYLELDIQLTKDGQLIAMHDTAVDRTTNGTGEVRDKTLSEIKSLDAGSWFNKAYPEKAKQEYVGQKVPTLEEIFQKYGRSMKYYIETKSPDVYPGMEEKLLALLEKYNLIGQNMSSSRVMIQSFSKDSLKKIHSINKNIPLVQLLWYYPNENNEIVEWSGITHEPKRVTNDDFQEIKKYAVGIGPNLRNDNGDLIINESYMKMARQNGLLIHPYTINEKPDMRLLMKWGATGMFTNYPDRLHTVLKEK

SEQ ID NO: 46841 - protein, 138 aa, Bacillus anthracis
GSFGGWLADNVGSKKSIISIIIVFACAIFLLPLMTFSFPLFIIMMGIWSMLSWAISPAQQNYLIEIAPESAGIQQSLNNSALHLGIALGSTVGGVVIEKSSVIYNAWVGGGFIILALLCAIFSITRGRSTQFAKEESI

SEQ ID NO: 46842 - protein, 298 aa, Bacillus anthracis
MTKQTEYKRKPEWLKIKLNTNENYTGLKKMMRSKNLHTVCEEAKCPNIHECWAVRKTATFMILGAVCTRACRFCAVKTGLPTELDLQEPERVADSVVQMGLKHVVITAVARDDLKDGGAAVFAETVRAVRRKNPFTSIEVLPSDMGGVEENLKMLMDAKPDILNHNIETVRRLSNRVRARAKYDRSLEFLRRAKEMQPDIPTKSSIMVGLGETREDLIEAMDDLRANNVDILTLGQYLQPSKKHLPVLKYYPPAEFAELKEIALSKGFSHCEAGPLVRSSYHADEQVRSAKEKTAEAK

SEQ ID NO: 46843 - protein, 508 aa, Bacillus anthracis
  MISC_FEATURE (274)..(274): X=any amino acid
  MISC_FEATURE (296)..(296): X=any amino acid
  MISC_FEATURE (297)..(297): X=any amino acid
  MISC_FEATURE (307)..(307): X=any amino acid
  MISC_FEATURE (373)..(373): X=any amino acid
  MISC_FEATURE (386)..(386): X=any amino acid
  MISC_FEATURE (483)..(483): X=any amino acid
YMIGVDIGTTSTKSVLFSTDGSVIASHGIEYPLYSPTPETAEQDPEEIFRAVIHTIKETVQTSSVQPHDILCGSFNSAMHNIIAVDEKGMPLTDGITWADNRSASWAEKIKNDMNGHEIYLRTGTPIHPMSPLSKLVWLQNEQAELFAKTYKFISIKEYVFYKLYKEYVIDYSIASATGMFNLKSLKWDEEALHVAGITDVQLSKLVPTTHSLTGLDEELANEMNVLGSTPFVEGASDRNLFNLGGNANGPGVWAGTLVTTGANLAGTNPPVNXPKRRIFLLPPNGNLWVIGGTTXXRGMIFRVGSXSIGTSEIELAKRLGKDPYEVLTEIAAKSESRDLDGVLFHPVFSRRKSSLWECKCAEDHSWDWDCPXEKTSESCSFRKGXFNNYIPVLLAKKNFIGEPEKNSKRQAVFARSELWRQMMADIFHQDVYVPRSFESSCLRAAILPLFNLCEEDTLHGISVKGRRGISPLTPTWKCGKIXRFNTNLYSLSRQLEEEYESIADYQK

SEQ ID NO: 46844 - protein, 167 aa, Bacillus anthracis
MKAIISYETPLEQAHFTAKNNEKDMFYKENTEESVEGSLKYDVLDAVGEFKGQPGYIVCNNISVTDEGRPVFENRFKNRAGLIENEPGFQAIRVLRPLSNDTYVILTMWETEQNFKDWTESRSFENAHKKRPAQAEGQAPSQAHPHAEQQKSIFSRPSFVTTFDVLV

SEQ ID NO: 46845 - protein, 329 aa, Bacillus anthracis
MIDNFWRDLPRPFFVLAPMEDVTDVVFRHVVSEAGRPDVFFTEFTNSDSYCHPEGMKSVRGRLIFTEDEQPMVAHIWGDNPEYFRQMSIGMAELGFKGIDINMGCPVPNVASRGKGSGLILRPDVAAELIQAAKAGGLPVSVKTRLGFKELSEWEDWLTHIFKQDIANLSIHLRTREEMSQVDAHWELIPEIKKLRDRIAPNTLLTINGDIPDRKTGLELAEKYGIDGVMIGRGIFKNPFAFEKEPREHSSKEHLDLLRLQLDLQDQYAEVLPRSITGLHRFFKIYVKGFPGAAELRNQLMSTKSTDEVRALLNKFEESVNVVEGSETV

SEQ ID NO: 46846 - protein, 386 aa, Bacillus anthracis
MLEFDTTQDQLANIKVIGVGGGGNNAVNRMIEHGVQGVDFIAVNTDAQALNLSKAETKMQIGGKLTRGLGAGANPEVGKKAAEESKEQIQEALRGADMVFVTAGMGGGTGTGAAPVVAQVAKELGALTVGVVTRPFTFEGRKRATQAASGIAAFKENVDTLIVIPNDRLLEIVDKNTPMLEAFREADNVLRQGVQGISDLIATPGLINLDFADVKTIMSNRGSALMGIGSGNGENRAAEAAKKAISSPLLETSIDGAQGVIMNITGGANLSLYEVQEAADIVASASDPEVNMIFGSVINEGLKDDIVVTVIATGFDDSIATQPPKPIIRPNVNHTQQQQQPVAQPPKQREVKREMKREEPVVHERHSDSDSDDIDIPAFLRNRRRR

SEQ ID NO: 46847 - protein, 882 aa, Bacillus anthracis
  MISC_FEATURE (29)..(29): X=any amino acid
  MISC_FEATURE (44)..(44): X=any amino acid
  MISC_FEATURE (87)..(87): X=any amino acid
  MISC_FEATURE (119)..(119): X=any amino acid
  MISC_FEATURE (120)..(120): X=any amino acid
  MISC_FEATURE (133)..(133): X=any amino acid
  MISC_FEATURE (142)..(142): X=any amino acid
  MISC_FEATURE (253)..(253): X=any amino acid
  MISC_FEATURE (284)..(284): X=any amino acid
  MISC_FEATURE (328)..(328): X=any amino acid
  MISC_FEATURE (416)..(416): X=any amino acid
  MISC_FEATURE (420)..(420): X=any amino acid
  MISC_FEATURE (421)..(421): X=any amino acid
  MISC_FEATURE (424)..(424): X=any amino acid
  MISC_FEATURE (481)..(481): X=any amino acid
  MISC_FEATURE (483)..(483): X=any amino acid
  MISC_FEATURE (524)..(524): X=any amino acid
  MISC_FEATURE (541)..(541): X=any amino acid
  MISC_FEATURE (542)..(542): X=any amino acid
  MISC_FEATURE (723)..(723): X=any amino acid
  MISC_FEATURE (729)..(729): X=any amino acid
  MISC_FEATURE (778)..(778): X=any amino acid
  MISC_FEATURE (804)..(804): X=any amino acid
  MISC_FEATURE (806)..(806): X=any amino acid
TPMISHYLKVKARLQDAFFFFFRFRDFYXNVPLEDAVKSSPAPXNTLTSRDGGSSERIPMCGCPLSLGLKFLWNNLLKKGYKVAVLXPSRRPKPAKGVVPREVVQLIPPRNDDGRGSDXXERKYFLSRINHIXRMVIWVSLXRLTAGQKSSNVIDWFSRRYLLEVYATGRKEIVVDSSFSKDELNKLTETLKMTISYEDATAIPEGLEHLVKNVSQAKLIKAVGRLFNYVIRTQKALLKFIYALWKFLFGSNXEIGWPFKAEFKANRTIWMEEKNRICSMRIEXDETARGVRMLKQWMERPLIQKERIEERLEMVETFVNDYFLREDXKEKLKEVYDLERLAGKVAFGNVNARDLLQLRRSLLQVPAILEAISLLDNAYAARLIQGADPCESLTELLGRSIQENPTAFDLRWRYYXRWLXXQLXSYRYVSKNGKTWIAELKKRERDITGIKSLKIGYNRIFGYYIEVTKATPWSITRRTLXAXPNACNAERFITDELKEKETLILEAEEKIVQHRIRFIYSASXRSKSILFEITAFSESNXXIRRTAKFATVSEEEQFVKPVLTTKREIFIKDGRHPVVEKVLNGKLYVPNDCIMPENMDVFLITGPNMSGKSTYMRQLALVTVMSQIGCFVPATEAVLPVFDQIFTRIGAADDLISGQSTFMVEMLEAKNAIANASERSLILFDEIGRGTSTYDGMALAQAIIEHIHDQIGAKTLFSTHYHXLDWPRXQLDSPEKRYPVQAIEKNGKVVFLHKNSKAGQQIKVTEFTLRQLAEASRXLNSLERKKLLAAFRATGRKLLSQSVXKXKRKSQEVIPEPIVVKEEPIEIEETKVDNEEESQLSFFGAEQSSKKQDKPALDAKETAVLTQIKKIDLLDMTPLEAM

SEQ ID NO: 46848 - protein, 84 aa, Bacillus anthracis
MAKEKIRIRLKAYDHRILDQSADKIVETAKRSGATVSGPIPLPTEKTVYTILRAVHKYKDSREQFEMRTHKRLIDIVSPTPQTV

SEQ ID NO: 46849 - protein, 100 aa, Bacillus anthracis
MRILFVGDVVGSPGRGMIQQYVPALKKKYTPTVTIINGENAAGGRGITEKIYRDFLECGAQAVTLGNHAWDNREVFEFIDDARYLARTATFPKGTLGKGL

SEQ ID NO: 46850 - protein, 298 aa, Bacillus anthracis
MLKIGSHVSMSGKKMLLAASEEAVSYGATTFMIYTGAPQNTRRKPIEELNIEAGRKHMEQNGIEEIIVHAPYIINVGNTTKPETFQLGVDFLRMEIERTSALGVAKQIVLHPGAHVGAGADAGIQQIIKGLNEVLTPDQTVNIALETMAGKGTECGRSFEEIAKIIDGVKYNEKLSVCFDTCHTHDAGYDIVNNFDGVLNEFDKIVGIDRLQVLHINDSKNVRGAGKDRHENIGFGHIGYKALHHIVHHPQLTHVPKILETPYVGEDKKDKKPPYKLEIEMLKNGTFDEGLLEKIKAQ

SEQ ID NO: 46851 - protein, 458 aa, Bacillus anthracis
  MISC_FEATURE (252)..(252): X=any amino acid
  MISC_FEATURE (254)..(254): X=any amino acid
MSLVKKGAALLMVATMALSSAACSNSKTEGKPEAQAKVAPVEKNGDKTVIRFWHAMGGKTQGVLDGLVADYNKSQNKYEIKAEFQGTYEESLTKFKTMSATKEAPALVQSSEITTKYMIDSKKITPIDSWIKKDKYDTSKLEKAITNYYSVDGKMYSMPFNSSTPVLIYNKDAFAKAGLDPEKAPKTYAELQEAAKKLTIKEGGNVKQYGFSMLNYGWFFEELLATQGALYVDNENGRKDAAKKAVFNGKEXQXVFGMLDELNKAGALGKYGASWDDIRAAFQSGQVAMYLDSSAGVRDLIDASKFNVGVSYIPYPEDSKQNGVVIGGASLWMTNMVSEETQQGAWDFMKYLTKPDVQAKWHTATGYFSINPDAYNEPLVKEQYEKYPQLKVTVDQLQATKQSPATQGALISVFPESRDAVVKALEAMYDGENSKEALDEAAKATDRAISISARTSQK

SEQ ID NO: 46852 - protein, 153 aa, Bacillus anthracis
MSTQYLNSNLKVFSLNSNKELAEQIAKHIGVGLGKCSVDRFSDGEVQINIEESIRGCDVFIIQSTSFPVNEHIMELLIMIDALKRASAKTINIVIPYYGYARQDRKARSREPITSKLVANLLETAGATRVITLHLHAPQIQGFFDIPVDPFKA

SEQ ID NO: 46853 - protein, 249 aa, Bacillus anthracis
MQRYFVEEKYVNETSIRIVGDDVHHIARVMRMSAGDHIYCCVNGRTAVCSIDEITSEFINTAIVEWVEASSELPVFVTIASGLPKGDKLELIFQKGTELGAAAFLPFQASRSIVKWDAKKADKKVERLRKIVKEAAEQSHRSEIPEVHAPASFKQLLSMSGEYDVCLVAYEEEAKQGEKSNFAKALTMMKPGQKLLIVFGPEGGLAEEEITVLREHNFVPCSLGPRILRTETAPLYALSAASYHFELMG

SEQ ID NO: 46854 - protein, 171 aa, Bacillus anthracis
MNNIAYIALGSNIGERYTYLTEAIQFLNKNPYIKVEDVSSVYETEPVGYTDQSCFLNLVIKISTNLSPQELLKVTQKVENDLGRKREIRWGPRTIDLDILLYNQENIEAENLIVPHPRMFERAFVIVPLLEINQDIKQNISRSQVEEMKRREGVTVWKQKNGEDAFVLFEN

SEQ ID NO: 46855 - protein, 454 aa, Bacillus anthracis
  MISC_FEATURE (110)..(110): X=any amino acid
  MISC_FEATURE (167)..(167): X=any amino acid
  MISC_FEATURE (193)..(193): X=any amino acid
  MISC_FEATURE (214)..(214): X=any amino acid
  MISC_FEATURE (296)..(296): X=any amino acid
  MISC_FEATURE (298)..(298): X=any amino acid
  MISC_FEATURE (345)..(345): X=any amino acid
  MISC_FEATURE (351)..(351): X=any amino acid
  MISC_FEATURE (354)..(354): X=any amino acid
  MISC_FEATURE (363)..(363): X=any amino acid
  MISC_FEATURE (369)..(369): X=any amino acid
  MISC_FEATURE (378)..(378): X=any amino acid
  MISC_FEATURE (445)..(445): X=any amino acid
MGKYFGTDGVRGVANKELTPELAFKIGRFGGYVLTKDTDRPKVIIGRDTRISGHMLEGALVAGLLSTGAEVMRLGVISTPGVAYLTKALDAQAGVMISASHNPVQDNGIXFFGSDGFKLTDEAEAEIEAFIDKEVDELPRPTGTNLGQVSDYFEGWTKYLQYFKQLXRKDFSGLHIAFKWAHGRYSLLYLRTXFADLKAEFLNNGTFPNGFDIXRWSRSTHPEVLAELVKEKGADIGLAFDGDGDRLIAVDEKGNIVDGDQIMFICAKYMKETGSLKHNTVVSTVMSKLGFYKSTXSXRITSDKTAVGDRYVMEEMKRGGYNLGGEQSGHIILLDYITTGDGNVXGPFNWXTSXKWRKNPLFXACREKXQKFPPISSXNVRYPDKKPSIWKRKKIKKIISCVRGRNEPVDGRISCSSIWNRNHISCNGRSTNQESLWMHMCIALXKCESEVGAE

SEQ ID NO: 46856 - protein, 713 aa, Bacillus anthracis
  MISC_FEATURE (160)..(160): X=any amino acid
  MISC_FEATURE (406)..(406): X=any amino acid
  MISC_FEATURE (439)..(439): X=any amino acid
  MISC_FEATURE (440)..(440): X=any amino acid
  MISC_FEATURE (565)..(565): X=any amino acid
  MISC_FEATURE (708)..(708): X=any amino acid
  MISC_FEATURE (711)..(711): X=any amino acid
KKQEKKSGRAVTMRLNILFFWGFILFSAMIIPLGKVQIIDVSDYKNEVEKRENATVSLSVPRGKIFDREGNPVVDNKSLRTITYTKMKGVKSEEILKTARQLADIIEIPQEDIDKLTETDKKDFWMQLNPTLTEKLVSKKEINKFRDKDITGKNLDKKIXELKIKRVTDKNLHDLTDKDIKVLAIKSKMTSGYQMAPQIIKKDVSEKEFTIISEGLANLPGVNVSVDWERVYVNDGLFRSVLGNVSNSDEGLPSERLDYYLVRDYSRNDRGGKSYIEQQYEDVLHGTKKEVRSVADKQGTTIRTETISEGKSGKNLTLTIDMELQKKVEESIEKILKAYKGSESMLDRAFVVMMNPKNGQVLSMAGKRLVEKDGKTEIEDYALGTMTSSYELGITVKGATVLTGFXTKAITPGTYFYDAPMKVKGTRGEKSWKRVGKIXXFKALQVSSNVYMFHTALKIAGVDYVRNSSLNIKQEYFDKMRYYFRQFGLGVPTGIDLPNETAGQIGKKDNQPGFLLDYSIGQYDTYTPLQLVQYISTIANGGYRMKPQIVQEVREQTSQKDEIGXVVHAVEPISFNKVDMKEEYIKQVKEGFRKYFQDEDGTGVRAFQKASYKPAGKTGTAQTVYGGESDIGRNEKGERRECYNLTLAGYAPYDNPEVAFSVVVPWVMNDKSGINSDIGKEVLDAYFELKNKRLTGETLQKDSSQEGXNIXNS

SEQ ID NO: 46857 - protein, 112 aa, Bacillus anthracis
MISDKIKLTAKDILEKEFKTGMRGYQQEEVDKFLDMIIKDYEAFHKEFEQLKQQNARLKRELEEQKLAATQVPQQPVVQTPVAQPVYNNTNTDILKRLSNLEKAVFGSKLYE

SEQ ID NO: 46858 - protein, 219 aa, Bacillus anthracis
  MISC_FEATURE (65)..(65): X=any amino acid
LKLDKVSKVYGEGNTEVTALHPISLDVKAGEFIGIVGPSGSGKSTLYQIAGALLSPSKGGYIHSXAKYYEVIEKEMTDIRLKKIGFIFQFANLVPYLNVKEQLLYIAKLKKENKQESEKRADHLLAAFGLGERKNHYPNQLSGGEKQRGSIARAFMNNPDLILADEPTASFRSQTAPRKVVEMMNPEWKETKKAGYYVTHEERMLDVWDRIWTLRDGQL

SEQ ID NO: 46859 - protein, 338 aa, Bacillus anthracis
MAERYSRQQLFKPIGDRGQEKIRNKHVLIVGAGALGSASAESFVRAGIGKLTIIDRDYVEWSNLQRQQLYSEEDAREKLPKAIAAKNRLEKLNSEVQIDAFVMDACAENLEGLLENVDVIIDATDNFDIRFIINDLSQKYNIPWVYGSCVGSYGMSYTIIPQETPCLHCVLKNVPVTGVTCDTAGIISPTVQIVAAYQVAEALKILVEDFAAIRKTFFMFDIWSNQNHFIKLGKIKTDDCPSCGLNRTYPYLSYENQTKVAVLCGRNTVQIRTVESRQYNFDDIEKVLKKLGEVDRNPYLLSCQLDEYRVVIFRDGRVFIHGTNDISKAKQLYYRVFG

SEQ ID NO: 46860 - protein, 235 aa, Bacillus anthracis
  MISC_FEATURE (206)..(206): X=any amino acid
  MISC_FEATURE (208)..(208): X=any amino acid
  MISC_FEATURE (212)..(212): X=any amino acid
  MISC_FEATURE (232)..(232): X=any amino acid
EQFQSMLEEKGITLSSRQLEQFEIYFEPLVEWNEKMILTAITEKEEVYLKHFFDSITLLFIMIFQKPFSICDVGAGAGFPSIPLKICFPHLKVTIVDSEQKRINFLNHLAQKLGLSDVAFCHDRAETFGKKEGVREAYDIVMARGSARLSVLSELCLPLCKVGGTFIAMKGAAANEEIENGKYALEVLGGDLKEMSTLQFTFGKKXTXYFYXSEKKRKTPKKYPRKPGNTQXNPI

SEQ ID NO: 46861 - protein, 207 aa, Bacillus anthracis
  MISC_FEATURE (67)..(67): X=any amino acid
  MISC_FEATURE (126)..(126): X=any amino acid
  MISC_FEATURE (154)..(154): X=any amino acid
  MISC_FEATURE (180)..(180): X=any amino acid
GSFRPVAGNLHLHRYYISPSLWLRQCPNRYTFRAGRNLPDKEFRYLRTVIVTAAVYWGFSSELRLRXPLSLTFQHRAGVTPYTSPYGFAESCVFLLQSLGPIHCGFSVKKAPLLPKLRGHFCRVPXPRDLSHTLGFSPRLPVVGLRYRHLLSRXKLFLAAGNQRLRSIRSFPITAQPSRXADLAYLSALLLGRAQPIARFFYPSAAP

SEQ ID NO: 46862 - protein, 252 aa, Bacillus anthracis
MTVAQLIDIDAKRTKTNNEVYQTSTMLALLDGIYDGVISFEELKERGDFGIGTFDQLDGEMIAFDNEFYHLRSDGSAEKVEPEETTPFATVTFFEKEMSYTIERPMNREEVEALLHELMPSKNLFYAIRMDGTFREVRTRTVPRQEKPYTPLVEVTKSQPIFSFENTEGTLAGFWTPDYAQGIGVAGFHLHYIDDERSGGGHVFDYVVENCTIQICQKAHMHLALPETADFMAAELSRENLEDNIATAEGAE

SEQ ID NO: 46863 - protein, 162 aa, Bacillus anthracis
  MISC_FEATURE (69)..(69): X=any amino acid
  MISC_FEATURE (73)..(73): X=any amino acid
KRIVTATVRNQSGVLNRITGVMTRRHFNKKSISVGILDSTDISRMTIVVPVENDQQVEQLFNHLHKQIXCFEXYRDITEEAMIARELALIKVATSVARAELYSLIEPFRAAVIDVGKDSIVVQVTGTPEKVEALIELLRPYGLKEIARTGVTAFTRSMKKQD

SEQ ID NO: 46864 - protein, 245 aa, Bacillus anthracis
  MISC_FEATURE (38)..(38): X=any amino acid
  MISC_FEATURE (60)..(60): X=any amino acid
  MISC_FEATURE (64)..(64): X=any amino acid
  MISC_FEATURE (80)..(80): X=any amino acid
  MISC_FEATURE (96)..(96): X=any amino acid
  MISC_FEATURE (108)..(108): X=any amino acid
KWMDAYEIYFFFSKKWKRKLLVKGYLKRGVLKKVPFPXNKNKQFVNKKFGVLFGRMSENXDNSXMKNSKIHLLIYVVEKXPVVISAISNADLKRYXKLVLSPGANYSXHVEIGRQRCYMMNATINIGAVIGEGSMIDMNAVLGGRATVGKNCHVGAGAVLAGVIEPPSAKPVIVEDDVVIGANVVVLEGVTVGKGAVVAAGAVVTEDVPPYTVVAGTPARVIKEIDEKTKAKTEIKQELRQLNPE

SEQ ID NO: 46865 - protein, 529 aa, Bacillus anthracis
MWKKIIPAVAVLSTITFSSVFAAPPSQTPAEQNRYIDVQILGINDFHGQLDTVKKINNKEAGGADYLATYLKERKKQNPNTLLVHAGDIVGASPPVSALLQDEPTIEFLNDLKFDVGTIGNHEFDEGIEEMRRLIYGGYHEKTGNFKGADFPYVAANFYNKSTGRLFLPPFTIKMVNGVPVGFIGVVTTDTPNVVMPTMLKNVEITDEVEAINKSAQQLKRLGVKSMVVLAHVGGTTDESGVTNGDLTRIANETDPEVDVIFGGHSHTYVNGTVNNKLIVQANSYGTAFSDVDVTIDRKTKDIVKKKAEVVTTYHEGVEPDKQVKKKLDQYKEKIAPLVNEVVGKSTAPIDRKQNDAGESTLGNLVADAQRQTMQTQIALMNPGGIRNDLDAGDITWGELYGIQPFGNQLIKVDLTGQDIRDILNQQWQKGTTRMLQISGIQYTWDANKPNGEKVTNIRLTSGEELSPSKTYSVVANAFLASGGDGFVSFKNGKNTETGPNDFEALVDYVKQLKEPIQPIIDGRIQKIN

SEQ ID NO: 46866 - protein, 1148 aa, Bacillus anthracis
MTKLQRIQKVLVANRGEIAIRVFRACSELGLKTVAIYSKEDSGSYHRYKADESYLVGEGKKPIDAYLDIEGIIEIAKSNHVDAIHPGYGFLSENIQFAKRCEEEGIIFIGPKSKHLDMFGDKVKARTQAQLAQIPVIPGSDGPVDSLEEVKEFAEKYDYPIIIKASLGGGGRGMRIVRTSEELRESYNRAKSEAKAAFGNDEVYVEKFVEKPKHIEVQILADEEGNVVHLYERDCSVQRRHQKVVEIAPSVSLSDDLRQRICEAAVKLTKNVNYLNAGTVEFLVKDDNFYFIEVNPRVQVEHTITEMITGVDIVQSQILIADGHALHSKMVGVPKQEEVVVHGFAIQSRVTTEDPLNNFMPDTGKIMAYRSGGGFGVRLDTGNSFQGAVIAPYYDSLLVKVTTWALTFEQAAAKMERNLKEFRIRGIKTNIPFLENVVKHKNFLSGEYDTSFIDASPELFLFPKRKDRGTKMLNYIGTVTVNGFPGVGKKEKPIFPDARIPNVLHSEPIQNGTKQILDERGADGLVKWVQDQKRVLLTDTTFRDAHQSLLATRIRTKDLHQIAEPTARMLPNLFSAEMWGGATFDVAYRFLKEDPWERLLDLREKMPNVLFQMLLRSSNAVGYKNYPDNLIQKFVECSAQAGIDVFRIFDSLNWVEGMRVAIDAVRDTGKIAEATMCYTGDIHDPMRSKYDLNYYKNLAKELEVSGAHILGIKDMAGLLKPNAAYDLVSALKETVSIPIHLHTHDTSGNGILTYTKAIEAGVDIVDVAVSSMAGQTSQPSANTLYYALGGNERQPDVNIDSLEKLSHYWEDVRKYYAPFESGMNAPHTEVYMHEMPGGQYSNLQQQAKVVGLGDRFDEVKVMYRRVNDMFGDIVKVTPSSKVVGDMALFMVQNHLTEQDVLERGHSMDFPGSVVEMFSGDLGQPYGGFPKKLQEIILKGKEPLTVRPGELLEPVDFDALKEELFHKLGREVTMFDVVAYALYPKVFMDYEKVAELYGNVSVLDTPTFFYGMRLGEEIDVEIEQGKTLMVKLVSIGELQPDGNRVLYLEFNGQPREIVVKDESVKATVAQRVKGNRENPNHISATMPGTVIKVVVKEGDEVKKGDSMAITEAMKMETTVQAPFNGKVKKVYVNDGDAIQTGDLLIELDH

SEQ ID NO: 46867 - protein, 562 aa, Bacillus anthracis
MSTGVKANDVKTKTKGADLVVDCLIKQGVTHVFGIPGAKIDSVFDVLQERGPELIVCRHEQNAAFMAAAIGRLTGKPGVCLVTSGPGTSNLATGLVTANAESDPVVALAGAVPRTDRLKRTHQSMDNAALFEPITKYSVEVEHPDNVPEALSNAFRSATSTNPGATLVSLPQDVMTAETTVESIGALSKPQLGIAPTHDITYVVEKIKAAKLPVILLGMRASTNEVTKAVRALIADTELPVVETYQAAGAISRELEDHFFGRVGLFRNQPGDILLEEADLVISIGYDPIEYDPKFWNKLGDRTIIHLDDHQADIDHDYQPERELIGDIALTVNSIAERLPKLVLSTKSEAVLERLRAKLSEQAEVPNRDSEGVTHPLQVIRTLRSLISDDTTVTCDIGSHSIWMARCFRSYEPRRLLFSNGMQTLGVALPWAIAATLVEPGKKVVSVSGDGGFLFSAMELETAVRLNSPIVHLVWRDGTYDMVAFQQMMKYGRTSATEFGDVDLVKYAESFGATGLRVNTPDELEGVLKSALAADGPVIIDIPIDYRDNIKLSEKLLPNQLN

SEQ ID NO: 46868 - protein, 397 aa, Bacillus anthracis
MNYAYPDEKGHYGIYGGRYVPETLMQSVLELEEAYKEAMEDEAFQKELNHYLKTYVGRETPLYFAENMTEYCGGAKIYLKREDLNHTGAHKINNTIGQALLAVRMGKKKVVAETGAGQHGVATATVCALLGLECVIFMGEEDVRRQKLNVFRMELLGAKVESVAAGSGTLKDAVNEALRYWVSHVHDTHYIMGSVLGPHPFPQIVRDFQSVIGNETKKQYEALEGKLPEAVVACIGGGSNAMGMFYPFVHDEEVALYGVEAAGKGVHTEKHAATLTKGSVGVLHGSMMYLLQNEEGQIQEAHSISAGLDYPGVGPEHSLLKDIGRVSYHSITDDEALEAFQLLTKKEGIIPALESSHAVAYALKLAPQMKEDEGLVICLSGRGDKDVESIKRYMEEV

SEQ ID NO: 46869 - protein, 218 aa, Bacillus anthracis
GYKLIEEVVKTKENPTLGMATGSSPLGIYAEMRKNKLDTSRVTTVNLDEYVNLPHEDKNSYHYFMQEQLFDHLPFKQTYVPNGMASDLEEECKRYEGILAANPVDLQILGIGENGHIGFNEPGTPFNSPTNIVELTESTRQANLRFFEKEEDVPTHAITMGIGFIMKAKQILLVAMGSKKAEAVKELLQGAYSEACPATVLQRHPNVTVIADQEALSL

SEQ ID NO: 46870 - protein, 657 aa, Bacillus anthracis
MPEFYKKQWFLYPVYVLAFFVFVLISILCYFHLMMGIISFFIFCIVLFVVVRFELTFQKNFEKHTTDMITRVKKVSNEAFNQMPIGILLYNKDYGIDWANPYLSSCLGQHALAGWHLYDVSETLLLFIKGETSDDIVSLNNRKFRVFVRKEEKLIYFFDVTEQTEIEKMYEDQRTVLAVIYLDNYDEVTQGLDDQLRTNITSLVTSRLNEWAVKYGAYLKRASSERFFVVLNESILAQMEKGKFSILDQVREETSKRNIPLTLSVGVGSGDLPLSELGAMAQSGLDLALGRGGDQVAIKQATGKVKFYGGKTNPVEKRTRVRARVISHALKDLVLESSNVIIMGHRAPDMDAIGAAIGILKVAQLNERKGYIVLDENDSDKGIKRLMDKVKQNEELWSHFITPEQAMEFANDDSLLVVVDTHKPSMVMEEKLLRKIENVVVIDHHRRGEDFIEDPLLVYMEPYASSTAELVTELLEYQPKNLKMTMLEATALLAGIIVDTKSFTFRTGARTFDAASYLRSHGADTVLVQELLKEDMDQYLRVAKAIKNAYIYTNGIAIAKVDSDDYYDQVLIAQSADTLLTMTGIIASFVIAKRGENFIGISGRSLGEVNVQLIMENLGGGGHLTNAATQMKNVTVDEAEEKLRFVIDDYLQGGTQS

SEQ ID NO: 46871 - protein, 474 aa, Bacillus anthracis
MNGYVYLVGAGPGDEGLITKKAIECLKRADIVLYDRLLNPFFLSYTKQTCELMYCGKMPKNHIMRQEMINAHLLQFAQEGKIVVRLKGGDPSIFGRVGEEAETLAAANIPYEIVPGITSSTAASSYAGIPLTHRNYSNSVTLLTGHAKGSLTDHGKYNSSHNSDTIAYYMGIKNLPTICKNLRQAGKKEDTPVAVIEWGTTGKQRVVTGTLSTIVSIVKNENISNPSMTIVGDVVSLRDQIAWKEHKPLHGKKVLFTSATNKTSVMKQKLQEAGAEIYQIPTFKKEEYTLTLEQIIEIFNVNRLVFCSAESVEILMQSCSKYKKDIRSLQAELQHMNVATQEKLMQYGLLSKEAKFSSDTTVYLGRNINRIAFIQEKIGAGSYMMTHKYTIDHRFDEVHSRMLSEFLWDSIVFEGRASIDTFLAEVKRLGFLDIVTLPFSYTDVPTLRYANKVGFHNIDHQLQETLMQKDMVRQ

SEQ ID NO: 46872 - protein, 107 aa, Bacillus anthracis
MMTTAEQIPFQLILNSGNARSFAMEALQFAKQGKMAEADEAMVKAKEAINEAHHFQTELIQSEARGEKTEISVLLIHAQDHLMNAITVKELAAEFIDLYKKLEAKGE

SEQ ID NO: 46873 - protein, 265 aa, Bacillus anthracis
MKFTIMSKGDQSSDTLASTMKEYLLDFGFIMDEQEPDIVISVGGDGTLLYAFHRYYNRLDETAFVGVHTGHLGFYADWLPTEVEKLVIAIAKTPFQVVEYPLLEVIIRYMNGSKESQYLAMNEATVKSAEGTLVTEVEIRGEYFETFRGDGLCISTPSGSTAYNKALGGAIIHPSIEAIQIAEMASINNRVFRTVGSPLVLPKHHTCVLKPTAGMNLQITVDHLTMVHQDVKSIQYRVANEKVRFVRFRPFPFWKRVRDSFVADK

SEQ ID NO: 46874 - protein, 631 aa, Bacillus anthracis
MKMLTVENLSKSYGEKPLFDGLSFSIAEGQRAGIIGVNGTGKSTLLKIIAGAEIPDTGDMTHSRGYTISYLSQQPEFDEQLTVLEQVFHGDTPLIRLLRDYEKALLHIEKDPSNEKVQEQLFAVQQRMDAMSVWEANANAKSLLTKLGITDFTATVGNLSGGQKKRIAMAQCFIETPDLLILDEPTNHLDHETVEWLEEYLARYTGAVLLVTHDRYFLDRVTNRIFELDNGKLYSYEGNYSTFLEAKALREEQELAQESKRQNLYRRELAWIRRGAKARSTKQKARIQRFEELKGQEGPAAKQSVDIALSGSRLGKKVLELKDVTKKFGDKTVLNNFNHIVKPGDRIGIIGANGSGKSSLLNMLAGKISPDSGEIEVGQTVKIAYYTQENEEMNLNQRMIEYIKEIAEVIHTTDGKVIGASQMLERFLFPPHSHGTPLGKLSGGERRRLYLLRILMGEPNVLLLDEPTNDLDPQTLTVLEDYLEDFSGVVLTVSHDRYFLDKVVDELFIFTGEGEVREFLGSYTDYLEMEKTRELIEKAEVQKEKKVVEEAPKQQRKRKLSYNEQREWETIEDTIAELEEKLESIGEELANVGSDFTKAQELSEAQQKTEEELEKTMERWSELSDIVEGLK

SEQ ID NO: 46875 - protein, 487 aa, Bacillus anthracis
MQKDIMYNTEMDETLKIINKGLKKTTSPKQIIVVGAGMAGLVSASLLKAAGHEVKIFEANNRVGGRIETVRMEDTGLYLDVGAMRIPYSHTLTMAYIRKFGLQVSPFINRNETDIIYVNGRKTTLKQYEKDPSILKYPVEMNEVGKTSEELLLLAVQPIINFIKKNPEKNWDVVVKDFGRYSTGQFLKYHPYQYNTYFSPVTIEMIGVLLDLEGFLERSFVETLRFLYIMQEESGFCEIVGGNDRLPKSFLPQLEENIIYNQKLMKLHQRDNGVTAFYRNEETFEYSSITGDLVIVTIPFSTMRFVEVEPFDSISHEKWKAIRELHYMPATKIGIQFKSRFWEEQGQLGGRIITDLPIRYAYYPSYGIGEKGPAMMLGSYTWSYDALLWDGLSKGDRIYYTLQNLATILGGQVYDEFLSGISKSWTLDPYALGGFALFQAGQESELQPAIVKPEGRIFFAGDHTTLYHGWIQGAIESGVRVAEEVNE

SEQ ID NO: 46876 - protein, 409 aa, Bacillus anthracis
  MISC_FEATURE (395)..(395): X=any amino acid
MEKKRVVITGLGAVTPVGTDVETAWENIKKGVFGIGRLTRIDRELFPAKVAAEITGCEVEKYIDKKEARRMDRFSTIAVAAAKMAVADAKLEITEENGPRIGVWIVSGIGGMETYEDQFKIFTEKGPRRVSPFFVPMMIPDMAAGQVSIATGAKGINTWFSTACASGANSLGDAFKAIQRGDADAMITGGAEAPLTSMAFAGFSSAKALTFNEDPATACRPFDKNRSGFVMGEGSGILILEELEHALARGAHIYAEIAGYGATGDAFHITMPAPGGEGGVRAMRQALADAGLQPEDIDYINAHGTSTDANEKYETMAIKETFGEHAYKVAISSTKSMTGHLLGAAGAVEAIFSIKSITDGVIPPTINYETPDPECDLNYVPINARHQEVNAVCKXFFGIPGGITPELVF

SEQ ID NO: 46877 - protein, 258 aa, Bacillus anthracis
MSVLEVKGLTKVYQSKGSVATTALNDINFKIEEGEFVGIMGPSGSGKTTLLNLLATIDKQTSGHVLVNGEEINQMRAAKLAEFRRTHLGFIFQDFNLLDTLSIKENIILPLVMAKKSVNEIDAKVLEIAKFLNIEEILNKKVYEVSGGQQQRAAAARAIIHEPTLILADEPTGNLDSKSAKSLMSALQDLHEQKRVTIAMVTHDPVAASYCERILFIRDGEIFSEIHKGRTKQAFFQEILDVLAMLGGEYHELSPARA

SEQ ID NO: 46878 - protein, 427 aa, Bacillus anthracis
  MISC_FEATURE (169)..(169): X=any amino acid
QLVTVMGAVLAESEAAYQIAKRGCQVRLYEMSPVRQPPAHHTDKFAELVCSTSLRANTLTNAVGVIKEEMRLMDSVIIRAADECSVPAGGALAVDRHEFAAKVTEYVKNHPNVTVMNEEITEIPEGPTIIATGPLTSPDLSAQLKELTGEDYFYFYDAAAPICGKDSHXYNKGVFKSRYDKGEAAYLTCPMTEEEFARFYEALIAAETVPLKEFEKEIFFEGCMPVEVMASRGRQTLVFGPMKPVGLEDPKTGKTPYAVVQLRQDDAAGTVYNIRRFPNHLKWGPQKEVLQLIPGLENAEIVRYGVMHRNTFINSPNLLRPTYQNINNVMILFFAGQMTGVEGYVESAASGLLAGINAARLVKGEEPVVLPPVTAMGSMANYITATNAKNFQPMNANFGLFAPLEKKIKKKAERNEAYATRALEMIR

SEQ ID NO: 46879 - protein, 368 aa, Bacillus anthracis
  MISC_FEATURE (54)..(54): X=any amino acid
  MISC_FEATURE (173)..(173): X=any amino acid
  MISC_FEATURE (296)..(296): X=any amino acid
  MISC_FEATURE (300)..(300): X=any amino acid
  MISC_FEATURE (321)..(321): X=any amino acid
  MISC_FEATURE (346)..(346): X=any amino acid
  MISC_FEATURE (350)..(350): X=any amino acid
KTQVVINAKIYTGQEVVENGFIRYAETIKEIGLMAPYVSQENETVLDAAGEGLXFPGMIDVHIHGGYDIDAMDANSDGLVLLGKEMVKERRTTYFPTTMTQAPESIEGALLACKGPKKKGALFQIIPLKGPYVSKKRAGAQPLEHIVPANIEQFKQWQETSGNLIKLVTYAPXRKKALGVSSYLVETGVVGTMGHTDAIDAQLKNRNITHATHLYNQMRGLHHREPGVVGHVLLNPDVMVEVITDGIHIHPDMVKLAYKLKGPKKVSVITDAMRAKVLKDGLYELGGQPSTCKRWXWLDXKIGTLAGSILKMDQAFRKCNXIYGLFIEDAVLMTSVNPAEGVGLIXKGAXRVGKDADFVVMNEDFTCI

SEQ ID NO: 46880 - protein, 301 aa, Bacillus anthracis
  MISC_FEATURE (76)..(76): X=any amino acid
  MISC_FEATURE (106)..(106): X=any amino acid
  MISC_FEATURE (137)..(137): X=any amino acid
  MISC_FEATURE (277)..(277): X=any amino acid
FIHAADLHLDSPFKGMEMNVPQSVWERMKQSTFESFERIIDKAIQEPVVFVLFPGDFYDGETRNLRAPNFCAGTKXRAFRSTISPFLLFTGTHDHLGGSWGSNWSXSENGHVFTEPYVEEKSFYKNGELLASIFGIXYLQPSVTDNMTAQYTKMSDAPFHIGMLHGKCGRDAEHNRYAPFQIRELKEMQFDYLGSWPIHKREILLEEPYIIYPGNIQGRHRKETGEKGAYLIELTKQGSHCSFFHTADVVWDEIEVNIDGLETVDELMTKCFNCDEXVQKKRKKVTQLTVVLQGQGATFLL

SEQ ID NO: 46881 - protein, 82 aa, Bacillus anthracis
MKLLPIGTVVKLEGVEPVIMIIGRMIVSADKRDFDYVGVPYPVGYLGDEKVLCFNHDKIVEEMHRGYMTESELVLREKLVEL

SEQ ID NO: 46882 - protein, 494 aa, Bacillus anthracis
MSQLAVNLHEKVEKFLQGTKKLYVNGSFIESASGKTFNTPNPATGETLAVVSEAGREDIHKAVVAARMAFDEGPWSRMSTAERSRLMYKLADLMEEHKEELAQLETLDNGKPIRETMAADIPLAIEHMRYYAGWATKIVGQTIPVSGDFFNYTRHEAVGVVGQIIPWNFPLLMAMWKMGAALATGCTIVLKPAEQTPLSALYLAELIEEAGFPKGVINIVPGFGESAGQALVNHPLVDKIAFTGSTPVGKQIMRQASESLKRVTLELGGKSPNIILPDADLSRAIPGALSGVMFNQGQVCSAGSRLFVPKKMYDNVMADLVLYSKKLNQGVGLDPETTIGPLVSEEQQKRVMGYIEKGIEEGAEVLCGGNNPFDQGYFISPTVFADVNDEMTIAKEEIFGPVISAIPFNDIDEVIERANKSQFGLAAGVWTENVKTAHYVASKVRAGTVWVNCYNVFDAASPFGGFKQSGLGREMGSYALNNYTEVKSVWLNLN

SEQ ID NO: 46883 - protein, 297 aa, Bacillus anthracis
MNRFTLKWDIESAEEGTLVREFLKTKGISKAALTDIKFHGGAIEVNGQHASVRHQLQVGEELRIFFPVEERSEGMIAEDIPLCIVYEDDAVLVINKEANMSTIPSREHPSGSVANALLSHYDKQYLPSTVHIVTRLDRDTSGLMLIAKNRFVHHLLSKQHQQKAVKRTYEAIVHGEMVEREGTIDAPIGRKSDSIIERTVCEEGQRAVTHFRVIDSANHKTHVSLELDTGRTHQIRVHLAHIGHPLLGDNLYGGKRDEMKRQALHSTSLTFYHPILEKEMSFAAMIPSDMQEVLRQT

SEQ ID NO: 46884 - protein, 396 aa, Bacillus anthracis
  MISC_FEATURE (117)..(117): X=any amino acid
  MISC_FEATURE (328)..(328): X=any amino acid
  MISC_FEATURE (334)..(334): X=any amino acid
MNYAYPDEKGHYGIYGGRYVPETLMQSVLELEEAYKEAMEDEAFQKGINHLLKSVVGRRNPLYFAENMTEYGGGAKIYFKREDLTHPGAHKIPNTIGQALLAVRMGKKKVVAEPGGXQPGVATVRVCPFLGLGVRIFRGEEDVSPQKIKCVRMEFLGAKVESVAAGSGTLKDAVREALRYWVSHVHDTHYIMGFVLGPHPFPQIVRDFQSVIGNETKKQYEALEGKLPEAVVACIGGGSNAMGMFYPFVHDEEVALYGVEAAGKGVHTEKHAATLTKGSVGVLHGIDDVSLQNEEGQIQEAHSISAGLDYPRCGPELKLAKRNGPGSXPFPYRXRGFKTPSRFFRKKKGFSPALESSHAVAYALKLAPQMKEDEGLVICLSGRGDKDVESIKRYME

SEQ ID NO: 46885 - protein, 484 aa, Bacillus anthracis
MQKSIASNIFYKILLNTFNIILPILVGPYAYRTLGATSIGTVNLAETFFNYFFVFAVFGVYQYGLREISLIKNDKKKVSKLFTSLYVINFTTSILALSSFVLFSYIGYGHESLFPVLLIFGFNFISNMFYVEWFNEAYENYDFITKKTVIVRLIYVVLLFSFIHGVDDYKTYAGLLVLSTFLNHSISFVYVKRQVKFDFSDLTIIPHLKPLLLVLIFSNANILYTQLDRLVLGVYVGKEEVAYYVMAFQIMMIINTLMLSVVQVTVPRLSYLSGNASEMEYESLLNKISKVYFITLFPAAIGLMLIAHGAVVIYGGQQFAAAGNTLIVFAFYMITVGIESILSNQIIYVKKKESILVRFLFICGFINLASNIALIFFHVLTPTTAIFTTTIANCFLITFEYIYVKKKLKVNYTLFDIQKLKYLFYSLTFIPIAFVIDMIVSGQILQVILVIITCGLTYALILFITKDEILFSLLEKILARFKKA

SEQ ID NO: 46886 - protein, 447 aa, Bacillus anthracis
  MISC_FEATURE (182)..(182): X=any amino acid
LKKDLKIRHITMISIGGVIGAGLFVGSGAVVHSAGPGSIVSYALAGLLVVFVMRMLGEMAAINPTSGSFATYAREAIGPWAGYTIGWLYWFFWVIVIAIEATAGAGIIQYWIPEIPLWLLSLILTILLTLTNVFSVKSFGEFEYWFSFIKVISIVLFLCLGLAVILGFVPGNRKAPWPFGFXGGKGGFFPNRKSGVQLGITVVIFSFMGSEIVAVASGDFADPVKAVKRATNSGNCRILEFFIGSIAVDVTLLSGESANILKSPFVAVLEHIGIPAAAQIMNFIVLTAVLSCLNSGLYTNSRMLFSMAERGDAPKAFLKLNSSGVPVRAVLFGTFFAYIGVVFSYISPDKVFLFLVNASGGIALLVYLVIAISHLKIRKKMGRVEQQNLKVKMWFFPVCDVVTIAAIIAVLIAMLAIEIFTFHSTFDMLVTVLIIISYFIFNRNKNS

SEQ ID NO: 46887 - protein, 298 aa, Bacillus anthracis
MNEQWIFLNGEFVPKDEAKVSVYDHGYLYGDGVFEGIRVYSGNVFRLREHLVRLYESAKSIMLEIPYSLDEITNIVVETIRQNKLSNGYIRLVVSRGAGNLGLDPDSCTKPNVVVIAEQLSLFPQEYYEKGIPVVTVATRRNRPDVLSPQVKSLNYLNNILVRIEAKLAGVQEALMLNDQGYVAEGSGDNVFIVKGNKLITPPSSAGALEGITRNAILEIGEKLGYDVREELFTRHDVYVADEVFLTGTAAEVIAVTTVDGRTIGLGQTGPHTNRLLEEFRKLVIEDGEKIYEENKVG

SEQ ID NO: 46888 - protein, 351 aa, Bacillus anthracis
MSKIIGIDLGSTNEDVAVMEASYKKVFPNPEGNRTTPSVVAFKNEERQVGESAKRQAFTTPKPIMSVKRHMGTDYKVEVEGKDYTPQEISAIILQNLKASAEAYLGETVTKAVITVPAYFNDAERQATKDAGRIAGLEVERIINEPTAAALAYGLEKQDEEQKILVYDLGGGTFDVSILELADGTFEVISTAGDNRLGGDDFDQVIIDHLVAEFKKENNIDLSQDKMALQRLKDAAEKAKKDLSGVTQTQISLPFISAGAAGPLHLELTLTRAKFEELSAGLVERTLEPTRRALKDAGFAPSELDKVILVGGSTRIPAVQEAIKRETGKEPYKGVNPDEVVAEGAAVQGGL

SEQ ID NO: 46889 - protein, 168 aa, Bacillus anthracis
MPTLLLGAAIPFGTIAYTLFIFLLLLVMLRKFAWGPLMGIMKEREEHVANEIDAAERNNAEAKKLVEEQREMLKQSRVEAQELIERAKKQAVDQKDVIVAAAKEEAESIKASAVQEIQREKEQAIAALQEQVASLSVQIASKVIEKELKEEDQVKLIRDYIKEVGEAR

SEQ ID NO: 46890 - protein, 166 aa, Bacillus anthracis
MHRIDPSKLELEERVVTINRVAKVVKGGRRFRFAALVVVGDKNGHVGFGTGKAQEVPDAIRKAIEDAKKNLIAVPLVGTTIPHTINGHFGAGEVFLKPAAEGTGVIAGGPVRAVLELAGVQDILSKSLGSNTPINMIRATVNGLSELKRAEDVAKLRGKSVEELLG

SEQ ID NO: 46891 - protein, 295 aa, Bacillus anthracis
  MISC_FEATURE (254)..(254): X=any amino acid
AKLSILVGKILTPIKLTFIGILVIVAFIHPIGEMQAPGEAYTSHAFFKGFQEGYLTMDTLASFVFGIIIINAIKEKGAKTKTQIMVVCAKATIIAASILAIIYTALSYMGASSVAKLGHLENGGEVLAKVSNYYFGSYGGVLLGLMITVACLTTSVGLVSVCSSFFHKLFPNVPYKAIAITLCIFSAIVANVGLTQLIAVSVPVLTAIYPLAIVLIFLTFFHSLFKGRTEVYQVSLTVTFIISLFHGLSAAGRXGEVISPVVPKIPSMQEVGLGLDLPAIIGGFIGYGISVLKLK

SEQ ID NO: 46892 - protein, 325 aa, Bacillus anthracis
MLVISAKEQRDLVNMNEVIAYAALALQEFSAERTITPIRTSLPFANEKNTALIMPSVAEGLEVLGLKVVTVVPHNKKIGKKTINGIVMLSDFQTGEPLALLEGSYLTMIRTGALSGVATKYLARHNAKTLCIIGTGEQAKGIAEAVFAVRDIERVMLYNRTEEKAYAFSQYIQKRFNTPTYVHKNANEAISEADIIVTTTNASTPVFSEKLQKGVHINAVGSFRPNMQELPSHAIANANKVVVESKEAALEETGDLQVPVREGLFEASDIHAELGQIISGEKAGRESDEEITVFKSVGLAVVDIIVAKYLYEKAVERGGGSRIEF

SEQ ID NO: 46893 - protein, 1185 aa, Bacillus anthracis
  MISC_FEATURE (115)..(115): X=any amino acid
  MISC_FEATURE (143)..(143): X=any amino acid
  MISC_FEATURE (151)..(151): X=any amino acid
  MISC_FEATURE (254)..(254): X=any amino acid
  MISC_FEATURE (317)..(317): X=any amino acid
  MISC_FEATURE (369)..(369): X=any amino acid
  MISC_FEATURE (466)..(466): X=any amino acid
  MISC_FEATURE (470)..(470): X=any amino acid
  MISC_FEATURE (619)..(619): X=any amino acid
  MISC_FEATURE (750)..(750): X=any amino acid
  MISC_FEATURE (808)..(808): X=any amino acid
NTTTTQINSAILTAQKSTNVFTVDIGQDIVYSVTITNSGNVNATNVIFTDVIPDGTSFEPNSFTLNGTIIENANIITGVPIGDIAPNESAIVEFHMAFKGNPGVLNPNDNTSSAXVFSIFVSTDRTSCFETPFLSSSVTTTNXKCYSNSCXKSVIKAFATIGDTITYTTTITNIGNIPANNVIFSDPIPSWTQFVAGSVIVDGTPLPSASITSGIGINTIIPNQTVTIIFQVQIVSNPPTFTPELQNLAFVNFXYNVGNALQAQPGNVETNVFVTAIHSAILSAVKTASTAFANIGDTITYTVLIQNRRHFQTLGMXISQGFIPGGTTFVENSFAVNGNTIPGANPNSGVNIGTVSAGSSLTVTFLSRXLHSTPPSNPITNVASIQFAFIVDPAAPPVTGTVTSNSASTQINNATVTTLLEADRTIVSIGDIITYTATLTNTGNFPANSVLLINGVPEGALFVPIXCHAXRDFTSEMQVQLSGIPVGIIAPGNSATITFQFLANSIPPQGAIINQALTSYTYIVDPSQPPVTATSSSNTVTTAVVDASLSVIKNTDSIVQSTDGTITYTVVIQNNGNTTANTVTLTDLVPEGTALIPNSVTINSISIPGGRSKGGKSHXTSLAPSEIVPGHIPKLSSILFQSGNPIFNIARYGLYFYCGSNCSYCLLEQLLRNQLSHKFQMRMVFLLKPSMHNKATTGDILPYTITLENTGNIPATNLIFSDTIPEGTTFVENSFTLKRNSYTGVQIQMXGVTLPNLAANATHLIAFQVLINDPFSQQSITNHFYFNHIQFTLVPGPTRFFLENFYKXILSLKILVQAQITNHKKGPIQIPVDIGGTILYICEVKNSGNVDAINIIFTDSIPVGTTFVLDSVTINGVLQRDANPENGIPIGTIPPNSSKTILFQVQTNNPPTETEIVNQSSVTYQYVSIPTAPPVNRSANSNIVTTSLQNANIISVKSADVTFVSIGQFITYTNTLQNIGTVPANNTVFIDNIPEGTIFIEDSLSINNVIQPGTNPDSGVTLGTIQPDETVTISFQVQLTNIPEDNTVINISDTSYEYQIDPSSPIIQRRSLSNTVNTEVRTANVSAIKSANRSITRIGQIITYTIAVTNAGTVPITNTLLIDAIAAGTTFVPDSILVDGIPRPNENPSTGILLNIILPNNTIIVTFQVNGRTRYPSQNNMNNIA

SEQ ID NO: 46894 - protein, 393 aa, Bacillus anthracis
MKKRKRLWNLWKTITLLVCTVVIFSLLVTDILISHNVERTTEDSQAEKAKTIAHIVANDSIVIDGLIGKADTSAIQTYTNRILKNTGVQFIVVMDMNGIRKSHPNPQKIGHHFIGGDEGPALKGKEHVSLAEGTLGISMRVFVPIFSETGEQLGAVAVGISADNVKERVKESRHIIYIGVGVGVLVGIIGAILLARHIKKSLFGLEPHRIAKILEERNTMLQSVKEGIIAVDKEARVTLINNEAKRLFKKSGLEEDFIGKDVELYMPNSRIKEVLQTGEVQLNEEQNIYGITIVTNRVPLYVKEEIVGAIATFRDKTEIRKLAEELTGIRLYAEALRAQSHEFMNKMHVVLGLTHMKQYEELQKYISGMVSEHQYEIGGVMKRIKSPVFAAGK

SEQ ID NO: 46895 - protein, 625 aa, Bacillus anthracis
  MISC_FEATURE (382)..(382): X=any amino acid
  MISC_FEATURE (396)..(396): X=any amino acid
MGKIRKLDDQLSNLIAAGEVVERPASVVKELVENSIDANSTSIEIHLEEAGLSKIRIIDNGDGIAEEDCIVAFERHATSKIKDENDLFRIRTLGFRGEALPSIASVSELELITSTGDAPGTHLIIKGGDIIKQEKTASRKGTDITVQNLFFNTPARLKYMKTIHTELGNITDIVYRIAMSHPEVSLKLFHNEKKLLHTSGNGDVRQVLASIYSIQVAKKLVPIEAESLDFTIKGYVTLPEVTRASRNYMSTIVNGRYVRNFVLMKAIQQGYHTLLPVGRYPIGFLSIEMDPMLVDVNVHPAKLEVRFSKEQELLKLIEETLQAAFKKIQLIPDAGVTTKKKEKDESVQEQFQFEHAKPKEPSMRRSFYRRAWMKNKKNRRLXNSQHNCGNHPLNRXIEEPIQEEKSWDSNEEGFELEELEEVREIKEIEMNGNDLPPLYPIGQMHGTYIFAQNDKGLYMIDQHAAQERINYEYFRDKVGRVAQEVQELLVPYRIDLSLTEFLRVEEQLEELKKVGLFLEQFGHQSFIVRSHPTWFPKGQETEIIDEMMEQVVKLKKVDIKKLREEAAIMMSCKASIKANQYLTNDQIFALLEELRTTTNPYTCPHGRPILVHHSTYELEKMFKRV

SEQ ID NO: 46896 - protein, 191 aa, Bacillus anthracis
MNVLIVYAHPSPSSFNAAILKHVQKGLQETNHSVTVLDLYKEQFNPVLVFNEEKKRRDLVNEEETARYRALVEEADTLLFIYPIWWWGMPAILKGFIDRIFVAGFAYKYEGALPKGLLKGKKAWGINTLDSPLWYVALLYRSADWIIMKRGVLRFCGIRDIKRSVFQSVKTSKREKREKWLLQIEEKARTL

SEQ ID NO: 46897 - protein, 129 aa, Bacillus anthracis
MQITITNTSKEPIYEQISAQIKKLILLGDLKQGDALPSMRQLAKDLRVSIITTKRAYEELEKDGFINSIVGRGSFVAEQNIETMKEEKLKTVEEKLCEAIQNAKQMDVSLNELKEMLTILYEEENSWKT

SEQ ID NO: 46898 - protein, 121 aa, Bacillus anthracis
MARIAGVDIPRDKRVVISLTYVFGIGRTTAEKILAEAGISEETRVRDLTEDELGRIRDIIDRIKVEGDLRREVSLNIKRLMEIGSYRGLRHRRGLPVRGQNSKNNARTRKGPRRTVANKKK

SEQ ID NO: 46899 - protein, 112 aa, Bacillus anthracis
MTVDGVNVLAAKVNVADMNNLRTMMDDLKNKLESAVVVLASVNDDKVNILAGVTKDLISQGYHAGKLVKEVASRCGGGGGGRPDMAQAGGKNPAQVEEALAFVQEYVKSVSK

SEQ ID NO: 46900 - protein, 149 aa, Bacillus anthracis
MLKLIQNEFLKLHAKKGMYILIGVIAVLEILGVLAMMKWGDGTEFKGSYLDFASSEIGLITLFATIFGITIASRMITDEFQKGTIKQLLIRPRKRMTVLFSKYITVLLTIIFIIFASTLIAMIIGGIVMDGSKTELTIGIVMKSTLYQV

SEQ ID NO: 46901 - protein, 74 aa, Bacillus anthracis
MGNEFRVCDDCQATNVKTLIPKLKKVDSCATIEVGCQSYCGPGRKKSFAFVNNRPVAAPTEDELIVKIEAKLNK

SEQ ID NO: 46902 - protein, 179 aa, Bacillus anthracis; identical to SEQ ID NO: 45329
  MISC_FEATURE (67)..(67): X=any amino acid
  MISC_FEATURE (134)..(134): X=any amino acid
  MISC_FEATURE (154)..(154): X=any amino acid

SEQ ID NO: 46903 - protein, 313 aa, Bacillus anthracis
  MISC_FEATURE (219)..(219): X=any amino acid
LFTVSIPQFNTKKLFTLEELTQEEIISLIEFAIYLKKNKQEPLLQGKTIRAYLYDKHSTRTRVSFEAGMVQLGGHGMFLNGKEMQMGRGETVSDTAKVLSHYIDGIMIRTFSHADVEELAKESSIPVINGLTDDHHPCQALADLMTIYEETNTFKGIKLAYVGDGNNVCHSLLLASAKVGMHMTVATPVGYKPNEEIVKKALAIAKETGAEIEILHNRXIAVNEADFIYTDVLDEHGGKRDKKEKLSFIQPYQINKELVKHAKQTYSFLTLVPAHREEEVTGEIIDGPQSIVFEQAGNRLHAQKALLVSLFKK

SEQ ID NO: 46904 - protein, 389 aa, Bacillus anthracis
MEEAPFYRDTWVEVDLDAIYNNVTHIKEFIPSDVEIFAVVKGNAYGHDYVPVAKIALEAGATRLAVAFLDEALVLRRAGITAPILVLGPSPPRDINVAAENDVALTVFQKEWVDEAIKLWDGSSTMKYHINFDSGMGRIGIRERKELKGFLKSLEGAPFLELEGVYTHFATADEVETSYFDKQYNTFLEQLSWLKEFGVDPKFVHTANSAATLRFQGITFNAVRIGIAMYGLSPSVEIRPFLPFKLEPALSLHTKVAHIKQVIKGDGISYNVTYRTKTEEWIATVAIGYADGWLRRLQGFEVLVNGKRVPIVGRVTMDQFMIHLPCEVPLGTKVTLIGRQGDEYISATEVAEYSGTINYEIITTISFRVPRIFIRNGKVVEVINYLNDI

SEQ ID NO: 46905 - protein, 423 aa, Bacillus anthracis
MNLSIAALENMKLKELYELAKEFKISYYSKLTKKELIFAILKARAEKEGFFFMEGVLEIIQSEGFGFLRPINYSPSSEDIYISASQIRRFDLRNGDKVSGKVRPPKENERYFGLLQVEAVNGDDPESAKERVHFPALTPLYPDRQMKLETEPKKLPTRIMDLIAPVGFGQRGLIVAPPKAGKTSLLKEIAHSVTTNHPEAELIVLLIDERPEEVTDIERSVKGDFVSSTFDEVPENHIKVAELVLERAMRLVEHKKDVIILMDSITRLARAYNLVIPPSGRTLSGGIDPAAFHRPKRFFGAARNIEEGGSLTILATALVDTGSRMDDVIYEEFKGTGNMELHLDRSLAERRIFPAIDIRRSGTRKEDLLIPKEHLDKLWGIRKTMRDTPDFVESFLRKLRQTKTNEEFLQNIVADSKRYVTTK

SEQ ID NO: 46906 - protein, 552 aa, Bacillus anthracis
  MISC_FEATURE (312)..(312): X=any amino acid
LEALEKEGVEVIFGYPGGAVLPLYDALYDCEIPHILTRHEQGAIHAAEGYARITGNPGVVIATSGPGATNVITGLADAMIDSLPLVVFTGQVATTLIGSDAFQEADIMGLTMPVTKHNYQVRKASDLPRIIKEAFHIARTGRPGPVVIDLPKDMVVEQGERCSDVQMDLPGYNPNYEPNLLQINKLLQAIQVANKPLILAGAGVLHAKASKELTSFARKYEIPVVHTLLGLGGFPPDDELFLGMGGMHGSYTANMALYECNLLINIGARFDDRLTGNLAYFAKEATVAHIDIDPAEIRKNVPTEIPIVGKCXAKRFQVLLSPRKEGKEIHHEWISFFKDWKRKCLHSSYKRNSESIKPQYAIDMLYELRKGEAIVTTDVGQHQMWAAQYYPLKTPDKWVTSGGLGTMGFGFPAAIGAQIAKPDELVFAHLAGKAGIPMTLQELSVLKEHSLPVKVFILNNEALGMVRQWQDEFYNQRYSHSLLSCQPDFVALANAYGIKGVRIDDPLLAKKQLQHAIELQEPVVIDCRVLQSEKVMPMVAPGKGVHQMEGVE

SEQ ID NO: 46907 - protein, 265 aa, Bacillus anthracis
MKNSKVIKLQDRVPKLKNQQKKKKKNVNHRLILYISILFLLVLFLIYFRSPLSNIKKISVFGNHYMTDEQVMKESGVTYDTSYFRVTAHKAEENLTKRKEIKAVNVKKRFPNKIDVHIEEYLTIGYINKDGKLQPLLENGKTLDVLPNGKLPVAAPIFEPFKEEKMKELIAELEKLTPTILRSISEIRYSPTNANEDHLTLYMNEGYEVSTTIQNFAKRMETYPLILKTIEPGKKVLIDLEVGAYTKELGAEEKKNRMIVFNTLS

SEQ ID NO: 46908 - protein, 343 aa, Bacillus anthracis
  MISC_FEATURE (246)..(246): X=any amino acid
  MISC_FEATURE (251)..(251): X=any amino acid
EKLNELLFDPAIISDSNKLREYSKEQSDIQETVEVYREYKDVREQLKDAKAMLEDKLDAEMREMVKEEVSELESQEKTLSERLKILLVPKDPNDDKNVIVEVRGAAGGDEAALFAGDLYRMYSRYAEVQGWKTEIIEASYTELCGYKEIIFMINGKSAFAKLKFENGAHRVQRVPETESGGRIHTSTATVAVLPQAEEIEIDIPEKDVRVDTFPSNGPGGQSVNTTNSAGTLTPFPTGVVVSRPDXKSPLXNKKKAMKVLRARVYDKFRQEAQAEYDQNRKQAVGTGDRSERIRTYNFPQNRVTEHRIGLTIPKLDQILQGKLDDFINALVMEDQAQRMEAAE

SEQ ID NO: 46909 - protein, 449 aa, Bacillus anthracis
MRDIKKFLQKLRPVQLIVLFYLLAVVVSVILLSLPFVTKSGVKWTFIDALFTSVSVVSVTGLSVVTISDTFTTAGIIILALILQLGGLGIMALGTFVWIITGKKIGLQRRRLIMADHNQGNLSGLVELMRSILIVIISIELIGAILLGTRFLLYFPTWQEAYFHGFFAAVSATTNGGFDLTGQSLIPYKKDYIVQMIHMLLIILGAIGFPVLMEVKQFLSKRGQQLFRFSLFTKLTTTTFFALVVVGTIMIFLLERNHFLVGKSWHETVFYTLFQSVTTRSGGLATMDILELSQPTLLFMSILMFIGASPSSVGGGIRTTTFAVSILSLYTFARGGRTVRVFKRQIHEEDVLKASVVMTMGILLCATALFILSITENVPLMSLIVEVCSAFGTTGLSTGITPDLTTVGKLVLIVLMFIGRVGILTFILASGGREQPPRYKYPKERIIIG

SEQ ID NO: 46910 - protein, 469 aa, Bacillus anthracis
MENLQIGVVGVGVMGKSLALNFESKGYSVALYDISKEKVDETIEENRGKNLVGTHIVEEFVNSLESPRKILLMVNAGEITDKAIDSLVPHLDKGDILIDGGNTYFVDTIRRNKRLAEEGINFIGAGVSGGEEGALKGPSIMPGGQKDAYEKVKDMLENISAKVNNEPCCSYIGPNGAGHYVKMVHNGIEYGDMQLICEAYFFLKQTLDLTAEEFHEIFAEWNKGELNSYLIEITADIFKKKDEETGKPLVDVILDTAGQKGTGKWTSQSALDLGISLPIITESVFARCISALKEERVNASKVLSGPKDKTAIGVEKAELIEAVRQALYMSKICSYAQGFTQLKAASEEYNWNLDFGSISMLWRGGCIIRAAFLQNIKEAYETNTDLPNLLLDPYFKEIVESYQGGLRQIISMAVQQGIPIPAFSAAISYYDSYRTAKLPANLLQAQRDYFGAHTYKRVDKEGTFHTKWI

SEQ ID NO: 46911 - protein, 970 aa, Bacillus anthracis
  MISC_FEATURE (53)..(53): X=any amino acid
  MISC_FEATURE (105)..(105): X=any amino acid
  MISC_FEATURE (127)..(127): X=any amino acid
  MISC_FEATURE (144)..(144): X=any amino acid
  MISC_FEATURE (193)..(193): X=any amino acid
  MISC_FEATURE (206)..(206): X=any amino acid
  MISC_FEATURE (228)..(228): X=any amino acid
  MISC_FEATURE (267)..(267): X=any amino acid
  MISC_FEATURE (307)..(307): X=any amino acid
  MISC_FEATURE (352)..(352): X=any amino acid
  MISC_FEATURE (366)..(366): X=any amino acid
  MISC_FEATURE (377)..(377): X=any amino acid
  MISC_FEATURE (381)..(381): X=any amino acid
  MISC_FEATURE (388)..(388): X=any amino acid
  MISC_FEATURE (393)..(393): X=any amino acid
  MISC_FEATURE (416)..(416): X=any amino acid
  MISC_FEATURE (423)..(423): X=any amino acid
  MISC_FEATURE (545)..(545): X=any amino acid
  MISC_FEATURE (575)..(575): X=any amino acid
  MISC_FEATURE (587)..(587): X=any amino acid
  MISC_FEATURE (590)..(590): X=any amino acid
  MISC_FEATURE (596)..(596): X=any amino acid
  MISC_FEATURE (609)..(609): X=any amino acid
  MISC_FEATURE (612)..(612): X=any amino acid
  MISC_FEATURE (614)..(614): X=any amino acid
  MISC_FEATURE (617)..(617): X=any amino acid
  MISC_FEATURE (627)..(627): X=any amino acid
  MISC_FEATURE (663)..(663): X=any amino acid
  MISC_FEATURE (715)..(715): X=any amino acid
  MISC_FEATURE (718)..(718): X=any amino acid
  MISC_FEATURE (725)..(725): X=any amino acid
  MISC_FEATURE (739)..(739): X=any amino acid
  MISC_FEATURE (746)..(746): X=any amino acid
  MISC_FEATURE (769)..(769): X=any amino acid
  MISC_FEATURE (786)..(786): X=any amino acid
  MISC_FEATURE (788)..(788): X=any amino acid
  MISC_FEATURE (792)..(792): X=any amino acid
  MISC_FEATURE (799)..(799): X=any amino acid
  MISC_FEATURE (827)..(827): X=any amino acid
  MISC_FEATURE (852)..(852): X=any amino acid
  MISC_FEATURE (892)..(892): X=any amino acid
  MISC_FEATURE (905)..(905): X=any amino acid
  MISC_FEATURE (907)..(907): X=any amino acid
  MISC_FEATURE (908)..(908): X=any amino acid
  MISC_FEATURE (915)..(915): X=any amino acid
  MISC_FEATURE (938)..(938): X=any amino acid
  MISC_FEATURE (939)..(939): X=any amino acid
  MISC_FEATURE (950)..(950): X=any amino acid
  MISC_FEATURE (968)..(968): X=any amino acid
KNVLDGLRLRNIDVTIPRKSTLALVTRIVWVQGKSSLALWIPIYPEGHAPNTXESLFGVTTPIFRGKWISPDVDTIGGLSPAISIDQKTGVCIPASTGGTVTEDXEYLRLIIAAIGFAQFSRIPGHXKFPSQPVGANWVAPFTXGPLDRTKLQVVSPIGFWRKGCTCKVLEDIKKHRVCSVDRLDGEMPHGAXKICVDKNKKPFHXSCIGRHWCKKKEIPDRLAEFPXKCIKAWGGRVLIDVMGEEELLFSEHHACPPLWFLQLDEXRHDVVLIQSPFGACPSCDGLGLKVRGRFRTCYSEAGIYHXMSMRLAPWEPTSSQYYPQLLQSVCNHYGVDMDVPVKDIPKDLFDXVVDRNREEKIYFPXGNGFGPGKGKXDFIXRCYSKYXTSLSXDEFGLLSEPLGKFLGETTCSKGXRRTLKAXKFAVFVGGKTIADVTKYSVQEVQEFFSNVELTEKQQKIAHLILREIQERVGFLVNVGLDYLTLSRAAGTLSGGEAQRIRLATQIGSRLTGVLYILDEPSIGLPSTAITIVLFVHCKKCVFRXYLIVVEHDEDTMMAADYLLDIGPGRRYSRXPKLYQRVHQLKXCRXEFTNRXYLSGKEFIPVSTXKTXRXWTXSGDCRCKREXLKNAKMSFPLGTFVAVTGVSGSGKSPMISEVLYKSXAQNLYKAKSGAQYLIKKLKGLEHLDKVIDIDQSPIGRTPRFNPSTLYRCVRXYSXCVCANEXSESARYQKGRFQLXRKRWDVXKRAVVMELLKLRCLLTRRIRSVXSCHGKRYNRENVRSEIXRXKHFXSVRDDDXRRSRVFANIPKIKRKLQTLVDGLGLVIXKFRGTQPTTLFWVVKAQRVKILAFXNYTRRFYRDVHLYIFRRPNDWVYMRMISPRLSRSAATSCXEPVRPVCPCEIIXMXXNQGIIRXPLAQEGEDKRWPIRCSRKRRTKXXRRTVVIQVSIXKSILNRDKARMKEKIKKXSY

SEQ ID NO: 46912 - protein, 486 aa, Bacillus anthracis
  MISC_FEATURE (17)..(17): X=any amino acid
  MISC_FEATURE (110)..(110): X=any amino acid
NPKVKAFLDEEIKMFIXCEIVSSISGKTFETYNPATEDVLAVVYEAQEEDIDVAVKAARSAFESGPWVEMTTAERAHLIYKLADLIEEHGEELAQLEALDNGKPISSSTXDDIAATVENYRYYAGWATKIIGQTIPISKDYLNYTRHEPVGVVGQIIPWNFPLVMSSWKMGAALATGCTIVLKPAEQTPLSLLYTAKLFKEAGFPNGVVNFVPGFGPEAGAAIVNHHDIDKVAFTGSTVTGKYIMRQSAETIKHVTLELGGKSPNIILEDADLEEAINGAFPRIMYNHGQNCSAGSPGVRSRKHYETVRKETCGKCGITGKLGAGMEKDTEMGPLVSKKQQERVLHYIEQGKAEGRYCCAGGERAFEKGYFVQPPVFTDVTDDMTIVKERILRFCCRCTPFDSTEEVIERANRSSYGLAAGVWTQNIKTGHQVANKLKAGTVWINDYNLENAAAPFGGFKQSGIGRELGSYALDNYTEVKSVWVNI

SEQ ID NO: 46913 - protein, 381 aa, Bacillus anthracis
MKLKIGITCYPSVGGSGVVGTELGKQLAERGHEIHFITSGLPFRLNKVYPNIYFHEVTVNQYSVFQYPPYDLALASKMAEVAQRENLDILHVHYAIPHAICAYLAKQMIGERIKIVTTLHGTDITVLGSDPSLNNLIRFGIEQSDVVTAVSHSLINETHELVKPNKDIQTVYNFIDERVYFKRDMTQLKKEYGISESEKILIHISNFRKVKRVQDVVQAFAKIVTEVDAKLLLVGDGPEFCTILQLVKNLHIEDRVLFLGKQDNVAELLAMSDLMLLLSEKESFGLVLLEAMACGVPCIGTRVGGIPEVIQHGDTGYLCEVGDTTGVADQAIQLLKDEELHRNMGERARESVYEQFRSEKIVSQYETIYYDVLRDDKNGKI

SEQ ID NO: 46914 - protein, 820 aa, Bacillus anthracis
MSDNYRSRTERNHVKNQKQETNKEKKPKKKGSFFKKFLIGCLLLGIVGLVAGVSAFFVMVKDAPKLDKSKLVNPLSTKFLDKDGNFFYEYGAEKRTHVTYDQIPKVVENAFLATEDSRFYDHNGIDFKRTTKAVMENVTGGFGSQGGSTITQQVVKNYFLTMDKTAKRKVQEWYLSYKLEQQYSKHEILEMYLNKINLGNRSYGIATAAQKYYGKDLKDLQLHEAAMLAGLPQGPNIYDPTKKENVERATNRRNVVLSLMNRHGYITKEEMNNAVKIPVTEGLQPSSEITEMKYQAFLDAVVKEVEKEYPDVNIGSDGLTIHTTLDQDAQDYAEKIMDGNLIKYPNDQFQGSFVFMDTQSGEVRAIGAGRKGSKSTFKGHNMATDLKRQVGSTMKPIFDYGPAIENLQWSTYHQLNDSEYTYSNGKKIRNATNSYKGDVSLREALKKSLNIPALKTAQAVGLPKSQAFAEGLGMTFKDGKTFESTAIGSNDSSPLQLAGAYAAFGNGGNYNKPHFVKEVTFPDGKKKSFKPKEQRAMQDYTAYMVTDVLRDVVKPGSGGTGPTAYVSGVDVAGKTGTQNFDADVIKEYGIPADANRDSWFAGYTPQYTMAVWTGYEKNGPENYISDRYTRIAQQMFQVMMSKFATDKTRFERPSSVQEINGELYVKGAKKDAIKQIKVDAPSGLNVTFDGASTVTLNWSGPTEVDAYAASYKATDGSSGSLSVKGTTATLGGIKPGVTYSFSVVAKKGTGTSPAVGASFTAPGGTPDAKKAEEEAKKKAEEEAKKKADEEAQKKANEDKLKQEEATKKAEEEAKNNKNNN

SEQ ID NO: 46915 - protein, 362 aa, Bacillus anthracis
MTKKINADEKSRIQSLSIGIIVPSKFFELAEKNEPFHVFAPYTVYKEYGKHLDDIDIDEMYDELMSNPKVKKKPLDISARDMLIKIAMIQLESGYPYLMFKSNANNQHPLKDIGTVKMSNLCTEIFQLQETSEINDYGTDDIIRRDINCNLGSLNIVNVMENKEIREAVHAGMEALTAVSDMTIIPNAPTVKKANDELHSVGLGAMNLHGYLAKNKIAYESEEAKEFARTFFMMLNYYSIEKSMEIAKEKGETFKDFDKSDYANGTYFEKYETTDYSPVTEKVQQLFEGIHIPTKEDWTSLKEQVQKNGLYNSYRLAIAPTQSISYVQNATSSVMPIVSQIESRTYANATTYYPMPYLSKDT

SEQ ID NO: 46916 - protein, 273 aa, Bacillus anthracis
MSAFLGELIGTALLIVLGGGVCAGVSLKKSFAKDSGWIVITMGWGLAVAVAAYVVGSISGAHLNPALTIGLAFKGAFPWGDVPGYIAAQMIGAIIGAVIVYLHYLPHWKETEDPGTKLGVFATGPAIPNTFANLLSEMIGTFVLVFGILAIGANKFADGLNPFIVGFLIVSIGLSLGGTTGYAINPARDLGPRIAHFFLPIAGKGGSNWKYAWIPVVGPILGGSLAGLFHQVVFEGKQNAALIYVIIATVIVLAISYMTSKKSGSNTNSRKVA

SEQ ID NO: 46917 - protein, 540 aa, Bacillus anthracis
  MISC_FEATURE (363)..(363): X=any amino acid
QFVTRQPPPISFPNGGEEESIVIMPFVEDVLTMSGNDLGTRHSTCEFPEEHKELAEESREKLMKAVAELDEEMMMKSLEGEEITVEELKAGIRKATTSVEFFPVICGSAWRNKGVQIMLDAVMVYLPSPLDVPAIKGIVPDTDEEVDRKSSDEDPLAALAFKIMTDPYVGKLTFFRVYSGVLNCGSSVKNSTKGKRERVGRILQMHDISREEISTVYAGDIAAAVGLKDITTGDTLCDEKSLVILESMEFPEPVISVAIEPKSKVDQDKMGTALSKLSEEDPTFRAHTDQETGQTIIDGMGELHLDIIVDRMRREFKVEANVGAPQVAYRETFRAAAKVEGKFARQSGGRGQFGHVWIEFERXKKTGIGFEFENKIVGGVVPREYIPAVGAGLEDALKNGVLAGYPVVDIKAALVDGSYHDVDSSEMAFKIAASMALKAAVSKCNPVILEPMMKVEVVIPEEYMGDIMGDVTSRRGRVEGMEARGNAQVVRAMVPLSEMFGYATSLRSNTQGRGTFSMVFDHYEEVPKSVSEEIIKKNKG

SEQ ID NO: 46918 - protein, 328 aa, Bacillus anthracis
MKMLVTGGTGFLGQKLAFRLKNMGYEVTATGRNKTIGKVLEQNGIKFVHCPLEDRERVLQVCKDKDYIFHSGAHSSPWGKYEDFYNANVLGTKHIIEGSQKYGIKRLIHVSTPSIYFYYDERQNVVENAKLPDTFVNHYATTKYMAEQAIDQAFAHGLPVITIRPRALFGPGDNAILPRLIKVCEKGALPRIGTENVLVDITYVENVVDALLLCMHSPKHTLGQKYNITNDERINLYEVIENVMKRLDKEVRYKKISYKTAFTLAAILEGISKTILFGKEPILTKYTVSVLSKSQTLSIDKAKEELGYAPKVSIEEGITKFVDWWKTQ

SEQ ID NO: 46919 - protein, 515 aa, Bacillus anthracis
LLAFDAGTGSIRAVLFDLHGNQIAVSQKEWIHKSDPLYPGSMNFDVIENWKLVQECTKEVLQKSNTLASSILAISATSMREGFVLYDQDGQEIWACANVDGRASAEVSELKEIRSHLEKDLYTKSGQTFSLGALPRLLWIKKHEPDVYNTIHSFTMLNDWILYKLSRVLQIGPSNGCTSGIFDLQNRVWDNDVAKECGLSLPFSPTVNEAGTVIGNVTKECAALTGLCEGIPVVAGGGDAQMASLGTGVVKPNQTLICGGSFWQQEANVTEPIPDPQAAIRINCHVVRNLWQYETIAFFPGLVMRWFRDAFCQEEKKLADKLGVDAYELLEEQAKDVPVGSHSIIPTFSNVMNYISWRHAAPSFLNLSLDADKCGKKRLFRAIEENAAFVTLGNLKLIENLTGIFPSEVIFAGGAAKGKLWPQILSDVLGIPVKVPVVKEAAALGTAIAAGVGAGIYSSMEETAEQFVQWEQTFEPVTENHELYKEFYETWKTVYNSQLALADNGLTSHMWIAPG

SEQ ID NO: 46920 - protein, 132 aa, Bacillus anthracis
MQLAFEKVYSNDQNKILDWLKNQTGINQICITGGKAKQLQQLLSASYKIVELNEFEATLVGVRYILKKEKYDINNFVLTNIGTGTSIHYIYNDQYIRAGGTGVGGGTIMGLSKLVTNIDHFENVIPLTKRRF

SEQ ID NO: 46921 - protein, 513 aa, Bacillus anthracis
MIDQKQQSNTFEERVETIKRGGAPKYHEQNKAKGKLFVRDRLALLFDNGEYVEDALFANCEETGLPADGVITATGKIHGRTACVMANDSTVKAGSWGARTVEKILRIQETAEKLRVPLFYLVDSAGARITDQVEMFPGRRGAGRIFYNQVKLSGKVPQVCLLFGPSAAGGAYIPAFCDVVMMVEGNASMYLGSPRMAEMVIGEKVTLEEMGGARMHCSISGCGDVLCKTEEDAITQARQYISYFPNNYLEKTPLVTPQEPKQFDKTLEQIIPENQNAPFNMKDLINRVIDEGSFYEVKKLFAQELITGLARIDGKPVGIIANQPRMKGGVLFHDSADKAAKFINLCDAYHIPLLFLADVPGFMIGTKVERAGIIRHGAKMISAMSEATVPKISIVVRKAYGAGLYAMAGPAFEPDCCLALPTASIAVMGPEAAVNAVYANKIAALPEEERDSFIAEKREEYKKDIDIYHLASEMVIDGIVHPNNLREELKGRFEMYMSKYQVFTDRKHPVYPV

SEQ ID NO: 46922 - protein, 249 aa, Bacillus anthracis
MSSWRNNINGYCSCNNQNGVHVDSCCFSCDGTVPKLGPTGPTGATGATGATGVTGVTGVTGATGITGATGITGATGITGVTGPTGATGITGATGPTGATGITGATGPTGVTGTSITATYAFANNTSGTAISVLLGGTNVPLPNNQNIGPGITVSGGNTVFTVANAGNYYISYTINITASLLVSSRITINGAPLAGTINSPAVATTSFSATIITTLAAGSAISLQLFGLLAVATLSTTTPGAVLTIIRLS

SEQ ID NO: 46923 - protein, 301 aa, Bacillus anthracis
  MISC_FEATURE (52)..(52): X=any amino acid
  MISC_FEATURE (169)..(169): X=any amino acid
  MISC_FEATURE (194)..(194): X=any amino acid
PLIGLALIIVVITGFNPAVLEIPNLFNILRQESINGAYAFGMTFVILTGGYXLSVGSILALSSALVAGMMASAHGPVLAMAVGLLAGLCMGICNGIIIAKGKVASFIATFSTMTIFRGLTLVYMDGRPITGLGDHLMVPNFWPPVNFRGFPVPVVTKDVRFRQYCTSFXEKATFVARTFAIGENEEAAPLFRYXCCKIKVNDFRSFGIWAALQGIVLTSRLDSAQPTAGTSYDLDAIAAVVLGGTSLSGERGWIVGTFIGVLIIGVLNNGLNLLGVSSFFQQVVKGLVILLAVLIDRRKEA

SEQ ID NO: 46924 - protein, 291 aa, Bacillus anthracis
  MISC_FEATURE (74)..(74): X=any amino acid
  MISC_FEATURE (162)..(162): X=any amino acid
  MISC_FEATURE (192)..(192): X=any amino acid
IIKGAFPVLITPMDEFQEINWNGVKQNVNYFIEQKVAGIIINGSTGEFVSLSKEERFKMVETVLKEVNGRIPEXVGTAAETTKETIEFTKHAETHGADCALIINSYYCKPKEEEIYFHFKEISNAVNIPIMLYNNPFTSGVDMSTELMLRIGKDCGNVTHIXESSGDIRKARDLVRTRRKWLFKSSADLEIXLWNPILFGATGWFSVAGNVVPGLVTKMYEHFQNGELEKAWEINDAILPLCEFLEGSGKYVQIVKRSMELQGQAGGPSRYPRLGLTEEEDQKLQAIISKI

SEQ ID NO: 46925 - protein, 385 aa, Bacillus anthracis
MKLFHTADWHLGKLVHGVYMTEDQKIVLDQFVQAVEEEKPDAVIIAGDLYDRAIPPTEAVDLLNDVLQKIVIDLQTPVIAVAGNHDSPDRIHFGSSLMKKQGLFIVGQFQFPYEPIILNDEHGEVHFHLVPYADPSIVRHVLKNEDVRSHDDAMRIFMNELSETMDKEARHVFVGHAFVTSAGEAEENTSDAERPLSIGGAEYVNSHYFDKFHYTALGHLHQAHFVRNETIRYSGSPLAYSISEEKHKKGYYIVELNEQGEATIEKRLLTPRRKMRTVEAKIDELLQHPVSEDYVFVKLLDENPVLQPMEKIRSVYPNAMHVERSIQRREFTESNEATVSRHKTDDLSLLKAFYKEMKGLDLSEEKERLFVEVLQTVQEREGERG

SEQ ID NO: 46926 - protein, 200 aa, Bacillus anthracis
  MISC_FEATURE (174)..(174): X=any amino acid
  MISC_FEATURE (189)..(189): X=any amino acid
WEEFLAPYHQAVAELKVKLKGMRTQFAMLTEHSPIEFVTGRVKSVASIIDKAEKRNVPLDRLREDMQDIAGLRMMCQFVDEIKPVVEYLRKRNDFEIVEERDYVTQKKDSGYRSYHVVISYPVQTIQGEQKVLVEIQIRTLAMNFWATIEHSLNNKYSGTFSEDIKIRLPRAAXAAFLLDERNSSISSXNQEAQKAFSRK

SEQ ID NO: 46927 - protein, 379 aa, Bacillus anthracis
MTAIRYEFIKTCKQTGARLGRVHTPHGSFDTPTFMPVGTLATVKTMSPEELKAMDSGIILSNTYHLWLRPGHEIIREAGGLHKFMNWDRAILTDSGGFQVFSLSDFRRIEEEGVHFRNHLNGDKLFLSPEKAMEIQNALGSDIMMAFDECPPFPATFEYMKKSVERTSRWAERCLKAHERPQDQGLFGIVQGGEFEELRRQSAKDLVSMDFPGYAVGGLSVGEPKDIMNRVLEFTTPLLPDNKPRYLMGVGSPDSLIDGAIRGIDMFDCVLPTRIARNGTCMTSEGRLVVKNAKFARDFGPLDPNCDCYTCKNYSRAYIRHLMKCDETFGIRLTSYHNLHFLLNLMEQVRQAIREDRLGDFREEFFEQYGFNKPNAKNF

SEQ ID NO: 46928 - protein, 303 aa, Bacillus anthracis
  MISC_FEATURE (77)..(77): X=any amino acid
FMNIEEISLFPAFWMTMITRITVGYGDAILVTHAGKVFALLIIPVGVGIVTYANGVVAAMIIEGNLFHAVRREEMGXQIAQLQNHIIVCGCGRVRLQVVHELQVKKIPFVVVDKEKAYLEKEKLLYVHGDATEGQSLHHAGFSKAGGLVAIVANDAENVFITLPARGLTDAIKFVARAEKPETRRQVKEAGANKVINPSSMNRHHIAKGIANPLTVHYIDTVLYGVEQSFVIEEIAVGKGSILTNKSLLESDVRNQFDVTILAILRNGNVIHNPTGQEKLQEHDMIIVFGSVEKLGQFEKELQ

SEQ ID NO: 46929 - protein, 450 aa, Bacillus anthracis
MSTHVTFDYSKALSFIGEHEITYLRDAVKVTHHAIHEKTGAGNDFLGWVDLPLQYDKEEFARIQKCAEKIKNDSDILLVVGIGGSYLGARAAIEMLNHSFYNTLSKEQRKTPQVLFVGQNISSTYMKDLMDVLEGKDFSINVISKSGTTTEPALAFRIFRKLLEEKYGKEEARKRIYATTDKARGALKTLADNEGYETFVIPDDVGGRFSVLTPVGLLPIAVSGLNIEEMMKGAAAGRDDFGTSELEENPAYQYAVVRNALYNKGKTIEMLINYEPALQYFAEWWKQLFGESEGKDQKGIFPSSANFSTDLHSLGQYVQEGRRDLFETVLKVGKSTHELTIESEENDLDGLNYLAGETVDFVNTKAYEGTLLAHSDGGVPNLIVNIPELNEYTFGYLVYFFEKACAMSGYLLGVNPFDQPGVEAYKKNMFALLGKPGFEELKAELEERLK

SEQ ID NO: 46930 - protein, 72 aa, Bacillus anthracis
MSLGVIAAAIAIGLSALGAGIGNGLIVSRTIEGVARQPELKGALQTIMFIGVALVEALPIIGVVIAFIVMNK

SEQ ID NO: 46931 - protein, 874 aa, Bacillus anthracis
MSIPSILRKETLKKKDKNIDLQENNINDLVVSASRVIAPLWPISTFAAHHPWMGLEKQSFEQVANWLKEARNVDIYPSASMIHSAKAKGEIEESFLQIALSRWLDSQSFHMPRETAERFCQEALKLERLPSSLLSSPELNKLAEEINYVNTGSMKDSSMQPISSLIENQNGDNLSDILNYHIIKWCKLYLDDAGASWAMPNREKGFYRAWQHLITFDPALSKTERKVLKDWPEDALIALTKALSELGISESNMQAYLEGHLLSLPGWAGMIRWRSQQSIEEQELLIEYLAVRLSMELAIVKPYLPLKNQKVEKKVSIVPLIASWIYWGDISIEKWLQMSATEQSELLAFAYRFDENTRKKLWLEAWEQTHAEQLREKIASKQRATHDKKRVVAQLAFCIDVRSEPFRRHLEKLGPFETFGIAGFFGLPIATTELGSNDSHPSLPVILKPKHQIKELTDENECKSYEQRKMVGSSVRYTFKTMKQNVLTSMLLPEVSGPLLGLQMVTRSFVPRRVGGFIRNLRKNMLQKPDTTFSLNHVHDTNCEIPIGFTKEEKVNYVRQTLKMVGLTEGFAPLVVMCGHSSQSTNNPYAAALECGACGGAAGGFNARVFATLCNLPEVREALSAEGIKIPDDTIFAAAEHKTTVDELEWIYVPELSETAQEAFDCIEAIMPNVSQHANRERLMQLPHFKTKIKNPSKEAHRFAEDWSEIRPEWGLARNASFIIGQRELTQECDLEGRAFLHNYDWKQDESGDILANIIAGPGTVAQWINLQYYASTVAPHYYGSGNKATQTVTAGLGVMQGNASDLLPGLPWQSVMQSDRETYHSPLRLLIVIQAPTKYIERLLNNNFTFREKVQNGWVRLASVDPEGRWKNW

SEQ ID NO: 46932 - protein, 483 aa, Bacillus anthracis
MDKKATFVNVEKKAMYINGEWITLQEQIEVNNPATKEIFATVPKGGVTEAKQAVDAAHEAFKSWSKLTAADRAAKLKKWFTLIDENKEEIAAIMTKEQGKPFAEALGEVNYANSFVEWYAEEGKRVYGEMIPASHPNKRILVMKQPVGVMAAITPWNFPAAMITRKVAPALAAGCTAVVKPASQTPLTALKLAELAHEADIPKGVINIVTGSAKAIADTWMEDGRVRKVSFTGSTEIGKELMASAAQTMKKVSLELGGHAPFIVMNDADLDKAVEAVIGSKFRNAGQTCICTNRVFVQEEVYEAFVEKFEKAVGQLKVGDGFGDGTTVGPLIDENAVSKVQEHIEDAIQKGGTVLYGGQKVAELDGHFMQPTVIGLANDTMLCMNEETFGPVAPVAKFKTVEEVIERANHTPYGLAAYIFTKDISQAFQISEALEYGIIGLNDGLPSVAQAPFGGFKESGIGREGGHFGIEEYLEIKYISLGL

SEQ ID NO: 46933 - protein, 277 aa, Bacillus anthracis
MSFLNNSIIYHIAIILYACSISLYFIDYFQSNRKANRFAFWLLSIVWVLHSIFMLLRATDSETNPLLTLLSGIYFYVWLLITMSLVINRFMRIDFLVFFTNVVAFGVSAFSIFTPLGKMSPVLAEQLVSELVYVHVGMAIISYATFTVSFIFSIMYLLQYRLLKKKKWNARLRRLGNLPKLESMSYGLNLFSVPFFLLAILLGCIWGYTKLDNFHWYDTKVIGSFVVLFVYCAGLYLRAADVLQGKKIVQWNIGAFLVMLINIFLLSSLSNFHFWYL

SEQ ID NO: 46934 - protein, 227 aa, Bacillus anthracis
VGGDGTLLYAFHRYYNRLDETAFVGVHTGHLGFYADWLPTEVEKLVIAIAKTPFQVVEYPLLEVIIRYMNGSKESQYLAMNEATVEQITKSLVPRVKKPGQALFNPPQGMGHCNSTPFGEDLRINEGASAEEIIPPSIEAIQIAEMASINNRVFRTVGSPLVLPKHHTCVLKPTAGMNLQITGGTHLRWVHQDVKSIQYRVANEKVRFVRFRPFPFWKRVRDSFVAD

SEQ ID NO: 46935 - protein, 377 aa, Bacillus anthracis
MRIGIPTEIKNNENRVAMTPAGAVHLVQNGHEVFVQKGAGLGSGFTDEEYVQAGAKLVETAEEAWNQDMVMKVKEPVASEYGYFREGLILFTYLHLAPEPELTKALIDNKVVSIAYETVQLDNRSLPLLAPMSEVAGRMSAQIGAQFLEKNKGGKGILLAGVPGVKRGKVTIIGGGQAGTNAAKIAVGLGADVTIIDLSAERLRQLDDIFGNQVKTLMSNPYNIAEAVKESDLVIGAVLIPGAKAPKLVTEEMIQSMEPGSVVVDIAIDQGGIFETTDRITTHDNPTYEKHGVVHYAVANMPGAVPRTSTLALTNVTVPYAVQIANKGYKDACLGNTALLKGINTLDGYVTFEAVAEAHGLQYADAKELLEKAPALS

SEQ ID NO: 46936 - protein, 119 aa, Bacillus anthracis
MKKKHRIKKNDEFQTVFQKGKSNANRQFVVYQLDKEEQPNFRIGLSVSKKIGNAVVRNRIKRMIRQSITELKDEIDSGKDFVIIARKPCAEMTYEELKKSLIHVFKRSGMKRIKSSVRK

SEQ ID NO: 46937 - protein, 431 aa, Bacillus anthracis
  MISC_FEATURE (192)..(192): X=any amino acid
  MISC_FEATURE (406)..(406): X=any amino acid
LTMVAEKGTQTKTQQQREQHFELLNSTQIVISEALEKLGYPNEVYELLKEPIRMMTVKIPVRMDDGTVKIFTGYRAQHNDAVGPTKGGIRFHPNVTENEVKALSIWMSLKCGIVDLPYGGGKGGIICDPREMSFRELERLSRGYVRAISQIVGPTKDIPAPDVFTNSQIMAWMMDEYSRIDEFNSPGFITGXPTCIRVDLYGRETATAKGVTICIREAAKKRDIDIKGARVVVQGFGNAGSFLAKFMHDAGAKIIGISKAYGALHDPNGLDIDYLLDRRDSFGTVTKLFNNTISNKELLELDCDILVPAAIENQITEENANDIKAKIVVEAANGPTTLEATKILTDRGILLVPDVLASAGGVTVSYFEWVQNNQGYYWTEEEVEQRLEKVMVRSFDSIYETATSSXVNMRLAAYMVGVRKMAEASRFRGWV

SEQ ID NO: 46938 - protein, 123 aa, Bacillus anthracis
YLRDHTIHPITDQRHNAEGFQPVDDDYEQFIERMFEHDTIIFATPLYWYGMSGHMKNFFDRWSQSLRDTSLHFKEKMKGKKMYVVIVGGDNPKLKALPLIAQFQYIFDFIGSSFEGYIIGDAN

SEQ ID NO: 46939 - protein, 180 aa, Bacillus anthracis
MSNGIVAKRYAVALFKIAKEKHVLEMFEEELRLVQNVYEKNGELHSFLTQPNISKEQKKTFLANVFGSVSESILNTLYILIDNKRIDILSDIANEYVVLANEERNVADATVYSTRLLSEEEKLNIAEAFAKRTGKDAIRVKNVVDEDLLGGIKVRIGNRIYDGSLQGKLARIQRELMKNR

SEQ ID NO: 46940 - protein, 480 aa, Bacillus anthracis
  MISC_FEATURE (168)..(168): X=any amino acid
  MISC_FEATURE (192)..(192): X=any amino acid
  MISC_FEATURE (225)..(225): X=any amino acid
  MISC_FEATURE (284)..(284): X=any amino acid
  MISC_FEATURE (308)..(308): X=any amino acid
  MISC_FEATURE (316)..(316): X=any amino acid
  MISC_FEATURE (323)..(323): X=any amino acid
  MISC_FEATURE (375)..(375): X=any amino acid
  MISC_FEATURE (381)..(381): X=any amino acid
  MISC_FEATURE (444)..(444): X=any amino acid
  MISC_FEATURE (452)..(452): X=any amino acid
  MISC_FEATURE (457)..(457): X=any amino acid
  MISC_FEATURE (470)..(470): X=any amino acid
  MISC_FEATURE (479)..(479): X=any amino acid
MNLETIIGLEVHVELKTNSKIFSASPTEFGAEPNTQTSVIDLGYPGVLPTLNKEAVNFAMKAAMALNCEIATETKFDRKNYFYPDRAKAYQISQFDKPIGENGWIEFEVDGKKKTYGITRLHLERDAGKSTHTADGSLVDYNRQGMPFNRIVSEPDMRTPEEAYGILXEFKSIIQYTGVSDCKMEEGSLALXCEHSLRSVGQEEGRYKRQNEKLKLFTNVPKGSXALSKCVQKKNYYLGGIIPQETRPYDEPTTKTILMRGKKRILTNYFTFPKPEYIEPFTPXPPEKKNFRLLFAELPDARKTPQTXGNWRFPLXRPPFLPXPQEMSDFFGSNNCRWSRCKLTSNWLMGEVLAYLNKQQKELKDVALTPGWFIXNGSINXKGTISSKIAKKVFNELIEKGGDPEEIVKAKGLVQISDEGTLRKVVTEILDNNEQSIRDFKNGXRPCDWLPXFVQLXKLPKGQANPTPIXQNFTGRDYXA

SEQ ID NO: 46941 - protein, 233 aa, Bacillus anthracis
MKVKTYQQKSPLKQECEDSYFCNEENKIYGVCDGATPLVPFRDEKGHNGAYIASHLFASYFASLRENHSLQVAVAKANEALQSKMLAYKVDTRKKEHLWCTCIAAVQINGEKIEYAQLGDCMIVAILQNGTMQVLTKDTVEGISKRAKKKREEDRKKGLSVPEEYVFQDVREQLKYNRYLATMQGGYSVANGMKEAIHYLQHGELHIDEVSGIFICSDGFFTQIGHSNKLLHI

SEQ ID NO: 46942 - protein, 144 aa, Bacillus anthracis
NKQVIEVLNKQVADWSVLFTKLHNFHWYVKGPQFFTLHEKFEELYTESATHIDEIAERILAIGGKPVATMKEYLEISSIQEAAYGETAEGMGRAIMKDYEMMLVELEKSMEIAQNSDDEMTSDLLLGIYTELEKPALMLRALLE

SEQ ID NO: 46943 - protein, 496 aa, Bacillus anthracis
MEQLVEWLVGQVWSIGLVVFALGAGVYFTIATRFLQIRYFKEMIKLLFEGKSSETGISSFQAFCLALSGRVGIGNIAGVATAIAFGGPGAVFWMWVMALLGAASAFVESTLSQIYKSKVENEYRGGTPYFIEKGLNMKWFAVIVAVVVTLSYGVLLPGIQSSSIAVGFENSNGISKYITGILLVVLLAAIIFGGVKRIAGVSQMLVPFMAIGYVIVTCIVLIANVKEIPSMFALIFSSAFGVNEMFGGIVGAAIAWGVKCAVFSNVAGVGEATYSSAAAEVSHPAKQGLVQAFSVYIDTIVVCTATALMILITGMYNVIPEGKSAIVKNIGNVDAGPIYTQQAVETVMTGFGPLFISIAIFFFAFTTLLAYYYIAETTLTYLDRELKHSWLKPVLKIGFLIMVYIGSVESASLLWNLGDLGIGSMAWLNLIAILLLSKIALKVLKDYETQKKEGKDPVFDPKNVGIEGLTFWEERSKEVARKNSKEQAVVDDSLKL

SEQ ID NO: 46944 - protein, 87 aa, Bacillus anthracis
MEKIFKVTSDSGIHARPATLLVNTASKFGSDINLEYNGKNVNLKSIMGVMSLGIQQNAEIKITANGDDAAQALAAIEETMKNEGLGE

SEQ ID NO: 46945 - protein, 698 aa, Bacillus anthracis
  MISC_FEATURE (48)..(48): X=any amino acid
  MISC_FEATURE (49)..(49): X=any amino acid
  MISC_FEATURE (103)..(103): X=any amino acid
  MISC_FEATURE (133)..(133): X=any amino acid
  MISC_FEATURE (360)..(360): X=any amino acid
  MISC_FEATURE (376)..(376): X=any amino acid
  MISC_FEATURE (381)..(381): X=any amino acid
  MISC_FEATURE (382)..(382): X=any amino acid
  MISC_FEATURE (408)..(408): X=any amino acid
  MISC_FEATURE (452)..(452): X=any amino acid
  MISC_FEATURE (453)..(453): X=any amino acid
  MISC_FEATURE (455)..(455): X=any amino acid
  MISC_FEATURE (461)..(461): X=any amino acid
  MISC_FEATURE (474)..(474): X=any amino acid
  MISC_FEATURE (482)..(482): X=any amino acid
  MISC_FEATURE (545)..(545): X=any amino acid
  MISC_FEATURE (688)..(688): X=any amino acid
MSKIRVHEYAKKHNISSKDLMTKLKEMNIEVSNHMTMLDDESSKQIRXXVFQLKNLSVPDELEVEEKVFGSKRAAIRKRKKGKGTEARRQETFVGRQQNPRLXTPPDKILFSESFTVGALVKKISKRAIGNLXKKLFMLGIMATINPDLDKDTIELMATDYGIEVEEEVIVSETEFETFPWRGQVGEGILKERSQVVVTIQWDTLNQGKTTLSGPLFRNYKVLAAKAGGISQHIGAYQLELNAKKIYILRHPGHAGVTTMRARGGHSNGYTIIVGATDDGVMPQTVEAINHAKAAGVPIIVAVNKMDKPAANPDRVMQELTEYELVPEAWGGDPNFRTNFCIKAKGIDILLEMIFLISEXEEYKANPTPLCNWVLXESTAXXGKGLIATLLFQNGTLRVGDPIVVTNXVGCVRAYTRDIGRRVKVAGPSTPVEITSLKRSTTSGEIVHGIRXXEXSSSNRXITCARSVTCSTWXKIFKLSLXRFISNKSQGGRCKKKLPLIVKADVQCFCRSKWQHHLVKLDVKGVKVKIIHTGVGAITESDIIXASASNAIVIGFNVRPDVNAKRTAELENVDIRLHRIIYKVIEEIEAAMQGMLDPEFERKSIGSSRSTSTFKVTKVGTFAGCYVTDGKITRDSGVRIIRDGVVIFEGQLDTFKTFKRRRKRSCTNYECGITIERYNDLKEGGHYXSIHYGRSEAM

SEQ ID NO: 46946 - protein, 157 aa, Bacillus anthracis
  MISC_FEATURE (48)..(48): X=any amino acid
  MISC_FEATURE (53)..(53): X=any amino acid
  MISC_FEATURE (55)..(55): X=any amino acid
SLFNLQGVSIPFLPMDCPFRKVDEINSTWGKNVGNIIFVDFHGGTDKXKTKRXGXYVDGRATALVGTHTHVPTADNRILPSGTALYTDVGMTGPYDGILGMAREAVLKKFLTNLPVRFEVTNGRTQLSAVLIDVDPNTGKAKKIERILINDDQPFFE

SEQ ID NO: 46947 - protein, 316 aa, Bacillus anthracis
MSTVQVPKLNTKDLLTLEELTQEEIISLIEFAIYLKKNKQEPLLQGKILGLIFDKHSTRTRVSFEAGMVQLGGHGMFLNGKEMQMGRGETVSDTAKVLSHYIDGIMIRTFSHADVEELAKESSIPVINGLTDDHHPCQALADLMTIYEETNTFKGIKLAYVGDGNNVCHSLLLASAKVGMHMTVATPVGYKPNEEIVKKALAIAKETGAEIEILHNPELAVNEADFIYTDVWMSMGQEGEEEKYTLFQPYQINKELVKHAKQTYHFLHCLPAHREEEVTGEIIDGPQSIVFEQAGNRLHAQKALLVSLFKNVEELS

SEQ ID NO: 46948 - protein, 357 aa, Bacillus anthracis
MRKRGRMSKFKMLKVTGAIIALFSFLTIIWSTAFYVSSSILDALAIHLSPFVTYLISDILSFIFMILVWILIAVLMRPKREAMIWTIIEPIQKIAKGDFSVKIRNEEKYDGEIGVLVKSINDMTDELNAMEKMRQEFVSNVSHEIQSPLTSIKGFARALQDTNLPEEKRKHYLTIIETETTRLSKLSQNLLKLTLLESEEYTPERVTYRLDQQLKQIVLNSEPLWAEKEIELDLDLEKVHITADQESMSQVWINLIHNSIKFTPSSGTISIKLKEYETLVEVRIRDTGSGISEEQKQHIFERFYKADSSRNRAYGGSGLGLAIVKKVLDLHQGEIKVESEEGNGTECIVCIPNYEEK

SEQ ID NO: 46949 - protein, 421 aa, Bacillus anthracis
  MISC_FEATURE (125)..(125): X=any amino acid
MKGSPFIRGTIFLTMATMISKMLGFIYVIPFTAMVGTSGYVLYTYAYRPYTIMLSIATMGLPLAVSKMVSKYDQLNDYHTVKRVLKSGIVFMFIMGVISCFTLYMLAPHLAKLVIDGNDQLGIVXARFTTNIQIVSFALILVPVMSLLRGFFQGFQSMGPSALSVVVEQFFRVLTILIGSFVVLYVLKASVSLAVGISTFGAFMGAIGGLTVLSAYYIRRRKHLKKKEMASIPQTTKSFFSLYKELFTYSIPFVVVGLAIPLYQTIDTFTINKLLIQIGYMQGEAEKINAIIGLVQMVVLIPVSVATAFSMSLVPEMTKAYTAGNVKLLYKHFTRTNLLVVGITVPAAIGMMVLAKPVYTLLFGAGNDPEMGRVILQYYAPACILFSLFTVTAAMLQGINQQQKTVLGLVIGIIVKIVLNI

SEQ ID NO: 46950 - protein, 82 aa, Bacillus anthracis
MNLLPIGTVVKLEGVDPVIMIIGRMIVSADKRDFDYVGVPYPVGYLGDEKVLCFNHDKIVEEMHRGYMTESELVLREKLVEL

SEQ ID NO: 46951 - protein, 310 aa, Bacillus anthracis
MNVGILGIGRYVPEKVVTNHDLEKIMDTSDEWIRTRTGIAERRIADDTIDTSYMAVEASKKALEDAGISGEDIDLILVATVTPDRAFPAVACVIQEAIGAKHAAAMDLSAACAGFMYGMITAQQFIQTGTYKNVLVVGSDKLSKIVDWNDRNTAVLFGDGAGAIVMGAVSEGKGVLSFELGADGSGGKHLYQDEYVMMNGREVFKFAVRQLGDSCLRVLDKAGLTKEDVDFLVPHQANIRIMESARERLNLPQEKMSMTIEKFGNTSASSIPIAMVEELQNGRIQDGDLIILVGFGGGLTWGAVALRWGK

SEQ ID NO: 46952 - protein, 66 aa, Bacillus anthracis; identical to SEQ ID NO: 46465

SEQ ID NO: 46953 - protein, 320 aa, Bacillus anthracis
MKLQLMYSFLRSDINVIEKELKKTVASEQPLVEEAALQLIEAGGKRIRPVFVLLAGKFGDYKLDAIKHVAVALELIHMASLVHDDVIDAAFLRRGSATVNAKWGDRIAMYTGDYLFAKSLECITNIEIPEAHQALSHTILEVCKGEIEQIKDKYNYDQNLRTYLRRIKRKTALLIAASCQLGAIAAGANRDTVSRLFWYGYFVGMSYQIIDDILDFVSTEEKLGKPAGGDLLQGNITLPALYAMEDPILCKKIRSVHENTTADEMKEIIEAVKNSAAIDKAFAFSERYLHKALEMIKPLPRGQAKYALQNVAKYIGKRKF

SEQ ID NO: 46954 - protein, 126 aa, Bacillus anthracis
MGGEMSLNLAYLYPDAVTHLILADSIRIESFQQKESYEVPPLSTDLQTVTEITDYNKNEVKNSRDDKGHYDQLTKMRERRIAMEADKIKVPTLIIWGRHDKSVSWKNGELYHGLFANSTVHIIEKR

SEQ ID NO: 46955 - protein, 1045 aa, Bacillus anthracis
  MISC_FEATURE (150)..(150): X=any amino acid
  MISC_FEATURE (153)..(153): X=any amino acid
  MISC_FEATURE (157)..(157): X=any amino acid
  MISC_FEATURE (200)..(200): X=any amino acid
  MISC_FEATURE (303)..(303): X=any amino acid
  MISC_FEATURE (317)..(317): X=any amino acid
  MISC_FEATURE (322)..(322): X=any amino acid
  MISC_FEATURE (339)..(339): X=any amino acid
  MISC_FEATURE (455)..(455): X=any amino acid
  MISC_FEATURE (533)..(533): X=any amino acid
  MISC_FEATURE (595)..(595): X=any amino acid
  MISC_FEATURE (604)..(604): X=any amino acid
  MISC_FEATURE (611)..(611): X=any amino acid
  MISC_FEATURE (628)..(628): X=any amino acid
  MISC_FEATURE (716)..(716): X=any amino acid
  MISC_FEATURE (802)..(802): X=any amino acid
  MISC_FEATURE (803)..(803): X=any amino acid
  MISC_FEATURE (807)..(807): X=any amino acid
  MISC_FEATURE (925)..(925): X=any amino acid
  MISC_FEATURE (983)..(983): X=any amino acid
  MISC_FEATURE (984)..(984): X=any amino acid
  MISC_FEATURE (1007)..(1007): X=any amino acid
  MISC_FEATURE (1033)..(1033): X=any amino acid
MNKIINFSLKNKFADWLLTIIVTETGIYSGLNMKLETIPDITTPVVTVTTVYPGATPEEVADKVSKPMEEQLQNLSGVNVVSSSSFQNASSIQVEYDFDKNMRKAETEIKDALANVKLPEGVKDPKVSRVNFNAFPVISLSVASKNEILXLPXTEMXEKNVVPRIKGLDGVASVQISRQQVDEVQLVFKKDKDERIMFKXRTVKNVIKGSDVSLPLGLYTFKDTEKIQCGVDGKYSTNEAIKDLKNPCCSFSASSQGSQTAGAGAQMPQMNPAAMNGIPTVTLSEIADIKEVGKAESFSGTKXKRKQLGIQIVKSCXRQHSXCCKCSKDKVKELEKKLXSLRDYFTFDQGALIEKSVETMLSKAIFGAIFAIVIIMLFLRNIRTTLISVVSIPLSLLIAVLVIKQMDITLNIMTLGAMTVAIGRVVDDSIVVIENIYRRMSLSEEKLRGKRFNSXSYERKCLSPIMSSTIVTIAVFLPLGLVKRHDWRDVLTIALTIVFALLASLLVAVTIVPMLAHSLFKKESMREKEVHSXRKTKKLANIYKRNTCMGLNSQKYYSSIAVLLLVGSLALVPIIGVSFLPSEEEKMIIATYNPXTRANVKRSXKNATKSXKALSKIIRSPNNFNSHXVGRKTMSPGSSNQAMVFVHYDNDTKNFEKEKEQVVKDLQKMSGKGEWKNQDFGASGGSNEIKLYVYGDSSEDIKPVRKRYSKYHEEKXRLKDIDSSIAKTYAEYTLVADQEKLSKMGLTAAQIGMGLSNQHDRPVLTTIKKDGKDVNVYVEAEKQTYETIDDLTNRKITTPTWXXSGLXKNVMTVKKGETSNTVKHRDGRVYAEVSAKLTSDDVSKASAAVQKEVDKMDLPSGVDVSMGGVTKDIEESFKQLGLAMLAAIAIVYFVLVVTFGGALAPFAILFSLTIYNHRSSKLPYXSLVNVKCLCNIGALMLIGIVVTNAIVLIDRVIHKENEGLSTREALLEAGATTPFARFXXLQLATIGALIRLHRICRDRVYFXRTWCKRYWRINKFHFFNSSLCPIGLXSIKQVQKEKSKI

SEQ ID NO: 46956 - protein, 65 aa, Bacillus anthracis; identical to SEQ ID NO: 45355

SEQ ID NO: 46957 - protein, 280 aa, Bacillus anthracis
MKYSLCTISFRHQLISFTDIVQFAYENGFEGIELWGTHAQNLYMQEYETTERELNCLKDKTLEITMISDYLDISLSADFEKTIEKCEQLAILANWFKTNKIRTFAGQKGSADFSQQERQEYVNRIRMICELFAQHNMYVLLETHPNTLTDTLPSTLELLGEVDHPNLKINLDFLHIWESGADPVDSFQQLRPWIQHYHFKNISSADYLHVFEPNNVYAAAGNRTGMVPLFEGIVNYDEIIQEVRDTDHFASLEWFGHNAKDILKAEMKVLTNRNLEVVTS

SEQ ID NO: 46958 - protein, 494 aa, Bacillus anthracis
MLTTNIELKPKVKAFLDEEIKMFINGEFVPSISGKTFETYNPATEDVLAVVYEAQEEDIDVAVKAARSAFESGPWVEMTTAERAHLIYKLADLIEEHGEELAQLEALDNGKPYQVALDDDIAATVENYRYYAGWATKIIGQTIPISKDYLNYTRHEPVGVVGQIIPWNFPLVMSSWKMGAALATGCTIVLKPAEQTPLSLLYTAKLFKEAGFPNGVVNFVPGFGPEAGAAIVNHHDIDKVAFTGSTVTGKYIMRQSAETIKHVTLELGGKSPNIILEDADLEEAINGAFQGIMYNHGQNCSAGSRVFVHRKHYETVVNELVKMANNVKLGAGMEKDTEMGPLVSKKQQERVLHYIEQGKAEGATVAAGGERAFEKGYFVQPTVFTDVTDDMTIVKEEIFGPVVVVLPFDSTEEVIERANRSSYGLAAGVWTQNIKTGHQVANKLKAGTVWINDYNLENAAAPFGGFKQSGIGRELGSYALDNYTEVKSVWVNIK

SEQ ID NO: 46959 - protein, 41 aa, Bacillus anthracis
MEIGSYRGLRHRRGLPVRGQNSKNNARTRKGPRRTVANKKK

SEQ ID NO: 46960 - protein, 447 aa, Bacillus anthracis
  MISC_FEATURE (81)..(81): X=any amino acid
  MISC_FEATURE (175)..(175): X=any amino acid
  MISC_FEATURE (333)..(333): X=any amino acid
  MISC_FEATURE (336)..(336): X=any amino acid
  MISC_FEATURE (344)..(344): X=any amino acid
  MISC_FEATURE (355)..(355): X=any amino acid
KFLQKLRPGQLIVLFYLLAAVVSVILLILPFVTKTGVEWTFYDALFTSGKVGKGTGLSVVTISDTFTTAGILFLAPYFAHXGGYELLRLGTFPWIITGKKIGLQRRRLIMADHNQGNFIGPGEFDRSILIVIISIELIWSNILGTRFLLYFPTWQEAYFHGFFAGVSATTNGGIXFNKTSLIPYKKEYIGQMNHMVLDNFRRDWFPVLMEVKQFLSKRGQQLFRFSLFTKLTTTTFFALVVVGTIMIFLLERNHFLVGKSWHETVFYTLFQSVTTRSGWTRYNGYTELSQPTLLFMSILMFIGASPSSVGGGIRTTTFAVSILSLSHFCKRRXNSXSFKRQIHXKDVLTSICSLXRWGILLCTTALFILSIGEKCTAYKLYPLRGFALRDHRTIYQVFLRFNNWWENLALIVLMFIGRVGILTFILASGGREQPPRYKYPKERIIIG

SEQ ID NO: 46961 - protein, 257 aa, Bacillus anthracis
MQKVTIQEAEHLLQEIISEEDDRFQILIKDERKGVQKLISKWYKQKELAQKEKEKFLEMSKYENALREKGLTYIAGIDEVGRGPLAGPVVTAAVILPEDFYIPGLNDSKKLSEAKRERFYGEIKAKAIAIGVGIVSPQVIDEINIYQATKQAMLDAIANLSCTPEYLLIDAMKLPAPIPQTSIIKGDAKSISISAASIIAKVTRDRMMKELGEKYPAYGFEQHMGYGTKQHLEAIEAHGVLEEHRKSFAPIKDMIKK

SEQ ID NO: 46962 - protein, 450 aa, Bacillus anthracis
MIKKVLIANRGEIAVRIIRACKEMDIETVAIYSEADKESLHVQIADEAYCVGPTISKESYLNLTNIISVAKLTGCDAIHPGYGFLAENADFAELCRECNLIFIGPSPEAISKMGTKDVARDTMKEAGVPIVPGSQGIIKNTEEAIELANQIGYPVIIKATAGGGGKGIRVARHEEELVKGIQITQQEASTAFGNPGVYLEKYVEDFRHVEIQIMADTHGNAIHLGERDCTIQRRLQKLLEESPSPALDENVRKQMGEAAVKAAVAVDYTGAGTVEFIYEYKTKSFYFMEMNTRIQVEHPVTEMVTGVDLIKEQILVASGEKLSLQQEEVQFNGWAIECRINAENPAKKFMPSPGKVEMYLPPGGFGIRVDSAVYPGYSIPPFYDSMVAKLIVHGKTREEAIAKMKRALSEFVVEGVHTTIPFHLQLLDHPDFVKGEFNTKFLEEHELVTQ

SEQ ID NO: 46963 - protein, 348 aa, Bacillus anthracis
MGEGLEIKVKPEQLEQIAKNISEMQTHSQNIQQNLNQSMFSIQMQWQGATSQHFYGEYMRSMRLMESYIRNLQVTEKELRRIAQKFRQADEEYQKKQNEKLKEAHKKEKKNEKSWWEKGIEGAAEFIGVNDAIRAVTGKDPITGKELSTKERLIAAGWTLLNFVPVGKVASLAGKGIKYVASSFGKTIVKAGKKLGEGVTMVAGKAGKAAVDGIKTASHKVKEGVNFVASTAKGFADKIGSLWNKGATTVKTTFLQGNEKIQHAVKTLMEYKWIPGEGKGFAMAGVGNVSGGGQYSLKEAYQYVESKVVKGTGKVYPTRQIDSVTEAHIIDRVKELRGNLSSKYKKSG

SEQ ID NO: 46964 - protein, 503 aa, Bacillus anthracis
MKLLEQIEKWAIETPDQTAFVWRDAKITYKQLKEDSDALAHWISSEYPDDRSPIMVYGHMQPEMIINFLGCVKAGHAYIPVDLSIPADRVQRIAENSGAKLLLSAAVTVTDLPVRIVSEDNLKDIFFTHKGNTPNPEHAVKGDENFYIIYTSGSTGNPKGVQITYNCLVSFTQWAVEDFNLQTGQVFLNQAPFSFDLSVMDIYPSLVTGGTLWAIDKDMIARPKDLFASLEQSDIQVWTSTPSFAEMCLMEASFSESMLPNMKTFLFCGEVLPNEVARKLIERFPKATIMNTYGPTEATVAVTGIHVTEEVLDQYKSLPVGYCKSDCRLLIMKEDGTIAPDGEKGEIVIVGPSVSVGYLGSPELTEKAFTMIDGERAYKTGDAGYVENGLLFYNGRLDFQIKLHGYRMELEEIEHHLRACSYVEGAVIVPIKKGEKYDYLLAVVVPGEHSFEKEFKLTSAIKKELNERLPNYMIPRKFMYQSSIPMTPNGKVDRKKLLSEVTA

SEQ ID NO: 46965 - protein, 49 aa, Bacillus anthracis
MRVNITLACTECGDRNYISKKNKRNNPERIELKKYCPRLKRVTLHRETK

SEQ ID NO: 46966 - protein, 429 aa, Bacillus anthracis
MVEKRIPIQVAEAVERVMEYAKIGEVEEVSITESYGRILGEDVVSDHDVPHFDRSPYDGFAIRAEDTKEANQENAIEFEVIGEIGAGSVFTEEVGSFQAVRIMTGAAIPADCNAVVMLELTEGFEKNGKTYMKLKRPFHSGDNVSFKGEDIKQNQVLVKKGAVINPGVAALLATFGYSNVKVVKQPVVGIVTTGSELLEVHESLQPGKIRNSNSYMIAAQIMKAGGKVRYYGQLADELDACFTAVQSAIEEVDILITTGGVSVGDYDYLPAIYERLQANVLFNKIAMRPGSVTTVAEVDGKLLFGLSGNPSACYVGFELFVHPVIKTYLYAKEPHVYRADAILQKDFPKPNPFTRFVRAKVTIVDGALHAMPVGLDKSSAVSSLADANAFIVLPGGTRGFETGMKVSVLLLEHAEGCDWPWAKPLQSYK

SEQ ID NO: 46967 - protein, 499 aa, Bacillus anthracis
MDNMNHEELNDQLLVRREKLHNLREQGIDPFGKRFERTNATNDLLSLYGEFSKEELEEKEISVSIAGRIMTKRGKGKAGFAHIQDLHGQVQIYVRKDAVGDEEYELFKTADLGDLVGIEGKVFKTNVGELSVKATGFTLLTKSLRPLPDKYHGLKDVEQRYRQRYLDLITSMESRETFVTRSKIIREMRRYLDDNGYLEVETPMMHAIAGGASARPFITHHNALDMELYMRIAIELHLKRLIVGGLEKVYEIGRVFRNEGVSTRHNPEFTMIELYEAYADYKDIMKLTENMVAHIAKQVLGTTTIQYGDYEINLEPEWTRLHMVDAIKEHSGADFWNPMSVEEARELAKEHNVEIKDTMEVGHIINEFFEQKVEDKLIQPTFIYGHPVEISPLAKKNDEDPRFTDRFELFIVAREHANAFTELNDPIDQKERFEAQLKEREQGNDEAHMMDDDYIEALEYGMPPTGGLGIGIDRLVMLLTNAPSIRDVLLFPAMRHKQD

SEQ ID NO: 46968 - protein, 296 aa, Bacillus anthracis
MVIQWFPGHMAKARRQVTEKLKLIDVVIELVDARLPLSSRNPMIDEIITHKPRLVVLNKADMADDRLTKQWIAYFKEKGHMAISINAQAGQGMKEIAAACKVLVKEKFDKMVAKGIRPRVIRALIVGIPNVGKSTLINKLAKKNIAKTGDRPGVTTAQQWIKVGKEMELLDTPGILWPKFEDELVGLRLATTGAIKDSILNLQDVAVYALRFMEKHYPERLKERYNLNDIPEDIVELFDAIGKNRGCLMGGGMIDYDKTSELVLRELRGGKLGKMTFETPEEFAEQTEDAEKVEEV

SEQ ID NO: 46969 - protein, 615 aa, Bacillus anthracis
MCGITGWVDYKRSLEGERDVVTKMAETLAKRGPDDNKVWIKGNVAFGHKRLIVVDPEGGKQPMTCLKDEANYAICYNGELYNTEDIRKELLRRGYTFKGHSDTEVLLASYIEWKEECVDHLNGIYAFAVWDEQKEQVFIARDRLGVKPLFYKYDSGRLLFGSELKAILAHPDVKAEVTLEGLSEIFGLGPSRTPGHGIYTGIKELRPGHAMTFSKNGLCIWRYWNVESKKHEDSFEETVEKTRFLLQDAITRQLVSDVPLCTFLSGGVDSSAITAIAAKEYEKSGKGQLHTYSVDYEDNDKYFKANAFQPNSDAPFIHLMTETFQTIHHRCVISNEQLAQYLTEAVLVRDLPGMADIDSSLLWFCREIKQDFVVGLSGECADEIFGGYPWFYREDDLQSSAFPWMRSTEAREQLLKKEWRNKLNLQQYVQQRYEESIQEVPILDGESPLEAKRRQLFYLNMVWFMTTLLDRKDRMSMGASLEVRVPFADHRLVEYAWNIPWEMKMYKNREKGLLRKALEGLLPNDILYRKKSPYPKTHNPHYTKAVTVWIQDLLTDKGSILHELFDKEQLSGLIESGGSAFQTPWYGQLMTGPQLLAHLAQIHVWFKEYGVNIKE

SEQ ID NO: 46970 - protein, 179 aa, Bacillus anthracis
  MISC_FEATURE (168)..(168): X=any amino acid
LNRLKEKFQKEITPALVSKFNYKSVMQVPKIEKIVINTGVGDAVSNSKTLDNAVEELTQITGQKPVVTRAKKSIAGFRLREGMPIGAKVTLRGEQMYEFFDKLVSVSLPRVRDFRGVSKKSFDGRGNYPLCVKEALIFPENDFDKVNKVPRMELLIATTAKTDVEDSXTGKQFRMPFPK

SEQ ID NO: 46971 - protein, 438 aa, Bacillus anthracis
MSMENVKTIVLINLVVISLFLTFNLWTYVPDSTSMQNAKFVQGNEGTTQTKIADVVRPTSIIVHKDKNHYGSKREGDIESIYKPLEAGELHEFKEISIAKADFLPYVHGEGKIELIFPTNIPFDAVKSMFSMKEKSIDKPKHFNRIILDPSRSRDQEIKINFVSDGDNSRIYEAKLSGVYLKDIVNAQNQFIVSAKPYFDYQINDMKKLFLPDGTTELSNITYISSNLAVDTFKNALFSDPRYLSPITEQSKEIFTDGIRSMEIENNQHMLKYKNSSVLSEKKPDNLMLLQKSFDFVNGHSGSLDSYRLDYMNKGQTVFRLQEDGYPVFNTDGLAELRQVWGSEEVMEYERSLLSLNTKGIEQKVTLPSGHVVIASLENNAAVDKRFIKDIGIGYKLSLDGQVARLQPIWYVKFVEDEAGKQKIYEWSEGGLNGLGSD

SEQ ID NO: 46972 - protein, 314 aa, Bacillus anthracis
EFASDFEVDEVIDMKGKWVLPGLVNTHTHVVMSLLRGIGDDMLLQPWLETRIWPLESQFTPELAVASTELGLLEMVKSGTTSFSDMFNPIGVDQDAIMETVSRSGMRAAVSRTLFSFGTQEDERSQLMYLGQFGKRYYTKSGMLTTMGCPPLVSYTCSTELLEECAGIAVENQTDGHIHLSETEREVRDIEAQYGKRPVEYVASCGLFKRPTVIAHGVVLNDNERAFLAEHDVRVAHNPNSNLKLGSGIANVKAMLEAGMKVGIATDSVASNNNLDMFEEMRIATLLQKGISSRMQQRYRLKQLLHLQLKERLK

SEQ ID NO: 46973 - protein, 385 aa, Bacillus anthracis
  MISC_FEATURE (117)..(117): X=any amino acid
  MISC_FEATURE (127)..(127): X=any amino acid
  MISC_FEATURE (134)..(134): X=any amino acid
  MISC_FEATURE (144)..(144): X=any amino acid
  MISC_FEATURE (152)..(152): X=any amino acid
  MISC_FEATURE (270)..(270): X=any amino acid
NFQLSLQTSNLIIGFMVWVILSSLMPYIKVDIPLTAGQISMVTAVPVILGSVLRIPIGYWTNRFGARKLFFIKFILLLFPVFILGVPNSMMDLIIGGLFVGIGGAVFSVGVTSLPKXLPKESHGFCXGIYGVRXRGNKNYFLFXRPVIRQLXVGVEEQQHRGILIFTCTRLALMNFLIGDRKGEKSEYPTNGNKKKVEYKNEKLWVLGILYLFNCGSFVAFTVYLPNFFSISFGFKESRCGMRTAGFIVLATIMRPNWWGGLGDTFYPIXNLIFVFIGLTLSGIILSFMAKHERIYIGLLLVAFLCRVSVMVQFSKLVPMYFSEQAGIVNGLVSALGGLGGFFPPLILTFLFPTNRSLCNWIMALSEVALACLIITVWMYSQEKL

SEQ ID NO: 46974 - protein, 155 aa, Bacillus anthracis
MPKGSGKVIAQNKKAFHDYFIEETYEAGLVLQGTEIKSIRAGRVNLKDAFARVHNGEVWVHNMHISTYEQGNRFNHDPLRTRKLLLHKKEIEKLAGASKETGYALVPVRIYLKNGFAKMALGLAKGKKQYDKRHDLKEKEAKREIARAFRDRQKM

SEQ ID NO: 46975 - protein, 276 aa, Bacillus anthracis
EMFFIIRVPRTVALMLTGAAMAMAGLVMQLITQNRFVEPTTTGTIEWSSLGLLFVYLLFPAPTLVQRMTGAIIFSFIGTMIFFLFLRRVKLRSSLIVPIIGLMLGAVISAVSTFLGLLFQMTQSIETWFVGSFANIQVGRYEYLWLIVIVTLLIFMYANRLTLAGLGEDVATSLGVNTHRIVLFGTVLISVAVGIVAAVIGNLPFLGLIVPNIVSMFRGDDLRSNLPWVCVIGMGTITACDIISRTIIKPFGLSVSLILASVGAVVFILLLVEKKK

SEQ ID NO: 46976 - protein, 81 aa, Bacillus anthracis
MKAGIHPDYKKVVFMDTNTGFKFLSGSTKGSNETVEWEDGTPYPLLKVRISFISHPFYTGRQKFATADGRVTRFNKKYGLK

SEQ ID NO: 46977 - protein, 255 aa, Bacillus anthracis
MKKKLGLLAMVVALMAITAGCSEVNQPITPKSTGIWNEYFVYPLSQLITYFANLFGSNYGLAIVVTTLIIRFALLPLMIKQTKSTKAMQALQPEMVKLKEKYSSKDQATQQKLQQEMMQLYQKNGVNPLAGCLPIFVQMPILFAFYHAIMRTSEISKHTFLWFDLGQADPYYILPVVAAITTFIQQKLAMAGTAGQNPQMAMMLWLMPIMILIFAINFPAALSLYWVVGNIFGIAQMYLIKGPEIKASKAGGSSK

SEQ ID NO: 46978 - protein, 199 aa, Bacillus anthracis
AGTCALFTRLGAGTDIPIGSPIAGRNDDALSDIVGLFVNTLVLRTNTSGDPSFEELLNRVKRSNLAAYENQDVPFERLVEVLNPVRTRNSHPLFQVMLAFQNTPEATFDAPDIEANLEIQSVGSAKFDLTFEISESNGVDGNPNGLQGLLEFSTDLYKRETAQKLVERYILLLDDAVKHPDQSIGRLEILTLAEKNTVL

SEQ ID NO: 46979 - protein, 570 aa, Bacillus anthracis
  MISC_FEATURE (359)..(359): X=any amino acid
  MISC_FEATURE (367)..(367): X=any amino acid
  MISC_FEATURE (399)..(399): X=any amino acid
  MISC_FEATURE (418)..(418): X=any amino acid
  MISC_FEATURE (425)..(425): X=any amino acid
  MISC_FEATURE (450)..(450): X=any amino acid
  MISC_FEATURE (481)..(481): X=any amino acid
  MISC_FEATURE (536)..(536): X=any amino acid
MTLNIQGIAASSGIAIAKAFRLENPEFNIEQKSITNEAAEIARLEAALEKAKTELEAIKDHAFAELGADKAAIFEAHLLVLNDPELVNPVKDKVNSEKVNAEFAMDEVASMFISMFENMDNEYMKERAADIRDVTKRVLAHLLGINFSNPGTNSEEVIIIAEDLTPSDTAQLNRKYAKGFTTDIGGRTSHSAIMARSMEIPAVVGTKVVLEKIQNGDIVIIDGLDGEVIVNPSEETLRSFEEKKAKFEEQKAEWAKLKDQATVTSDGHHVELVANIGTLNDVQGIIDNGGEGVGLYRTEFLYMGRDNLPTEEEQFEAYKAVLEGVKRGSPVVVRTLDIGGDKELPYLHLSKEMKPFLSXRANCLCPXEQRCVRTQLRALLRASVYGNLKNYVPNDCNFXRVSVQQKAILLEGKSETLXSGTNCFXFYGSWMMVENPRFSSISRQFRKKKXFLLYPNNGLNSIPHGCRPIDTTSILTYPTIXPIYFTSCKMGIDAAHKERQWAGMCCEMPGESLAIPLLLRLSLDEFSMSGTSILSXRTQLSQLSKAENGNISRKSINDVNCEEVVELVKS

SEQ ID NO: 46980 - protein, 311 aa, Bacillus anthracis
MENIKNVPLVSILIPTYNRPHYFKIALESALAQTYSNIEIIVGDDSTNNETEKLIYRDYLHKHKHITYIRNPSTLGQFHNALMLLEQSNGEYINFLMDDDIFYNNKIEKMMFYFQKDLDQNLALITSYRTWINDDGDIIEQHPSMKKLYDEDTLLNGKDFGNRMLILGQNIIGEPTTVLFRKRLLTEPFGTLNGRNYNCSVDMASWISLLSKGDAIYITEPLSSFRLHTGQQVHHKYLEGCEDFSHLVLHSKKYGFLQDIDYYKTSLLKACEWYKNATTFYQLYPELIPTTDTHTRLSHCLNIVTKELHAI

SEQ ID NO: 46981 - protein, 136 aa, Bacillus anthracis
MVMTDPIADMLTRIRNANMVRHEKLEVPASKIKKEIAELLKREGFIRDVEYIEDNKQGILRIFLKYGANNERVITGLKRISKPGLRVYAKADEVPRVLNGLGIALVSTSKGVMTDKDARQLQTGGEVVAYCLVIYI

SEQ ID NO: 46982 - protein, 73 aa, Bacillus anthracis
MGTVENNVKKEKLQPITLGEGKIIKQYPQSGEVMSEGDRIFLLGKNATMPNLQGWSMRDVMYFSKLLKLDLRK

SEQ ID NO: 46983 - protein, 122 aa, Bacillus anthracis
MARNSTKNLSKYEGKNRKNIFSLLYCDFYTGKNIIKNSKKEGIAIEKIEVYTQPDCSPCVIVKEFLKAYNVVYEEFDVKKDAAARNRLLYDYDSYSTPTVVINGEVVCLVSQIEKFPPTSLL

SEQ ID NO: 46984 - protein, 443 aa, Bacillus anthracis
  MISC_FEATURE (169)..(169): X=any amino acid
  MISC_FEATURE (219)..(219): X=any amino acid
  MISC_FEATURE (240)..(240): X=any amino acid
  MISC_FEATURE (274)..(274): X=any amino acid
  MISC_FEATURE (329)..(329): X=any amino acid
MAVENITMPQLGESVTEGTISKWLVNVGDHVNKYDPLAEVMTDKVNAEVPSSFTGIVKELIAGEGDTLAVGEVVCVIQVEGADEVAATAVEEKTKEEPKAEVNTPEKAPKAKQPTDGKPRFSPAVLKLAGEHNVDLDLVEGTGSNGRITRKDILKLVEFRKYSRKQVRXRKKKPVAAVVEARPEAPKAAPVAQKVEAAKPVSVPTMPGDIEIPVTGVPXAIAANMLRSKHEAPHPLDDIXRKGTNLVSYRNSIKRGFPKKAEGFNLTFFCFLPXKSSPSVKKGPLKLIPWWGRGKKSVQKKKFNLSYAVGKEDELFGPRIKPPGEKANXGVASGNYELAGKVRTKSLKADEMQGGTFTINNTGSFGSVQSMGIINYPQAAILQVESIVKRPVIMENGMFGARDMVNLCLSLDHRVLDGLICGKSLRTCKRNFRNTSENNTSVY

SEQ ID NO: 46985 - protein, 292 aa, Bacillus anthracis
MKDIATPNRTKDIVEKYGFSFKKSLGQNFLIDTNVLNRIVDHAEIGSESGAIEIGPGIGALTEQLAKRAKKVVAFEIDQRLLPILDETLAPYGNVTVINKDVLKADVHEVFSEQFEEGQDVMVVANLPYYITTPILFKLLEEKLPVRGFVVMMQKEVGDRLAAKPGTKEYGSLSIAIQYYTEVETVMTVPRTVFVPQPNVDSAIIRLLKRPKPVVEVTDETFFFEVVRASFAQRRKTLMNNLSNNLNGFPKDKELLDRILTEVGIDPKRRGETLSIEEFATLSNALVLHKLS

SEQ ID NO: 46986 - protein, 467 aa, Bacillus anthracis
MKSLLRKKALSTESPRQLQRTLTALDLTFLGIGAVIGTGIFVLTGIVAAKHSGPGIMLSFLIAAFTCACVAFCYAEFASSIPVSGSVYTYAYMTVGEVVAFIVGWCLMLEYLLAVAAVAVGWSGYLQSLLQGFNIHLPAIIASAPGVGKGGLIDLPAVCILLIITVLLSFGIRESARINNIMVLIKLAVIIAFIVAGAKYVKPENWTPFIPFGYDGIITGAATVFFAFLGFDAIATAAEETKKPQRDLPIGIIGSLLICTVLYMIVSFVLTGMVPYTQLDVSDPVAFALHFVGEDTIAGLLAVGAMTGMTTVLLVVMYGQVRVSYAMSRDGLLPKALARVNKRVKIPLLNTWITGVVAALLAGLLDLHVLANLVNIGTLTAFTFVCCAVLILRKTHPDLKRGFRTPFVPVLPVVAILCCLYLMINLSKTTWISFAIWLIVGLCFYFFYSRKHSHLATEKTNDEQKKA

SEQ ID NO: 46987 - protein, 369 aa, Bacillus anthracis
MKITAIHLYAIRLPLRDPFVISYGSYSDMPSIIVKMETDEGIIGYGEGVADDHVTGESWESTFHILKHTLAPALIGQNPMNIEKIHDMMDNTIYGVPTAKAAIDIACFDIMGKKLNQPVYQLIGGRYHEEFPITHVLSIADPEEMAEEAASMIQKGYQSFKMKVGTNVKEDVKRIEAVRERVGNDIAIRVDVNQGWKNSANTLMALRSLGHLNIDWIEQPVIADDIDAMAHIRSKTDLPLMIDEGLKGSREMRQIINLDAADKVNIKLMKCGGIYPAVKLAHQAEMAGIECQVGSMVESSVASSAGFHVAFSKKIITSVELTGPLKFTKDIGNLHYDVPFIRLNEKPGLGIEINEDTLRELTVFQDIVR

SEQ ID NO: 46988 - protein, 415 aa, Bacillus anthracis
  MISC_FEATURE (96)..(96): X=any amino acid
  MISC_FEATURE (165)..(165): X=any amino acid
  MISC_FEATURE (289)..(289): X=any amino acid
  MISC_FEATURE (291)..(291): X=any amino acid
  MISC_FEATURE (297)..(297): X=any amino acid
  MISC_FEATURE (360)..(360): X=any amino acid
  MISC_FEATURE (381)..(381): X=any amino acid
  MISC_FEATURE (408)..(408): X=any amino acid
KRVIVKKPELLIPAGNLEKLKVAIHYGADAVYLGGQEFGSLFSNPGNFPLGRKWQKGVNFAKKIGSEIICTPNFLAHNENRAGLEGIFKGIEKAAXRGIIVADPLIIETCKRVAPSVEVHLSTQQSLSNWKAAQYWKEEGLHRLVLAREASYEEMKEIKEKVGYXDEAFVHGAMCIAYSGRCTLSNHMTAAYSYPWGVCQSRRWTYDLVKTVSQHKDAKELPLFQEEDAHSAMSPKDLNFNFINSEMIEIGIDSLKVEGRMKSIHYVATVATVYRKVIDAYCADPDNFXVXARMLRXADKCANRDTAPAFFEGVPGHQEQMVWKSYYENNYDFAGLVLDYNEETGIVTIEQRNHFKSRTXGGSSLDQNRKLYQTVEENWGXGWKRIRCGETPLQIVKFKVDQGMCSEXYDAQKHT

SEQ ID NO: 46989 - protein, 208 aa, Bacillus anthracis
MPAEVFGPDYAFLKDEFLLTFDEIERVAKLFVSIGVRKIRLTGGEPLLRKDLAKLIARLVKIDGLLDIGLTTNAIHLTKQAKVLKEAGLHRVNVSLDAIDDDVFKAINGRNINTKPVIKGIMAAKEAGLDVKVNMVVKKGMNDHQVLPMAAYFKEQGIPLRFIEFMDVGSTNGWNFDQVVTKRELIEMIHRVYPLEPAEAHYFGEVAK

SEQ ID NO: 46990 - protein, 71 aa, Bacillus anthracis
MYACVAFIGNKAGLYQVNVEAATIEQKIVQQQKENQELQAEVEKLSRYERIAEVAKKHGLEINANNVKGLK

SEQ ID NO: 46991 - protein, 339 aa, Bacillus anthracis
  MISC_FEATURE (57)..(57): X=any amino acid
MAFEGLAGPIFNRGMQKIRGQRKKFFEADVKGMYEKGLVLALLEAARTFKVSKRFCXALCPKRVVGQDVMKSLTPGQQVIKVVQEELTELMGGEQSKIAIANKPPTVIMMVGLQGAGKTTTTGKLANLLRKKHNRKPMLVAADIYRPAAIKQLETLGKQLDMPVLLLGDQVSPVEIAKQAIAKAKEDHHDYVLIDTAGHLHIDEELMDELAKVKEVAKPDEIFLVVDAMTGQDAVNVAQSFHEQLGLTGVVLTKLDGDTRGGAALSIKAVTNTPIKFAGMGEKLDALEAFHPERMASRILGMGDVLTLIEKAQATVDEEKAKELEQKMRTLSLTLDDFL

SEQ ID NO: 46992 - protein, 108 aa, Bacillus anthracis
  MISC_FEATURE (98)..(98): X=any amino acid
LIKSFGYAIVGIFFCLRHERNMKIHYLAAVIVLCCGFYFHITKVEWMILLIVIGIVMSLEMVNTAVEKTVDLATTDIHPFAKVAKGVAPGTRFIVCIXAGIIGAIIFL

SEQ ID NO: 46993 - protein, 689 aa, Bacillus anthracis
MKEQYSNQNTFLSMIDMDLIRRGLLHAIQDLVFIVKVIDDETFKYIYVNKLGMDYAKLSEECYGKTFAEVLPEDTAEILQVQYAKVASEAKAHTFCDVVSLPKGELHYESSLNPVFDEEGVCQFIICITRDITAQIEEKMEIEEKQMLFKSLLEYNNDSIISIDSIGRITYANPATYEIFGYRFEELNNKFIFEFINKEYEKDFQIIFKEAMQGRAKQIVSKKYVHKEGYELYISLRTIPIIVNGEIVGVYIVTRDVTKQVLNEMRTEYLAYYDQLTGLMNRISCTNKLNDFLNEKVAFAFIFIDLDEFHLINDTFGHKEGDKVLQKVTECLSSFQIPDMHLFREHDDQFVMLIENITKERVEVFAKSIQKKISEHFVIEEEDVYLSASIGIVMAPTDGEDEKILFQRVDAALEKAKEKGKGHYHFYGNGLDCEREKRFIIENQLHRAIEKNEFFLYYQPQMNIETKKIASMEALIRWENKELGFVSPNQFIPLAERTGFIIKLDEWVINEVCRQIREWLNKGYEVVPIAVNISARHFRSITLIEMITRALHKYNVSAHLLAIEVTEGALIHKDISKRVLLQLKEQNLKIHLDDFGTGYSSLSYLKTYPIDTLKIDRSFMEGIHVDERDTNITAAIIHLAHTLELDVIAEGVEKAEQIQFLKEKNVKFVQGYYYSRPLSKYDVENVYYK

SEQ ID NO: 46994 - protein, 353 aa, Borrelia burgdorferi
MILKRKVMLTGDRPTGALHLGHYVGSVVNRLKFQEEYETYFIIADLHTLTTKPDLKSINTIPSNVREMVLDYLACGINPDKVSIYLQSAIPELFELHLIFSMIVTVARLQRIPSIKDMSIAAGLKEIPYGLLGYPVLMSADILMTKANLVPVGRDNESHIEFARELARRFNHLYKNNFFPIPESVFTDSRPLVGIYGKNKMSKSLDNAIFLNDDENLLEKKIMSMYTDPNRIRADIPGNVEGNPIFIYHSFFNSNHEEVEDLKSRYKKGKVGDVEVKKKLFLALNSFLKPIRDKRSFYEAKKKDYIDEIIFDGTSKARFIANKVVKDVKDLIGLSKTWNGIKYSAEKKLKNEE

SEQ ID NO: 46995 - protein, 124 aa, Borrelia burgdorferi
MKSIGCDIIKVERFKNFLENKKKMERFFTHKEIENFKLKGGSIIESLAGKFAAKESLIKALSPLLQYKINYTLKDIEVIKSLKGNAEFCLHNEVEKFAIKMNLKLYLTISHEKEYAIAFVIVEN

SEQ ID NO: 46996 - protein, 215 aa, Borrelia burgdorferi
MVLMKTKEFHFNLSHSLIEQYPSEKRGSSRLIVLDPQLQKIYHKNSVNNILKYINSNIFNNSKARKSRIYAESEMSSNVEFLILDRIDTNLFTALVSKSKKQIIGNFYKFPEGLMDEILSKNSSEVVLKFNNNVGEDYFEKHCFVPLPSYIKRDYDKIDEDRYQTIYSKYVGSTASATAGLHFSRDLFSAFENNNIEYDFITLHVGAWDFSSCKI

SEQ ID NO: 46997 - protein, 490 aa, Borrelia burgdorferi
MKEVDENSNVELFEVKLKPILGIEPKVYVFLTTIILLLSLISTLIIIPKFKNPGAYLKINSNIENTYIYLNEKYIGRTPLNKYINATEGVLRAKRMGFKTYEQRIKIHNKFFGNYSLQINLELVDPEKIIKQRQKELSIMVKIKNINENTKLIPVFSLISSELKEHPKYIKKFLKDSIPYLNSTEMFKDFLNSYKAIYSIDQDNSNQEEIWNSLKTNFDLENRAIFWFLENLDKDLKILTKNAPWVKTLAKTLDNENIQLISKNEKINIKLPGFKKINSNKIEKIQNYELNSLDSKNISLKSTYNVKEFLIQEQNVTKYEYQDFLKENPKWALNNKENLIKEQLVDENYLKNFNQIGLNEAITGISYFSAIEYANWYSKKLPTGFKARLPISQEWELYQKEPNKNPLNINEISKKVGFWNLMQNSSFNEIAIFKNEKNFYSENSNFYSLITEIRTYSQQNNNLLNASTKASFLKNWSSPNIGFRLIVSKE

SEQ ID NO: 46998 - protein, 150 aa, Borrelia burgdorferi
MNTNNLLLENKKAKFNYFIEEKISCGIVLKGTEVKSIKAKKLSFNNSFASIKKEELWLENLHVSKYKEGNIFNHDELRPRKLLIKKRELQRLKKFKEKEGYTLIPISFYLKKSIIKVEVGICKGKKLYDKREILKQKSIKKDLSREIKYK

SEQ ID NO: 46999 - protein, 250 aa, Borrelia burgdorferi
MIIVFMKILRSIITYFNVLLFFLILIFFLFPFYLVCKIFLIERYVVRLSFIMMRACIKISLWLAGIKIIVTGSENIPKKSNVIIMGNHIAAMDPLIFIYTFACPFVILAKHSLLRIPFVNIVLIVMGVIFVNRRSIRSAAAAEVKAIKVMREGRSIGIFPEGTRNRGGDTRVFKKGSIKMALKTGTSILPVTLYNTNNFFIKNIIFNSGLSVYIHVHPLIDVLKLSEYEKENLTSIIRDQIVKKLETIKI

SEQ ID NO: 47000 - protein, 819 aa, Borrelia burgdorferi
MGVSLVLKKIVLLGFKSFLNRQEFEIGENLSFIVGPNGCGKSNLIDAVRFCMGEDNLKFLRVEDISDLISVSKSGKSNFAEITLFFSNINSEKSTLKEFNEDFYIRRRLYKDGSSEYYFNNKILNFQDYNRLLNSFKFKKSPYMFITQGRVEDISLERNVNLKSLIEQASGIDILKMEEEEALKNFKQSSQNLSSLLSLQENLRQKYDNIKNVFLLRKKHQDLSQKLEALEKTITLKKLFNINFDLNVLKSELNLDGLSKFLSSGFKEKLEFYSFREKNVINNIQELEKDLELMKSKILGLEIKIQKLEQEKTLKMNLEDKFVKSKSESEEKKNSINNNLYQLNSLLKEKKNDFFSLSDEINRYTKSFFELVDLILSVLRSAKSEEFVLLKEHILDSLKLFEESLSIKYIKEIRVNLIKYISKDENLLALLRDKIEPIFDQNVNLKKFLLEKNALKSNLAKEITNIERLIEEKTLQLNDVLGELEYIELSKFKNLDEIKLIDGNLEFLFESKNSLDEELKDLYLKLENLNLEKSDIQLNLSNLIGASKFSSESFKEKDFNSLVFLNDFKKTNYYEYIKKQTEYEFLLNSNVSIKSEIENFNVSNEMSDKFELEEDLATRELLRKEIDAIKLGDYVFFNIDKEFDETKERFEKVSLQVEDLKLSKYSLQKLQKKIKNEIYKKFRESFDEINKNFSFFFKKIFKGTASLFYNENTDNVEIRINFSNKFVKNNNMLSGGESTLVSMAFLFALYYYSPACFCMLDEIDAALDFENSKKLSLLLRELGKKFQLLVITHNAYVSEGGENLIGITLDNGESRVFNI

SEQ ID NO: 47001 - protein, 181 aa, Borrelia burgdorferi
MICGIDEVGRGCIFGPILSAAVVFKKKPSFIKELDDSKKLKKEKREYLSSLILENSYYAFAEISNITIEKINIHNASLLAMQTAYENLKLNCSLVLVDGKFVPKITAKNVKAIIKGDSIIDEIKAASIIAKVKRDKLMDKYDKIYPLYLLKKNKGYPTKEHKNAIKKYGVLSLHRKNFKLI

SEQ ID NO: 47002 - protein, 224 aa, Borrelia burgdorferi
MFNEFLWFGVLFTTYSFLIIVSIFFKKNGLFAWVAVAIIIANIQVLKQITIFGINATLGNIIYTSSYIATDMLSEFYGEKTSKKAVYIGFISFIIFAVLTNAQIHFMSNRTQENFKSLGNIFSSMPALLLASLVAYLISQLNDVYLYQLIKKKFPRFLFFRTNGSTLISGLIDTTIFVGIATYFKVFPKQAFLNIVIFTYVIKAVAGVLGTPFIYFAKYIKLEK

SEQ ID NO: 47003 - protein, 393 aa, Borrelia burgdorferi
MSIKTVKDFSSFAGKRALVRCDFNVPLKEGSISDDTRIRAALSTIEYLKERGARIVLVSHLGRPDGKKNPKYSLKPVANRLSELLGQDVKMLSDCIGSEVVNSTLQMKDGDVVLLENVRFYAEEEKNDKNFAKKLSENGDVFVNDAFGAAHRAHASTVGVADYLPSVGGFLMEKEDKFLGGILKNPERPFVSIIGGSKVSSKIAVLESLLSKSNVVVIGGGMAYTFLHSEGYSIGKSLLEDEYIGIASSFLKKAKELGVKVILPLDHIVADDFNKNSIPEYIDSFNIPENKIGMDIGANTLKEIENVVKTAKTIIWNGPLGVFEFDSFSKGTAKVAEMVASCSGLTVVGGGDSVAAVNKFNLSDKITHVSTGGGASLEYLEGRILPGIKVLEN

SEQ ID NO: 47004 - protein, 335 aa, Borrelia burgdorferi
MKLAINGFGRIGRNVFKIAFERGIDIVAINDLTDPKTLAHLLKYDSTFGVYNKKVESRDGAIVVDGREIKIIAERDPKNLPWAKLGIDVVIESTGVFSSATSDKGGYLDHVNHAGAKKVILTVPAKDEIKTIVLGVNDHDINSDLKAVSNASCTTNCLAPLAKVLHESFGIEQGLMTTVHAYTNDQRILDLPHSDLRRARAAALSIIPTSTGAAKAVGLVLPELKGKLNGTSMRVPVPTGSIVDLTVQLKKKDVTKEEINSVLRKASETPELKGILGYTEDPIVSSDIKGNSHSSIVDGLETMVLENGFAKILSWYDNEFGYSTRVVDLAQKLVK

SEQ ID NO: 47005 - protein, 259 aa, Borrelia burgdorferi
MLGFFNFKNKKKKKGSPENDLEDKSNIETSLIKNFNALKETVVKEIMIPRIGVIFVDYAKSKDELLKVVTSSSHSRFPVYHGTIDNIVGIIHTRDILLHMCKKDFYEIDLKDIMRKVMFVPESKKTDSLLKEFQENHVHIAIVVDEYGGVSGLVTLEDILEEIVGDIQDEFDNELDEIVRLDDGSYLCDARILIEDLNEKLNLNLPNGDFDTLGGFVYDLFGRIPLKNEKVEYNNLVFSIKNMHQRNIKVIKISEKEGL

SEQ ID NO: 47006 - protein, 293 aa, Borrelia burgdorferi
MKNIKAVASDLDGTLLLSKSYIGAFTELVIKKLTKEKKKFIIATGRSKNEIIQIIKKTDQLQVSFFITLNGAKVYNQEWKLIKSHNLSAEVVKKILNLRDEKFSHIPHFLHKADQNDDQLNIDIKTKIAIDQCKKLQKESNVFRHEIISPINKIQEIKDFNELKNFENVAKIILAGGEESLIEYEAMILEKYKGEINAYLSTPNSLEIVDHKVSKGNALKEVLKTININLSETIAFGDGFNDTDMLENVKKGLLMGNANYRLKAMLPYLEVIGTNDEEAVANYINENVLEEPI

SEQ ID NO: 47007 - protein, 490 aa, Borrelia burgdorferi
MVRFLGFLYLITTIPLIKSCDAAQFGDYKPLYFENENDLKTANEYINSLGYKTISEYTTKIDILDFPENKEITINEINKLNNLDLRKSIFLKKLSNLFNIEHKKLLYVENRFKSINFKNLKKELNINADIHSLDYKTKINFISSIIFLIIIILLIFLDPTNSIFTLIFLLISSLAFMISKEIMYFYPFTVLSYLLFLIISNFNKNYNKIYLKEINFLTLMTKIKHLLFLFTFTALYFITITTFFTTNIDPTFIAFVAIPTLCIFLIFSWIKTESNFKDTFLFPIEIKEKKIEGKKALKSKIAIHLLLFTLSLIPFAYSSYMLNSYENINYLYSKKLNYFDYLNPNNIYIMLGYNKDMPNIIGYLSHILYQNELKYNITAKYGKIPKDIKENYFEIKNDKIEIHPKTVYEVDKSFIDEILKKDLASLFLKNKNPILIYKENKNNINTDKKNYKILFFFSLPFFVLLFLFKAIRFTILLNINEKTYKKYIQG

SEQ ID NO: 47008 - protein, 348 aa, Borrelia burgdorferi
MPKTFGGSFDKNEIQAKIEKYEKEINQKNFWNDPKRAQKVIKAQSILKNKIDPWEELINKIKDLSDLCEIAENEKDTNGLEIEFNTLEKQYKDLLTISYFKEELDANNAFLTIHSGAGGTEACDWVAMLYRMYSRYAERKKYKTELIDLLEAEGGIKSVTIEIKGEYAYGLLKSEVGIHRLIRISPFDAAKKRHTSFASVFVDPVIDDKIEITIKPEDIRIDTYRASGAGGQHVNKTSSAVRITHIETGIVTQSQSDRSQHKNKDLAMKVLKSRLYEYYKSKEDEKNKSKQDTKKEISWGNQIRSYVFQPYNLVKDHRTKFENSNTTSVMDGNIDNFIEEYLKWKSLN

SEQ ID NO: 47009 - protein, 281 aa, Borrelia burgdorferi
MGILEKIKNLFKSKQQENVIENLEDILLESDINNEIVIEIINKLTKEKNENEKTIIGKLKELLSSYINTKKFTLENNKLNILLIVGINGIGKTSSIAKLANKLKNEGKNILISAADTFRAAAIEQMKIYGEQIGVRIISQNQGSDPSAVIFDSISSAKLKNYDALIIDTAGRLQNKENLIKELQKINNVILKQIKNTDINYQKILVIDSTIGKNANSQAEIFNKAIEIDGIIITKLDSSSKAGTILNISKILEKPIYFTTFGEKLEDIKEFDINEYFNKLL

SEQ ID NO: 47010 - protein, 173 aa, Borrelia burgdorferi
MGIRNFLLKRLILEEKNSLALTIVIILSIALGEIIIILTISIMNGFQNDFFLSITNVESGNLKIENELTQEEIKKIKKIEGIKHINKIYETQGIGIQNYYYPTILNIIAVDIKDLKKDQNFISFTGLEKDELDLKDNEIIIGNVLSHNFNLFENDPLELIITDEIKNTYIARK

SEQ ID NO: 47011 - protein, 780 aa, Borrelia burgdorferi
MQDEQDKYLKNIDFYEILSLVSKYVSNPDTVNLLSNQKILKTKESLEKIFSFVSLIRMLFESCKGYPNSFINSLKYPISLLLKENSRVSIENLRDIIVFLDEVLRINLFLHKNSDIKHLNVQILSDLLFLNPELKNLLNELKEHIDVDALELKSGVVKEYDSIEFEIKNLNRRVENQIKKIISLNAEYLTSNFVCYKSNKYTLALKSNFKGKIKGNIISISSSGETFYIEPNDIVNANNRLNYLSLEKERIILKILRNLSAKVHSNIVLLDNLYNNFLYYDSLKARAIYGIKTKGVFPEISNVLNIFDAHHPLLKDSKAITFTPAENRVVIITGPNAGGKTVTLKTIGLLSAMFQFGIPIVVGESSTFKIFDNIFIDIGDEQSISNSLSTFSSHMSNISYILKHTTKDSLVIFDEFCSGTDIDQGQALAISILEYLININSYVLISTHYNALKYFAYTHEGVVNASMRMDLETMQPNYNLIFSIPGESYAFNVASKALIDRSIVIRANEIYSSQKTEINEILEKLIEKEKDLLLIKESMDKKLIQIELQEKELENFYQDLLLREKNIETKLLNEQNEFLKNSRKVLENLVREIKEGNINVAKNKAFISDLEKNVDLKTNKVNSLNNKRNVVADFKIGDKVRIVNSNAKGKIVGISKKKITVNVGAFNVSVSSSEISLENFKEKKENGKNFNFSIDYNKENLLSFTIDIRGMRSVDALDFLNKKIDNIILNGINKFEIIHGKGEGHLMREVHNLLKELKFIRKYYFAHPSDGGSGKTIVEI

SEQ ID NO: 47012 - protein, 261 aa, Borrelia burgdorferi
MKNFKEVIIIFDSGIGGLSYFKYIKSRIGGCQYVYVADNKNFPYGEKSPEYLLEAVLFLIEKLKKIYNIGALVLACNTISVSVYNKLNFVFPVVYTLPDVSSVSDLVLKRVLLIATNTTLESKFVKDQVNIHNDLIVKAAGELVNFVEYGENYKKYALRCLEALKFEVVNTGREIVFLGCTHYLHLKVMIEDFLKIPVYENRELVVKNLIRSMNFSEHKGNYYKNDFDFVDDEFYLTENKNLTFYQNFCKKYNLRFKGMIV

SEQ ID NO: 47013 - protein, 466 aa, Borrelia burgdorferi
MINKMFASIKDILKNPILNSNVTINGWIRTKRSNGKIGFIEINDGSTLKGIQAVINEEENQFSEKDLKKLTTGTSISLTGLLVESPAKGQNYEIKTHSFNVIGETDPETYPLQKKRHSFEFLREIPHLRIRTNTFGAIARVRNKISYKIHEYFQKNGFFYINTPIITSNDGEGAGEMFRVSTLKFNKLNNALSNIDFKDDFFGKEAFLSVTGQLHGEAYAMALSKIYTFGPTFRAENSNTTRHASEFWMIEPEMAFYKLNDNIALAEDLLKYLLSSILNECSQDMDFLENYIEKGLIKKLENVINSNFEVITYTKAIEILENSKKNFEIKPYWGIDLQTDHERYLTEETFKKPVVVIDYPKNFKAFYMKANKDNKTVKGMDILVPKIGEIIGGSEREDDLQKLENRIKELNLNIEHLNWYLDLRRFGSAPHSGFGLGLERLVQYSTGISNIRDSIPFPRTPKNLYF

SEQ ID NO: 47014 - protein, 483 aa, Borrelia burgdorferi
MSNYVEVIKVEKKFFSGFLLSFLALSIGFFIGMHYLASNRSNIVFAEEKDNTVRALQDSFREVSKKILPSSVEVHATGVIKQSFPIPFFFFDMPEFDSERKSNWAGSGVIIGRDSQKKSLFYVVTNSHVVDKATELEVVSYDKKKHKAKLIGKDEKKDIALISFESDDATIKVADLGDSDKLEIGDWVMAVGSPFQFSFTVTAGIVSGLQRSANPNLQSRNLFIQTDAAINRGNSGGPLVNIKGEVIGINAWIASNSGGNIGLGFAIPVNNIKSTVDFFLKGKKIESAWLGISFYPLKTRDSEVLKSLGVESNDVSAAIIASLYPGSPAVKSGLRAGDIIMKVNGVSMSVFQDVTSYISDFYAGEKVNVEILRGNVKKNIEIVLAVRPKDKELSSSKMLPGFVVYPLVEDIKAQLNLRNWIKGVVVDYIDKNLASNIKMKSGDVILSVNSKSVSNLREFYDALEVGKNTYKILRGNDSFKITF

SEQ ID NO: 47015 - protein, 145 aa, Borrelia burgdorferi
MDLMHEVRVLAFQKIYSIDINQSAMDDIFDIFNIEDKDLDIENESIKSFYSSLVIGTFDNLEHIDSLIRDISLNWSLERMDKVDLAILRMGVYSLKFQNFENSKRAIIDEAILIAKKYGSKNSYKFINGILDALLKNMESGIEKK

SEQ ID NO: 47016 - protein, 398 aa, Borrelia burgdorferi
MIKKVAIIDGLRTPNFKFGGSFKGLNIIDESSKVVKALLERNKLYKVDEVIIGNVISAGLGQNIARQIALKSDLGDTVPAFSVNKVCGSGLKALELAFNSIALGDNDIVLAGGVEDLTNSPYLLPRKIRFDGLKFGNFGIEDSIQKDALIDSLNFISMGLTAENLSEKYRITREMQDEFAYNSHVKALKARELGYFEDEIYPLTVFDKKTNSSVTISSDEEIRDNLTLNKLASLNPVFKESGTVTAGNSSSLNDGACFLILASEERVKSLGLSPLAYIGGFKSVGLDPLYMGFGAYMAIEGIISKLSLNPSEIDLIEVNEAFAAQALSIEKALFKKYNITSDIINVNGGAIALGHPFAVSGSRILLTLSRSMKMKNKTKGIASVCIGGGQGISSFLYR

SEQ ID NO: 47017 - protein, 455 aa, Borrelia burgdorferi
MALAAFSNSALLFNDGAEKAVISSIFYNSDKIEQIAFHVRADDFYNETHKLIFKAMVSLYEKRENIDPITVFEEVSKHVSKTQLLIKKDLINLPDYLDSLSVYLPTDRTINVYAKIVKEQSVRRSILNVSKELNDYINDSTKSINEIVEESQQKILSIELDYSSKNLYHAKVIAERVHNEIYERSMKKKEANFGIPSGFRKVDSLIGGFRNSDFIIVGARPSIGKTAFALNIASYIALRKEEKKKVGFFSLEMTADALIKRIISSQSCIDSFKVQNSILSGQEIKSLNDIINEISDSELYIEDTPNISLLTLATQARKLKRFYGIDIIFVDYISLISFETKNLPRHEQVASISKSLKELARELEIPIVALSQLTRDTEGREPNLASLRESGALEQDADIVILLHRDKDFKFESSAEIEPIETKVIVAKHRNGPTGRADILFLPHITKFVNKDHQY

SEQ ID NO: 47018 - protein, 173 aa, Borrelia burgdorferi
MKVILKEDFINLGKEGDTVEVRDGFARNYLLPKGFAVFSNKHNIEIFNQKRRSILKKQEAKKQMANDLKSKLDLVKLEFFMKSNDSGKLFHSINSLNIADELLKLGFDIERKKIDIHHGTLKTFGTYDVTIKLYEGISSIIKVEIKKEKKQEDKKSLSKKLNKADEQGERAEV

SEQ ID NO: 47019 - protein, 96 aa, Borrelia burgdorferi
MYKDRDTNQRDSRFENQQDGFKKNSNFRFFKRKSCKFCDSGKHPDYKDFDFLKKFITEQGKILPKRITGTSAKHQRRLALEIKRARYMALLPFVKK

SEQ ID NO: 47020 - protein, 149 aa, Borrelia burgdorferi
MADINSLVLSGRLTRDSELSYTESGMAVLRFSIANNRRMKKNDEWIDYPQYFDCVIFSKRAESLNDYLKKGKQVVVSGSLKYESWQDRNTGDKRSKVNIFVDNLQMFSSGSNTIQMQDSDVNSLTNHKKEDVVKDIDIVDDKFSEDIPF

SEQ ID NO: 47021 - protein, 233 aa, Borrelia burgdorferi
MLRENKLKNYSLSDVNTSKIPKNELFSSISHLFGIILSIIGTTILVTISTLKKKDLHVVVFLIYGFSMTLLYVMSTLYHIFPKGSKIKKIFRKFDHISIFILIAGTYTPACAILVPNKSGLIILCIVWSLAIIGIIFKIIFTNSPGWFNGSIFIIMGWIIIFKIKPIYKALSGKGFFWLVFGGIVYTIGGIVYILSKKFNPTINMKMHDVFHILIIIASASHFWLMLKYISNF

SEQ ID NO: 47022 - protein, 230 aa, Borrelia burgdorferi
MNKGSLPSHVGIIMDGNRRWALGKRLSSLEGYKEGLKRAKEIVKYSLRVGIKCLSFYVFSTENWRRDDCEIENLMFLIANYLRAEFDFYEKNGIKIIVSGDVESLSGEVKSSIKDSISFSKNFNNLILNLAINYGGRNEILRAVKKFVSSDFDLESLNENIFSSFLDNPELPDLDLLIRTGGNIRISNFFLWRIAYSELIFSNVLWPEYYDTRYSKDLECFQFRRRNFGR

SEQ ID NO: 47023 - protein, 184 aa, Borrelia burgdorferi
MEDYKAFLDEKMNKVLLSLDNEYKTLRTGRISSNIFDRICIQYHDRRTPITQVSSIRIPEARLVVIQPWDKSILNKIEQAILNSDLSMNPSNDGSVIRIKVPNLTSERRQEIVKHAKKIAEEHKISTRNIRQDLNNKVKKQEKESEITEDCLKRILDDIQKSTDMYIKKIDSILESKIQEIMEA

SEQ ID NO: 47024 - protein, 279 aa, Borrelia burgdorferi
MSIISPQDVKKLREETNAGFGDCKKALSVAGGDFELAKKKLREMGIASAEKRLDRDAKEGRVFSYSNNIYAGLLLVSCETDFVALNHNFVNFGNSLIKELVESGIDSLTTSQELELKNLAATIKENIQVKKIFITKIQSNEFVKIYLHGEQSKIGVLVKLKVNDFSKTEDKIFKNFAMDLALHVAAFAPVYLRNDDVCPNYIKEQEEIFTKQLESSGKPESIIKGIVAGKIKKHLAEISLLEQSFVKNDKITVKEMLEEISKAISSKVEMVEFKYLRIG

SEQ ID NO: 47025 - protein, 260 aa, Borrelia burgdorferi
MAIITMKSLLEAGVHFGHQVKRLDPRMKRFIFSERNEIHILDLQKTLQGIKDSYELVQRVIKDGKKVLFVGTKKQASEIIEQEARRSDMPYVNNRWLGGMLSNFNTIRKSVQKLKKLEKMEVDGTFDMISKKEISQLNREKSKLAKNLTGIKDMETLPGAIFIIDPKREQIAINEARKLKIPIISVVDTNCNPDVIDCPIPGNDDAIRSVALFTKIISDAILESDKEVGIQIIENLNEEDLMKEIEIKNDKSDSIEERGE

SEQ ID NO: 47026 - protein, 553 aa, Borrelia burgdorferi
MRMENQKDLQENYLKVLERVELGSRVSGTVVNIMKDYVLVDIGYKSEGFIKIEEFENVPQVGDRLEAIVVRIGGELGLILSVEKLNSLNFQDKVYEYIQNKKIIKGKVLVELPNGYKIQINENVSGFMPFYLSSKSKDEKLKRGSVVEFYILEASEADGLRLILDRRTLEKERDLAKRIELVSSYNEEDVVDGVVERITEYGAIVKIKNFVTGILHKRNIAFNQVENVEDFVRVGDKLKLKIIKINPQTGKMELSLKALKANPWDSVDVKYKIDSIVKGKVVKILPFGAVIELDSELSGFLHISNFSWIRVVKSPQELIKLGQIVEVKILEIDKENQKISLGIKQINENPWERLTEKYPIGRVVQGVVTNITKTGAFVNIEEGIDAYVSKFDISWLEEIDPEEYFKIGDLVNGKVLEVDKRKRNVRLGIKQLEESPWEDFSKSYKKGDTIEVEIVEKKSKGFQVRVYNKIMGFISKIQLGDTKESSLETFEKLNVGDKLKVVITSIDSKDKSVLLSYREYENQRSREEISSYLFKGNDEESYKPFENLLKRDE

SEQ ID NO: 47027 - protein, 221 aa, Borrelia burgdorferi
MIIAIDGPSASGKSSIARELGVRLNYKFISSGHLYRIITLIAQRSLMNSCDFISEDSLLNLILENDISFNNFAFLLNGENVENQILNDKIDFQVSFYSSYVGIRNIVNKKLREVVKFSDDNYIIEGRDITTVVFPESEFKIYLDASVKVRALRRYKQRNGNETLEELERTLKRRDDVDKKKQYGKLKLSKGVFYLDTSYKGLDDVCNIIIEKFNLKKVRER

SEQ ID NO: 47028 - protein, 249 aa, Borrelia burgdorferi
MIALKAPRVHVFLAEKGVGSRRFCEELIRKKLVRVNNTIAKLGDKVTLGDRIIYKKQIFVFKDFQINNRIYLALNKPRNYLCSNFDVDGRKLAISLVQPLFKERVFSIGRLDFKSSGLLLFTNDGKFANDIIHPRQKVEREYIIESKKDIDENLLISFKSGIKVKKEFFKLKSYEILNKNSARLILDEGKNREIRKVFLSKNIFLKKIHRIRIGNINLDSLKEGQVKIVPLSKINSLKSRLEKLNDNSN

SEQ ID NO: 47029 - protein, 365 aa, Borrelia burgdorferi
MSKLKEKREKAVVGIERASKEEAIELARVQIEKAFGKGSLIKMGESPVGQGIKSMSSGSIVLDEALGIGGYPRGRIIEIFGPESSGKTTLTLQAIAEVQKEGGIAAFIDAEHALDPVYAKALGVNVAELWLSQPDTGEQALEIAEHLIRSGGVDLIVVDSVAALTPKLEIDGEMGDSQIGLQARLMSKALRKITGILSKSNTCIMFINQIRMRIGVMFGNPETTTGGNALKFYSSLRLEVRKIEQVTRSGSSDDVIGNKIRVKIVKNKVAPPFRKVELIIYFGKGISREAGILDAAIKHNLIQKTGSWYSLGDNKLGQGRESVIEYLSKEVELANNLDKRLRKIIFNNFDQENDNFIEFKEDESE

SEQ ID NO: 47030 - protein, 457 aa, Borrelia burgdorferi
MMDIKTLKGFKDYLPKDSLIRIHIVRQIFSVLNSYNFDLIDTPVLEYSDLLLKKSGDETEKQIYRFKDNGGRDVSMRFDLTVPFARFVATNISALKLPFRRSQFGKVFRGENSQKGRYREFMQFDFDIVGEDTFRGDAEILSVVYYGLEEIFLNFIEGINKKFIIHYSHIGILNSFFEKLGLKEKSIFILRNIDKIDKIGIDKVKEALLLEIEKEAVDSILSLVSLQGTFKDKIQALKSILGDNESIKRVEDVFQHLSLLKIQDSFNLNLKISRGLDYYTGIVFESEVFGSNMGSVCSGGRYDNLVSSFSNSIQKISGVGGSFGVDRIKDIIDLEKFSYIKIFVTKARSKVLIVNLDSALQNYYYELATRFRNHDYSKVKNISCEVYFKNKNGKNIKEQIEYALSKEIRFLVFVGQEEYKENKMKVRDLTKKEELLLSFEESINLIKCNEKLLCTPF

SEQ ID NO: 47031 - protein, 629 aa, Borrelia burgdorferi
MTKRMLNNTYRIKTILTIFLAITLLTIYKYFTLMAFNNSPDNTISLKSNDIAKRGTIYDRNGKPIAFSSKSYSIGTNPQKIENIVSTSETLGAILQINSRILKEKLSSNKGFLYIKRKIKREESDLIKRIQAEGRLSNITLYPDYTRIYPFRNTTSNITGFVGTDNLGLEGIEFSLNSILGKDKTKQQFLNEEPETNNIHLTIDMDIQQGVSKIAKKYFKENNPESLITLVMNSQNGEILSMVQFPQYDANFYSKYPEEIRKNLSSSLTYEPGSINKIFTVAIILESGKLNLEEKFLDNGIYQKQFPSGEKITIKTLNPPYKHIDSTEILIYSSNVGIAYITEKVSNEYFYKKLLDFGFGEKVGVPFPGETKGLLNHYSKWSGRSKATIGFGQEIGVSAVQILQAASILSNNGIMLKPRIIKKISNDKGENIKEFDKEEIRKVISKNSAQKVLKMMREVVNKGGIPNLKIKNLDISAKSGTSQAIDRKTGKYSEEDYTSSILAIYPTEQPKYIIYIVYRYPKKIIYGTRIAAPMAKEIIEFIEHQQNTIAYKKIKMPSKIKIPKAETNYKNKTYLPNFINLSKREAIDILKYYKNTMKIKINGDGFVYKQSISPNTKLEDITELELYLK

SEQ ID NO: 47032 - protein, 1036 aa, Borrelia burgdorferi
MLVKRIVGKPITMLILFSLLLMISLYTFSRLKVDLLPGIDIPQISIHTVYPGASPREVEESVSRVLESGLSSVKNLKNIYSVSSKESSTVSLEFYHGTDLDLVLNEIRDALELVKSSLPSKSQTPRIFRYNLKNIPVMEIVINSVRPVSELKRYADEIIKPGLERLDGVAIVTVNGGSKKRVLIEVSQNRLESYGLSLSRISSIIASQNLELSAGNILENNLEYLVEVSGKFKSIEEIGNVVIAYKIPDISSGINLSPIEIKLKDIANIKTDFEDLSEYVEYNGLPSISLSVQKRSDSNSIAVSNVVMNEIEKLKLSMPKDMKLEIASDSTDFIKASISTVVNSAYFGAMLAIFVIFFFLRSFRATIIIGISIPIAIVLTFCLMYFVNISLNIMSLAGLALGIGMVVDCSIVVIDNIYKYRQKGAKLISSSILGAQEMMLPITSSTFTSICVFGPFLIFKSELGVYGDFFKDFTFTIVISLGVSLLVAIFLVPVLSSHYVGLYTSFQKNIKNAFIRKIDAFFASIYYFLEFLYINLLNIVLNHKLIFGLIVFFSFIGSLLLGLLLDVTTFTRGKENSITINLNFPHKTNLEYAKFYSNRFLEIVKSEAKGYKSIIATLRADRITFNVLFPLKEESRDNLTQSVDYDSIKYKIMNRIGNLYPEFNIEPSISGNALGGGDSIKIKISANDFEYIKDYGKILVSMLKKEIPELVNPRLSISDFQLQIGVEIDRALVYNYGIDMNTILNELKANINGVVAGQYVEKGLNYDIVLKLDRMDVKNLKDLEKIFITNSSGVKIPFSSIATFEKTNKAESIYRENQALTIYLNAGISPDDNLTQVTAKVVDFINNKVPHKEGITLKVEGEYNEFSNIMNQFKIIIMMAIIVVFGIMASQFESFLKPFIIIFTIPLTAIGVVLIHFLAGEKLSIFAAIGMLMLVGVVVNTGIVLVDYTGLLIKRGFGLREAIIESCRSRLRPILMSSLTSIIGLIPMAFSSGSGNELLKPIAFTFIGGMTASTFLTLFFIPMLFEIFPTCFKFQI

SEQ ID NO: 47033 - protein, 318 aa, Borrelia burgdorferi
MMNLIFNINLYLKKYFLVLFLVLVACVGDNKLDDKNIDKEKESSYRFPVIAMKVKKGILSDYLSLNGDVDTKVKADIFPDAVGKITSLRIKLGAYVQKGQIVATLDPSRPGSVYLKSPVRAPISGYILNITKKIGETVNPQSNIAVVGRIDTKQILTYVSEKYISNIKVGNDAIIEVGAYSNEKFKAKVSEISPILDSKSRTIEVYLTPIGSNLDKLIIGMFSKIKLITKRFKDVIKISREAVVEREGKKFVFKVDLESKSVQMLPITVLFEIDNIVALSGEVEENDLIVVEGMSALSNGSLINLVDTKEGLSAESNI

SEQ ID NO: 47034 - protein, 401 aa, Borrelia burgdorferi
MPNFCLFNSKSVLTGNDKIDNSAVLIKDNKIFDIVTSDRLKKMDLEEYQMIDTKGNYITPGLYDNHIHGFHGHGTDQCSTESILKMSEHLAQYGVVGFLPTLYPRPIDEMIKTIKACIAAIGKEKGAKILGLHLEGPFFSPEKKGAHPVSYLHEPSIEVMQKLIDAAGGVFTGSNGKRKTHISTMTVAPELKGMRELAIFCLENNINLQAGHTNATYENMIEGFQVGILHTTHFFNAMSKLDHRNPNAIGAVLIHGDVSCEIIADGHHIHPKLILMLRKLKDISKIVLVTDGLTPNCQTCGKLIANGDEVYIAEDGLFHSVKSNTIAGSTLTMIQGLKNLIEFGFSLSDAVQASSYNPTRILNIDKKGLICHGYDANLNVLDKDFNLKLTMIESKIIFNNL

SEQ ID NO: 47035 - protein, 268 aa, Borrelia burgdorferi
MRLIIRPTYEDISKWAANHVAQKINEFSPTKENPFILGLPTGSSPIGMYKNLIELNKNKKISFQNVITFNMDEYIGIEENHPESYHSFMWNNFFSHIDIKKENINILNGNASNLKKECEEYEKKIKSFGGIMLFVGGIGPDGHIAFNEPGSSLTSRTRIKTLTQDTIIANSRFFEGDVNKVPKNALTVGIGTIMDSQEVLIIVNGHNKARALKHAIEKGVNHMWTISALQLHKNAIIVSDKNATYELKVGTVEYFNDIERKNFNNDLK

SEQ ID NO: 47036 - protein, 899 aa, Borrelia burgdorferi
MLKAVLETTIGSKSKRDLKDYLPTLRNINKLERWALLLADEDFSKETEKLKDELKSGNSLENILERAFTLSREAARRRLKERPYDVQIIAGLALHKGKIIEMKTGEGKTLSSVQAAYLNSLTGDGVIIVTVNDYLAERDSNWMKPVFDLLGVSVGVVLSNMDYELRKAQYAKDITYVTNNELGFDYLRDNMRYDLNEKSLRKFNYCIIDEIDSILIDEARTPLIISGPTEGNTNAYLEVNSLVSFLKECSKDPKTGDYPLEIDDLDGDYTVDEKAKRISFTAKGLNNLEQLLVSKGIISGSMYTDSNFNYVHYMTQALKAHLLFLKNREYIVGDSGVEIVDEFTGRVLTGRRYSDGLHQAIEAKEGVRVANENKTMATITFQNLFRMFDKISGMTGTADTEAKEFHKIYNLDVVVVPTNRLLARIDEDDTIYYTEEFKFNAITDEVYKTYKKGQPVLVGTVSIEKSEILSAMFKNRGIKHEVLNAKNHSREAFIIAEAGAKHAVTIATNMAGRGTDIKLGGNIEHRVRKKIGTNVSLEEFQEAVKNERENYLKDYNEVKSLGGLYVIGSERHESRRIDNQLRGRSGRQGDPGRSRFYVSLEDDLMRLFAGDNLRSLMGKLGMATGEPITHSLLTKSLINAQKRVEDRNFEIRKHLLEYDDVITKQRDFIYAQRNSILEDTAIKDRILVALEEYLSFLLEGTKSSTVSNVFLNEVNSIFAYMLESLGSIENISSLDLKAKLMQIAKANLDEKENLIGRDLFNGFLRYEYLKNIDFKFQEHLANLDSLREAVYLRSYANKNPITEYKEEGFSIFSELIKDIKVSTIRRVLQLKLDSNSSDFKSTKKSRNVKPIHKELSGIVINENKSASNVQVVRSSPKIGRNEPCYCGSGKKYKNCHGKS

SEQ ID NO: 47037 - protein, 372 aa, Borrelia burgdorferi
MYNNKTMGSNKTIIINLNNLEHNLNLIKNKIGEKEIVATLKGDAYGHGLINIFKFLKSKNINYFGLSNIEDAKTLKKIDKNIKILMYIKVDKKEIKNLIKFELVPFVSDFEYLFLIEKECALQKNKIKVHLKIDIGMNRYGIKIDDALEIATYIQNSKFLELEGICSHLPSIENFKTTQKQIEQFLFFLETLKQKNIHPKFVHISNSGHIINYKLNPQFNMVRPGLILYGYCQSLKNKKPALNFKPVLSLFSKVIFIKNVKKGEKISYSGIFQAKEDMKIGIIPIGYFDGIPQNISNDFYFLINNKKCKIRGKVCMNLTIVEIPKDLKVKTGSKVEIVSEKLSIDEMSKFSKRSHYELLCNIGKYEKRKYLD

SEQ ID NO: 47038 - protein, 125 aa, Borrelia burgdorferi
MQKAVSEHEFIEEIKKFLSAEKREILDSIKSVENSKKEIINNDMYPKDVVDIAFDNMDGNNLEALGFVEKRKLNLINQALYRISQNSYGKCLACEREIARERLLAIPYAFLCISCQTKKEKKNKR

SEQ ID NO: 47039 - protein, 90 aa, Borrelia burgdorferi
MFNHVKFILLEKIMEVVLNIKEEAIETEGIVKESLPNTMFRVELKNKHIVLAHLSGKMRKHFIKIVPGDKVKVELSPYDLTKGRIVYREK

SEQ ID NO: 47040 - protein, 208 aa, Borrelia burgdorferi
MISDIEFALSEHNFQFAYKDLQKINLYIKRILLLNTRFNLISNSNSNFNSILNLHVIDSLLGLSTVKEINPSEVLDVGSGAGFPGIILAIFDSSRKYYLLERSKKKSTFLKMIKLELDLENVKILEYEIEKEKKKYEFITIRAFRNMNEYALILKNLLKGGGLIMAYKGKFDRINLEVNQIKNLFSKIEVKSLNSKLRVDRNLVLLYR

SEQ ID NO: 47041 - protein, 627 aa, Borrelia burgdorferi
MFGEINMDFDAIVIGGGHAGIEAALALSRLNFKTLMITQNLDTIGKLSCNPAIGGLAKGNMVREIDALGGEMGRIIDFSMIQFRVLNKSRGPAVQAPRAQADKLMYQTKAKETLERQDNLDLFQDTVVDFLLNSMRNEIEGVVTERGNKFRSSVVVLTTGTFLRGKIFIGEYRADMGRLAEFSAYGLDKTLLGLGFEMGRLKTGTPARIHKKSVDFSKTEVQFGDSDIIPFSFSNGKLDKSQLSCYVTYTNKKTHEIISENMHLSPLYSGEIVGNGPRYCPSIEDKIVKFKDKDRHQIFIEPEGFNTEEMYLNGLSSSLPENIQQKLINSIEGLEHAVITRPGYAVEYDYINPIELYPNLESKRVKGLFIAGQTNGSSGYEEAAAQGLMAGINAALRLQNKKPMILTRTSSYIGVLIDDLVTKGTKEPYRMFTSRAEHRLNLRHDTSDKRLIKIGYDLGLVDEKRYSRYLFKESRVEEIKELLKQRRLSLKDVVDEQLKKHVSKDFYHILKDPSISLDNLIKIDPSLSDSKVILEQVELDVKYEGYINRQKDLIKRLDNLELVKLPFDFNYEIIEGLSREAREKFSKIQPATLAQASRIPGIRSTDITVLLIYFSNPKNKVVINFSL

SEQ ID NO: 47042 - protein, 464 aa, Borrelia burgdorferi
MSKFFERDDDIVALATPFLSSALCVIRSSGASSISKFSKIFSNHSALNSASGNTIHYGYILDSENGCKVDEVVVCLYRAPKSFTGQDAIEVMAHGSVIGIKKIIDLFLKSGFRMAEPGEFTLRAFLAKKIDLTKAEAIHEIIFAKTNKTYSLAVNKLSGALFVKIDAIKKSILNFLSAVSVYLDYEVDDHEISIPFDLILSSKAELKKLINSYKVYEKIDNGVALVLAGSVNAGKSSLFNLFLKKDRSIVSSYPGTTRDYIEASFELDGILFNLFDTAGLRDADNFVERLGIEKSNSLIKEASLVIYVIDVSSNLTKDDFLFIDSNKSNSKILFVLNKIDLKINKSTEEFVRSKVLNSSNLIMISTKNLEGIDILYDKIRALISYERVEIGLDDIIISSNRQMQLLEKAYALILDLLSKIDRQVSYDMLAFDAYEIINCLGEITGEVSSEDVLDNMFKNFCLGK

SEQ ID NO: 47043 - protein, 81 aa, Borrelia burgdorferi
MLVLSRKANESIKINSDIEVLILEIKKDAVKIAIKAPENIKIFRSEIYEFIIEENKKSLLKDKHNISKIKSLFNHYFKNEN

SEQ ID NO: 47044 - protein, 115 aa, Borrelia burgdorferi
  MISC_FEATURE (40)..(40): X=any amino acid
MARAKNGTVHVARRKRILKKTKGFWGTKKSNYKKAKDTLXKGMMYATRDRKVRKRDFRRLWISRISAALSDTGVTYSRFIEGLLKSNIKINRKILSNLAIEDVEAFKKIVLEIRR

SEQ ID NO: 47045 - protein, 66 aa, Borrelia burgdorferi
MANKMKTRKSAKKRYSFTVNGKVKYKKQNLRHILTKKSSKRKRNLRKSGNLSCFEVKRIKTLLPYG

SEQ ID NO: 47046 - protein, 186 aa, Borrelia burgdorferi
MINRNANRDRDRSRSNDKELKINYRIKAREVRVIFENGTQEVLSIEDAIKKAKEAGLDLVEVSPNVSPPVCKIIDYGKYKFHQEKRQKEQKKNQKVIKLKEVRMQPKIDAHDLDFKSKNILGFLKDGNKVKVTIRFRGRELAHTYLGYGILNSILEKVGDVNYVLESAAKMEGKTMFLIVAPKFKK

SEQ ID NO: 47047 - protein, 269 aa, Borrelia burgdorferi
MMDSLLETEKSIFFDKLIDTHVHFYELKKRSLDVNYIINECFKNGFSYFLDVGLHPSDFNDRKDLLSPYSNVFLTAGIHPLNLSDHFKDDIKQLEKILISENVVAVGEMGLDYFKADNKKFQIKALEEQLYLADKYKRPVILHIRDAYDDVYNIVRSLNFLNRGILHCYSGTYEHAKKFIDLGFKVSFSGNITFKNAQPLRILVGKLNINDLLIETDSPFLAPVPLRGKINSPLFLGYVCLEIARIKNCSVNDVAFAVYNSFKDLLLLH

SEQ ID NO: 47048 - protein, 379 aa, Borrelia burgdorferi
MLNEKILDALGDLSSISDDQLLDVTEKSKRGYQLIKEERLSEAESLFSDILEKDNENNYALVGLGDIERKKNNYDKAIVYYQKCLVKHPSNNYALFGLGDCYRNLDNYKKATDIWEEYLKYDPENITVLTRVAASYRKLKNFQKSKQTYLKVMELIPDNDYALVGIGHLYYDFKEYKEALKYWLKMYELNQSKVDVRVLTSIGNCYRKLREFTRGIYFFKKALEISPSNFYAVFGLADCYRGNKEYKEALKYWLDIIEKDPKNNLVLTRVGDAYRYLNDYENSQIYYKKALDVDFDMFAILGLALIQKEQGKYEEALIAIKSLIKNNPKNSALYVNAAECYEALGQIGNAVDILSSFLQLGMKNIVVIDYLAVLRKKME

SEQ ID NO: 47049 - protein, 357 aa, Borrelia burgdorferi
MLLEKLNSATSKIKLIEEKLQDINLIKDQKKYSKIIKEYTYLEKINTKKIEYEKILSQINDTKTILEKEDQQEMKELIKQELIDLDKKKEDLEHQIKILLLPQDENDSKNIIIEIRAGTGGEEAALFANNLYSMYIKYSEKKKWKTEIINFNETELGGFKEIIFEIKGKDVFKKLKYESGVHRVQRIPITESNGRLQTSAATVAVLPNIEETEIDINEKDLRIDVYRSSGAGGQHVNTTDSAVRITHLPTGIVVQCQNERSQHKNKDQAMKILRARLYEFEDSKKQEQRSSNRKQQVGSGDRSERIRTYNFPQNRITDHRANITLYKLEEFMQGELDPLLDPLMIALQEQELKSNSI

SEQ ID NO: 47050 - protein, 667 aa, Borrelia burgdorferi
MIQAYEIAHLIKINDLEKARNIFKKTVENTYKDEFERKSIFKALEIAEQLHYGQYRESGEPYIIHPIMVSLFLAKFQLDFKATIAGLLHDVLEDTNVEKEEIVKEFDEEILSLIDGVTKIHDLHNKTRSIKEANTISKMFFAMTHDIRIIIIKLADKLHNMTTLSYLPKNRQDRIAKDCLSTYVPIAERLGISSLKTYLEDLSFKHLYPKDYKEIKNFLSETKIEREKKLYKGKLSIEKELQKSGIEAEITVRSKHFYSIFRKMQTRTNKLTQIFDTLGIRIICKKQKECYEILEIVHRVWKPIPGRLKDYIASPKENKYQSLHTTVRIPEDNQLIEIQIRTEEMDRIANYGVAAHWIYKEQIELKADDLSFINRIKKWQQESANKSQYSMNDIHKELLNTFIYVYTPEGEVVELPFGSNSIDFAYIIHTDIGDQALYAKINGKISSITKPLKNEQIVEIFTSKDSKPDVIWLNSVRTKKARSKIRSWLNKNDNTIFVDNNIIAYLVGANKEQRKLFSLFKSYTKTKIKRIAIDPECSPTTGEDIIGIIHKDEIIVHNENCQKLKSYKKPQLIEVEWEATPTRKVHHIILLLKELKGIFSYLENIFTLNDVRLISEKIEDCGNGHGITNIIVSSNAKNITKIISALKENPNILQIMQIEEDIKNYDN

SEQ ID NO: 47051 - protein, 356 aa, Borrelia burgdorferi
MLIFGGVSFEHEISCKSAYSIYLALLDLNKYNIYPVYIDKCTGVWYLLDSVSDPPKPINTDVLPIVSLLPGFGIFSNNKNLEIDVVFPVVHGRTGEDGAIQGVLKVMDIPCVGAGIIGSAISSNKYFCKLLLKSFDIPLVPFIGFRQHDYFLDKEEIKRNVKEVLGYPVIVKPAVLGSSIGINVAYSENQIESFIKEALKYDLTIVIEKFIEAREIECSIIGNEKMKIFSPGEVVVQDFIFYDYDAKYSVIPGNSIIFNIPAHLETNQLLSIKEYAFLTYKNLELRGMARVDFFVEKKSGTIYLNEINTIPGFTDISMFAKMCSNDGLQFKDLVDNLIDYAFQSYINRKKRIDFEN

SEQ ID NO: 47052 - protein, 508 aa, Borrelia burgdorferi
MNKKLNEVLLKLDQDLIKCVKGSLDLEISGVTYSSKLVLPRFVFFALPGIHFDGHDFIEIAIQKGSNVVVCSRDVDFYSPNVTYIKVDDFNIRKFMSNFSNIFYDEPSKKLKVIGVTGTDGKSSVCYYIYLLFKKKGVKVGFISTVFFDDGSGSLIKNPYRQSTPESTEIHSFLSTMVKNEAQYAILESTSHGLDLETARLIDVNYFAVVFTNIGHEHLEFHGTIQNYLNVKLGLFRSVSDDAGFGVINLDDLYSSDFKNAVKKSFTYSLKSSKADFFVSFIDEKTDSTRFEFYHKGVKYLANVSLLGSFNVENVMAALILVSQILNIDIQDIVDKLNCIKSLDGRMDSINLGQNFSVIIDYAHTPGAFSKLFPIFKRFATNRLISVFGSAGERDVEKRFLQGQIADIYSDLIILCDEDPRGENSMCIIKDIAKGIVNKVENKDLFFIADRKQAIEKAISLAKAGDLVVALGKGHESSIIYKNREVFWNEQEVVKNAILSLEKSEKEK

SEQ ID NO: 47053 - protein, 311 aa, Borrelia burgdorferi
MFDIKQIFNKTYEYLIIIITLILISIIVIANIFIVGPSEEAIVLRLGKLNRTLDSGIHVKIPLIEEKFIVPVKIVQEIKFGFLISPSDIRENDNANDESRIITGDLNIINIEWLVQYKIRDPYSFKFKVEDPETTIKDIAKSSMNRLIGDNTIFEIINDNRVGITEGVKSSMNEIIDNYNLGIDVVQVQIRNALPPKGKVYEAFEDVNIAIQDKNKYINEGRKEFNQIVPKIKGEALKVIEEARGYKESRINNALADTEIFNAILDAYLKNPDITKERLYNETMKEILENKDNIELIDKNFKNFLPFKEVK

SEQ ID NO: 47054 - protein, 278 aa, Borrelia burgdorferi
MKGIILAAGYGTRFLPITKTIPKEMLPILNKPAIDYIIQEFIDSGIKDILLISSRRKKVLEDYFDREIELENIFLKENKKDELEKIRSKKINISFIRQKEMLGTGNALLYAKPWINREPVVVAYPDDLCIGNPPLSLQLIKLYEKTGKNIISIIENPENINRYGVIDLYKDEIHVKNIIEKPKIGSEPSNKASIGRFLYNYEFFEHLEEGFKLHKKGEYYHIYALKKLMDQKKVLYKNIEGKRIDIGTLEGYLEAIINSAKKDKKLMGIIKKGINEND

SEQ ID NO: 47055 - protein, 610 aa, Borrelia burgdorferi
MNKIRFLDKYLVQKIAAGESIDRPCSILRELLDNSIDSGATKIEVFLEEGGIQKILIIDNGSGISKEDLKICYLPHTTSKISSEEDLRKIETLGFRGEALSSIAICSNISITSSTTSNESYQIEVENGIEKCFKKQPAINGTIVDVTKIFHNFPARKRFLKQEPIETKMCLKVLEEKIITHPEINFEINLNQKLRKIYFKESLIDRVQNVYGNVIENNKFRVLKKEHDNIKIEIFLAPDNFSKKSKRHIKTFVNRRPIDQKDLLEAITNGHSRILSPGNFPICYLFLEINPEYIDFNVHPQKKEVRFYNLPFLFKLISDNINNFFDKNINNYQDIIIKRQLTEDDHLIEMTNQPENFNKINTYDIPQNNNLETEDVNEPNKNTTQSNIDLRRYNSIIQNRPTLRENIGNIFSDNFLEFEEPPNKNEKEEIKFNYIGQIFSEFLIVEKINEIYFIDQHAVHEKIIYEKLRNSKKNVQKLLVPIEFTVVDKNIEEIIDSEIEEYKQMDIIISKIGPKKYQLESIPNICSQYENTLINFFQSRRSRTINSLESDLYATIACRKAVKRNDMLSAEFSKFLINEFFKLEIKHCPHGRKIYYKISKFELEKKVDRA

SEQ ID NO: 47056 - protein, 302 aa, Borrelia burgdorferi
MHLSLKTKRKIIEIIFKSFILISAIISSLSILFLGLFILKTGIMPFLNNKIKILNFLFSTNWDPTSNLQKSYGILAFIINSFLTTLFSILIALPIGLGFAIYLLEKAKGFYRQFLQTVIELLAGIPSVVYGFFGSTFIAALVKNIFQREDNLGYNLISSSLILSIMIIPTIISVCYSSLKAVPKSYKFASLALAATDWQTIYNIIIPSASRGILAGTILAIGRAIGETVAVLMVGGGSPLFIKNIFSPIRTLTVNIAMDMGYASGVHREALFSTALVLLLFSIITNLLKNFILSSNKGLKKK

SEQ ID NO: 47057 - protein, 260 aa, Borrelia burgdorferi
MIKEKDTPKNEVIIETENLNLFYTDFKALNKINMKILKNSITALIGPSGCGKSTFLRTLNRMNDLVEGIKIEGNVIYEGKNIYSNNFDILELRRKIGMVFQTPNPFLMSIYDNISYGPKIHGTKDKKKLDEIVEQSLKKSALWNEVKDKLHTNALSLSGGQQQRLCIARTLAIEPNVILMDEPTSALDPISTGKIEELIINLKESYTIIIVTHNMQQAGRISDRTAFFLNGCIEEESSTDELFFNPKNTKTEEYISGKFG

SEQ ID NO: 47058 - protein, 594 aa, Borrelia burgdorferi
MTLNKLRKKYIDFFKSKKHFEIMGKSLVPENDPTVLFNTAGMQPLIPYLLGEVHPSGDMLVNVQKCLRTGDIDEVGDLSHLTFFEMLGNWSLGAYFKEYSVKCSFEFLTSSDYLNIPKDSLYVSVFEGDQEIPRDTETAKVWESLGISKDRIHYLSKDHNFWGPVGSKGPCGPDTEIYVDTGKSKCSLDCNITCSCGKYFEIWNNVFMQYNKDENGNYIELGRKCVDTGMGLERTIAFLQGKSSVYDTDAFMPIIKRIEYISGKIYGQKEDDDRCIRIISDHVKAACFILADSSVVFPSNLGQGYVLRRLIRRSIRYAKKLGIKSHFLADLVDSVEAIYRSFYNELTEKKDFIKKELSKEEEKFFKTLSQGEQEFIKITRNLPSKTIPGDIAFKLYDTYGFPYEVTEELAIEYGFNVDKLGFNEHFKKHQKTSKKGGDKVFKGGLADYTYETTKLHTATHLLHKALQLVLGDHVRQKGSNITAERLRFDFVHSEKMTDDEIKKVEEIVNLQIKNSLSVKKIIMELSEAREKGAMALFGEKYDDLVSVYEIDGFSLEVCGGPHVENTNELGTFKIQKEQSSSSGIRRIKAILIDE

SEQ ID NO: 47059 - protein, 335 aa, Borrelia burgdorferi
MLMNRKISIAPMVNITDEHFRYLIRLLSKKVTLYTPMISAKSIIMGDVKKIVKQNPLESPIAIQIATNSKNDALKAIQILEKHFNFDEYNLNVGCPSLKIQNANCGACLMGNANQVGEILKTMKENTNKPISIKHRLGIRPLSSDYKNESYSEVKNFVKIISDFGIKNFIVHARIAILKGFSPKNNRNIPKLRHEFVYKLKKENKNLFIEINGGINNSEQIKKHLSFVDSVMIGRSAFENPYFIANASREFLNETDEILTRKDILMQMVEYIKEYENYLSINILFKHLMGIVFSKEGAKKFRQNLTAPFPKNLKKHEILLKAIETLPEKILNSNS

SEQ ID NO: 47060 - protein, 425 aa, Borrelia burgdorferi
MLDLKFIRDNLDLVKRSIKARGLVLDIDKLIYLDDKRKKLITKIGELNAKRNENSSKMQENLDKVLKISLIETGKILKKQLIDLEEELERVSVDFDLENKKVPNILSPDVPIGSSEEDNFEIKRVGVVPQFDFKPKDHLELGRDLDLLDFDRAREISGSKFYYLKNEAVFLEIALINFSLNKLRDKGFDVFITPDVAREFIVDGIGFNPRGNESNIYKIEDTDKYLVGTSEITLGGYYYNKIIDLTLPIRMAGFSHCFRKEAGAYGQLSKGLYRVHQFSKVEMFCFCKAEESGVIHDEFLSIQEQIFTELEIPYRVLNICSFDLGSPAYKKYDIEAWMPGRDGKGGYGEVTSTSNCTDYQSRRLKIRYKDQDGQNKFAHMVNGTAIATTRVIISILENFQDQKGGVRIPKSLVKYTGFDYIPFKN

SEQ ID NO: 47061 - protein, 81 aa, Borrelia burgdorferi
MRKDIHPKNNLVVFKDGSNGAMFLTKSTLNSKETIKYIDGKEYPLVTVEITSKSHPFYTGQQKFVDAAGRIDKFNKRYKKS

SEQ ID NO: 47062 - protein, 515 aa, Borrelia burgdorferi
MDKKNGGFDLESEIRRLDVSKEFKIEDNLKKKVVKVVAKKDSASSVTKSADLSGVKDSNGVIFSDFDYDIPSSGLENNIKTLEQSNIIKFFNGKDYVEIEKLYDKPITEVRKIVEGLGTNHTIAVTMKKTELIFLLVKILSENNIDVLFTGVLDVLSDGYGFLRTASNSYLSGGNDVYVSPSQIRLFNLRTGDILYGQIRSPRDGERFFAMVKIKSINDQDPTFAQNRIPFDNLTPLYPNVKLNLEYENCNISTRLINLFSPIGKGQRALIVSPPKAGKTTLLQKIANAITTNYSDVILMILLIDERPEEVTDMIRSVKGEVIASNFDEQASRHVQVAEMVIEKAKRLVENKKDVVILLDSITRLARAYNQTMPTSGKILSGGVDSNALHKPKRFFGSARNIEEGGSLTIIATALVDTGSKMDEVIFEEFKSTGNMELILDRSLADRRLFPAINIKKSGTRKEELLLSEEERSKILLIRRILGGVDDYEGVEVLIEKMKKSKNNEIFLKTMSNGN

SEQ ID NO: 47063 - protein, 108 aa, Borrelia burgdorferi
MSFSRRPKVTKSDIVDQISLNIKNNNLKLEKKYIRLVIDAFFEELKSNLCSNNVIEFRSFGTFEVRKRKGRLNARNPQTGEYVKVLDHHVAYFRPGKDLKERVWGIKG

SEQ ID NO: 47064 - protein, 107 aa, Borrelia burgdorferi
MTIFELVDILKLLFNNIIKEYNLRKNASALKRSRQNLKRKIRNVSVKSELKTIEKRCINMIKAGKKDEAIEFFKFVAKKLDTAARKRIIHKNKAARKKSRLNVLLLK

SEQ ID NO: 47065 - protein, 368 aa, Borrelia burgdorferi
MRLNAGIVGLPNVGKSTLFSSLTSSNVEIANYPFCTIEPNIGIVEIPDERLLKISECIIPRKIIPAVMEFVDIAGLVKGASTGEGLGNKFLANIREVSLIVHVVRCFEEKEVIHINDDINPEKDITTINVELCLSDLETVQKSLQKQEKNAKSTDKKISESSKAIVLMLKRLEDHLSNMNPAVEFKFDDFEYNFIRSLNLLTFKKVLYVCNVDENSLSGNKYTDIVKNIALKEGNDFLILCAKIEAELAQIKDISYKNEMLKLFGINDSGLGNLIKKAYYTLGLRTYFTAGLQEVRAWTFKQGMRAPKAAGIIHSDFERGFIKAEVYSCEDLFKFQSVQKLKEKGLVRIEGKEYIVRDGDVIFFKFNV

SEQ ID NO: 47066 - protein, 521 aa, Borrelia burgdorferi
MKTRCFCLAAFSGILTTLAIPNEIKETGYSILGFVAYVPLFIALNKLEDKKALMGLTVFYFIIANSLQNFWLGFFHAFGWITFIGVIIGYIPYSLTLGYFLYYSLKSFKNKTMSITMLFTFYDYSRSIGFLAYPWGLAAFTVNNFNNLIQIADIFGVFFVSFAVYFLNSGIADFLIHKNKTNLLNIAFPTLLITASFTYGMIKKIELKNLLAKEIDSLNIAAIQLNTDPWLPGNDKKGIRDSIEITEQALKENPKIEFVIWSEGVLTYPFSKEDQHFKSSDLHNELKNFIKEHKIPFAIGAPSNLDKAIGIQQNSIYMVEPNLNITNIYSKIFLVPFAEKIPFYEYKFVRNFFLKNFRILGQIEGNKIEILKLKKFKFAPLICYDDAFPELSRFYKTQGANILVNFSNDSWSKTNSAEWQHFVVAKFRSIENGIKTIRATNSGITATINEYGETIKKLETFKKGYLLSTVKLSPTFTTIYEKIGDSFIHILVMMFLITTLRFQFMEDKNQLLSSSVVKIKV

SEQ ID NO: 47067 - protein, 254 aa, Borrelia burgdorferi
MNYTKFQEFISEFLGTFILLALGTGSVAMTVLFSSSPEIPGEIIKGGYTNIVFGWGLGVTFGIYTAARMSGAHLNPAVSIGLASVGKFPVSKLLHYIVAQILGAFTGALMTLVVFYPKWIEMDPGLENTQGIMATFPAVPGFLPGFIDQIFGTFLLMFLISVVGDFTKKHSDNPFIPFIVGAVVLSIGISFGGMNGYAINPARDLGPRILLLFAGFKNHGFNNLSIVIVPIIGPIIGAILGATIYEFTLKNNKD

SEQ ID NO: 47068 - protein, 501 aa, Borrelia burgdorferi
MKYILSIDQGTTSSRAMVFDKNANIKGFAQKEFTQIYPQPSWVEHDPTEIWGSQLGVITEAMANARILPNEIDAIGITNQRETTVIWEKNTGKPIYNAIVWQDRRTAKICDQLKKEGKDKIILEKTGLVLDSYFSGTKIMWILDNVEGARQRAENGELCFGTIDTWILWNLTQKKEHATDYSNASRTLLLNIKTLEWDDELLSILNVPRAILPELKESSTIYGKTDKALFGAEIPIAGIAGDQFAATFGQACLKKGMAKNTYGTGCFLTVNIGKEPIISHDKLLTSIAWGRKKSVTYVLEGSVFIGGAVIQWLRDGLEFFRKSSDAEALASSVSDNGGVYFVPAFVGLGAPHWDSYARGTIIGITRGSTKAHITRAALESIAFQSFDILNTMKKSIPNFEIQELRVDGGASQNNLLMQFQADLLECKVVRPKITETTALGAAYLAGLATGYWQSAEEIVSLWQVDKIFEPSMPKNQKEKLLENWNKAVGKAKSWIQNSHSS

SEQ ID NO: 47069 - protein, 201 aa, Borrelia burgdorferi
MKTLFFATTNENKINEVKNILDIPNLNLIVPQNFNIKETGKTFKENSLLKAKALFEILNNNQNVFGEDSGLCIEALNLEPGIYSKRYDTYKLCKKLSTNEKNQLILDLMKNEKNRKAYFICNISYISKNGQILNFEGIIKGKIALSLNDKKNYGFGYDSIFLTKNNKKLSDLTLEEKNKISHRGIAFLKFKKFLLKSLFNS

SEQ ID NO: 47070 - protein, 840 aa, Borrelia burgdorferi
MSKYEFIKIEKKWQEFWDNNKTYKVEEDPSIPKEKRLYILDMFPYPSANGLHVGHPEGYTATDIFGRYKLLNGFHVLHPIGFDSFGLPAENYAIQTGTHPQKSTEENINKFKKQIKALGFAYDWDREIRTHEENYYKWTQWIFLQLYKKGLAYVKEMPVWYCPELGTVLANEEIIQTSDGPKSERGSYSVEKKYLRQWVLKITKYAERLLDDLEELEWPESVKEMQRNWIGKSTGVEIEFEIEGHSDKIKVFTTRPDTIFGITYLVIAPENKLIEKITKNNFKQNVLKYVKHEELKSDLNRTSLEKDKSGVFTGSYAFHPITNEKIPIWVGSYVLGTYGTGAVMGVPAHDERDFQFAKKYQLKILPVISKSGKNEILEKAFVDDGISINSPNEFNNLKNSEVKDKVIKWLTKNKKGKEKVAYKLRDWIFSRQRYWGEPIPILFDKLGNAIPLEENDLPLKLPEIANYKPSGTGESPLSRIKDWVNVKDMGFTRETNTMPQWAGSCWYYLRYLDPKNSKEFANKKKIEYWMPVDLYIGGAEHTVLHLLYSRFWHKVLYDLGYVNTKEPFKKLINQGIITSFSYQKENGVLIPNDQVIEKDNKFFDKKDNKEVTQVIAKMSKSLKNVINPDDIIKEFGADSMRIYEMFMGPLTDSKPWNTKGIIGVFRFLNKIWNLREKELSKENPPREIISELHKVIKKVTEDTEKLNFNTAISAMMIFINELLKYEKNYLNIFKPFIIILSPYAPHLAEELWEYIGELPSLFKNSKWPKFDESLIIKGKKEIVLQINGKIKDKILLNKETGEKELKEIAMENSKIKSNLLNKKIVKIIVIKNKLVNIVIK

SEQ ID NO: 47071 - protein, 708 aa, Borrelia burgdorferi
MKIWKQKETNIQAQELTRIAKQYNINAFEATLLINREIKEEDFMFFLEDSVNLLHNPFLLKNIDKFINRINKAIKNNENILIFGDKDADGITATIIMYETLKDFGLNVSYKIPSNGEFYGLSNELINTALEKKISLIITVDNGISSIEEINYANSKGIEIIITDHHLPGENFKTENIVINPHLKDDKYPFKEIAGCCVSFKACLALSMSFTDLYSKNLVFLFLEKTKNEIILHAIEINNYILKQYLRLNNKNDPLINSNKLEKFVQNKCIIIFNKEDQNELLNKHFAKSININTIDISENFIKKYPNFRKKTLTDLIQATKYFKYKEVEIKDKLYYIFYNVIFETNKNLLQKCLKRLSFVAIGTIADNMPIINENRIILKVGLKEIALRERMSINYLLKDGNILTKPNITSTDIAYKIAPILNSTGRLEKADIAINFLLTNDINQIENKFKEIKEINELRKYKEEKAWNSHNKNTIFKNDKFIVCYDNNTPKGISSRIATRLSSYYQKVAIFLTKQDNIIKGSIRSNNKINSKTLISIIPSHLVINSGGHKAAAGFTLHENLLEDFIKELEYATTKVEYETTNENESIPIDAILPKNLTKDSLFKTIEIFEPYGYEFREPILLMKNAYLQELKIIDKNHSSKHINMRIKSQNDYYKAIFFNGTKKIEELDIKEDQYLDIIFTVNEDFYYPREKILKIIDIKKNAQINV

SEQ ID NO: 47072 - protein, 69 aa, Borrelia burgdorferi
MVTVTVDKNENLEKALKRFKRMIEKEAIIREWKRREYYEKPSTIRVKKEKAFKRKQAKKVRKLKQKTNR

SEQ ID NO: 47073 - protein, 787 aa, Borrelia burgdorferi
  MISC_FEATURE (679)..(679): X=any amino acid
MKDFYQYFQFLFFFMLSVISFSLFVALTPLSNVFVFFVFNLLGQILLNVFSFLSFYLIVYPIVNWYAYKKHIFTKRFIFNWNYTVILFFTLIFLIKINSNVEKSYFIKIFLINFGIVLGNFFIFTLLILEFVVWIYLNYVFFKDVNFILDTFKFLEFKIKILFENILSYFPFSNSLDVKKDIKVYGDSVDDLKDSQVFDEKKNIINDEEYQALWSFSAFLRNNKKPSNINLDKTIFEGSDLKEASSLNKDILNENALNLDENVDEIDESCEYKYLDNLEDNKLVISGKVKACEIRTKGIISQVAISHVYNENVALNKKNDSYVIDISVFDQKEIKNDVEDIEYDKEIQKQSMILQETLKEFNINAKLIDIIKGPVVTMYAVRPDKGIKLSKITSISDNIALRLAAIRVRIIAPIPGREAVGIEIPNKRREFILISEIIDSKEFRGDFRIPFALGKEISGENIVFDLVNSPHLLIAGATGAGKSVCVNSLIASIIFSKSPDEVKLIMIDPKIVELKLFNDIPHLLTPVITDVKRALEALRWCLDEMERRYVLLDNLLVRDISSYNKKIKDENLNLMILPYLVIIIDEFADLILSARKDLENLISRLAAMARAVGIHLVLATQRPSVDVITGVIKANFPSRISFMVASSMDSRIILGSSGAEKLLGKGDMLYISSLNPFPXRIQGGFLKEREVYRLVEEVKKFGSPNYIDDEIFIDSVKEPDLVALGPSDEPMFDEALEIVKTTRKASASYLQRRLKIGYNRAARIIEIMEDMGYVGPVNGSKPREVLI

SEQ ID NO: 47074 - protein, 417 aa, Borrelia burgdorferi
MIIPKKKQRVEKRKKNFLFNSKKSVNFELKDFANISNIGKRRKKVFKIKNFFKKKINFFKKVSLFFYKLKIQNINHYEYKYYYKSLRDKVFDIFSVRFDYKLVFKLNAIIFIFILTFYINIFSYYGSYVFLNRLSLPKDYFIDTFLYYSDQDIAQISSYLPESNVSANVPGFKKNFVLKVFDHKIKPGETLSHVAARYQITSETLISFNEIKDVRNIKPNSVIKVPNMKGIVYIVKKNDSISSIASAYNVPKVDILDSNNLDNEVLFLGQKLFIPGGRLPKDFLKEVLGETFIYPVQGVITSGYGYRPDPFTGVISFHNGIDIANLANTPIKASREGVVVTAGFNAGGYGKYIVISHSNGFQTLYAHLNSFAVKVGKKVSRGAVIGYMGSTGYSTGNHLHFTIFKNGKTENPMKYLR

SEQ ID NO: 47075 - protein, 168 aa, Borrelia burgdorferi
MRIFKAHKYELASILAACLFLITLIKLFLSFYIVKGESMTPAIFEKNWIVNHKFAYGLRIKKHQKYLLLWKTPQKNEMVLIKDPITNKIAIKKIFAIPGEKFKQIEKNTICIHDLNFKIDENILKKNTKKIPEDHYLVIGENKQISLDSRDYGFIKIDNILGKIIYYF

SEQ ID NO: 47076 - protein, 372 aa, Borrelia burgdorferi
MIKDEFLIKSWYIPLDFFSADDEGRTELPTDQKKQKAREEGRVLKSTEINTAVSLLLLFALFFFMLSYFALDLIAVFKEQAIKLPEVMRMSVYTMGFAYIRSIMGYVVLFFFASLAVNFFVNIIQVGFFITFKSLEPRWDKISFNFSRWAKNSFFSAGAFFNLFKSLLKVVIICLIYYFIIENNIGKISKLSEYTLQSGISIVLVIAYKICFFSVMFLAIVGVFDYLFQRSQYIESLKMTKEEVKQERKEMEGDPLLRSRIKERMRVILSTNLRVAIPQADVVITNPEHFAVAIKWDSETMLAPKVLAKGQDEIALTIKKIARENNVPLMENKLLARALYANVKVNEEIPREYWEIVSKILVRVYSITKKFN

SEQ ID NO: 47077 - protein, 147 aa, Borrelia burgdorferi
MNKINGVENVFNLNISNKVKKKTDFNVDNISNKVNLGKDDFLKLLITQLRYQDPTNPMKDKEFIAQMAQFSALEQMANMSRSFEKLSSSLEIRKDLDLLGKVIKFQHGDGEIVEGRVTNIKTGAIPQVMVNGNYYVYKNILSVGLEE

SEQ ID NO: 47078 - protein, 394 aa, Borrelia burgdorferi
MYMSNLLNLSKAYGNKLNLLNTIKGLNLNVSKMESKGNASSFLNVMSSESKKLAKAKFMIFDFLNFFKDNGLIAKNLKKSPLNKSFFFKKLENEDFVSDLKSLIARMNVFLDFEGLNSIKEDLSSNFDFLGKEKFFEKIEKLCLAFNDLSSFLGFDFLTALIDDYYNQISLNDKKEEKNVINIDVKNFKKNNSDHNDFVFSKFSLNAIDGQNFVDRYKVKEISNDSLKGFVEEFANYNIKSSKDVGGFDFVSSLKPEWNLKINKNIVDKAKVVLKSNNTGEIKLVLKPKELGSIRINLNLDSNNNLLGKIVVDNQNVKMLFDQNMHSLNKMLGESGFNASLNLFLAGENLNSFTGNFKDDSKDQNFHFGYNKFFKIEEEVEFSYDVDKNVNLIV

SEQ ID NO: 47079 - protein, 344 aa, Borrelia burgdorferi
MEEKKEKEILDVSALTGKQKAAILLVSIGSEISSKVFKYLSQEEIESLTFEIAKLETITSELKDNVLLEFKELMMAQEFIQKGGIDYARELLEKSLGTQKAVDIINNLGSALQSRPFEFVRRADPANILNFIQQEHPQTIALILSYLDPQKASFILSSLPTEVQTNVARRIALMDRTSPEVVREVERVLEKKLASLSSEDYTSAGGVDNVVEIINMADRKTEKFIIESLEEEDPELAEEIKKKMFVFEDIVLLDDRSIQRVLREIDGQELAKALKSVDIPVQEKIFKNMSKRAASMLKEDMEFLGPTRRKDVEESQQKIVSLIRKLEEQGEIVISRGGEEDVLV

SEQ ID NO: 47080 - protein, 182 aa, Borrelia burgdorferi
MSFKGTTVIAIKKNGKTVVAADGQVTFGHTVLKSNAIKIRKLLNGKILAGFAGSTSDAITLFEKFEEKIKAKGDGLIDIKRAAVDLAKDWRSDKILHKLEAMMLVADSNNILLISGTGDVVEPEEDVISIGSGGNYAYSAALAYMENKKLSAFEVALRSLKIAARVCIYTNSNIVLEEIENE

SEQ ID NO: 47081 - protein, 404 aa, Borrelia burgdorferi
MEEALMKDYNMIDSHTRRFDSTTNPTILKVIGAGGGGSNAVNRMIEYGVRDVEFIVANTDLQALQTSIAPIKIALGAKVTAGLGAGGKPEIGQAAAEEDIDVIRNHLSGADMVFITAGMGGGTGTGAAPVIAQVAKELGILTVGVVTKPFKFEGPKKLRLAEQGINNLRKSVDTLIIIPNQKLLTVVDKRTTIKDAFKRADDVLRMGVQGIAGLIIEHGEVNIDFADVKSIMQGQGDALMGIGYGKGENRAVDAATSAISNPLLEEVRIEGSKGLLVNVTGGDDFSLLELEEIMGIITVSVDDEATVIYGHAINSNLEDEIYVTVVATGFASKKQKEISSTPENNTLSSKEFDTLMSGNQNAPSGSYEQQDSSFAAKSKNVNYFDDDIDVPTFLRNLNKKSSDD

SEQ ID NO: 47082 - protein, 413 aa, Borrelia burgdorferi
MSRNLIVGLDVGTSKICTVVAEVNLNDQLEIVGIGTSISRGVRKGVLINIEAALDSISNSIEAAELISGCDITSLSVSMSGSSVEGTNSRGVVAINSKTREINEEDVERVIEAAKAIVIPMDREILHVIPQEFIVDGIPHIKNPIDMMGIRLEGEVHIITGSSSSSQNLVRCVNRAGFAVDEVVLGSLASSYATLSKEEREMGVLFIDMGKGTTDIILYIDGSPYYTGVIPIGVNRVTLDIAQVWKVPEDVAENIKITAGIAHPSILESQMETVIIPNLGTRPPQEKSRKELSVIINSRLREIFEMMKAEILKRGLYNKINGGIVLTGGGALFPGISNLIEEVFNYPARIGLPMSINGIGEEHIDPKFSSALGLVLYKHEQQKFNKLKKVSSKVKRKNKISSKLKGWFLKEWF

SEQ ID NO: 47083 - protein, 247 aa, Borrelia burgdorferi
MIFERKFLIKYIYFLTSLIFFEIIIIIFASPYFLIRYISINNDISLSKEDIIKISGIKPNTYYHNANVRIYEENLKKDLRVKNVKVDLKFPNKINIKIEKRIPIAVALENVNGNITYYCIASDGVILEKSKHLIYDLPVISGLVLNDNNVGDFLEDRMLNIVRGLDYLKINQKYLYNLISEVNFLKLNFYDYNVILYIKSIYNKILITVDMNLMDVMHKVFLAVNLLKGKPGVIDLRSGDIILLGES

SEQ ID NO: 47084 - protein, 364 aa, Borrelia burgdorferi
MVVEINSLRTCYLLVLLLLVAYGLVVFYTSSFFLSLELTGNPNFLFFTRLNYLFLSFMVFLVFERISLNFLKKSIFPVLIITLFLIMATFLSPSISGAKRWIFFQGVSIQPSEIFKISFTIYLSAYLSKFDPRKNNGISYWIKPMLIFAIFWVLIILQNDYSTAIYFAILFFIVLFVSNMAFSYVFAIVVTFLPVSAIFLMLEPYRVSRIFAFLNPYDDPSGKGYQIIASLNALKSGGILGKGLGMGEVKLGKLPEANSDFIFSVLGEELGFLGVLFAISLFFLFFYFGYFIAIHSNSRFKFFIAFISSLAIFLQSMMNILIAIGLLPPTGINLPFFSSGGSSIIVTMALSGLISNVSKNLSNN

SEQ ID NO: 47085 - protein, 351 aa, Borrelia burgdorferi
MFYLLGLRLLKYITFRMAYATIFAFLLSLIVGPYIILKLKKLRADQILREDGPKRHLSEKAGIPTMGGILIFFCVFISLVFWSNILNVYFLIMVFVMLGFAFLGFIDDFLKIKKKTSDGLKARFKIYGQIIFSFFSVGILYYFGGEHVSVIYFPFIKSFQIDLGLFYIPFGMFILISASNSFNLTDGLDGLAIGLSIVITGALIIIAYLTSRADFAAYLHIPNIKGSEELVIFLGALLGGSFGFLWFNAYPAKIMMGDTGSLALGAILGMAALILKSEILFSILAGVFIIETMSVIIQVLVYKKTKKRVFKMAPLHHHFEELGWSEMQVVIRFWIIGLIFAIIALSTIKIR

SEQ ID NO: 47086 - protein, 464 aa, Borrelia burgdorferi
MRIKIKDILISSKDVKFVGNIKNIERVVSFYSLDSREIKDDNINDSLYFAYKGNKVDGFSFVKYLIDLGVKCFACSREHESECIKYLNDNEGLVFLLTSNVIKLLQALASFLIEKTSFKRIAITGSNGKTTTKEMLYSILSKKYKTYKTWGNLNSDIGLPLSILRVEGNEEYAVFEVGVSYVGEMDLLSQILKPEIVIITNISYAHMQAFKELQAIAFEKSKIIGKNIEIFVVNEMNDYCVYLEKRAKIANPNVKIVYFDFENLSIKSFSFLDGKFSFDFVYKGFEYSILLLGRHNIFNAIGCINLALFLGMREKEIKEGLIETAFQKGRAEILTKNGYLILNDSYNGNMGSFMALKNMILDLNIQNKKFIVLGSFKELGELAYKTHKDLIQEAISMNFDKIFLIGEEFLDVRDSENLVEKCLYYFSEFDKFIDFFLKSLEPSVFIVIKGSRFNRLERILNIFR

SEQ ID NO: 47087 - protein, 296 aa, Borrelia burgdorferi
MNNNAFHFPVLLDAICKLIEDLPVKSDLIYIDSTLGEGVHAKAILEKYDFLSLVGIERDPQILERARQFLSIFEERITYFNDWFDNFFVNYPLNVKANFILVDLGISMFHYKGSKKGFSFLEDEPLDMRLCSSSCKISAAEIVNTYSKYDLEALIYDLSNEHYSRRISKAIVEYRKIKKIETTKELQSIISKVYPFSKVKINPATKTFQALRIYVNDELARLKRSLPFWVENLAKDGILAIITFHSIEDRIVKDFFRSLSCDLYAKISKKPIMPSFDEIKKNKPSRSAKLRVVKKL

SEQ ID NO: 47088 - protein, 293 aa, Borrelia burgdorferi
  MISC_FEATURE (212)..(212): X=any amino acid
MINANLTTFPIKINMKNKVLLCINTLKSGASILGNDVKVYLETKYFVEVVLIDVGRPLFSFPKENFLFLITLGGDGTVLLAVNLLLENENIDIPIISINMGNVGFLADIKIEDFKKVIDRFFNNSLVINKKFLLHVTVSQHGKDLISKYALNDIIIRSSVLNKMIYVDLMVNSESFLSYKSDGIIVSTPTGSTGYSFSAGGPILEADLEGFXLTPISPHSVYNRSFVFSKLSKLSISFSKEYFIAAASIFLDGINFGSFGVDVVFEFKISSQSLNFVSFCTDTFVKRLKNKLL

SEQ ID NO: 47089 - protein, 347 aa, Borrelia burgdorferi
MQNKLFLKNIEKNINKIFSTTNFLNLFKDNDLKFTFKIKKETLDYIKAPAIEIVNRGGKRIRPMIMILLAYALGLKEKNTKLIYKLSLLLELPHSGSLIIDDIEDNSLKRRGASAIHLIYGIDNSINAGNLIYFLPAKLIEKSNLKENQKLLIYENFFTTLSNLHLGQGIDIKFHNESYIPSIKEYISLVELKTASLFGMASFLAAILTNNEDKAKKIYSTFLKLGVYFQIIDDIKNIKNKINGKEFGDDLLEGKKSLPIIYFLQEKKFEPKIISKFNQIKNTKTTKARKEIFKLTEMINSSKSIKNSTIVALKYLNEFKNELNLYPLTNRYKNLLIDTIEQIKEGI

SEQ ID NO: 47090 - protein, 377 aa, Borrelia burgdorferi
MNIKNKLISLLIVVAISFIACKTPPESRESKNAKIAQPDNKNFQLRDIKDIKNELIRERGHLFYSKEFNEAERLEEAMKQSFSKKKAIEGNEIALKVLERYKTIIRETREKKEKTNYLKENIEKYLNDAEANEAYIWIPLEIDEVNNLYFEATRKYKNYDLDNALDMYSKAFNRAQQAAKNAKEAKALKETDERMYKQLKALEAASNLPIYSNNKLIKPSPWNGRAFIKERNSHLNLLNTNKDTYLLGEAEISIPIVLAYEEKVEIAKNSKPQEQFKTLELIERSRTLWEKGVEAKNVKNFRLANELFLESARYLEAYQSNASSELYVIKIGNTLWGISKKLYNDPYLWPKIWFANRQKIQNPDLIHSNWKIIIPAK

SEQ ID NO: 47091 - protein, 931 aa, Borrelia burgdorferi
MPDVDKIIQFKREILDNLSNERLSKESFGLSMDVKLPEPGESIVPWIGEDLALDETDDELDLNFMLDALENEDKLSYSDIFNDNLPLSGSNLRVDVDSELSTLNNDFDVSSSDSFENNIDKVLDDNSIDLEIASKLDFDNLINSPELSSEELINNQGNNNFFEANNDSSVLGDSNFLQSNEFNIDDAVNGKNQTDEQSEMFVGDSLNLSADEDDFENVIDDFKFLEYDQNANFKRFEFKVNYPLFLKHLNSYPRNLRIAIAEALTKENVSRFKLEALIDLVEKNKKRLKFIAKFVGDIVGRSIKLPVIYFKAEEFSKLQQKLSYRVSRALLPLIKIASFFVVLVLVSLYLIVDVIFFYVASESKYKEGIESIYANKRDLAKSIFRDAYYIRPDDKWFINYAKAFEDVRDFDSAEEKYEELFTIEPFSKNSTNRRRKKFNKEGYISYASMKIGLGEHSEANSILDEVISYDLYDYDALVLKGDNYFKWAKTNSNYYKDSINSYTVVLSKYGQKKEILFKLFNAYIEANLDTESDNVNNFIKSNEILDIDEVVYTKYAKKLVDKYISFVTYNQRANNLAINLNYLNGQTNLLNKEFSDFKRNDGRTIFKLDNNVNMNSEIEYILRKILNKNPNYDKALFESGRYSYYIGDFKKAEVYLLKALNSFRHKNSIEDAGDKILAYKILADIYEKTRDSLRASNIIGLALSDYSFYKKHNLIKGSKEISSIYEKQGDILRSLNDFKSAISSYKLAINEGVDYPDVYYKVGLLSYRENNYDDALKYLFKVESMAGFSSSNEVLNTIALTLYKIGDFLASRSYYLRVMQNLELEKANVLNFNPKENDYHKTLLLKEIETYNNLGVVEVMASFSSIRDTKLFNSGVSNLSESAKIFDILNRDEDMVKSVKKDLASLNLRNIFKNSFSKSNVLFYENLSEKL

SEQ ID NO: 47092 - protein, 290 aa, Borrelia burgdorferi
MEKENILEIKNLTIEFRLKHTTIHPVSNVNLSVKRGEIRAIVGESGSGKSVTSMAILKLLPELTTVYKSGEILFENQDLLKLSEKELLKIRGNKISMIFQDPMTSLNPFLRISTQLEETIILHQGLGKKEAKEKAIEMLKTVGVVNAEERIKHFPHQFSGGMRQRVMIAMALSCHPSLLIADEPTTALDVTIQEQILLLIKNLSKKFNTSTIFITHDLAVVAEICDTVSVMYQGKIVEEGTVEEIFNNPKHPYTIGLLKSILTLEHDPNKKLYSTKENPMKITKTSTEEF

SEQ ID NO: 47093 - protein, 323 aa, Borrelia burgdorferi
MSSKKEIILKVENLMQTFTTGEDFLFWKNKQKVNAVNNVSFEVEKNKTLGLVGESGCGKSTTLRSIMQLYTPTSGNIYFNGKNITKLSKKELLKTKKDMQMVFQDPHTSLDPRMTIKEIIAEPLEIYNENKILPKTKQEIEQRVNELTDIVGLHKSMLTRYPHEFSGGQRQRIGIARALALNPKLLLLDEAVSALDVSIRAQILNLLKALQKEFNLSYLFISHDLAVVKYMSDKIAVMYLGVILELAPRETLFSNPIHPYTKMLIASIPEINPEKRKNKNIKLDEQTLANIRKIHLSTQVHPKLEEVEKDHFVSKYLFDEMNR

SEQ ID NO: 47094 - protein, 433 aa, Borrelia burgdorferi [sequence omitted]

SEQ ID NO: 47095 - protein, 136 aa, Borrelia burgdorferi
MKKSNFSNVNLSMGTGRRKSSVARVYIREGSGNIKVNNRDFDSYIQLENLRTMALSPLVLTNTLGKYDLYINVYGGGISGQSGAIRHGISRALFKLDESNKMILRSNGFLTRDSRKVERKKFGQKKARKSFQFSKR

SEQ ID NO: 47096 - protein, 146 aa, Borrelia burgdorferi
MNKITNNDTIWIKPKTVEKKWYVIDAADRILGKVAVDVVKILRGKHKAYYTPHQDLGDNVIIINASKVKLTGKKYQQKLYYRHSRYPGGLYSDTFRTLSERKPCAPLEIAIKGMLPKGPLGRNLFRNLKVFSGSEHTLKAQNPIKL

SEQ ID NO: 47097 - protein, 269 aa, Borrelia burgdorferi
MYDLPLIDNLPVIKRARFFYLYDIHGKRYLDLYLNGGRNFLGYRVQGLNRLFKQTMSRGLISPYPSVFKNQFINLVFTFFKEAGSVYIFKLEKDAKEFLLSLTGKNKFFMPWEKEEGIYEFRVGFSNIKYPMIFNIPLPDFMSVSIVVMDNLSRKIEFKDNFDAVTLSLARHTLSKLLFYKKNIDIDFNSFATPLFRIADRYMLPLYDACYHAEIFNEFLKFGYLISPNFSIPSIVPLKFSKGDLDNFKKLCFALKNKFIDGLDSDPYK

SEQ ID NO: 47098 - protein, 485 aa, Borrelia burgdorferi
MEYKLVIGLEIHVQLGLKTKAFCGCKNEFGGVPNSRVCPICLGLPGSLPSVNVELINSAILAGHATNSKIRNVVKFDRKHYYYPDLPKGYQISQNDKPICEGGSLLIETPSGPKKINIIRIHMEEDSGKSLHLLDSENQSYVDFNRSGAPLLEIVSAPDINSGDEAVAFLSSLREIFRYLDLSECNMENGSFRCDVNVNLIVKENGVEHKTPIAEIKNLNSFKSIKAAIEYEELRQQQEWIQFKKTLNSCGKHTRGFDDRSGVTVIQRNKETVSDYRYFQEPDLPLIEIDDSYIDNIKNLKLIELPFHARIRLKGQYGLSDFDVITLTADKHLLKYFEEAVINSSDPKKVANWILSEVLSVLNDKGISVLEFNLLPSYITELVEFIVAGKISGKMAKRVFSEMMTRGVSASVVISENQLEQVSDKFVIKQIVLEVLDENPKSIELYKKGKDHAIKFMMGQIMKKSSGKINPILANEILLESLSNV

SEQ ID NO: 47099 - protein, 496 aa, Borrelia burgdorferi
MDIFHLLKYWSKDKVLDLSNLTLTKIQELVLTRKCKIYDILLAYKNNYELNKDINGYIEFFDDSLEIAKRYDDCLKNCELEDLPLIGMLIAVKDNISIQDKSLTCASEILKGYISPYDATVIKRLKNKGAILIGRTNMDEFAMGSTCEFSYYGATLNPLNREYVIGGSSGGSAAVVAAFQAPFSLGSDTGGSVRLPASFSGILGFKPSYGGLSRYGLASYASSFDQIGFFSHSIEDIALILKHTCGSDKMDSTSVDIFDDFYPLKIESLQGKNLAVIKELSEDLMDKNVANSFAKFKLDLLSKGINIKEVSIEEINFILSIYYIISPVEASSNLARYTGLCYGKRISEGLSLNDFYFKHRSNFLSEEVKRRIVLGNYLLSERYDSKYYAKACEILQNLIIPKFNKLFESCDFIITPTSFVKPFRLGLDFDDPVKMYYSDICTVIANLIGAPAISLPYSKDEEGLSIGMQIIGRSKKDFELLSFSKNVIRELGLNGI

SEQ ID NO: 47100 - protein, 398 aa, Borrelia burgdorferi
MKENDFIKFGSYLRKVRDSKNLTLEMVAEDIKISIKYLKALEESNIEIFPNEVLAVGFLRTYSEYLDIDSRLISTLFKDYKSRLNNSYIGIKSEDKISNLGFLSDNKVSEKKIFFFSLESLSIFKVFLGIVGVLLLFVFLYFREVEGYFKKFFNLSQDEKIISNIHEVSFDKKNFWNVSLKEGDFLSLTYSDDIAKYRASFIGDDLVIVDESKKSKNILNLGEFKEINLDDNIRVKIIYENYYYDKLKIAHVSLESFALNVKYVSETNIDNRFNILNWQFDVKGTEKLPSSNYLTLYSSQKLSNVDLKIDFLNDTFFRYADENNLYGKSLFASKGIPINLAFEKSLILFFSRLSDVNIILNDRDITPFLKEQGKEIFAVQFFWVKTPSGFDLKVSEVY

SEQ ID NO: 47101 - protein, 475 aa, Borrelia burgdorferi
MIKMSLNYTEINTLIKEIPFTNSLITKIIQPDYKSLVLEIYNKIDNKKFKILICLNPNTTRFHITKKNFKKNALKLRFSDFLKSKIQNGKIIKAFQMKNERIISLEILQKDMIILFIKLWPSSPNIIATNSNFKILDAYYRRPKIKETTGEIFLKAKEIHESNKMSDKKIMELKEEYNNTSYTSYSEFLENYYESLNDQIKKTNIKELLIEKYKKELIVLEKRIDSLKQQIKLLENIENEKEKGELILLNINKIQKGIKEINLLNYKEEKIKISLNQSLSPKENALQYFKAYKKGKNSFKTIQNQLKDNLDKFNLIQSKITMLKVENLIPEEEYNQEKTAIKEKEKTPKIGLHFTYCGFEILIGRNAKENDKLLRHCVKGNDYWLHTRDYPGAYVFIKNQKNKTPSLDVLLGAGNLCVFYTKLAKKSGKADLYYTQVKNLRRVKNKKLGLVIPKAEKNLHIKLDENLIKKIKNQT

SEQ ID NO: 47102 - protein, 477 aa, Borrelia burgdorferi
MISKLTKIVATISDLRCEPEHIKDLHDAGVNVIRLNTAHQSHEDTIKVIDNVRKISNKIALMIDTKGPEVRTANIENPIIVKTGDKVIISTSPINEPNNFQTNYDGFVKEVPQGSKVLIDDGELEMTVVAKLPDRLICEIKNDGQIKNKKSINTPGISLKLQSVTEKDKGFIELAAKYNVDFIAHSFVRHSKDVQDVQEILTASGNPDVKIISKIENQEGIDNIEEIAKASYGIMVARGDMGVEIPAEDVPIAQLKITQTCIKYGIPVITATQMLHTMIENPRPTRAEVSDIANAILNGTDAIMLSGETAYGKYPIEAVKMMTSIAKKVEKHRKMTLYKDELFYDKSITRNYIIKCAIDATKLMDIKAIIVDSLKGKTARIMATYRASVPLFITTNSERLARELALSYGVYSNLVDNNFKRTTEFVVTSLKMLKEQGVVNDKDTVIIISGNPNRNIEKGTEFMEINTVEDAIKGRNI

SEQ ID NO: 47103 - protein, 92 aa, Borrelia burgdorferi
MARKCEITGKKTMFGNNVPRKGLAKKKGGAGQHIGVKTKRTFKVNLINKKFFIPNLGRSVSIKVSANALRSISKIGLDAFLKKNCKKIENFL

SEQ ID NO: 47104 - protein, 243 aa, Borrelia burgdorferi
MKQIVLDENCLAGNFIIVKDAKIYHHLVNVRRLKKGDKLNILLKDKELRASEIVKIGSNFIKFTTNKIDKIEKNNFEISIFISSLKGRKIDLVLRQVVEIGVSEINIINADRSVSKIDINNASAKILRFSKIIDEALKQSGNKIVPKINFYNNFFYLPYSFCTTRYYVAHPSGMILSKNESFDNFGKIGIIIGPEGCFSESEIVFFKEKGFNFVRFNTPILRADTAIIYSLAYFKALLEDYNG

SEQ ID NO: 47105 - protein, 670 aa, Borrelia burgdorferi
MNKVNNYQNINSVIISKKEVGLRDLIKLKSIFNLIQIVKSEKALYSEYVKQNNIKFAIIYNYEKPIDFSINIANELKNANKIHSIIISKEKFDEEYLKLDHIEIIKDISELEYKQSLIHQKKLFCDNKNTTLDFFLNLSELIKEIVIITNTKNEIIYINEKGSKNLNLPMKTSGNIIKVTDIDIRDWEKLEKINLSYHTNSIPEFKNILITDCLLTLKNNKKLHVDIFISTIAQNNIDKLITIKEISNSNKIENYKYLEIIDSQDEIQNAKEIEKLLVNHMDIYKKKSIYLLNLDVSLTAEYEYKEDQEKLNAKILKIMYSKIMSLYSEYIFKLKHNNLIVIISTSGGEKRIISIAKKIKKTIALAFKKEDIIIFKFNIGIIEVNLKENLEFKIPKLMMATKISSEYKESNPTIYKEELPEAVILKNQNKIFQYILKAIKNDFFTLYYQKINPLKKNLKPKIEILTRLFDHMGKPIPNNQIFNLIDKYNLTVEVDTLVVKKALREYKSFVSKNGIHIFSINISPYSLKSQNFRIFLRDTLLKSQIPLQNICLEITETGILENFEIINKYFQELKSFGIKLALDDFGSGHTSLSYIKTLPIDLLKIDGSFIKAINSSEIDFVIIKSIKKIADTKNIKIIAEFVYNEEILKKIIELEIDYGQGFLWHKPEPI

SEQ ID NO: 47106 - protein, 363 aa, Borrelia burgdorferi
MSFYKVIGGVFMKISVIGAGAWGTAISKSLADKFDFNIFLWVFEEDVKNDINNDNVNTKYLKGIKLPKNLVASSDLFEVVTMSDYIFIATPSLFTVDILKKLDQFLHFLEIKPKLAILTKGFITFDGKTQTVIEAAERIMKGYKDEITYIVGPSHAEEVGLGVITGLVAASNNRENAYLFINLFSKTPISLFYSNDVFGVQIAAALKNVFAIAFGILDAYKLNYPNLIGNNTESFLFSISLNNIKDIAMELGGRNIETFLFLSGSGDLDVTCRSMFGRNRRFGNEIVSKNILESFLSIDDLISNIEKIGYLPEGVLAAKSIFFFFKQLNRDLNPNSLLSVIYKILNKELEPKSVIEYMRDVRQ

SEQ ID NO: 47107 - protein, 405 aa, Borrelia burgdorferi
MNLALSLLHKRGFLKQCTSLKVLSDLMDREKIVFYAGVDATSSSLHIGHLIPFLAMMHLRQHGHMPIVLIGDSTAKIGDPSGKSEMRKILSSEEIGNNALLIKNQLQRITKFTSECFIHNSNWLDNLNYIEFLRDVGMHFSVNRMLSFETYKRRMDFGLSFIEFNYQLLQSYDYYMLNKIKNCRLQIGGDDQWGNIISGVDLIRKKNGSETFGLTFPLITRSDGKKMGKSEKGAVYLDSNLFSIYDFYQYFRNTSDSDVKTFLYLFTFLEEDEIELISNFKGNSLNKAKEILAFEITKIVHGEAEALKVQEASFAAFRGSGDRSNIPFFKFSFSSLKEEILLVDLMLDSKIVPSKSEGRRLIDSGGVYINGKRVESQSHLLTKKDFNNNEVELRVGKKKFLRIVI

SEQ ID NO: 47108 - protein, 445 aa, Borrelia burgdorferi
MVRMEDIISLAKRKGFVFQSSEVYGGLSGAWDYGPLGVELKKNIKKEWWKSMVYLHENIVGLDSAIFMRPEIWRASGHVDGFSDSMVDCKDCKSRFRADFIDLSKNCPNCKVGNNFTSPRSFNLMFKTHIGVVEDSSSEVYLRPETAQGIFVNFRNVLDSSRLKIPFGIAQVGKAFRNEIVTKNFIFRTCEFEQMEMQFFVHPKQIDEWFCYWQQNRMNFFIETLKISPDRLRFKAHDSTQLAHYAKAAFDIEYEFPFGFQEVEGIHNRGNYDLTQHAKFSNKPKVFEYHDLLTKEKYVPYVIETSAGLTRSVLMTLCDAYSEEELSDGDKRIVLRLHPKLAPYKIAIFPLVKKVELTEIARRIYMELCDDFHIFYDDSGTIGKRYRRQDEIGTPYCVTIDYNTIEDETVTVRERNSMTQKRIFINDLYSYIKTEILNYKEDFNK

SEQ ID NO: 47109 - protein, 490 aa, Borrelia burgdorferi
MSTRVRYAPSPTGLQHIGGIRTALFNYFFAKSCGGKFLLRIEDTDQSRYSPEAENDLYSSLKWLGISFDEGPVVGGDYAPYVQSQRSAIYKQYAKYLIESGHAYYCYCSPERLERIKKIQNINKMPPGYDRHCRNLSNEEVENALIKKIKPVVRFKIPLEGDTSFDDILLGRITWANKDISPDPVILKSDGLPTYHLANVVDDYLMKITHVLRAQEWVSSGPLHVLLYKAFKWKPPIYCHLPMVMGNDGQKLSKRHGSTALRQFIEDGYLPEAIINYVTLLGWSYDDKREFFSKNDLEQFFSIEKINKSPAIFDYHKLDFFNSYYIREKKDEDLFNLLLPFFQKKGYVSKPSTLEENQKLKLLIPLIKSRIKKLSDALNMTKFFYEDIKSWNLDEFLSRKKTAKEVCSILELIKPILEGFEKRSSEENDKIFYDFAESNGFKLGEILLPIRIAALGSKVSPPLFDSLKLIGKSKVFERIKLAQEFLRINE

SEQ ID NO: 47110 - protein, 237 aa, Borrelia burgdorferi
MILIISAMQEESEEINKILDNKEEIVLNDYLENKKIYKGKILGKDVISLTTGIGKVNAATWSSQIISKYKITHIINSGSSGGIKENSNLKILDIIVSSETAYYDFDLTKFGHKIGQVPNLPQKFKADEELLKKVANIVDNKLLNIDIHIGLILTGDQFVDNEKNLETIKKNFKDALAVDMEGAAIAQVAHIFKIPFIIIRSISDLPNNKDNHIDFNKFLKTSSINSSKMTKELIRLI

SEQ ID NO: 47111 - protein, 392 aa, Borrelia burgdorferi
MNKIIAANQTLTSEAVSEGHPDKIADQISDAILDEILKEDKNAKVACEVIIAQNLVVIAGEINSPVKKNIDIKEVAKNIIKDIGYTNIDYGLDYKTITVIDAIGNQSRDIINAIEKKGSNALGAGDQGIIFGYACDETKNFLPAPYELANSILKKASNLRKSGAIKWLRPDSKSQVTIEYDKNRNPVKIKNIIVSHQHHPNISQKLIQQTIIEEIIKPTVQDKSMLDENTAYCINPSGNFVIGGPTGDTGLTGRKIIADSYGGFARHGGGAYSGKDATKVDRSAAYMARYIAKNMVAAGISKEFELQLAYAIGIENPISIQITGGINDPKYANKILNFIVNNFDLTPNGIIEKLKLKQPIYLKTCTYGHFGKNEFEWEKLDFVKKIQTALKK

SEQ ID NO: 47112 - protein, 454 aa, Borrelia burgdorferi
  MISC_FEATURE (26)..(26): X=any amino acid
  MISC_FEATURE (29)..(29): X=any amino acid
MIDIDELRIFLKEKSYSKIKEKFLKXDSXDIAEALKRLNGTELILLYRFLPKKIAVETFSNFDQSTKNKLANSFTNKEISEMIDELNLDDVIDLLEEVPANVVQRFLASSTEENREIINKFLSYSDDSAGSIVTIEYVELKEDFTVGKALDYIRRVAKTKEDIYTYYITDDEKHLKGVIKIEDLILAKDDVILSSIMRSSGFYIVGVNDEKEDVALLFQKHDITSVPVVDNEGRMIGVIIIDDILEVIQSVNTEDFQMIAAVKPLDTSYLDTSILVMTKNRIIWLLVLMVSSTFTATIISNYQNLMLSLVVLANFIPLLMDTSGNAGSQASALIIRELALGTVKVKDFFKVFLKEICVSILVGAILASVNFLRIVFFVAPHHSDKLKIAFVVSSCLMVSLTVAKILGGLLPIVAKLLKLDPALMAGPLITTIADAITLIAYFNIAKWVLVSYAV

SEQ ID NO: 47113 - protein, 157 aa, Borrelia burgdorferi
MSRKNKKIKKKVFVDTRYNSRIVAKFANRMMYDGKKSISESILYSSIDLLADKLEESDKMAVFYKALDNIKPLVEVRSRRVGGATYQVPVEVREERREALAMKWIIFAARKSSGRSMKEKLSNELLNAYNSTGAAFKKKEDTHRMAEANKAFTHYRW

SEQ ID NO: 47114 - protein, 124 aa, Borrelia burgdorferi
MPTINQLIRKPRKSQTEKTASPALQNCPQRRGICTRVMTVTPKKPNSALRKVARVRLSNGFEVTAYIPGIGHNLQEHSVVLIRGGRVKDLPGVRYHIVRGAKDTLGVNNRKKGRSKYGTKKPKA

SEQ ID NO: 47115 - protein, 1377 aa, Borrelia burgdorferi
MKEIKDFERIKIKIASPDQIRNWSYGEVKKSETINYRTLRPEKDGLFCERIFGTTKEWECYCGKFKSVRYKGIICDRCNVEVTHFKVRRERMGHIELAAPVAHIWYYKYIPSRIGLLLDITASSLNSILYYEKYVVIEPGDTDLKKMQLLNEDEYIEARERYGMSFNASMGAEAIKTLLENLDLDELSSKLRIQMIDKDDKTDKKLLRRLEIIENFKISGNKPEWMIMEVLPVIPPEIRPMVQLDGGRFATSDLNDLYRRVINRNNRLRKLLLLNAPEIIVRNEKRMLQESVDSLFDNSHKRKVVKGSSSRPLKSLSDALKGKQGRFRQNLLGKRVDYSGRSVIVVGPELKLHQCGLPAKMALELFKPFVIRRLIESEAVFNIKRAKNLIEQEVDEVWQILDLVIKEHPILLNRAPTLHRLGIQAFEPVLVEGKAIKLHPLVCHAYNADFDGDQMAVHVPLTPAAQAESWALMLSTNNLLNPANGHPIVFPSQDIVLGLYYLTMEKKNVVGEGKKFLNFNNVILAINNRSLDYNASIYVKIHGEYKKTTAGRVIFNEALPKGIEFVNKTLSDLELQILISKVYVVHGSSIVIEMLDIIKELGFRYATKFGCTISMSDIIVPDEKRTYVERANKEIAKIQNDYAKGVITGEERYNNVVSVWLKTNEELTNKMMEILKKDRDGFNVIYMMADSGARGSRNQIRQLAGMRGLMAKTSGDIIELPIISNFKEGLSVIEFFISTNGARKGLADTALKTADAGYLTRRLVDIAQDVVVRIEDCGTINGIKVETVKNGEEILESLKEKAVGSYSIERIKNPITGEIVLDANEEISEAKIELLEKIGIEKLVIRSVLTCEAEHGVCQKCYGRDFSKNKPVNIGEAVGIIAAQSIGQPGTQLTMRTFHIGGVAQAGSEDDKISLKNAFILNGIEGFNVRVDNGILFTRKGTLKIINVFYEEKIKNIKEIKVLDSQRVIKGIPLFIDKKGSEILSSYIGYVKLRDDNFFIVSEEQEVSLKAGTKLEIEVGDYVESGKVIGTFDPFAEPIIAEVKGKIKFKDIILGTTLKEEINTETGNVEKRITDNVFESLDPRIFIIDSSGMEVASYVLPGDAYLQVEDGQSINIGDIIAKLSKGSEKTQDITGGLPRVNDLFETRIPKNLTEMAKVSGIVQFKSIQKGKRLINILDEYGVEHKHYIPAGKHLLVRDGDVVKAGDMLCDGRINPHDVLEILGGISLQEFLLAEIQDVYRKQGVSINDKHIGVIIKQMMKKVKIVAVGDTNFVYGQKVDKHTFYEQNRKVIEQGGEPAIASPILIGVTKTSLNIDSFISAASFQETTKVLTDASIAGKIDDLRGLKENVVIGHLIPTGTGMGLYKKIKVSENIDSEV

SEQ ID NO: 47116 - protein, 1155 aa, Borrelia burgdorferi
MIKRVHLGQGRADEILDLPNLIEIQLNSYEKFLQLDKLKSKKPLLNEGLESVFRNIFPIKSGNGDVALEYERYYIENDALNFTEKECKRKGQSYEAVLKVRLNLQFLTTGEIRQKDVYMGTIPLMTERGTFIINGAERVVVSQIHRSPGVVFYKEKDLYSARIIPYRGSWLEFEIDSKKDYLYVKIDRKKRILITLFLRALGFDTREKIIETFYNIKKIKVEDGTKRDLPGQYLAKSINIRENMYYRAGDKITLQDVEDFLQNGVNEIELVDFDGYNDISGKRFVSSNVILNCLEKEDAFFALKDGSKELPKESVMLAVYGSLFPGEPISIDNAENDLKTIFFSERRYDLGRVGRYKLSKKFGFDDLTTSVLTMDDIVNTISHLLRIYEGHDILDDIDHLGNRRVRSVGELLTNIYKGAMSRVEKIAKDRMSNKEVFNLKPQELISVKPIVSAVKEFFATSQLSQFMDQVNPLAELTHKRRLNALGPGGLSRDRAGFEVRDVHYTHYGRMCPIETPEGPNIGLIVSLATYSRVNDYGFLETPYRKVVNGVVTDQLEYLSAIDEEKKCIAQANAAFNSNGKYLEDLVSVRISGDYTTTSPTNIDYMDVSPRQLISVSSALIPFLEHNDANRALMGSNMQRQAVPLLFPKPPIVGTGMESVVAKDSGVVVKAKRSGEVILATSSKIVVKPFEAENAKDLDEYHIVKYERTNQDTCFNQSVLVKEGQKVERGEIIADGPATRYGELALGNNLLLGVIPWNGFNYEDAILISDRIVKEDLYTSIHIKEFSIEVRETKLGPEKVTGDIPNVSEKILNKLDENGIIRIGTYVKPGDILVGKVTPKSEGDITPEFRLLTSIFGEKAKDVKNNSLKVPHGTEGTVIDVQRITKEDVGNLSPGVEEILKVYVAKKRKLKEGDKMAGRHGNKGVVAKILPVEDMPYLADGTPLDICLNPLGVPSRMNIGQLMESQLGLAGKYLGESYNVPVFESATNEQIQEKLKTAGFNPTSKEILYDGYTGEPFENEVMVGVIYMLKLHHLVDDKMHARSTGPYSLVSQQPLGGKAQFGGQRLGEMEVWALEAYGAAHTLQELLTVKSDDMSGRVKIYENIVKGVPTNVSGIPESFNVLMQELRGLGLDLSIYDDAGNQVPLTEKEEELINKS

SEQ ID NO: 47117 - protein, 124 aa, Borrelia burgdorferi
MALNKEDILTWLEGAKTMEVVDLVTAIEEKFGVTAAVAAGVGGAVSVGSADSEEQTEFDVILMSFGDSKINVIKEVRAITGLGLGEAKALVEAAPKAIKEGLSKSDAEELKKKLEAVGAKVEVK

SEQ ID NO: 47118 - protein, 168 aa, Borrelia burgdorferi
MFGGNIMSAKINAKKLEMFDLLKQFIDSKQNLFFLDYRGLNVAQLTELRNKIEGEHGSLKVVKNNIMKMVLKEKNINVVDSCLVGPTVVVTALEEANVIAKIFYDFVKSSTLKVKGGFVLGEFYDEAKVQAYSKLPTKKESISLFASVLKAPVSKLARTLKALADVKN

SEQ ID NO: 47119 - protein, 226 aa, Borrelia burgdorferi
MSKKGKKYIEAFSKVDKNKFYNIEDAILLLKEIKFAKFDETIDISINLNLKKNHTVRDTIVLPNQFMKPKRILVFAKGDRADEARAFGATYVGDDDLINKIKSGWDEFDVVVATPDMMKDVGRLGPILGKRGLMPNPKTQTVTNNLKDAINSLKKGRTEFRANKNGVISFSFGKSSMDNEKIKENYEEFVKEVVKKRPSDLKGAFIDSIYISSTMGPSIKVNFVWR

SEQ ID NO: 47120 - protein, 143 aa, Borrelia burgdorferi
MAKKKAISWIKLQVPAAQAAPGAKIGQALGPHGVSGPQFVKEFNERTAKMDPGIVVPVIITVYSDKSFSFIVKTPPASILIKKAIGIESGSKKSNTDKVGTISKEKLMEIARIKMSDLNAKSESAAFKIIAGSARSMGVEVEK

SEQ ID NO: 47121 - protein, 184 aa, Borrelia burgdorferi
MSRAWYVVQTYSQYEKKIEQDIRLLINEGVFGGVVLDVKAPIEKVEEIRNGKKRIRERKIWPGYILIELDLPEVGWKDIIANIIKVQGVINFVGVSKGQRPIPINDEEVKSVFMLTGEIKANKSIFMLYDFEEGERVRIKGGPFDSFEGLISSIDYERKKLKVAVQIFGRSTPVEVDFQHIEKI

SEQ ID NO: 47122 - protein, 59 aa, Borrelia burgdorferi
MGKKKGKGAVELISLICEETGIRNYTTTKNRRNKQEKLELMKYCPKLRKHTLHKEGKIK

SEQ ID NO: 47123 - protein, 488 aa, Borrelia burgdorferi
MSDFIASKEDDYSKWYLDIVQKAKLADYSPVKGCMVIMPYGYSIWSKIQSILDKKFKETGHENAYFPMLIPYSFLEREKDHIDGFSPEFAIIKDAGGESLAEPLVLRPTSETIIWNMYSKWIKSYRDLPLKINQWANVVRWEKRTRPFLRTTEFLWQEGHTAHATEEEALEETLLILDVYKRFIEDYLAIPVFCGKKSEKEKFAGAVSTYSIEALMQDKKALQAATSHYLGLNFAKAFDVKFQDKDGKMRHVFASSWGVSTRLIGALIMVHSDEKGLVLPPRIAPIEIIVIPIFKKEDEINKKILDYSDCVVDALKKAEFRVEIDKDVRSSPGFRFSSAEFKGIPIRLEVGINDVLLNSVTISRRDKDRKFKYQISLDSLISKVKVELDLMQKDLFQRALNFRILNTKEIFRSSKDSYETFKAYVNDYSGFVLSCWCGSLNCENIIKNETKATIRCIPDDFKARDLTGMTCIYCSSKAKYFVLFAKSY

SEQ ID NO: 47124 - protein, 372 aa, Borrelia burgdorferi
MNNEDNIFLMKNNIKEYDWGGINFIPNLLGDKIDGKPKAEMWLGAHKTFSSKILYKNEYVLLSDFLEDHKELLGCNDEFPFLLKVLSANKPLSIQIHPSKDIALKGYESENNKGIDINDPKRTYKDKNPKIELIYALSDFYALKGFLPLDEIKKIYEILELNFDFQSHKDFVKTIFDLQMYELEKIIEKILKNLDLIDNFRGYWFNEIYNIYGIDVGLLVFLGMNILKLKPGEVVYTNSQEVHAYLKGDCIELMTNSDNVIRAGLTTKYIDKDEMLRVGQFEEGKLSFLNPDFQDNFSVFRLPNTNLKLIQKKINENICINRNSAMVLLVLNGCVSINKSLNLKKGESIFIGKKAENLFIDGDGEAFIAGFN

SEQ ID NO: 47125 - protein, 625 aa, Borrelia burgdorferi
MFFNFLKKDLVFVLPEVNSKEDVIDFLIEKINDKGYIDNKKEFLQGILDREKIGDTSWENGVAIPHFIGDVVKTSFISLLYIKGSGVKWSEENPPVNLIFLICMSKKQQGNEHLKAIAFIAKLFEDDAFQNALRGFVTTDDIYYYIENVQRKAKEEVFGATKAEKIVAVTACPVGVAHTYIAAKKIENEAKKQGYSIRVETQGSIGIENALTEEEIKNASVVILAVDKDIDEKRFEGKRVYKVSTVKAINNTENIIKESFNAPVFKSKDSGTNSDTKASVATGKGSFYKYLMSGVSPMIPVVASGGILIALSIAFVGIGPDGPNFAEHPFYKQIADIGSIAFGMMLPVLAGFIAMAIADKPGLTPGLVGGVMSGNVKAGFLGAIFAGFLAGYVARFLARRSVPEWLRPVMPIFVIPLISTIIVGFFMLYFGVYIGKFMGVLESGLKSLQSNSETFGVLGKIFLGLVLGSMITVDMGGPFNKVAFLFGVGLIPQVPEIMGMVAAAIPVPPMAMGLATFLAPKLFENEEKESGKIAFLISFIGISEGAIPFAASDPGRVIPSIVVGGAVSSIIAAFLGVANHAPHGGPIVLPVIDNKFGFIIAIAVGVAVATALVIFLKSLKLKESE

SEQ ID NO: 47126 - protein, 259 aa, Borrelia burgdorferi
MKSIFAKLNASINLFLFIIFILATIVILTFSYKIKYNENYQNYILEIYNNNFIILVNKLTIFIAGIIGSLWSYINYKRTNNIQFIFFYCFISSYTLDPILISEDFFLKNNLNSSYYLFTKFILFVNTFSLLNLFFLSLYICDFKIKSIHYTIYIILIFACIYSYTMPINSYENSQNHGILKIENTKFYIDAFLLLILTNFIVAFLRKKSFDYFFLFVSMLLILSGIYLNLLKMPYAFLPISIGIPIYLKKSGKIFFYWL

SEQ ID NO: 47127 - protein, 211 aa, Borrelia burgdorferi
MGLVFLGPPGSGKGTISKIISNEFKYQHISTGDLFRENILNSTALGQEIKKIVERGELVPDLITIKIVEDKIKAIKKNKDFILDGFPRNICQAEALDKFLPNVKIINFLIDEELVIKRLSGRRICKSCNNIFNIYTLTTKKNGICDVCGGDLYQREDDKEECLKTRLKEYKLQTKPLIEFYSKCSRLNNVDASVKIDEIKKKIIKIMLKKN

SEQ ID NO: 47128 - protein, 1494 aa, Borrelia burgdorferi
MKKANFLSTNFLILLLVCFVNVNLFSKDIFKFKLVDQFFPFYYKNNKGEYEGLIFSILDKWAKDNNADIMVEHIDNLNESEIEDEAIYLGLTYNVKLNDFFYFKSELARSISILFFKNSNKKYKNTHSTFLSNFNIGVIKNTIYEDILRLKNVNTIFLADNSQELVLALKNDKVDYIYGDCKTLHYIANNFLSEDLVIFTGDVFYSIKNRVAISRNAPEIVKNLNLDLFSYLMKMPEELVFSFLDSNAKGSFVDVGLYNDYPPLSFINSQGKLSGILVDLWNLLSRQHIFKPIFKGFSKEDIKKSLDGKSVGIFGGIISNDSVLENVNYVVSKPIYPLNFKFYSKDLSNDAGPINSQFIDFNFNNIQLNKNKDIVNNFIDIVNNSYGFIENSITTKYLLKLNGYNGRLKSYDSIFNKNRFLVLAIDNRIYKVIKYILNSIFDDISFESLLQIDKNWLDKEEINSSRINSYKIMNKVKFNIEEKIWLSKNNKLNLAVKNWYPIDYVEANNYKGINQFLLDKIRMFSGLRFNIIKVHSSLDLKKLIKSGKIDMLNTNATDSNLDNVFNIKLNSRIPLYIFSNKKRVLPSRSLEKFAILDFLYSKNLASNIKSKLILVSSFNEALLLLYKGKVDGIISDEYTAAAVFEELNIDDVEKIPTFRDLAFDLSLAIYNQDYILKEIIQKVVMRSNVDSQMYLNDWKFDIYYKSRSIRFKNFKFLVITFIIFYFTFLGFVIIFMFRLSFEQKRRYSFVMNEKKIAEAANAAKTIFIANVSHDIRTPINGIMAATELLDTTILTDVQKDYVRMINYSSDSLLSLIDDILYLSKIDVNELYVESQEIDLESEMEMVLKAFQSQCAKKNIDLFSYSKSIFNNYIKGDIVKIKQVLINLIGNAFKFTDDGVIVLNYEEVCRTRTDGNRVLVTVEFKVIDTGKGIEKENFSKIFEIFKQEDDSSSRVHEGAGLGLSISRELIRLMGGLGIAVDSKVGEGTTFSFMLPFLLGSELKSKKLSINRFQSVNGDNKVLNVLLSQKSIKIFEHCSILLGCSSNVRYVASFEDAYKVFKKYPSYNFVYINVNNDNIQEGIRLANNIERLNSDVQIIFLFYYLDNKALKNLKYGYVKKPLMGLGICSILYKKEFNPEMDFEDLVPIDSALRIKEPINVLIAEDNQVNQKVLKDILVVIGINENFIDVVDDGVKALKSLKDKKYTISFIDIRMPRYDGFSVAKEIRKFEKAKNLKPCVLVAVTAHALQEYKDKCLASGMNDYISKPIHISSIKTILKKYLQFEVDDIGENENLNQLVKFPNLDVNRALKELNLSYVSYSELCRGLVDFISINIIDLEKAFDEEDLSLIKDISHSISGALSNMRSELYKDFQKIETSKDSISELKKMYSFVKDDLFQLISDIKENILFESEIVSENKLYFKNNDQFLNLLNKLLIGIKTRKPREYKEILESINKYVLDDNIQVLFSDLRRNLRLYRFAESSKILEEIIEMLNNKRY

SEQ ID NO: 47129 - protein, 263 aa, Borrelia burgdorferi
MAYVLFLYLVSKRFWIFIIKKNVFNIFYLFLVLEELKGPVLYIVGTPIGNLEDITYRAIDVLKSVNVIFAEDTRVTSKLLSRYKINKKMISCNAVTENKKISLLLDYLAKGNSVAFVSDAGTPGLSDPGSLLVAAAFREGYKVCPIPGVSSFNTIVSVNPFRDKSVFFEGFLPNKGLKRFKRIAELYKRGDAFVLLESGHRILKLLVEISSVSLDAKVLIGREMTKIYEEYQIGKPLELKKYFESSKDKVKGEFTILVSRSRS

SEQ ID NO: 47130 - protein, 250 aa, Borrelia burgdorferi
MKIISVINQKGGVGKTTSAINISYSMTLLNKKILLIDIDSQGNSTSGTNTSKHIAEKSSYELINKKIKVKPLNHFGLDIIPSSIKLALLEKELINELSRENFLKNALTLYEKDKYDFIIIDCPPTLSILTINALIASNYLLIPIETEFFAFEGINQLIDTITTVKQINKNLEIAGVFINKYDIRNKSKEKYVSSLKKVFKEKLLNTKIRKNITISKSQEAKMPVYEYDKESNAAKDFLELSKEIINKIKE

SEQ ID NO: 47131 - protein, 810 aa, Borrelia burgdorferi
MAVGENKEQILNVRIEDEIKTSYLNYAMSVIVSRALPDVRDGLKPVHRRILYSMYEMGLRSDKAFKKAGRIVGDVLGKYHPHGDQSIYDALVRLAQDFSLRYPVIRGQGNFGSIDGDPPAAMRYTEAKMEKITEYIVKDIDKETVNFKSNYDDSLSEPEIMPSSFPFLLVNGSSGIAVGMATNMAPHNLREICDAIVYMLDNENASIFDLLKIVKGPDFPTFGEIVYNDNLIKAYKTGKGSVVIRARYHIEERAEDRNAIIVTEIPYTVNKSALLMKVALLAKEEKLEGLLDIRDESDREGIRIVLEVKRGFDPHVIMNLLYEYTEFKKHFSINNLALVNGIPKQLNLEELLFEFIEHRKNIIERRIEFDLRKAKEKAHVLEGLNIALNNIDEVIKIIKSSKLAKDARERLVSNFGLSEIQANSVLDMRLQKLTALEIFKLEEELNILLSLIKDYEDILLNPVRIINIIREETINLGLKFGDERRTKIIYDEEVLKTSMSDLMQKENIVVMLTKKGFLKRLSQNEYKLQGTGGKGLSSFDLNDGDEIVIALCVNTHDYLFMISNEGKLYLINAYEIKDSSRASKGQNISELINLGDQEEILTIKNSKDLTDDAYLLLTTASGKIARFESTDFKAVKSRGVIVIKLNDKDFVTSAEIVFKDEKVICLSKKGSAFIFNSRDVRLTNRGTQGVCGMKLKEGDLFVKVLSVKENPYLLIVSENGYGKRLNMSKISELKRGATGYTSYKKSDKKAGSVVDAIAVSEDDEILLVSKRSKALRTVAGKVSEQGKDARGIQVLFLDNDSLVSVSKFIK

SEQ ID NO: 47132 - protein, 639 aa, Borrelia burgdorferi
MNGRFMNYVASNIQVLKGLEAVRKRPGMYIGSVSINGLHHLVYEVVDNSIDEALAGFCDRIDVIINLDNTITVIDNGRGIPTDIHEEEGISALELVLTKLHSGGKFNKGTYKVSGGLHGVGISVVNALSSFLEVYVNRDGKIFRQTFSKGIPTSKVEVVGESSVTGTKVTFLADSEIFETLDYNFDVLEKRLKELAFLNDKIYISIEDKRIGKEKSSKFYFEGGIKSFVDYLTNDSKAFQSEPYYIDGFINDVIVNVGLKWTESYSDNILSFVNNINTREGGTHVMGFRSGLTKAMNEAFKNSKISKKDIPNLTGDDFKEGLTAVISVKVPEPQFEGQTKSKLGNSEIRKIVEVVVYEHLLEIINLNPLEIDTILGKAIKAARAREAARKARESERKKNAFESLALPGKLADCTSKNPLEREIYIVEGDSAGGSAKMGRNRFFQAILPLWGKMLNVEKTREDKVITNDKLIPIIASLGAGVGKTFDITKLRYHKIIIMADADVDGSHIRTLLLAFFFRYMRDLIENGYIYIAMPPLYKIKYDNRIYYFYEEKEKEKFLDSIETKNRNSISLQRYKGLGEMNPTQLWETTMDPARRKMRLMNIDDAIEAEKIFVTLMGDLVEPRKEFIEQNALNVINLDV

SEQ ID NO: 47133 - protein, 486 aa, Borrelia burgdorferi
MEKSKNIWSLILTEIKKELSEEEFYVWFENLCFLESIGDNIKISTPNLFHKNQIEKRFTKKIKEILIKNGYNNIVIVFTNQPPKTHSNKQETKNPALNETFSKFDKLKEKTTSKEAIQNIQDRIKMYIKKEEEEPTNFKNPFLKKRYTFENFIIGPNNKLAYNASLSISKNPGKKYNPCLIYGGVGLGKTHLLQSIGNKTEELHHNLKILYVTAENFLNEFVESIKTHETKKFKKKYRYLDMLLIDDIHDLQKKEGIQEELFHTFNALYEDNKQLVFTCDRSPSELTNFTDRLKSRFTRGLNVDISKPNFELRAAIVEKKAEEDGINVPKNILNLVAQKVTTNVRDLEAAVTKLKAYIDLDNIEIDIEIVEKIIKEIIIYEKETTNEPNNKINIENIKKILLRELKITHKDIEGHSKKPEITKARHIYAYLLRNFTELSTVEIGKIIGGKTHSTVLYSINKIDRDRNNDKEINNLITELMNKIKKN

SEQ ID NO: 47134 - protein, 385 aa, Borrelia burgdorferi
MLHNTFFICETNQIMNEIEKAKGIILNRNMNDIWSALLIEVKKSNLIIKSTDRNIFFESTISIVSETDFKVLINASNFYDAVKAFSFYKKIKIVFNENNSKLEIMGELNDEKEEYEDHLKEPTFSYEEIENYNYDMVNEDYTFGIEIKQKSFKKVINRIAFSAHLDESKNVLNGVYFSKDEDSKLLLVSTNGHRMSICKTEVIVEEDVNFIVPVKIFNFLKHLMSGEGMVKIKFSDKKFYVEFDNYKIACSLINGNYPDYKSIIPKEQKNKSLVSLGILKDRLARVNLYVDKSRKLVLTFSELQLKLLGEDLITGRKGEFFIKDPNYLYDGADEVMAINISYFVEAISVFETSKIEIQFNSGNVLKLSEPENFNFTHLIMPMSLG

SEQ ID NO: 47135 - protein, 51 aa, Borrelia burgdorferi
MKRTYQPSRVKRNRKFGFRARMKTKGGRLILSRRRAKGRMKLTVSDEKKKY

SEQ ID NO: 47136 - protein, 119 aa, Borrelia burgdorferi
MRKRNISLKSKIEIQKIFKEGKLIRFSNLNLKMFYKSNHLVYSRILVTFSKGFRGSVKRNRIRRLFKEAFRKRLELLEGIALDIIFVVSYGKLTLTYFSIESLMKGLVLRCERGIGESK

SEQ ID NO: 47137 - protein, 544 aa, Borrelia burgdorferi
MNQSRRILRTVYLSLFLIGLFMLINDIFSSNILSSKSSDKEVQFDLNKSFDDNEMSSVKSNSFNLINKSQDIIVETGIYVATFSTFKGNLVSLKLKNHLNLEKNPTDLINIDRKNETFFDISFDYFVDDLFLYKKIDDFNHEFKAYFKNNGKTYEYVKKYTFSKKDEYLMQFKVTVNGLEDYNLFDFDSYKIIFSSEIERLSDKAKLQYNNYLSQIIYYDNKLKYGKDGLRINNPRWIGSSTKYFGVLVSKENMEVEFKKERGTLKSFIINNVRNKKNISDEFFIYAGPKDNRYLDVFDKRDDNTFGLFDIFFGMSVEKSFWYLIQVPMQMVMQVFYDVIPNWGLSIIFLTIVVRILIFPLTFKGFRATAELSKLQPKMKELQAKFKHDPKKLNEEMGRLYKEEGVNPLGGCLPVILQLPIFFALYSLVNNLFLLRGASFIPGWIDDLSIGDSVYHFGYKLYFVSWTDIRILPFIMMFTQLGSTIVSSNMDLKNLGAQQKFLYFGMPIMFFFILYNMPSGLLIYWITTNIFTILQQYYIKMHLS

SEQ ID NO: 47138 - protein, 359 aa, Borrelia burgdorferi
MGVLDKIKPGVVYGKELHFLYEICKKEGFAIPSINCIGTNSINAVLEAAKEINSPIMIQFSNSGSAFISGKGLKMEKPQGVSIVGAISGAMHVHLMAEHYGVPVVLHTDHCAKNLLPWVEGLLEYGEKYYSQHKKPLFSSHMLDLSEEPIKENIEISKKFLERMAKIEMFLEIELGITGGEEDGVDNSDRALHELFSTPEDIYYGYSELLKVSPNFQIAAAFGNVHGVYKPGNVKLTPKVLKDGQDYVISKTGVNMAKPVSYVFHGGSGSTIDEINEALSYGVVKMNIDTDTQWAAWEGVLNYYKKNESRLQGQLGDGKDIDIPNKKFYDPRVWLREAEVSMKDRVKIACKNLNNINRN

SEQ ID NO: 47139 - protein, 506 aa, Borrelia burgdorferi
MINANMKTGHFEILAKNIEIISKCNELPFMIEDDNNASENSKLEYRYLDLRRDSLKNKIILRCQATHLIRNFLIKRKFLELETPTFVKSTPEGARDFVIPSRIHKGSFYALPQSPQLYKQLIMIAGFDKYFQIARCYRDEDSRGDRQPEFTQLDLEMSFVKKENIFKLIENMLFLIFKNCININLPKKFKKITYKKAMNKYGSDKPDTRFELELQDISRNLKNSEFNIFKDTLKNKGSIKILIVKDKADKFSRAKINNLEEIAKLYKTQGLYFTKIENNKFSGGIAKFLKTEEQELIKTYSLENNDIIFFTANNNWETACKAMGQIRIKIANDLGLIDENKFEFLWVYDFPLFEYDENTKTYSPAHHMFSLPKKQYIANLEKNPKKTIGEIYDLVLNGVELGSGSIRIHNKELQQRIFKIIGFQKEKSEDRFGFFLKALEYGAPNHGGIAIGIDRLIMLMTKSTSIKDVILFPKNSFAASPLDNSPSKISNEQLKELGINIVDGDN

SEQ ID NO: 47140 - protein, 701 aa, Borrelia burgdorferi
MNKKIFYITILLHLPNLLFSYSTKYDIEVKMSAFVMSLAIIVISSISIGNLVAKIGIPKVIGQITAGIILSPNAFGKIQIPLLFPLGITQIGENYLINEKIFAISTIASIILLFTAGLETDLKLFIKFLPRGGIIGITEVVGTFTSFVLMASIIFNVPLISPTSLFIGIIGTPTSAGIAASILSAKKKMSTSEGVTIISTSIIDDVLSMLMLTSVITISRSISDLDIASSIKAIVQNIVIWLCLTFSLIYISETLSRLLKKLNSVTLATVITLSLALTIASIFQNLGMSFVVGAYVFGLAMSKTDIVYVIQDKLTIFERFFIPIFFTSIGLMSDINEILSKEVLILGLAISAIAIITKSIFCFIPALFLGFNKLGALKIATGMVPRGEVSLIMANVALSSGFISQKIFGIIIIMVFLPTIIATPIINFLFKINKSGLKKELPIDQNTHICVSFEYDNLAKILIWDFKNELRKEGFFTQQIKNDSSQYINARKNNISFSIKREGSKITFECPNNHLIIIQDLFRETILNLEKITKEVETVSLRAKKLDYSINYDKILSNINLNKRIKKENIILELKSSNKADVIRELLSVINIEIDKERIFQDLMEREKLITTALKEGFAIPHLKTNLISKIHIAIGISHEGIDFNALDKNLSHVFILILCPAKDYVSYPRILASVVGKVDLYKKEILNAKTDKEIYNIIVS

SEQ ID NO: 47141 - protein, 280 aa, Borrelia burgdorferi
MFKEFFIFQDYFNYIIEGVVGYGLKVSIAIVLWYFLKLIVSKMGKILFKTLEKSRLEEKLEVTVFNFLKSFFKILTDFVIVLIILPYLGVPTTSIIAVFGSLGLAIGLAAQNILSNFVSGFIVLNSKFFKCGDHIQCGDVEGLVADVQIFFTTLETFNKEIIKIPNSKLTSNFVVNFSSCTRRRVVFSFQVPYDTNIGLLKDKIEDLMIFNNKKFNVELCAPTLIVKKYTPYYIVLQVRFFVNTEVFWDFQYFVGESIQNVLLDMKIKVPICFVPFDKLY

SEQ ID NO: 47142 - protein, 383 aa, Borrelia burgdorferi
MKVAIFTDTYIPEKNGVATSIKQIKEGFEKNGYEVYIFCPKSKKSLNEKNVYRCSSIQINKKLDAVIAFPNKRKISKIIQSYKPDIIHTHSEFSMGKIGKQIALKHNIPIVHTSHTMWDYYLHYLGIFKYFIKPDKMMRKHYNKIKHFIYPSSKAKERYFQLSNNSSNYKIIPNGVDRKLFIKTLSKEKKDEILKKHNIKQTDKIIIFVGRINKEKNINLLVTHLKDLLMQNNNYKLILIGKGSEEKEIKNFSIKHGLEKQILLIGTIPWEEIYYYYKISDIFASLSKSEVYPMTVIEALTAGIPAILINDYIYKDVIKEGINGFLIKKYENLSRYIDKVIKDDEILKKFKENAKKHSTKFSSYFFTKKIKNYYSEIIARKNH

SEQ ID NO: 47143 - protein, 560 aa, Borrelia burgdorferi
MASSRGTALKKRPRDFNSLEGQDFVVETLKHSIEKNKIANAYIFSGPRGVGKTSSARAFARCLNCRNGPTVMPCGECSNCKSIENDSSLDVVEIDGASNTSVQDIRQIKEEIMFPPAISKYRIYIIDEVHMLSNSAFNALLKTIEEPPNYIVFIFATTESHKLPETIKSRCQHFSFKLLSLDKIYNMLKKVCLEDDIKYEDEALKWIAYKSSGSVRDAYTLFDQIVSFTDSNIKLDQIRSKMGLTNDEFLEKLSVSILGEDVKELICVLDSIFLSGVSYEQFLLDSIEFFREALFLKIGIKNFEFIGIKSEDLRKKLIEFDLNYLERIIVVLLETYRDLQFSVNPRYELEINFIKILRLKSYVPNHVLIKQIQNLEDNLLENIATDSNNFDVLSNNKSEDDLAFIPSKSSLKCEFPEIKSLEKEEADRDENLSTKIDKNILETNSIDEIDEIFIEDDNASNSNDFIDIRDKFIYIVSRYVQTLVHSGEVAIDDNVLYYKVFSEFEYNELQNYKGEIRSEFYKEFPNLSIVFQKNFKNLEKDFEKLETVKNIFGASEVLEG

SEQ ID NO: 47144 - protein, 442 aa, Borrelia burgdorferi
MRFNFIKFLYIGGWIMHSYIVEGGYKIGGQITASGNKNAALPCILAALLTDEEVILENIPNINDVKVVLDILNDIGADIAREGNTLKIKVLNIVKTEIDSSFTDLIRASILLLGPFVSRFGKIDMALPGGDVIGKRRLDTHFYGLCKLGAKLSTKDRRIVLKANKLVGAEMFLDEASVTATENIIMAAVLAEGNTVIMNAACEPHVQDLCNMLNSMGANILGIGSNVLEIKGVKKLSGTVFRIGADFMQVGSLISLAALTGGELEIKKADPQHFRLIRHVYSRLGINFEYDRENVYVRNKQELKVKLDFGGHIPKIDDGPWPAFPTDLMSIIVVTATQVEGTVLVFEKMFESRMFFVDKLIKMGARIVLCDPHRVVVTGKSSLKGNVLSSPDVRAGMSLLIAAFVAEGRSEIQNVYQIERGYEDVVNKLINLGAKIKKVKSQ

SEQ ID NO: 47145 - protein, 401 aa, Borrelia burgdorferi
MKFRRLVMAKEVFQRTKPHMNVGTIGHVDHGKTTLTAAISIYCSKLNKDAKALKYEDIDNAPEEKARGITINARHIEYETANRHYAHVDCPGHADYIKNMITGAAQMDAAILLVAADSGAEPQTKEHLLLAQRMGIKKIIVFLNKLDLADPELVELVEVEVLELVEKYGFSADTPIIKGSAFGAMSNPEDPESTKCVKELLESMDNYFDLPERDIDKPFLLAVEDVFSISGRGTVATGRIERGIIKVGQEVEIVGIKETRKTTVTGVEMFQKILEQGQAGDNVGLLLRGVDKKDIERGQVLSAPGTITPHKKFKASIYCLTKEEGGRHKPFFPGYRPQFFFRTTDVTGVVALEGKEMVMPGDNVDIIVELISSIAMDKNVEFAVREGGRTVASGRILEILE

SEQ ID NO: 47146 - protein, 103 aa, Borrelia burgdorferi
MIAKDKIRVRLFSFDVKILDQSAESIVKAVQKAKAQIKGPIPLPTKIKKYTVLRSPHVNKKSREQFEMRTHKRLIDILEPTSALMDSLMKLELPAGVEVDIKQ

SEQ ID NO: 47147 - protein, 206 aa, Borrelia burgdorferi
MLGLIGKKVGMTQIFQKNGIVVPVTVIEFQPNYIIGKKTVDRDGYSALIAGSVDLKSSKVSKPIKGQYKSLKDIEPKRYVIELKGLDGYDAGDEIKVDVFKSVKYVDVTGTTKGKGFQGAMKRHNFSGGPSSHGSKFHRHLGGTGQATTPARTFKGTKMAGRMGGNQQTIQNLEVVLIDEEKRALLVKGAVPGAKGSFVVVKKSKK

SEQ ID NO: 47148 - protein, 209 aa, Borrelia burgdorferi
MERKVFSKDGKEIGTINLDDRVFNIEISHGSIYNAIKNELSNLRVGTSSTKTRSEVRGSSKKPWKQKGTGRARVGTKRNPVWIGGGIALGPKPRDYSYRLPKKVKKLAFKSVLSLRAADENSFKVIENFNVESGKTKDLALIIKNFASFNGKVVILLGNDDQMIKRAGKNIRDLKILSFDKLRVVDLFYAKNLIALESAVNKLNEFYIK

SEQ ID NO: 47149 - protein, 103 aa, Borrelia burgdorferi
MLRISMKAYDIIVSPMLTEKTNTQRESINVYVFKVNKRANKKEVGAAIKELFNVTPVSCNLLNIKSKAKVVVSRKGYPIGKGKTSSWKKAYVYLKKEDKIDIF

SEQ ID NO: 47150 - protein, 277 aa, Borrelia burgdorferi
MGIKTYKPKTSSLRYKTTLSFDDLSKGNDPLKSLTKGKKFKSGRDSSGRISIRRRGGGHKRKYRLIDFNRRDKFSIPARVASIEYDPNRSANIALLVYKDGEKRYIISPKGIKVGDVLESGPNAPIKIGNALPLENIPIGRTVHNIELNVGKGGQLIRSAGGYAMILASDGNYVTVKLSSGEMRLIFKKCIATIGEIGNEDYANISIGKAGKSRWLGRRPKVRGVAMNPVDHPHGGGEGKTSGGRHPVSPWGQPTKGYKTRKKKRYSDKFIIKRRNK

SEQ ID NO: 47151 - protein, 92 aa, Borrelia burgdorferi
MARSIKKGPFIEKSLYQKVLSSFGSEKRVVIKTYSRSSTIIPEMVSLTISVYNGKTFIPIYITEDLVGHKLGEFSPTRIFRGHAKSDKKGRK

SEQ ID NO: 47152 - protein, 120 aa, Borrelia burgdorferi
MLVNRRYTAKGKNLPSSPKKVRPIADNIRGESYIKAIAVLCSMPNKGAKLLEKVVKSAASNAMYHNKNLSEDMIFVKTVMVDDGRRRKKIWPRARGRADRLVNRNCHIFVEVDEKKDIKG

SEQ ID NO: 47153 - protein, 293 aa, Borrelia burgdorferi
MGQKVHPYSLRVKINKDWKSKWYFDKKLYSAILHEDFLIRREIMKFLKGIKFDISDIEIIRNNPQKVTVVIVTPRPGSVIGLKGSNLEKIGQLLTKKISKKISIKIKEVKRPELDAQIIANGIAKQVENRASYRKVLKSSLSTSMLKGAQGLKIKIAGRLGGAEIARSFEVKEGRVPLHTLRANIDYGFSEAQTTYGIIGVKVWLFKGEVLGRQTNSDAGQVINKKPFRERGDAVKNFDKTLNNREKANEKQTRLLDKKDGLSKDEVDLLNKKKFSASFSKERDDSNEQDIGG

SEQ ID NO: 47154 - protein, 138 aa, Borrelia burgdorferi
MLSPKKVKYRKKQRGRLSGEAQKGNKISFGEYGLVSLETNFITARQIEAARIAMTRKIKRGGRVWIRIFPDIPYTKKPAETRMGKGKGGVDHWNAPVKLGTVMFEMSGVVEELAQEAMSLASSKLPVKTMFVVRRDLR

SEQ ID NO: 47155 - protein, 66 aa, Borrelia burgdorferi
MLKNFKNFTLEDMKAKRLELKKEYLDLRFKSVVGHVENPLKKREIRRDIARLNTMICEYELGIRKV

SEQ ID NO: 47156 - protein, 84 aa, Borrelia burgdorferi
MARENKKELIGKVVSDKMSKTIVVEIVQRKMHPIYHKYLKVSKKVKAHDEKEVSKVGDKVKIIEVRPISKDKRWSLVEVLEKLK

SEQ ID NO: 47157 - protein, 124 aa, Borrelia burgdorferi
MIVIQMQTYLTIADNTGGKVAQCIKVLGGSKRRYAKIGDIITIVVKQAIPNSSVKKGDVYKAVIVRTSKEVRRKNGTYVRFDDNACVILDANLSPRGKRVFGPVARELRDANFMKVVSLASEVI

SEQ ID NO: 47158 - protein, 101 aa, Borrelia burgdorferi
MKTKLKIGDSVKILSGKDRGRIGKIASINRKKNKVIVESCNMVKKVIKARTPQEKGRIIDKEAAIDISNVMIFVKGTSSRLGIRFENNEKIRYLKKNGQRI

SEQ ID NO: 47159 - protein, 182 aa, Borrelia burgdorferi
MNYVPELKKYYKDSVIKELVKEFEYKSIMQVPKLEKIVISVGVGEAVRNKKLLDSAVLELAQITGQKAVKTKAKKAIAGFKIRQGQEIGAKVTLRGNAMYEFLYKLIHLALPRVKDFRGINGDAFDGNGNYSFGITEQIIFSEIDYDKIERISGLNITIVTTASNDKESKALLLKFGMPFSN

SEQ ID NO: 47160 - protein, 74 aa, Borrelia burgdorferi
MECRLVIRGFIRYMAKKSMIIRALRKPKYKTRQNNRCKLCGRPRGYLRDFCMCRICFRKYASEGLIPGVSKSSW

SEQ ID NO: 47161 - protein, 132 aa, Borrelia burgdorferi
MAITYSIGDMLTKLRNASRVGHGSVDLKMSNMNKSILNILKEEGYIKDFNFLEKKGIAFIRVLLKYDNKRNPVINKIDAISTPGRKIYSSYRNMPRIKNGYGILIISSSQGVITGKEAKDKKIGGELICSVW

SEQ ID NO: 47162 - protein, 180 aa, Borrelia burgdorferi
MSRIGRLPIKIPDAVKVDVKDNLVIVEGIRGRLVQDIKDSINVKVENGSVIVDRVLNDKKAKAYHGLYRSLIFNMVKGVTEGFSKSLTINGIGYRVEQQGNSLFLSLGYSTQFEYVIPDGISVKLDGNTKISVEGIDKFKVGQVAAEIRSLKKPEPYKGKGIKYDNEVIRRKVGKSGVKK

SEQ ID NO: 47163 - protein, 119 aa, Borrelia burgdorferi
MKKIKEAEQRKLRRKKRIKDKIGRGVASRPRITVFKSNRYFYAQVIDDSKGHTIASISTIEKSLNLGKNIDDVKKLGEVLAKRLKEKNINNLIFDRNGYKYHGLIASFATSLREFGINI

SEQ ID NO: 47164 - protein, 165 aa, Borrelia burgdorferi
MVDVHAQRKQIEKLISLNRVTKVVKGGRRFSFAAFMVVGDGEGHVGWGFGKANDASDAIKKSLTSARKNLRFVPIRKGTLPHEVIGCFKKAKVLIKPATHGTGVIAGGPVRAVMEALGVHDILSKSLGSNNSMNVVKATFKAFDLVLNAEKVAEMRGKTLKTLWG

SEQ ID NO: 47165 - protein, 101 aa, Borrelia burgdorferi
MIKRKLRLQLKKARFNASRSRSKNKCFIKRMENNRKIISKNNINVQVFLVRSLIGKLNKKVKVLKALGLNKIGDKKVHFLNESIKGMLNETINMILLSEVM

SEQ ID NO: 47166 - protein, 145 aa, Borrelia burgdorferi
MFNLLKPKGASKRRKIVGRGPGSGLGKTSGRGQKGQKARNTSPRLGFEGGQTPLYRRLPRKGFSNSDYKLEYAIVNLGDIDKKFKDGQVVNYDTLLENKLIKKKNKKIKILSNGKLTKKVSFEVSKISKSAESLVIKIGCTIQLV

SEQ ID NO: 47167 - protein, 434 aa, Borrelia burgdorferi
MKELFLSLFTVKDLRNKFLFTLFVLFLFRVGSYLPIPGIDSVALKSYFKSQSDFSIANYFDFFSGGAFSNFSIFMLSIGPYISASIIVQLLVYSFPSLKKMQEGDGGRQKTKKYTKYLTIVAAVVQGYATSLYAKGIPGAVTIPFYRYIFVAILTVTTGTFILLWFGEQINQRGVGNGTSLIIFSGIVVRLQAALFNLFQSMQDPSQNVNPVFVILIISIFILVVILIIYEYKAQMRIAIHYARANSNNTVSSYLPIKLNPSGVLPVIFASVLITLPLQILSGFAETSSIARQILSYLRPNGFYYTFLNVILIIGFTYFYSKIQLSPKDISNNIRKNGGTIPGIKSDEMEKYLDEIMNKTLFSGSIFLSIIAIIPFLVQNIFRFPHDVSRIMGGSSLLIMVGVALDTLIHIDAYLKTQGFSHGNKKNYAFLQKI

SEQ ID NO: 47168 - protein, 39 aa, Borrelia burgdorferi
MIMKVRVSVKPICEKCKVIKRKGVLRIICDNLKHKQRQK

SEQ ID NO: 47169 - protein, 125 aa, Borrelia burgdorferi
MARISGIDLPNNKQLKIALTSIYGIGRTRALEVCNKSSISPSKIAKDLDNDEVNRLRKVIESDYIVEGKLRSEVAMSIKRLMDIACYRGVRHRKGLPLRGQRTKTNARTRKGKRKTVANKKIASK

SEQ ID NO: 47170 - protein, 134 aa, Borrelia burgdorferi
MEGKLSAKLSTNSKKKIKRNIGEGNVYIQATFNNTIVTVSDIKGNALAWASAGGMGFKGAKKSTPYAAQITAESALNKVRDFGINYVHVYIKGPGIGRESAIRAIGSIGMTVKSISDITPIPHNGCRPKKTRRV

SEQ ID NO: 47171 - protein, 345 aa, Borrelia burgdorferi
MMLVEKFLKDFTIPEKIEFLKSQGDGSYGKFTIYPFERGFGITIGNTLRRVLLSSIEGYAITAMRVQSNNKDSSSKVVSSEFDLIPGVSEDTLEIIANIKNIHLKLGEGEQRKTISFSVSGKDTNVLKASHFERDGVEVFNKDLVIATLSHDVNLDLEFQINYGRGYVSSEQNSKYLEEVNVIALDSIFSPIEKVSYSVEDTRVGQRSDYDKLVMEIWTTGVISAKDAIKKAASIVREFLFPLVDFEDNVNTSFEKSKSESSNLLDMSIEKLNLSVRSLNCLAKENVRTLGELISKNAEELSKARNFGKKSLEEIIEKLGSYRLYLGMSKEDALSVLSKNVKISE

SEQ ID NO: 47172 - protein, 123 aa, Borrelia burgdorferi
MKTKLGFNRLSRKSSHRRALLKNMVISFFKHEKISSTKTKLFEVKRFAERLITRAKVDTVHNRRELSKFIHDKHILNKLFTKISPVFRQRSGGYTRMIKLGKRYGDAAEMAILELVEKPLKVE

SEQ ID NO: 47173 - protein, 510 aa, Borrelia burgdorferi
MIYIIFSSIFAGFILGFLVRVFLGRLSLLDLEKNLKKVRVESQLEIENERRQIIANAKSQMLKEKNQQDRDIRDRKNEIVNLEKRLLQREETLDKRISALDKQQSRVDFKIKEFEQKEKVIREKEADLVKRLENISGLTREDARKIVIEKVEHESKRDAQVIINKSEQEAQLLADKVAKDILVSTMQRIVTEVSSEFTVASVELPNDEMKGRIIGKEGRNIRALETLIGADIIIDDTPEAVVISCFDPIRKELAKRTLERLVTDGRIHPARIEEVVYNVTNEINSIIQEEGEKVVFDLNIHGLDKRLIRGLGRLYFRSSYGQNVLSHSKETAIIGEILAKEMKLDPVVVKRACLLHDIGKGMESISDNSEGHAITGAELAQSCGESEIVVNAIAAHHNEVKPESLEAIVVQIADAISASRPGARRESLNNYINRLKRLEDIAYSFEGVQKCYAIQAGREVRIIVDNALINDEKSILLARDIAKKIEAEMRYPGKIKVTIIRETRVIEYAR

SEQ ID NO: 47174 - protein, 262 aa, Borrelia burgdorferi
MQDSTIKTLIIGDIIGESGLKKVFFNLKNIKNKYRIDLVIANGENSSNGFGITPEIANNLFRSGVNVITTGNHVYSNCKINDYLNKQTYILRPNNFSDLLDGHGYCFLTIRDEKVAVVNVQGVLNMNFIVKNPFDNTKKLVNMLSNKAKTIFVDFHAESNYEKESFGYFLNGFVTGVVGTHTHVMTQDERILSKGTAYISDIGMTGGLNSVIGFNPDISLKGLLEYTPLRAEVVEDDTILQGVIITSNLKTGRALKIERIQK

SEQ ID NO: 47175 - protein, 433 aa, Borrelia burgdorferi
MLSYKKVLIVGRPNVGKSALFNRILDTKRSITESTYGVTRDLVEEVCKVDSFKFKLIDTGGFTILKDEISKIVVQKVLSSLEKVDLILLVLDINEILLEDYQIIERLRKYSSKVVLVLNKVDTKDKECLAHEFHNLGFKRYFLVSAAHCRGITKLRDFLKVEVGEVGIESGADIKVGIIGKPNSGKSTLINYLSGNEIAIVSDQPGTTRDFIKTKFTRNGKVFEVVDTAGIRRRARVNEIVEYYSVNRALKVIDMVDIVFLLIDVQEKLTSQDKKIAHYVTKKGKGIVIVFSKWDLVDESKGYFEALKSHVKFFFPILNFAPIFRISVHKRIGLDSLFKESFKLKDQLELKTSTPDLNKMLNLWIKDYHLNISHKIKYITQVSTNPVKFILFANKIKNFPNSYYNYLVNNLRKIGYKNIPILVELKEKIRDLK

SEQ ID NO: 47176 - protein, 528 aa, Borrelia burgdorferi
MKVIFMKADLNLIKTLHPLEIKVIVNNEEEDDISASIIIEKLGFNEGQANKTIEWLNSKGIIEEIYRKLNVFYKATERGLGALRDGFVEEKIINLVSQKAVLASNLALELDIDVKEVRKAFGNLLKEGILSLDLDKQIIINCLDGTETNYQKVRVLLERAKNSDLLRESLTTEELLLISNFAKKKGADSVFFKIIEKLDLKFRLSSFGLEVKNFLMKSKLTGDELTKLTPEILKNKTYENKKFRAYNIHIPSAKTFIGRANSYLDYISKIKDKLVGLGFQEFDGPLVETEFFNNDALFMPQFHPSRDIKDVYYISDPSMQESLPEPYFSNVKLAHETGYATGSRGWRYSFSEDLSKRLVLRTHGTVLSAKQLINAKNPSRYFGVIRCFRYDQVDATHGVDFYQTEGIVIEDGVSIKTLLGLLEIFAKELAGATEIKYVPAYFPFTEPSIEIHVKHPVLGWFELGGSGIFRPEVTKPLGIDLPVIAWGIGIDRMALMHLGLNDLRDLFTYDIGDVILRRGKIDAKVRNL

SEQ ID NO: 47177 - protein, 566 aa, Borrelia burgdorferi
MPKLEIYKNLFLDKIGKNFTNLEISELLEPFKAEFDGFDESSGKIKIEFNDTNRPDLWSYLGLARQIKTYFFGEMPYYDFFSKKGDFKKFYGEILVDGKMSQIRPFIFGFLAKGLIINDKMLETLIQFQEKLCQNYGQKRRRIAMGMYNSNFIKFPISYIASSPNHKFVPFGMDYELSLLEINEKHPKGLEYSHIIKNFDKFPLLLDDNNNVVSYPPIINSNNIGSLKVGDTDLFVEVTGIDFEATLLALSIAACDFYDMGFEILPVKTVFREPFNLDFKELVCPYYFQEEVEFNVENINRLLGSNLTLERICLSLKKMGVNSYSKDFKNYIVPPFYRNDFLHEVDVIEDVMIGEGLSSFNPELPKAFAVGRLSPLEEFSRNVRNLMVGMGFQEMIYNYMGSKKDFIDRMNINDQNFLKVSNPMTENYEYIRASIIPNLLKSESVSSNFPYPHKIFEIGKVALKNLDTTEGTSTFTNLAFLMSGKEISFNEINSIVATLFYYLNIEINLIESKTTFYINGRGADIVIEGFNIGGFGEISPYVLNNFGIFIPCSVFEVNINKLMSRS

SEQ ID NO: 47178 - protein, 635 aa, Borrelia burgdorferi
MGKIIGIDLGTTNSCVAIMEHGKPVVIQNSEGGRTTPSIVAYTNKGERLVGQVAKNQMVTNPENTIYSIKRFMGRRFEEVASEIKMVPYKIEKGLNGDARVNISNIKKQMSPPEISAATLTKMKETAEAYLGEKVTEAVITVPAYFNDAQRQATKDAGKIAGLEVKRIVNEPTAAALAYGIEKKHEEIVAVYDLGGGTFDISILELGDGVFEVKSTNGDTHLGGDNFDDEIIKHLISEFKKESAIDLSNDKMALQRLKEAAEKAKIELSGAQEASINLPFITADANGPKHLQYTLTRAKFEQMVDHLVQKTKEPCLKAIKDAGLKASDINEVILVGGSTRIPAIQKIVKDIFGQDPNKGVNPDEAVAIGAAIQGGILTGETKDMVLLDVTPLSLGIETLGGVMTKLIERNTTIPTKKSQVFSTAADNQTSVDIKVLQGEREMAAQNRILGNFILDGIPAAPRGVPQIEVSFDIDANGIVHVSAKDMGTGKEQKIRIESSSGLSESEIDRMVKDAEAHAEEDKKLKENIEAKNTANSLIYQTEKSLKEYSEKISSEDKEAIESKIKELKESLEKEDISLIKSRTEELQKASYKIAEMMYKDSSQQNANSQQENGPQSNTSEEGKEADYEVVDEDKK

SEQ ID NO: 47179 - protein, 315 aa, Borrelia burgdorferi
MNNLKDKINTYSKLILGSWQFGGGYFKQVEKETAKKILKKAYDHGIRNIDTARAYGNGISEKIIGEIIEKDPTIRENILIASKCYPMEISEYRENFNESLKNLKTDYIDIYYIHWPKADFDLRPIASFLEEMRVKGRIKYVGVSNFEISHMESIKKVCKIDVNQIGYNPLFRNKEKDVIPYCEDNNIATISYSTIAQGLLSKANIKDKNKFNDIRTEKLILFKKEIWPYTLKTINKLEEIAKINNLTILELTYSWLKKTKLSGFIVGFSKENYVESNVNSFKAEINDKVYEEITSILDNFNHQTKNFPNLFNKKI

SEQ ID NO: 47180 - protein, 933 aa, Borrelia burgdorferi
  MISC_FEATURE (798)..(798): X=any amino acid
MNYQRIKNYCKFTSVFLFFLFSCVSNELKLDQSLVKGKLVNGLRYYIYKNQTPKNAVNMGIVFNVGSLNEEDNERGIAHYLEHMAFNGTKDYPGNSIVDVLKKFGMQFGADINAATSFDFTYYRLDLSDGNNKDEIDESINILRNWASQISFMKEEIDLERNIIIEEKKLGETYPGRIYEKMDKFLTSGSLYEFRSPIGLEEQILSFQPEDFKKFYRKWYRPELASVIVVGDIDPIEIEEKIKKQFVSWKNPTDKIKEVKVSLDVELKDKFLLLEDLEVGEPSLMFFKKEIINFVKTKDDLLNAIKKSLLAALFENRFSELKTAGVKQFKNVSNKDFFSFKSDNNTIVAKSISLNFNPDHLNEGIQDFFYELERIRKFGFTQGELEKVRSQFYKSLELRKKNINKTNSWAIFQDLIEIAINGSNKFDMNEYCDLSFQYLEKIDLKTINNLVGREFDVKNCAIFYSYHGRAHPVLTLEDIDNLQKIALKRELKPYENSLIEGKFFKKSLDDKDIIRENEFENEISSFVLENGVEVYFKYNDQKKGVIDFSATSWGGLINEDLKLIPVLSFAPGVVSGSGYGDYSALQIEKYLSDKAVSLRVGVGAQESYISGSSDKKDLETLFQLIYFTFKEPKIDDVSLQNAINNIKALIKSNENSSDYHFHKAISKFLNNNDPRFEDTKDSDLQYFTKENILSFYKKRFTYANNFKFVFAGDSDIQTIKAYSKKYLGNLNFKEINEYKDLDYSYSKNFNKIVVRKGKNSTSFAYVIYPFKFNYLAETWLNLNALADLLTDGLIKNIXEKMSSVYAIQASFDSNLRKNVDSDGILSIFFTTEPKELDNVLNSINRYMIERQKIDFNDKDFSYVKKNYIKNTKINSEKNGYWISNILASLSWYGVFKNNFGVKFIETNLNKDLINEFFKKINLDEKAEILLIPE

SEQ ID NO: 47181 - protein, 693 aa, Borrelia burgdorferi
MDYNKLRNIGISAHIDSGKTTLTERILFYCNKIHAIHEVKGKDGVGATMDSMELERERGITIASAATHVEWKDFPINIIDTPGHVDFTIEVERSLRVLDGAILVLDSVAGVQSQSITVDRQLKRYSVPRLAFVNKCDKTGANPYNVKDQLRSKLDLNSVLMQIPIGLEDKHIGVIDLVLMKAYYFEGKDGTEIIEKEIPSDLLEEAKSKREIMLDTLADFNDELMELHMEGKEVPTEIIYNATRTGTLALKLCPVFMGSAYKNKGVQLLLDAVTRFLPSPHDIKNTALDLNNNEKEIDLKIDNELPTVALAFKLEDGQYGQLTYVRIYQGILKKGQELINSRTSKKFKVGRLIRMHANNTEDIEFGGSGDIVALFGIECASGDTFCDPSINYSMTSMFIPDPVISLSVKPKDKKSADNMAKALGRFTKEDPTFKTYVDIESNETIIQGMGELHLEVYIERMKREFKAEVETGMPQVAYRETITRKAEFNYTHKKQSGGAGQFGRVAGFMEPLDKEGETYEFVNLIKGGVIPTEYIPSCDKGFQKAMERGTLIGFPIVDIKITINDGQYHIVDSSDIAFQLAAIGAFREAYEKAKPTILEPIMKVTLEGPTEFQGNMFGLLNQRRGIITGSLEDGSFSKVEAEVPLSEMFGFSTVLRSSTQGKAEFSMEFLRYGKVPSTIFDELRKKFNDQNKS

SEQ ID NO: 47182 - protein, 192 aa, Borrelia burgdorferi
MDNLNSINSIKDLSKFFMYKLLFIIVFVLSCSSIFKEYQNISGEYYKLAKLNEELGNDETSVLLYEKSIKFNINAGDDSSYNFILACINLKKYVEAELKLNSIIKEDPENILLINLKGYLLFKKNDLDNALIYYLKTLEFAPANKEALFNIFYIYHLKSDKKNAKKYISKYKELNHPIPSGAEEIVSSILKS

SEQ ID NO: 47183 - protein, 406 aa, Borrelia burgdorferi
MNLLKKKSIGIIACPGGRVFASKIIEELDRIFINIENEIIESICQDSKALKEEIFKIEKVLSPFLEGLSLSTLKSKEPLEIPVKFVKFANGEFKTEILKTIRNKDIFIVQDVANAYEVEINSSEKIIMTVNDHIMNLMTTIDACMQAKANSVSVIIPSYPYSRQDKKHSRECLTASLIGRFLEELGIRHILTLDIHSKAIENVFRKVYFENLNVSYEIFNSLKDLIDIRDSNLVIVSPDTGAVSRNKFFASSLKSPLALLYKERDYSRVSNDVADSNISVTKLLGDVEGKNVFMSDDMLATGGTLIKAMKLLKSMGAKKIICGISLPFFNGDAIKYFDKAYEEGFFYKIIGTNAVCHNDELINKPWYHEANVAPLFAEAIFAIYNKVGLQKILDRKDDIQKLITKG

SEQ ID NO: 47184 - protein, 286 aa, Borrelia burgdorferi
MKDLNENNDNNKGFFVALTSIATVCIIIFLGTIIFFPNKNLASDIAEKNIVLEEDKDPNTLEKVDQNEKSLKVSETQNEIIIDLTQDLNKEKKPTNKIPNTQKSKIIEKPQPTTQKISNTSQKSKTIEKPQPTTQKISNTSQKSKTIEKPQPTTQKISNTSQKSKTIEKPQPTTQKISNTSQKSKTIEKPQPIAQKTLNTDNIYDPNIEYYIQFVSLSDPINADNYIQKLLKYNIIARIYSATVDNKDIYRVRSGPYKTKSEAKADFKKIAGIGEFKETYILPVNK

SEQ ID NO: 47185 - protein, 908 aa, Borrelia burgdorferi
MKELYLIDALNIIFRNYHVMKNYPLLNTQGENVNAFIGFFKTLFFIIKEKNPEHLIITFDSEVPTFRKQKYPSYKATRDLPPDDLIPQIGWIKEGLLKAKIPIFEMEGYEADDLLASFAKKAAKNNYLTYIISPDKDLLQTMSEYVKILKIENNSFIEMDNEYVTKKFGVNSFQIKDYLAIVGDRSDNIPGIKGIGAKGAANLLREFKTLDGIYSNLEIINKKHRELLIKEKENAFLSYELVSLEENLKIPEIENFALKNFSEEIISLFEKHSAIALIKTYKKDILKQEKENADQKSLFKQEPTTNSLDDINTIDTENVKYRSITTKIELDDLIESLKKAKYISIDTETSSLDTYTAKLIGISISFKEFEGYYIPIEAKGKIYIEKNYIIQKFNNLFESNPKIIGQNYKFDYKILKNNGFNPIPPYFDTMIAAYLIDTNSKVSLDFLAEKYLMHKNIKYEDVIQKNDNFANISLEMATSYSSEDADITFRLFNIFTKKLKEDKLDKLMHEIEMPFNKVIIEMEENGIYLDKEYLKEYGKELGKELEAIENEIIKSIGIDFNLNSPKQMHEILFEKLNLKLPEKMKKDSTDIKVLESLREQHESIENLIKYRQIAKLKSTYTDNLIELINYKTNRLHTSFIQTKTATGRITSINPNLQNIPIKDEKGRKIRKAFKPENGNIFISADYSQIELAILAHLSQDEVLIKAFENNKDIHTETASKLFKIEEKEITPNLRRIAKSINFGIIYRMSDFRLAKELGITKEEAKGFINSYFDSYPKIKEFIINQINFVRNAGYSETILKRRRYIKEINSNNYLERSAAERIAINSIIQGSAADIMKIAMVKVFNEFKSKKMESKILLQVHDEMLIESPIEEENEVKKILKIMMETAYTLNLPLRANIETGKSWGEIH

SEQ ID NO: 47186 - protein, 660 aa, Borrelia burgdorferi
MSSKVQQEIADLKKLIRKWDKEYYVDSLPSVEDFVYDKHILRLQELESKYPEYKTLDSPTLKFGSDLLNDFKEVEHSAPILSLDKVYDLDLLKSWIDKIDFNNSFNISVEPKIDGCSIVLYYKDGVLEKALTRGNGKFGNDVTINVRTIRYIPLFLDEKVDLVLRGEVYITKENFLKINKFLEKPYTNSRNLASGILRRVDSREVANFPLNIFIYDFLNAGLEFKTNDLATARLKKLGFKVNPLIRFFDLKNSIGEVLNYIADITKKRDSFEYEIDGVVLKVSDFALRERLGYTAHHPKWAMAYKFEALSGFSRVNSIVVQVGRSGKITPVANIDKVFVSGAFITSATLHNQDYIRSIGLNVGDVVKVSRRGDVIPAVEMVINKFSTGFFKVPDNCPACKTAVVKEGAHFFCPNNNCPSVAVERIKYFCSKNCMDIEGFSDKIISFLFEKKFIFSEIDLYTFDFYKLLEFKGFKDRKINNLINSIEASKKKPFSKLLLSMGIKDLGENTIRLLFLNNLNSFSKLFKLCQDRYFAFSTLLKIKGIGEKIALNIIEAFNDSVMLNKFKFFENLEFKMEEVVAIDGENKLLAGKKFCITGTFNGYSRSIIIDKLKNKGAIFNTCVTGSLDFLIVGEKAGSKLKKALSLNIKIMSFEDIKSYLD

SEQ ID NO: 47187 - protein, 86 aa, Borrelia burgdorferi
MVKKEAIIKAVNGLHVRPASTFVKKAKEYSSEITIESDGKSVSGKSLFRLQTLELSSGKKLLICAEGEDEEIAASELAELIESFKE

SEQ ID NO: 47188 - protein, 573 aa, Borrelia burgdorferi
MTLSGKRISKGIGIGEVLCIRKNFDKIISREKIDFSQVDSEISKFNKAKSKAIEALRDLERKAMLQFGDDKKGIFEGQVLIVEDDELDELVIELIVKENYSAAYSIYLAFENLVKSVEDYKDPYLKERASDYKDIRNRLISIILGQVSDFSEINKDIILVTEELTPSDTMQFDLNYVKGFLTAVGGETSHAAILARTMGLPALVMTLSDIDALKDGDKIVIDAMSSIVIKNPSSDEINLYEGKILRQVELEKELFSLKDKDAETKDGTKVFLKANIGTPVDITYVNKYGVEGIGLFRTEFLYMRSLQPPTEDEQFETYKRVIETMEKKGVVTIRTLDVGGDKEIPYLNFKKEENPFLGFRALRMYKEYEELIQAQFNAIFRASHYGKIRVMVPMLTIYEEIETIEYFVNNAKINLKSRGLPFDENLEVGCMIEVPSAALISSKLANKLKFFSIGTNDLTQYVLAVDRGNQKISNLYDKYNPAVLKLIKKVLDDGVSSGIDVSVCGELGGDDAGALLLVGLGFRSLSMIPSATLRIKYLLKKYTIMELEELANKVLNSDSKQETLSYFDKFIGD

SEQ ID NO: 47189 - protein, 650 aa, Borrelia burgdorferi
MILIFYFKQIALFIIFRLCYIIKKVKIKLKRKSCMKKQFDTEVNDLLYLIIHSLYSHKEIFLRELISNASDAIDKLKFLSLTNEKFKNIALEPKIEISFDDKSILIKDNGIGMDEQDLTNHLGVIAKSGTKEFINNLKQDEKKSASLIGQFGVGFYSAFIVSEKVEVTSKKALESDAYIWSSDGKTGYEIEKAKKEESGTEIKLYLNKEGLEYANKWKIQEIIKKYSNHINYPIYIKYSEPIMKDGKQEGIEEKEEKLNETTALWTKNKSEIKAEEYNEFYKNTTFDYENPLMHIHTKAEGNLEYTNLFYVPSKAPYDLYYPNTKPGVKLFINRIFITDSEGSLLPNYLRFIKGIIDCQDLPLNVSREILQQNKILSKIKSSSVKKILSELEKLSKKNPEKFSEFSKEFGRCIKEGVYSDFENREKLISLIRFKSSSVDGFVSFKEYKERMNESQKSIYYITGGKENILKENPIVAAYKEKGFEILIMDDELDEAILNLIPEYEGLKLKAINKNETSNELKDENFKKIEEEFKDTLTKVKEILKDHIKEVNLSATLIKEPSAIIIDSNDPTYQMQKIMLSMGQEVKEIKPILELNPNNKIVQNLKNLEPEKLEKISILLFEEAMLTSGMPSKNPGKFINIINEFIEKDFL

SEQ ID NO: 47190 - protein, 464 aa, Borrelia burgdorferi
MDVGIYGLGVMGSNLALNIADNGFNVSVYNRDNEKTEIFVKQNSHKKINGFKDIESFVKSLKTPKKIILMVTSSAIEKVIEQILPFMNKSDIIIDGGNSHYKSTMRLEKELFAKDIYFVGLGISGGERGARFGPALMYGGSKSAYEILEPMLNKIAAKTKNNDICSTYIGENGSGHYVKMIHNGVEYADMQLISEVYFFMKKAFNLDNLKISEVFEKWNEGDLSGYLLEITSKILKYKENNEYLVDKILDIANQKGTGVWTAIDALESGVPVNLIVESVFSRFMSGLKHERIIASDLLKMDTSSFEFELSDWILDLYYALLVSKIVAYAQGFMMLKTASVNYGWDLNLGKISLVWREGCIIRSSFLDKIKLAYDKNPHLINLLFDDYFLDLLKNNHKSLRRIISKASEIGIPLPAFYASLSFLDSYSTNYLPSNLIQAQRDFFGAHSFERLDSKRGEFFHSAWQ

SEQ ID NO: 47191 - protein, 180 aa, Borrelia burgdorferi
MSTDSDVQDSLSQYLLFSLDELYAIEIKYVVEVLEYTKISKIPRTPNYMAGIINNRGKIVPIIDIRKQFGMSDRAVDEDDKKRNKGVNISNIIILNLVYEGDEFNLGILVDYVNEVLELDPFSIDDAPKIGSGFNSKFISGIGKSNDKFIIILNVENLFDVRELSKFRNTTIYDPEYQQQ

SEQ ID NO: 47192 - protein, 124 aa, Borrelia burgdorferi
MKKRILVIDDNRAIRQSVAYILEQNGFGVSEAKDGLEGVLRFKEAVGQGDKDFDLVITDINMPNLDGIGVIKQIREFGSFVPILVLTTESEQSKVDEGRKAGATGWLVKPFNPEALMKTISKIF

SEQ ID NO: 47193 - protein, 358 aa, Borrelia burgdorferi
MEDIVHKYKVSVIICFFNSAETLDAMIKDAVNQTLKDKEIILIDDGSYDGSLEIAEKYANKYSFIKIFSQKNMGLSASRDKGLSEAQGEYVIYWDGDDSVESTMLEVLYNRAKADNSDIVCSQFYIYFLAINVKRKSLLPFPNYPLTGKEAFKNLLFTVYATFGRKNFVVGTLWDKLIRRELILKNNIRQQNVVFEDIVFVMQIFLKASKVSFVNNYFYTNFQRMGSMSSSISVLHKSKLSLNTMETLLKREGIFNECQNLYKKFFLQFYYFISFKQIYIISWNISDKLVYRAYKEKLISVLDEIKGLSEFQDCYEYAKSFGFNEIQILPRIMLKIWNFSSRLYVNFSIFIYKFFIKN

SEQ ID NO: 47194 - protein, 533 aa, Borrelia burgdorferi
MKKNLKILVITGGVISGIGKGVTSASIARLFRYDFRVTPIKCDGYLNTDPGTINPVEHGEVFVLDDGGEVDMDFGHYERFLNLNAKSSWNITMGKIYKKILENERKGKYLGRTVQLIPHVTDEIKSTIFQIASSENSDMLIIEIGGTVGDMENILFIETVRQIRQEIGSGNISFIHLTYVPSPAGINEQKSKPTQQSVKTLNKAGIFPDLIIARSSQVLTDQIRKKVAMFCNVESTSIIDNVDVSTIYEIPISFYKQGVHEILSSKLNIKVDPKIEELSKLVGVIKSNFFVPKKIINIAICGKYAELDDSYASIRESLVHVAAHLDLLIKSTLIDSNDLNESCLKEFDGIIVPGGFGGKGYEGKIMAIKYARENNIPFLGICLGLQLAVIEFARNVCGILDADTEENLARDKPLKSPVIHLLPEQKGIKDKGATMRLGGYPVILKKNTIAFKLYGQDRIIERFRHRYEVNNDYIDLFAKNGLIVSGFSSDFKMAKLIEIPENKFFVACQFHPELITRIENPAKLFLGLIKACI

SEQ ID NO: 47195 - protein, 1161 aa, Borrelia burgdorferi
MLKIKFYFDKIILGMSFRSRFIHLHVHSDYSLLDGAAKISDIISKAKKCNMSHIALTDHGNLFGAIKFYKEAKKAGIKPIIGIEAYMAKTSKFLKKQDDLGKMSYHLILLAKNELGYKNLLKLTSISYLEGFYYRPRIDKDDLEKYSEGLICTSACIGGLIPRLILANRFEDAKNEILWFKKVFGNDFYLELQRHGIKDQDIVNERLVKYSRELGVPLTAANDSHYVNREDATAQDIIVCIGTGAKKSDENRLKMETNEFYIKSQEEMCELFNDLPEALENTVRIAEKCDDFKITFPGPILPDYQIPVEFNTLGEYLEHLTLEGLKFRYKNLTSKIKDRAFYELSVIIGMGFEGYFLIVWDFIKFAHDNDIPVGAGRGSGAGSIVAYALRITDIDPLKYNLLFERFLNPERISMPDFDIDFCFEGRDEIIKYVTNKYGEDKVAQIITFGTLKPKAVVKDVARVLDIPFAESNELTKFIPDGPKVSLKEVLDDNSLKECFTSKPVYKELMNAALVLEGMNRHASTHAAGIVISKTPLTDYVPLYKDYKQGSVSTQYTMDLLEECGLVKMDFLGLKTLTLIKNAENLIRSVNPDFKIKNIPDNDVKTFNMLGEGRSASVFQFESEGMQQILKDAKPDSIEDLIALNALYRPGPMQFIPQFIAAKKGVKRIKYPHPDLKEVLRPTYGVIVYQEQVMEVAKIIGGFSLGKADILRRAMGKKKEDEMNEMKVDFLRGAIEKGYDKEIASEIFELLKPFSGYGFNKSHAAAYSLIAYQTAYLKANYPEYFMAANLTNEINNNDKLSYYIEESKAIGINVLKPDINRSFREFRVTDSGISYGLNGIKNLGGIVVDLIIDEREKNGKYSSFEDFIRRVDDKVINKKFLESAIKSGLFDSLDQNRKTLFENLDHLIEVVSEDKNNKKLGQNSLFGALESQDPIQQSFNYQTFKEYSYSELLGFEKELLGFYVSGHPLDPYKKAIDSFSSLNVLTDLAAKKDSIVQFSGILNSVKVIQTKRNNAKMAFGVIEDFKGAIDIVVFTESYERYRNFLLEGNVIGVVGRLTFNRDKFSIVVEKVVNIERLSEYKINNIHIKFLNNKLNDLQLLNSLKESISNFEDNSGFSNVYFYLRENGKDLKLKMNSILNFVPDEDKLDKLRKCVIVEDVWVD

SEQ ID NO: 47196 - protein, 451 aa, Borrelia burgdorferi
MLLDEIKNLNFLIMGLGLNGGGVALSRFLLKRGAKLVITDLKSETELALSIDALRDFEDQIRYVLGKHDVNDFKNADIVVKNPGVKPNNKYLKFAKRIETDISLFLMFNKNPIVAVTGTKGKSTLVSLLYQALKEKYPGVKLGGNIGVSPLSFFDQLDGKSPLILELSSWQLQSLENFNPIISIITNVYNDHQNYYLNFDDYIIDKSKIFVNQTSGIVIIQDQAYCKYFSKFKSKVRVILFSEFNPCDFDQDIFYCNEGKVYFNDSLIGSFSNSRAVFIIPKVITFFVSYYLNIDLNRTGQILSNFKGIEHRLEFVKSVQNVMFYNDTASTIPESTVLSVKSLKTKDNRINLIVGGTDKELDFLSFSKIADIVRTWILIRGSATVKIIKILEKSSIQYFLFDSLRDAVNYAFKISSPGDIVLFSPASASFELFNNEFDRGLQFKNLVNNLG

SEQ ID NO: 47197 - protein, 347 aa, Borrelia burgdorferi
MTIKKIKTKEMEENYLQSELWALIKTTKNSYWKAIAFESDVLGKIVVMQRRLFKNFYLAYIPHPEFSNKTLENINIDKISKSIKEFSIKIKPYLHKNTIFLRFDLMYYYQRTLNDKYSPLKTKIKYLKKSFDDIQPANTTILNLNNSLEEILLNMKKKTRYNIKLSTKKNLNIIIDDKFKHLSEFYKLYKETSKRDKFTIHSEEYIQNLIQIFKQDKNAQIKLIIAFYNNIIISGIIVGIYKEKAVYLYGASSKEYRNLMPNYAVQFKAIEMLKKLEIKEYDLLGIPPIANKNHPLYGLFSFKTGFGGNIIHRIGCYDFTYKNFIYKIYANLEKLRYFYYKVIRKKI

SEQ ID NO: 47198 - protein, 734 aa, Borrelia burgdorferi
MKKMNLVTAALPYVNNIPHLGNLVQVLSADAFARYSKMSGIETLYVCGTDEYGTATETKALIENTTPLELCNKYYEIHKSIYKWFNIEFDIFGRTTNKNHQDIVQNFFLQLEKNGYIKERETEQFYCNKDSMFLADRYVIGECPECQSMAKGDQCDNCSKLLNPTDLINPKCIICKNKPILKKTNHLYLDLPKIKTKLEKWIKNPDTSKNWNTNALKMTKAFLRDGLKERAITRDLKWGIPVPKKGFENKVFYVWFDAPIGYISITKNIIKNWESWWKNNDQVNLVQFIGKDNILFHTIIFPCIEIGSEENWTILNQLSSSEYLNYENLKFSKSEGTGIFGNDAITTGIPSDIWRFYIYYNRPEKSDFQFMWQDLMERVNTELIDNFSNLVNRVLTFQRKFFGDVIETIEIQNKFWKQITPKYNKILNLFKKTELKSALKEILKISSLGNKIFQDNEPWKRKNNSPQETKELISNLIYLIRDLSILMMPFIPETSKKIQQFFGNSYQFSTKILGTKSGIKKIEFTEILFNKLEQKKINNLKLKYSGDKNMKENEQAENLPIAKEQPENLFREKVLLRVVKINKIERNPEAKNLFILKLDDGTNKDKQIVSGLEGYYTEEELLGKHIIIVDNLKPAKFRGIKSEGMLIAAEDKNKNFKVIIVEDSIQNPIAGERIILENDQNKDLACPPKIDINKFLKANIVAENGELKINGINLILENSKNKILSKDIPNGTVC

SEQ ID NO: 47199 - protein, 265 aa, Borrelia burgdorferi
MNNCLIKFFIFLLVFSNSYVAFSKNVNVLIVTAMDSEFDQINKLMSNKEEIVLKEYGLNKKILKGKLSNRNVMVIICGVGKVNAGVWTSYILSKYNISHVINSGVAGGVVSAKYKDIKVGDVVVSSEVAYHDVDLTKFGYKVGQLTGGLPQKFNANKNLIKNAIEAIKSKVGGSNAYSGLIVSGDQFIDPTYINKIIGNFKDVIAVEMEGAAIGHVSHMFNIPFIVIRSISDIVNKEGNEVEYSKFSKIAAFNSAKVVQEILRKL

SEQ ID NO: 47200 - protein, 352 aa, Borrelia burgdorferi
MLYSFYKVFCLKDYVFKKARIFVKENKLKANIVFPESSDSRVLKAAIVILQKNLADSIILIGKKDTVINSLKEFSNCNDILGRIEVVDPNSFPDIEMYLDEYWSLQKLKGVTKQSLKTQVLDEITFAMLMVRFGYAKSCVCGAVSTSAKVLSNALRIIPKLEGVKIISSFMIMDTLCTARNVDFCFGHNGILFFADCSVVVNPNSLELAEIALQSAKSFKDILNAKPKVALLSFSTKGSSSAKETEKVKNALNIVRNKESDLLIDGELQLDSAIIKDVAEKKCRESLVAGSANVLIFPNLDAGNIGYKLVERFAFAKAYGPFLQGFSKPISDLSRGCSVDEIVFASALMISI

SEQ ID NO: 47201 - protein, 281 aa, Borrelia burgdorferi
MILSLLSMNINYNSITSIKQTLKERKIAPRKLWGQNYLINESIRQKIIESLDIKENEKIWEIGPGLGAMTEILLKKTNLLTAFEIDLKYSEILNEKFGKLKNFKLIKGDFLKKYKNENQNIDKIFSNLPYNIASKVISKLIEENFLKEMVFTVQKELADRITAKINSKNYSSFTVLVQSHFKVIKILDIGENNFYPAPKVKSTTLKLIPKKNNIKNFKEFNKLVRTVFSNRRKKLKNTIINFITNKATLRENFLKEYLDKRPENISVEEFIQISNTLNAYH

SEQ ID NO: 47202 - protein, 591 aa, Borrelia burgdorferi
MLKRKKMNKSVKKKIKDEINVIVTNLALSNNIKLDNININIQKPPKSDLGDISILMFEIGKTLKLPIEIISEEIIKNLKTKYEIKAVGPYLNIKISRKEYINNTIQMVNTQKDTYGTSKYLDNKKIILEFSSPNTNKPLHVGHLRNDVIGESLSRILKAVGAKITKINLINDRGVHICKSMLAYKKFGNGITPEKAFKKGDHLIGDFYVKYNKYSQENENAEKEIQDLLLLWEQKDVSTIELWKKLNKWAIEGIKETYEITNTSFDKIYLESEIFKIGKNVVLEGLEKGFCYKREDGAICIDLPSDSDEKADTKVKQKVLIRSNGTSIYLTQDLGNIAVRTKEFNFEEMIYVVGSEQIQHFKSLFFVAEKLGLSKNKKLIHLSHGMVNLVDGKMKSREGNVIDADNLISNLIELIIPEMTQKIENKESAKKNALNIALGAIHYYLLKSAIHKDIVFNKKESLSFTGNSGPYIQYVGARINSILEKYKALSIPVMEKIDFELLKHEKEWEIIKIISELEENIINAAKDLNPSILTSYSYSLAKHFSTYYQEVKVIDTNNINLTAARIEFLKAILQTIKNCMYLLNIPYMLKM

SEQ ID NO: 47203 - protein, 302 aa, Borrelia burgdorferi
MPKSLNNFLKKINIKPQTKNLANYTTYKIGNISKLFLTPKNIKEAENIFKAAIEEKIKLFILGGGSNILVNDEREIDFPIIYTGYLNKIEIHENKIVGECGADFESLCKIALDNSLSGLEFIYGLPGTLGGAVWMNARCFGNEISEILKKITFIDDKGKTICKEFKKEDFKYKISPFQNKNFFILKIELNLKKDNKKIIEEKMNKNKQARINRGHYLFPSGGSTFKNNKAFLKPSGQIIEECKLKGLSIGGATVSKYHGNFIININNATSKDIKSLIEKVKAEVYLKTGLLLEEEVLYIGFK

SEQ ID NO: 47204 - protein, 480 aa, Borrelia burgdorferi
MILKLYNTRTKDFSELTNFENVKVYACGPTVYNYAHIGNFRTYIFGDLLIKTLRFLGYKVNYAMNITDIGHLTGDLDDGEDKVAKTAREKGLTVYEISEFFTEAFFNDCRKLNIVYPDKVLVASKHIPIMIEVVKILEEKKITYFSNGNVYFDTSCFKSYGEMAGIDLIDKDMTLPRVDVDKFKRNKTDFVLWFTNSKFKDQEMKWDSPWGFGYPSWHLECAAMNLEYFKDALDIHLGGVDHIGVHHINEIAIAECFLNKKWCDVFVHGEFLIMDYNKMSKSRGNFITVKDLEDQNFSPLDFRYLCLTSHYRNQLKFSLDNLQASKIARENLINKLSYFYESLDPVDLNTLNKDLKNFGFSVEKEYYDSFVEKISFDLNVAQGLALLWEIIKSDNLSFVSKLRLAFIFDEIMSLNLREEILKNLQNHDVVIDENMKALIEERRIAKCEKNFKRADEIRDFFAKKGFVLVDTKEGTKVKRG

SEQ ID NO: 47205 - protein, 417 aa, Borrelia burgdorferi
MRDDQIFNLIEKEKLREREHIELIASENFTSLEIRQAVGSILTNKYAEGYPLNRYYGGCSFIDEIETLAISRAKELFGAKYANVQPHSGSQANMAAIMALISPGDRILGMQLSHGGHLTHGSRVNFSGIFFNTYFYGVSRDSELIDYDEVLKIAKDCRPNLIIAGASSYSREIDFKKFREIADDVSAYLLCDIAHIAGLIVAGFHNSSIDVAHLTTSTTHKTLRGPRGGIILSGKDFDKLVNFNGKEKPLFNAVNSTVFPGTQGGPLVHVIAGKAIAFKEALQESFKEYIANVIKNTKVMAEYFKSEGFRIVSGGTDNHLFLVDLSSSDLTGADAEKLLESVNITLNKNAIPFDKKSPSLASGIRIGGAAITSRGLNESDSLNVAKFIVRALKAKSDIELKQIKKEVVRFIRDFDMP

SEQ ID NO: 47206 - protein, 659 aa, Borrelia burgdorferi
MSNDDFLKNSLNQFQYEAVTTIEGALLIIAGAGSGKTRVVTHRIAYLLLKGIAQREILALTFTNKAANEMKDRIKKILKSPLSNLMVSTFHAFGLYFLKENYKLLGYRKNFSIYDDNDRISLLKEILLDEGLFNKKVSLNSLSNVISLLKNGILTLNDLKEEDINIYRLYEERLRLYNSFDFDDLILKPKELLSNNSDIRNKYSKRYKYVLIDEFQDTSLIQYNFIRLLINHSNLCCVGDDDQSIYSWRGANYNNMLQFEKDYNVKEIKLEQNYRSAKNILDVANSVILNNKNRKEKTLWSSKMCSKVIDVFIFEDEIQESEFVANRIMQLSRLEDFKSKKIGVLMRTNALFKNVEMIFRRQGIKYKVSGGTSFFQRKEIKDIISYLNVIINPKSDYDLLRIINVPRRGIGKEYLKKIRDIADKKGCCIYDALCDITFSFTNISSYDKALNKQVIESIEDFVSFIEEYQYKFSITKNTYSNIIKEMIESIEYWGFLVSENPNSIKVAEYKYQNIEGFLSIIKNWESKQFGELRDLSSFLNYIVLQSNEVSEEAENININLMTVHSAKGLEFDYVFFIAVEDNIIPHHRIIEDSEVDLEEERRVFYVALTRAKDSLVITMANKRKKDRQIFDQLPSRFISEIPKEFLNFNYYADFVENKA

SEQ ID NO: 47207 - protein, 430 aa, Borrelia burgdorferi
MARVKGQKVKECSFCGLSVAELGGNVVISNGVAICPECSKICHNLFKEKLCKPLDSKSNGLPTPKQLKDHLDMYVVGQEDAKKVLSVAVYNHYKRILKNNKYDNGIEIEKSNILLVGPTGSGKTLLAKTLAAEMNVPFAIADATTLTEAGYVGEDVENILLKLIHAAHGDVSLAEKGIIYIDEIDKIAKKNENVSITRDVSGEGVQQALLKIIEGTVANVPPRGGRKHPYEDTIEINTQNILFICGGAFVGLENIVKNRINKSSIGFSAIEKKNIREDTSLKYLEMEDLIKFGLIPEFVGRLPVHSYLEKLNKEDLLRILVDPQNSIVKQYYHMFKMDNVELVFEKDALESIVDEAILKNTGARGLRSILEGLLKDVMFEVPSISKAKKVVVTKESVLNADVNPLILVGNAIKKPWAKELYEINLKYDKK

SEQ ID NO: 47208 - protein, 813 aa, Borrelia burgdorferi
MQLKNLGQKSYMKSILNMIKNRKEDLPIVILKENVLFPNITLWVTFDNEYVINSIAQSMLEERLILFAYSNEPNCDESDRGVVKNLCSVGTYSKLIQVIKISKDVIKVLVECQSRVLIDSVSKKNDYLRAKVTFVPDSSGLNRELFTYSKFLKETYEAYRNSLSLKSYDADNEPINYFENPSKLVDIIASNSNLENSIKLELLQELNVKTRIEKLIVNLSIEIDLLDLKKDINSKVRAKLDKGQRDYFLSEQVKEIQKRLGKDENDYIDRLNSKDIPEDVKSKIEKEISRLSKMQMNSPDANIIRSYIELILDLPWNENTVMKNHLSEIEFILRNSHYGMDEAKEKIINFLAVYQINSKVKAPILCLVGPPGIGKTSLVESIARSLSREFVKISLGGLRDEAEIRGHRRTYVGSLPGVFISAMKRSGKSNPVILLDEIDKINSSYKGNPESALLEVLDPEQNYKFIDHYLEIPYDLSNVLFVTTANSLNGMSKPLLDRMEIIKVEGYSYIEKLEIAKIFLIPSIIKESFLDKVYIRIEDDVIFNLIRNYTMESGVRGLKRVLTNLIRRLVRELLYEYSKDQIIKGNFYSPSSLIHGNNSLFTHDPDIPGIYKIININNYYNYVDTEDNLDLIKIDSSGFVYGLAWTNYGGTVLPVEATKFEKKGDIILTGSLGAIMKESAQLAYSIVKTYSSKLNFDVKESPEIHLHFPEGATPKDGPSAGITIATAIASILSDKKVPLDLAMTGEVTLKGFVLPVGGIKEKVLAAYRNGISKVILPKDNKKDYSKLPEEVKDNIDVKFVSSLEEVFDYLNII

SEQ ID NO: 47209 - protein, 209 aa, Borrelia burgdorferi
MMNRKQIAKGKLVRRFGINIFEQPKYDKILKKKPHPPGMHGKARKAKITEYGKQLIEKQKIKFTYGVSERQLTNTFKEAKKHHGVTGDNLLSILERRIDNVVYRAGFAISRAHARQIVSHGIIILNGRRVTIPSIILRANDQIQIKEKDSLKKLIRSNIEKTSSLRNLPTWIEVNADDLNIKVKHAPSRDEIPTLANEQMVVEYYSKRA

SEQ ID NO: 47210 - protein, 451 aa, Borrelia burgdorferi
MVKVISLKNIHKFAYLKLDPLKKEDIYIVYIETNSKLIANLKAKTKVDQIEIINFYIDDDFKSEGIERIMISNLIHYGKKNKFKTISCQIAEIQEELLSLGFEYNDSKYKKELASEIEEDKFVMGIGIISIFTEVASISSKLTVGILFNSFALIADAFHVMADFVLSTITYFSLKITSKPETIHYPYGHKLMESLIAFIMGIIILMTGFTLFLNTTGLNKFITLGGESGFNLHIHQNKNKNDTIYEHDHCHSHDHDHDHNHDHNEEDKKNILEIFSNKSLKKSLWIPLTPFIFFIVKIIEYLTKFQIGKRYNNQLLLALASADKNCIFSHGGITLSLLLATYMWSGFDKIMSIFIGFIIIKEGLNVIINNANNLLSKQNIDLKRSVKDTLKNSNINFKTLNFHNQGNKLVLYIKINLNSENDFKNFINKTQDIKKIIKQEYKEINDIYFLV

SEQ ID NO: 47211 - protein, 330 aa, Borrelia burgdorferi
MFCGRFANFIMRDVINFIKKYNNFVIIGHKDPDFDCIGSSLALSSFLSRIGKNSILLNEGPFIRKEIVPFKDKFLSEWPNIEISEYSVIILDCSILDRIGDEFIFYVKNMPTLVIDHHMSGEKLECEGYIDPFAPSTTFLIEKLIREFGHDLTKEEAWYILVGFCTDTGFFKFISRSDPEPFEMVARLVSKGISLKEVYSYIETTKSLKSIETLKLMLNSLESYWNGKVLFTFLSSSSSGKDGGVSGVNELFYMILSNVENNEILGILKEMEDGSIIVGLRSKDSFDVGKLAEDFGGGGHKNASGFRIKQGSLEIVKNRMLAYIKDNIYL

SEQ ID NO: 47212 - protein, 555 aa, Borrelia burgdorferi
MKRNFYLIVLFIANNCFSIDFWDTMEREKLINEMVSKMQDHELLGQMFMISYPNQSITNFVLDFISKKNLGGIKIFGWNAKDLKNLTESIHKAQKTSQNNKFKIPLFVATDQEGGLAQHIKLNTSETIGNLGIAASLSPKDSYNTGYYIAQELRQLGINLNFAPIVDIYSHENNFAIGPRTYSDNPKIVSLLSLAFYKGQKQGGVISTAKHFPGHGNTTLDSHINIPIINSNLLEISLNELLPYKILIQENIPVIMTGHLAYPKLTNGENIPASSSIKIIKDILRKKLKYNNIIITDDLLMNAVNYNNESIYNTIERIVRTKSDIFLISLNENIQQNAYNMLLNLMKKDSEIKNNIIESNKRILRIKLMYLKENKNKSDLYPNLNKNEKIYSKEGEKFFEQNTLRSITKVRIEKEISKTKKTLIISPYYKMIVEGKKIFQNTYAYYYNYYPLNGINPQKLDEIKKLINKFEQVIFNLSTPGSLKYLENLKEYKDKISVIVSLTPHHIKKLNWIKNIVIIYGTTPLAFKSGFLTLTKDFDPKGTIPLKNIINKYYP

SEQ ID NO: 47213 - protein, 1125 aa, Borrelia burgdorferi
MNIDEELTTILKNNSNLKKMKEFLEQNIFFSLTGYEGFFKAFLIKKIKEYSKTGKIILIVKDEHTLDKIKNDLQVITNQIFELNYFSPLVYKGIGSKSTIFNERIKFLFNFYKKNPGIYITVLKSLLSKIPDKNTLLKNIYKIEKNTNINTADIEKTLITLGYEKTLRVTIPGEFTVKGEIIDIYPFGEQNPIRIALNFDKIEEIKKFNPLTQLKHDNEILEFQILPKKEIIWDDKTINTLKTKIKSVEYKKILEELDFKKETKTEEMFYPLVANTYLGDEIEKHTPIVNFEINNFEKEIEKIHQEYEKLYKEAEEAGKNIIDPKRILLNYKTFNLKSDVLFSKIKSLKSKETIEFKIESERNFFSNIALTKEEFENWLKNGFKIIIAAESESQKEKLKYIFKELPKVSIEVLKISSSLIIEKEKIAIILESNIFNTGQKINKAFESSKTKAIDSFVEIEKNSHVVHINHGIGIFRQIKRIKTSSLEKDYIEIEYAEGEKLFIPIEQTNLIQKYIGSDPKNIKLDKISSKTWIKNKANAKKRIEEIADKLIELYSKRESIKGIKYPEDNELQLLFESEFPYDETPDQIRAIKEIKEDMMSFKVMDRLLCGDVGFGKTEVAMRAAFKAVMGNKQVIVLSPTTILAEQHFNTFKKRFKNFPIKIEVLSRFIKNNAESRILKELKSGKIDIIIGTHKILSKKFTCKNLGLIIIDEEQRFGVKEKEKLKEIRISVDCLALSATPIPRSLHMSLIKLRDISVLKIPPQNRVKIEAYLESFSELLIKHAIESELSRDGQVFLVNHNIEELYYLKTLIERLTPYARIAIIHGKLTGEEIENIMHNFIKKAYQILLATTIIENGIDIPNANTIIINNANKFGLAQLYQLKGRVGRGSQKAYAYFLYQDSEKLNERSIERLRAITEFSELGAGFKIAMKDMEIRGVGNLLGREQHGEIESIGLDYYLTMLNKAIEKKMGKISSDEEEVDIKINYSGFIPENYAKNEQDKILIYKKIFKIQTEEESKKIRSELHNDFGPIPEEINSLLMLAELKILAKDLNITKLKEKNRALEIEYKNIESIPMEKIIEILQKHPNLLILNPSYQKSIFLSFKNIEKSEKINYIYKNINLLKTST

SEQ ID NO: 47214 - protein, 181 aa, Borrelia burgdorferi
MEKIKEIIVVEGKDDLKRIKESFDCTVIETKGFALKIETIKLLKKALKYKGIIILTDSDKSGNIIRQKIVKYLGENNKIKHAYLNTKDTEVESVNKTEIIKILKGVGTLSKDNQKDLLKLSDLLELGIIGENSKENRQKIQKHFCLGDGNSKKLLERLNYFKIKKTDLKNQLALTNSPRRT

SEQ ID NO: 47215 - protein, 626 aa, Borrelia burgdorferi
MIIMQNLFSKNLIVLNYNATSKEDVIRKMASMFNENGYLNDMEAFIKEIKKREETNGTGIEEHIAMPHAKGNFIKKHGIAILRVVGNGFDFNSSDQKLSKLFFMMALPEETPSNAHIKAISYLSNTFSNNLLRHELMSTNNEDRFLEIILNNDNINESNNLNTKKDFILAVTACPVGIAHTYMAAESLKKAALELNINIKVETNGSSGTENPITEEEIKKAKGVIIASGKTIDKERFSGKPLIEVGVKDGIHKAKELIQTILKNEAPIYKKSNTNKTTETLQKQNKKTGIYKHLMNGVSFMLPFVVSGGIIIAISFMFGIKAFDINDPSYNKIADILMQIGGGSAFALMIPILAGYISFSIAERPGLAPGMITGLMMNNGNAGFLGGILAGFISGYVTLTVKKISDKIIPSNLRGINPVLTYPFLSVIISGILIYGMLSPISVINESITNMLNQLSGTNMAILGALLGGMMAIDMGGPVNKAAYAFGIAMITAKNYIPHASIMAGGMIPPIGIALATSLFKNRFSKEERESGKVCYFLGACFITEGVIPFAAADPLRVIPACILGSSVGGFISALFKVEVIAPHGGIFILPIVVNPLMWITSILVGSIITAVLIGILKKEYKNIND

SEQ ID NO: 47216 - protein, 307 aa, Borrelia burgdorferi
MIYTLTLNPSVDYKIVLKEFQEESLNYALNNNFFAGGKGINVSTVLKNLGKPSTALGFLGGFTGDYIRFSLDSRGIKNDFIKIKYDTRLNIKMIANGRETEINANSPDISENEFELLKNKLKNLANNSTLVMSGSVPAALGEDAYNEIANSISNDVKLIIDTSGKPLRKILRLNPFLIKPNIYELEDLFNAKFDSTKELIKIGKNLVESGVQNIIISMGSDGAIFIGGKNVAFRAFVPKINFVSTIGAGDSVIAGFVYAFDNGSTLEDSFKFGVAAGTATALKGNLCEFQDVKKMLCQIRVEDIYTS

SEQ ID NO: 47217 - protein, 610 aa, Borrelia burgdorferi
MRDFLVLREFLKDKNKKFLTPELKLYEIIELLNINKKNCYKAQTLARSTNNENIVIFLIFLFNYFDKGHLRADINLLAKDIQNTIIFTKDNLEKTNKSYNKLIKILKGLETFGNLETIKNIVLLLKKNNILMEFNKLKITTPLILENNIYIYTQKNYREEEELIKQIIKRLENHKSELNDNKIQNIISNLNTNNLNKEQITSVRKALKSNFFLLSGGPGTGKTTTVNYILKAINKTLNNKKKGLVAITAPTGKASLRLQTSIDYSFKNLEIECNTIQKLLGIKFINKKNLYDEENQLNFDVIIIDEASMVDAHTFLKLLKATPITTKLIMVGDKNQLPSVNEGNVYSSLLGIQKINSDNVEDLKENFRSNKEINLLSKAIYKEDSTLICKYINNNKNIQLKEIEKINLKKDLIEYTNNLYRKIPTFNLKLLKESKIETILETLLENIILSSKNFGKFGTKTLNEIIKTYLKKTYGSFIGQIIMITKTDYKNKLFNGERGVIFNENSKFYALFQRKDEKYKKINLDLLTNYEFSFATTIHKSQGSEYKHIKVILENNPFLTKELMYTAITRAKDSLEIISNKETIIKLSKKSSKRDSKILEHVNSFKEIDK

SEQ ID NO: 47218 - protein, 1169 aa, Borrelia burgdorferi
MNKILEKIQNNTTILIEASAGTGKTHILENVVINLIKTKLYSINEILVLTFTKKATEEMHTRILKVIENAYSNSKTNEILKEAYEQSKKLFISTINKFALHALNNFQIETENYSKYKPKEKFSKEIDEIVYDFLRKSDSLIQALDIKDYELKVFKSDAKKTEEIVLKIKKAYERDTTQELGDWLKTQTAFENILLKKEELIKDYNKIIEDLDKMTKDEILSFYNKHIQTGKLEIEYSKENDIFKIAETLLKNKFFSTLIEKETKKNSKLSPKELKIKNDLICLGINIKHEKYKSEDNRNKNRNNLKQYVILKVEYKILKYIEKELKKTIKSTNTIDQNYIISNLKNYLKSEDKKLLNAIKNRYKIILIDEAQDLSLIQIEIFKILKTAGIKLIFIADPKQIIYSFRKADISFYNKEIKNKINTDARIVLKINHRSSKKLIGPLNKIFNNIYNNAIADEIEKIDFTNSLPNQKNDNNKIVINGQEIEGINIITTNTESEEDIYQKTALTIKYLLAYGKIAENNKIRNIKMQDIKVLCRGKNEINLIDKALKKEQIQTNKTQEKFLKTKEFSEIFYIIKCLDRKQSFKTLNYILSSKILNVPWNLQRILIKQDKICLIEEFIENIIVLLEKNEITLINAINKITFEKNLWIKIANITKDQKIIEWAKNKINYKGLLIKEGKLENLKTYETTLEIISKIYHKEQNIQSLISTLESLIINEEPEEIEEKINNINNDNESIELMTIHKSKGLGMNIVFLLNTTPIENSNFFSKKNQFYKFYQDGKIEYDFFKLEENKKYARLKILSEEKNIFYVGATRAKFALFIIKINSITSKLLEIAKIFTIDDIKHDFNIHEFIGQKRFNKKKYNTNVNTKLIPPKPIIKNMFKKEYTSSFSSLTAQAHHKEFYENYDFKNINYEKETELDYEPGLEETLPKGKDIGNILHAAMEEIIFSTAKDTFDNFKKNNIEIIEKQIQKINSNLNTIEIQNSLAKMIYNILTYNIRAINTRLCDIEELQKEMEFLIKINPEFQKQKYLFDKHFEDLHIKLSDGYLKGIVDLIFKANNKIYILDYKTNYLGKNKEDYNITNLENTIKKEYYDLQYKIYALGIKKILFKNKKEYNQKFGGIIYLFTRAFEDNIECLKSKFENGIYFNLPKFNDVDLDKIILELGIKRHL

SEQ ID NO: 47219 - protein, 481 aa, Borrelia burgdorferi
MKNLSLFTDFYEISMMNAYFTKGINPKAKFEVFFRKTPFKNGYIVLAGMHTLINELKNIRFGENELKYLKSFNILDKQFLNFLREFKLNVKISSIEEGRIVFPQAPVVVIEGHLIELLLIEGLVLNIINFESLIATKTARIKESGAKILAELGLRRAQGINGALSASKAAYIGGADFTSNMLAGYKYNIPVTGTMAHSWIMSFETEEQAFREYAKTYPNKVSLLIDTYDTLNSGLKNAIKIFKELKHEEKNNFSIRIDSGDLEYLSKAARKELNRNGLNHVKIIASNELDENIIMYLNSINAPIDIWGVGTNLVTAKGDPSLSGVYKMISIEKNGKFIPKIKISNNAEKSTLPDQKEVARIYLNDQMILDFIFLKEEKDKIKDHLNSRKEFTVFHPIQDNIFKIIKQYDDFEFLTHTVLENGKLRKGYESSLTNIRNKTKLDLSKLEHTYKRIINPHIYKVSISKNLRKLKNKLTKDIKNN

SEQ ID NO: 47220 - protein, 478 aa, Borrelia burgdorferi
MKERSVSNFDIVIFGVTGNLSRKKLIPSLFNLFKNKCISNFRVIGFSRKIFTDKEFRLYIKDSLWQEETDSLIEIFLNFFVYVFGDFNEKESYKNLFKFLDRSRETIYYLSTSPAFYGPIINHLKKYFLSEKLTLSKIVLEKPFGSSLETAKKLNSLLYSAFKEDQIYRIDHYLGKETVQNIFTFRFGNSIFENIWNNRYVDFVQITVAEELGLDGRVEYYDSVGALKDMVQNHILQLLSLVAMESPIKFDSEFIHDEKVKVLKSLRKISKEDIKNYIVKGQYIGSQVQGVFKKGYKDETEFLGNSNTETYLAMKVFINNWRWSGVPFYLRTGKGLARKFSEIYIQFKKPSFTLFNNSSVDFSNALIFRIQPRDGIEIKFNTKKPGYNYEIQTANMEFSYHGAFKRLFDEAYERLLLDAFLGDGTLYATSDEIESSWEFVSDIANKWADIEICNYFYGSEGPKEIDSILEKDHFWRKI

SEQ ID NO: 47221 - protein, 348 aa, Borrelia burgdorferi
MKKIFILIVILTTFACTNKDTITLNVFNWAEYIDKTLLDQFEKENNIKINYEIFHNNEEMMAKFNNTKNYYDIIVPSEYLIQELIDEGKIEKLDYSKLPNVTKNITQNLTNLEHDPGNLYSVPAYWGLMGILYNKTKIDLNDMQGFDILFNKKYKKEITMLDSPKDNIGVALKKLGYSINEHDTDKIKEAGELLKIQNPLLIGYFSDVPAKSLMLNGEASIQLTWSGEAQSAMLKDKNLDFYAPENTNLWIDAFVIPIDAPNKNLAYKFINFLYENEPSYKNFKETRYNSPNKNVIKRIEEEAKNNPEMKLYLEEKFLPKDFSKFEIFKKIPKKIKEEILKIYLNLSS

SEQ ID NO: 47222 - protein, 279 aa, Borrelia burgdorferi
MANKINWFPGHMKRALDLIKNNLQKANIVLEILDARAPFSSKNPLTEKITKNQAKIILLHKSDVAQINEIIKWKKYFENLGNTVIISNIYKKGMRKQIIDIIKKLAIVKKIKNYKEKIKVLIIGVPNVGKSSIINLLSGKKSAKVANKPGYTKNIQIVKINEEINLFDMPGILWHNLVDQSIAKKLAILDMIKNEIVDNTDLALYLLEIMDQNNKNILLKKYEIYHKNSLDILQNFAKARKLIGKKNELNLEKASKILIKEFREGKFGKIILDKNYNAF

SEQ ID NO: 47223 - protein, 514 aa, Borrelia burgdorferi
MLKGFEQAQKFGRSFMLPIAILPAAGLLLGIGGSLSNPETVRTYSFLNIFFLQSVFKIMSASGSIIFSNLAPIFSIGIAVGLAKSDKGTSGIAAFIGYLVMNATIGVLIDVSGRAESFSSGAVGFVLGIKTLETGVFGGVVVGILTYYLHSRFNKVDLPKVLGFFSGSRFVPIIVSFSSIFLAVIMFLVWPFVQSGINKVGGLVDSTGYIGTLIYGIFLRMLGPFGLHHIFYLPFWTTGLGGSVIIDGKLIEGTQNIFFAELAAQGTDRFFIGTSRFMSGRFITMMFGLPGAALALYYTAKREERTKVFGLLMSSALTSFLTGITEPLEFSFLFVAPILYVVHATFDGFAFMLAHILQITIGQTFSGGFVDFILFGILQGNSRTNWLLVPVIGIVWFFLYYFTFIFLINKFDFKTPGRTQDLNSEDSPSSKSSEFEENYATKVIIGLGGASNIVELDCCATRLRITVRDVLKVSEKILKKTGSKGVIIKGNGVQVVYGPGVSVLKNEIEELLEA

SEQ ID NO: 47224 - protein, 327 aa, Borrelia burgdorferi
MNIKNIIFILIFLLLLILVSPRIKFKNEFSKKLIPKNIEEIDNYLLKEELQFNLESNTKKEIIWYKEKAQKTNYSVVYIHGFGASKNEIYPVPNNIAKALNANIFFTRLKGHGINNKNAFRGITTQDWLRDIDEAINIGKLIGDKLVLIGTSNGGTASIWALANYPNEINSAVLISPNIFPYDKRTNIVYYPWGRQIAYLITGGYNKFETKEYKRKEHPTIKSHSSRVQHVDAIIAMMGLVTLLNSYNFNEIKIPLIITHTPNDHTVDPIKINEFIKNYGGEKKDIPIILLENSHAHLPIGNQSYKSAQNTSYFTKYVFDFINKINK

SEQ ID NO: 47225 - protein, 545 aa, Borrelia burgdorferi
MAKDIYFNEDARKSLLSGVEKLSNAVKVTLGPKGRNVLIDKKFGSPTVTKDGVSVAREIELENPFENMGAQLLKEVAIKTNDVAGDGTTTATVLAYAIAREGLKNVSSGINPIGIKKGIDHAVNLAAEKIRQSAKKITTKEEIAQVASISANNDSYIGEKIAEAMDKVGKDGVITVEESKTFDTTISYVEGMQFDRGYLSPYFSTNKENMSVNFDDAFILIYEKKISSIKELLPVLEKVLGTNKPLLIIAEDIEGDALAALVLNSVRGALKVCAIKSPGFGDRRKAMLEDIAVLTGGVLISEELGLTLETVEIEQLGQAKTIKVDKDNTTIINTGNKEQIKERSELIKKQIEDSTSEYDKEKLQERLAKLVGGVAVINVGAVTEVELKEKKHRVEDALSATRAAVEEGVVPGGGSTLIEVAMYLDTIDTSKLSYEEKQGFEIVKRSLEEPMRQIISNAGFEGSIYIHQIKTEKKGLGFDASSFKWVNMIESGIIDPAKVTRSALQNAASIAGLLLTTECAITDIKEEKNTSGGGGYPMDPGMGMM

SEQ ID NO: 47226 - protein, 276 aa, Borrelia burgdorferi
MTKDYYNILGIQKNASNEEIKKAYKKLAIKYHPDKNKGNKIAEEKFKEINEAYEILSSPDKKRNYDSLGNTNFNGNNDHFEREFSSTRFGNFEDLDFFSKIFGGSSRKTADREIIINISLYDAYMGSKKIILINNKKIEVIIPKGTLETTTIKINNKGPINPISGIKGSLIVKFNISSYKNFKLNGKTLETTIEVYPWEIALGCEKLFETIEGKKIKLKIPSDAKNGEILNLKGLGMPIIGSSSKRDLKVTLIVKIPKIINNEVKTIYERLKEIYS

SEQ ID NO: 47227 - protein, 290 aa, Borrelia burgdorferi
MKSGFAAILGRPSTGKSTLLNSICGHKISIISPIPQTTRNNIKGIFTDDRGQIIFIDTPGFHLSKKKFNIAMMKNIHSSIGEVELILYIIDIQDKPGEEENKMLEIIKNSKIKFLVILNKIDLKNTKIKEITQFLKEKGIEDSNIIKISAEKKINTEELKNKIYENFSEGPLYYPQEYYTDQEINFRISEIIREKAIENLKEELPYSLYVDIDTLENKKGSLFIRANIFVANESQKGIIVGKNGKEIKSIGERARKTIAKIFETKCNLFLQVKLKKNWNKEDKLIKRLIN

SEQ ID NO: 47228 - protein, 342 aa, Borrelia burgdorferi
MPLSFGKMILLIDLILFSYLSLYSKTPDYLNVLDFFDTNVFRFDFNIENDVFTIENDKGYLKFRVGFEYALTSSGYYMFVDPIIDIRGEILISQKVLKQIENYFSSLKDYNKPRITSIIIDPGHGGHDTGAVVTLKINGYDVVLQEKDFALTYSIYLSKILSNYFVNKNILLTRINDVYLTLKERSEFANAIKPNFPNNVIFLSIHANDAPNGEARGVEFWYLPKDSKREVIKDFKGYDIKGNRYLSELNDILDIKYKYESKRLAEILYKVFKNELSETNIRPIRKEQWFVIKNSSMPAVLIEMGFLSNILDAKLILDYNYMSKFNILILKALMEFINFYEK

SEQ ID NO: 47229 - protein, 383 aa, Borrelia burgdorferi
MTISKNVFSKFILKFLNSSAFVSVFALFVGFLIVGLVVMGLGHSPFRMYFIILEIIFSSPKHLGYVLSYSAPLIFTGLSIGISLKAGLFNIGVEGQFILGSIVALIASVLLDLPPILHVITIFIITFLASGSLGILIGYLKAKFNISEVISGIMFNWILFHLNNIILDFSFIKRDNSDFSKPIKESAYIDFLASWKLSPEGLAYRSSHPFVNELLKAPLHFGIILGIIFAILIWFLLNKTIIGFKINATGSNIEASRCMGINVKAVLIFSMFLSAAVAGLAGAIQLMGVNKAIFKLSYMQGIGFNGIAASLMGNNSPIGIIFSSILFSILLYGSSRVQSLMGLPSSIVSLMMGIIVLVISASYFLNKIVLKGVKRVKYNNILD

SEQ ID NO: 47230 - protein, 753 aa, Borrelia burgdorferi
MLLKLKYRFVGFLLLFLIFILLLFSTIFNFVLCGYLEDYYKQLTRAQVRRAAFSLQSFLDTLHVIINGAASNLALETISEFAMSENRGKDFSESELIDLRKNPKFVIDSVKVSKKYRQYLYNFMANLKNDTLFEEFAFFDFEGRVIVSTRHENNMDFGHSEANTNYFKKAVEDYRQNQLKFIGWYSNLSEGISAEVAIRSKQSEKKAFAIIVPVYSPEDKLVCGYLAGYLLNDIVADSFDRFRFGFYKRGNFIYVDPNNIAVNPFEEYNETSRVSSKFLNVLKDVFSKPPFPSNIASEVSVYTIDRILLSEMGEDCYYAMLPISSKLGEKSGVLIARLPYKDIYGVISSLRFQYILYSVLGIIALSIVLSIRIDRIISFRLNAIRVLVQDMVKGNLDKDYALDDDENTLDELGMLSLQVVKMKKAISVAISSVLRNISYVNKASLEVASSSQNLSSSALQQASALEEMSANVEQIASGVNMSANNSYETEQIALKTNENSQIGGRAVEESVIAMQDIVEKVSVIEEIARKTNLLALNAAIEAARAGDEGKGFAVVASEIRKLADLSKISALEIGELVEDNSKVATEAGVIFKEMLPEIEETANLVKKISEGSSKQSDQIAQFKMALDQVGEVVQSSASSSEQLSSMSDKMLEKSKELRKSVLFFKIKDSKIENPENDDYDFRLIDCPENSFKDENQNLKSNGISTSNASGHNNYSLDIESESSVRTINKRVDPKKAIDIADKDLNFDDDFSEF

SEQ ID NO: 47231 - protein, 355 aa, Borrelia burgdorferi
MKIAVLLSGGVDSSVALYRIINKGYSNIKCYYLKIWVEDELSYIGNCPWQEDLNYVEAICNKFNVPYEIINFQKEYYNKVVSYTIEELKNGNTPSPDIFCNQRIKFGAFFEKINSQYDLVVTGHYAKIQIKESKFLLKQAKDKIKDQSYFLSHLSQKQMSKLYFPLGTLLKSEVRQIAKNINLPNKDRKDSQGICFLGKIKYNEFIKYHLGEKKGNIIEKETGKIIGIHNGYWFFTVGQRRGIKLSNGPWFVIEKDLEKNIIYISHNENYLKQAKRKFLVHEIHWINDTPTNFENFKIKIRHGEKKYSCKLKLITNNLMEISLNKKDQGISPGQFAIFYKNTECLGGAKIFKIIE

SEQ ID NO: 47232 - protein, 360 aa, Borrelia burgdorferi
MMDTEFMGIEPNILENKKRHIEICLNKNDVKGGCNFLKFIKLKHNALSDFNFSEINIKEEIFGYNISMPVFISSMTGGSKEGNDFNKSLVRIANYLKIPIGLGSFKLLFKYPEYIRDFTLKRYAHNIPLFANVGAVQIVEFGISKIAEMIKRLEVDAIIVHLNAGQELMKVDGDRNFKGIRESIAKLSDFLSVPLIVKETGFGISPKDVKELFSLGASYVDLAGSGGTNWILVEGMKSNNLNIASCFSDWGIPSVFTLLSIDDSLKANIFASGGYETGMDIAKGIALGARLIGVAAVVLRAFYDSGEDAVFGLFSDYEHILKMSMFLSGSKSLLEFRNNKYFLSSYLLDELGVFKQFYGT

SEQ ID NO: 47233 - protein, 431 aa, Borrelia burgdorferi
MNLESLSSFMELSKNFRHKSVLEKRQEIKSFLELSYKDFFYNNANEDFLFNMIENYIGYLSFPIGIVKNLKINGKYYSLPIATEESSVVAALNFAAKILENADLRYSLGEVLGISQIYIKSEKDLSKIFVDLGDKIKTWIEPLLTNMNQRGGGFRRLSTRHIKELGIQKLNIYVDTCDAMGANLLNSIAERVAEFIFLEFGYECVLKVLSNDISEFTAKARFVLDFKHLLPGKEDSWNLAKKIELISSIGFYEEERAVTNNKGIMNGITGVCLATFNDTRALEASVHKFASKSGKYFPLSKFYTTDNALVGEIEIPLQVGTKGGVISFNEASILSFKIMNVNSKSEFIGILSCVGLASNFAALRALAFNGIQKGHMRLHVNKILHLLKTKYNISDFEKDKLLLEMERMNIYSFDFAFKILKKIRLENENKV

SEQ ID NO: 47234 - protein, 312 aa, Borrelia burgdorferi
MKIKCKVHASLALIKYWGKKDVFLNIPATSSLAVSVDKFYSISELELSNRDEIILNSKPVILKNREKVFFDYARKILNEPNVRFKIKSKNNFPTAAGLASSSSGFASIAACILKYFNKYSCNSASNLARVGSASAARAIYGGFTILKEGSKESFQLRDQSYFNDLRIIFAIIDSNEKELSSRAAMNICKRHKFYYDAWIASSKKIFKDALYFFLKKDFIHFGATIVKSYQNMFALMFASSIFYFKNSTIDLIRYAADLRNEGIFVFETMDAGPQVKFLCLEENLNTILKGLKQNFTGIDFIVSKVGCDLEWI

SEQ ID NO: 47235 - protein, 317 aa, Borrelia burgdorferi
MDLISFSVPGNLLLMGEYTILEEKGLGLAIAINKRAFFSFKKSDSWRFFSKKKKIDDFSLIENRSDFVFKMFAYLSQNCFFNLENFAYDVYIDTSNFFFNDGTKKGFGSSAVVAIGIVCGLFLIHNATNVVEKGEIFKYCLEAYRYSQGGIGSGYDIATSIFGGVIEFEGGFNPKCRQLGAVEFNDFYLMQGLQAIKTTTSICEYNKHRNSILDFILKCNLEMKKLVLNASNSKSALISSLRRAKELGLAIGEAIGVSAALPSSFDHLLGQCDLIKALGAGNETFLVYRPNIEAFNLSKIISIVLENEGIKFESDKC

SEQ ID NO: 47236 - protein, 189 aa, Borrelia burgdorferi
MYYNNYIKEIVMEKYLSYIKKDDLDAIQLKLQELLASLHIFYSNLRGIHWNIKDTNFFVIHKKTQKLYEYIEKIIDIVAERSRMLGYDSEFRYSEFMKKSFIKELDIESTSNFLPSMESIVCSLTEILKNIFGMRKLIDTAGDYGTANIMDDIMSDLEKHLWMHKALLENCDCFCHDENESKCCECDAK

SEQ ID NO: 47237 - protein, 447 aa, Borrelia burgdorferi
MFLMLESLGSNFRNFINYLSGKSTINDKNIAEAIEIIKNSLVDADVNLRVIRRFLNSIIEESKGVKVLRGIDPKSQFIKIVNDNLVKFLGGKNYELSLHPANKQSYILMLGLQGSGKTTTCAKLSLKLKKENRKVLLVAADTFRAAAVEQLKILGGQVGVPVFSIEGEKDPIKIVKASMKFAESNFFDSVIVDTRGRLEIESLLVEEIKKIKGILRPAETILVVDSMMGQVAVNIAKEFNENVGLTGAIFSKFDSDTRGGAVLSFKSICAVPIKFIGVGEKIEDLDSFYPERIASRILGMGDVVSLVEKVQSVVDKEEAIKLEEKINKASFNFEDYLSQFRRIRQVGGFSNFVSFLPGVSKSMLNSNNLNEESFNKEEAIILSMTKKERINPVILNNPSRKKRIAMGSGTTVFDVNKLIKKFSQATLIMKKMKNKDFQNKIASLLGK

SEQ ID NO: 47238 - protein, 86 aa, Borrelia burgdorferi
MSVKIRLKRMGAKKRPYYRVVVMNSTSPRDGRAIEELGYYHPVEKQNQIKIKEDRMKDWISKGAILSDTVKMLLNKNNLNAKSQEV

SEQ ID NO: 47239 - protein, 82 aa, Borrelia burgdorferi
MKEYGNEIELIEFIVKSLVDKEDEVKLNVIEGEKSTILELRVSQSDVGKIIGRRGRIARAIRTLLGACAAKTNRRVQLEILD

SEQ ID NO: 47240 - protein, 166 aa, Borrelia burgdorferi
MFIKGVILSSYGVNGYARVKSISNNFCDFINLKNNKVLLKKSNSSSVEVKVVDVNIKGNSLFLKFEEIDTPEAVRPLIGFELWVDDSLASSLKEGEYYLGKLIGYAIVNNNKKLGEVVAFFEYLNSVFLEVRVGIKFFFIPFLSIYIGDINTQEKTIELKVLDLLK

SEQ ID NO: 47241 - protein, 239 aa, Borrelia burgdorferi
MKFTVLSLFPAIIKPFFENSIMKKAINKGIVSFELVDVRDFSKDKHKRCDDLPYGGGAGMVLKAEPISFALEHVESAKKTTIFLSPSGIKYSQELAYSLSKREEIVIICGRYEGIDQRIIDLYVDFEISIGDYVLSSGEIAALVLIDSVYRLLDGVINPNSLLEESFGVKNGLLEYPHYTRPYDFKGIKVPEVLLSGHHANIKNWRLVKAREKTKKNRYDLYLKYLEIIGEDNGFDKKN

SEQ ID NO: 47242 - protein, 121 aa, Borrelia burgdorferi
MDLIRKIEAQNKKNEAFVFNVGDTVRVVYKIIEGSNERLQSFEGIVISFQNKGIGKTFLIRKISSGIGVEKIFPVYSPIIEKVEVLRRGKVRRAKLYYMRNRIGKAAMKIKERLTIKKVKH

SEQ ID NO: 47243 - protein, 80 aa, Borrelia burgdorferi
MDNDEIFSKVRSIISEQLDKKEDEITTDSRFVEDLNADSLDIYELLYLLEEAFDDKIPENEANEFETVGDVVNFIKKRKG

SEQ ID NO: 47244 - protein, 410 aa, Borrelia burgdorferi
MNLGKNNPNIIKIGKIFKKNNYEFYLVGGALRDLLLNKQPYDFDFATNATPEEIITLFPNNIKTGIKHGTIGIIFNKKIFEITTYRIEKEYENNRAPKQVEYTKNLLKDLERRDFTINAIAMDIFNFNIIDCYNGKKDLNKKIIRCIGNPNKRLEEDALRILRAARFSSTLNFNIEKNTLISMKYKKENILMISKERIKNEFHKLLEGINIQKGIYYLKKVDFFKNFFNLEIKTKVIKKIALLDKNKFYLKAITILTIKKPIKELKEKLTLLKFSNKEIKLILFYRGIIDNNNIFNVKKLSDIRYLLSKSTREHYKEIIDIYKALKGKNKRYLFIIKNIKRKKLLKNPLSLKDLKINGKDIQNLEQIENKNIGKILNMLLRCVIENPKLNTKNYLIKKIKTLKVNVFHSF

SEQ ID NO: 47245 - protein, 523 aa, Borrelia burgdorferi
MKYLQTVASMKSKFDIVAIVEQYIKLVKSGSAYKGLCPFHAEKTPSFFVNPLQGYFYCFGCKKGGDVIGFLMDMEKINYNDALKILCEKSGIHYDDLKISRGSENKNENKDMVSKIYSLNSRLINTIKFFLSKNKKALDYVLKSRAISKEIVDLFELGYLPFNFKNGLELHDFLVSKGYSSEVLRKSGLFSKTNPKVSILFQRLIFPIKDFKGNVVGFGGRDLDGKGSKYINLGETEVFKKRELLYGFYEGFEEIKSTKSVILVEGYIDVLAFFTSGIKRAVSTLGTAFSKEHLALIQRYADEIIFSFDGDDAGLSATLKAYQICLPFNINVSVVRMDFGTDPADVLKSEGVDSLQKILNNRCDAFEYLLDVYSNKYNLNKTVDLNAMINLFLNLINLSKVDTQKKIFLDKLSNKLGIGVTTLLKDYYRIKERFVVDNNKRNLYAHNDDSYERYLIVALLKNFSYFSIVRRNIIDSDLINVDARKVFMCFENLFENNKDFSLMDLKKNLKDTYKVSEFFLKKF

SEQ ID NO: 47246 - protein, 631 aa, Borrelia burgdorferi
MSDLEKKYSKLIEGIITHLGDRKSLSFSELSNLLPDDILEPEILDCICSVLEDRGIRLVNKISELDLVVSEDGNDEEEEVEIESDRNFMILDDGFQSDEEDIDIDVKLDDCDEEDISVKDDLGSGYIKGNVLKDSHSEDPIKLYLKEIGKEFLLTGNQEVELAKQMDSGESIIENILKNEGLVIENYYNLVNTIYSRMEREEFFKREKDKDKESSPDYYNKKKRIASFYKIPLKPIQDRLISYVDNKHRVYDLGGDIFEKNLKKERLALKELLRDIPLYQEELRIFSDDYIDSANKIKDLQRQQRIILSRLKIEKIRDLRVLGRDLTIAEKKIEIEKSLKLKEDAIKEQITEAQLAQKELERIEMYYEYPTDKIISMSEEIAKGKQMMQHAKDQLIKANLRLVVSIAKKYANRGLHFFDLVQEGNIGLIKAVEKFEYKRGFKFSTYATWWIRQAITRSISDQARTIRVPVHMIEQINRLNRETRYLIQVLGKDPTDEELSDRLGWELKKVKTVKSVSREPVSLETPIGEEEDSVLSDFIEDKAIKNPANHTSFVVLQDQIRAILGTLPEREQEVVKMRFGLEDGYSLTLEEVGLHFNVTRERIRQIESKALRRLKNPKKTQKLKDYLEDLN

SEQ ID NO: 47247 - protein, 361 aa, Borrelia burgdorferi
MELLWKTFREVVLNLFKSFLIDIGIDLGTCNTLVYIKDYGVVMSEPSVVAIDITKGNKVVAVGRNAKKMLWKTPENIKAVRPLRDGVIADIENTEKMIKYFINQIFSRKKLFFKPRMVIGVPTCITEVERRAVKESAMNAGAREVKVIEESLAAAIGSDIPIFEPTGHMVCDIGGGTTEISVISLGGMVVSRAIRTGGDEFDESIIKYMRNSHNIIIGQQTAEKLKIKIGNVYPDIQNLRVEKIDIKGTDAVTGLPRKQLVDSMEVRESLQEPINVVVDEVKRTLGATPPELATDIVERGIILTGGGALLKGLNRLLSKETGVPVYVADNPLLSVAVGAGLFYDYANRIDISKNIYSFINE

SEQ ID NO: 47248 - protein, 581 aa, Borrelia burgdorferi
MSKDLDKEDILYKKRHSIAHVMAEAVLDLFPNTKIAIGPPIKDGFYYDFEFKKQITEDSLLDIENRMREILKTGSSFEKEIISVEQALEIFKDEPYKIDLIKNFDLQNEVSIYKSHNFVDLCRGPHVENMNKIDPKAFKLTSIAGAYWRGSEKNPMLTRIYGTLWNNEKELRSYLNLREEIKKRDHRKLGKELDLFSIHEEIGPGLVFFHPNGAKIRALIEDFWREEHSKNGYDILFTPHIGKSWLWQTSGHLDFYKDSMFEKIEMDKSDYYLKPMNCPFHIAIYNTGKHSYRDLPFRWAELGTVYRYEKIGALHGMMRARGFTQDDAHIICTHSQVLDEIKEVLRFAIYMWSKFGFSNPKAYLSTKPDKSVGNDSDWEMSLKVLEETLSDFEVPYEIDKGGGAFYGPKIDLKIVDSLEREWQMSTIQFDFNLPERFNMTYTAEDGKEKRPFMIHRALLGSIERFFGILVEHYGGAFPLWLSPVQVVIIPVNNIVEDYAIKVFNKFKNEGIRIKLDNSSSRMNAKIREYQAKKIPYMFIIGEREATEERISIRTRTNEQINGMKLDEALKFILFKIRDKEI

SEQ ID NO: 47249 - protein, 209 aa, Borrelia burgdorferi
MNNLIKVITPNKITLVRIALSFIILILFFLENVFFSYLFFGIIWFLIIFNEFTDFIDGYLARKYGLVSNVGKILDPYADVLQHLTYFVFFFYKGITPYYFFVIFIYREISIGFVRNLIIQFNVVQQANFLGKLKSLLYAVCTFASLLFYTLNQLNFTESVQNFISYILTFKFKFLFIVQMTYVCAAFFAILSFLEYVLIFLNVKKYENK

SEQ ID NO: 47250 - protein, 443 aa, Borrelia burgdorferi
MYDMLKFEFSDRFLLFSYFVLIMFIGSLLLMLPISWEGDGKLAYIDALFTAVSAVSITGLTTVKMEGFSTFGFILIMLLIQLGGLGFISITTFYLLIPKKKMNLTDARIIKQYSLSNIEYNPIRILKSILFITFSIEMIGLILILICFKLRGVNISFLEALFTTISAFCNAGFSMHSESIYAWRDVPEAIVVVSILIICGGLGFMVYRDVNNTIKNKKKLSLHAKIVFSLSFFLIIIGAILFFFTEMHKLKAGYSMSTLIFNSIFYSISTRTAGFNYLDNSLISGRTQIISLPFMFIGGAPGSTAGGIKITTFFLIVLAVVKNQNGNGYIIGSYKVSIDSIRFALLFFARAIFILSFSFFMLLFFEGGSGNWKVIDLGYEVFSAFGTVGLSVGVTQDLSFWGKVIIIFTMFAGRIGLFSMAVFVSRKSRFEEFTRPRQDILVG

SEQ ID NO: 47251 - protein, 448 aa, Borrelia burgdorferi
MVYRIKNENLDFKIDSLGECKQNNPLIDFYASEGSSHFVNEKNKIKFSVYRNEDKGDRYEDVLLEKAGPREKIYFVPRHVKAAITTCGGLCPGFNDVIRSIVRTLWKIYGVRNIYGVKFGYQGLLPESNSPFINLNPDVVDDINKFGGTILGSSRGGIKPVEIVDTLERMNINMIFNIGGDGTQKGSLLIAEEIEKRNLKIAVVGIPKTVDNDFMFVQKSFGFETAVEQAVAAVAGAHFEANSAYNGIGLVKVMGRDSGFIAAHTALSSNDVNFCLIPELDFDIEGPNGFLVHLERRLLEKESLEEIPHAVILIAEGAGQKYFDHFPKKKDDSGNLLYEDIGLYIKDKITEYFKAKNIQFTLKYIDPSYIIRSSPANASDSLYCARLGSNAVHAAMAGKTKMLISLWSTKFVHIPIKMAVIDRNKVNPNGSFWRDVLSSTGQPISMKN

SEQ ID NO: 47252 - protein, 532 aa, Borrelia burgdorferi
MFMLNYKNLNELENFKILEGIAPEVLKTALTGKRIKEYDITIEGDSVHYNYASKQINETHLKIFQNLSDEANLIEKYKEVLDGEKINISENRKVLHHLTRGQIGKDVIEDNKENMREFFQSELEKIYNFAKQIHSGNIKSSNGKKFKNVVQIGIGGSSLGPKALYSSIKNYAKKHNLALMNGYFISNIDPDESEEVLSSINVDETLFIIVSKSGNTLETKANMQFLINKLKLNGIKEYKKQMVIITLKDSMLAIEEKGYLEYFFMHDSIGGRFSPTSAVGLTLLTLCFTEKVAKEILKGANEADKKSLNKNVKDNASLLAALISIYERNVLNYSSNCIIAYSKAMENFYLHLQQLEMESNGKSVNRFNETINYKTVRIIWGGIGTDVQHSFFQMLHQGTDIVPMDFIGFNETQLKEDVISDNSSSNDKLKANLIAQIIAFSKGKENSNKNKNFQGERPSALIYSKELTPYAIGAILSHYENKVMFEGFLLNINSFDQEGVQLGKIIANQILKNDNFKDEVIESYSKKILKKF

SEQ ID NO: 47253 - protein, 932 aa, Borrelia burgdorferi
MKLNSPNLKKINTHKLLIYLTYFAVSFSIITLSLAVSKTINIQKDKNFGYVNPAVPSRLLDINGKQITQFISDENRELMPLRKMPDNLINTLLIREDIGFFSHRGFSLIGIFRAAFNIVLGRYFSGGSTLTQQLAKLLYTNQARRSILRKLHEIWWAIQLEKKLSKYEILEKYLNKVYFGNGNYGIVAASKFFFGKSVNKINTAESVMMIIQLPNAKLYSPLYNPEFSKKIQRAVLNQVVSNGIVKAEIAEKEFNEYWQNYDWTRMADTSAISNKKDQAPYFSEYIRQKILKYLPDGANIYKDGYSIYSTLDLEAQKYADKVTNDMINKARTMHNLNRSSETIIINSEIVPVVDAISDLLGIKNLRINGRQYKKLRKRKFYEDNIDLIASFGAILGIDKIDKATKEYIIKNKLTPKLIAQPEGAMIAIDTTSGAIRAMVGGSGHTKDNEFNRATQAKVQPGSAFKALYFAAAIDLKKITAATMFSDSPVAFLNKNGEVYAPGNYGGKWRGNVLTRQALALSLNIPALRILDRLGFDSAISYSSKLLGITDPKEIEKTFPKVYPLALGVISVSPIQMARAFAILGNSGSEIEPYGIRYIEDRAGRIITNEEASILAKIKNKEHQTQIVSPQTAYIITDMMKSTIQYGTLANQRYTNLKNFKSDIAGKSGTTQNWADGWAIGYSPYITTAFWVGFDKKGYSLGISGTGTGLAGPSWGEFMAEYHKNLPKKVFVKPAGIISIPVQAETGLLPEEIADEKIINELFISGTQPVEKSKYYENKQEFKNTIEFNIYGIDEINNNDEINFDTPEFEYLDNNLESFNNNSNNDNNLESFNNNNNDLESINDNEENKNEDEIEMNIEEPLNEIENKNPQQDLVNNNNNQEMLIENTKEIKDEVIVNETNIETQSTKELNSNNNENEKINNKDVNGEDIQLD

SEQ ID NO: 47254 - protein, 335 aa, Borrelia burgdorferi
MLCSYFMKFLFDIPLPIMILAPMEDVTDTVFRNLIHLIGSAEGEPHIYFTEFISTKGILNGSKQSVQHVFLKPNELNRPLIAQIWGNVPEQFYRAIEILGSMGFWGIDINMGCPKSKIIKKGVCSALINNKSLAKEIILASKEACARFNLPLSVKTRHGFSYPEVDDWLGFLLGLEIDMLTVYPRLAVNQSKGPVNFDIFYELVKLRNNLSPSTLIIGNGDVLSLKEARYYVDKYLIDGIMFGRGIFDNLNLFKPFSKHFLDSNLNFRLNILKFHIKDFHATWGLEKDFNKLKKYFKIYFTEKERQSKYFSNLINSKTYEELFENLKVIDMVGDF

SEQ ID NO: 47255 - protein, 875 aa, Borrelia burgdorferi
MNCRPLEKYDPKAFEDEIYTKWLKNNVFLPDNSLFEKFSMVAPPPNVTGVLHMGHALNFVLQDVLVRYKRMKRHNTLWLFGTDHAGIATQAVFERHLKKIGKSKDDFEREELVQEIFKLKDRHRGIIVNQINKLGASYDHSRERFTLDENLCKAVNKVFKDLYFKGLIYRGEYLVNLDPGSGSVVSDEEIEYKEVDGKLYFVKYFIDNSSFIEVATTRPETMFGDTAIAVNPNDERYKSLVGKEVTIPLTTKKIKVIADFYVDSAFGTGALKVTPAHDPNDFEISKRHNISKVNILTQDGKLNKNVPLQYQGLSAKDARFKIETELMEKGFLQDVKKHKQQVGHCYRSGEVIEPYLSTQWFVRMKPLADKALKALENGELKFYPKKWENTYKYWLSNIRDWCISRQLVWGHRIPVWYNVDTSELIVSDTDPSLDEKNMGKRFVQDPDVLDTWFSSWLWPFSSLGWPNVDVDFKNYYPTNTLITAYDIIFFWVARMVMAGLEFTGQVPFKDVYITPLLRDKQGKKMSKSLGNGIDPLDIINEYGSDSLRFTLSFLSVQGQDLNIDAKDFMFGAKFANKVFNASKFILLNLKNRKILNDLKFNDIDKWLLTSLNSTILGVESSFANYKYNEASKFVYEFFWNDFCDWYIEISKIDLNNENVDIQNMAISKLLFFLKKSLLILHPFIPFVTEKIYSEFAEKEDILALNEYPNFDIANNFQEEFEIFKVLKTFIIAIRTLKSEFNIPASVEIDVALKFDADFKYEAYFKANESIVKRMINFKNIFYNENYDGMLGVAAVGFEIYADVKSLIDKTKELIRLEKQLEKYKMLNISVSKKLENENFLMNAPKEIVESEKLKFVEFSSLINKINNYIINLKNL

SEQ ID NO: 47256 - protein, 565 aa, Borrelia burgdorferi
MKIKLIFKIILLLEYQFRQGNGLITVSNLEVAFGERVLFKDVNIKFSPGNCYGIIGANGAGKSTFLKVLGGMIEASKGEISIPKNQRVAALEQDQFAYDGYKVIDTVIMGHKRLYSVQKEKDEIYSKLDFTDEDGIRAGELEAEFSELGGYEAESDAAVLLKGLGIDEAIHNNLMGDVEGALKVRVLLAQALFGDPDVLLLDEPTNNLDLQSIKWLEEFLINFENTVIVVSHDRHFLNQVCTHIVDIDYGKIQVYLGNYDFWYETSQILNKQLKDAKKRSEDKIAELKTFIQRFSSNASKSKQATSRKKLIEKIKVEDLKPSSRKFPYVNFKSERELGKNVLTIKNLIKEFEGNLILNKFSIIVEPQQKIVFLGNPMFATFLFDIITNEDRNYKGHYEWGSTVNFSYFNKDNGKYFDLDLNLVDWLRQYSKEQDETYIRGFLGRMLFSQDEALKKVNVLSGGEKVRCMLAKAMLSGANVLILDQPTNHLDLEAITSLNSGLKEFKGVVLFTSHDHQFIDTVANRIIEFTPNGIIDRYMTFSEYVDDAKIRDLRNNLYGNNAGFRL

SEQ ID NO: 47257 - protein, 309 aa, Borrelia burgdorferi
MINVEKVTKMYGPFTALFNVSFKVEEGEVLGILGPNGAGKSTLIKILTSFHYPSKGNVKIFGKDIVEHSKEILQQIGYVPEKLALYPELSVKEYLKFISEIKGVKKLKKEIDRVISIFKLKEVEDKLISQLSKGFRQRVGIAGALINNPKLVILDEPTNGLDPNQIIEFKEFLRELAKESTILFSSHILSEVESICKRIIIVNNGVIVADDTKENIIKNKLKEIEIELIVSKKSENEKKIFNSKNDIFSLIKLEEHEKDLNISLKLSQGKTEEDLFSYIVKNNIILKAMIPKHESLEKIFSKLTKEREK

SEQ ID NO: 47258 - protein, 382 aa, Borrelia burgdorferi
MNNFFKKALTKLNKLSNEQKTKFIEQIYKKIEIYDGIFASINEGIIVLDKQNNIIYANKILYQILALTSKSKIEILDDIQIPNLINLIKELVRTEDKIIGLEVPISNGIYIKISFMPYVKEKKLEGNIILIEDIKEKKKKEELFRRVEALASFTRHARNIAHEIKNPLGAIDINLQLLKKEIEKQKMKNGKAENYFKVIKEEINRVDKIVTEFLLTVRPIKINLQEKDIKQVIGSVCELLNPGLENKHIKLLLNLNKISNILIDEKLLKQVIINIVKNAEEALLETKKEIKKIEIFLFEKDNKIHINIKDNGNGIKDGVKEEIFKPQFSTKEKGSGIGLTISYKIIKELGGEIFVESKEGKGTIFTITLPKLNKKNILIEGY

SEQ ID NO: 47259 - protein, 363 aa, Borrelia burgdorferi
MSNKKIIFFTGGGTGGHVFPGISIIQKLKEFDNEIEFFWIGKKNSIEEKLIKEQDNIKFISIPCGKLRRYFSFKNFTDFFKVILGIIKSFYVLKKYKPQLIYATGGFVSTPAIIASSLLKIKSITHEMDLDPGLATKINSKFANNIHISFKESEKYFKNYKNIIYTGSPIRREFLNPDPKIIKQLTQNTNKPIISILGGSLGANALNNLALCIKKDAEIYFIHQSGKNLNDLSEKNYLRRQFFNAEEMASIVKFSNLIISRAGAGAIKEFANAGACAILIPFKKGSRGDQIKNAKLLTNQNACIYIDEDEILNINILKIIKKTLKDREKINSLKENIKKFNNKHSSTLIAKLLIKDIKETKSK

SEQ ID NO: 47260 - protein, 346 aa, Borrelia burgdorferi
MKVLGIETSCDDCCVAVVENGIHILSNIKLNQTEHKKYYGIVPEIASRLHTEAIMSVCIKALKKANTKISEIDLIAVTSRPGLIGSLIVGLNFAKGLAISLKKPIICIDHILGHLYAPLMHSKIEYPFISLLLSGGHTLIAKQKNFDDVEILGRTLDDACGEAFDKVAKHYDMGFPGGPNIEQISKNGDENTFQFPVTTFKKKENWYDFSYSGLKTACIHQLEKFKSKDNPTTKNNIAASFQKAAFENLITPLKRAIKDTQINKLVIAGGVASNLYLREKIDKLKIQTYYPPLDLCTDNGAMIAGLGFNMYLKYGESPIEIDANSRIENYKNQYRGKNNEKNFSNA

SEQ ID NO: 47261 - protein, 293 aa, Borrelia burgdorferi
MFVFYIKKNKFIIVIFIIISIVIAITQAFASFLYFNDNSKIANAPLKNRFEKTQKESLIIKNNNEDKKAKSKPKFYLIIDDVGYDEFMLEQFIKLNLKITYAIIPFLPKSMSLYKKLKNANKTVIIHFPMQSKHRNSIEKFHINIKDKKEEIHKKIEKAFKKYPDAKIMNNHMGSLITSNKDLMKIILEKLKEIDRYFFDSVTIAGSVPEIIGKEIGVKVEKRDVFLDSKDTEESVTKELEKAKNIARKNGMVKVIGHIWSKNTLKVLKKEGPDLNQEFEFDNLLNLYEETIR

SEQ ID NO: 47262 - protein, 103 aa, Borrelia burgdorferi
MYALVEINGKQYKAIEGEFLKIDKISPVEKDKLEFNSVLLINKDGEVKIGKPYVVNSLIRCTYKEDKKDKKVVSYRYRRRKSSERKVGHRQTYSYILVDEIVF

SEQ ID NO: 47263 - protein, 81 aa, Borrelia burgdorferi
MATSKSGGSSKNGRDSISKRLGVKRSGGQFVKAGEIIVRQRGTKFHKGKNVGLGRDYTIFALSSGKVEFKTLKGRKYVSIV

SEQ ID NO: 47264 - protein, 328 aa, Borrelia burgdorferi
MYNFKDSVNITVVSGNGGSGCVSFLREKFNAKGGPDGGNGGSGGSVIFKVRENLSTLSFYKNGHVLCAENGKPGMGFKRSGANGKDLTLFVPPNTEVYNENDGTLLYRLKNLNDEFVVLKGGRGGLGNWNFKTSVRRVPRFAQPGESGNSLSVRLELFLVADIGLVGLPNAGKSSLLNRITSAKSRVANYPFTTKIPHLGMLRRSYDDLIIADIPGIIKGASFGVGLGTKFLKHIAKTKILALVIDISEANFLESYNILLNELKSYSHKLFNKKKIIIANKLDLDGSEKNFDCLIKALGKEKVVGISIYENRGIDELIKEFFILAKTF

SEQ ID NO: 47265 - protein, 214 aa, Borrelia burgdorferi
MGRRQVVSQLVLVQSFEGSNPSVPVFYIRSFLVENSRVLSCQYRSSFGSSNARRIRAKSEIPAVVYGQGKDVSHLRIKSSEFNKKFAKFTDNTVLILDDGKLERCVFVKDAAENIASKLIYHIDFYEVDRNVELEKYVPIKLIGASIGVKEGGILTVLKEQVKVRSLPLDLPEFIELDLTPVNKGDSVLLKDLVLPSNVRLAENDENLEVVIIK

SEQ ID NO: 47266 - protein, 440 aa, Borrelia burgdorferi
MHFLDENIQIKIDKFYKKNSLDKNRVIVAFSGGADSTALLLNLKYYLSNNVIAFYFAHFIRSDNEQNQEIEHVKGFCDLYNIALQIKKCDIDIKSESARLGVSIEELARKFRYIALENALKENGANYIALAHNENDQIETIIMRFFQGSFLDGLSGIPSVNRNIIRPLLEVSRLEIENFLSLNNIGFFVDSTNAQNLYLRNRVRNNLLPAIKKVFKGYEKCLKRISEFSKEFADYFGKDEFFPVEKGKYYYSFDLKTFLDFPKYLVFRLIFKILNSEGIAAKVSYKALNEAFKVEINRKKNNVLLKTNDFFLEKRHNKINLIFKRDEKFYKPFDFILEVGKWHSLSLGKILLKYLECNAASVSRLKCCSYEFRYKFFKDRLKAKKFFSKFIRCNPAYLMLLALDNRLIGIIDLNTLNLVWSEKSILKKINISLIGGLLKE

SEQ ID NO: 47267 - protein, 639 aa, Borrelia burgdorferi
MNGNNNMNNNGKSNNKKKNKNWILGLVVVFLISAIFMSYFIRGGESYKNVPYSTFQSYLDNGLVESVVIIDKNLIQFVVKGSNFAKSYFSTSIPYLDINLLSELKNKKVELSSGKSQASLIGVLLQTLPWILFFIFFFFIFRQTQGGGGKVFTFGKSNAQKYEAGKNKITFKDVAGQEEVKQELREVVEFLKNPKKFEKIGAKIPKGVLLVGSPGTGKTLLAKAVAGEAGVSFFHMSGSDFVEMFVGVGASRVRDLFDNARKNSPCIIFIDELDAVGRSRGAGLGGGHDEREQTLNQLLVEMDGFGTHTNVIVMAATNRPDVLDSALLRPGRFDRQVTVSLPDIKEREAILNIHSLKTKLSKDINLQVIARATPGASGADLANLINEGALIAARNNQDEILMKDMEEARDKILMGVAKKSMTITDRQKLETAYHEAGHALLHYYLEHADPLHKVTIIPRGRALGVAFSLPREDRLSINKHQILDKIKICYGGYASEQINLGVTTAGVQNDLMQATSLAKKMVTEWGMGEEVGPIFLVDDEAPIFLPKEFSKAKAYSENTADKVDREVKRILEECLKEASDILLKHKDQLVKLAKELVLKETLTDKEVRELLGFEANKDEYDLFSSDSTTKEVKGEDVKG

SEQ ID NO: 47268 - protein, 495 aa, Borrelia burgdorferi
MFMFYLKMGFILFISINLYAISVKEDEDISSILFNESKNFSNLQKGNDLIYGSLDFNLLASDALYELSLKENVALTDKIYLLKEAININNFKAVTLKEVYTYYFSLLLRQNENKNMYEEIITLYRNLNEELQIDKDLICMRLEASGRLESFGDDFKKILFKAFSLYGNDFLFFKWFLKEDRFFFSIFNTIRSKEDFFFTTENINYIFRNSNFNYDNSVSLFSFLKGKIKEYNGIHGIYFLKYKLLDPDEAYRIFKKFPPETINEYKMFYDLLEDPDMKSKFLEDYKSLSGIYCIDNKNNVAILKDGVLVGIFSGIVDFDSKFSLNSKYFNKIYFKDKSPVYYENSLLGYKINYSVYPYVDMIEVQYPDKRDVYTFALHAFKFNLFNNLGCNFNSFGIRELFLIDIRDFFIPNALNLFFEKTSVLDIRSSLISKKKYFGSNLVEIKNYVVGSLVSIYKKVNSSKKFNYIEIYEKNKLKIKKALLDDDSFESYYSFE

SEQ ID NO: 47269 - protein, 367 aa, Borrelia burgdorferi
MGFCLDFANKEDTKLNNIVSVSHFDFRVKINLILVVGPMGSGKTEYAAKIYKDSLVVRKKSFKVLGNIIKGNRSRVNVFFIRNFLDKRRFQDYPENVIPYRGGGKDKIDEIGYASNSFDIENLIASNPSCGTFIIDEACFYDERLIFVLNKISSNENILFILPTLLYNFRKESFNDTAKLLVEYSDKIYKLGAYCGHIDCMEESFFSYRYYFYNNKEIPAPYFDPLLIVGGDEEIESAIYPNYSTRCSMHHYLIGKEYFFSFLKPFALLYSQGDKKFLENEIVALSTDVENSNFVNSLDSEKAREFRAEILRNILELPFLAERALITLFSEYSILSKDNFKDLVFKFSLNKDYINKIFFSKEGKEFF

SEQ ID NO: 47270 - protein, 257 aa, Borrelia burgdorferi
MEKIIKTKIKNGKINNINVLLLKNNKFIHSIDNYYYIIIIDNLIIDTKRKEEKIFVIKILKNFYCIEGIDGSGKTSITNKLKALCNDESRYYFTKEPSSGIIGEMIRKQLMNFENPLEESTFAYLYAADRHDHLYKKGGILEILNTKSRKIITDRYLFSSIAYQGKLGYELNKNFPLPEKVFFIETDPNIAYERIQKNRTQSDLFELEKYKTFEQIALKYLKIFKKLEKKINVIYINNSIKDNLDKNAKKIFNLIKF

SEQ ID NO: 47271 - protein, 1465 aa, Borrelia burgdorferi
  MISC_FEATURE (799)..(799): X=any amino acid
MNLLFLRSKTFILLILPFFIFVLIIFSINLFVQAQIYSAKFFAIKYLESKFGFKIKYDKISPYFLSSIKIDGLELSLDGKDKILIDIVRIDLNLFKLILGDENIILNVYVKGSNFNFDINDFSLSGDLNPSNAYSDNENTVFNKILNYLYRLNINLENININIKLNDNSWLNFQVKNFSLSTVDEDFLFSSVVDFSAVKNLEINLPFERVDDGILDSTFYFEGKFKKGFEDGYVNFSFFEFKTSYFSLLEQGFQINYSKGNLKIFNLRRENFDFNLSYDKANGFVRLDALFFNVSLLDWIKLNKGFEIYKDYFDISLNGQLAFSYDFKDKDLRYAGIIDSSLNVDTIGKEVQGLQLEIKGDDRIVSVKNAFLKLKRGVVNYKGYYSLKDLLPMGRLNFKSAKILNFNDLNGYLDFNKDKDIFSVKSDNFSLGNLSFQNLILKTYFLKDKIFVDYLIYLENKNSQISLKGDLNDEEFSLSLGIKEFPLLFLKEVIPSSHLINFFPKTLFSGKYLNLVSDFNFNKFNYHKNKLKKFNFMVFSKLDNFKFVLDASGEKNFYKSNNFDLQYNDHNLHSNLFVELFESGFNISTNFSYLNKVYPLHFNVNLKDKFIVAESPLGIKLDFNYFDSKVVYTLNVNDFKVYNKTSDLLININFNGNYLGLNEDLKFKIDEFNIIKVSKTPAYNFNFGFKGLYEYDKLYISDVKLINKLSNLQGYGQFNLKDNFNGSLNLFSSLNSERYFLGVNSDEYGSYFLLKFQDLDFYNFNSFSLLEGKVNGNFLLNFKKNDFKNYSLSGYLEAXKLTFLGVPVQFSMNLGLLDNKLNIYDIKAKRNKKEFLTGSLRYDLSSSIGVSNIVFNSDLFSYRFNANFRNFQSGVEEQFGVLKTKTEGEFFFRDIKYKNESLSNLTIEFSNDFEKFNMASIDYDLVNVLYHYGSGEYSFILKDYLPLSFNSSGKIIKNKILGNVRDIKFDSKIITKDFLDSHSLFNVDNHFILYDLVLNGEFDIDGDLYNPNINGSLNIQKGSISTEYLRASRKFGGDRALEIFDMPVAIQDNKIIFSNEFNLDRYSKIFVSTSLNLNFLSDTIIDYYKIDINVTGRTGVPIKFEKIALSFTGYALGDFSIEGNADEIMFKGILNISNAWVYSLESSVVDLLINPFKRAKRLQTDINLLDFDILTDLEINFDSGVTFHWPDSNISFLQATISRGDKLVIKSDTKTDDFIIKGDLNIASGFVNYNNKKFIFKSGSYISFNESRAKFDPWIKAEATNTIKDRNDKLLVTISIDSPLSLWKIEFMSYPSRNEQEIKYLLSGSTIGGYEGGLRSAGTNAAEMAIGIVSDIALDFLIQPIEDYMRSVLNLDLLSIKTDILKNSINSNFFKIGNPTFVDVLDNTSVKVGKYLVEGVFISGGFGFLKEQMSPFSKDLNFVVNLGIEFDSPFFLVNYEFDYNFMKKGLDGIGNNIGISWKFKY

SEQ ID NO: 47272 - protein, 862 aa, Borrelia burgdorferi
MEKNVTPMIRQYLDIKKKYKDAVLFFRVGSFYEMFFDDAIEVSKLLNLTLTKRENVPMCGVPYHTSKEYIRKLILFDKKVAICEQASNSTSGGPLEREVVEVITPGVIIDEDFLNDDINNYLVAISDYKDYYSFSYIDLSTSSLGIMFYENGFFEKLKRDLEKYSPKEIIVSENFYYEYSEKLNLSRFLINRVPTWHLDKDIAIKTIKEHFNILGLSSLGFDEEKPYYISIFLIINHIKNNLKNLLSNIDKIDINNDSSYMFLDDVTQVNLELVKNNNDFSSQYSLYSVLNDCKTAMGKRLLREFILNPILNISEINTRLDHVEFFCKNISLTVTLRETFINIWDIERIISRIQMKRYIKKDFLFIEKALSVFFTVKKLFDKHNFDYWNFDKFEEDSISKVYFLINSAISSAPDELIKRGYDLKLDNLKDLKINANKYIDQYLESERLLSKINNLKIRKTNNRGLFFEVTKSNYAQVPPHFMESQALNSSKRYKTEKLISLEVDINNAEDNVVAFEQEIFDEIASNVVMHNKVLKKVAEFFAYIDLVVNFGYLAKKNEYKRPVLTSGKEILLEKSRHPVVEHYTKNTEIFTENFVRINKEKYFCLITGPNMAGKSTYLRQVALITLMAHIGSFVPASKALIGITDKIFCRIGASDNIAKGESTFLVEMNETANILRNATEKSLIIMDEVGRGTSTNDGLAIAYSIIEYILEYIKARSLFATHFHELSSINHQAFINLSMKIEKQGNDLVFLREVEEKPSLNSYGIYVARIAGLPLRVIDRANVILESLVGREGNSCLEFLPHVSSDGNDKEILKNDTDIHIKLNEYLELKNFISNIDINNITPFQSIELLNQIVLKVISQSS

SEQ ID NO: 47273 - protein, 482 aa, Borrelia burgdorferi
MIKGTGHMIVNIANDRGMSIDSIRKTIKESVLIAYKKYFGSNENAFIKFDDDTGDLSVYAKKKIVKEVKDSLLEILEKDISKENIVEGDYAYIEINPKVFDRLSIQVAKQRTKNDLQGIEDNEILSEFKSKLNKVVIGYVQQNRNGDLYVNLGNTDGIIPKKYQSPREVYNLNDKIRVLVYNVKKGKNGIEVILSRTHPKFIEELLALEIPEIEEGIIKIHKIVRDPGYRIKVAVYSEKEEIDPVGPCIGQKGVRIQSIIKELEGEKIDIIPYSKDIKEFIKDSLTPSKIEHVYILDEDLHKALVVVSDDQLSLAIGKMGQNVRLANRLLDWAIDVKTSSQFAEMKANSEFKQETLEMFDKVMQDVVEEEQFEEISKISDLKLLDPSVISNLSKEGFDDINNFLQADEGVLFNLGVSYEKQEEINKILKEGMIIIANDNDESMEKVEEDEELLCPECGVVINENMTSCPGCKIGLSFEFEEE

SEQ ID NO: 47274 - protein, 882 aa, Borrelia burgdorferi
MSKNIDDIKNEDGKKVKIIKLKKKVVKIVTYNDLSVKNDSNSFVDLHNNSNKAEYSQSRDNRTGGYSQNRDNRAGGYSQNRDNRAGGYSQNRDNRTGGYSQNRDNRTGGYSQNRDNRTGGYSQNRDNRGGYSQGRDNRTGGYSQSRDNRTGGYSQNRDNRTGGYSQNRDNRTGGYSQNRDNRTGGYSQNRDSLSFQYQGSVKKTYVAKNNSQNKYTTTSMSFRRLIKTKVPAIVSSTPAADSENSKELNRKLGEKKKQQQESQKSYKRKKAETESKTIEQKVFEQLQKKKRENLANPIPKSIDIMGSITVSDLARKMNLKSSDLIAKLMALGVMVTINEKIDSDTATILVEEYGSKVNVVSIYDETVIEEEVEDQSKRVEKPPVITIMGHVDHGKTKLLSVLQNIDINQTESGGITQHIGAYTIVYNDREITFLDTPGHEAFTMMRSRGAQVTDIVVLVVSAIDGVMPQTIEAINHAKEANVPIIVAINKIDLPDSNPDKIKHQLSEYGLVSEDWGGDTIFVMISALKNIGISELLDMILLQSDMMLLKANPSKRAIGKVLDAKIDLGRGIVCSVIIEDGTLYVGDSFVGGACYGKVKALISEKGVSVKSVGPAKAISVLGFSSMPQAGDPFQVTKTEKEAKLISSKRQDLKKYESSKNVKKVTMLNLYDSIKEGALKELKIILKADVQGSVEALKNSLEKLTNDEVRVRVVHSSAGVITETDISFASASDAIVIGFHVRPTAKAQVLADQEKVEIRKYNVIYDAINDVRSVLEGMLEPDVEQQFIGFAEVRAVINVPKIGVIAGCYVSRGLIKRDAITNVMRDGLQIHSGKISSLKRFKDDVKEVAEQYECGIMIDNYANIKEGDIIEAFEVKKVKKSFKT

SEQ ID NO: 47275 - protein, 282 aa, Borrelia burgdorferi
MENGFLLINKEQGKTSFETLFPIKKYFNTNRVGHAGTLDKFASGILVCLVGKYTKLSGYFTSLDKEYVAEFRFGLETDTLDPNGRIVSKTDYIPNVEDIDLKLKDFVGEIYQSPPRFSSVHIDGSRAYKLALNGKFFEIKKRKVTVYNIQRLSYDFSSSLLSLKISCSKGTYIRSIARDLAYSLNSCAYVSNLKRTKVGMFRLKDSTLCENLSKASLISLESLKSFEKVYIDSNKINLVKNGVYFEIEININEFKILKSREEKILAVIQGVGLNKYKYVIIF

SEQ ID NO: 47276 - protein, 88 aa, Borrelia burgdorferi
MIDKKQKQKIVSEFGKNESDTGSVGVQIALITGRIKYLTEHLKINKKDHSSKRGLLKLVGQRRSLLRYYQKKDLEAYRMLISKLGLRK

SEQ ID NO: 47277 - protein, 722 aa, Borrelia burgdorferi
MRKILKLKIGRDELVFETGFMAKQANGSVLATYGGSSVLATVCCSSNVREDLDFVPLSVEYNEKYYAAGKIPGGFIKREGKPKDKEILVSRLIDRPMRPLFDKRFGREIQVIPTTLATDQLNPPDIVGMNAAFTAVFLSDIPFNGPIAAVRMVYLNGKFIVNPSFEEIHDSDLDIVVAGSLNGITMVEGGANEVGEDILLSAIDGAHEYIKQICNAQKEFLDIVGKKEKLPLAFEEKIFEFKDELRDFVYADLKEACFVKGKLNRDKAITLLRNKSYEYFSSLEKLTDSNESLFHKAFDDFEKEIVRSSILNDNIRTDGRTPNEIRDIISEVDILSRTHGSALFTRGETQALAVTTLGTSIDEQIMDDIDGDKRLNFMLHYNFPPFSVGETGRLMTGRREIGHGHLAQRALESMVPGKNDFPYTIRVVSEVLESNGSSSMATVCAGSMSLMSAGVPVKGQVAGIAMGLISEGDKYVVLSDILGEEDHLGDMDFKVAGTKNGITGFQMDIKIENVTKDLMRDALEQARIGRIHILSIMNTVISNSRVGISKYAPKIVQLQIDIDKISLVIGSTGKTVKAITDEFEVKVQIEQNGKIILFGDDDFKMQKAKERIESIVREPKVGEIYEGTVKKINSFGAFIELTPAKEGFLSTRLKPRDSKYGSGRFGNSNRYSRFGGGGENIRGNAGLVRPPKLEEGQRIKVKIIDIDKFGKIDLEIVRDKDY

SEQ ID NO: 47278 - protein, 375 aa, Borrelia burgdorferi
MFSVIKNDKHFNARVGFLNLPHGRVDIPCFMPVGTLGAMKGLKHAVLEKLECNLMLANTYHLYLRLGIKTVEKYVGLHNFTIWNKNFLTDSGGFRVFSFSDLRKIDLKGVHFKSHIDGSYHYFTSEGIFAMQEIFGSDIIMPLDICSSYGIDYNEANLYTNITTNWASSTFKSSKNRKEGYNGLLFLITQGNFFKDLRKRSINDILELDSPGIAIGGISVGEPREKYLEILEYSFLLIPKEKPRYVMGIGTPHYILNAIYYGIDIFDCFNPARITRHGSLLTDNGIMCIGRKEYKDDTSKVEKNCICTLCKRYSRGYLRHLIKSKELFGIVLASEHNIHYMFRLISKIRAAILNDDFLNFRTSYLKKYEEENFDE

SEQ ID NO: 47279 - protein, 512 aa, Borrelia burgdorferi
MKRKISMNKYVVSTILVMISTFFSRIMGFVKIKIFSYYFGANLDADIFNYVFNIPNNLRKILSEGAMTSAFLPEFTHEKNKSHEKAVSFFRTVITFNIISIGLIVLVMIIFAKPIMYFISYYRGENLIFASSVFGYLVLYILLISLSSIFVSVLNSYKIFFIPSFSPIMLSFGIILSIFLFYGRFGIYSAVIGVIFGGFLQFLIPFANCLMIGFAWKPTFYFREKVFLNFLTRWLRMIFGFSISIITQQISFALASTLEIGSVSILSNAVVYYQLPVGIFYISIATVIFPKMAEHAVLGNNIKLNALLVDGIKILLLIFIPVSFLMFIWSDYILNLFLMGGKFSIYDTQKTASVLKCFLLGLLFYSMFGFFQKYYFSIRDAKTPFYLSVLFSILDIAISVFGINYYGLNALALAQSISFMICVIVFYFIILKRGVKIDLIEILFVLLKSIITLFPLYAIYFFFEKFQWDVGFSFKNLYFLMAAGIVSIFVLFICYSVLGINKLFRYIRRDAL

SEQ ID NO: 47280 - protein, 444 aa, Borrelia burgdorferi
MLLNKYFLANRNINFIVMALLFSSSYISASSFISGPSAVYKYGLSFILLATIQIPTTLIVFIIVGQRLNRESKKINAINIIDYIRHRYESDFLALMSGFVLIFFSMFLISAQLIGGAKLIEVFWGIDYVVGLTFFAFLVFIYVFFGGFKAVAYTDLIQGFLMLVSSVILFSKMLDLGGGINNLFKTATSSLDKSLLLPSNADLKPQYIISFWILIGIGILGQPQIINNFIAFKDENAIKFSLPISTFIISFLIVLMHLIGFFAIILFPDLSPNDKVVLNVALKVLNPFSCFMFFIGLLSAIMSTVDSNLLLITSVLIKSIFIYKEDLKEDVKIGRIIMISNIFFILIILIFSLFPPNFLFFINIFAFGALEVSFFPIIVFGLYLNFVSKIAAFASMFLGLIFYLSILFFGLNIWFFHPVFPSFFVSIFTFLVVNFFCKKNSKVC

SEQ ID NO: 47281 - protein, 468 aa, Borrelia burgdorferi
MKVDFDDLNNIFFVGIKGSGACSLACFLNSKGYCVEGVDVSDKFYTDEILSNNKISYYDNIYEFSLKQLDRSFDLIVYSSAYNKDGLQVLLEAKELNIPILSYPEALGELSRKYYSIGIAGSHGKTTTTAFLGVLFNKLGLNPNVIVGSSVKDFKDNSAIAGISNIFIVETCEYKKHFLNFSPNMLILTNVDYEHVDFFKNYEALEEAFLQYINNLKKNGILIINSDDNNLLKIKRQINRKDISIFSYGSGDLSDFQISNIAVRSEYFCFSFLGLLNVELKTVLFHNVLNFSAALLALNLFLESNGKSIFDFEEAIKRIAKNYSGIKRRVEVVKEENGVIYMDDYAHHPREIKNTLFGIKNFYKNKRIILDFMPHTFTRTKEFFADFVEVLSAADILILHNIYLSNRENFNPDELSVKLFLNIKKINKNTYFFKDVKDSINFIKSLLISGDLFITMGAGNNFILHDFL

SEQ ID NO: 47282 - protein, 288 aa, Borrelia burgdorferi
MKSMTGFFYLEKIIGNYMFSVNLKSYNGKFLEFKFRLPEIFSGYDLDIRNLISKYISRGNVFLNVGYKELVPSVNFTINPNYIEAISRLRDSLAHTNLNIKNELSLGDFLSLKGALIIDEDSEHQEEIYGLFKGVLEEALLHYNNGRSFEGENTKSDIVSTLVLIERDLKIVKDACSDINVKLFASIKENISKLMDEFRDLNIAEEAAKMAIRLDINEEIMRLDSHIETFYKNLEYEICGKALEFISQEMHREITTMSNKAVDLDIKNLILNMKLNLEKIKEQIRNVE

SEQ ID NO: 47283 - protein, 848 aa, Borrelia burgdorferi [sequence omitted]

SEQ ID NO: 47284 - protein, 413 aa, Borrelia burgdorferi
MSNYKILHTSDWHIGKKIENFSILKEQKNFLYFLLEFIKKENIDLLLVAGDVYDSKRPGFEEQRLVNNFFYELSFTSCKWCVVISGNHDKKDYLSINKKLLSRFNFFLITEYDSDEQIVLLKDNGNLKFIVVCLPHINERLILGQNFDNIFGLEDQYSSKLFLENLENAYREKISNLSNFLENKYKGIPKILMAHSFFGSSKKIDTLGGSYIIPFNVFGNGFSYVALGHIHKFMKLRDNIVYSGSPMQYSFNETCDKYINVLHFNDNKLILQEAFPVPIFNKLIFAKGSLNEVLDFLANSKKEESFTIYLKIELNEAVDTSAEESIYDLARLNFMNLVSISYSLPSSQDLQDDSNFIGELEVLEMDEKYFFEKKLRWDFENGVIRDIKFKEEELISLFNEVLANGYLGEYEDK

SEQ ID NO: 47285 - protein, 950 aa, Borrelia burgdorferi
MNMRINKLIFKNIASYKGEHELNFDTLLLRQSGIFLISGNTGSGKSTILDCITLALYARVYRLGKKIVDIISKGETSAYVKLTFTISGKIYESFVELNVKNIETPKSMLLNCFFDNRIIEGRTDVLEHIKSLCRLDFNQFCQTVILPQGNFQEFLTSTPKEKAAIIDNIFNLKKYDNLEFYLKSDFERTKFNIDKLLNSESYEKSILDYDESECKSLKGYLDLVDIDRLEIDLENIRRAISLCNQAIASNERYLGLEIEMSSLNDQLSSQIKYLNSLEKDHSLQKKLKENLDLDRKVYLCSDFWSLKNLVAVQGELFNDIGLLDLELSKVMNNLEEIKDLYSNDFNFNYVKELYNKNCNLFNLKLVENDYQSLLLRKNSLEDEKKELLRSQSKKNDEIKSISSEKSNFDFDKYVYYEALKLFQTFNDELISKYRDRLEFLLKSTGKEDFNKNKEKNIIKIDLYKELLKYLDDKNFSIESDKEKLKYIEAEYKNYQHKDKLSLCSLKELYALNSKLHLIQNQIDELKYQLSCRQEEISKQEVNALEFEKNNAEILRLIGKNLFDKYINYFDREKILAFENKLEKLEQFKAKKKDLKIEISLKNKNFDQNLLKIKDLLLKLNLNLSFNDYSSLEREFNVVLAKQKSVENEWNMLVLNLKNLEDLKIKTETQIKFTKESILTLKARLNEEQNNFINLISNLKNVFFSSFSFESTTDLEQINKNSLSFLQKLSLSISSKLEFLSRDIEKYKIKLLNFQTLQKKINQQKINLDSLRGELNLAKERKDKLDVLRKVVIRSSGLKYYVQTFLINDILRLANEKYLRWIFPDFELKTNKESKEFDFLIEDKKDVNKIRTVKTLSGGEKFLVSLALSLALSDKIRDSELKIEAFFLDEGFGNLDEDTLAQVMPKLSKFQMMTGRQIGIISHVSYLKEMIKAQIVINKISKISYIAIENL

SEQ ID NO: 47286 - protein, 1042 aa, Borrelia burgdorferi
MFKKVENKANFPKIEEKILKFWNDNKIFEKSIKQREGCEEFTFYDGPPFATGLPHFGHFVPNTIKDIIPRYQTMQGKYVKRNFGWDTHGLPVEYEVEKKLGISGKYEIENYGIENFNKECRKIVLRYTEEWKNIILRLGRWVDFEKGYKTMDISFMESVWWVFKNLYEKGLIYESYYVLPYSPKLATPLSNFEVNLGEYKEVNDPSLTIKFKIKDKNEYLLVWTTTPWTLPSNLGIAVGQEIEYSKIFDKTKEEILILGSKKLNSYYDDENSYTIIEKFKGSKLEGIEYEPIFNYFLEQKDKGAFKVHTADYVTTDDGTGIVHIAPFGEEDYRILKKHTNVDIIDPLDAECKFTNQVKDFKGLFVKDADKKIIENLKLRNFLFKRENYLHRYPFCYRTNCPIIYRPISSWFVNVEKIKTKLLEVNEKINWMPAHLKKGRFGKWLENAKDWAISRNRFWGNPIPIWICSKTGKKICIGSKKELENLSGQKIEDLHKDQIDKITWPSKDGGKFIRTSEVLDCWFESGAMPYASNHYPFTNEINFKNIFPADFIAEGLDQTRGWFYTLTILGTALFENTAFKNVIVNGLVLSSDGRKMSKSFKNYTDPMQVINTFGADALRLYLIMSPVVKADDLKYSDNGVRDVLKNIIIPIWNAYSFFTTYAIIDKFKPPKNLSLAKNNNLDKWIISELESLKKILNTEIDKYNLTKSIESLLEFIDKLNNWYIRRSRRRFWKSENDKDKNDAYETLYYAIKTLMILLAPFIPFITEEIYQNLKTDEDKQSIHLNDYPKANENFINKTIEEKINLARKITSMARSLRSLHNIKIRMPISTIYIVTKNQNEQNMLMEMQEIILDEINAKEMKIKANEEELITYKAKANFKELGKKLGKDMKAVSTEISKLKNEDIIKIINGTSYEIKVANAKHYLSLNDIILEREEKENLKVINEESITIGIDSLITKELYLEGLTREFVRQIQNLRKEKNFDVSDRINLYIENNETLKEMLNKFEKYIKTETLALNIILNKSKLEKKINLADDIFTLIGIEKC

SEQ ID NO: 47287 - protein, 739 aa, Borrelia burgdorferi
MVEIDSKEIARKNKNKEVSIWHLLMSIITTPKKSEIKFIDSKTLKNIKQEVISEIDKLEKILIEKNEIIIPKINKEIFALIKEAKKEFKSKPLIGAKEIFYQILKNKKLLKKHKLSKSSFNFKDQNILEYMEKNKIRLIETYKEFDEEIRLENEHFEIGKYVKNLTALAKAKKLDPLVGREAEIKTLTNILLRRNKNSAMLIGEPGVGKTAIVEGLASSIVQKKISSKLQDKTILMLKVSNLVSGTKYRGEFEDRLNNIIKYIEKNKNTIIFIDEIHTLIGAGNSEGALDASNILKPSLSRAEIQIIGATTYNEYRKYISKDKAFARRFQTITVKEPDEKDTLKIIENIAKNFEDYHGVIYEKSALLNIVKLSSKYLINKRFPDKAIDIIDIAGAIKKEELTKDNIITSDDIQKAINEILSIKTANNTKEEILELKEIESEINKKVIGQKHAVSELIKEIIKVKLGLNDDSKPLTSILLIGSSGCGKTALTDEISKKIIKDQNSVLKLDMSDYKEENSISKLIGTNPGYVGYSDGGILTNKLRHSFETLILFENIENAHSSVLNLISRMLENGELIDSKEDKILFKNTIIIMTTNIGSRMLLGEKNIGFNKNQQKSLETKSFKEEINQDLEKRFKLSFLDRIQKKIILNILTKENVEEICKNYLNTLKTKFHSKGIEIEIKKDVDKFITTKYYKKNSGARSVIAAIKGKIEENIITKIAENQNINKITIYLEKEKIIIE

SEQ ID NO: 47288 - protein, 570 aa, Borrelia burgdorferi
MMLKIEAKRKLKNYILLEEDMHFKEEAIKIQKTNNSTEILNRFYKDLEFGTAGIRGIIGAGTCYMNTYNIKKISQGICNYILKINKNPKVAISYDSRYFSKEFAYNAAQIFASNNFETYIYKSLRPSPQLSYTIRKFDCDAGVMITASHNSKEYNGYKAYWKGGIQIIPPHDTLITNEIKNTKNIINTITIKEGIEKGIIKELGNEIDEEYVKAINKELPDFEKNSKETNLKIAYTALHGTGGTIIKKLFANSKIRLFLEKNQILPNPEFPTINYPNPEKQTSMLKVIELAKKKDCDIALATDPDADRIGIAFKDQNEWIFLNGNQISCILMNYILSKEKNPKNTFVISSFVTTPMLEKIAKKYGSQIFRTYTGFKWIGSLINEMEKNEPNKKFAFACEESHGYLIGRKVRDKDAFSAIKGICSLALDLKAKQQTIKDYLEKIYKEFGYYEEFNIEKNFEGANGEIQREKLMLKLRKEQKVQFAGIKIIEKLDYKTLKKINFKNEISEIKEYKYPINAIKFILENEIAIIVRPSGTEPKIKFYISVKLEYKEKHKIFDIINAIKMEIKKY

SEQ ID NO: 47289 - protein, 950 aa, Borrelia burgdorferi
MEKSLKKKIIVRGAKEHNLKNVDVDIPKDGLVVISGKSGSGKSSLAFDTIFAEGQRRYMESVSAYARQFLGVMKKPNVDYIDGLSPSIAIEQRTISNNPRSTVGTITEIYDYYRLIFAKIGKAYCPNDGRLIEEQSLDKIVNTILSYSEGSKVILFAPIVRGSKGSHKKVLEKILNQGFNRVRINSEDYLIEDALNLNLHKNKKHTIEIIVDRIKLGNNVRVRLAESIETSLAVSNGYLRVEIDNDLEKIDKLFTEHNSCPLCGFSLPLIEPRLFSFNSPFGACSECSGLGVTLEFDFESICPDTSLSFNDDAFLTFKTSSSWSVAIFKGLAKHYNFDLNTPIKDIPDKVLKQILYGSNEKIDFIYQSKEMEAKELDGGFHYSKTFEGLLPLLKRRYLATESESTKIFYENLMSKKICNSCKGKRLSVGALTVKINGKDIQDLTNLSVFDSYVFFENLQLDMVDEKISKEILKEIKSRLKFLIDVGLSYLYLNRISGSLSGGEAQRIRLATQIGSALSGVIYVLDEPSIGLHQRDNEKLISTLVNLKNLGNTVIVVEHDEQTLRTADYIIDMGPGAGILGGEIVAKGALIDILNSKNSLTGQYLSGKFKIDVPSSRRKADKGEILLLGSNKNNLKNIDLSIPLGVFTVITGVSGSGKSTLLNEVLYPALDSRLKLNEKYCDGFKDIVGYEKIDKIIQINQKPIGRTSRSNPATYVGFFTEIRELFAKLPDAKSRGFKAGRFSFNVKGGRCEKCQGDGYLNIQMHFLPDVFVPCDLCKGKKFNEETLEVRYKGKNIHDVLEMSVFEASKFFENVPKISHYLKFLIEVGLEYIKLGQSATTLSGGEAQRIKLAFELSKKSTGKTFYIIDEPTTGLHFDDIKKLLEVLQRLVSNGNTVVLIEHNLDVIKQADYIIDLGPDGGLAGGNIVVSGIPEEVAKCENSYTGMFLKNLL

SEQ ID NO: 47290 - protein, 482 aa, Borrelia burgdorferi
MKLFRRNVMIKMPSSFTIIFSLIVFVTILTYVIPAGKFDKEFKQMGDGSKREIIVAGTYQYVDRGSRGFLHPIMTILTAMSKGMEHAVEVIVFVLIVGGAYGIIMKTGAIDVGIYFLIKKLGHKDKLLIPLLMFIFSIGGTVTGMSEETLPFYFVMIPLIVALGYDSLVGAAIIALGAGVGTMASTVNPFATGIASAIASISLQDGFYFRIVLYFVSVLAAITYVCVYASKIKKDPSKSLVYSQKDEHYQYFVKKDGLSTGDNAQNALEFTFAHKLVLLLFGFMILILIFSIVNLGWWMQEMTMLYLGVAIISAFICKLGETEMWDAFVKGSESLLTAALVIGLARGVMIVCDDGLITDTMLNAATNFLYNLPRPLFIILNEIIQIFIGFVVPSSSGHASLTMPIMAPLADFLSIPRASVVIAMQTASGLINLITPTSGVIMAVLGISRLSYGTWFKFVLPLFMIEFFISILVIIANIYLSF

SEQ ID NO: 47291 - protein, 510 aa, Burkholderia cepacia
VTILRAYAKYLRQVGSTFSDAYIERALTGNPAIARQLVELFVLRFDPRIGDTRDVQAERLLKAIEGALDQVPNLDEDRILRQFLGVINATERTNYFLADANGESKPYLSFKFNPAKVPGLPEPKPMFEIWVYSPRVEGVHLRGGRVARGGLRWSDRREDFRTEVLGLMKAQMVKNVVIVPVGSKGGFVVKNPPPQSDREAWMREGIACYQTFLRGLLDLTDNLAGNTIVPPPDVVRHDPDDPYLVVAADKGTATFSDYANAISHEYGFWLDDAFASGGSVGYDHKKMAITARGAWESVKRHFREMGIDTQTTDFTVVGVGDMSGDVFGNGMLLSPHIRLVAAFDHRHIFLDPNPDPATSFAERQRMFALERSSWADYDTSVISAGGRRVSAHREDDPAVAGGTGRARHRAHALPPTELIRAILQAPVDLLYNGGIGTYVKAARETHAQVGDRANDAVRVNGADLRCKVVGEGGNLGCTQFGRIEFAQRGGRINTDAIDNSAGVDCSDHEV

SEQ ID NO: 47292 - protein, 461 aa, Burkholderia cepacia
MRRRQRCGVPAIERERCQQRAHRGEAHPVARCGLVAGHVNEPGRDGRREAPEHGRREAVGERKARDPHLHRHHLRERDDHRTVIDAVHEREPEQHEQHVGERRRVRKERQRRVGGRDGEHRHADQQRPAADPVGQRAADRQPHEVRHADAKRHEQAVGGAQVQHRLAEGRRVDGDQIEARGGHRDQHHAGDHDAPVLDQRTEHFLHARTMLACLEFLGFLQVAAQHEDERHDHAADEERHAPSPGGDLRCAQPLIERETEGRRDDDRHLLARRLPAREEALAARRRQLGQIDRDAAQFGACGEALQQPADQHEHGRQQPDRRVARHERDQDGAARHDGQRDDQALAAADLVDVRAEHDRTQRPHQEAGAEHGEGHHQRRELALRGEEDVGDLRGVEAEQEEVELLEKVAGRDAKDRGGLRAFGRKAGRGMHRGCLLKILEYAGGTGLIVVFRHVGAVSLKR

SEQ ID NO: 47293 - protein, 249 aa, Burkholderia cepacia
AKIEVNNLNFFYNKFHALKNINLRIPEGKVTAFIGPSGCGKSTLLRTFNKMFALYPEQRAEGEILTDGENLLTTNFFISLLRARIGMVPQKPTPFPMSIYDNIAFGVKMFEKLTRSEMDDRVEWALTKAALWNEVKDKLGQSGYGLSGGQQQRLCIARGIAIRPEVLLLDEPCSALDPISTGRIEELIAELKSDYTVVIVTHNMQQAARCSDYTAYMYLGELIEFGETEKIFIKPVRKETEDYITGRFG

SEQ ID NO: 47294 - protein, 556 aa, Burkholderia cepacia
MSRRGIPPDSRFTRTVMTLKSLPAWTALQSHFEQIRHARLRDWFAPENDRAPTRAERFTIPGGGLAADFSKNRIDDETVRLLVQLARDAGVEARRDAMFAGEIVNPTEGRAALHTALRATDPQAPFHAQVSAERAKMATFARAVRSGTWTGYTGKRIRHVINIGIGGSDLGPKMVVHALHHVATPEISTHFVSNVDGADLARVLEQVDPEETLAIIVSKTFTTLETMTNARSLRDWFVARGCPEDALAKHFVGVSANPAEVVKFGIAADNVFEMWDWVGGRYSLWSAVGLSIMIAVGPEQFDELLAGANDMDRHFREAPLERNLPVLLGLIGIWYRNFFGSQSYLVAPYSEALHYLPSYLQQLEMESNGKSARLDGTFVDYPTSAVTWGEPGTNGQHAFFQMLHQGPTIVPIDFIAVLTPEHPLASHHPKLLANCFAQSEALMLGRTLEEARKVAGPGKEALAPHLTFPGNRPTTTLLVDALTPRALGALIALYEHKVLVQATVWDINPFDQWGVELGKILGKVVEADLSAESVDPAKHDSSTTALIERARAALKR

SEQ ID NO: 47295 - protein, 283 aa, Burkholderia cepacia
MTSIPQSFQLFQEHMMSKIPAFGLGTFRLQGQVVIDSVRNGLDVGYRAIDTAQIYGNEAEVGEAIAASGVRREDLFLTTKIWVDNYAPEKLAASLEDSLRKLRTDVVDLTLIHWPAPGNGVSIDAFMTALADAKAKGLTRQIGISNFNIALTKEAIAAVGKDAIATNQIELSPYLQNRKLVEFLNAEGIHVTSYMTLAYGKVLGDPVIGAIAQRHDATPAQVALAWALQLGYSVIPSSTKRENLASNLLAQTLRLTDEDMAQIAALERNGREVDPAGLAPKWD

SEQ ID NO: 47296 - protein, 516 aa, Burkholderia cepacia
MIKKFIRKLLGQDETEQTPPAAAPADAAAPAAPRTPKGARGGGAKKPRSNHEPTVVPASVHGINPALISKNAVRVTDTLQQAGFRAFIVGGAVRDLLLGIAPKDFDVATDATPTEVQRLFRRARLIGRRFQIVHVQFGQELIEVSTFRALVDAPPEAATAEPPKRLKRDELDRRTHAVDASGRVLRDNVWGEQHEDAARRDFTINAMYYDPSTQTVLDYHDGMADVRARLLRMIGDPATRFREDPVRMLRVVRFAAKLGFEIEPHTREPIHALADLINNVPAARLFDEMLKLLLSGHALACLQRLRKEGLHHGLLPLLDVVLEQPQGEKFITLALNNTDARVRAGKPVSPGFLFATLLWHDMRQRFEQYTAAGEIPVPALHRAMDDVLDMQTEKLAIHKRYSADMREIWGLQLRLEKRSGRSAMRLLEHQRFRAGYDFLLLRCESGELDAEVGQWWTDFIEGDAAAREALLTQGGSKEKSPRKRRRRGGARNRKPGEGAAEQAPDTAGDTASGSDD

SEQ ID NO: 47297 - protein, 116 aa, Burkholderia cepacia
MNDDLPAGLPAPDQMRAAAESACALLKVMSNPDRLLLLCELSQGECCVSDLEARLDIHQPTLSQQLGVLRDNALVRTRREGKTIRYSLDSPAVVAVMGVLYEQFCGATAKEARDAG

SEQ ID NO: 47298 - protein, 130 aa, Burkholderia cepacia
MPHIVVEYTANIRDDARIPALLRTINATLIAQGGVFPTGGIRSRAIELHDYCVADGTEDDAFVHVMLKIGSGRTDAQKKAACDALFDAIKAHFAELYAKRYLALSMELTEFSESGSYKHNNIHARYKRAG

SEQ ID NO: 47299 - protein, 278 aa, Burkholderia cepacia
MTRPVRTRFAPSPTGFIHLGNIRSALYPWAFARKMKGTFVLRIEDTDVERSSQEAVDAILEGMQWLGLDFDEGPIYQMQRMDRYREVLAQMLEKGLAYPCYMSAEELDALRERQREAGLKPRYDGTWRPEPGKVLPEPPAGVKPVLRFRNPLTGTVVWDDAVKGRVEISNEELDDLVIARPDGTPIYNFCVVVDDMDMGITHVIRGDDHVNNTPRQINILNALGGEPPVYAHLPTVLNEQGEKMSKRHGAMSVMAYRDAGFLPEAVVNYLARLGWSHG

SEQ ID NO: 47300 - protein, 140 aa, Burkholderia cepacia
MVRRWVASYREHGEQGLRKKHSHYDARFKLSVLQRMRRDELSYAQVAALFGIRNERSIPIWERLYHEGGIDALAPRRRGRPPKMITSPPPKSPDDTVQKEPSREELLKEIVYLRAEVAYLKKLDALLQSKKQAAPRKKRK

SEQ ID NO: 47301 - protein, 275 aa, Burkholderia cepacia
MAIVKVKPTSPGRRAMVKVVNKNLHQGKPFAALLDSQSSTAGRNNNGRITTRHKGGGHKQHYRIVDFRRTKDGIPAKVERLEYDPNRSANIALVLYADGERRYIIAPKGLTVGQQLMSGSEAPIRAGNTLPIRNIPVGTTIHCIEMLPGKGAQMARSAGTSAMLLAREGVYAQVRLRSGEIRRVHIECRATIGEVGNEEHSLRQIGKAGANRWRGIRPTVRGVAMNPVDHPHGGGEGKTAAGRDPVSPWGTPAKGYRTRSNKRTTTMIVQRRHKR

SEQ ID NO: 47302 - protein, 373 aa, Burkholderia cepacia
MWVLVYGPLAGLCQDGEDARTLVHLHAYRYYPLLRQIVSGAIGVVTLVLLLQIWGVPIFRAFETGTIGHRLASALVTIAIAAIVALVVWEAANIAIERRLQRWTREGNLVRAARLRTLLPMLRSLLFVMIALVVVLTGLSELGVNVGPLLAGASIFGVALGFGSQKLVQDFITGIFLLMENAMQVGDWVTLAGVSGTVEYLSIRTVRLRAGDGSLYTIPFSSVTTVNNTNRGLGNAAVKVSIAYGEDIDRAIATLKEIGAALRDDPKYHDGILSDFSYWGIDQVDGAALALAGQMQCTDSARWSVQREFNRRIAETFRERGIRIANPQRSVVAYADGSRPVAADENDPRADTRNAADTAAPPPSPDEAARKPG

SEQ ID NO: 47303 - protein, 650 aa, Burkholderia cepacia
  MISC_FEATURE (567)..(567): X=any amino acid
YRPDIDGLRAFAVLAVVVFHAFPSVLPGGFVGVDVFFVISGYLITGILLADLGTDRFSFGRFYARRIRRIFPALVVVLLATYGMGWFSLYGDEYRELGKHIVAGAGFVSNWASWTEAGYFDQAAEAKPLLHLWSLGVEEQFYIVWPLVLWAAYRLRLTGWVCAIVGLASFATNVILISHHASAAFYWPVTRTWELLAGAAFAISAGAGRPITGNRANAWSAGGAMLCVASFALLTARDAFPGWWAVLPVVGTVALVAAGRDGWINRHVLAHPVSVWLGKISYALYLWHWPLLSFAFIVAGRTPSSVVRGALLVIAVVLAWLTTAIIERPIRFGVAKRWKLVAPCLLMIGIIYLGGMTYARGGLGFRKGYSPDADVTTAKLGAGHEFVNLTCGVSPDEQRLFPFCATDKRVRSHFAVWGDSKADALYWGLVRESAPGEGWTLIARPSCAPMAGVWRTSSNAGDDPALCRDANITALRMLLDTPELKTVVLVMTDRDVIGQTFADRDQTTPRESAALDGLDQAVTVLERAGRRVALVLDNPRLRDPRQCMDRAHSRGRSFGMHSVSPTXAQRNACAIGYREHVARMAPFTALVDALRRRHPALLVSDPANALCDSSRDVCPMTKDRHYLYSYGDHLSDYGNGLVARQFLPLL

SEQ ID NO: 47304 - protein, 269 aa, Burkholderia cepacia
MPKFAANLTMLFNEVPFLDRFKAAADAGFDAVEFLFPYPYAKEELAERLETNRLRLVLHNLPAGNWDQGERGIACLPDRVGEFQEGVGRAIEYAKALKVPQLNCLVGIPSASTARDKTFVTIVDNLRFAADALKREGIRLLVEPCNSFDIPGFALNRSSEGLDVIRAVGSDNLFLQYDIYHMQRMEGELAATIERNLASIGHVQLADNPGRNEPGTGEINYAFLFALLDRLGYAGYVGCEYKPRTTTTEGLGWLQSVAGCAPASARRAA

SEQ ID NO: 47305 - protein, 152 aa, Burkholderia cepacia
LVETATGIAGLDQVCAAPRVVRVAFGTLDFQVDLGIDGDGEALNAFRSRIVLASRLAGIAPPVDGVSTVIDDPAAIERHARYARGFGFGGKLCIHPKQIDAVHRAYAWTDAEQAWARRVLDAVDASGGAAVALDGRMVDMPVILKARRILRG

SEQ ID NO: 47306 - protein, 413 aa, Burkholderia cepacia
MNIYAVGGAIRDELLGVPVQDRDYVVVGATPEQMTAQGFRPVGKDFPVFLHPQTQEEYALARTERKTAAGYHGFQFHYAPDVTLDEDLARRDLTINAMAREVSPEGTLVGPVIDPFDGQADLRARVFRHVSDAFVEDPVRILRIARFAARFADFTVADETLALMRRMVDAGEVDALVPERVWQEIARGLMEAKPSRMFAVLRDCGALARILPEVDALWGVPQRADYHPEVDTGVHVMMVVDYAAKQGYSLAVRFAALTHDLGKGTTPADVLPRHVGHESRSVELLKPLCERLRVPNECRDLALVVAREHGNLHRVMEMGAAALVRLFQRSDALRKPARFAELLQACESDARGRLGLDAQPYPQAERLRVALAAARSVDAGAIARGIGSDTEKIKEAVHRARIQAVAQALAIGE

SEQ ID NO: 47307 - protein, 215 aa, Burkholderia cepacia
MNAPAPSSVRRTKKLPPLRVGIGGPVGSGKTTLLEMLCKAMRDRYDLVAITNDIYTKEDQRLLTVAGALPEERIMGVETGGCPHTAIREDASINLEAVDRMLARFPDADIVFIESGGDNLAATFSPELSDLTIYVIDVAGGEKIPRKGGPGITKSDLLVINKTDLAPLVGANLDVMASDTRKMRGERPYVMTNLKALDGVADVIAFIEKKGLLTV

SEQ ID NO: 47308 - protein, 851 aa, Burkholderia cepacia
MMELYISDHPLDCLTCPANGDCELQDMAGVVGLREVRYGFDGANHLKDAKDESNPYFTYDPSKCIVCNRCVRACEETQGTFALTIAARGFESRVAAGESESFMASECVSCGACVAACPTATLQEKSVVQLGQAEHSVVTTCAYCGVGCSFKAEMKGTQVVRMTPHKNGLANEGHACVKGRFAWGYATHKDRITKPMIREKITDPWREVSWDEALTYAATQFRKLQQKYGRDSIGGITSSRCTNEETYLVQKLVRAAFGNNNVDTCARVCHSPTGYGLKTTLGESAGTQTFASVGQADVIVVMGANPTDGHPVFGSRLKRRVREGAKLIVIDPRRIDVVDGPHVKATHHLQLRPGTNVAIVNALAHVIVTEGLVADAFVAERCETRAFEQWRDFVAQADNSPEATADVTGVPAELVREAARLYATGGNAAIYYGLGVTEHAQGSTTVMGIANLAMATGNVGREGVGVNPLRGQNNVQGSCDMGSFPHELPGYRHIGDTVVRTQFEQAWSATLQPEPGLRIPNMFDAALDGSFKGLYCQGEDIVQSDPNTQHVAAALSAMECIVVQDIFLNETAKYAHVLLPGSTFLEKDGTFTNAERRISRVRKVMPPLAGYADWEVTLLLSQALGYDMHYTHPSEIMDEIARLTPTFSGVSYEKLDALGSIQWPCNEQAPDGTPTMHIDTFVRGKGRFVITKFIPTPEKVTQRYPLILTTGRILSQYNVGAQTRRTENVQWHEEDRLEIHPHDAEDRGIRTGDWVGIESRAGQTVLRARVSDRMQPGVVYTTFHFPESGANVITTDSSDWATNCPEYKVTAVQVMPVAQPSDWQRSYARFNTEQLDLLERRAAAPAAVRQA

SEQ ID NO: 47309 - protein, 347 aa, Burkholderia cepacia
MRTATVVSMPNGQSGIPHIVKRILIVKVTSLGDVVETLPVVADLHRAFPGVSVDWAVDESCAEIVRWHPGVSTVLCAPLRRFKKMRNAGDLKAISASIGALRAHRYDAVIDLHGVYKSAIIAALARAGRRVGYRTPDLGETGARFAYSHRFGPKPACDAWHGMRISAGEALGYAPEGIASYGIEPPDVTLPPAVNEGAPFMLLFHATSNSDKKWPTGHWVELATRMMARGLRVLLPWGSSSEHRDAQEIAMQAPGAVVLPAMSLGELAATMSRAALVIGVDTGMVHLSHALRRPTVMIFVATSRAHFGIGGAPHALSIGESGAAPSVDDAMKAIDTVGPVYDVLPVR

SEQ ID NO: 47310 - protein, 336 aa, Burkholderia cepacia
MTIRVAINGYGRIGRNTLRAFYENGKKHDLEIVAINDLGDAKTNAHLTQYDTAHGKFPGEVSVDGDYLVVNGDKIRVLANRNPAELPWGELGVDVVMECTGFFTTKEKASAHLKGGAKKVIISAPGGKDVDATIVYGVNHDVLKAEHTVISNASCTTNCLAPLVKPLNDKIGLETGLMTTIHAYTNDQVLTDVYHEDLRRARSATHSQIPTKTGAASAVGLVLPELNGKLDGYAIRVPTINVSIVDLSFIAKRDTTVEEVNAIMKEASEGALKGILGYNDAPLVSIDFNHNPASSTFDATLTKVSGRLVKVSSWYDNEWGFSNRMLDTAVAFANAK

SEQ ID NO: 47311 - protein, 342 aa, Burkholderia cepacia
MTHAGRRHALGALAAALGAVCCGAFPASAAAAVSAAGGAGGAHGGVSLAGNPVVSQASAKMPVRPQRVVALDFMFAESVIALDLVPAGMADTAFYPGWLGYRSEQLAHVTDIGSRQEPGLEAIAAVKPDLIIGVGFRHAPIFDALDRIAPTILFQFSPNVSEGGVPVTQLDWMRQIFRTIGAVTGRDARAQAVEAQLDAGIARNAARLAAAGRHGERVALLQDLGLPDRYWAYTGNSTSAGLARALGLDPWPKKPTREGTLYVTSADLLRQRDLAVLFVTASGMDVPLSTKLDSPVWRFVPALKDHRIALIERNIWGFGGPMSALKLADVMTDTMLKLPAVR

SEQ ID NO: 47312 - protein, 827 aa, Burkholderia cepacia
GGTISGAGGVVQSGSGTTTLGGANTYGGGTTLSSGGLSVGSNTALGSGALNVTGNGTLSASVNGTTLGNAVTLGAGATLGLNGANDLGLSGTISGSGGLAQTGAGTTTLTGTNTYDGGTTLSGGGLVAGNGSALGTGALNVTGAGGSLGTSVGGTTLGNAVNLGAGATLTVGGANDLGLGGGISGSGGLSVSGPSTTTLTGVNTYTGNTTIGGGSTLAVGAGGSLSAGSALDLAGTGAALDISAATTPQTSGMLSGVAGTNVNLGGNTLTLAGTGNGNYAGTIGGTGGLTMAGTGTETLTGTNTYTGATTINSGTLAIGAGGSLSASSPVNLTGAGATFDVSGATTPQTTGTLSGVAGSTVNLGGNNLTLGGTGNGTYGGTIAGAGGSLTLSGTGTETLTGNNTYTGGTTLSGGGTLIAGSGSALGTGALNTSGAGGTLAASTPGTTLGNAVNLGAGSTLTVGGANDLGLGGAISGGGNLAVNGPSTTTLSGANTYTGSTTIGGGSTLAVGAGGSLSAGSAIDLSGTGATLDLSAATSPQTSGALSGGTGTNVNLGGNTLTLGGAGSGTYGGVIGGTGGLTLSGTGTETLTGTNTYTGATTINSGTLAIGGNGSLSSSSPVSLTAAGATLDLSGAASPQSTGAISGVAGSTVNLGNNNLTLGGSASGTYAGNIAGTGGVTMSGTGTETLTGSNTYTGATTINSGTLAIGAGGSLSGTTPVSLTGAGATFDLSGATTPQTTGTLSGVAGSTVNLGGNNLTLGGFGSGTYDGAIAGAGGSPTVGGAGARHAAGAPRAPPSRPRRPAPRAGGAPGRTGRNPLSPTRLRGQ

SEQ ID NO: 47313 - protein, 311 aa, Burkholderia cepacia
MMKRIQIIDSHTGGEPTRLVVSGFPSLGDGTMAERRDVLAREHDRYRTACILEPRGSDVLVGALLCDPVAPDAAAGVIFFNNSGYLGMCGHGTIGVVRTLHHMGRIAPGVHRIETPVGTVEATLHDDLSVSVRNVPAYRHAQGVALDVPGYGPVKGDIAWGGNWFFLISDHGQRVAGDNVAALTAYASAVREGLERAGITGANGGEIDHIELFADDPEHDSRSFVLCPGLAYDRSPCGTGTSAKLACLAADGKLAPGAVWRQASVIGSVFHASYERADGGIVPTIRGSAHLSAEATLLIEEDDPFGWGIGS

SEQ ID NO: 47314 - protein, 453 aa, Burkholderia cepacia
MNIVILAAGTGKRMRSALPKVLHPLAGRPLLSHVIDTARTLQPSRLVVVVGHGAEQVQAAVAAPDVQFAVQAEQLGTFHAVRQALPLLDPAQPTLVLYGDVPLTRASTLQRLVDAAREGRYGILTVTLDDPTGYGRIVRDASGFVTRIVEQKDASPEELKIAEINTGIIVTPTAQLSMWLGALKNENAQGEYYLTDVVELAIEAGFEVVTSQPDEEWETLGVNSKAQLAELERIHQRNVADALLVDGVTLADPARIDVRGTLRCGRDVSIDVNCVFEGNVTLADNVTIGANCVIRNASVGAGTRIDAFTHIDGAALGANTVIGPYARLRPGAQLADEAHVGNFVEVKNAVIGHGSKANHLTYIGDADIGARVNIGAGTITCNYDGANKFRTVIEDDVFVGSDTQLVAPVRVGRGVTIAAGTTIWKDVAEGVLALNEKTQTAKSGYVRPVKKKS

SEQ ID NO: 47315 - protein, 336 aa, Burkholderia cepacia
MHSIQLALWMVATLVLVALVFDFMNGFHDAANSIATVVSTGVLKPQQAVVFAAAFNVIAYFIFHLKVAQTVGKGTIDPEIVDHYVVFGALVGAIGWNVITWYYGIPSSSSHALIGGLVGAALAKSGWSSLNVDGLLKTIAFIFISPLLGFILGSLFMLGVSWLYFRTAPSKVDRRFRRLQLLSAGLYSLGHGGNDAQKTIGIIWMLLIASGYASATADAPPAWVIGACYLSMGLGTLFGGWRIVRTMGQKITKLKPVGGFCAESGGAITLFVASFLGIPVSTTHTITGAIVGVGATQKLSAVRWGVAGNIVWAWVLTLPAAALFAAGGWWLGHQIF

SEQ ID NO: 47316 - protein, 593 aa, Burkholderia cepacia
MLPAHKQTLEALLADSVKQVAHALKGADAAFVAPAITLERPKVAAHGDVACNVAMQLAKPLGTNPRQLAEQIVAALTAQPAAQGLVEAAEIAGPGFINLRLSAAAKQAVIAAVFDQGRAFGTSDREKGKQVLLEFVSANPTGPLHVGHGRQAALGDVLANVIASQGYAVHREFYYNDAGVQIGNLAISTQARARGLKPGDAGWPEAAYNGEYIADIARDYLNGETVAASDGEPVKGTGDVEDLDAIRKFAVTYLRREQDMDLQAFGVKFDQYYLESSLYSEGRVEKTVDALVKAGMTYEQDGALWLRTTDEGDDKDRVMRKSDGTYTYFVPDVAYHVTKWERGFTKVINIQGSDHHGTIARVRAGLQGLHIGIPKGYPDYVLHKMVTVMRDGQEVKISKRAGSYVTVRDLIEWSGGAAAGQEAAPDLIDEATITRGRDAVRFFLISRKADTEFVFDIDLALKQNDENPVYYVQYAHARICSVLNELKSRYNVDVAQLPGADLSQLTSAQATSLMQKLAEYPDMLTHAANELAPHAVAFYLRDLAGEFHSFYNAERVLVDDAAPRNARAALLAATRQVLENGLAMLGVSAPAKM

SEQ ID NO: 47317 - protein, 228 aa, Burkholderia cepacia
MTRRHDVLFADSIDVTRLANRAGSTPFFIYARAAIDARVCQLRAKLPASIQLHYSIKANPMPAVVHHLATRIDGFDVASGAELALALNAGMPPDQIGFAGPGKTREELRCAVASGVNVHIESLTQLHLVAALGWELGLRPNVTIRVNPDFQTTHAGMRMGGGATQFGIDAEQVRKRPSSTVVQVVDRGAPRRYRMGSTRAVGGSDGATFHGSSSSTRLAGWSAMRSST

SEQ ID NO: 47318 - protein, 917 aa, Burkholderia cepacia
MPEERNLEGKTLLLVDGSSYLYRAYHAMPDLRGPGGEPTGALYGIINMLRRMRKEVSAEYSACVFDAKGKTFRDDLYADYKANRPSMPPDLALQVEPIHGAVRALGWPLLMVEGVEADDVIGTLAREAERHGMNVIVSTGDKDLAQLVTERVTLVNTMTNETLDRDGVIAKFGVPPERIIDYLALIGDTVDNVPGVEKCGPKTAVKWLSQYESLDGVIAHAADIKGVVGDNLRRALDFLPLGRKLVTVDTSCDLAPHLESIEASLKTDGEARELLRDIFARYGFKTWLREVENAPAEGGGADAPEGEPAPVIAADVVREYDTIQTWEQFDAWFAKIDAAALTAFDTETTALDPMLARLVGLSFSVEPGKAAYLPVAHRGPDMPEQLPLDEVLTRLKPWLESADRKKVGQHLKYDAQVLANYDIELNGIEHDTLLESYVVESHRTHDMDSLALRHLGVKTIKYEDVAGKGAKQIGFDEVALAQAAEYAAEDADITLQLHHALYPQVAREPGLERVYREIEMPVSLVLRKMERTGVLIDDARLHAQSTEIATRLIELEGQAYELAGGEFNLGSPKQIGQIFFEKLQLPVVKKTPSGAPSTDEEVLQKLAEDYPLPKLLLEHRGLSKLKSTYTDKLPRMVNPTTGRVHTNYAQAVAVTGRLASNDPNLQNIPVRTAEGRRIREAFIAAPGHRIVSADYSQIELRIMAHISGDASLLRAFSQGEDIHRATAAEVFGVTPLEVNSDQRRIAKVINFGLIYGMSAFGLASNLGITRDAAKLYIDRYFARYPGVAQYMEDTRATAKEKGYVETVFGRRLWLPEINGGNGPRRQAAERAAINAPMQGTAADLIKLSMIAVDDWLTRDRLASRMIMQVHDELVLEVPEGELSLVREKLPEMMCGVAKLKVPLVAEVGAGANWEEAH

SEQ ID NO: 47319 - protein, 399 aa, Burkholderia cepacia
MIITSLLDTDLYKFTMMQVVLHHFPAANVEYRFRCRTPGVDLVPYIDEIRDEVRGLCSLRFSDVELDYLRRMRFIKSDFVDFLALFHLNEKYISVTPSPKGNGEIDIVIEGPWLHTILFEIPVLAIVNEVYFRNTQREPDYREGRERLREKIKLLGAKPEFADCKIADYGTRRRFSKVWHEEVALTLRDGLGPQFAGTSNVLYAMKHDITPLGTMAHEYLQACQALGPRLRDSQIYGFEMWAKEYRGDLGIALSDVYGMDAFLNDFDMYFCKLFDGARHDSGDPFEWGERMLRHYEANRCDPRTKVLVFSDALDIPKVMQLYERFRGRCKLAFGVGTNLTNDLGYVPLQIVIKMVRCNGQPVAKLSDSPGKSMCDDKAYLAYLRQVFGIAQPVEEDASK

SEQ ID NO: 47320 - protein, 302 aa, Burkholderia cepacia
MQKAAESLSITQPAVSKTIAELEAILGVKLFERGRHGAQPTREAQLFMPHANACVLALRQGVGLLAREGGAAAATLEIGILPTVAASLAPALMKALTARWPRIVVRIATAANAELLERLKSGAIECAIGRLSEPERMIGLAFEQLYNEPLVAVVRAGHPLLASVAPAAELARYPVVLPPFGTLIRQSAEQLLGACGAPPLDSFIEVLSVSVARALALENDAVWFVPLYAAEYDLSAGALARLPLPSAGTDEPVGLVLRTDAQPSPVARTLIDAVRDIARSRFGDARPHRAPRTARKPARGKR

SEQ ID NO: 47321 - protein, 491 aa, Burkholderia cepacia
MPFRFTLQPAPQADGKRLEHADLTLGPVSATYLLDATRGQPLRAVRGAMGIHRMPDMPQDGVSAAVDVTELDADAWLALAHTLQPDTPRAPEPQAAPRVDFASFAPKRFAFHFGTLKLLKRNWENVIVGASHVDDLWQANIASNQVSGYLSWAPGGGHNGAGVLNARLAKLVVPQSSQHDLVGRAMNLPTPTDRPMPSIDLIVDQVVARDHDIGRLVVNARNIDEDGTPVWQLDKLELSNPAAKLTATGNWRTSRRALARGVDENDAPRRTVFDFKLDIDNAGALLDRVGLPRTLADGHGSVTGKVGWRGGPTALDFPSLGGQVALDLEHGQILKVDPGAAKLLGVLSLQSLARFLTLNFRDVVGKGLPFDKITGTGRISNGIARTDDFSMMTGPANVTVRGAVDLGTETQDLHAHVAPKISAGAAAIGAAIINPLLGVGVLAANYALSETLSRAFALDYAITGSWAYPHIERVRSDQGKMNHGPADAANH

SEQ ID NO: 47322 - protein, 156 aa, Burkholderia cepacia
MAGILIIAHAPLATALRDCIAHIYGGVPARIGCIDVMADSDPTQVMAFAHAELARLREENGVVVLTDMYGATPANIAGQLAKLDNVRVLAGVNLPMLVRAVCYRTVPLDKLVDKALSGGAKGVHEVSSGTPPPPTETGCGQCAPIPPEPQPRTESH

SEQ ID NO: 47323 - protein, 357 aa, Burkholderia cepacia
MPYQHIKVPEGGDKITVNKDFSLNVSDQPIIPYIEGDGTGFDITPVMIKVVDAAVAHAYKGKRKIHWMEIFAGEKATKVYGPDVWLPDETLQVLKEYVVSIKGPLTTPVGGGIRSLNVALRQELDLYVCLRPVQYFKGVPSPVREPQKIDMVIFRENSEDIYAGIEWAAGSEQAKKVIKFLQDEMGVKKIRFPETSGIGVKPVSTEGTERLVRKAIQYAIDNDRKSVTLVHKGNIMKFTEGLFRDAGYALAQKEFGGELIDGGPWMRVKNPKTGNEIVIKDSIADAFLQQILLRPAEYDVIATLNLNGDYISDALAAQVGGIGIAPGANLSDSVAMFEATHGTAPKYAGKDYVNPGS

SEQ ID NO: 47324 - protein, 334 aa, Burkholderia cepacia
MNSETPAAGPQQAQPPATLTIASRESRLAMWQAEHVRDALRKLYPACDVKILGMTTRGDQILDRTLSKVGGKGLFVKELEAALADGRADLAVHSLKDVPMALPDGFALAAIMEREDPRDAFVSNDYASLDALPAGAVVGTSSLRREAMLRSRYPHLEVLPLRGNLDTRLAKLDRGDYAAIILAAAGLKRLGLEARIRALLDVEASPPAAGQGALGIEIAAHRDDVAAWLAPLHDPRTALAVEAERMVSRALGGSCEVPLAAHAVWRAGELYLTGRVSTTDGKRVLTAEECGAVMTVADALALGRAVSDELEAQGALDIVQALLAGSQAAGKGDA

SEQ ID NO: 47325 - protein, 428 aa, Burkholderia cepacia
MSSQQQSIPSYLHADDLGPWGNYLQQVDRVAPYLGSLSRWLETLKRPKRILIVDCPIELDNGTVAHFEGYRVQHNVSRGPGKGGVRYHQDVTLSEVMALSAWMSVKNAAVNVPYGGAKGGIRVDPRKLSRGELERVTRRYTSEIGIIIGPNTDIPAPDVNTNEQVMAWMMDTYSMNQGQTSTGVVTGKPISLGGSLGRKEATGRGVFVVGSEAAKKKGLEIEGARIAVQGFGNVGGIAAKLFQEAGAKVIAVQDHTGTIYQPAGLDSNKLLDHVARTGGVAGFEGAEPMPNDEFWTVETDILIPAALENQITEKNAAKIRTKIIVEGANGPTTTAADDILSANGVLVIPDVIANAGGVTVSYFEWVQDFSSFFWTEDEINHRLERVMREAFAGVWAVAEEHKVTVRTAAFIVACKRILMAREMRGLYP

SEQ ID NO: 47326 - protein, 143 aa, Burkholderia cepacia
MAKKIIGFIKLQIPAGKANPSPPVGPALGQRGLNIMEFCKAFNAQTQGMEPGLPVPVVITAFADKSFTFVMKTPPATVLIKKAAKVDKGSSKPHTDKVGSITRAQAEEIAKTKMPDLTAADLDAAVRTIAGSARSMGITVEGV

SEQ ID NO: 47327 - protein, 104 aa, Burkholderia cepacia
MSEIRKNDHRLMQVLLAPVISEKATLVADKNEQVVFEVAPDATKQEVKAAVELLFKVEVDSVNVLVQKGKQKRFGRSMGRRKDVKKAYVCLKPGQEINFEAEAK

SEQ ID NO: 47328 - protein, 124 aa, Burkholderia cepacia
TSAPRYAACCGRFIDGGEAAPTALELMRSRYSAYVLGATDYLRATWAARTCPPDLDTDPSAPDAPRWLGLAVKRHAPLDDRHAEVEFVARYKVGGRAYRLHETSRFERDEHGFWRYVDGEVSER

SEQ ID NO: 47329 - protein, 441 aa, Burkholderia cepacia
PFLKIQGLGRALMLPIAVLPVAGILLRLGQPDVFNIKMIADAGGAIFDNLPLLFAIGVAVGFAKDNNGVAALAGAIGYLIETAIMKDIDPKLNMGVLSGIIAGVVAGLLYNRYKDIKLPDYLAFFGGKRFVPIITGLVCVILGIAFGYVWQPIQHAIDAAGQWLTTAGAIGAFVFGFLNRLLLVTGLHHIINSLAWFVFGNFTPPAGGEIVHGDLHRFFAGDPTAGTFMAGFFPIMMFGLPAACLAMLHEAPKERRAMVGGLLFSMALTSFLTGVTEPIEFSFMFLAPVLYVIHAVLTGLSLAICQILGVKLGFTFSAGAIDYVLNYGLSTKGWIQIPLGIAYGAAYYGLFRFFIRKFNMAKPVLEPASTDSSTEWYASGGFVAPAAGTTATGCRQPLRSNDYITRASPGACQTCRVVEACTTRLRLTVVDPKQVTEPQLK

SEQ ID NO: 47330 - protein, 317 aa, Burkholderia cepacia
MASISMRRVQKAYGEHAPVIRDVDLEIGAHEFCVFLGPSGCGKSTLLRMIAGLEDLSAGELSIDGRRVDDVPAAERGVAMVFQSYALFPHMTVYENMAFGLKLARVPKAEIDRKVRDAARILQLDTLLERKPKALSGGQRQRVAIGRAIVREPGVFLFDEPLSNLDAALRGQTRIEIARLHRQFERASVVYVTHDQTEAMTLADKIVLLHAGAVAGQLGLLAQVGAPVRLLSVLGPFFLRVSVVRFCVSSPRAFGLFRLRGPVPWGGWSRRRRVASSGGLVCSFSPRCPFCFSPLPSLSARPGLGRLGAVCAPLSNT

SEQ ID NO: 47331 - protein, 265 aa, Burkholderia cepacia
MNSRPYPTAPAHVYLFATCLVDLFVPEAGLDAVRLLEREGLTVHYPRGQSCCGQPAYSSGNPDEARRVAAAQLDLFAQPWPVIVPSGSCAGMIRHHWPALFADDPVHGPKARAIAERTYELAEFLVHVLDVRLDAIAAGAGPDERVVLHTSCAARREMGTRVHGVALVDALPGVTRIEHERESECCGFGGTFSLKHPDISGAMVRDKVASACATGCDRLVSADCGCLLNIGHAAAKAGAPLPVEHLASFLWRRTAGAGSLRGESQ

SEQ ID NO: 47332 - protein, 815 aa, Burkholderia cepacia
MAKCPASFIRGLWPVGPAGQPAAPGLPARAAISAGRQTIHDMTETVALKIVQRIATELSVQPRQVAAAVQLLDEGSTVPFIARYRKEVTGNLDDTQLRQLEERLLYLRELEDRRATILSSIDEQGKLTDELRAAIDAADSKQVLEDLYLPYKPKRRTRAQIAREAGLEPLAQALLANPLLDPQAEAAAYVDADKGVADVKAALDGARDILSEQFGETAELLGKLRDYLHNQGVVSSAVVEGKENEEGEKFRDYYDYAETIKTVPSHRALALFRGRNAGVLTIKLGLGEELDAQVPHPGEAMIARHFGIANQNRPADKWLSDVCRWCWRVKVQPHIENELLTQLRETAETEAIRVFARNLNDLLLAAPAGPKAVIGLDPGLRTGVKVAVVDRTGKVLATDTIYPHEPRRDWDGSIAKLARIAAQTQAELISIGNGTASRETDKLASELIAKHPELRLQKIVVSEAGASVYSASELAAKEFPELDVSLRGAVSIARRLQDPLAELVKIEPKAIGVGQYQHDVNQRELARSLDAVVEDCVNAVGVDANTASAPLLARVSGLNATLARNIVDYRDANGPFPSREHLRKVPRLGDKTFEQAAGFLRINGGENPLDRSSVHPEAYPVVERILAKINKRIDDVLGNREALSGLSPMEFVDERFGLPTVRDILAELEKPGRDPRPEFKTATFREGVEKVSDLVPGMTLEGVVTNVAAFGAFVDIGVHQDGLVHVSAMSTKFIKDPHEVVKAGQVVKVKVLDVDVKRQRIALTMRLDDDAAAPGMSSRGGQDRGNAGRGAARPQRSREPEPAGAMAAAFAKLKR

SEQ ID NO: 47333 - protein, 262 aa, Burkholderia cepacia
MRSARRSHPGPSGRFPLLRHRARARSSLITQGMPMTGYDRQSISDTTAKILLEVQAVHFNAEKPFIFTSGWASPVYIDCRKLISYPRVRRALMEMAETTITRDIGFEQIDAVAGGETAGIPFAAWIADRMMVPMQYVRKKPKGFGRNAQIEGHLEEGSRVLLVEDLTTDSRSKINFVNALRTAGATVNHCFVLFHYNIFKESVSVLKDIDVDLHALATWWDVLRVAKASGYFETKTLDEVEKFLHAPAEWSAAHGGATAPKE

SEQ ID NO: 47334 - protein, 528 aa, Burkholderia cepacia
MTMDNEILTTPALIARAAARHGAHPAIESEHGRLTYAELDAARIDAARALLASGIDPGDRIAVWAPNLPQWIVAALAIHTVGAVLVPVNTRMKGMEVGGVLHDGGARLLFCCGTFLGESYPAMLAPHRPATLERVVVFDGEPPSGAHDETWNAFLARGAAVPLAAVREREAQVTPDTVMDLMFTSGTTGRPKGVMTAHGQNLRAAQAWAAIAGVRPDDRYLIVNPFFHTFGYKAGWLAALSSGATVLPHLVFQPDDVLRRVAADRVSVLPGPPTLYYALLDAPDRATRDLSSLRIAVTGAAAIAPSLIERMRAELGFETVLTGYGLTESCGFATLCRPGDDAETVARTSGRPMPDVELRIAGPGGEPLGPDETGEIWVRGYNVMRGYFNQPDATRETVDAAGWLHTGDLGCVDANGNLKITDRIKDMFIVGGFNCYPAEIERLLAAHPAIAQVALVGVPDTRLGEVGHAYVVLRPGAHADADELNDWARRNMANYKVPRYFTFVAQLPTSAAGKVLKYRLRAATEAAA

SEQ ID NO: 47335 - protein, 302 aa, Burkholderia cepacia
MSITTTPAAAPAATGSAPAPRMGRLRTADGLELASYRWPAGDGTAPPRATIALVHGLAEHAGRYAALAGRLNAAGIDVLAIDLRGHGQSPGKRVWVERFDGYLNDADALVAEAARGDAPLFLMGHSMGGAVAALYAIERAPARGHGLTGLVLSSPALAPGRDVPRWMLAVSRVISRVWPTFPAIRIDAALLSRDPAVVAANRADPLVHHGAVPARTGAEILDAMARIENGRGALRVPVLVYHGTEDKLTEPDGSRAFGARVGSPDRTLTLYEGGFHETMNDLERDRVIDALIAWIHARVPAH

SEQ ID NO: 47336 - protein, 156 aa, Burkholderia cepacia
MFNVVLVAPEIPPNTGNVIRLCANTGAHLHLIEPLGFPLDDARMRRAGLDYHEYAQMRVHRNWDAFVASEAPDPARMFAFTTRGSGRFHDRAFLPGDWFVFGSETRGLPAELLERFPNEQRVRLPMRPDNRSLNLSNTVAVVVFEAWRQAGFEGGA

SEQ ID NO: 47337 - protein, 444 aa, Burkholderia cepacia
MKKKPAGTLVRSIALGGALMFGAQHVALAATEIQFWHAMEAALGERVNAIADQFNASQSDYKIVPVFKGTYDQALAAGIAAYRSGNAPAILQVYEVGTATMMQAKKAVVPVYDVFKQAGVTLDEKAFVPTIASYYSDAKTGHLVSMPFNSSTPVLYYNKDAFKKAGLDPNQPPKTWADVKADAEKLRKAGMACGFTTGWQGWIQLENYSAWHGLPFASRNNGFDGTDAVLEFNKPQQIAHLSFLQQMAKDGTFTYAGRKDEASAKFYSGDCGILTTSSGALANVQKFAKFSYGTGMMPYDANVKGAPQNAIIGGASLWVLAGKDPATYKGVAKFLAYLASPAVAAKWHQDTGYLPVTTAAYDLTRQQGFYAKNPSAETAIKQMLNKPPLPYTKGLRLGNMPQIRTVVDEEFEQVWAQKKAPKDALDSAASRGDELLRRFEKSGG

SEQ ID NO: 47338 - protein, 150 aa, Burkholderia cepacia
MTKEGAMFRHILVPTDGSELSQKAIDGAIDLARAVSARVTAYACLPQYPYSPFSEVIIEPPADFRARSEREARAHLDEVEAAAQAAGVECDTWTSVHPSPYLGIIEAAERGGCDVIFMASHGRRGLGSLLIGSETQRVLTHTKIPVIVYR

SEQ ID NO: 47339 - protein, 225 aa, Burkholderia cepacia
MAGHDSGNARRGRASFGAFVRKPVERDMVANAGQAAEPGGPDATQTWPDDAVEVGAVVDAYGLKGWVKVAAHADAGRGGDALLNARRWWLERGAERLSVRIMQSKTHSDTVVAQPAGVSDRDAALSMRGFRVFVRREDFPALAADEFYWVDLIGLEVVNEQSVALGKVSGMIDNGVHSIMRVEYPATGKDGRPTTDERLIPFVGVYVKTVDQAARRIVVDWEADY

SEQ ID NO: 47340 - protein, 451 aa, Burkholderia cepacia
  MISC_FEATURE (53)..(53): X=any amino acid
  MISC_FEATURE (446)..(446): X=any amino acid
MYRVTALVGRPNLGKSLPFTRLTRLRDALIPTLPDLTRDRHYGEGRVGERPYXVVDTGGFEPVAKDGILHEMARQTRQAVEEADVVVFIVDGRNGLAPQDKSIADYLRKTGRPIFLVVNKAEGMKYTAVATDFYELGLGDPRAISAAHGDGVTDMINEALEVAYAGQPEEAEEDDPSRGIKIAIVGRPNVGKSTLVNALIGEDRVIAFDMPGTTRDSIYVDFERNGKKYTLIDTAGLRRRGKVFEAIEKFSVVKTLQSISDANVVILLLDAQQDISDQDAHIAGFVVEQGRALVIGVNKWDGFDDHARDRAKADLTRKLKFLDFAKSHFISAAKKTGIGALMRSVDDAYAAAMSKLPTPKLTRALIEAVEFQQPRRRGPVRPKLRYAHQGGQNPPIIVIHGNALDAVTETYKRYLENRFRETFSLTGTPLRIEFRSSNNPYADKGXSTSRK

SEQ ID NO: 47341 - protein, 90 aa, Burkholderia cepacia
MNDSVKTSLKRTLVGRVVSNKMDKTVTVLIEHRVKHPIYGKYVVRSKKYHAHDEANTYNEGDLVEIQETRPVSKTKAWTVSRLVEAARVI

SEQ ID NO: 47342 - protein, 317 aa, Burkholderia cepacia
MLAWRQPPLMTSTLRSASAEGAMRRAVEAACAAEADGMLAVSVLPGFSLADIPAPCISVVVVADGDRAAADAVAERIARQIWDARDEFVYRSAPLAESVAQAAALADGADRPVLMLDHGDNCMSGGPCDTMDLLEAALAHGLDGIVSGPLCDPEAVAALIDAGVGATVTVPVGNRLPSHGGVRREPFRATGIVRAITDGEYVITGPTYTGQRAYMGRAAVLDIGTATLVVTERTQEPWDLGVFESVGVDPRRARFLLLKSRMYCRPVFVPISSALVECDSRGVTGSDFGLFRYARLARPVYPLDDVVEWSSGMRRTD

SEQ ID NO: 47343 - protein, 264 aa, Burkholderia cepacia
MDVDMIVTPAARPLGILAALPEELGDLIAAMRADGAMKTVTLGRRDYHVGTVHGAACVVTLARVGKVAAAATVSALIHVFGVSGVVFTGVAGGVSRTVRVGDVVVADTLLQHDLDASPLFPRYEVPLLGITRFATDAALTARLRAACTLFVEEEGAQFAERFGLAGAALHAGLVISGDRFVSSEREVVALRDALPDALAVEMEGAAIAQVCAEHDVPFALVRTISDTADDHATQSFSHFLSAIASSYSSGILKRFLTLHATTAA

SEQ ID NO: 47344 - protein, 979 aa, Burkholderia cepacia
MQGINPSLPHSVSAEVALEASRPPHPTLVENNRWFHDLLINGAPVEYKDAATGETRGGRARLIDFDNPANNDFLVVRQLTVAGANGKTIRPDLVLYVNGLPLVVIELKDPANTSATLEVAIDQLGRYKTVAPDLFVPSLLLVASDGLLTRVGSITSGLQRFTPWRPAHGGEPTLEALIRELLNPSALLDYLLSCVAFEEDERGNIVKKVAGYHQFRAVRKARASVISAIKTSARSDDVTAGKGGVVWHTQGSGKSLTMLMLAGTLVRAAEMANPTIVIVTDRNDLDDQLFETFAMGRALLRQDPMQAEGREHLRQLLDRASGGVVFTTIHKFTEAHGMISERANIVVMADEAHRSQYGFVEGGARWMREALPNATFVGFTGTPLMAGDRVTQNVFGEYADVYDVRQAVADGATVPIYYEPRIVKLTIDETGAKEAEAKIAQYATRDEYGQETPENVRISLEELYGAPERLQRVAKFVVEHWEERRAAMEGKAMLVTMSRDIAARLYDEICKLRPAWHDEDDAQGAIKVVMTGGPNDSEHMMRHSRSKAQRKSLADRFKDPTDDFRLAVVVDMWLTGFDVPCAHTMYLDKPLAGHNLMQAIARVNRVYGEKPGGLIVDMIGLADPLADALATYASATGETDKPVKELQDEAIPAMQSAFEQLRSFFHDFNYAEALDAIPSRVLRVYLGAIDHVLDVKHTVGDETGWQRFGGMVKRLATAFALAVPREETRDITPHLAFFQRVAAMIRKRLTDERGPTESRSDGSPDIDAAVRQVIGGAVDAGEVIDLFAAAGLDAARLDILSDDFLERVSALEQKNLALETLRKLLADQIKLSERSNLVQAQKFREALERAMLGYTNKQITTAQMITQLLALAKWVREAKLHGQDLGLSDEEAAFYDALTENGSAKEAMKSDQLRLMARELAEMVKKMPRLDWTQRESVRADLRRKVRRLLAMYGYPPDLSEEATQLVLRQAELSTENSE

SEQ ID NO: 47345 - protein, 201 aa, Burkholderia cepacia
MKVVAFERQQQGTGASRRLRNAGKTTGIVYGGEAAPQKIELDHNALWHALKKEAFHSSILDLEVAGQSQQVLLRDVQYHPFKQLVLHVDFQRVDAKKKLHTKVPLHFLNAEVSPAVKLSSAIVSHVATEIEVECLPAALPEFLEVDLSKIEAGQSLHAKDIALPKGVTLVAHVDAENPVVASATVPAGAVSDAAEGETPAA

SEQ ID NO: 47346 - protein, 702 aa, Burkholderia cepacia
MRPRARIPLAPYFNAPMDVTATRPAARALDVFHPAVAAWFTRTFAAPTGAQALAWPHIKAGRSTLVAAPTGSGKTLTAFLCALDDLVRDALAHDGTLPDATLVVYVSPLKALSNDIHVNLDAPLAGIAESLAQLGLPVPAIRTAVRTGDTTQAERAALRKRAPHILVTTPESLYVLLSSTSGRQMLSNVRSVIVDEIHALASSKRGSHLALSLERLDALTGRALPRIGLSATQKPIDAVARFLVGGPADAPRDCAIVDTGHTRERDLALELPNVPLEPVMATDVWEQVYDRIAGLAAAHRTTLVFVNTRRTAERMARHLADRLGKDAIAAHHGSLAKEHRFDAEQRLKRGELKLLVATASLELGIDIGDVDLVCQVGSPRGIAPFLQRVGRSGHHVGGVPKGRLFPLSRDELVECAALLDCVQRGELDALRIPEAPLDVLAQQIVAEVACTEWQEDALYASFTRAAPYARLTRERFDEVMKMLAEGFTSRRGVRGAYLHRDVVGGTVRGRRNAMMTATTSGGTIPDMADYAVLLEPQGIQVGTVNEDFAIESLAGDVFQLGNQSYRIIRVETGRVRVEDAQGQSPSIPFWLGEGLGRSDELSAAVGRLRARLDALFAEGDRQVDSGGRKRGGGNAVSNAATEADAPAATGTALAPADSRLAPALRWLVDDLHLSPDAARQIADYLARTRAALGALPTQDTLV

SEQ ID NO: 47347 - protein, 340 aa, Burkholderia cepacia
MPRPIVAHIRPDAVRHNLDFIRRTVAPSRVWAVVKANAYGHGIERIYPGLAAADGIALLDLDEAVRVRELGWDKPVLLLEGVFEPADVELADRYRLTVAVHCDEQLDLLIAAKPRQPIDIQLKMNSGMNRLGYRPAAFRAAWERAASAPSIGKITLMMHFANADEGEVDWQLEQFDATTAGIPGERSVSNSAAVLWHPRAHRDWVRPGTILYGASPTGAARHIADTPLVAAMTLTSKIIGVQTLAPEETVGYGRRFTADRPMRIGVVACGYADGYPRHAPTGTPIAVDGVMTRVVGRVSMDMLTVDLTPCPNAGIGSSVELWGDQVKVDDVAEASGTIGY

SEQ ID NO: 47348 - protein, 329 aa, Burkholderia cepacia
MRWQTGAGARIDYTCASAARDEAARTDSLRTIPEETMSDVQQGILAPIDTAARYLTFTMSNDGNVAAALAALREIVDGRDTVVGFGHALAAYLGHPVPGLTDYPAFAVNDRTLPMTPADVWVWLRSDDRGEIVLRARAIERALAPAFVLQEAVDGFRYSNDRDLSGYEDGTENPEGDDAVAAAIVTGHGAGLDGASFVAVQQWLHDFDQMERIASGDMDHIIGRRRSDNEELDDAPEFAHVKRTAQESFEPEAFMLRRSSPWSDARRAGLYFVAFGCSFRAFDVQMRRMSGAEDGIVDGLFRFTRPLTGAYFWCPPMKDGKLDLSALGL

SEQ ID NO: 47349 - protein, 91 aa, Burkholderia cepacia
APAAGAAAAPAAPQGHVVTSPMVGTFYRAPSPGADPFVQAGDTVKEGQTICIIEAMKLLNEIESDKAGVIKEILVENGQAVEYGQPLFVIG

SEQ ID NO: 47350 - protein, 125 aa, Burkholderia cepacia
MVTRHPILAVLFVAAALSAPTLSSAQQDDHGHGHANGHAYGHGKHDMRKGPGRVEDVPPRWADQPRREWHKGDRLPPEFRDRQYVIDDWRGYHLSPPPRGYQWVGVGGDHLLVQIGSGIVLRIGD

SEQ ID NO: 47351 - protein, 516 aa, Burkholderia cepacia
MSSSEHPLHGRRYNWAYETDPEPHMDNRRMECGRGKGLGGSSLINGMCYIRGNALDYDNWSTHKGLENWTYLDCLPYFKKAETRDVGPNDYHGGSGPVSVTTSKPGVNPLFEAMVDAGVQAGYPRTDDLNGYQQEGFGPMDRTVTPKGRRASTARGYLDQAKARPNLEIVTHALADRILFDGKRASGVTYLRGSERATAHARREVLVCSGAIASPQLLQRSGVGPGAWLKALDIPVVLDLPGVGQNLQDHLEMYIQYECKEPVSLYPALKWWNQPKIGLEWMLNGTGLGASNHFEAGGFIRTRDDDPWPNIQYHFLPVAINYNGSNAIEMHGFQAHVGSMRSPSRGRVKLRSRDPNDHPSILFNYMAEALDWREFRDAIRATREIMRQPALDRYRGRELNPGADCKTDKELDAFVRARAETAFHPSCSCKMGYDDMAVVDEEGRVHGLDGLRVVDASIMPIITTGNLNAPTIMIAEKIADKIRGRTPLARVDVPYFVANGAPARNVAKAVRQPETV

SEQ ID NO: 47352 - protein, 551 aa, Burkholderia cepacia
CPPPAGYNILFILTDQERHFDRWPFPVPGREALRRDGITFMHHQIAACVCSPSRSTVYTGQHIQHTGVLDNAGLPWQKDMSPDIRTVGHMLRDAGYYAAYLGKWHLSASMHETASPYTAPVADYNRTIRAYGFDDYFGVGDLIGMVRGGYQYDGLTAEAAVSWMRNHAPRLAQDGKPWFLAVNLVNPHDAMFVNTDTHGSTVQDANHPMLGNAPPPNDALYRTSWRDVPLAASRRQPYDEPGRPPAHGMFNAAHANLVGRYPFTDERVRLYQDNYFNCIRDCDTHVVRLLQTLQSLGLDERTIVVMTADHGDHVGAHQLVGKGAAAYQPQNHVPLVIRHPAYPGGMQCDALTSHIDIAPTLLGLTGLDDARRATIRGSALKGHDLTRWLAKPADAQRHAARDATLFNYAMLLYYDSEWMLKELGTLRQKGVPEDELLRRALAQQPDFRLRGTIRSVFDGRYRFTRYFSPLEFNRPTTLDALFARNDVELFDVARDPGEMRNLAIDRKRHGELLLAMNGRLNDLIDSEVGDDSPDVMPIRDGKVQVQIRKWH

SEQ ID NO: 47353 - protein, 769 aa, Burkholderia cepacia
MAKAPYSAQAQALPHRMSKLLTEIRWILQVALCAFLVMALLSYSRRDPSWTHAAQVDHISNWAGRVGAWTADIILLLFGLSAYWLIVPLGRRIAVNYRRITRHEAIPDEPERPIGWLTEIFAFVLVVLACDGIEALRMWSLKVQLPRAPGGVVGEAVAGAMSHAFGFTGGTLLLLIALAIGLSLYFRFSWLSVAERVGGAILSAVNVAKLRREAERDRKLGEAAAVRREGKVEEERVRIEDHEPVTIVPPVVTPAKSERVERERQVPLFTDLPGDSTLPPVSLLDPAPKTQEAISADTLEFTSRLIEKKLKDFGVEASVVAAYPGPVVTRYEIEPATGVKGSQIVNLAKDLARSLSLVSIRVVETIPGKNYMALELPNQRRQTVHLSEIIGSEVYAAASSALTLSLGKDIGGKPVCADLAKMPHLLVAGTTGSGKSVGINAMILSLLYKATAEQVRLILIDPKMLEMSVYEGIPHLLCPVVTDMRQAGHALNWTVAEMERRYKLMSKLGVRNLAGYNNKIDDAAKREEKIPNPFSLTPEDPEPLGRLPNIVVVIDELADLMMVVGKKVEELIARIAQKARAAGIHLILATQRPSVDVITGLIKANVPTRIAFQVSSKIDSRTILDQMGAESLLGMGDMLYLPPGTGLPVRVHGAFVADDEVHRVVEKLKEQGEPNYVEGLLEGGTADGDEGSAGAGTGEGGGESDPLYDQAVEIVIKNRRASISLVQRHLRIGYNRAARLLEQMEQSGLVSAMSSSGNREILVPARDAE

SEQ ID NO: 47354 - protein, 445 aa, Burkholderia cepacia
MVFRFYRTNSLEDYRFLSASRDPKIPASIRQQAAEMTPSASSRPAASRPLADTRPPRVLRNMLSLHDFEAAARRVLPRPIFGYVSGAAEDNRTRDDNRAVFDEYGFATRVLRNVSQRQQTVELFGRRYASPFGIAPMGIHALSTYRGDIVLARAAQRAGIASIMSGSSLIPLEEVAAAAPGTWFQAYLPGDPDRIAALLERVARAGYRTLVITVDIPVSANRENNVRTGFTTPLRPGPRLFWDGITRPRWLAGTFARTLLAHGMPHFENSFATRGAPILSSTVLRDFSARDHLDWGHLKRIRQEWKGELVIKGILSVDDAVIARDIGADGIILSNHGGRQLDGAVSPMRILPDVVRALGADYPVMIDSGFRRGSDVLKAVAMGARMVFVGRPFNYAAAVAGQAGVLHAIGLLRDEVDRNMAMLGVGQCSALTPDVLIRKSGSSAA

SEQ ID NO: 47355 - protein, 82 aa, Burkholderia cepacia
LLLKQHALTQSMSRRGNCLDNAAMESFFGTLKSECYRLTRFASVEQLRDALSRYIHYYNHERIKLKLNGLSPVQYRTQPLAA

SEQ ID NO: 47356 - protein, 665 aa, Burkholderia cepacia
MSDITETAAGAAPAPAPRPLRAIQPLPDQLISQIAAGEVVERPASVVKELLENAMDAGASTLRIVLEEGGVKRISITDDGCGIPPDELALALMRHATSKIRSLEELEAVATLGFRGEALASIASVAEMSITSRTADAAHAMKIDAQTGVLSPAAGATGTTIEVRELYFNTPARRKFLKSEQTEFGHCLEMIRRAALARPDVAISVLHNGKAVEHWNATEPAQRVAKILGDSFATAHLPLDEQAGPLAVYGCAGLPTASRGRADQQYFFVNGRFVRDKLLTHAVRAAYEDVLHGDRYPSYVLFLDLPPEAVDVNVHPSKIEVRFRDSRSIHQYVFHAVQRALARHAGASPETTAGGHAAQLSPVPRGPASFLDTPLGQSQGHATGSGGSGFSSPSSSSSSSSGNTWMRQARMTQGTLPVAQPLALYDALFGRKDTGAGTPDGTTTLARDSADAPIAPLSGFTASPIATTTHDEQPLGFALGQIHGIYVLAQNAHGLVIVDMHAAHERILYEQFKNALADRSVAVQALLLPISMTATPVEIGTVEEERDTLESLGFDLAVLSPTTLAIRAVPALLKDADLQSLARAVLADLHAFGGSRVLTERQHELLGTLACHHAVRANRRLTLDEMNALLRQMEATERADQCNHGRPTWYQLTLNDLDRLFMRGQ

SEQ ID NO: 47357 - protein, 232 aa, Burkholderia cepacia
MNDAPPPLVELSHVAKSYRRGNQIVPVLTDITLDIGEGDFVALMGPSGSGKSTLLNLVAGIDRPDSGELRVGGLDISHLAEAQLAEWRAANVGFIFQFYNLMPVLTAFENVELPLMLTHLSRRERRERVELVLDMVNLGDRTSHYPSELSGGQQQRVAIARALITDPVLIVADEPTGDLDRASATDVLAMLQRMNAELGKTIIMVTHDAHAAGAARSLVHLEKGELIDGHAG

SEQ ID NO: 47358 - protein, 174 aa, Burkholderia cepacia
MTKYDEQFKQQVVSAYLRGDSGFDALAARHGIHSGMLQRWVAAYRAHGRAGLQSKYSSYDAPFKLRVLQHMQRDELSLREVSALYDIRDAGSVARWACLYDEGGINALTPRPRGRSRQMVTSPPPKPTEAGTPDERSREELLKENEYLRAEVAYLKKLDALLAKKQAAQKKKRK

SEQ ID NO: 47359 - protein, 232 aa, Burkholderia cepacia
MAKISKRRQAFAAKVDRQKLYAIEDALSLVKECASAKFDESIDVAVQLGIDAKKSDQVVRGSVVLPAGTGKSVRVAVFAQGEKAEQARAAGAEIVGMEDLAEQIKAGQMDFDIVIASPDTMRIVGTLGQILGPRGLMPNPKVGTVTPDVATAVKNAKAGQVQFRVDKAGIIHATIGRASFEPTALRSNLSALIEALQKAKPATSKGVYLRKIALSSTMGVGVRVDQATLAAQ

SEQ ID NO: 47360 - protein, 260 aa, Burkholderia cepacia
MKSITSRDNPLYKRLKALAGSTPQQRRSGQALLEGFHLASAYLDTGATPELCVTTEGALGHAEAQAIVARIDAQRIVTLPDALFGQLSNVVNGVGFLLLVDRPAHPLPARVTETSVVLDGVQDAGNVGSILRSAAAAGVRHVFCAPGTAYAWSSKVLRSGMGAHFLLSIHEDVDAGELSGRLAVPIALTDSHGAQAVYDCDLSAPVAWVFGNEGAGVSAFWCDAATHRVTIPQPGGMESLNVAAAAAVCLFEQVRQQRPA

SEQ ID NO: 47361 - protein, 246 aa, Burkholderia cepacia
MAVTMRQMLEAGVHFGHQTRFWNPKMAPFIFGHRNKIHIINLEKTLPMFTDAQKYVRQLAANRGTILFVGTKRQSRDTIAQEAQRAGMPYVNARWLGGMMTNFKTLKVSIKRLKDMEAAVEAGELEKMSKKEALLFEREIAKLQKSIGGVKDMGGIPDAIFVVDVGYHKIAVTEANKLGVPVIAVVDTNHSPEGVDYVIPGNDDSSKAVALYAEGVADAILEGRANAVNEVVQAARGDDEYVEENA

SEQ ID NO: 47362 - protein, 356 aa, Burkholderia cepacia
  MISC_FEATURE (241)..(241): X=any amino acid
RPSGRRADELRKVALTRHYTKHAEGSVLVEFGDTKVLCTASVAERVPEFLRERGQGWLTAEYGMLPRATHTRSDREAARGKQTGRTQEIQRLIGRALRAVFDLEALGPRTLHIDCDVIQADGGTRTASITGAFVAAHDAVSTLIAAGKLTRSPITDHVAAISVGVYEGAPVLDLDYAEDSRCDTDMNVVMTGAGGFVEVQGTAEGVPFSRAEMNALLDLAQGGIAELVQLQKDVLGASHAXRPHRAPLSRIVLASNNPGKLREFTALFSTVGIEIVPQGDLAVPEAEEPFGTFIENALTKARHASRLTGLPAIADDSGLCVRVLRGAPGVYSARYAQRAGRDKGDAANNAYLVEQL

SEQ ID NO: 47363 - protein, 313 aa, Burkholderia cepacia
MNRQLLTKKLVSLIASAAIIFAAFLMGHTLWSRYVDSPWTRDGRVRAEIVNVAPDVSGAVVDLRVHDNQHVKKGDLIMEIDPSHYRIAVDQARAVVSERLAELQMRQSEAARRADLNAEVVSNEARQNAAKAVSIAEAQYRQAAAQLESAKLNLARTLVIAPVDGYVTNLNTFVGNYAIAGIAKLAIVDTNSFWVYGYFEETKIPRIEVGSRAEIQLMSGGVLRGYVEGISRGIYDRDNPQSHELVADVNPTFNWVRLAQRVPVRIRIDAVPKGVLLAAGLTCTVVVDDNSRRQSTITQKTNAWLDGILRWWS

SEQ ID NO: 47364 - protein, 795 aa, Burkholderia cepacia
MQSTTPTSPPPAPEPKKRPWWQKVLLGFAAMCVALVVAGGLVLGYALVVAWPNMPSLDALTDYRPKVPLRIYTSDHVLIGEFGEERRDVVHFKDVPDSLKKAILAIEDARFYDHGGVDLTGIIRAGFVALTNGHASQGASTITMQVARNFFLSSEKTYTRKIYEMLLAYRIERALTKDQILEVYMNQIYLGQRAYGFASAARVYFGKDLKDITLAEAAMLAGLPKAPSAYNPVVNPKRAKVRQEYILQRMLELNFITREQYDEAAAQPLVVKGPGRDFSVHAEYVAEMVRQMMYAQYREETYTRGFNVVTTIDSADQQVAYTALRKGIMDYERRHGYRGPEGFIELPAGADDREQAIDDALLEHPDNGELIAAVVTAASPRQITVAFIDGSTATIEGDNLRFASGALSANAQPSRRIRPGAIIRVVKNDAGKWSITQLPQVEGAFLSIVPQDGAIRSLVGGFDYNKNKFNHVTQAWRQPGSSFKPFIYSASLDKGLGPATVINDGPLYFSAAETGGQPWEPKNYGGGFEGPMSMRTALQRSRNLVSIRILNHIGTKYAQQYITRFGFDAERHPAYLPMALGAGQVTPLQMAGAYSVFANGGYRVNPYLIAEVTDPNGAVVARAQPLVAEQNAPRAIDARNAYVMNSLLQSVAQRGTGARTNVLKRTDLAGKTGTTNDSHDAWFAGYQHTLAAIAWIGYDNPRSLGDRETGGGLSLPVWIDYMGAALKGVPEFKPTVPEGVESLGGELYFTEFTPGHGFVSTVGVPQAPAAQNVDEAVPHVDEQEKQDIMNLFRGH

SEQ ID NO: 47365 - protein, 218 aa, Burkholderia cepacia
MSPRMFRRLAPAALLTALVHAPLVHADVSTRDDAGNTVTLPAPAQRVISLAPHATELVYAAGGGAKLVGTVTYSDYPPAAQAVPRVGDNKALDLERIAALKPDLIVVWRHGNAERQTDALRALHIPLFFSEPKHLDDVSSSLRRLGTLLGTQPTADAAAAAFMRDIAALRARYAARPPVSMFFQVWDRPLTTLNGTHLINEVFELCGGRNVFASLKPL

SEQ ID NO: 47366 - protein, 283 aa, Burkholderia cepacia
MAASEGTRGPDPSEYIAHHLQNFSTSHQTSIFDIHVWNLDTLFWSIVCGIVTIVLLRLAARKATSGVPGRFQCAIEMLVEMVEDQSKAIVHGNRTFIAPLALTVFVWVALMNSLDFLPVDLPGRVIGLLGLSDVISHHRIVPTADLNGTLGIALGVFVLMIYYSIKIKGAGGFVHELLSAPFGAHPLLWIPNLALNIVEYLAKTVSLGMRLFGNMYAGELLFLLIALLGSMWSFGGDATFLGFVGHVIAGSVWAIFHILIVLLQAFIFMMLTLVYLGQAHDKH

SEQ ID NO: 47367 - protein, 263 aa, Burkholderia cepacia
HVVRCLEDENVIHVAGKVSPIDAIEVINTELALADLGTIEKALTRYSKAAKSGNDKEAAKLVAVLEKVRAQLDQGKAVRGLALSDDEQALIKPFCLITAKPAMYVANVKDDGFENNPHLEAVRKYAESENAPVVAVCAAIEAEIADLDDADKEAFLADMGMEEPGLDRVIRAGFKLLGLQTYFTAGVKEVRAWTIHIGDTAPQAAGVIHTDFERGFIRAQTIAFDDFVTYKGEQGAKEAGKMRAEGKEYVVHDGDVMNFLFNV

SEQ ID NO: 47368 - protein, 242 aa, Burkholderia cepacia
MRLRLPCSRHVHSREVRMVVDTGRQPLLIRSPGARRRLLFAGAPDSLAEPLPAEPEIGDIVFIRVTVRPFLEVASATRSWTNHVGIVVGERGGETLIAESTFPLSRVTTMSRFLARSDRGACVIARLRQPLDAAQRRELVAAAMRRIGVVYDTGFNLASRRQFCSRFVREVVCEATRIVLGDVETFYTLLHRNPDHPLGFWRIWYFGRIPWHRRTVTPASILDSGALRVVMDTRDSGTGRDD

SEQ ID NO: 47369 - protein, 91 aa, Burkholderia cepacia
MEKMRLRGGCGEEERREERAKEESKKRGRRGINETEEKAEEEGRDKGGEEGKGREEEGEKKNREERGEGEKEKKKRKRKGKRKRGGESGRR

SEQ ID NO: 47370 - protein, 435 aa, Burkholderia cepacia
LQRHLSARHIRFLALGSAIGTGLFYGSASAIQLAGPAVILAYVLGGAAVYMVMRALGEMAVREPVAGSFGHYATENLGPFAGFVTGWTYTLEMVIVAIADITAFGIYMGFWFPDVPQWIWVLGVVAIICGLNLCHVKVFGELEFWLSIIKVGAIVAMIGGGVAILLTGMHFGHSADMPTFANLWNHGGFLPNGVGGLIASLSVVIFAYGGIEVIGMSAGEAKDPERVIPRAINAVPARILLFYVLTMVVLMSISPWTGVGSDGSPFVQIFSALGVKSAATILNLVVISAAISAINSDIFGAGRMMFGMARQGQAPRVLMTTSRHGVPWVTVLVMAGALLVGVLLNYLMPKDVFLVVAAIATFATVWVWLMILLSQVAMRRRLSSAEVAALKFKVPLWPVAPALTIAFMGFVIVMLGWFDDTRVALYVGAAWLALL

SEQ ID NO: 47371 - protein, 179 aa, Burkholderia cepacia
MRLTTKGRFAVTAMIDLALRQEQGPVTLAGISQRQRISLSYLEQLFGKLRRHEIVESVRGPGGGYNLARRAQDVTVADIIIAVDEPLDATQCGGKGTCDGSKQPDGHCMTHELWSTLNQKMVEYLDSVSLQDLVDQQRAREGAPAVLRDRRAPEPVAAPAEPARTMPLGPNSVFNIASS

SEQ ID NO: 47372 - protein, 979 aa, Burkholderia cepacia
MRMRMGSNKKRAEARPKLLVPTGMLVALVGAGIVPADALAACVGTTTVSCTGATTTYSNGANNLNLTVGSGATVSVVPLIGGTALSLTGSGVTLTNNGRIDPALSGLSLVSNGTVVGNIASASTVNVTNASTGVMMGSTSSLLNGPALTVYNGIGGTTNITNAGTIGTTGLLGFSAGPTAQVVTTSGGAQVNFTNASGGAINGSVVLAPSGTPGAGNTFTNAGTVTGNVSLGAALGTSNTFNAQTGSSVGLGVDAGLGGNNTLNLQLNPAAGSSASGTLAVDTYGNFTHLAVQGGTWNITGASSAADASLAGGTAIINNSAGLGLGTIAAGGGTLEAGTAGLNLLNNVTLGADLTVDGATGLALSGTIAGGGALKASGTGTLTLNGANSFTGGTNLTGGGGLVVGTDTALGGGALNVSGAGGTLGTSVGGTLLGNAINIDTGVTLGLNGSAGLGLSGAIAGNGGLAQTGPGITTLLGPNTFAGGTTLSGGGIVAGTGAALGTGALHVTGTGGSLATNAGGTLLGNAVNLDAGATLGLNGANGLSLGGTIAGNGGLAQSGTGTTTLLGANTFSGGTALSGGGLIAGNGAALGTGALNVSGTGGTLATNVGGTVLGNAVNLGAGATLGVNGAVDLSLGGAIGGSGQLAQTGAGTTTLLGTNTFTGGTTLSGGGLVAGNGAALGTGALNVSGTGGTLATNVGGTVLGNVVNLGAGATLGLNGAADLGLSGAISGAGGLALGGTGATTLSGANTFTGGASLTGGGSLIVEGGSALGIGGALNVSGLGGSLSADLAAGAALANGINLNGASLTLNGANDLGLSGAIGGTGGLVLSGTGTTTLSGANTFGGGTTLSAGTLLAGSNTALGSGALNVAGTGGALGASVNGTALGNAVNLGAGATLALTGANDLGLNGVIAGSGGLAQIGSGITTLSGANTFSGGTTLSGGGLLAGNGAALGTGALNVTGTGGSLGTTVGGTVLGNAI

SEQ ID NO: 47373 - protein, 293 aa, Burkholderia cepacia
MTSDTTQVDRTPAPDPAENNAYFPSPYSLSQYTSSKTDFDGADYPNPYTGGKWKVLMIATDERYILMTNGKMFSTGNHPVEMLLPMHHMDKAGFEIDIATLSGNPAKLELWAMPQDDEAVQSTYRKYLPKLKTPLKLSDVLDRHSGADSPYIAVFIPGGHGVLAGIPHSKDVKRTLRWALDHDRHIITLCHGPACLLSAAVDEDPQDYPFKDYEICVFPDALDTGPNLDIGYMPGPLPWLVAQSLEKLGARVLNKDMTGRCHQDRKLITGDSPLASNGVGKLAAAALLKEVGH

SEQ ID NO: 47374 - protein, 619 aa, Burkholderia cepacia
MSAEGHDPWIRQLVVQRQADARPAEAARDRLVGLRERLEYVRELIGRHADAGIADADRHGRRAAARCRHRQRHRAAVGELDRVADQVDGDLPHAHRIAEIRMRDRRIDVDAQRDTPRAGHWLEQVRDVAHQFIDPETGRFERHPVGLDLRHVEHVVQHVQQHPGSRRDRMQARLLPARVGRLVEQFEIAEHRVQRRADFMADRREERRLSAVRAVERALGVGARRDVGEAAQQRVLALVAHADEVDEQVARAPIVERHRQLDVELGRRRVRVLAVACQQPLVQRRGTGLAVVQLEHPVAQQYLMRVGRHETDAERRGRDDRAAHPLAFEHAARATEQRREHPQIERDHERPQHDQDGCDRAEFAQHRCPDRIGDRVPRIRIDDRVAGVRDPVGDREHAVPVAFVEIHEAAAPRAFGERVLHQRGAVLRVVGAIDVEHHAAVLVDQHRNGIFGRVPEPVGDHVDVEIADESHEMLLPVEGGFDETEHRLAGQWVDRRCLPRDPARQAPVARDRRIGPVGHVEREVLDQRMRVGHADVRKQVRIRHRRRRRDRDHVAVGAVRVAAHRAPGLALGGRDGNRLALHQLDVAIGFVVGQRVGRRGQEDLAHAAHRREQHVAVLA

SEQ ID NO: 47375 - protein, 116 aa, Burkholderia cepacia
MGGAAVAAAFNQLAARGGRYAVISTQPKERTTMTHGLIMWLIIGAIAGWLAGLLVKGGGFGLIVDIIVGIVGAVIGGWLAGLLGISIGSGFIGSVIVAVIGAVILLFVIRLFKRAA

SEQ ID NO: 47376 - protein, 84 aa, Burkholderia cepacia
MVIIRLARGGSKKRPFYNIVATDSRNRRDGRFIERVGFYNPVATKGESLRIAQDRLTYWQGVGAQLSPTVQRLVKEAQKAQPAA

SEQ ID NO: 47377 - protein, 972 aa, Burkholderia cepacia
MNPSRLFILRPVGTALLMAAIMLAGLVALRFLPLAALPEVDYPTIQVQTFYPGASPEVMTSSVTAPLERQFGQMPSLNQMSSQSSAGASVITLQFSLDLPLDIAEQEVQAAINAAGNLLPSDLPAPPIYAKVNPADAPVLTLAVKSKTLPLTQVQDLADTRLAMKISQIAGVGLVSLSGGNRPAVRIQANPTALAQYGMNLDDLRTTISNLNVNTPKGNFDGPTRAYTINANDQLTSADQYNSAVVAYKNGRPVMLTDVATVVAGSENTKLGAWVNADPAIILNVQRQPGANVIATVDAIKAQLPKLQETLPAALDVEIVTDRTTMIRAAVRDVQFELLLAVALVVLVMYLFLANVYATIIPSLSVPLSLIGTLAVMYMAGFSLNNLSLMALTIATGFVVDDAIVMIENIARYVEEGESGLEAALKGSRQIGFTIISLTVSLIAVLIPLLFMGDVVGRLFHEFAITLAVTIVISAIVSLTLVPMMCAKLLRHSPPPESHRFEARVHQAIDWVIARYAVALEWVLNRQRSTLVVALLTLGLTALLYVFVPKGFFPAQDTGVIQAITQAPQSISYGAMAERQQALAAEILKDPNVDSLTSFIGVDGSNITLNSGRMLINLKARDERTETAAQIIRDLQQRVSNITGISLFMQPVQDLTIDSTVSPTQYQFMLTSPNSEEFATWVPKLVARLQQEPSLADVATDLQSNGQSVYIEIDRASAARFGITPATVDNALYDAFGQRIVSTIFTQSNQYRVILESEPKEQHYAQSLNDIYLPSAGGGQVPLSSIASFHERPSPLLVAHLSQFPSTTISFNLAPGASLGEAVKAIEAAEKDIGLPGSFQTRFQGAALAFQASLSNQLFLILAAVVTMYIVLGVLYESYIHPITILSTLPSAGVGALLALMITGHDLDIIGIIGIVLLIGIVKKNAIMMIDFALEAERVEGKPPREAIYQACLLRFRPILMTTLAALLGAVP

SEQ ID NO: 47378 - protein, 230 aa, Burkholderia cepacia
MDLIQSMQAFVTLADAGTFTETGKRLGITTAHVSRLVASLEHRLGIRLLNRTTRSMCLTEAGERYLARARDITLAVDASEREARDARVHPHGRLRAHCSASIANHFVIPLIGQFQARYPDVSVDLTLAPHLPKLVRDSYDVAVIAMPSLPSSEQVAIDVGRIRSVLCASPAYLDAHGMPDSPGALVHHRCVQLVAPAYHERIWTLWNGAEAQTVDVDPSMTADVAASLAI

SEQ ID NO: 47379 - protein, 113 aa, Burkholderia cepacia
MLKKALAKLDDEGRPLLHSDQGWQYQMPAYRRLLKQHALTQSMSRRGNCLDNAAMESFFGTLKSECYRLTRFASVEQLRDALSRYIHYYNHERIKLKLNGLSPVQYRTQPLAA

SEQ ID NO: 47380 - protein, 261 aa, Burkholderia cepacia
MRGSAAVARPRRDKDKPAPSLAPRANIDVGLGNNFRFKGHGADLGLRGTITVMSAPGVPLRAVGNVRVTEGSTYTTKNRKLAIENGFFTFNGPVSNPGVNILAMRRNQEVEAGVQVTGTIQSPTVKLVSEPNVTDNEKLSWLLFGHGTDQGNNVGQQGAMTAALGLLGSVTGKRVAQTFGLDEVSVGRSEVGLTDPQVVLVSKAINERFVLGFEQGLQSASNAFKATINLTRFWSVSAYGGTFQGVDLNYTRRFDRWFGQR

SEQ ID NO: 47381 - protein, 332 aa, Burkholderia cepacia
MSFHPLHRPRRMRRDDFSRRLMRENRLTTDDLIYPVFVVEGTQQRQPIPSMPGVERVSVDLLMQVAEQCVELGVPVLSLFPAIEPSLKTPDGREAANPEGLIPRAVRELKKRFPELGVLTDVALDPYTSHGQDGVLDENGYVINDDTIEILIEQARAQAEAGVDIVAPSDMMDGRIGAIREMLESDGHIHTRIMAYSAKFASAFYGPFRDAVGSASNLGKGNKMTYQMDPANSDEALREVRLDIDEGADMVMVKPGMPYLDIVRRVKDEFRFPTYVYQVSGEYAMLKAAAMNGWLDHDKVVLESLLAFKRAGADGVLTYFALDAARLLKAQR

SEQ ID NO: 47382 - protein, 187 aa, Burkholderia cepacia
MMADHESTHPRLKQHRAFVVWLTGISGAGKSTLANLLKEQLDARGLRTYLLDADRLREGLNRDLGFSDADRHENIRRTAEVAKLLVDAEFIVIAALISPFQEAREKARACFDAGTFVEVFVDVALDIAEARDPKGLYALARQGTIRQFTGIDSTYERPRSPDVHVRTAEASPSECVDAILRKLPLDN

SEQ ID NO: 47383 - protein, 203 aa, Burkholderia cepacia
MRIVFQGTRMDSHIAPVALNKAYRLLNHGPTVLVSARHDGVDNVMAAAWACALDFLPPKLTVVLDKSAKTRELVERSGTFVIQVPTAAQLQLTHAVGSHSLAERPDKLREAGVTLFDVDGHDLPFVAGCSGWLACRLIPEPHNQQTYDLFIGEVVAAWSDTRVFRDGHWYFESADPALRSLHYIAGGNFYAIGESLHVDPDAQ

SEQ ID NO: 47384 - protein, 323 aa, Burkholderia cepacia
VADESDLDKTEAATPRRREKAREEGQVARSRELASFALLAAGFYGAWLLAGPSGAHLQAMLRGAFTFDRATAFDTHRMLSAAGSASLEGFAALLPLLALTGVAALLAPMALGGWLISQKTFELKFDRLNPISGLGRIFSIQGPIQLGMSIAKTLVVGGIGGIAIWRSKDELLGLATQPLGAALPDALHLVAVCCGTTVAGMLVVAGLDVPYQLWQYNKKLRMTKEEVKREHRENEGDPHVKGRIRQQQRAIARRRMMAAVPKADVVVTNPTHFAVALQYTDGEMPAPNAVATGLNPPRARPPLLSFHPHLPLLESPSLARAPF

SEQ ID NO: 47385 - protein, 552 aa, Burkholderia cepacia
MTKYVFVTGGVVSSLGKGIAAASLAAILESRGLKVTLLKLDPYINVDPGTMSPFQHGEVFVTEDGAETDLDLGHYERFISTKMRKANNFTTGQIYESVIRKERRGDYLGKTVQVIPHITNEIQAFIERGAASATCGEPDVAIVEIGGTVGDIESLPFLEAARQMSLRLGRNSACFVHLTLVPYVATAGELKTKPTQHSVQKLREIGILPHVLLCRADRRIPDDESKKISMFSNVPEDAVISVWDADSIYKIPQMLHDQGLDRIICEELKLSPKDADLSMWSALVEKLENPKQEVTIGMVGKYVDLTESYKSLIEALRHASIHTSTKVNIEYIDSEELETNGVDSLKHLDAVLVPGGFGRRGTEGKIAAVRYARESKVPYLGICLGMQLAVIEFARDVVGLKQANSTEFDPDTPERVVALITEWYDREGKVETRTEESDLGGTMRLGSQRCPIKPGTMAEEIYGKDVNERHRHRYEVNNRFVPQLEAGGLIISARTPSEDLPEMMELPRSMHPWFVGVQFHPEFTSTPRDGHPLFKSFVEAALANKQARGVQA

SEQ ID NO: 47386 - protein, 241 aa, Burkholderia cepacia
MKRISAGAVVLVAAISGAHAQSAGQWVVSAGWSHFAPQGAADPLTLNALGQSQVMTGSGGDIASGDTFGLTATYFLTDHIAATTVMGFPPTWHLNGAGTLSGFGELGTARAWSPAIIFNYYFGQPNARFRPYLGAGVTYTWFSNIKLSNPVSTGQIYFSPTVGTALEGPTSVSLSHSFAPVVNGGLTYNIDSHWSINASVAYSWVSTRATLTTRSSVGTVTSTSKFRVNPIVTFLSVGYRF

SEQ ID NO: 47387 - protein, 134 aa, Burkholderia cepacia
MPLPQFGVIDVAGDDAATFLHSQLTNDIEHLDAGSARLSGYCSPKGRLLASFLTWRAGHGVRLLVSKDVQPAVQKRLSMFVLRAKAKLTDANDTLAVAGFAGDVRDALSGIFDALPDGVHVKVDGPAGTLIRVP

SEQ ID NO: 47388 - protein, 228 aa, Burkholderia cepacia
MNRRPIIDPEVLPVEGTGAGLPVIDSRLMTPSGLRERFARTLEWSVEPGEARLQEGVDPRSAAVLVPLVVRESGLTVLLTQRADHLNDHAGQISFPGGRREPFDRDATATALREAKEEIGLAAERVEILGALPDYLTGTGFCVTPVVGLVHPPFTVQADTFEVAEIFEVPLAFVMNPANHQVRVFRWEGGERRFFAMPYPNGEPGGHYFIWGATAGMFRNLYRFLAAG

SEQ ID NO: 47389 - protein, 203 aa, Burkholderia cepacia
MMVLYSGTTCPFSQRCRLVLFEKGMDFEIRDVDLFNKPEDISVMNPYGQVPILVERDLILYESNIINEYIDERFPHPQLMPADPVQRARARLFLLNFEKELFVHVSTLENEKGKAAEKNHEKARLAIRDRLTQLAPIFVKNKYMLGEEFSMLDVAIAPLLWRLDHYGIELSKNAAPLMKYAERIFSRPAYIEALTPSEKVMRR

SEQ ID NO: 47390 - protein, 179 aa, Burkholderia cepacia
MARFQEFYKEKVVPGLIEKFGYKSVMEVPRITKITLNMGLGEAIADKKIIENAVGDLTKIAGQKPVVTKARKAIAGFKIRQGYPIGAMVTLRGRAMYEFLDRFVTVALPRVRDFRGVSGRAFDGRGNYNIGVKEQIIFPEIDYDKIDALRGLNISITTTAKTDDEAKALLASFKFPFRN

SEQ ID NO: 47391 - protein, 342 aa, Burkholderia cepacia
MKTTPGPVMLDVVGTTLSRDDARRLAHPNTGGVILFARHFQNRAQLTALTDSIRAVREDILIAVDHEGGRVQRFRTDGFTVLPAMRRLGELWDRDVLLATKVATAVGYILAAELRACGIDMSFTPVLDLDYGHSKVIGDRAFHRDPRVVTLLAKSLNHGLSLAGMANCGKHFPGHGFAEADSHVALPTDDRTLDAILEQDVAPYDWLGLSLAAVIPAHVIYTQVDKRPAGFSRVWLQDILRGKLGFTGAIFSDDLSMEAAREGGTLTQAADAALAAGCDMVLVCNQPDAAEVVLNGLKARASAESVRRIKRMRARGKALKWDKLIAQPEYLQAQALLSSALA

SEQ ID NO: 47392 - protein, 470 aa, Burkholderia cepacia
MGKQAIGVIGLAVMGRNLALNIESRGYAVSVFNRSREKTDELIAEFPGRNLVPTYTLEEFVASLETPRRILMMVKAGEATDATIASLKPLLEKGDVLIDGGNTHFTDTIRRNQELAQSGLHFIGTGVSGGEEGALRGPSIMPGGQRDAYDLVEPILKQIAAKAPSDGEPCVAYMGPDGAGHYVKMVHNGIEYGDMQLIAESYSVLKDVAGLTNDELGAVYTEWNQGELDSYLIEITSKIFGKKDEETGKHLVDVILDRAAQKGTGKWTSQNALDLGVPLPLITESVFARVLSSLKTERVAASKILSGPAAAPFDGDRAAFVEAVRRALYLSKVISYAQGFAQLRTASEEYGWNLDLGTIAKIFRAGCIIRARFLQKITDAYAKDPALANLLLDPYFKDIAANYQTALRDVVVAAVKAGVPVPAFASAVAYFDSYRSERLPANLVQAQRDFFGAHTFERTDKPGSFHANWS

SEQ ID NO: 47393 - protein, 405 aa, Burkholderia cepacia
  MISC_FEATURE (401)..(401): X=any amino acid
LIPCAGTGSRSGSAVPKQYRTLAGRALLHYTLAAFDACTEFAQTLVVLAPDDSHFDARRFAGLRFAVRRCGGGSRQASVLNGLLELAEFGATDHDWVLVHDAARPGITPELIRTLVATLKDDPVGGIVALPVADTLKRVPAGGDAIARTESRDALWQAQTPQMFRIGMLREAILRAQREGHDLTDEASAIEWAGHTPRVVQGSLRNFKVTYPEDFALAEAILARPANLPDFHPISIGTRMDFRIGQGYDVHQLVEGRPLIIGGVTIPYERGLLGHSDADVLLHAITDALFGAAALGDIGRHFSDTDAAFKGADSRVLLRACAERVKAAGFTIQNVDSTVIAQAPKLAPHIDGMRANIAADLGLPLERVNVKAKTNEKLGYLGRGEGIEAQAAALLVKQGGXRPAV

SEQ ID NO: 47394 - protein, 131 aa, Burkholderia cepacia
MSMSDPIADMLTRIRNAQMVEKVSVAMPSSKVKVAIAQVLKDEGYIDDFAVKAEGAKSELNIALKYYAGRPVIERLERVSKPGLRVYRGRNDIPQVMNGLGVAIVSTPKGVMTDRKARATGVGGEVICYVA

SEQ ID NO: 47395 - protein, 86 aa, Burkholderia cepacia
MGAVQGSMLLVFTLIAIAALILMIARYKIYPFLVLIIVSLGLGLVVGMPMDKIVKSFETGTGGTLGHIAIVVGLGTMLGKMMAEIG

SEQ ID NO: 47396 - protein, 279 aa, Burkholderia cepacia
MEGDASQDELFAYVTSPAFDADNSAGGSGVRAPMLRRGRNQPANKRVLSPDDDAPKLHKVLAEAGMGSRREMEELIVAGRVSVNGEPAHIGQRIMPTDQVRINGKPVKRKLPNKPPRVLLYHKPTGEIVSHADPEGRPSVFDRLPPMKTAKWLAVGRLDFNTEGLLMLTTSGDLANRFMHPRYSVEREYAVRVVGELAEGMRQKLLHGVELEDGPANFMRIHDGDARRHHRWGIATCCPKTRSCTLTRRSARFALTVTSATAWCQIPTSSTQRPNMSSS

SEQ ID NO: 47397 - protein, 446 aa, Burkholderia cepacia
MSYNEAKFWHPMLHPNEMKQRKPIRIVRGDGCYVFDEAGRKLVDGVAGLWNVNVGHNRQEVKDAIVRQLDELEYFQLFDGISHPRAEELSKKVIDLLEPEGMRRVLYSSGGSDAIETALKIARQYWKVRGQADRTKFISLKQGYHGTHFGGASVNGNTVFRRNYEPNLPGCFHVETPWLYRNPFTQDPEELGRICAEMLEREIQFQSPDTVAAFIAEPIQGAGGVIVPPANYWPLVREVCDRYGVLLIADEVVTGFGRSGCLFGSRGWGVRPDIMCLAKGISSGYVPLGATVVNARIEDAFAANADFGGAIMHGYTYAGHPVACAAAIASLDIVVKEDLPANAAKQGAYLLEALQPFAERFAAVGEVRGKGLMLALDLVANKDTREPIDPLSGYANAVAEVARENGVLVRPVGTKIILSPPLVIQREQLDRIVDALAAGFEAVPFA

SEQ ID NO: 47398 - protein, 522 aa, Burkholderia cepacia
MRLTGDIMEYVIGVDIGTQSTKALLVDRHGTIVARRSAGYQPDTPRPLWAEQWPHVWFDAVLDCIGGCVSDARAQGVPADAIRAVCVSSLYGGSGIPVDSDMRPLHPCLIWMDRRATAQVDWVDEHVNVERLRVITGNGVDSYYGFTKMLWLRDQRPDVWANVRYFLPPNAYVIYLLTGEVAVDHSSAGNIGGVYDVARREWSDDALDMLGIPATMMPERLVDSTDVVGGLLSQWTAQLGLPAGTPVVAGGVDAAVATFAAGATRTGQHVAMIGTSMCWGYVNRHVDARHGLVSMPHVFNGQRDLYVFGGAIAAGASVAWFRDQFCHAETDAARLLPHGDPHVLLEEAAERVPAGADGVLFLPYLMGERSPVWDAKASGAFVGLSLAHTRAHLYRAVLEGVAFALRHNIEAGRRGAAALDDRLIVVGGAAHSALWMQIIADMTGFPVWTIEQDVEAAMGAALLAGVGAGLVSDDDAQGGWVTLVERARPDAERANTYDARFSLYTALYPALKPIMHRLGTSS

SEQ ID NO: 47399 - protein, 761 aa, Burkholderia cepacia
  MISC_FEATURE (635)..(635): X=any amino acid
  MISC_FEATURE (760)..(760): X=any amino acid
DTDMIVFSAGIRPRDELARACGLDIGPRGGVAIDDACRTSDADIYAIGECAAWNGIVYGLVAPGYDMARVVAKQLAGGADEAAAAFAGADMSTKLKLMGVDVASIGDAHGTTAGSRTYQYADERRQVYKKLVVSDCGKFLHGAVMVGDAAEYGTLLQMMLNRIELPESPEFLILPSSDGAAKPAIGVDALPEGAQICSCNNVSKSQICAAVADGATSLGALKTCTGAGTSCGGCVPLVTQIMKAEMKKQGLAVNNHLCEHFPYSRQELFHLIRVERITTFDALLHKHGRGLGCDVCKPAVAGILASCFNEFVLKKEHAGLQDSNDYYLANIQRDGTYSVVPRMPGGEVTPEGLIAVGQVAKKYGLYTKITGGQRVDLFGARVEQLPSIWEELIAAGFESGHAYGKALRTVKSCVGSTWCRYGVDDSVGLAIDLENRYKGLRAPHKIKFGVSGCTRECAEAQGKDVGVIATEKGWNLYVCGNGGMKPRHAELLASDLDRATLVRYIDRFLMFYVRTADRLQRTSVWRDNLEGGLDYLVDVVVHDKLAIADELEADMQHVIDTYECEWKKAVTDPDTRKRFRHFVNSDAPDTTIEFVETRGQIRPATPGERAGGKPVPIPVVAAAATRAATETATAXPTSATLQGAHHERSPSLSWTRVCPLDDIVPNTGVCALVNGEQIAVFHVAHADGGVFAIDNVDPVSQAAVMSRGLIGSLGERVVVASPLYKQHFDLRTGECLEAPEQSVNAYPSRVEDGFVWVAAXP

SEQ ID NO: 47400 - protein, 307 aa, Burkholderia cepacia
MTMHTIRIRHAALAVAAVAALSGCATVQTPTKGDPLEGFNRTMYKFNDTVDTYALKPVAKGYQYVVPQPVRDSVTNFFSNIGDVYIAANNIVQLRIADGVGDIMRVVINTVFGVGGLFDVATIAKLPKHTADFGITMGRYGMPSGPYLVLPLLGPSTLRDTAGLGVDYVGNPLTYVKPDGLSWGLFGVNLVNTRANLLGAGDVLDAAALDKYSFVRNAYLQRRQALISNARGEAAVTSNNDALPKYDLPEDGAAPAAAGAAGTAGAAAVGGAAPAGASGAAVAAPASGTAESPNPASETNVPAMQVA

SEQ ID NO: 47401 - protein, 419 aa, Burkholderia cepacia
MTHRPLRAAARLTTAAAVAFASLGTTAPADAGTLTLNIAFKGASQRAVWQSTIEAFHKAHPDIDVKPTFVDEEAYKVQLPAWLTTVAPDVVNWHAGERMAYYAKRGLFEDLSGDWTKNGWDAMYASTRSASSYNGKQYAAPTVYYSWGLFYRKDLFRKVGIADEPKTWDQFLDACKKLKAAGITPIAIGGRDAWTLAGWFDYLDLRLNGNAFHQQLMAGDVPYTDPRVKKVYTTWKSLIDSGYFIDNALSYDLDGAQPFLFQGKAAMMLMGTFIAAGFPPNVKPEMGYYRFPIIDPKVPTAEDGPVESLHIPTKAKNKADAHTFLAFVETPEMGAKLAEGLGSLSANSKSPEPADPISRIGFRILADTKGGVAQFYDRDMTKEMADEGMKGMQQFLANPAQLDTVLAQLEQTRKRIYKK

SEQ ID NO: 47402 - protein, 703 aa, Burkholderia cepacia
MPRKTPIERYRNIGISAHIDAGKTTTTERILFYTGVSHKIGEVHDGAATMDWMEQEQERGITITSAATTAFWKGMAGNYPEHRINIIDTPGHVDFTIEVERSMRVLDGACMVYDSVGGVQPQSETVWRQANKYKVPRIAFVNKMDRIGADFFRVQKQIGERLKGVAVPIQIPIGAEDHFQGVVDLVKMKAIVWDDESQGVKFTYEDIPANLVELAHEWREKMVEAAAEASEELLEKYLHDHESLTEDEIKAALRQRTIANEIVPMLCGSAFKNKGVQAMLDAVIDYLPSPVDVPAILGHDFADPEKPAERHPSDDEPFSSLAFKIMTDPFVGQLIFFRVYSGVVESGDTVLNATKDKKERLGRILQMHANERKEIKEVRAGDIAAAVGLKEATTGDTLCDPAKPIILEKMEFPEPVISQAVEPKTKADQEKMGLALNRLAQEDPSFRVQTDEESGQTIISGMGELHLEILVDRMKREFGVEATVGKPQVAYRETVRTTAADVEGKFVKQSGGRGQYGHAVITLEPNPGKGYEFLDEIKGGVIPREFIPAVDKGITETLKSGVLAGYPVVDVKVHLTFGSYHDVDSNENAFRMAGSMAFKEAMRKAKPVLLEPMMAVEVETPEEFMGNVMGDLSSRRGIVQGMEDIAGGGGKLVRAEVPLAEMFGYSTSLRSATQGRATYTMEFKQYAETPANVSEAVINAKVK

SEQ ID NO: 47403 - protein, 448 aa, Burkholderia cepacia
MSASAVNVTPGRNVVVVGTQWGDEGKGKIVDWLTDHAQGVVRFQGGHNAGHTLIIGGKKTILRLIPSGIMREGVACYIGNGVVLSPEALFKEIGELEEAGVNVRDRLFISEATTLILPYHIAIDQAREARKGVGKIGTTGRGIGPAYEDKVGRRALRVQDLFDAKTFADRLRENLDYHNFVLTQYLGGAAVDFQATLDTMLGYADRLKPMVADVSRRLYDANNAGQNLLFEGAQGTLLDIDHGTYPFVTSSNCVAGAASAGAGVGPQKLNYILGITKAYCTRVGSGPFPSELYDADNPQRQDQVGVTLANVGKEFGSVTGRPRRTGWLDAAALRRSIQINGVSGLCMTKLDVLDGLDEVKLCVGYKVDGKDVDILPRGAVDVARCEPVYETFSGWKESTVGIKTWDALPVNAQAYLSRVQEVAGVPVDMVSTGPDRDETILLRHPFKV

SEQ ID NO: 47404 - protein, 161 aa, Burkholderia cepacia
MRGARDLAGHRLPDRRARGEPRADPGDAARPLRGERNPLTRAGIGWREPPPCTSPHPHPKGRAPLCPAPAHPPLSPVPPPPPPPPAPPRPPLTPRAAPPPRALSPPPTPRGPPPARQAAQPRAPRAPWRPSRPAPWHPPTPPPAPSPPRARRRPRRTTPPS

SEQ ID NO: 47405 - protein, 296 aa, Burkholderia cepacia
MPRYRGANRRRGRKRPVHPDSDACPRNDRRVDRRERDKPTRRFHSNSPSTTGRDWSIYYAPPISPHSTMRRRFFWLIVLSLGIAQPAAAQQAPALPASAPEAAASAPGDASAPLANDQPNEANRRITSYLTKKFGVAKERAAKLADIVSVTATKYSLPPALVYAIISIESRFQEKARGQHGATGLMQVVPSAHRGMLRNVKDLTEPNANVEVGSRILSGYVKAAGGNVQAGLKSYSGGSSAYAAKVMQRVDAFRFVLEPEDDAKSANTGSDANNAKAHMVPVSDPSAAPAANRNAK

SEQ ID NO: 47406 - protein, 389 aa, Burkholderia cepacia
MPLPTNQLRLAMVAGEPSGDLLAASLLGGLRERLPESAQYYGIGGQRMIAQGFDSHWQMDKLTVRGYVEALGQIPEILRIRGELKRQLLAERPDAFIGVDAPDFNFSVEQAARDAGIPSIHFVCPSIWAWRGGRIKKIAKSVDHMLCLFPFEPAILDKAGVASTYVGHPLADDIPLEPDTHGARIALGLPADGPVIAVLPGSRRSEIALIGPTFFAAMALMQQREPGVRFVMPAATPALRELLQPLVDAHPQLALTITDGRSQVAMTAADAILVKSGTVTLEAALLKKPMVISYKVPWLTGQIMRRQGYLPYVGLPNILAGRFVVPELLQHFATPEALADATLTQLRDDANRRTLTEVFTEMHLSLRQNTAAKAAEAVVRVLEQRKGRA

SEQ ID NO: 47407 - protein, 497 aa, Burkholderia cepacia
MKKRIEPVTGKEIEMKELMDVQRGDAPAADRERVLERMAAGMARWSEKWFPDAYIFAALAVIIVAAGALAAGAPVARIGVAFGDGFWSLIPFTMQMAIVAISGYVVAVSPPASRLIDALARVPASGRAAVTFVALVSIVASLFNWAISLIFSGLLVRALARRADLRMDYRAAGAAAYLGMGATWALGLSSSASQLQANPDSLPKALLAISGVIPFTETIFLPQSMLMAAVLTVASLLIAYLSAPNDARAKTATELGIALDESHAALARPSRPGDWLEYSPLVTIVIVAIGAIWAWHEFTTKNPLIAISNLNTYNFLFLLLGMLLNWRPRRFLNAVARSVPSVAGVLIQFPLYGGIAYILTKAAAPTGLPLSDHLAHFFVALSSHASFPAVMGVYSAVLGFFVPSGGGKWIIEAPYVIEAAKLLQVHLGWAVTVYNAAEALPNLINPFWMLPLLGVLGLRARDIVGFTFTQLVVHLPLVIFMLWALASTLTYHPPVMP

SEQ ID NO: 47408 - protein, 632 aa, Burkholderia cepacia
MAHETMSFQAEVKQLLHLMIHSLYSNKEIFLRELVSNASDATDKLRFEGLADNALYENDPNLRIRIGYDKAARTITIDDNGIGMSRDEAIANLGTIARSGTKEFFTKLSGDQQKDAALIGQFGVGFYSGFIVADKITVETRRAGLPANQAVRWESAGEGDFTIDAIERAQRGTTITLHLREGEDDLLSSHRLKSIIQKYSDHIALPILMRKEEWDQEKGEMVLKDEDETVNQASALWTRSKSDVTDEQYTQFYQHIAHDHQDPLTWTHNRVEGRSEYTQLLFVPAHAPFDLWNRDYRGGLKLYVKRVFIMDDAEQLLPQYLRFVKGVVDSADLPLNVSREILQESRDVKAIREGVTKRALSMLEELANAEEDAGKEKYKTFWGAFGQVLKEGLGEDHANRERIAKLLRFASTHGDTDAQDVSLADYVSRMKPEQSKIYYVTADTWQAAKNSPHLEVFRKKGVEVLLLTDRVDEWMLSFLHEFDGKPLASVARGDLDLGELNDEEKKAQEQAGEAIKPVVEKMKEALGDKVKEVRVTFRLTDSPSCLVADDNDMSGYLQRMLKAAGQNAPAMQPILEINPEHALVKQLNADSADFGDWCHLLFDQALLAEGGMLDDPASFVKRTNALLLSRAA

SEQ ID NO: 47409 - protein, 240 aa, Burkholderia cepacia
IGAGEMIELCATHFAAQGPRELVVANRTAERGQRLAERFNGRAMPLADLPTRMHEFDIIVSCTASTLPIIGLGAVERAVKARRHRPIFMVDLAVPRDIEPEVGKLKDVFLYTVDDLGAIVREGNASRQAAVAQAEAIIETRVQNFMQWLDTRSVVPVIRHMHTQADALRRAEVEKAQKLLARGDDPAAVLEALSQALTNKLIHGPTSALNRVNGADRDSLIDLMRGFYQHAPRSNDQSGH

SEQ ID NO: 47410 - protein, 325 aa, Burkholderia cepacia
MNLANLMSEPDEARRPSRRSLFAQARDHSVYLAFVALAVFNLIVTPGFSNPLAARSLLFQAAPIVLIALGQNLAIATRGIDLSVGSVMALSSAIIAVCLPYGTGAAFAAAIAIGLAVGLFNGGLVARLGIDPLISGLALLVAARGLAQALLGGSRVSLPPSDAFDFVGIGTWFGLPVVMLIALVCAAVVFFVVRNTTFGRYTILVGASRDAAHLAGVPVRRTLLAVYAASGALAGLAGLFATARLGAGDPNYVGVNFELDAIAASVIGGTPLSGGRVSIVGTVFGVLLLQLLDASFIMNNISYTYAQILKAAFILGALYLQRSGA

SEQ ID NO: 47411 - protein, 338 aa, Burkholderia cepacia
MNVFYDKDADLSLIKGKQVTIIGYGSQGHAHALNLKDSGVNVTVGLRKGGASWSKAENAGLSVKEVAEAVKGADVVMMLLPDEQIADVYAKEVHANIKQGAALAFAHGFNVHYGAVIPRADLDVIMIAPKAPGHTVRGTYSQGGGVPHLIAVAQNKSGAARDIALSYAAANGGGRAGIIETNFREETETDLFGEQAVLCGGTVELIKAGFETLVEAGYAPEMAYFECLHELKLIVDLIYEGGIANMNYSISNNAEYGEYVTGPRIVTEETKKAMKQCLTDIQTGEYAKSFILENKAGAPTLQSRRRLTAEHQIEQVGAKLRAMMPWIAKNKLVDQTKN

SEQ ID NO: 47412 - protein, 166 aa, Burkholderia cepacia
MTTLTLIVARARNGIIGRDNQLPWKLPEDLAFFKRTTMGAPIVMGRKTHESIGRPLPGRRNIVVTRDATRRFEGCDTVTSLADALALAARDGAPEAFLLGGAQLYAEGLTLADKLVVTEIDADFDGDASFPAPDAAHWQEISRDAHQAAAPNTFGYAFVVYARKRG

SEQ ID NO: 47413 - protein, 346 aa, Burkholderia cepacia
MAQHETGTATQPMTMIQALRSAMDVMLGRDSDVVVFGQDVGYFGGVFRCTEGLQNKYGKSRVFDAPISEGGIVGAAVGMGAYGLRPVCEIQFADYFYPASDQIVSEGARLRYRSAGQFTAPMTIRMPCGGGIYGGQTHSQSPEAMFTQVCGLRTVMPSNPYDAKGLLIASIENDDPVIFLEPKRLYNGPFDGHHERPVTSWLKHPASAVPEGYYTVPLDTAAVVRPGNDVTVLTYGTTVHVSLAAAEETGIDAEVIDLRTLWPLDLDTIVASVRKTGRCVVVHEATRTCGYGAELVSLVQEHCFYHLEAPVERTTGWDTPYPHAQEWAYFPGPTRVGEALRRVMEA

SEQ ID NO: 47414 - protein, 344 aa, Burkholderia cepacia
MKVVVVACDAQGNVDIADLKAKAEQHSKDLAAIMITYPSTHGVFEQNVREICEIVHAHGGQVYVDGANMNAMVGLTAPGQFGGDVSHLNLHKTFCIPHGGGGPGVGPVAVGAHLAKFLPNQRSTGYARTEDGIGAVSAAPYGSASILPISWMYIAMMGAKNLTAATETAILNANYIAKRLAPHYPVLYSGPGGLVAHECILDLRPIKETSGISVDDVAKRLMDYGFHAPTMSFPVPGTLMVEPTESESQEELDRFIAAMIAIREEIRAVEEGRADREDNPLRHAPHTAAVVTANEWPHAYSREQAAYPVASLGTNKYWPPVGRADNAYGDRNLFCSCVPMSDYA

SEQ ID NO: 47415 - protein, 303 aa, Burkholderia cepacia
MITTGALLFGDAQRHLAFTPSESPIALQLGGSERDDLARAAKLGEQWGYDEINLNCGCPSERVQRGAFGACLMNEPQLVADCVKAMRDAVAVPVTVKHRIGVDAVEDYAFVRDFVGTVAEAGCETFVVHARNAILKGLSPKENREIPPLKYDYAYRLKRDFPSLEIVINGGITTLDEVAQHLEHVDGVMLGREAYHNPYVLAEVDARFYGSTAAVPTREEAEAQLIAYCAAELKRGTYLGAIVRHALGLYRGMPGARGWRRVLSDNKKLARGDLAVFDEARAHLNEAEEIFEKKALQDSKVFV

SEQ ID NO: 47416 - protein, 210 aa, Burkholderia cepacia
MRAPTENNGDEAHILGEPDEETTMSANALLSRMLRYQAWANDEMLKAMSGLDAERHAQARHLALRLMNHCLVVNRIFAAHLSGERHGFVSDNTPDTPEPEALRAAFATLDRWYLDYVATATPDMLSESIPFLFTDGDNGYMTREEMLTHVVTHGGYHRGEAGRLMVQAAALSAQDIELPWDTYAVHLHRTEPERRLQGKLGDAHSANAGR

SEQ ID NO: 47417 - protein, 187 aa, Burkholderia cepacia
MPIINTQIKPFKATAYHNGDFVPVSEENFKGKWSVVVFYPADFTFVCPTELGDLADRYAEFQKLGVEIYGVSTDTHFTHKAWHDTSDTIGKIKYPMIGDPTLTLSRNFDVLIEEEGMALRGTFVINPEGEIKLCEIHDNGIGRDAGELLRKVQAAQYIAAHPGEVCPAKWTPGAETLTPSLDLIGKI

SEQ ID NO: 47418 - protein, 1084 aa, Burkholderia cepacia
MPKRTDIKSILIIGAGPIIIGQACEFDYSGAQACKALREEGYKVVLVNSNPATIMTDPNTADVTYIEPITWEVVARIIEKERPDAILPTMGGQTALNCALDLHHHGVLEKFGVELIGASPEAIDKAEDRQKFKDAMTKIGLGSAKSGIAHSMEEATKVHAEIMAATGGSGYPVVIRPSFTLGGSGGGIAYNREEFEEICKRGLDLSPTRELLIEESLLGWKEYEMEVVRDRADNCIIVCSIENLDPMGVHTGDSITVAPAQTLTDKEYQILRNASLAVLREIGVDTGGSNVQFSINPKDGRMVVIEMNPRVSRSSALASKATGFPIAKVAAKLAVGYTLDELKNEITGGQTPASFEPTIDYVVTKIPRFAFEKFREADSRLTTQMKSVGEVMAIGRTFQESFQKALRGLEVGVDGLDEKSTNRDEIAIEIHEPGPDRIWYVGDAFRIGMTAEEIFAETAIDPWFLEQIEQIILKEKALSGRTLASLTFDELRYLKQSGFSDRRLAKLLGATPEDVRKRRVELNVRPVYKRVDTCAAEFATKTAYMYSTYEEECEAQPTTNKKIMVLGGGPNRIGQGIEFDYCCVHAALAMREDGYETIMVNCNPETVSTDYDTSDRLYFEPLTLEDVLEIVDKEKPVGVIVQYGGQTPLKLALDLEAHGVPIVGTSPDMIDAAEDRERFQKLLQDLGLRQPPNRTARAEDEALALADEIGYPLVVRPSYVLGGRAMEIVHEPRDLERYMREAVKVSNDSPVLLDRFLNDAIECDVDCICDGEAVFIGGVMEHIEQAGVHSGDSACSLPPYSLSKETVAELKRQTGAMAKALNVVGLMNVQFAIQQVPQADGSKQDIIYVLEVNPRASRTVPYVSKATSLPLAKIAARAMVGQKLAQQGVTKEVEPPYFSVKEAVFPFVKFPTVDPVLGPEMRSTGEVMGVGQTFGEALFKSQLAAGSRLPESGTVLLTVMDADKPKAVEVARMLHDLGYPIVATKGTAAAIEAAGVPVKVVNKVKDGRPHIVDMIKNGEIALVFTTVDETRQAIADSRSIRMSAQAHKVTYYTTMSGARAAVEGLRYLKDLEVYDLQGLHARLN

SEQ ID NO: 47419 - protein, 465 aa, Burkholderia cepacia
MGRTLRGHTGPPGGAGAERNWRHPGRHGPGGTGGGPGGREKTRGKGNGGWGGGGREKEGGGGKRARGQGAPRATRGDGPREAGKGGDPEEPNRVGRVDQSKRLASGRSDVVRITVSSPKAEAAVPEIRELLDRMGVTVPLVRDFHYNGHLLLRDYPGCAESLSKYRINPGNVGQGAKRDTQFAQMIEAAAKYDKPVRIGVNWGSLDQDLLARMMDENGARAQPWDAQSVMYEALIQSAIGSAERAVELGLGRDRIVLSCKVSGVQDLIAVYRELGRRCGFALHLGLTEAGMGSKGIVASTAALGVLLQEGIGDTIRISLTPEPGASRTGEVIVGQEILQTMGLRSFAPMVIACPGCGRTTSTLFQELAMQIQTYLREQMPVWRKEYPGVEKMNVAVMGCIVNGPGESKHANIGISLPGSGENPAAPVFIDGEKVKTLRGERIAEEFQQIVSDYVARNYGRTEALN

SEQ ID NO: 47420 - protein, 727 aa, Burkholderia cepacia
  MISC_FEATURE (71)..(71): X=any amino acid
KARAEQEEISKRRAAAEAEARAIREMMNTPRKAVVKAAEPPKPAEPAKPAEAKGTLHKPAKPEVRRRVRPXRSRPAPRHRPRRKRRQARATATRSRAQARAAGRTTRRSVRHQDARRLERRRRPRLARRPEGSRPSQDSASSFQAPTEPIVREVHVPETVSVADLAHKMSIKASEVIKVMMKMGQMVTINQVLDQETAMIIVEELGHRAVAAKLDDPEALLVEGETGTDAEQLPRPPVVTVMGHVDHGKTSLLDHIRRAKVAAGEAGGITQHIGAYHVDTPRGVITFLDTPGHEAFTAMRARGAKATDIVVLVVAADDGVMPQTKEAIAHAKAGGVPIVVAINKIDKPEANPDRVKQELVAEGVVPEEYGGDSPFVPVSAKTGAGIDDLLENVLLQAEVLELKAPVEAPAKGIVIEAKLDKGKGPVATILVQSGTLNRGDIVLAGTAYGRVRAMLDENGKPTKEAGPSIPVEIQGLSEVPGAGEEVIVLPDERKAREIALFRQGKFRDVKLAKQQAAKLESMLEQMGEGEVQNLPLIIKADVQGSQEALVQSLLKLSTDEVRVQIVHSAVGGISENDVNLATASKAVIIGFNTRADAQARKLAEANGIDIRYYNIIYDAVDEVKAAMSGMLAPEKREVITGMVEVRQVFKVPKVGTVAGCMVTDGIVKRSSSVRVLRNNVVIFTGELESLKRFKDDVKEVKQGFECGMSVKNFNDIIEGDQFEVFEV

SEQ ID NO: 47421 - protein, 809 aa, Burkholderia cepacia
MQFPESWLRTFVDPQLTTDELSHALTMAGLEVESLSKAAPPTSKIVVGRVLEVVKHPDADKLNVCQVDAGTGATLNIVCGAPNVAPGIKVPVALVGAELPPAEEGGKPFAIKLSKLRGVESQGMLCSARELKLSEDHSGLLILPEDTPVGQDIRETLNLDDTIFEIKLTPNKADCLSVFGIARETAAITGAPLTPVDIRPVNVELDETLPVRIAAPDLCGRFSGRVIRGVNAHAKTPQWMVERLERSGQRSVSALVDISNYVMFELGRPSHVFDLDKIHGGIEVRWGKRGESLKLLNGNTVELDETVGVIADDRQVESLAGIMGGDSTAVTLDTTNIYLEAAFWWPDSIRGRARKYNFSTDAAHRFERGVDYATTVEHVERITQLILEICGGKAGPVDDQAVNLPQRAPVKMRVSRANRIIGVKIDADEIADIFTRLGLPFEREDDAFLVTPPSHRFDIEIEEDLIEEVARIYGFEKIPARPPVATSEMRATHETRRSIHDIRHALAARDYAETVNFSFVDAEWEHDFAGNDNPIRLLNPIASQLSVMRTTLFGSLIAVLRHNLNRRADRVRVFESGRVFVADPSVKAGELAVEGHAQPKRVGALAYGPALDEQWGVTTRAVDFFDVKGDLEALLAPAVARFVKAEHPALHPGRSARIEIDGRAVGWIGELHPRLMQKYELPHPPVMFEIDADALIARALPAPTDVSKFPPVRRDIAVVVDQAVEVQALFDEMKKALAEEACRFVQKVVLFDEFRAKSNTSGGLAANEKSLAFRVTLQDAAGTLQDEVVDQAIQTLVERMARAGARLRG

SEQ ID NO: 47422 - protein, 115 aa, Burkholderia cepacia
MAFRLKVVQHMREHGVSSKEAAARFNIRNPSAVLEWARRYDDGGLTALAPRPKGRRPTAMPKTPPAQPLNPTDGTDTRTREDLLQELNYLRMENAYLKKLRALVQAQAVPRKKRK

SEQ ID NO: 47423 - protein, 232 aa, Burkholderia cepacia
MSDLAARLDSVHRRIADAARAAGRDPATVALLAVSKTFPADDVRAAHAAGQRAFGENYVQESIDKIDALADLRASLEWHFIGPLQSNKTRPVAERFDWVHSVDRLKIAQRLSEQRPAHLPPLNVCVQVNISGEASKSGVAPADVAEVARAVAALPSLRLRGLMAIPEPADDPDAQRAPHRALRALFDTLRAGGLPLDTLSMGMSADLDAAVLEGATIVRVGTAIFGARDYSH

SEQ ID NO: 47424 - protein, 113 aa, Burkholderia cepacia
MLRKALRRLQPDERPMLHSDQGWHYQMPGWRLMLEQRSLAQSMSRKGNCLDNAAMESFFGTLKSEFFYLNHFSSIEQLRIGLKRYIRYYNHERIKLKLKGLSPVQYRTQPHPA

SEQ ID NO: 47425 - protein, 135 aa, Burkholderia cepacia
MPPPNVVPLSAAPLYVQIKDTLRARILDGTYAPHSRMPSEHELCAMFDVSRITVRQALGDLQKEGLLFKLHGKGTFVSKPDAFQNVTSLQGFAEAMSSMGYEIVNQLRSLRTVKADPHLATKLNVPESAPLGQIH

SEQ ID NO: 47426 - protein, 549 aa, Burkholderia cepacia
RQILVTSALPYANGQIHIGHLVEYIQTDIWVRALRMHGHEVYYIGADDTHGTPIMLRAEKEGLTPKQLIDRVWTEHKRDFDSFGVSFDNFYSTDSDENRVLSEKIYLALQEAGLIAEREIEQAYDPVKEMFLPDRFIKGECPKCHAKDQYGDNCEVCGSTYLPTELLNPYSVVSGATPVRKTSKHYFFRLSDPRCESFLREWVSGLAQPEATNKMREWLGDAGEAKLADWDISRDAPYFGFEIPGAPGKYFYVWLDAPVGYYASFKNLCERNGIDFDAWIRPGSKAEQYHFIGKDILYFHTLFWPAMLEFSGHRTPTNVFAHGFLTVDGAKMSKSRGTFITAQSYIDTGLNPEWLRYYFAAKLNATMEDIDLNLDDFQARVNSDLVGKYVNIASRAAGFLIKRFDGRVQDSAMNHPLVAKLRDAIPQIAASYEAREYGRALRHTMELADEVNAYVDGAKPWDLAKDPANAVALHETCSVSLEAFRLLSLALKPVMPRVAAAVEAFFGIAPLAWADAAKPLSSAQPIKAYQHLMTRVDAKQIEALLAANR

SEQ ID NO: 47427 - protein, 171 aa, Burkholderia cepacia
MINPAAANAATSRRDAEQGDATGQEFLVFTLGDEEYGIDILKVQEIRGYDSVTRIANAPEFIKGVINLRGIIVPIVDMRIKFHLGRVEYDHQTVVIILNVSNRVVGMVVDGVSDVLTLQTDQIMPAPEFGATLTTEYLTGLGTVDGRMLILMDIEKLMSSREMALIETLGG

SEQ ID NO: 47428 - protein, 331 aa, Burkholderia cepacia
MNAEGLTKSALLLMSIGEEEAAQVFKFLAPREVQKIGAAMAALKNVTREQVEDVLQDFVKEAEQHTALSLDSSEYIRSVLTKALGEDKAGVLIDRILQGSDTSGIEGLKWMDSGAVAELIKNEHPQIIATILVHLDRDQASEIASCFTERLRNDVLLRIATLDGIQPAALRELDDVLTGLLSGSDNLKRSPMGGIRTAAEILNFMTSVHEEGVLESVRQYDADLAQKIIDQMFVFENLLDLEDRAIQMVLKEVESETLIVALKGAPPALRQKFLANMSQRAAELLAEDLDARGPVRVSEVETQQRRILQIVRNLAESGQIAIGGKAEDAYV

SEQ ID NO: 47429 - protein, 329 aa, Burkholderia cepacia
MRTFLSLGRTLALAAAVLAPAAHANNVIVLNSAEATLSLIDQQTREVVSTMPTGKEPHHLMATPDNASLIVANSVSNSLMFLDPKTGKLQRTVEGIDDPYQLGFSPDRKWFAAAGLRLDRVDIYGYDGRDLKLVKRVPLAVMPSHLAFTKDSKTLLVSLQVSGEIAAIDLPTQTVKWKMKVGKVPAGLWLTPDDKFLLVGMTGADYVAVVDWRNQKVVKQIYTGKGAHNFRSLADGTHVAVTNRVANTISIIDENTLTNVGDITGLLPGPDDMELSADKKTLWVTFRFAKKVGIIDLASRKLVQTIAVGRSPHGIYFYDRAPWKAANGA

SEQ ID NO: 47430 - protein, 136 aa, Burkholderia cepacia
MAKMQAKVQADERDDGLREKMISVNRVTKVVKGGRILGFAALTVVGDGDGRIGMGKGKAKEVPVAVQKAMEQARRNMFKVPLKNGTLQHEVHGKHGASAVLLAPAKAGTGVIAGGPMRAVFDVMGVQNVVAKSHGS

SEQ ID NO: 47431 - protein, 549 aa, Burkholderia cepacia
MPIIESKLNPRSEDFRANAAALEAVVADLRAKIEQLAQGGGQAARDKHLSRGKLLPRDRIAQLLDPGAPFLEFSQLAANGMYNDDAPGAGVITGIGRIAGRECVIVCNDATVKGGTYYPITVKKHVRAQEIAAENRLPCVYLVDSGGANLPNQDDVFPDRDHFGRIFFNQATMSAAGVAQIAVVMGSCTAGGAYVPAMSDESIIVKDQGTIFLGGPPLVKAATGEEVSAEDLGGGDVHTRLSGVADHLAQNDAHALSIARNIVSHLAPKIAPPVALREPKPPRYDAKSLYGVIPVDTRKPFDVREVIARIVDDSEFDEFKARYGTTLVTGFAHIWGHPVGIVANNGILFSESAVKGAHFIELCCQRKIPLVFLQNITGFMVGRKYENEGIARHGAKMVTAVSNAKVPKFTVIIGGSFGAGNYGMCGRAFFFWNGLVGVTGRAATSQASRLNRAGGAGVTLWSAPVFVAIACPAFFSCRSLLLLVPIHSSLSNPLFLFCSRQSFFHPSPPSFFFCALFAPAPLFFVSPSFYYPFTLVPYFSPFTPPKTYI

SEQ ID NO: 47432 - protein, 281 aa, Burkholderia cepacia
MLSYRHGFHAGNHADVLKHAVVVQLLRYLNKKDKSYWYIDTHAGAGVYSLRDGYAAKTSEFDTGIGQLWNEKNLPEALGDYVDEVRALNDDGELHFYPGSPYIAWRSMREQDRMRLFEMHTTEIDVLRHNFRDAGRRAMIFAGDGFEGIKALLPPPPRRALVLIDPSYEDKKDYARTVSCVTECLKRFATGCYAIWYPQVTRTESQRFPEQLKRLQPNNWLHLTLTVSNPPTDGLGLYGSGMFILNPPYTLAQSMNEVLPYLVEMLGQDSGARCQIEHRGN

SEQ ID NO: 47433 - protein, 256 aa, Burkholderia cepacia
MTQELILRAPETFITDSPAALDTARPPLPTHLAVILDGNRRWADRLGLPAADGYRAGGRNVHALLSWCEETGIPFVTLWPLSTENLQRDAGELRDLLAVIGDVFDELAACGRWRLHVIGDLTQLPPATAERIRAAQQRTAHARGLDVNIAVAYSGRLDLLHAVRSLIAEHVAAGTVEQLLAQLSPELIASRLYTAGQPEPDLVIRTSGEQRLSNFMLWQTAFSEFYFTPTCWPDFGRDDFEQAIDAYGKRARRFGK

SEQ ID NO: 47434 - protein, 209 aa, Burkholderia cepacia
MFTGIVAAVGRIESIAPLGTSADAGVRLTVQAGGLDLADVALGDSIAIQGACMTVIEKTDTTFDVDVSRESLNRTVGLAQPGEVNLEKALRAHDRLGGHIVSGHVDGLGTVSRFAPVGESHELRIVAPRELGRYLAYKGSITVNGVSLTVNAVDDRADGCEFSINLIPHTVDVTTLRHVKAGDKVNLEVDMIARYVERMLSASQGVHQD

SEQ ID NO: 47435 - protein, 438 aa, Burkholderia cepacia
  MISC_FEATURE (42)..(42): X=any amino acid
  MISC_FEATURE (46)..(46): X=any amino acid
  MISC_FEATURE (59)..(59): X=any amino acid
  MISC_FEATURE (61)..(61): X=any amino acid
MPPGGAGRRAPPHSEDTSGGPTRPTPDRGGGGATHARGTPPXRTKXAPAPGSTDADREXEXERPPPRTPPGLARTDAAGAGCSVAWPRWDAFKRDFISADGRVIDVGSADSRTVSEGQAYGLFFALVANDRRMFDTILAWTENNLAQGDLSAHLPAWLWGRAPDGAWRVLDANPASDADLWIAYALVEAGRLWRERSYTARGALLAKRVLDAETATVPGLGLTLLPGPTGFKLADGQWRVNPSYSPPQVIRALGARLPDDRRWAALASSTGRVLLDTAPKGFSPDWALYRAGKGFGPDPDTHAQSAYNAIRVYLWAGMLDRADPLAAPLLAKFAPFADAIAAHGAPPERVDTTTGVAGPNDGNGGFSAAAVPFLDARGQHALADAQAARVDTLARQSAPGYYTSVLTLFGLGWRDGRYRFGADGTLDTRWGDRSCAAR

SEQ ID NO: 47436 - protein, 670 aa, Burkholderia cepacia
TNVNLGANALALNGTGSSTFGGTIDGSGSVTVASGTQVLTGGNTYTGGTTIAAGGTLQLGNGGTSGSVAGNVVDNGALIVNQSGNVTIASVLSGTGSLTQAGSGQLTLTGASTLSGPTTVSAGTLAVNGSLGQSTVTVQSGATLTGTGTVGGLVVQNGATAAATQPGAALNVGGNVTFQPGSTFQVAATPQQSGSLAASGTAMLNGGTVQVLANQSAYQPSTTYTILSASSGVQGAFTQVSANYAFLTPTLSYDPGHVYLRLVQNGTSLPDVATTPNQRSVATALGGLGAGNPLYDAVLTTDAPTARRAYGLLDGELQASLKSMLLLDSRYVRDAVTDRVRQGLAPGSGPLAALSSGGAALCGDNTAGVADPTLPPERRIGSRDGCYGGTPYQPVVWGQAFGGRSRLAGDGNASTINRSMTGFIAGADMALNDKWRAGLAAGVTHSSLDNDQSSSAAVNSYYLSLYGGAQYGALGVRGGASYTWYRINSDRYPGFAGFSDHDSAGYNANSAQVFGEVGYALPVGPVAIEPFAGLAYVNLHTDGYTETGGAAALRAGGETTHVGFSTLGLRAASQLGSIASGTFTARGTVGWRHAFGNVRPSSAFTFANGGTSFQVSGVPIARDSAVLEAGIDANVTKRLTLGLTYSGQYGSGVRDNAILPILCATFAWQF

SEQ ID NO: 47437 - protein, 124 aa, Burkholderia cepacia
RRKLDTTLSARELLALCQKIEHHFGRERPYRNAPRTLDLDILLFGADSIDEPDLIVPHPRLTDRAFALVPLVEIEPALDIPARGRADAFLAAVADQRVEKVQTCQCLMQKALAAGEDADKTRCR

SEQ ID NO: 47438 - protein, 364 aa, Burkholderia cepacia
MAKSMRSRVMAGAVACAMSVAPFAGTTALTTLATTHAAMAATAPADDYATTRYPIILVHGLTGTDKYAGVLDYWYGIQEDLQQHGATVYVANLSGFQSDDGPNGRGEQLLAYVKTVLAATGATKVNLVGHSQGGLTSRYVAAVAPDLVASVTTIGTPHRGSEFADFVQDVLAYDPTGLSSTVIAAFVNVFGILTSSSHNTNQDALASLKTLTTAQAATYNQNYPSAGLGAPGSCQTGAPTETVGGNTHLLYSWAGTAIQPTLSLFGVTGATDTSTVPVVDPANVLDLSTLALFGTGTVMINRGSGENDGLVSKCSALYGKVLSTRYKWNHIDEINQLLGVRGAYAEDPVAVIRTHANRLKLAGV

SEQ ID NO: 47439 - protein, 405 aa, Burkholderia cepacia
MSTPARVADAWRRERFTGGFMLLALASGTTISMAQLATTLYALALGVDDARLGIIAAMEPLGIALMTLPAGLLVARYGARRVYFAASMGPMLLNLVVPFTGAWPLIALTQGLIGLCIPFRIVSINGVFLARLAQIGLARAGWYRAAMSVGTGMAGPWLASWLIGTHGAVATFCAASASFAGMALFSRALLGDAPPPPRGDRTGTGSLRTLLALAWRRDIREQLVAEAVNSATRALVGTYTVVLAIQSLGLAQTHAVALLTLQGVVAVLALFGLGHVAQRMTERRCHALSVAGGVAGLLALGLGRDAWTVGAGLAALCAGSSLLHLVNMQHLGRHPADKSQVSSLYNLASMTGAFCGPLIGGALAPLVGLRAVFLCWLPVVVLGALALLFAHGRRDATQPAPAKLS

SEQ ID NO: 47440 - protein, 437 aa, Burkholderia cepacia
MTTTTELTVVERAAVALGASERETSLRELVAKSTDMVEIKNAAARDQVHGAAMVLRTARTDIQKAGKAARDDANAFSKAVIAEENRLIAITEPEEKRLLGMRDEWDEAREAEKRAKLEAEQRRVAAIREHIDDIRAIAVRAAGLPAARIQGEIEDLEALGITLDRFAELTGEAEAVRGTTLDKLRELHASTVAQEAEAARLAAEREELERQRAELAAQREREEAERAERERVEAAARAEQERVDRERREAEEAARRAQQEREDAARRAEIEAAEARLAEQRAEQERRQAELDRAEREQREREEAALREAAEAAAQAARDRAAREHAENRAAMLAPEPTGGNWTAKSGCVVTDVPLPGCVGGGFDDVEHYGGYLIAESIFRPADGHMLAASREMFDALRQWQHAERVGDAEELANARAARDAAIERAIYVPTEETAAA

SEQ ID NO: 47441 - protein, 398 aa, Burkholderia cepacia
MSQVKRLTDLIAAGQLAGKRVFIRADLNVPQDDHGNITEDTRVRASVPAIQAALDAGAAVMVTSHLGRPTEGEFKPEDSLAPVAKRLAELLGRDVPLVSNWVENGVNVAPGQVVLLENCRVNKGEKKNSDELAQKMAKLCDVYVNDAFGTAHRAEATTHGIAKYAPVACAGPLLAAELDALGKALGNPARPLVAIVAGSKVSTKLTILKSLAGKVDQLIVGGGIANTFMLAAGLSIGKSLAEADLVAEAKAIIDEARERGASVPIPTDVVTAKEFSPTAAATVKQVADIEADDMILDIGPDTAKALASQLEKAGTIVWNGPVGVFEFDQFGNGTKTLAEAIAKSSAFSIAGGGDTLAAIAKYGIHDQVSYISTGGGAFLEFLEGKKLPAVEVLETRAA

SEQ ID NO: 47442 - protein, 500 aa, Burkholderia cepacia
MNAPEPRPRGTLMIQGTTSDAGKSTLVAGLCRLARRGGARVAPFKPQNMALNSAVTADGGEIGRAQALQAMAAGVAPHTDFNPVLLKPTSDRGAQVIIHGKARMNLDARAYHDYKPVAFDAVLESYARLRAGYDTVIVEGAGSPAEINLRDGDIANMGFAERVDCPVVLVADIDRGGVFAHLVGTLACLSDSERARVRGFVINRFRGDLKLLEPGLDWLRARTGKPVFGVLPYLHGLLLDAEDMLPAQARSAAARGDAGVLRVVVPALPRISNHTDFDPLRAHPQVEFTYWKSGPVPDADLLILPGSKSVQRDLAWLRDAGWDALIRRHLRYGGKVIGICGGMQMLGRTLDDPLGLEGAPGSVPGLGLLDFDTMLQPDKTLKNVTGHVALPGEAAVRGYEIHMGDTRGPALATPALMLAADTAQGGARPDGARSADGQILATYVHGLFDAPDACAALLAWAGLDGTARIDYPALREASLERLADTFAEHLDLDALYAEFR

SEQ ID NO: 47443 - protein, 108 aa, Burkholderia cepacia
MTEATLAQWHPLGAFDEFSEGEPAARVAGQKPIAVFRIGDELFAMHDLCTHGHARLSEGYVEDGCVECPLHQGLIDIRTGAPKCAPITEPVQTYPIRIVDGQVEVNVG

SEQ ID NO: 47444 - protein, 515 aa, Burkholderia cepacia
MTMQTITAAPGHDAEAGMRPDGPLLALDGITVTFPGVRALDAVSLSVRAGEVHGLMGENGAGKSTLLKVLSGVNQPQAGTLTLNGTAQRFASTRAALEAGIAIIYQELHLVPELTVAENLMLGQLPSRLGVVDERTLAARALDALERLGEHIDPGILVKYLSIGQRQMIEIGKALMRDARVIAFDEPTSSLSARETTQLFRIIRALRAEGRAIIYVTHRMEEVYELCDRVTVFRDGRRIDTFDSVADLDRDRLIGCMVGRSIEDVYGYRPRAAGDVLIEAKGLAGPGLAEPVSFTARRGEIVGFFGLVGAGRSELMKLLYGAVRPSAGHVELNGKRVAFGSPRDAVRAGIALCPEDRKQEGIVAIASVADNLNISARRHFSPARVLLDGRRERELAQQYIERLAIKTRDGDTPIGALSGGNQQKVVLARWLAERIDVFLMDEPTRGIDVGARAEIYNLFYELAEAGRTVILVSSDLAEVIGVSDRIVVMKEGRIAGEVAKAHATPDALIKLALPR

SEQ ID NO: 47445 - protein, 156 aa, Burkholderia cepacia
MRAVSAVRSPAEGAVEPGANPSQTKAAFPKAARLLKTDEFSSVFRLRPWRRSAHFVIYGKPTGQPARLGLVIGKKYAPRAVTRNLVKRLARDQFRLRRAEFAGYDLLLRQHTRFDKKALPSAASAPLAAMCAAEIRELLDRAVREIARRASKPASE

SEQ ID NO: 47446 - protein, 746 aa, Burkholderia cepacia
AIGSSVRTVAQCIEEASQDVTVQTSLLEARRIVGSTALFERFTVRYHEALDARAFFTAKVLEMRQRHAKFQDTPYSLEPNVKESPGGLRDLQTILWIARAAGFGSSWRELDTRGLITDREARELRRNEGFLKTLRARLHVIAGRRQDMLVFDLQTQAAESFGYQPTQAKRASEQLMRRYYWAAKAVTQLATILIQNIEAQLFPATSGITRVLSADRFVEKQGMLEIVDDGVFERHPDAILEAFLLYETTRGVKGLSARTLRALYNSREIMNNAWRRDPRNRDTFMRILQQPEGITHAFRLMNQTSVLGRYLLNFRRIVGQMQHDLYHVYTVDQHILMVLRNIRRFAVAEHAHEYPFCSQLIGNFERPWVLYVAALFHDIAKGRGGDHSTLGMADARRFCREHGIAGDDAALIVWLVQHHLTMSQVAQKQDTSDPEVIKRFAEVVGNERYLTALYLLTVADIRGTSPKVWNTWKGKLLEDLYRITLAVLGGANPDAHSELKSRQEQALALLRLETVPDDAHRALWDQLDVGFFLRHDAADIAWQTRVLYRHVNAETAIVRARPSPIGDALQVLVYVKDRPDLFAGICAYFDRNGLSVLDARVSTTRHGYALDNFIVTQTERDVRYRDIANLVEQQLAARLAETAPLPEPSKGRLSRLSRTFPITPRVDLRADERGQYYILSVSANDRPGLLYSIARVLAEHRIGVHAARINTLGERVEDIFLLAGAGLSDNRLQIQLETELLRAIAV

SEQ ID NO: 47447 - protein, 312 aa, Burkholderia cepacia
MAGFAMSAQARVFRSADVHGDTFPTNMAVKFMGEELSKQTGGKDSIKVFGNSALGSEKDTVDQVRIGAIDMARVNGASFNEIVPESLIPSFPFLFRDVAHFRKAMYGPAGQKILDAFTAKGMIALTFYESGARSIYAKRPVRSPADMKGLKVRVQPSDLMVDEIKAMGGTPTPMPFAEVYTGLKTGLVDAAENNLPSYEETKHYEVAPDYSETQHAMTPEVLVFSKKIWDTLSPQEQAAIRKAAADSVPYYQKLWTAREASAQQLVTKGGAKILPAAQIDRAAFVKAMQPLWTKYEKTPQMKQIVDEIEATK

SEQ ID NO: 47448 - protein, 197 aa, Burkholderia cepacia
MSDGSHHALPFVSVTSSIPFALLTGNVMKKSILTAVALAALSTSAFAAGTGTINFTGEIVAGACGIDSNSVNQTVQLGKVPTNKFKQAGDKSDPVSFDIKLTDCDTSIAQNAYFTFTGTSSAGQPKLLATIGSATNVGIRLQAASGEYLDNGAEQKAPTLLQNGTNTARFAAMYEATAAGVTPGTADGVANFTVRYQ

SEQ ID NO: 47449 - protein, 417 aa, Burkholderia cepacia
MRKPIDSLFGRLALLVVGVLLLSHFAWFFAMRLERNQMQTRYAVEEAAFLVDAVRQHVERTPDQPLPSRVRLVAPDSPDVPKGGDSGLPPPLKRFRDDVSERRPPRHAGRDRYARPSAGLWVKEPADRNWIVVPVQPLRPPRSLDRMLLWLGTIFSAGVIAALFAAWQLQQPLRSLARAVARFGRGQPVPPLRERGPRELRQLTHGFNQMVEQVSQAESDRAVMLAGVAHDLRTPLARMRLRAEMMDDARLRDGVVRDVDSMSHIVDQFLVFAHGGADRSEPVPVDQACERIAAAIVRSRRTRRRSRRGWRPIPASGCRRRRLDRILSNLLDNAHAYGAPPVLVETARTPTGYVLSVSDSGGGIAPRDLAAATRPFVRLDPARGGNGHSGLGLAIVERLVLRLGGACDIGNRPEGGL

SEQ ID NO: 47450 - protein, 457 aa, Burkholderia cepacia
YGAFLRNDGTNVYLLSTNKGDPEGQWNDFRPVTWNLETGRVTIDDRGSGTAIGGNTRSAANFRWVPVKLKARSVSARSTASSIRTVTAMAGGRRRRAHSSITSPIARSASTAIPCGTPATCRRSIATKGGTMSGDLWFDPGKRIYLSEGSAQAPSLTFTNDGAPDTGLYHTGDGMFGVTCNSVSQVSFTPGGTTFQTPVQGQTPPAGDRSTRLATTEWVVAAIASAAIGTVVFEPRTTARAGFLKLNGALLKRADYPALWAYAQASGALSTETDWAAGWSGTFSTGDGTTTFRIPELRGEFVRCWDDTRGVDPNRGLGASQNFANAWHAHGASAAASGDHVHSAWTDVQGWHGHHGWTASVGDHQHVAPYSESGIAPFGTHSTNQVGSHGGVDNDNPWAFTSGAGGHNHEFNTEGAGNHGHNVGIGAAGNHSHAITVNGDGANESRPRNVALLAMIR

SEQ ID NO: 47451 - protein, 373 aa, Burkholderia cepacia
MIFASSLGTVFEWYDFYLAGSLAAYISKSFFSGVNPTAAFIFTLLGFAAGFAVRPFGAIVFGRLGDLVGRKHTFLVTIVIMGVSTFVVGFLPGYASIGIAAPVIFIAMRLLQGLALGGEYGGAATYVAEHAPANRRGFYTAWIQTTATLGLFLSLLVILGVRTFIGEEAFGNWGWRVPFVASILLLGVSVWIPLQLNESPVFLRIKAEGKTSKAPLTEAFGQWKNLKIVILALIGLTAGQAVVPPTGQFYALFFLTQTLKVDGASANILIAIALLIGTPFFLFFGSLSDKIGRKPIILAGCLIAALTYFPLFKALTHYANPQLELATQKAPITVVADPATCSFQFNPVGTSKFTSSCDIAKSALAKAGLNYEN

SEQ ID NO: 47452 - protein, 332 aa, Burkholderia cepacia
MGLPSALAPPLVFPRVLIVPPSRLCSAVGKVADAAAGVAGPTARIQRVLQRAGVASIDAALPLAERWDRQRQLRQAVDAAHEALVRDGDGLSRSAVEAEVAEQDIADVPAHLEAVKQSLDDVGKRLNALSQQQVVADQAFGAIDGQANAAVAESKRQEALAAMGDAAEQYLEAATASRLLKWATDRYRDQKQGPMLRRAGEIFAGLTLGEFAKLTVDTERTPPALYARRTKGTSVEVAGLSEGTRDQLFLALRIAALELQLGSRTALPFVADDLFINFDDARAKAGLDALRDLSTRTQVLFLTHHDHLLPLVRDVFGARVNVVELQRAPVGA

SEQ ID NO: 47453 - protein, 2435 aa, Burkholderia cepacia
MANYARSGNDLVVEFKDGRTVRVQAFFENGADYHNLVFVQDDGRFLVQFGPALQATGDGIVDAALTYAPIGDGLSTGALLGILGGVAAAGGIAAAAASGGGGDDGGSGASGGGTPTGPARLAIDSIDGQSTDGNGNIVTGRASPTIAGSGAQPNTTVTIQVDGQTIGAVTADANGRWSYTPGTLPEGAHQITVTQTDSSGNTSELSTVGIVVDTIVQKTPAITAVSDDAQHPVTIGGATSDTTPTLGGTAEAGSRVSVYDGTTLLGTTTADSSGKWTFTPTTGLGEGAHSITVTATDAAGNVSTPSAAFELTIDTTAPALPTVNATDGTSLSGTAEAGATVNIDTNGDGTPDATVTADPSGVWTYTPSTPLPIGTVIGVTATDAAGNTGPSASVTVTGDTTAPGAPVIGTVTDDAGSVVGAIASGGSTDDATPTLSGTAEAGSTVSVYDGTTLLGTTTADPSGNWTFTPTTGLEEGAHSLTVTATDTAGNVSVPSTAFDLTIDTTAPSIPTVNATDGTSLSGTAEAGATINIDTNGDGTPDATVTADPGGAWTYTPSTPLPAGTVIGVTATDAAGNTGPSASVTVTGDTTAPGAPVIGTVTDDAGSVVGAIASGGSTDDATPTLSGTAEAGSTVSVYDGTTLLGTTTADPSGNWTFTPTTALGEGAHSLTVTATDTAGNVSVPSTAFDLTIDTTAPAIPTVNATDGTSLSGTAEAGATVNIDTNGDGTPDATVTADPSGAWTYTPSTPLPAGTVIGVTATDAAGNTGPSASVTVTGDTTAPGAPVIGTVTDDVGSVVGAIISGGSTDDATPTLSGTAEAGSTVSVYDGTTLLGTTTADPSGNWTFTPTTGLGEGAHSLTVTATDTAGNVSVPSTAFELTIDTTAPALPTVNATDGTSLSGTAEAGATVNIDTNGDGTPDATVTADPSGAWTYTPSTPLPAGTVIGVTATDAAGNTGPSASVTVTGDTTAPGAPVIGTVTDDVGSVVGAIISGGSTDDATPTLSGTAEAGSTVSVYDGTTLLGTTTADPSGNWTFTPTTGLGEGAHSLTVTATDAAGNVSTPSTAFDLTIDTTAPALPTVNATDGTSLSGTAEAGATVNIDTNGDGTPDATVTADPSGAWTYTPSTPLPAGTVIGVTATDAAGNTGPSASVTVTGDTTAPAAPIVVSVTDDVGSIVGLLTTGATTDDTTPTLAGTAEAGSTVNVYDSTTLLGTTTADPSGNWTFTPTTALGEGAHSLTVTATDTAGNVSVPSTAFNLTIDTTAPALPTVNATDGTSLSGTAEAGATVNIDTNGDGTPDATVTADPSGAWTYTPSTPLPAGTVIGVTATDAAGNTGPSASVTVTGDTTAPAAPIIGTVTDDVGSVVGAIISGGSTDDATPTLSGTAEAGSTVSVYDGTTLLGTTTADPSGNWTFTPTTALGEGAHSLTVTATDTAGNVSVPSTAFNVTIDTTAPAIPTVNATDGTSLSGTAEAGATVNIDTNGDGTPDATVTADPSGVWTYTPSTPLPIGTVIGVTATDAAGNTGPSASVTVTGDTTAPAAPIVVSVTDDVGSTVGLLTTGATTDDTTPTLAGTAEAGSTVSVYDGTTLLGTTTADPSGNWTFTPTTGLGEGAHSLTVTATDTAGNVSVPSTAFNLTIDTTAPSIPTVNATDGTSLSGTAEAGATVNIDTNGDGTPDATVTPDPSGAWTYTPSTPLPAGTVIGVTATDAAGNTGPSASVTVTGDTTAPAAPIVVSVTDDVGSIVGLLTTGATTDDTTPTLAGTAEAGSTVSVYDGTTLLGTTTADPSGNWTFTPATGLGEGAHSITVTATDTAGNVSTPSTAFELTVDTTAPALPTVNATDGTSLSGTAEAGATVNIDTNGDGTPDATVTADPSGAWTYTPSTPLPIGTVIGVTATDAAGNTGPSGSVTVSDLTAPAAPIVVSVTDDVGSIVGLLTTGATTDDTTPTLAGTAEAGSTVSVYDGTTLLGTTTADPSGNWTFTPTTGLGEGAHSITVTATDTAGNVSTPSTAFELTVDTTAPALPTVNATDGTSLSGTAEAGATVNIDTNGDGTPDATVTADPSGAWTYTPSTPLPIGTVIGVTATDAAGNTGPSASVTVSDLTAPAAPIIGTVTDDVGSIVGLLTTGATTDDTTPTLAGTAEAGSTVSVYDGTTLLGTTTADPSGNWTFTPTTGLGEGAHSITVTATDTAGNVSPPSTTFDLTIDTTAPALPTVNATDGTSLSGTAEAGATVNIDTNGDGTPDAIVTADPGGAWTYTPSSPLPIGTVIGVTATDAAGNTGPSASVTVSDLTAPAAPIIGTVTDDVGSIVGLLTTGATTDDTTPTLAGTAEAGSTVSVYDGTTLLGTTTADPSGNWTFTPATGLGEGAHSITVTATDTAGNVSPPSAAFAITVDTTAPTATATLTTLTDNTGVPNDWITGDTTPTLSGTLNAALGAGEV

SEQ ID NO: 47454 - protein, 551 aa, Burkholderia cepacia
MLCSGKTDDKGRMACDATLEQAGNVQLIAVAKDGDGRTSNASTSVWVTREDELWFGGDNTDRIDVIPEKTSYEPGETARFQVRMPFRYATALVAVERGGVMETHIVELNGKNPTVDLKVGDSWGPNVYVSVLALRGRIREVPWYSFFTWGWKAPVEWARAFWREGRHYEAPTAFVDLSKPAFRYGLGEIKVGTGVHRLGVTVTTDATRYTVRGKAQAHVKVTLPNGQPAPAGTQIAIAAVDEALLELMPNNSWDLLDAMLRRRAYGVETATAQMEIVGRRHFGRKAVPAGGGGGSAPTRELFDTLLLWNPRVTLDANGSATVEVPLNDALTRFRIVAIAAVGPDRFGTGSTSIRSTQDLQLISGLPPLVREGDAFRAQVTLRNTTDRAMQVVVTPHVTGLDVAPQTVSLAANAATEVAWTITVPEQALDAAGALNWRIEAAEQGGKRASDALAVAQKVVPALPVTVQQATLAQVDGTLTVPVAAPAGAVSNAQGVPRGGIAVSLQSKLTDGLPGVRRWFERYPTAPEQQTSRAIGLRDPAQWQALIARMPV

SEQ ID NO: 47455 - protein, 387 aa, Burkholderia cepacia
MIELDQLTKTFTRKDGQAVRAVDSVSLSVPEGEICVFLGPSGCGKTTTLKMINRLIAATSGRVLINGEDTAQLNEVDLRRHIGYVIQQIGLFPNMTIEENITVVPRLLGWDKKRCAERARDLMSMVALDPKLYLKRYPRELSGGQQQRIGVIRALAADPPVLLMDEPFGAVDPINRESIQNEFFQMQRQLNKTVIMVSHDIDEAIKLGDRIAVFRRGQLVQYDHPDTLLARPRDEFVAQFVGQDSTLKRLLLVKAGDAATQPETARVDSPLAHALAVMDETDCRYLTVLDDAGRALGYVTRRAARTDGGVCGERVTPFPAGVAADDNLRIVLSKMYQYSASWMPVLDPDGAWLGEITQDSIAAYLSSGRSRRQTGQPPGSPAETVAS

SEQ ID NO: 47456 - protein, 431 aa, Burkholderia cepacia
MTGDALSIFSQESTMTAVRKNFAMLFALQISTYVVPLVTLPLLTRVLGPQQYGRLSFVLAVTTYFINLVNYSFDLTATPRVALARDKVERSSIFWTTISAQWLITVAGFAVLVAMTSLIPYFEAERTALLLEFGMAIGAALTPGWYFQGIQKLSVFSMTVVGYRALSVAAFFLWIRTPDDILYAVAINAAVPLLCGATLLAYLFFCREIARVRVRFADITEALKGGTQVFLASTSISFYASTNTVLLSIVSGHVAAGYFAAGDKLIRAAVGMLQPLRATTYPHITYLMHNARDEAFAFLRKLIVVQGALVLAMSATIYEFAPLAVRILYGTTFEPTVAVLRCLALVPFMACMTDLFGVQTMLPLGMKRVFSTILISSGLLNVTILPPLASLFAERGAAIAVLMVETTVAVVLMYVLFRERVGLINMPARSR

SEQ ID NO: 47457 - protein, 347 aa, Burkholderia cepacia
MCVVIHGPNDLRVEEQDAGEIGPGQVRVDVAMGGICGSDLHYFRHGGFGAIRLQQPMVLGHEVAGTVAAVAPDVTSVKVGDRVAVNPSRPCGVCRYCLEGLPNQCLDMRFYGSAMRMPHVQGAFRNALVCDAVQCVKVADHVPLSLAALAEPFAVGLHAVSRAGPLIGKRVLVSGCGPIGVLAVAAARVHGAAEIVATDVVDAPLEIASALGADRTINAAADAGWVERYGAGKGTFDVMIECSGNARALRDGLDVMRPRGIVVQLGLGGDVSLPQNVVVAKELSICGSFRFHAEFALAVQLINAGRVDLRPAVTRVFPMRDANLEFELAGDRQRAMKVLIDFANEAA

SEQ ID NO: 47458 - protein, 293 aa, Burkholderia cepacia
MSNAEYLLCIDGDALLAHDAIGWMLEHFLTDPGVGAVTGNPRIRTRTSLLGRMQVGEFSSIVGLIKRTQQVYGRIFTVSGVITMFRKTALADVGYWSSDMLTEDIDISWKLQCRDWRVVYEPHALSWILMPETIKGLYRQRLRWSKGGIQVLLKYAGTLMRPTQMMMWPLFAEYLIGIAWAYSMSFILLLALIDVVYPLPPNWHVSVVPHWHGMLLVATCILQLIIGSMIDRRYDEKLLMYFLDTIWYPVAFWLISMITTVIALPAVVLRGRGKRAVWVSPDRGIQHEERADY

SEQ ID NO: 47459 - protein, 295 aa, Burkholderia cepacia
MNDSYPSRKSTDKPQEKRSLLERLTDFISPEPESRGELLEILQDAHERNLIDADSLSMIEGVFQVSDLCARDIMVPRAQMDAINIADKPEDFIPFVLEKAHSRYPVYEENRDNVIGVLLAKDLLRFYAEEEFDVRGMLRPAVFIPESKRLNVLLHDFRVNRNHLAIVVDEYGGVAGLITIEDVLEQIVGDIEDEYDFDEEAGNIIAGPDGRYRVRALTEIEQFNEVFGTDFPDDEVDTIGGLITHHFGRVPHRGEKLQLGNLAFEIQRGDARQVHVLLVRRNPLASRRAETSHED

SEQ ID NO: 47460 - protein, 416 aa, Burkholderia cepacia
MRAHPAFLCGAAPIGRRGRRLPENVMPIPLLALAISAFAIGTTEFIIMGLLPEVAHDLAVSLPSAGLLVTGYALGVAVGAPLLAVLTSRMPRKAALQLLMAIFIVGNVLCATASGYAMLMVARVVTSFAHGSFFGIGAVVAASLVPADKRASAIALMFTGLTLSNVLGVPFGTFVGQLLGWRASFWIVAALGVLALGGVAALVPNRHDSGPVGLGHEVRVLKEPQVWLALLMTVLGFGGVFVVFTYIAPILETVSGYSPRAVALILVLFGAGLTIGNTIGGKLADRALMPSLIAILVALMAVMAVFAKTSHLPVAAAVTVFVWGIAAFATVPPLQARVVEKAASAPHLASTLNIGAFNVGNAGGAWLGGLALEHGFALDALPWVAVAVTFAALIVTWLAMRLDARGPARGAAPAAQ

SEQ ID NO: 47461 - protein, 55 aa, Burkholderia cepacia
MAKGARDKIKLESTAGTGHFYTTTKNKRNMPEKMAIKKFDPVVRKRVEYKETKIK

SEQ ID NO: 47462 - protein, 212 aa, Burkholderia cepacia
MTPPNSIMQTVAVLDFETTGLSPNLGDRATEIAVILLRDGEVVDRFQSLMNAGRRIPSDVVALTGITNDMIAAAPPASEVMKEAAAFVGKHAVVAHNAGFDKRFWQSELGLLGMSADHAFACTMLVARRIYPDARSHRLSSLIEMLRLPQSGRAHRAMVDAEMAGHLWCRLQQDISRTYGLDRIDHALMSRVQATTKAKVPMYLRSLGRACA

SEQ ID NO: 47463 - protein, 370 aa, Burkholderia cepacia
MSRRIIPLADVSGMPDVSGVAHAPDGTLADTFARPLRDLRISVTDRCNFRCVYCMPRAVFDKDYPFLPHSALLTHEEIERVARLFVAHGVEKIRITGGEPLLRKNLEFLIERLARLTTHAGRPLDLTLTTNGSLLARKARALKDAGLTRVTVSLDALDDTLFKRMNDAEFASADVLDGIFAAQAAGLAPVKVNMVVKRGTNDSEILPMAERFRGTGVILRFIEYMDVGTSNGWNMTEVLPSADVVARIAEHFPLVPLEPHTAAETAQRWGYADGSGEIGVISSVTQAFCGDCTRARLSTEGKLYLCLFASAGHDLRALVRGGASDAEIATAIARIWQARTDRYSQLRGSASADATPDGAGKRVEMSYIGG

SEQ ID NO: 47464 - protein, 610 aa, Burkholderia cepacia
MRARFMCCWCAATRSPAVAPKPRTKTDRSAPAAPPSTARPLPLHMDDPIPSRPAGGLLAPAPGRALPRWHYPAALLAGAANTLSFAPTPHGGWLQLVVFVWFFAQLTRTSSWRGAALTGGAFGFGNFISGVWWLYISMHVYGEMAAPLAGGALVLFSLYLSLYPAFSAGLWSFCAGHAWHRRAPDPRPFSPTWHGAFAFASAWALGEWLRGTVFTGFPWLGSGYPQVDGPFAGFAPVVGVYGIAWVLALFAALVVQALVAARPSPVRDNGAGASGGNARVRVAAPAGIAVALVAAGLGLSQVTWIVPANAPLTVRLLQGNVKQDIKFEQEGIDAAIKMYQQMIVEKPADLIVTPETAIAVMIQELPEPFAVAIRKFSDTTGSAVLFGAVGASVTEDGHYVDYTNSLYGVTPNSRDIYHYDKHHLVPFGEFIPWGFRWFVDLMKMPLGDFARGAPVQKPFLVHNQPVMADICYEDLFGEEIAATIRDNPQPPGVLVNVTNLAWFGDTIALDQHLQIARMRSLETGRPMLRSTNTGMTAAIDAHGRVLGQLKPFTIGSLDVRIEGTSGFTPYVTSGNNIVLAVSLVLLAFGFTFGPGLRRRNGRKPGDDEAA

SEQ ID NO: 47465 - protein, 461 aa, Burkholderia cepacia
MLPRQTESLRSPVMSYSESRFWHPRQHPLAASRPPVRITRGEGCYLYDDTGRPYLDAVASLFNVYVGHGRREIKEAIIRQLDELEYHPVFAGFSHPRAEELSARLVGMLQPEDMSRVIFGSGGSDAVEAALMIARQYWKVSGQPERTKFIALRQAYHGSHFGGSSVTGNTVYRRNYEPTLAGCFHVETPWIYRNPFTHDPEELGRLCASLVEREILFQGPDTVAAFIAEPVQATGGIIVPPANYWPLVREVCDRHGVLLIADEVVTGFGRTGAAFGSRGWGVAPDIMCLAKGVSSGYLPLGATVVNRRIENAFASNPGGIGTLMHGYTYSGHPIVCAAALANLQIIVDEDLAGNAAREGAYLLERLQPLVDRYPVVGDVRGKGLLVGIDLVKDKVTRESIDPSDGYAAALADAARDAGVLIRSLGNRLAIAPPLVIGREDVDRIVHAIEHAFEAVPRWTAR

SEQ ID NO: 47466 - protein, 119 aa, Burkholderia cepacia
MPRVKRGVTARARHKKIINLAKGYRGRRNNVYRIAKQAVMRAGQYAYRDRRNKKRVFRALWITRINAAVRQHDMTYSVFINGLKKASIELDRKVLADMAVFDKAAFAAIVKQVKAAVAA

SEQ ID NO: 47467 - protein, 250 aa, Burkholderia cepacia
MWNNVRQLNLAASALYALLLLVLAAAGCYWLIQRPTFALREIRIDGDTEHINSPTVRAGVVGRLKGNFFTVDLDTARAAFEQMPWVRHASVRRVWPNALAVTLEEYKPLGTWGSDQLVSVDGELFTANQGELEQELPAFDGPEGSAKEVVTRYRDFGKWFAPLKAAPEEVTLSARYAWTVKLSNGMQVELGKERNSDTLHDRSQRLVAAWPAVTERWGNDIEYADLRYPNGFAIRAAGMRFLTDTDKRKK

SEQ ID NO: 47468 - protein, 347 aa, Burkholderia cepacia
MTRLRTLFRHPLAWPVLTLALLFALDVAHRPGFLSIALLDGHLFGAPIDILNRAAPLVIVSLGMTLVIATRGIDISVGAIVAIAGAAAAIVLEADPSRVGMALAAALGVGLLAGAWNGLLVAFVGMQPIIATLILMVAGRGVAQLLTGGQIIPIGAPGYLALGGGYLATVPCAVWIALATIGASALLVNRTALGLFIRAIGVNPVATRLVGLRSGAVVFGVYLCSGVMSALAGILASSNVRSADGNNAGLLLELDAILAVTLGGTSLLGGRFSLAGSVLGALIIQTLTYTTYSIGVPPEATLVVKAVVVIVVTLIQSDAARALLVRHASRLLPSARSRATTTGATPR

SEQ ID NO: 47469 - protein, 369 aa, Burkholderia cepacia
MVRVLVEMLEPYEGRIYDPACGSGGMFVQSEKFVEAHGGRRTDVSIFGQESNPTTWRLAHMNLAIHGIEAKLGEQPADTFLRDQHPDLKADFVLANPPFNVSDWSGQLLRGDKRWAYGDPPVGNANYAWIQHFIHHLAYPNGKGGGVAGFVMANGSMSSNTGGEGDIRRKIVEADLVDCIVALPAQLFFTTGIPVCLWFLTRDKTGRNIRRGTPNRPGGRAGETLFIDARKLGTMQTRVLRVLTGTEDAECVPGTSDPLPNSDVGRIIYAYRRWRGEPAPDWWNEGEHGPWAFTPIPGFAKPATIDEIAKHGHVLTPGRYVGAEEQVDDAEPFAERYPRLMAELEEQLAEGERLSTLVRERLSFITEGE

SEQ ID NO: 47470 - protein, 135 aa, Burkholderia cepacia
MNYKISTEPGAKLRIDKWLWAARFFKTRSLATDAVDKGHVKIGGAAVKPAKDVRVGDEVEIAIDGIVWHIAVLGVCDVRGPASVAQTLYEETEAGRAARLAELERRRTYREPAAELHGRPTKRDRRIIDRFSGGS

SEQ ID NO: 47471 - protein, 496 aa, Burkholderia cepacia
MNQQTAAAQASGAEYAAGTSLLDDIVEKSKVAKSDSEHARAKDLIGELVHQVLDGTVIVSDNLSATIDARVAELDRLISTQLSAVMHAPEFQRLESTWRGLDYLVKESNTGQTIKIKALHAPKRDLVRDFKGASEFDQSALFKKVYEEEFGTFGGSPFGALIGDYEISRQPEDMYFIEQMSHVAAAAHAPFIASASPELLGLESFSDLGKPRDLGKVFDTVEYAKWKSFRDAEDSRYVGLTLPRFLGRLPFNPKDGQTAENFNFVEDVDGTDHDKYLWCNAAWAFAARLTAAFDDFGWCAAIRGVEGGGLVEDLPTHTFKTDDGEVALKCPTEIAITDRREKELSDLGFIPLVHCKNSDYAAFFAAQSVQKPKKYSTDSANANAVLSAQLQYIFSVSRVAHYLKAMMRDKIGSFASAQNVETFLNRWISQYVLLDDNASQEQKAQFPLREASIQVSEIPGKPGSYRSVAFLRPHFQLDELSISLRLVADLPKPANS

SEQ ID NO: 47472 - protein, 460 aa, Burkholderia cepacia
MNAPQDPQIESLKVPPHSVEAEQSVLGGLLLDNAAWDRIADFLSQGDFYRYDHRIIYEHIGRLIASTRPADVVTVYEALTTSGKADDVGGLAYLNALAQNTPSAANIRRYAEIVRDRAVLRRLVSVADEISADAFNPQGKEVRQLLDEAESKVFSIAEEGARGNQGFLEIGPLLTQVVERIDTLYHTANPSDVTGTPTGFVDLDRMTSGMHGGELIIVAGRPSMGKTAFSMNIGEYVAVEYGLPVAVFSMEMPGTQLVMRMLGSIGRLDQHRMRTGRLTDEDWPKLTHAVQKMSEAQLFIDETGGLNPMELRSRARRLARQCGKLGLIIVDYLQLMSGSSQGENRATEISEISRSLKSLAKELDVPVIALSQLNRGLEQRPNKRPVMSDLRESGAIEQDADVILFIYRDEVYNPDSPDKGTAEIIIGKQRNGPIGPVRLTFLGQYTKFDNFAGAQTFYGE

SEQ ID NO: 47473 - protein, 471 aa, Burkholderia cepacia
MSKTVADVMQLVKDEDVKFVDFRFTDTRGKEQHVSVPVSAFDEDKFESGHAFDGSSIAGWKGIEASDMLLMPDPNAAFIDPFYEESTLVLTCDVVEPADGKGYERDPRSLAKRAEAYLKSTGIGDTAYFGPEPEFFIFDSVQWNTDMSGCFVKINSEEAPWSAGKEFEGGNTGHRPGTKGGYFPVAPVDTFQDMRSEMCLLLEQLGIPVEVHHHEVAGQGQNEIGTKFSTLVERADWTQWSKYIIHNVAHSYGKTATFMPKPVVGDNGSGMHVHQSIWKDGQNLFAGNGYAGLSELALFYIGGIIKHARALNAITNPTTNSYKRLVPHFEAPVKLAYSARNRSASIRIPHVSNPKGRRIETRFPDPMANPYLLFSALMMAGLDGIQNKIHPGEAADKNLYDLPPEEDAKIPTVCAGLDQALEALDKDREFLTRGGVFTDSMLDAYLALKEQELAKFRMTTHPIEFEMYYSL

SEQ ID NO: 47474 - protein, 325 aa, Burkholderia cepacia
MGGSSPALAVARRPMHDAREIRIMSAPNIRPTMDPLMTPGVLVTGRTLDRAELMQLIEGSPAPLHLEDCDLESADLSRLDLRGARFERCALAEASFVGATLAHTTWIRCRARQTDFASSDLEDAAFRSCDLNNTSWRRSKLGSVRFNECRLTGADFEECKSLGLEFASTLLVGASLRRFSFRKTRLVALDFSDADLAGADFRDAVFEGGSLRNAHLNDARFEGADLRDVDLAALPFLPPPASLLRPCCPRGRRRAPPRPPPCGGLCCAVSLPHRCGPFAPPLSTPCHTFPAAPAPRPLDPRSTLPPLSSRRAAPPATARHRTTTM

SEQ ID NO: 47475 - protein, 527 aa, Burkholderia cepacia
MSQYQDDIKAVAGLKENHGSAWNAISPEYAARMRAQNKFKTGLDIAKYTAKIMRADMAAYDADPSKYTQSLGCWHGFIGQQKMISIKKHFNSTERRYLYLSGWMVAALRSEFGPLPDQSMHEKTSVSALIRELYTFLRQADARELGGLFRELDAAKDAAAKAAIQQKIDNHVTHVVPIIADIDAGFGNAEATYLLAKQFIEAGACCIQIENQVSDEKQCGHQDGKVTVPHEDFLAKIRAIRYAFLELGVDDGIIVARTDSLGAGLTKQIAVTNQPGDLGDQYNSFLDCEELSADQLGNGDVVIKRDGKLLRPKRLPSNLFQFRAGTGEARCVLDCITSLQNGADLLWIETEKPHIAQIGGMVSEIRKVIPNAKLVYNNSPSFNWTLNFRQQAYDAMKAAGKDVSAYDRAQLMSVEYDETELAQLADEKIRTFQADASREAGIFHHLITLPTYHTAALSTDNLAKEYFGDQGMLGYVAGVQRKEIRQGIACVKHQNMSGSDIGDDHKEYFSGEAALKAAGKDNTMNQF

SEQ ID NO: 47476 - protein, 171 aa, Burkholderia cepacia
MEIGQYQPNLEGDGLRIGIVQSRFNEPVCNGLADACVEELERLGVTGEDVLLVSVPGALEIPLALQKLAESGQFDALIALGAVIRGETYHFELVSNESGAGITRIGLDFNLPIANAVLTTENDEQAVARMTEKGRDAARVAVEMANLTMALDQLGDDEDEEEDEDDEEERA

SEQ ID NO: 47477 - protein, 89 aa, Burkholderia cepacia
MSDSHQSDPHRRARLRWRARRGLLENDIVFERFFSRYEYDLTDADVGALSRLLDLSDNDLMDLLLARKEPEGDLDSPDIHRLLEMLRNV

SEQ ID NO: 47478 - protein, 198 aa, Burkholderia cepacia
MEHLNQTFFLWLNAPEHPNALVVTLATFFVEWLIWAVPILIGISWLRGNVNTRKALLVATASGLLGLLTNQIIGLAWSHPRPFMIGLGHTLIPHVADSSFPSDHLTLWWSVAVSFLLQRGLRRAGVALALFGLPIAWSRIYLGVHFPLDMLGAIAVASLNAVLALHAARWYLGPIYRLATRIHCLLFGRLIAQGWVRE

SEQ ID NO: 47479 - protein, 202 aa, Burkholderia cepacia
MTTKRNHPDELVVGLVSISDRASTGVYEDKGIPALQEWLAGALVSPWRAETRLIQDDAPTISATLTELVDVAGCDLVLTTGGTGPARRDVTPEATLAVATKEMPGFGEQMRQISLNFVPTAILSRQVAVIRETADHAALIINLPGQPKSIRETLEGLRDADGKPTVPGIFAAVPYCIDLIGGPYVETDAAVVAAFRPKSARR

SEQ ID NO: 47480 - protein, 243 aa, Burkholderia cepacia
MNEPIHAALAGAAINADGHAEGADYASDRILARIGHVTRTLRDSMRELGLDKHVERAAEAVPDARDRLRYVATMTEQAAVRVLNAIEIAKPMQERIQNEAEALDARWAQWYAAPIEHADVRELMDDTRTFLRTLPESTSATRAQLLEIMLAQDFQDLTGQVIKKIMDMVYLIEQQLLTVLVENIAPERREQFAATAAAFAAEQMSATGSPESLLNGPQIAPEGKSDVVQDQGQVDDLLASLGF

SEQ ID NO: 47481 - protein, 101 aa, Burkholderia cepacia
TDGELEDAYFTPQFVGLLDEAVWGQGFPAPLFSGEFDVVSQSLVKEKHLKLQLARGRQRFNAIWFNHTEPLPASALVAYRLVADTWNGVTRVQLIVEHAAG

SEQ ID NO: 47482 - protein, 138 aa, Burkholderia cepacia
MTKKLLTEAEILKMSDKDYMNEDQLAFFKNRLEQLQADILKNAGQTTENLRETVIVPDPADRATIEEEHALELRTRDRERKLLKKVQQSLARIDSGDYGWCEETGEPIGIPRLLARPTATLSLEAQERRELRQKLFGD

SEQ ID NO: 47483 - protein, 368 aa, Burkholderia cepacia
MLSFASGFIVSLLVTLFIVRYAHLHEKFSIDSDLAGVQKFHVRPVPRVGGIGILAGVVVAALVLFRRYPTISGSILGIVACGMPAFLSGLVEDLTKRVSPRARLLCTMGAAALAFWLMHIAVTRISVPPLDFLLGYVAISAFVTVLAVAALANAINIIDGFNGLASMVSFMMFASLAYVAFHVNDPVVMSASIIMMGAVLGFFLWNFPAGLIFLGDGGAYFIGFMLAELAIMLVMRNREVSAWYPVLLFMYPIFETCFSIYRKKFIRGMSPGIPDGVHLHMLVYKRLMRWAVGTKHAHDLTRRNSLTSPYLWLLCLVAVIPATLFWRHTVHLFAFVVLFAVTYVWLYLSIVRFKAPRWMVVRKHRQSR

SEQ ID NO: 47484 - protein, 282 aa, Burkholderia cepacia
MGRLSLAAKITHVPSMYLSELPGKHHGCREAAIRGHQLIGERCRALGVDTIVVSDVHWLVNAGYHVNCNARFAGTYTSNELPHFIRDMQYAYPGNPALGRLIAETATERGVATRAHEIDSLELEYGTLVPMRYMNGDQHFKVVSIAGWCMWHTLDESRRFGEALLEAIEKSDSNVAFLASGSLSHRFNDNGSPEESIHQISREFFRQVDLRVVELWKQGDFKTFCAMLPEYNTHCHGEGGMHDTAMLLGLLGWDRYDRPVEIVTDYFASSGTGQINAIFPLP

SEQ ID NO: 47485 - protein, 344 aa, Burkholderia cepacia
MTVRIDMHSHFFPRITREEARTLDPEHAPWLRVDPDGATGTIMTGERDFRPVYRALWDPATRIAEMDRCGVDIQLMCATPVMFGYRYDAVAAHEWATRMNDRALEFCSHAPQRLMPLAQVPLQDVELACREASRARRAGHRGVQIGNHLGPRDLDDDQLVTFLTHCAHDDIPVLVHPWDMMTDGRMKKWMLPWLVAMPAETQLSIVSLILSGAFERIPRTLKLCFAHGGGSFAFLLGRVQNAWEQRDIVRENCPNPPASYVDRFHVDSAVFSDGALQLLVETMGEDRVLLGSDYPFPLGEKVVGDLVANHPQLSDAAKEKILGVNAQRFFNLAPEPGSGGRHAN

SEQ ID NO: 47486 - protein, 298 aa, Burkholderia cepacia
ASVGVLLGLGGTAMSLTGNNTTLTNNGTIDPSALGSGLGVLSSGAVIGNAAASSVNVTNNGVMNGSTGVAISGVTGMALSVQNGTGGTSTITNTGSIGSSALVGATLIGADAPVVAAYGGGTVNMTNSGTISGRVSFGSNNAPGGGNTFTNSGVINGSVSMGANSTNTFNAITGSQVNTAGGTGGAFNITVGANTLNVAQTGIVDGGSGGNNTLNLQQGASANGTIAVNNYINFNHLNVQGGNWTINGASTAQDATLSGGVAIINDNASLGTGNITGNGGALQAGTAGLQVSNNVSLG

SEQ ID NO: 47487 - protein, 656 aa, Burkholderia cepacia
MLFPTEFDVIVVGGGHAGTEAALASARMGAKTLLLTHNIETLGQMSCNPSIGGIGKGHLVKEVDALGGAMAAATDESGIQFRILNSSKGPAVRATRAQADRILYKAAIRHRLENQPNLWLFQQAVDDLMVEGDRVVGAVTQIGIRFRARAVVLTAGTFLDGKIHVGLNNYTGGRAGDPAAVSLSSRLKELKLPQGRLKTGTPPRIDGRTIDFSKLDEQPGDLDPIPVFSFLGRAEQHPQQLPCWVTHTNERTHDIIRGGLDRSPMYTGVIEGVGPRYCPSIEDKIHRFASKESHQIFLEPEGLTTNEFYPNGISTSLPFDVQLELVHSMRGLENAHILRPGYAIEYDYFDPRALKASLETKAINGLFFAGQINGTTGYEEAAAQGLLAGLNAGRYVQEKEAWCPRRDQAYLGVLVDDLVTRGVAEPYRMFTSRAEYRLSLREDNADMRLTEIGRELGLVDDARWDAFSRKRDAVSRETERLKSTWVTPKTLPAEEATALLGKAIDHEYSLAELLRRPGVSYDGVCGLKGGECGPAEPLTDDPVLLEQIKEQVEIGIKYQGYIERQASEIERNDANENTRLPDGIDYREVRGLSFEVSQKLNEFRPETIGQASRISGVTPAAISLLMVHLKRRGLGRRNGTAAEAAEQGGGTVPTQQ

SEQ ID NO: 47488 - protein, 87 aa, Burkholderia cepacia
MAHKKAGGSSRNGRDSESKRLGVKVYGGQAINAGGIIVRQRGTRMHAGENVGMGKDHTLFALVDGHVKFATKGADKKHLVIVVPAAA

SEQ ID NO: 47489 - protein, 436 aa, Burkholderia cepacia
MQAQIEAGRRAGRRQDPPVVDEQHVRIDVDVRVAAREFGGREPVRRRAQAVEQPGFREHERAAADRRDPAAARGRRAQRVEHAARRRRERHGGAGNHDRVGVGQRIEAKRRAQLEQVAADARLVAAHADTVRLRDVGRPHARERVARDTQIERDDIGQSKHGDRVHGIRGRGQNPLKDVILANGSNPHYTRQSPRTTWSPADDTRRSQRVAEPAIPVAAGGDHPRRAGVRGRAAQASGRLSGRGIDHGPDSRHRVRDVRVGGGRHRVERAVEQGRGRAARAVGRRAVCGAGERRLDRAQAARAMIYLVLKAVHLAAVVTFVGGLLLSSVAVRIANLAVHRAVRRWDRTVTAPALAIVWIAGIALALSGHWFGTAWLLVKLAIVVALSVLHGILAGTLRRMARDDLVVVPAPWLGQTAGVALVAMALVVGLAVIKPF

SEQ ID NO: 47490 - protein, 356 aa, Burkholderia cepacia
MPRPISATIHTAALANNLSVVRRFAGPSKVWAVVKANAYGHGLARVFPGLRGTDGFGLLDLDEAVKLRELGWAGPILLLEGFFRSTDIDVIDRYSLTTTVHNDEQMRMLETARLSKPVNVQLKMNSGMNRLGYVPEKYRAAWERARACPGIGQITLMTHFSDADNERGVAEQLATFERGAENIAGARSLANSAAVLWHPDTHFDWVRPGIVLYGASPSGLSSDIADTGLKPAMTLASELIAVQTIAKGQAIGYGSTFSAQAPMRIGVVACGYADGYPRVAPEGTPVIVDGIRTRIVGRVSMDMITVDLTPCPQAGVGARVELWGNALPIDDVARHCGTIGYELMCAVAGRVPVRAE

SEQ ID NO: 47491 - protein, 149 aa, Burkholderia cepacia
MSGASARDATLLAFDYGEKRIGVAIGNALTRSARALVVIQNLNREHRFKAVGDLLAEWRPDALVVGLPMHPDGTPHDMTQQAKRFGNQLNGRFGLPVTWVDERYSSVEAEAGLRERNVRGRARTDMLDAEAARVILQQYLDQLSDHEHH

SEQ ID NO: 47492 - protein, 642 aa, Burkholderia cepacia
MTDPTANPSPPPAPPSAPPRRRRDWRTLAGAVLGLTLACAGIGAWTIDRIWTQLPSVEHLAVYRPALPLRIFSRDGDLLAEYGVERREFVPLERIPPLMRHALLAAEDAKFYEHGPVDVGGLARATFANVVTGQPGQGGSTITMQVARNFYLTRDKVLSRKLAEILMAAKLEREYSKDKLLELYMNEIYLGERAYGFAAAAHVYFGKPLDALSAGEAAVLAGLPKAPSAFNPVVNPARATARRNYVLGRMHALGQLDDATYRAAVDAPIALATTPPPGIVAAPYVAERARRMMVERFHDDAYTLGLDVTTTISMRDQRAAEAALERTLSRQARAKRETRNGLEGALVSLDAATGDMLALVGGADFNRNVFDHALQAYRQPGSSFKPFVYSAALEKGYFPGVLVDDTQRTLTHAETGARPWRPRNFGNRYEGFIPVRRGLVRSKNLVAVSLMQATDARYVQQHAVHFGFDAQRNPASLPLALGAGAVTPLELASAYSVFANGGTRMEPRLILSVKQRHGGAMYEATVPAGERVVSARNAFVMDSMLRDVVRAGTARGALALRRDDAAGKTGTSNGSKDVWFAGYSSGIVAVAWLGYDTPRPMGRATGATLALPVWLDYMKTAVDGRTPVAAMPPQDVALVDGG

SEQ ID NO: 47493 - protein, 206 aa, Burkholderia cepacia
MELKLLNENGQEGAVVNASDVVFGRDYNEALIHQVVIAYQANARQGNRAQKDREQVKHTTKKPWRQKGTGRARAGMSSSPLWRGGGRIFPNSPEENFSHKVNKKMHRAGLCSIFSQLAREGRLSVVEDIILEAPKTKLLADKFKTMGLDSVLIITDTVDENLYLASRNLPHVAIVEPRYADPLSLIYFKKVLVTKAAVAQIEELLS

SEQ ID NO: 47494 - protein, 288 aa, Burkholderia cepacia
MMVARRGQAGEPEEHDTPETAGRSGRRGGSSGADRRSAGGNAANRTATRASDDALVSFEIAAPDDPFDDDESFDAHDRSRRRVSGVRFPVDRTADAPATEDVYTRSSQHPRRARRAAGASSGDASSDAPGARERKSSKPPRSLKGRALGYLSRREYSRAELARKLAPYVGEDESVEPVLDALEKEGWLSDARFAESLVHRRASRVGVARIVGELKRHAVGDSLVEAVNAQLRETELTRAQAVWRKKFGALPQTPAERAKQARFLAARGFSSATIVKLLKVGDDFPIDD

SEQ ID NO: 47495 - protein, 43 aa, Burkholderia cepacia
MRELRQCHPVAALLKAAGLARSTFYYQLKALAAGDRYANLKAK

SEQ ID NO: 47496 - protein, 694 aa, Burkholderia cepacia
MSKALIIAEKPSVANDIARALGGFTKHDEYYESDDFVLSSAVGHLLEIAAPEEYEVKRGKWSFAHLPVIPPHFDLNPIAKSESRLKVLTKLMKRKDVDRLINACDAGREGELIFRLIAQHAKAKQPVQRLWLQSMTPQAIRDGFANLRSDSDMQPLADAARCRSEADWLVGINGTRAMTAFNSKGGGFFLTTVGRVQTPTLSIVVEREEKIRRFIPRDYWEVKAEFACAGGFYEGKWFDPKFKRDEFDPEKRDSRLWSLPAAETIVAACRDQVGTVSEESKPSTQLSPLLFDLTSLQREANSRFGFSAKNTLGLAQALYEKHKVLTYPRTDARALPEDYLSTVQSTLEMLKESHNYLPHAKQVLDKGWVKPNKRIFDNSKISDHFAIIPTLQAPKSLSEPEQKLYDMVVKRFLAVFFPAAEFRVTTRITEVAGHHFKTEGKVLVEPGWLQVYGRDAEGADANLVPVQKDEKVKTDEIAAVALVTKPPARYSEATLLSAMEGAGKLVEDDELREAMAAKGLGTPATRAAIIEGLLGEKYLLREGRELIPTAKAFQLMTLLRGLGVKELTAPELTGEWEYKLSQMERGNLGRDAFMHEIRRMTQHIVKRAKEYDSDTIPGDYATLETPCPNCGGQVKENYRRFACTKCDFSISKIPGSRQFEIPEVEELLQKKEIGPLSGFRSKMGRPFSAILKLS

SEQ ID NO: 47497 - protein, 243 aa, Burkholderia cepacia
IGAGPGAADLITVRGMRLLEQADVVLHDALVEPAMLDYAPNARKIAVGKRCGQRSTAQHFINKQIVDAAREHACVVRLKGGDPMLFGRAEEEMRALEAAGIDYEVVPGITAALAGAATLKRSLTLRGVSRSVAFATHSRAPGSDEIREAARADSIVYYMGRDSAPGIAQELIDAGRAPATPVAIVEACSTARERTLTLTLAQMAAGDAQAWLDPAEPSLLMIGDAFAERARLAQAGAPVRNAA

SEQ ID NO: 47498 - protein, 107 aa, Burkholderia cepacia
MQNTHDTLFRTLADPTRRALFERLCAEGELTVAALTAHAGVSQPAVSKHLGVLKQAGLVNDRHEGRQTHYSAQPQALAPLIDWTSQMAGFWQRRFDALEDLLKRMDQ

SEQ ID NO: 47499 - protein, 207 aa, Burkholderia cepacia
MARYIGPKAKLSRREGTDLFLKSARRSLADKCKLDSKPGQHGRTSGARTSDYGTQLREKQKVKRIYGVLERQFRRYFAEADRRKGNTGENLLQLLESRLDNVVYRMGFGSTRAEARQLVSHKSITVNGVVANVPSQQVKAGDVVAIREKAKKQARIVEALSLAEQGGMPSWVAVDAKKFEGTFKQMPERAEIAGDINESLIVELYSR

SEQ ID NO: 47500 - protein, 242 aa, Burkholderia cepacia
MTTHPDATRAAYYARIAEQRLAPLWESLHNLVPTSPQPAAQAAIWKYAQIRDLVMQAGSVISAEEAVRRVLVLENPGLPGKSSMTPSLYAGLQLILPGEIAPSHRHTQSALRFIVEGRGAWTAVNGERTTMHPGDFIITPSWAWHDHGNPSVEDGGEPVVWLDGLDIPLLAHLDAGFAENFPEAVQPVNRPEGDSFARFGHNMVPVRHRVSDPTSPVFSYPYARSREALDALYRNGELDAWD

SEQ ID NO: 47501 - protein, 473 aa, Burkholderia cepacia
MIPPTEFSADRAVLDAVGVALSGLPPDARIAIAYSGGLDSTVLLDAAVRVAGASRCVALHVHHGLSANADAWVAHAEAEAARLGVAFESMRVDVPRDSGLGIEATARERRYAALDAMGERHGVATLWLAQHADDQAETVLLQLLRGAGIAGLAAMAPRYRPDGVSIERVRPLLRLLRAQLERYAEQHALTWIDDESNGDTRYARNALRLDVLPALAVHFPGFRDALGRAAQHAAAAQRLLDDLAELDFAVAARDDGRALSRDALVGFDDTRGANLLRFWMRRLGLPGASAARLANMMRQLRAAHDAHALRVDHAGQCLRLYRDVVYWEAGDSSEPADDGTGTPHPEAALAWDGQEVWHLPGWRGTFVFAPADAGSADAVPEALLRGARLAARARAGGERMRTSPGGPGRTLKNLFQERGVPAWQRDVPLLFAGDRLIYVPRLGVNRDIDVPDGATSGAAAWRRIEWRPDLLIA

SEQ ID NO: 47502 - protein, 325 aa, Burkholderia cepacia
MQTSLLKPKIIAVESLGENHARVVMEPFERGYGHTLGNALRRVLLSSMVGYAPTEVTIAGVVHEYSTLDGVQEDVVNLLLNLKGVVFKLHNRDEVTVTLRKEGEGVVTAGDIELAHDCEVINPNHVIAHLSKGGKLDVQIKIEKGRGYVPGNVRRYGEDTAKIIGRIVLDASFSPVRRVSYAVESARVEQRTDLDKLVMNIETSGVITPEEAIRQSARILVDQLSVFAALEGTETAAEAPSRAPQIDPILLRPVDDLELTVRSANCLKAENIYYIGDLIQRTENELLKTPNLGRKSLNEIKEVLASRGLTLGMKLENWPPAGLDK

SEQ ID NO: 47503 - protein, 288 aa, Burkholderia cepacia
FEMLETETNGTIIKVVGVGGAGGNAVQHMINRGVQGVDFIVMNTDAQALSRSRASSVIQLGNTGLGAGAKPEMGRAAAEEARERIADALRGAHMVFITAGMGGGTGTGAAPVVAQIAKEMGILTVGVVSKPFEFEGGKRMRVAEAGSQQLEDHVDSLIVVLNDKLFDVMGDDAEMDKCFQCADDVLNNAVAGIAEIINVDGLVNVDFEDVKTVMAEQGKAMMGTATVAGVDRARLAAEQAVASPLLEGVDLSGARGVLVNITSSRSLRLSETPQVMNTIKSYAALNAT

SEQ ID NO: 47504 - protein, 864 aa, Burkholderia cepacia
MHERYVPADVEAAAQGDWRAADAYKTKEDSQKPKFYCVSMLPYPSGKLHMGHVRNYTINDVMYRYLRMNGYNTLMPMGWDAFGMPAENAAMANGVPPAKWTYDNIDYMKGQMQSMGLAIDWSREIATCKPDYYKWNQWLFLKMLEKGIAYKKTGTVNWDPVDQTVLANEQVIDGRGWRSGALVEKREIPMYYLRITQYADELLNDLDGLGWPERVKIMQQNWIGKSFGVNFGFPYELDGEQKLLRVFTTRADTIMGVTFCAIAAEHPLATRLAQDKPELLAFIEECKRGGVAEADVATMEKKGVATGFSVKHPLTGEPVEVWIGNYVLMSYGEGAVMGVPGHDERDFAFAKKYDLPIKQVIASEGQTYSLDAWQEWYGDKETAVCVNSGKYDGLRYAEAVDAVAADLKAGGFGDKQVTWRLRDWGVSRQRYWGTPIPIIHCPSCGDVPVPEQDLPVVLPEDLVPDGTGNPLAKSEAFLNCTCPTCGAAAKRETDTMDTFVDSSWYFSRYTAPDAETMVDARTDYWMPMDQYIGGIEHAILHLLYSRFWTKVMRDLGLVKFGEPAKNLLTQGMVLNETYYREDAAGKKTWYNPLDVTVTHDDKGRPVGATLNADGQPVVLGGIEKMSKSKNNGVDPQLLIDQYGADTARLFTMFAAPPEQQLEWSGAGVEGASRFLRRVWSFGYGNREALAARAGFDAATLGDADKALRREIYSVLKQADFDYQRLQYNTVVSAAMKMLNAIDGAKGATPAVLRETYGVLLRVLYPVVPHVTFELWKALGYADEFGPLLDAPWPKVDEAALEQAEIELVLQVNGKVRGALKVAKDASRDAIEAAAVADEAFAKFSDGKPAKKIVVVPGRLVNIVV

SEQ ID NO: 47505 - protein, 322 aa, Burkholderia cepacia
MRAVRIDSIGDDMKFAFVFPGQGSQAIGMLNAFADLAVVRETLQEASDALNQDLGKLIAEGPAEELNLTTNTQPVMLTAAYACYRAWQQAGGPAPSIVAGHSLGEYTALVAAGALAFKDAVPLVRFRAQAMQTAVPVGQGGMAAILGLDDDTVRAVCAEAAEAGVVEAVNFNAPAQVVIAGSKAAVEKACEIAKAKGAKRALPLPVSAPFHSSLLKPASDQLRDYLANVDVKAPQIPVVNNIDVAVVSDPAAIKDALVRQAAGPVRWVECVRHIAGTGVTHVIECGPGKVLAGLTKRIDGNLTGASVFDPASLDEALKLATA

SEQ ID NO: 47506 - protein, 275 aa, Burkholderia cepacia
MSQQLQQIIDTAWENRAELSPKAAPADVREAVAHAIEQLDKGALRVAEKIDGNWTVHQWLKKAVLLSFRLEDNAPMPAGGYSQFYDKVPSKFANYTAEDFAAGGFRVVPPAIARRGSFIAKNVVLMPSYTNIGAYVDEGTMVDTWATVGSCAQIGKNVHLSGGVGIGGVLEPLQANPVIIEDNCFIGARSEVVEGVIVEENSVISMGVYLGQSTKIYDRETGEVSYGRIPAGSVVVAGNLPSKDGSHSLYCAVIVKKVDAKTRAKVGLNELLRGD

SEQ ID NO: 47507 - protein, 453 aa, Burkholderia cepacia
MRATRERPMPHKEGSLEAPTRHPLDWQSEAFYDQAAIDAEMTRVFDICAGCRRCVSLCGAFPALFDLVDDTPTGDIEEVPKAAFGKVVDQCYLCDLCYMTKCPYVPPHAWNVDFPHLMLRGKAARYKRGEATLRDKVLSNTDALGHFAGIPVVTQAVNAVNRTPPARHALEAALGVDRHAWLPEFAPRKFRRAARRSDNPPVRDGERTPGKVAIYATCYVNFNEPGIGHDLLAILAHNEIPYELVAREACCGMPLLEQGNLDGVAAKQAVNIPVLERYARDGYALIGAIPSCVLMYKSELPLMFPDDAAVRAVADAFWDPFEYVIARHRDGLLKTDFKTGLGTVSYHVPCHARVQNIGRKTADALSLVPDTRVNVVERCSGHAGTFGVKKAFHAEAMRIGAPVFKAMAEPQPDVVSSDCALAGHHIVQGIDEKGLPHAPLAHPLTLLRRAYGI

SEQ ID NO: 47508 - protein, 86 aa, Burkholderia cepacia
MAFRLKVVQHMREHGVSSKEAAARFNIRNPSAVLEWARRYDDGGLTALAPRPKGRRPTAMPKTPPAQPLNPTDGTDTRTREDLLQE

SEQ ID NO: 47509 - protein, 259 aa, Burkholderia cepacia
MFVDSHCHINFKGLADRLPAVLENMREHDVTHALCVSVDLETLPDVLAIAEAHDNVYASVGVHPDHEDMREPTLAELVELAAHPKVVAIGETGLDYYRLEGRSIADMEWQRDRFRTHIRAATATMKPLIIHTRSSSEDTLRIMAEERADVPGGVMHCFTEPWPVAEQALAQNFHISLSGIVTFKNATDVQDVARRVPLDRLLIETDSPYLAPVPYRGKPNEPAYVSHVGRFIASERGIAVEALADATTQNFFRLFKIAR

SEQ ID NO: 47510 - protein, 650 aa, Burkholderia cepacia
MGKIIGIDLGTTNSCVAIMEGNQVKVIENSEGARTTPSIIAYMDDNEVLVGAPAKRQSVTNPKNTLFAVKRLIGRRFEEKEVQKDIGLMPYSIIKADNGDAWVEAHGEKLAPPQVSAEVLRKMKKTAEDYLGEPVTEAVITVPAYFNDSQRQATKDAGRIAGLEVKRIINEPTAAALAFGLDKAEKGDRKIAVYDLGGGTFDVSIIEIADVDGEMQFEVLSTNGDTFLGGEDFDQRIIDYIIGEFKKEQGVDLSKDVLALQRLKEAAEKAKIELSSGQQTEINLPYITADASGPKHLNLKITRAKLEALVEDLVERTIEPCRIAIKDAGVKVSDIDDVILVGGQTRMPKVMEKVKEFFGKDPRRDVNPDEAVAVGAAIQGQVLSGDRKDVLLLDVTPLSLGIETLGGVMTKMINKNTTIPTKHAQVYSTADDNQGAVTIKVFQGEREMAAGNKLLGEFNLEGIPPAPRGVPQIEVTFDIDANGILHVGAKDKATGKENKITIKANSGLSEAEIDQMIKDAEANAAEDHKLRELADSRNQGDALVHSTKKALTEYGDKLDAGEKEAIEAALKSLEDVLKDTSADKAAIDAKVEELGKVSQKLGEKMYADMQAQQAGAAGAAGAAEGAAHAGGAQQAADDVVDAEFKEVKKD

SEQ ID NO: 47511 - protein, 235 aa, Burkholderia cepacia
SDQLQKFMFNAAPVRGEIVSLRNTWQEVLARRDYPAPVRTVLGEMMAACALLSANLKFHGTLIMQIFGDGPVQMLVVQCGSDLSMRATAKFSGDAAQTIGDDTSFAALVNASGHGRCVITLDPADKLPGQQPYQGIVPLNGVDGPLESVSQVLEHYMHHSEQLDTRLWLAADRDRAVGMLLQKLPGDGGIVPRNAETDIDTWERVCTLGGTLSAKELLEVEPEVVVRRLFWQENV

SEQ ID NO: 47512 - protein, 367 aa, Burkholderia cepacia
MEAERLNAIESSLLDLRNRAGELRGYLDYDAKAARLTEVNKELEDPNVWNDSKNAQALGREKKLLEGVVTTLTALDSDLRDALDLFELAREEGDEDTLLASEEDAAKLEARVGDIEFRRMFSNPADPNNCFIDIQAGAGGTEACDWASMLLRQYLRYCERKGFKAEVLEESDGDVAGIKNATVKVTGEYAYGFLRTETGIHRLVRKSPFDSSGGRHTSFSSVFVYPEIDDSIEVEINPADLRIDTYRASGAGGQHINKTDSAVRITHMPTGIVVQCQNDRSQHRNRAEAMAMLKSRLYEVEMRKRQAEQDKLESSKTDVGWGHQIRSYVLDQSRVKDLRTNVEMSNTRAVLDGDLDDFISASLKQGV

SEQ ID NO: 47513 - protein, 508 aa, Burkholderia cepacia
MNPFDLKQLGLDVEYPYRQQYDNYIGGKWVAPVKGEYFENVSPINGQPFCRIPRSGADDIELALDAAHAARRKWGKTSVAERANLLLAAADRMEKNLKLLAVAETIDNGKPLRETMAADLPLAIDHFRYFAGCIRAQEGGISEIDDNTVAYHFHEPLGVVGQIIPWNFPLLMAAWKLAPALAAGCCVVMKPAEQTPASVLVLMELIGDLFPAGTINIVNGFGKEAGEALATSKRIAKIAFTGSTPVGKHILRAAADSLIPSTVELGGKSPNIFFADVLDQDDAFLDKALEGLAMFALNQGEVCTCPSRILIQESIYERFIEKAVARVERIKSGHPLDLQTMIGAQASQQQLDKILSYIDIGRGEGAQCLTGGERAAPAADLGTGYYVKPTMLLGNNKMRVFQEEIFGPVASVMTFKDEQEAIELANDTFYGLGAGVWTRNGTRAYRMGREVEAGRVWTNCYHLYPAHAAFGGYKQSGIGRETHKMALSNYQQTKCLLVSYQAEALGFF

SEQ ID NO: 47514 - protein, 377 aa, Burkholderia cepacia
MLDFDYSLLWVAIALLGLGVVMVYSASIAMPDSPKYASYHDYAFLMRHCVSLTVAFIAAVLAFRVPVSTWDKYAPHLFLIALVGLVIVLIPHVGKGVNGARRWIPLGITNMQPSEIMKLAVTIYAANYTVRKQEYMQSFAKGFLPMAFAVGLVGALLLLEPDMGAFMVVAAIAMGVLFLGGVNGKLFGGLVATAVGTFTMLVWLSPWRRERIFAYLDPWDERYAQGKAYQLTHSLIAFGRGEWFGVGLGGSVEKLNYLPEAHTDFILAVIGEELGFVGVLVVILLFYWIVRRAFEIGRQALALDRTFAGLMAKGIGIWFGAQTFINMGVNLGLLPTKGLTLPLVSYGGSGILLNCVALAVLLRVDYENRVLMRGGKV

SEQ ID NO: 47515 - protein, 491 aa, Burkholderia cepacia
MTNQPSQTAADRPVDMIIFGGGGDLAARKLLPALYMAHLHCNLPPETRIIAVGRRDWGIDGYRKFMDEQSRPFIDEKAFDADAWSRFLDLFKYVLIDVNAPDDYQRLAEAARSEAVRVFYLSTSPELFTTICDNLSAAHLVDAHSRVVLEKPLGHDLASAKAINDAVGKHFEESQIYRIDHYLGKETVQNLMVLRFGNPIFGPLWQAPNIRSVQITVAETVGVGSRAGFYDHTGALRDMVQNHLLQLLCIVAMEPPVSLDPDAVRDEKLKVLRSLRPMSLSDVARDTVRGQYTAGAVDGQPVKGYLEEDNVPADSRAETFVALRAHINNWRWANVPFFLRTGKRLQRRQSEIVIEFADMPFSIIPTGPRNYGNRLVIRLQPEESIQLQMLAKEPGSGMNMVPVSLNLDLQQAIPERRAEAYERLLIDVIRGRLTHFMRRDELEAAWSWVEPILDGWKQLGDRPRLYTAGTFGPAASSALLARDGMSWAEEA

SEQ ID NO: 47516 - protein, 313 aa, Burkholderia cepacia
MTHASPASSPRRAARLAAVAALAVAALLPAAAHAAPLRIGMTFQELNNPYFVTMQKALNDAAASIGAQVVVTDAHHDVSKQVSDVEDMLQKKIDILLVNPTDSTGIQSAITQAKKAGAVVVAVDANANGPVDSFVGSKNYDAGVMSCEYLAKAIGGSGEVAILDGIPVVPILERVRGCKAGLAKFPNVKLVDTQNGKQERATALSVTENMISAHPNLKGLFSVNDGGSMGALAAIEGSGKDIKLTSVDGAPEAIAAIQKPNSKFIETTAQFPADQVRIALGIAIARKWGATVPKAIPVDVKVVDRGNAKGFSW

SEQ ID NO: 47517 - protein, 145 aa, Burkholderia cepacia
MDARRPNRDHSGNPGRRARETGTLGAGRAPDRHSAAARRRPRNRDPMTTPIYQEIKDFILARIHAGEWAEGDQVPSENELAREFNVARMTVNRALRELTAEQVLTRTRGSGTYVASPKYESTLVAIRSISDEVAARGHGYRAQVL

SEQ ID NO: 47518 - protein, 264 aa, Burkholderia cepacia
MRRASYCLFSLDPTVIPHSFLQDLLNRVDIVDVVGRYVQLKKGGANFMGLCPFHNEKSPSFTVSPTKQFYHCFGCGAHGTAIGFLMEHAGLTFPEAVQELAQSVGLTVPHEPSMRGGGGGGGGGGDYPAPVSKSVATALSDAMTAACDYYRKQLRGATVAIQYLKNRGLTGEIAARFGLGYAPDGWQNLEAAFPDYRDESLVEAGLVIVSEKTDAQGVARRYDRFRERIMFPIRNVKGQVIGFGGRVLGSGEPKYLNSPETPLF

SEQ ID NO: 47519 - protein, 961 aa, Burkholderia cepacia
MEQIRIRGARTHNLKNVNLDLPRHKLVVITGLSGSGKSSLAFDTLYAEGQRRYVESLSAYARQFLQLMEKPDVDLIEGLSPAISIEQKATSHNPRSTVGTVTEIHDYLRLLYARVGTPYCPDHDIPLEAQSVSQMVDAALALPEETKLMILAPVVANRKGEHAELFEDMQAQGFVRFRVRSGGGAANEGVAKIYEVESLPKLKKNDKHTIDVVVDRLKVRPDMKQRLAESFETALRLADGRAIALEMDTDHEHLFSSKFACPICSYSLQELEPRLFSFNNPMGACPECDGLGQITFFDPKRVVAHPSLSLAAGAVKGWDRRNQFYFQMLQSLAAFYEFDIDAAFEDLPEKIRKVLLFGSGKQTIPFSYINERGRTTIREHVFEGIIPNLERRYRETDSVAVREELSKYQNNQPCPSCDGTRLRREARHVRIGTGDYARGIYEISGWPLRDALGYFDGLTLDGAKREIADKVIKEIVARLTFLNNVGLDYLSLERSAETLSGGEAQRIRLASQIGSGLTGVMYVLDEPSIGLHQRDNDRLIATLKHLRDLGNSVIVVEHDEDMIRTADYVVDMGPGAGEHGGVVVAEGTPKQVQSNPQSLTGQYLLGKRVIEYPDERLAPDPERMLRIVDAHGNNLKHVDLELPVGLLTCITGVSGSGKSTLINDTLYHAVARHLYGSAAEPAPHEAIEGLEHFDKVINVDQSPIGRTPRSNPATYTGLFTPIRELFSGVPTSKERGYDPGRFSFNVKGGRCESCQGDGVLKVEMHFLPDVYVPCDVCHGKRYNRETLEVQYKGKNISEVLDMTVEHAYEFFSAVPVIARKLKTLLDVGLGYIRLGQSATTLSGGEAQRVKLSLELSKRDTGRTLYILDEPTTGLHFHDIALLLEVIHRLRDQGNTVVIIEHNLDVIKTADWVIDLGPEGGAGGGQIIAQGTPEQVAKTKASFTGKYLAPLLKRPTRKVAAG

SEQ ID NO: 47520 - protein, 281 aa, Burkholderia cepacia
ARLVSSHACHGGEQRFYRHDSAVIGLPMKFSVYLPPQAAHGRVPALFYLAGLTSTDETFAIKAGAQQYAAQHGIALVMPDTSPRGAGVPGETDAWDFGVGAGFYVDATEAPWSTHYRMESYVTGELRELVAAELPIDGARLGIFGHSMGGHGALTLALRHPGLYRSVSAFAPIAAPTRCPWGEKAFSGYLGADRDAWKAHDASELVARADAPKFADGILVDQGLADQFLANQLNPDVFEAACAKAGQPLTLRRHPGYDHGYYFISTFIGDHLAHHARVLAR

SEQ ID NO: 47521 - protein, 361 aa, Burkholderia cepacia
NLGSNTLTLGGAGNGTYGGTVAGTGGLTLSGSGTQTLTGTNTYTGATTINSGTLAIGAGGSLSGSSPLNLAGAGATFDVSGATTPQTTTALSGVAGSTVNLGGNTLTLGGSGSGTYGGTIAGTGGSLTLGGTGTETLTGANTYSGGTNLTGGGTLVAGNNTALGTGVLNASGAGGTLAAGTPGTTLNNTVNLGTGSTLTVGGANNLGLGGAISGGGTLAVNGPATTTLSGANTYTGGTSVTGGGTLVAGTPTALGSGTLSVGGNGGTLGTSVAGTTLGNAVNLGAGSTLTVGGANNLGLSGPISGGGNLAVSGPSTTTLSGANAYTGGTTIGNGSTLAVAGNGGLSAGSALTLAGNGATLD

SEQ ID NO: 47522 - protein, 201 aa, Burkholderia cepacia
  MISC_FEATURE (187)..(187): X=any amino acid
MQIPSNVFKAALARGDAQIGLWLGLANPYSAEVVAGAGFDWLLIDGEHAPNTVPTILAQLQAIAPYPSHPVVRVPWNDPVIVKQVLDLGAQTLLVPMVQSADEARAAVAATRYPPHGIRGVGSALARASRWNRVGEYLHRANDEMAVLVQVETRAGLEAIDAIARVDGVDGVFIGPADLAADLGHLXHPGHPDVHTVIDRA

SEQ ID NO: 47523 - protein, 797 aa, Burkholderia cepacia
MPEKKHARHPPASFRESTLPPRETLTHYSSVRSRGSQHAGALLPATAPCIAIHPHVLIQVLMSNEGQCPFNHANGGGTTNRDWWPNELRLDLLSQHSSKTDPLDPGFNYAEAFNSLDLDALRKDLAALMTDSQDWWPADFGHYGPLFVRMAWHSAGTYRMGDGRGGAGRGQQRFAPLNSWPDNVSLDKARRLLWPIKQKYGQKISWADLLILTGDVALTTMGFKTFGYAGGREDTWEPDRDVYWGSETTWLGGDLRYDKGGACESQHGGNAGRNLENPLAAVQMGLIYVNPEGPDGNPDPVAAAYDIREVFGRMAMNDEETVALIAGGHAFGKTHGAGPADNVGLEPEAAGLEQQGLGWKNSFGTGKGADTITSGLEVTWSDTPTQWGMGFFKNLFGYEWELTKSPAGAHQWVAKNAEPTIPHAHDPSKKLLPTMLTTDLSLRFDPVYEKISRHFMDNPDVFADAFARAWFKLTHRDMGPRARYLGPDVPTEELIWQDPIPAVDHVLVDDTDVAPLKETILASGLSVAELVSTAWASASTFRGSDKRGGANGARIRLAPQKDWAVNEPARLAKVLKVLERIQGEFNSTQPGGKKISLADLIVLAGGAGIEQAAKRAGHDVVVPFAPGRMDASQEQTDAHSFAVLEPVADGFRNFVKGKFAVPAEALLIDKAQLLTLTAPQMTALVGGLRVLNVQTGDEKHGVFTDQPETLTVDFFRNLLDMATEWKPIAGEDTYEGRDRRTGELKWTGTRVDLVFGSNAVLRALSEVYASADGEAKFIRDFVAAWVKVMNLDRFDLA

SEQ ID NO: 47524 - protein, 365 aa, Burkholderia cepacia
MVRSPRPTCTSSARARSAASRALMPPCSSSGSITFSSAVRCGINWNDWNTNPTAPLRSAARSSSSSWSSARPSRRTVPLVALSNPASRPSSVDLPDPDAPTIARLLPGCTASVMPSRIVSSPVASATRLHTSWTSMIGSVILNMDTTFRWKRRAAAAALLGTLLAVTVPARAATASASSQPVIVVLGDSLSAEYGLPRDTGWVALLRQRLTTERIDYSVANASVSGDTTSGGRARLPAVLQRLKPSIVVVELGSNDALRGVPLATTEQNLRDIIASAQRARAKVVLVGMYVPPNYGPDYTQKFHAVYTRLSKDLAVPLVPFLLAGIENKPEMFQADQMHPAQQAQGILLDNVWPALKPLLGKPHG

SEQ ID NO: 47525 - protein, 119 aa, Burkholderia cepacia
MDGRKGKEREGEKEGGGRGKREERGRKNGRGRGKEGGEEEREGKGKEGEKEGEGGRRKKKEEGGRGGKERGEEKLKRRGGKGGEREGARKKRASAAGSTTESRRGGGTSTPRKTKWGGR

SEQ ID NO: 47526 - protein, 425 aa, Burkholderia cepacia
MKIHIKGGTLIDPVAGTEGQADVFVADGKIAALGSAPAGFNADKTIDASGLVVAPGLVDLCARLREPGYEHKATLASEMAAAVAGGVTTLVCPPDTDPVLDEPGLVEMLKFRARNLHQANVHPLGALTVGLKGEVITEMVALTESGCVGFTHANVPVRDTQVLLRALQYASTYGYTTWLRPLDAFIGRGGVAASGALASRLGLSGVPVAAETIALHTIFELMRVTGARVHLARLSSAAGLALVRAAKAEGLPVTCDVGVNHVHLIDVDIGYFDSQFRLDPPLRSERDREAIRVALADGTIDAICSDHTPVDDDEKLLPFGEATPGATGLELLLSLTLKWADETRTPLAQALRRITSAPADVLQLPAGRLAEGGAADLCVFDPRAHWRVEPRALKSQGHNSPFLGYELPATVRTTLVAGQVAFERH

SEQ ID NO: 47527 - protein, 595 aa, Burkholderia cepacia
MSVKPTLSKPIGGEDASSPVVVARRLWPYLKPLLWVMVAGVLAMAVVAATEAGIPALLKPLLDRGFGTKGDVTAKLYVPIAVVGLALVRAAAQYASNYLLQYVSNRILLDLRIEMFNRMIHTGVSFFQRETASTVINAVVFEVNQVLNVLLGVLITLVRDSLTVVFLLGYLFYLNWRLTLIVAVLLPCIGWLVGKINRRLRRLNREHQMLTNQLAYIVEETVGGYKVVKIHNGEQYEISRFNELSRRLRGYSMRMIVSGGLAQPLTQFLASIALAVVLTIAVVQSANDQTTVGGFVAFVTAMLLIISPLKHLMDVNQPLQRGMTAAELIFGLIDEPREPEGGGKPLERATGRIRFNDVSFAYHAGTGKPTLDRVSFDVAPGEMIALAGPSGSGKTTLVNLMPRFFDPTSGEILVDGVALPEYRLRDLRDQIAMVSQDVVLFNDTIASNVAYGQSPDRERVTAALRAANLLSTVEAMPDGLDTLVGDNGMRLSGGQRQRLAIARAIYKDAPILILDEATSALDSESERHVQAALETLMKGRTTLVIAHRLSTIERADRILVMDGGRIVESGSHAALLASGGLYAHLHRIQFQQEAG

SEQ ID NO: 47528 - protein, 91 aa, Burkholderia cepacia
MSHTVREKQKLLNRVRRIKGQVEAIERALEEERGCNDVLQLITSCRGAMNGLLAVVLEDHIRSHLVDADTPDAHEGSATEQLIEVVHSYFK

SEQ ID NO: 47529 - protein, 185 aa, Burkholderia cepacia
MTNDDRTTFVPRRTPESAAMVAEVRRAMAITARLNRLTFDDAADVRALFGELIGTQADDGFVLIPPFHATGGTGMKLGHNVFVNQNCTFYDLGGLEIGDDVMIGPNVSLITSGHPVEPSRRRDGVVAKPIVIERNVWIGAGATIIGGVTIGENAVVAAAAVVTRDVPPNTLVGGNPAKVIRSIAE

SEQ ID NO: 47530 - protein, 250 aa, Burkholderia cepacia
MSRSFPTTLPTSRISLVALGAALAAALSAGPSGAFAQAADASAPDAVASAPVAASAVPDFDARQKVLNQRSAENDYRYAVAEHDCYSKFFVNHCLGKARDQMREERASIRQEQLALNDEQRAVRAQQRDQQQALKQARNAAEAPQRAANEAANAAAFRDKQEQNALKQAQRGAEGPQRAASKQAYDQKQADFQRKLDQAHQQAAQKAQERADNATRYEQKQKEAAQHKADVERRQQEAAEKAKQQQQQGQ

SEQ ID NO: 47531 - protein, 109 aa, Burkholderia cepacia
MEVKAIHRGARISAQKTRLVADQIRGLPVDKALNVLTFSPKKAAGIVKKVVLSAIANAEHNEGADIDELKIKSIYVDKAASLKRFTARAKGRGNRIEKQSCHITVTVGN

SEQ ID NO: 47532 - protein, 299 aa, Burkholderia cepacia
MNTPAPTGFRCGMIAIVGRPNVGKSTLMNALVGQKISITSRKAQTTRHRITGINTFDDAQFVFVDTPGFQTRHSTALNRSLNRAVTSTLTSVDVILFVIEAGRFGPDDQKVLDLIPPGMPTLLIANKIDRVNDKASLFPFMQKVSELREFTELVPLSAQKPEDIKRLLDTIKPYLPEGEPIYGEDELTDRSSRFLAAEILREKVFRWTGDELPYTSTVLIDKFEEEGRLKRIFATILVERDSHKAMVIGKKGEKLKQISTEARMDMEKLFDGPVYLETFVKVKSGWADNEAGLRAYGYE

SEQ ID NO: 47533 - protein, 177 aa, Burkholderia cepacia
MTPAHLIPSPLGDIAVRIEDDALTGLYFVGQKYFPSLAIVREADALATSPIARQVAEEIAEYFTGARDTFSVPIHLRGTAFQRRVWQELLAIPFGELVSYGDITERVGLPMSGARAVGGAVGRNPVSIIVPCHRVVGASGSLTGYAGGIDRKRALLSLEGAELSRGVHHPMQHALAF

SEQ ID NO: 47534 - protein, 293 aa, Burkholderia cepacia
MSILINKDTKVITQGITGKTGQFHTRACREYANGREAFVAGVNPKKAGEDFEGIPIYASVKEAKAETGATVSVIYVPPAGAAAAIWEAVEADLDLAICITEGIPVRDMIEVKDRMRREGRKTLLLGPNCPGTITPDELKIGIMPGHIHRKGRIGVVSRSGTLTYEAVAQLTALGLGQSSAVGIGGDPINGLKHIDVMKMFNDDPDTDAVVMIGEIGGPDEANAAEWIKDNMKKPVVGFIAGVTAPPGKRMGHAGALISGGADTAEAKLEIMEACGITVTRNPSEMGRLLKKAL

SEQ ID NO: 47535 - protein, 191 aa, Burkholderia cepacia
MARRIDGAENLTSPSGQCRPRVDRASPYLRLSSDPFRRQRATFARCAARPASLKWRCRAIPRIRYGENMRPAWLLGLPVALAACAPLEPSAAGRDVRIVTSDPGGTCRHLGDVTGSRGNFLIGGFIPDATFETGARNDLKTRAAALGGNVVVLLTHRGVQSGSFDGTDGRYLRHTGVTLTGSVYRCPGAGA

SEQ ID NO: 47536 - protein, 275 aa, Burkholderia cepacia
MRASIHDGRHGERRRPTCLVQPSGTRATMPASRLGQHDVLDDLPDVLVAVDRLRFLVGDQRADPRRFAEADPAVRAELAEIGEDRDFRRVADHRARHFGFHPVVVRRAAHVVDADRRQQREIGAIAEDFGDRAVADRRRRAAADHPAEQDRFVLRLRRVTRAHLQRDVDRIRDDREARQLRQFLGQQRRGRARVDEQRLRARHQPRGRAGDRQLRLHMRLRTLGDRRFVADLHRAAVHALQFTERLEVDQIAAHGFARHVQLGHDPVGGNALHLR

SEQ ID NO: 47537 - protein, 122 aa, Burkholderia cepacia
MIPLSAKAIVRNGRSVLFLRNPRDEWELPGGWPEAGESLEDAVTREVEEECGIVASAIRYVGSRSCEVVPGKRVLIVCFQCEVDRHDIVLSDEHHQFGWIDLDADKPANLPDFYWTFCKQAD

SEQ ID NO: 47538 - protein, 233 aa, Burkholderia cepacia
MWLHTGPFCIHPHPLLVSDSAVSPFLPAPLQCGRFELTFERPLVMGILNATPDSFSDGGRFLARDDALRRAERMIAEGADLLDIGGESTRPGAPPVPLDEELARVIPLVEALRPLNVPLSIDTYKPAVMRAALAAGADLINDIWGFRQPGAIDAVRDGNSGLCAMHMLGEPQTMQVGEPDYGDVVTDVRDFLAARAQALRDAGVAAERICVDPGFGFGKAVVDDNYALLAALP

SEQ ID NO: 47539 - protein, 392 aa, Burkholderia cepacia
MPAMTAHHSFDVAVVGGGLVGKTAALALTQSGYKTALLAQPATPRAADLAFDTRVYALSSSSQALLERLRVWQALDHSRLAPVYDMRVYGDAHAELHFSAYQASVPQLAWIAESSLVEASLDAALRFQPNLTWFDARAQGFDVRDDAAVLTLSSGQVLEADLVVGADGAHSWVRSQMGARVERRDYRQTGVVANFKASLPHRETAYQWFHEGEIIALLPLPDGHVSLVWSAHTAHADALLALDPAQLAAEVERVSHGQVGALECVTPAAGFPLALQTVDKLIAPRVALVGDAAHLIHPLAGQGMNLGLRDVAALADAIAGKESFRNLGDTVLLRRYERSRREDIRALMVATDGLQRLFAVPGSLAKAVRNAGMAFVGAQPLVKRWLVSAALG

SEQ ID NO: 47540 - protein, 496 aa, Burkholderia cepacia
MHAKSLTELRAALAAKECSAVELAQHYLKRIDAARDLNAFVHVDADLTLAQAKAADAELARGAGGALTGLPIAHKDVFVTRGWRSTAGSKMLANYESPFDATVVARLQAAGMVTLGKTNMDEFAMGSSNENSAFGAVKNPWDTNAVPGGSSGGSSAAVAARLAPAATGTDTGGSIRQPASFAGVTGIKPTYGRVSRYGMIAFASSLDQGGPMAQSASDCALLLNAMAGFDERDSTSLERDDEDFTRHLGQPWAAGNDAGKPLAGLRIGLPNEYFGAGLADDVRATIDAALKQYEALGATLVPVSLPKTELSIPVYYVIAPAEASSNLSRFDGVRFGHRAAQYGDLLDMYKKSRAEGFGPEVKRRILVGTYVLSHGYYDAYYLQAQKIRRIIANDFQEAFKSCDVIMGPASPTVAWDLGAKGDDPVQMYLADIYTLSVSLAGLPGMSVPCGFGAGANAQRPVGLQIIGNYFNEARMLQVADAFQRATDWHKQVPAGV

SEQ ID NO: 47541 - protein, 335 aa, Burkholderia cepacia
MNLPDSSSTPSTTLAATAGDAPPPRAMWAQLRRSTLFYPLVGLIVVCIAMMIASPSFLSAANLENVLRQVSINAIIAVGMTCVILTGGIDLSVGSVMALSGTLAAGLMVAGVNAVAALAIGIAVGLGFGFLNGVFVAFAGMPPIIVTLATMGIARGLALIYTGGYPIDGLPDWVAFFGSGKVLGIQAPVLIMLVVYAIAWLLLDRMPFGRYVYAIGGNEQATRLTGVRVARVKLIVYTLAGVTSALAAIVLTGRLMSGQPNAGVGFELDAIAAVVMGGTSISGGRGAILGTLVGALLLGVLNNGLNMIGVNPYVQNVIKGGIILLAMYISRERSR

SEQ ID NO: 47542 - protein, 142 aa, Burkholderia cepacia
MFQGASALTLDAKGRMSVPARYREALQGQAEGRVTVTKHPDGCLLLFPRPEWEVFRAKIAALPMDAHWWRRIFLGNAMDVDLDSAGRILVSPELRMAAGLEKEVMLLGMGSHFELWDSQTYNAKEQAAMAQGMPDALKNFTF

SEQ ID NO: 47543 - protein, 374 aa, Burkholderia cepacia
MSRLLAIYRLGIKELWSLARDPILLALIVYTFSASIYVAATARPETLHKVPIALVDEDASPLSARIAAAFFPPQFAPPPIIDTGAADRGLDNGDYTFSLDIPPNFQRDVLAGRHATIQLNVDATRMTQAFTGSTYIQQIVSGEIDAFVRRYRGTPLPGVDLAMRMRFNPNLDEVWFGALMELINNVTMLSMILTGAALIREREHGTIEHLLVMPVTAAEIMLAKVWSMGLVVTVAAVASLTCVVGGALHVPIPGSIPLFVAGMALHLFATTSLGIFLATLVRSMPQFGMLLVLVLLPLQLLSGGLTPRESMPAAVRDIMLAAPTTHFVELAQRILYRGAGLDAVWPQFAALSAIGSVLFLLSLMRFRKTIGQMT

SEQ ID NO: 47544 - protein, 1066 aa, Burkholderia cepacia
MNISKFFIDRPIFAGVLSVIILLGGVIAMFLLPISEYPEVVPPSVIVKAQYPGANPKVIAETVASPLEEQINGVEDMLYMQSQANSDGNMTITVTFKLGTDPDKATQLVQNRVNQALPRLPEDVQRLGITTVKSSPTLTMVVHLISPDNRYDMTYLRNYALINVKDRLSRIQGVGQVQLWGSGDYAMRVWLDPQKVAQRGLSAEDVVQAIREQNVQVAAGVIGASPSLPGTPLQLSVNARGRLQTEDEFGDIVVKTTPDGGVTHLRDIARIQLDASEYGLRSLLDNKPAVAMAINQSPGANSLQISDEVRKTMAELKQDMPAGVDYKIVYDPTQFVRSSIKAVVHTLLEAIALVVIVVIVFLQTWRASLIPLIAVPVSIIGTFSLLLAFGYSINALSLFGMVLAIGIVVDDAIVVVENVERNIENGMNARQATYKAMQEVSGPIIAIALTLVAVFVPLAFMSGLTGQFYKQFAMTIAISTVISAFNSLTLSPALSAILLKGHGDKEDWLTRVMNRVLGGFFRGFNKVFHRGAENYGRGVRGVLSRKTLMLGVYLVLVGATVLVSKVVPGGFVPAQDKEYLIAFAQLPNGASLDRTEKVIRDMGSIALKQPGVESAVAFPGLSVNGFTNSSSAGIVFVTLKPFAERHGKALSAGAIAGALNQKYGAMKDSFVAVFPPPPVLGLGTLGGFKMQIEDRGAVGYAKLSDATNDFIKRAQQAPELGPLFTSYQINVPQLNVDLDRVKAKQLGVPVTDVFNTMQVYLGSLYVNDFNRFGRVYQVRVQADAPFRQRADDILQLKTRNDKGEMVPLSSLVTVTPTFGPEMVVRYNGYTAADINGGPAPGFSSGQAQAAVERIAHETLPRGVRFEWTDLTYQQILAGDSAMWVFPISVLLVFLVLAALYESLTLPLAVILIVPMSILSALTGVWLTQGDNNIFTQIGLMVLVGLSAKNAILIVEFARELEHDGRTPLEAAIEASRLRLRPILMTSIAFIMGVVPLVTSTGAGSEMRHAMGVAVFFGMLGVTLFGLMLTPVFYVVLRTLAGGKIHVAGKDSAGYGVSPSGASASDA

SEQ ID NO: 47545 - protein, 208 aa, Burkholderia cepacia
MVLDELISEFDRGLRSLTGISRMSRPVPAPADAPDAELTPAERTHAAGLMRVNHVGEVCAQALYQAQKLTARTASAKAMFEEAAREEEDHLAWTAHRLKELDSRPSLLNPLWYAGALAIGVAAGALGDKVSLGFMAETERQVESHLEGHMSELPATDTASRAIVDQMRIDEVKHGKAATDAGGIELPLPARMLMRAASKVMTSTAYYL

SEQ ID NO: 47546 - protein, 788 aa, Burkholderia cepacia
VSLPASPAPPGRPAPLPRRPTRVAPAPRRPPRPPPAERRAASPPPPPARGAPQTPPAEVLTCASCLRVRVLRQPAAHGILPAFRRQPATPSAIMSAGLNPAQNEAVRYLDGPCLVLAGAGSGKTRVITQKIAHLIEAKGFEPRHIAAVTFTNKAAAEMRERVSKLLEGKTLTTPGKEGRKVPVNQLTVCTFHSLGVQILRQEAEHVGLKPQFSIMDSDDCFGMIQEQLGTTDKGLIRKIQSIISLWKNGLIMPDEAMAIAANEDEHQAALVYRNYVATLHAYQAVDFDDLIRLPAELFAKNEQVRDRWQNKLRYLLIDEYQDTNACQYELLKQLAGPRAAFTAVGDDDQAIYGWRGATLENLAQLGKDFPKLHVIKLEQNYRSTVRILTAANNVIANNPKLFEKKLWSEHGMGDSITVTACNDEEHEAESVVFRLSAYKFERRAQFRDYAILYRGNFQARIFEQVLRRERIPYVLSGGQSFFDKAEIKDLCAYLRLIANADDDPAFIRAVTTPRRGIGNTTLEALGSFAGQAKVSLFEAVYMGGIEARLSARQVEPLRMFCDFIQRLTERADKEPATVVLDDMMEAIHYEAYLYDAFDERQAQSKWQNVLEFLEWLKRKGTKPETEAVDGEADGFHNADGLADTGKNLLGLIQTVALMSMLEGKDEDPDAVRLSTVHASKGLEYPHVFLVGVEEGIMPHRGGSEDDGPIDNERIEEERRLMYVAITRAQRSLHLNWCKKRKRARETVVCEPSRFIPEMGLDEAPPPTPEEAPMSPKDRLASLKALLQK

SEQ ID NO: 47547 - protein, 340 aa, Burkholderia cepacia
MRLRACRVGCPLIQRTLRSRSRPPAVAADEARRAFLQVRFAQPTETALTPVARLLLSPGARRFVSGLSAFAALAAAGARDASAQTPSPLGEWQYTAGVPLQKLFDPNIPTWQVSVGAAMTLQPRYAGSDRYRVMGGPNFDIRYRDLFFLSTGEGLGANVLRGPNWRVSLSVGYDLGRRSADDLGHLNGLDNINAAPVMKLAADYVVSKDFPLVLRADVRRSIGGSNGWTGDFSAYMPMPGSNEHFFWFAGPTVTFADSRYMNSWFGVNPGAAARSGLPTYSSGAGIKSAGLGVTMVWFVNKHWFVTMDGAIEQLVGRAARSPITQQSTNGVFDMSVNYQF

SEQ ID NO: 47548 - protein, 1066 aa, Burkholderia cepacia
MAKFFIDRPIFAWVIAIILMLAGVAAIFTLPISQYPTIAPPSIQITANYPGASAKTVEDTVTQVIEQQMSGLDNFLYMSSTSDDSGNATITLTFAPGTNADIAQVQVQNKLSLATPVLPQVVQQLGLSVTKSSSSFLLVLAFNSEDGSMNKYDLANFVASHVKDPISRLNGVGTVTLFGSQYAMRIWLDPNRLTNYGLTPVDVSSAITAQNVQIAGGQIGGTPATPGTVLQATITESTLLQTPEQFGNILLKVNQDGSQVRLKDVAQIGLGGENYNFDTKYNGQPTAALGIQLATNANALATAKAVRAKIDELAPFFPHGLVVKYPYDTTPFVKLSIEEVVKTLLEGIVLVFLVMYLFLQNLRATIIPTIAVPVVLLGTFAIMSMVGFSINTLSMFGLVLAIGLLVDDAIVVVENVERVMAEEGLSPKEATRKAMGQITGALVGVALVLSAVFVPVAFSGGSVGAIYRQFSLTIVSAMVLSVLVALILTPALCATILKPIPQGHHEEKKGFFGWFNRTFNNSRDKYHVGVHHVIKRSGRWLIIYLVVIVAVGLLFVRLPKSFLPDEDQGLMFVIVQTPSGSTQETTAKTLANISDYLLKDEKEIVESAFTVNGFSFAGRGQNSGLVFVRLKDYSQRQHANQKVQALIGRMFGRYGSYKDALVIPFNPPSIPELGTAAGFDFELTDNAGLGHDALMAARNQLLGMASKDPTLQGVRPNGLNDTPQYKVNIDREKANALGVTADAIDQTFSIAWASKYVNNFLDTDGRIKKVYVQADAPFRMTPEDMNIWYVRNGSGGMVPFSAFATGHWTYGSPKLERYNGVSAMEIQGQAAPGKSTGQAMAAMETLAKKLPVGIGYSWTGLSFQEIQSGSQAPILYAISILVVFLCLAALYESWSIPFSVIMVVPLGVIGALLAATMRGLENDVFFQVGLLTTVGLSAKNAILIVEFARELQQTEKMGPIEAALEAARLRLRPILMTSLAFILGVMPLAISNGAGSASQHAIGTGVIGGMITATFLAIFMIPMFFVKIRAIFSGEKEDVDEALRLAQEHSHHEEKPGNGDEGNKGQ

SEQ ID NO: 47549 - protein, 420 aa, Burkholderia cepacia
MHLSELKSLHVSELIEMANGLEIENANRLRKQELMFAILKKRAKTGETIFGDGTLEVLPDGFGFLRSPEMSYLASTDDIYISPSQIRRFNLHTGDTIEGEVRTPKDGERYFALVKVDKVNGQPPEASKHKIMFENLTPLHPNKPLSLEREMRGEENVTGRIIDMIAPIGKGQRGLLVASPKSGKTVMLQHIAHAIKQNHPDVILFVLLIDERPEEVTEMQRSVAGEVIASTFDEPATRHVQVAEMVIEKAKRLVEMKHDVVILLDSITRLARAYNTVIPASGKVLTGGVDANALQRPKRFFGAARNIEEGGSLTIIGTALIETGSRMDDVIYEEFKGTGNMEVHLERRLAEKRVYPSINLNKSGTRREEMLIKPEILQKIWVLRKFIHDMDEVEAMEFLLDKIRQTKSNSEFFDLMRRGG

SEQ ID NO: 47550 - protein, 583 aa, Burkholderia cepacia
MLLRQAFRFADNTLPNKSILTVRGTPMTPASLIEQYGPRESMEYDVVIVGGGPAGLSAAIRLKQLAAEKGAEIGVCVLEKGSEIGAHILSGAVMDPRAITELFPDWKERGAPLDVEVTEDRFLFLSEKSAVTTPNWALPDNFKNHGNYVISLGNVTRWLGQQAEALGVEIFPGFPAAEILYNDDGSVKGVATGNMGVGKDGEPTENFQLGMELHAKYTLFAEGCRGHLGRQLISKFKLDANADPQAYGIGIKELWEIDPAKHKPGLVIHTAGWPLKSDTYGGSFLYHMDNNQVVVGFVVGLGYTNPYLSPFEEFQRYKTHPSIRAFLEGGKRVSYGARAITAGGLLSLPKTVFPGGALIGDDAGFLNASRIKGSHAAIKTGMLAADAAFDAVQAGRQSDELNAYPDAFKQSWLYTELYRARNFKQWMAKGLYLGTLMVGLEQKVMGGNVPWTLHHQHADHEMLKPASQCEPIAYPKPDGKLTFDRLSSVFISNTNHEENQPAHLTLKDASVPVNVNLRTYAGPEARFCPAAVYEFVKNDDGSERLVINAQNCVHCKTCDIKDPTQNIVWVTPEGGGGPNYPNM

SEQ ID NO: 47551 - protein, 182 aa, Burkholderia cepacia
MSSDEVSESRRKWVQGTTAGLVASVALPTIAQTGGGPPDDAGDTAPRDPRTLYPHAPFPQQHQPWPGLAGRMTPRPDHGERSYRGSGRLDGRKALITGGDSGIGRAVAIACAREGADVAIVYLPDEEPDAREVVDLIRSAGRKAVPLPVDIRSEGACNGLVERAVAALGGLDILVNNAARQQ

SEQ ID NO: 47552 - protein, 242 aa, Burkholderia cepacia
MSMIEFQNVSKSFGHVPVLKNIDLKIDAGEVVVVVGPSGSGKSTMLRCINALEKITGGELLVDGQSVRGNATTIRNIRLEAGMVFQQFNLFPQMTALENVMFGPIQVRGASRADARDQAMALLDKVGLESRANHYPSELSGGQQQRVAIARALAIRPRLMLFDEPTSALDPELRHEVLKVMQDLATEGMTMIVVTHEIGFAKRVGTRLLFMDQGGIAEDGHPVDLIDRPPTPRLKEFLKHVS

SEQ ID NO: 47553 - protein, 300 aa, Burkholderia cepacia
MTKMKFHKAVLTVAALCAFASGAHAQETGTLKKIKDTGVIALGHRESSIPFSYYDQNQQVVGYSREFQLKVVDAVKKKLNLPNLQVKNIPVTSQNRIPLVQNGTVDIECGSTTNNLERQQQAAFSDTIFVIGTRLMTKKDSGVKDFADLKGKTVVTTAGTTSERLLRKMNNDKQLGMNIISAKDHGDSFNTLESGRAVAFMMDDALLAGERAKAKQPGEWVIVGTPQSEEAYGCMMRKGDADFKKVVDDAISQVEKSGEAAKIYAKWFENPIPPKGLNLNFPLSDSMKKLYANPNDKALD

SEQ ID NO: 47554 - protein, 174 aa, Burkholderia cepacia
MLQIHSTTLDAQVVDITTLEVDAIVNAANGSLLGGGGVDGAIHRAAGPGLLAECRTLGGCDTGDAKLTRGHGLPARYVIHAVGPVWYGGARGEAELLASCYRRAIELAEEVAATSIAFPAISCGVYRYPAEAAVDIAVGTVAEMLAQAPNLTRVVFACFSPDIYDLYRARLART

SEQ ID NO: 47555 - protein, 54 aa, Burkholderia cepacia
RLPQVTGTGGDIQIVRELSGLLNQSDKEAQKLSDTFIASEMFMLAVSAYKVDAA

SEQ ID NO: 47556 - protein, 278 aa, Burkholderia cepacia
MRELRQCHPVAALLKAAGLARSTFYYQLKALAAGDRYANLKAKIQTVYDHHKGRYGYRRITAAIRQTGDAINHKTVQRLMGQLQLKSLVRPKRYRSWRGEVGRVAPNLLRRQFDAERPNQKWVTDVTEFNVEGQKLYLSPVMDLYNGEIVAYQMDERPSFELVSCMLKKALAKLDDEGRPLLHSDQGWQYQMPAYRRLLKQHALTQSMSRRGNCLDNAAMESFFGTLKSECYRLTRFASVEQLRDALSRYIHYYNHERIKLKLNGLSPVQYRTQPLAA

SEQ ID NO: 47557 - protein, 286 aa, Burkholderia cepacia
MTDRNEAFSPRSTADFRALDAAHHIHPFSDMGALNRAGSRVIVKADGVYLWDSDGNKVIDGMAGLWCVNVGYGRKELADAAYRQIQELPFYNTFFKTTHPPVIELSAMLAEVTPAGFNYFFYCNSGSEGNDTVLRLVHQYWRVQGKPQKKYVISRENGYHGSTIAGGTLGGMGYMHEQMPSKVEHIVHIDQPYFFGEAAAGETPEAFGLARAQQLEAKILELGAENVAAFIGEPFQGAGGVIFPSATYWPEIQRICRKYYILLVADEVIGRFGRTGKWFAHHHLSY

SEQ ID NO: 47558 - protein, 464 aa, Burkholderia cepacia
MLATDSDPIVAIATAAGRGGIGVVRVSFGRGGEAAALPLIDALCGQKLAPRHASYVPFLDAHGAPLDRGIALYFPAPHSYTGEHVLELQGHGGPIVMQLLLQRCLDAGRGFGLRLAEPGEFTRRAFLNDKLDLAQAEAVADLIEASTEAAARSAGRSLDGAFSRQIHALVDDVITLRMLVEATLDFPEEEIDFLEAADARGKLAKIRAQLAHVLGDARQGALLREGLSVVLAGQPNVGKSSLLNALAGAELAIVTPIAGTTRDKVAQTIQVEGIPLHIIDTAGLRETEDEVERIGIARTWSEIERADVVLHLLDSRTGMTADDETIAARFPAGVPVVRVLNKTDLTGVPACVEHPAAEGDLTEVHLSAKRGDGIDMLRAELLRIAGWQAGAEGVYLARERHLIALRAAQEHLAQAADHAEQRAQSLDLFAEELRLAQEQLNAITGEFTSDDLLGVIFSRFCIGK

SEQ ID NO: 47559 - protein, 299 aa, Burkholderia cepacia
MRWVLLIVFIACVVYTHRRGKVRHGLFRQLSDHSTFTAPLNCFSYAFSSVPTTPFLDTDHFPELAVLQREWRTFRSEALALRDASRIKASGEYNDIGFNSFFRNGWKRFYLKWYDAPHPSAQALCPRSVEILSRIPSIKAAMFAQLPPGGKLGLHRDPYAGSLRYHLGLDTPNDDACRIVVDGESYAWRDGEAVMFDETYLHWAENRTANDRVILFCDIERPMKYRWAQRINDAFGQLLMRAAASPNETGDRTGGLNRAFRYLYAIRRAGKRLKAWNRTVYYIVKWLLFGGIAVAIFCI

SEQ ID NO: 47560 - protein, 228 aa, Burkholderia cepacia
MKSTRPFHPTPVITIDGPTASGKGTVAALVAAHLGFHLLDSGALYRLAALASVRYGIAAEDIDALVKLIDDLHITFREGCAQLDGVDVSNDIRAEAVGNRASAIAVHGPVRAALVARQRAFRKTPGLVADGRDMGTVIFPDAVLKVFLTASAEARATRRHKQLMQKGFSANIDDLLRDLRERDARDSNRAAAPLKPAADAKLLDTSALSVDEAVDQVLQWYRALGQPA

SEQ ID NO: 47561 - protein, 214 aa, Burkholderia cepacia
MTAVRAPRRRAPSDGQGGFDFSRPDEIVCGVDEAGRGPLAGPVVAAAVILDPARPIDGLDDSKVLSAKKRDLLYDLIVARSHAYCVASASVDEIDTLNILHATMLAMKRAVEGLSVLPTLAQIDGNRCPTLSVRAEAIVSGDALVPSISAASILAKVTRDRMLVDLHERFPVYGFNVHAGYGTAKHLAALREHGPCEAHRRSFAPVRAALDLIR

SEQ ID NO: 47562 - protein, 124 aa, Burkholderia cepacia
MAIAKEDILAAVEGMTVLELNELVKAFEEKFGVSAAAVAVAGPAGGGAAAAAEEKTEFTVVLAEAGANKVSVIKAVRELTGLGLKEAKDLVDGAPKPIKEGVDKAAAEEAKKKLEEAGAKVEVK

SEQ ID NO: 47563 - protein, 368 aa, Burkholderia cepacia
PEPSFFLFYRGAMGAHVPSSHDSAARPRAQQIARVALYAALLVLALWVIRDFIPAIAWACVIAIAMWPLLKRFESHRLFRDRPTLIATVITAAISLLVVLPVAVATTQAIAQAHDLREWLHTVQDNGIPLPDVVSRLPYGAAQITEWWQANLGHPLHAATAMHGVNSEKFIAFGRQFGTKLAHVLLEFGFMLVTLFVILRAGHKLSGALLQGARRAFGRNGAELIERMVAAVYGTVTGLVVVGLGEGALLGVAYALAGVPHAALLGLVTAVAAMLPFCAPVVFCGAALWLFVQGTTMWAVVVTALGFIVVFVAEHFVRPVLIGGSTRLPFLLVLFGILGGAETFGLIGLFVGPALMTVLTMLWAEWIA

SEQ ID NO: 47564 - protein, 512 aa, Burkholderia cepacia
MRRRRSEDGGGRFHPSFSKQVIHMSTVQETLALKDPSLFRQQAYVNGEWQGATNGETFDVRNPATGGLLGTVPAMGAAETRHAIDAANAAWPAWRKKTAKERAVILRKWHDLMMENADDLALILTTEQGKSLAEAKGEIGYAASFLEWFAEEGKRVYGDTIPTPASDKRIVVTKEAIGVCAAITPWNFPAAMITRKVGPALAAGCPIVVKPAEATPFSALAMAVLAERAGVPAGVFSVVTGDPKAIGGELTSNPIVRKLSFTGSTPVGRLLMAQCAATVKKVSLELGGNAPFIVFDDADLDAAVQGAIASKYRNSGQTCVCTNRFYVHEAVYDQFAQKLAAAVGQLKVGRGTEPGVTQGPLINEAAVLKVEAHIEDALAKGATVVTGGKRHALGHGFFEPTVLTGVTPAMKVAKEETFGPLAPLFKFGSDDEVIRLANDTEFGLAAYFYSRDIGRVWKVAEALEYGMVGVNTGLISNEVAPFGGVKQSGLGREGSHYGIDDYVVIKYLCLAV

SEQ ID NO: 47565 - protein, 1368 aa, Burkholderia cepacia
MQYSFTEKKRIRKSFAKRPIVHQVPFLLATQLESFSTFLQADVPATQRKPEGLQAAFTSVFPIVSHNGFARLEFVSYALSSPAFNIKECQQRGLTYCSALRAKVRLVILDKESPNKPVVKEVKEQEVYMGEIPLMTPTGSFVINGTERVIVSQLHRSPGVFFEHDKGKTHSSGKLLFSARIIPYRGSWLDFEFDPKDILYFRVDRRRKMPVTILLKAIGLTPEQILANFFVFDNFTLMDEGAQLEFVPERLRGEVARFDITDRDGKVIVQKDKRINAKHIRDLEAAKTKFISVPEDYLLGRVLAKNVVDGDTGEVIASANDEVTESVLEKLREAGIKDIQTLYTNDLDQGPYISSTLRVDETTDKTAARIAIHRMMRPGEPPTEEAVEALFNRLFYSEEAYDLSKVGRMKFNRRVGRDEIVGPMTLQDDDILATIKILVELRNGKGEVDDIDHLGNRRVRCVGELAENQFRAGLVRVERAVKERLGQAESENLMPHDLINSKPISSAIREFFGSSQLSQFMDQTNPLSEITHKRRVSALGPGGLTRERAGFEVRDVHPTHYGRVCPIETPEGPNIGLINSLALYAHLNEYGFLETPYRKVVDSKVTDQIDYLSAIEEGRYMIAQANAAIDEDGRLIDELVSSREAGETMMVTPDRIQYMDVAPSQIVSVAASLIPFLEHDDANRALMGSNMQRQAVPCLRPEKPVVGTGIERTCAVDSGTTVQAFRGGVVDYVDAGRIVIRVNDDEAVAGEVGVDIYNLIKYTRSNQNTNINQRPIVKMGDKVSRGDVLADGASTDLGELALGQNMLIAFMPWNGYNFEDSILISEKVVADDRYTSIHIEELNVVARDTKLGPEEITRDISNLAEVQLGRLDESGIVYIGAEVEAGDVLVGKVTPKGETQLTPEEKLLRAIFGEKASDVKDTSLRVPSGMSGTVIDVQVFTREGIQRDKRAQQIIDDELKRYRLDLNDQLRIVEGDAFQRLARMLVGKVANGGPKKLAKGTKIDQAYLEDLDHYHWFDIRLADDEAAASLEAIKNSIEEKRHQFDLAFEEKRKKLTQGDELPPGVLKMVKVYLAVKRRLQPGDKMAGRHGNKGVVSKIVPIEDMPYMADGRPADVVLNPLGVPSRMNVGQVLEVHLGWAAKGLGWRIGEMLQRQAKIEELRTFLTKIYNESGRQEDLESFTDDEILELAKNLREGVPFATPVFDGATEEEMGKMLDLAFPDDIAEQLGMNPSKNQVRLYDGRTGEMFERRVTLGYMHYLKLHHLVDDKMHARSTGPYSLVTQQPLGGKAQFGGQRFGEMEVWALEAYGASYVLQEMLTVKSDDVTGRTKVYENLVKGDHVIDAGMPESFNVLVKEIRSLGIDIDLDRN

SEQ ID NO: 47566 - protein, 124 aa, Burkholderia cepacia
  MISC_FEATURE (93)..(93): X=any amino acid
  MISC_FEATURE (98)..(98): X=any amino acid
  MISC_FEATURE (107)..(107): X=any amino acid
GWVQRPADPGGVIFIHLPHRKGIVQLVCHPDRHEMFAPAEGVRNEFCVRIKGIVRNRPEGTVNAGVKSGKIEVLSHELNVLNASVRPQFQLRXYNRSXPKCFTHRVXPRRVRLQQPVRQAPRRL

SEQ ID NO: 47567 - protein, 477 aa, Burkholderia cepacia
MPVWPIAAVWRAPYSPFTLRLQCSIGRGAATIPRCAVPGDIAMTPTFDTLDAAAGARARSQARKAAIGSFVGAVVDWYDFLLYGIVAALVFNSEFFPKVSPTMGTLAAFATFGVGFLFRPLGGIVFGHYGDRLGRKRMLVLTVMLMGLSTVAIGLLPAFSTIGWWAPVLLVLMRAIQGFAVGGEWGGAALMAVESAPKQKKAFYSSGVQVGYGVGLVLATGIVSILGHTLGEAAFKSWGWRLPFVFSIVLVLIGLWVRKNMDESQEFVEKVEHGNRKLRLPVLEALTRHPKAFLLIVALRLAELFTMYIVTAFALSYSTTNLGMSRDLFLNIGLLVGAVSCVTIPCFAWLADRYGLRRIYLIGALIGLASAVPFFVALEARSIAWIVIFSILLANAAHDMVVSVQQPLFTELFGAEYRYSGAGVGYQFASVVGGGFTPFIAVGLVSVAGGSWHLVAGYLAVGCLISLVVAARMRAAQ

SEQ ID NO: 47568 - protein, 691 aa, Burkholderia cepacia
MARTQAEPPASQPDARAAWLRDQLERANYAYYVLDQPDLPDAEYDRLFRELQQLETDHPELVTPDSPTQRVGGEAAGGFTPVVHDAPMLSLNNGFADEDIVAFDKRVADALAKATDLAGSVTDPVEYACELKFDGLAISLRYENGVFVQAATRGDGTTGEDVTENVRTIRSIPLKLKGKHVPAVLDVRGEVLMFKRDFARLNERQRAAEQREFANPRNAAAGSLRQLDSKITAQRPLSFFAYGIGVLDGMPMPDTHTALLDWYEAFGLPVNRERAVVHGAEGLLDFFRKVGEKRESLPYDIDGVVYKVNRRDEQERLGFVSRAPRFALAHKFPAQEALTKLVAIDVQVGRTGAITPVARLEPVFVGGATVTNATLHNEDEVRRKDIRIGDTVIVRRAGDVIPEVVGALLDRRPADAAEFVMPTECPVCGSKIERLPDEAIARCTGGLFCPAQRKQALWHFAQRRALDIDGLGEKIIDQLVELNLVRTPADLFNLGFATLAELDRFAEKSAQNLLDSLEKAKHTTLARFIYGLGIRHVGESTAKDLAKHFGSLTPIMDASIEELLEVNDVGPIVAESIHQFFAEEHNRTVIEQLRAPGKVTWPEGPPAPKAPQGVLAGKTVVLTGTLPNLTRDAAKEMLEAAGAKVAGSVSKKTDYVVAGAEAGSKLAKAEELGIPVLDEDGLHQLLEGNTP

SEQ ID NO: 47569 - protein, 248 aa, Burkholderia cepacia
MTSSNTTIGSNGTNVSTLPTDTMNTNNVSSTNGTSASDLQATFLKLLVTQLQNQDPTSPVDSSQMTSQLAQINTVSGIAQLNTSLTSLSTQLAAGQQTQAALLIGTNVLAPGNSVAVKGGAASPFGVSLANSVSNLTITVKNSAGAVVNTINAGAQSAGTVPFNWTPTDAAGNALPDGTYTVSASYTNSAGTPQAATTLAAATVQSVVKQADGTAGLVLSNGTTVGLTQVASIFPNTKSSTSGDTTTN

SEQ ID NO: 47570 - protein, 99 aa, Burkholderia cepacia
MALTLTDVKRIAHLARLEMADADAEHMLGQLNEFFGLVEQMQAVDTAGIAPLAHPIEQIQEVAQRLRDDAVTEVVDRDDNQRPAPAVQDGLYLVPKVIE

SEQ ID NO: 47571 - protein, 386 aa, Burkholderia cepacia
MPMIAGGETRAALGALAHGWRMRFPLPVVAVTGSNGKTTVKEMIASIFAAAVGADARLATAGNLNNDVGLPLTLLRLSAAHRLAVIEIGMNHPGETEVLARLTAPTVALVNNAQREHQEFMATVEAVALEHAAVIHALPPDGVAVFPADDAYAGIWRVAATGNRILDFALHDAERQNDAQIVGRMHGDELAIDTPAGAVTVRLRALGEHNARNALAATAAALGAGVALSAIRQGLEAFEPVKGRLQVKPASVGSLAGATVVDDTYNANPDSMRAAIDVLAAHPAPRVLVIGDMGEVGDEGPAFHREIGAYARERGIDALFALGDASRDACTAYGDTARHFDDVGALVSALLAAGYGAQATVLVKGSRYMKMERVVDALTNQPAAGT

SEQ ID NO: 47572 - protein, 373 aa, Burkholderia cepacia
  MISC_FEATURE (1)..(1): X=any amino acid
XDAGRTGARRANMHFTIRCLSAGNRFRNLPGSRAARARITEDTPPMPHASAPARRRALQRLAALAAAPFAGGLALPARAAGADLSGVTLVLGDQAGGLRALAEAARVLDGTPYRFRWANFQGAAPLFEAQRAGAIDLAPAGDLPVLTAALGDPSLRIVATRVGSPASLGIVVQPDSPVRAVADLKGQTVVVSSARGSISQYQLYGALREHGLAPRDVDVRFVLPVDAFAAFEAKRIGIWATFDPYYGHAVRRGARIVRDGSGINSGLAFLTSPVETLDDRGKRAALADVLARLARAGQWALAHPADYASVYASLTRLPPDAATDIARRAALAQRSLSGADIDVLQHVADRAAADAILPRRVDVASIAIRQVSA

SEQ ID NO: 47573 - protein, 159 aa, Burkholderia cepacia
MNGCFLVFSASQAATRGACRHTSCASLRRVGHARGRPPHRHHVAMLQQLAHAGLLSQRLRQRIRPGHFAAHLADHHQHVLLALHVQRATHQRRTIHDEQFVFLMVKFSNKAALTVDQRHRAVENHAVRERHAAFRECLARHRCTSPWRRRRAARVAPAP

SEQ ID NO: 47574 - protein, 87 aa, Burkholderia cepacia
MPAYRRLLKQHALTQSMSRRGNCLDNAAMESFFGTLKSECYRLTRFASVEQLRDALSRYIHYYNHERIKLKLNGLSPVQYRTQPLAA

SEQ ID NO: 47575 - protein, 334 aa, Burkholderia cepacia
MLTFQQIILTLQSYWDKQGCALLQPIDMEVGAGTSHVHTFLRAVGPEPWRAAYVQPSRRPKDGRYGENPNRLQHYYQYQVVLKPAPENILDLYLGSLEALGFDLKQNDVRFVEDDWENPTLGAWGLGWEVWLNGMEVTQFTYFQEVGGLECKPVLGEITYGLERLAMYLQKVENVYDLVWTEWEEQGPNGPELRRLSYGDVYHQNEVEQSTYNFEHANVDLLFTFFNSYEAEAKKMIDAQLALPAYELVLKAGHTFNLLDARGAISVTERAAYIGRIRALSRLVAQAYYDSREKLGFPMLGNPPGVPGLTTDAQDAAQPAWAPPLKVERKIDQV

SEQ ID NO: 47576 - protein, 388 aa, Burkholderia cepacia
MTPARYFQLDEHYDHEGKPEDRQFLITGVMHAGSNNYQAGEGAATYACSFTCIRKKIPYRPPFTIAKPTIIGPQTAVVVGPKGEEIYTDSLGRVKVQFPWDRLGERNQSSSCWVRVGQPWAGSGFGMVNIPRIGDEVVVIFLDGDPDRPLIISRVYNAQNMPPWALPASATQSGILSRSTKGGNVNTANAIRFEDKKGEEEVWLHAEKDQRIEVEHDESHWVGNDRAKNVDHDETVHVGHDRTETVGNNETITIGVDRTERVGNNETLTVGGNRNETIEGMENLVIALTSTETVGLAKALTVGGGYQVTVAGAVNTSAGLASAEEVGLSKTTMVGKTYMITAGDRIELKTGSAVLIMESNGHITLRGTQLLIEGSGPVQINGRDVDIN

SEQ ID NO: 47577 - protein, 282 aa, Burkholderia cepacia
MTSADYASRQRAIIAELNVAPHFDAEAEIDRRIDFLAQYLRSTGLRTYVLGISGGVDSSTAGRLAQLSVERLRADGYDARFIAMRLPNGVQNDEEDAQRALAFVRADEVLTVDVKPAADAMLRSLVASGHAFDTPAQQDFVHGNIKARERMIAQYAVAGARRGIVIGTDHAAESLMGFFTKFGDGGADILPLAGLNKRRVRGVARALGGEELIVMKVPTADLEELRPLRPDEHAYGVTYDEIDDFLEGKPVADRVYETVLRFYDGSRHKRALPYTMFDWPAA

SEQ ID NO: 47578 - protein, 455 aa, Burkholderia cepacia
MFEKILIANRGEIALRIQRACRELGVKTVVVYSEADKEAKYVRLADEAVCIGPAPSNLSYLNMPALISAAEVTDAEAIHPGYGFLSENADFAERVEQSGFTFIGPRPETIRMMGDKVTAKQTMIKTGVPCVPGSEGALPDDPKEIVKIARTIGYPVIIKAAGGGGGRGMRVVHTEAALVNAVNMTREEAGRAFGNPQVYMEKFLENPRHIEIQVLSDAYKNAIWLGERDCSMQRRHQKVIEEAPAPGIPRRLIDRIGDRCADACKKMGYLGAGTFEFLYENGEFYFIEMNTRVQVEHPVSELITGVDIVQEQIRIAAGEKLTLRQRDIQFRGHAIECRINAEDPFKFTPSPGRITSWHTPGGPGVRVDSHAYNGYFVPPNYDSMIGKLITYGATREQAIRRMRIALSEMVVEGIQTNIPLHRELMIDSKFVEGGTSIHYLENRLAQKQQVAPEEA

SEQ ID NO: 47579 - protein, 242 aa, Burkholderia cepacia
MKKTIRIASLALAVTMATLGCTAQADQTTDKLKATLQARLGNDAPIKSVSKSPVAGLYEVNLGSQIIYSDAAGDYVLLGDLVDAKTHKNLTDARLSEINKIDFASLPFANAIKVVKGNGARKIAVFSDPNCPYCKKLETTLQSVDNVTVYTFLYPVLSPDSTAKSKAIWCATDRAKTWESWMLDHRAPSGAGTCDTSALDKNLALGRGMNVTGTPTIFLPDGRRQQGAVSADQLNQALASSK

SEQ ID NO: 47580 - protein, 386 aa, Burkholderia cepacia
NDYLFTSESVSEGHPDKVADQISDAILDAILEQDKYSRVAAETLCNTGLVVLAGEITTTANIDYIQIARDTIKRIGYDNTDYGIDLQGCAVLVAYDKQSPDIAQGVDRAHDDNLDQGAGDQGLMFGYACDETPELMPLPIYLSHRLVERQASLRRDGRLQWLRPDAKSQVTVRYVDGKPDSIDTVVLSTQHAPDIELPALREAVIEEIIKPTLPADLIKGDIKFLVNPTGRFVIGGPQGDCGLTGRKIIVDTYGGAAPHGGGAFSGKDPSKVDRSAAYAGRYVAKNIVAAGLASRALIQVSYAIGVAEPTSVMVNTFGTGRVSDAVITKLVREHFDLRPKGIIKMLDLLRPIYEKTAAYGHFGREEPEFSWEATDKALALAEAAGV

SEQ ID NO: 47581 - protein, 256 aa, Burkholderia cepacia
MAAIDLNVNLGEGRAHDDALMTYATSINIACGWHAGDPTTMHRTASAALARDIAIGANPSYPGRAHCGRPSSEMDRDDLCAGIQYQIGALGGIVKALGGRLAHVKPHGALYNDAEHDASIADVVVAAVRRVDPSLALYGLSGGHLVAKAREAGLVAIAETFADRRYRPDGTLVPCSEPDAFIDDPGHIARRTKDIVVAGRLQADDGSWISITAQSLSLHGHGHHAVAFAREIHAALRSASCTLRPPIRVDTRSAIP

SEQ ID NO: 47582 - protein, 469 aa, Burkholderia cepacia
MTSQLHKKGEAWSARFSEPMSELVKRYTSSVFFDKRLALVDIAGSLAHANMLAAQKIISADDLAAIERGMAQIKGEIERGEFEWQLDLEDVHLNIEARLTALIGDAGKRLHTGRSRNDQVATDIRLWLRGEIDRIGGLLNDLRGALIDLAEQNADTIMPGFTHLQVAQPVTFGHHLLAYVEMFTRDAERMRDCRTRVNRLPLGAAALAGTSYPIDRHAVAKTLGFDGICANSLDAVSDRDFAIEFTAASALVMTHVSRFSEELVLWMSPRVGFIDIADRFCTGSSIMPQKKNPDVPELARGKTGRVNGHLMALLTLMKGQPLAYNKDNQEDKEPLFDTVDTVADTLRIFAEMVAGITVKPDAMRAAALQGFSTATDLADYLVKRGLPFRDAHEAVAHAVKICDDRGIDLADLTLDEMKQELPNVAHLIGDDVFGYLTLEGSVASRNHPGGTAPDQVRAAVKAARAALGK

SEQ ID NO: 47583 - protein, 262 aa, Burkholderia cepacia
MLGEKVPLNPTPFTLIGLTLAIFAGFRNNASYERYREGRQLWGGVLTATRTLVSQALCYGAVDHDDASRRAFVRTVVAFVYTLKHQLRGTDPAADLRGLLDGATYTRVAAARFRPVVVVHALREAFAARADAGQLADTRLWMLDARLDDLVAMVSGCERIASTPIPFSYDVLLHRTIYAYCVLLPFGLVDSIGAATPFVTVFVAYTLIALDAIAHAIAEPFGDGPNHLALDAMTRQIERTLLELNREPLPAEVTPGPSYRLT

SEQ ID NO: 47584 - protein, 91 aa, Burkholderia cepacia
MIMQAYIANIQGLTAIGIGIIIGLGAIGACIGIALMGGKYIEACARQPELINPLQTKMFLLAGLIDAAFLIGVGVAMLFAFANPLLSKLAG

SEQ ID NO: 47585 - protein, 156 aa, Burkholderia cepacia
MKLFILAVGHKMPGWIASGFDEYTKRMPPELRIELREIKPELRSGGRSAESVMAAERQKIEAALPKGARLVALDERGRDWTTMQLAQALPGWQQDGRDVAFVIGGADGLDPELKARADVLLRISSMTLPHGMVRVLLAEQLYRAWSITQNHPYHRA

SEQ ID NO: 47586 - protein, 322 aa, Burkholderia cepacia
  MISC_FEATURE (11)..(11): X=any amino acid
  MISC_FEATURE (15)..(15): X=any amino acid
MSIGLLEKKTXVFPXLVKRGITPDCVTDQTSAHDPINGYLPQGWTVAQWREAQKVDPQSIVKVAKQSMAVQVRAMLALQERGAATLDYGNNIRQMALEMGVENAFDFPGFVPAYIRPLFCEGKGPFRWVALSGDPEDIYKTDQKVKELIPDDPHLHNWLDMARERIAFQGLPARICWVGVKDRYRLGQAFNEMVKNGELKAPIVIGRDHLDTGSVASPNRETESMKDGSDAVSDWPLLNALLNTAGGASWVSLHHGGGVGMGFSQHSGVVIVADGTADAHERLGRVLLNDPATGVMRHADAGYELAQQTAREAGLKLPMLGR

SEQ ID NO: 47587 - protein, 251 aa, Burkholderia cepacia
RAFALLEHLVQAGDAVSLADLARDVDIPKASLHRMLASLEAGGLVIREPGRKNAYAVGPRLARLGTGVMLHAGTRRLRHAILERLVADLAETCNLTALHDTEVVYLDRVEADWPLRLDLKPGSRVPAYCSASGKLLLALLPRDERASLVRTMALPGHTPNTISDPELLEAELDRTAHKGIAIDNEEFVAGIVCIAAPVLDDDGACIAAVAVHAPVSRAPLSRLLDHVPRLQEAARALAEDLLVPRGGAPPA

SEQ ID NO: 47588 - protein, 367 aa, Burkholderia cepacia
  MISC_FEATURE (361)..(361): X=any amino acid
SAGNGATLDVSAATTPQTASALSGAAGSTVNLGGNTLTVAGPTGGSFGGTIAGTGGFAVQGSGTQTLTGANTYTGGTTIGSGSMLALAGASSLAPTSPVILAGSGATLDFTGSAAPQSIGTLSGTTGSNVNLGATPLTVNTAGTSSFAGTLSGTGPLTLAGTGAQVLSGTNTLSGPTTVTGGTLAVTGSLANSPVTVGSGATVTGTGTIGGLVVSGGGTASVLQLGQPLKVAGNATFQPGSTLQVGATPQQSGGLDVTGSATLNGGSVQVVAATGQYQPGKLYTIVNAGAGVQGQFIRGELDVCVPHADAHVQPGAGADVADAERHAVLVGRDDTRRASGGGCGRHARRRQPAVRDGVPSXQLRNGF

SEQ ID NO: 47589 - protein, 462 aa, Burkholderia cepacia
MRQLHVGTARGQQALRTPHHHQYHHETEDQHPVLGEPARDFRQHGQQDRRENHAELRAHPAEHDDREDQRRFDEGERFGIHEALTRREERAADPRERRAERERRQLDARRVETQRTARDLVVAQRFPRTAHRHADQAARHEQREAHQQQRDQVQEDHHVLAAVFQPDQFMEGLRAFDARRARHLEAEHRGLRNARDAVRAAGEARQVVREQADDFAEAERDDRQIVAAQPQHREAEQEAERRRGDRRDRQAFPERQPEILVQHRVRIAADRVEPDVAEIQQPRETDHDVQPEAEDHVDQRERRDVHRAARAEERPHEADREQHPDDHALLPRAHRRRRRQLHDRFRAHQPRLEQLEQEHGRDRDPHRAPVRRQHHLIAVELQLQPEHRNREDRRQDRGGHGVLQRLAERRVGGRAANGNDLTHLRLPQTFSMSDLPSRPVGRKSRISTSRPNATTSLYSAGM

SEQ ID NO: 47590 - protein, 387 aa, Burkholderia cepacia
METRVMKITRLETFVVPPRWLFLKIETDEGIIGWGEPVVEGRAHTVEAAVQELADYLVGRDPLLIEDHWQVMYRAGFYRGGPIMMSAIAGVDQALWDIKGKHHGVPVHALLGGQVRDRIKVYSWIGGDRPSDVANNARAVVERGFKAVKMNGSEELQIVDTYDKVEQVIANVAAVRDAVGPHVGIGVDFHGRVHKPMAKVLAKELDPYKLMFIEEPVLSENAEALRDIVNQTNTPIALGERLYSRWDFKHILAGGYVDIIQPDASHAGGITECRKIATLAESYDVALALHCPLGPIALAACLQLDAVSYNAFIQEQSLGIHYNQGNDLLDYLRNPEVFRYEDGFVAIPQGPGLGIDVNEEKVREMAKTGHRWRNPVWRHADGSVAEW

SEQ ID NO: 47591 - protein, 484 aa, Burkholderia cepacia
MCTQARRPRTGATLDGGTAIRLYGGRRGAAGIDAAAARVHSGNGRPDDDLHVAVLVVDQFLEAVRDDVAERDAPGDERLHVDAAVRDEADHVREFAVVRERADHFLLGRHDVEEVERRRFLEDADHHRLAGLADHVDRELRGGRVPDALERDIRAVAARQRPDFRDRVGRLRIDDHARADLQRLLLARGRHFQCDHASGARGLRAHDRAQADRARADHDDGLPDDVAGLLHRMQPDRERFDQRAGLGREMVGQLIQQFGRHVHVFGERAVVHQPREREVLADVVQPVPAIPAGAAMLACVGRHAVADREARHARAELGDLAAELVAQDALAFQAGQRMRRVDRDEHRPGDVFVQVGAADAAPVHANRDPACRRAFRNGNLFDADVVAAVPDGGLHAEGSDRCRCTHVAVSVRLSSGVRRCCRRTRRAIARSTGMQERGQREAGRCVAAGKCALGALHHVAVRRTATIWKERSVEFAAIAPQRSA

SEQ ID NO: 47592 - protein, 261 aa, Burkholderia cepacia
MGAAEKALIATSTWAMLIVVVPVILLTLWFAWRYRASNRNAAYAPNWSHSTAIEVVIWTVPTLIILFLGVLTWKTTHELDPYKPLESAVKPLDVEVVALDWKWLFIYPELGIASVNQLAIPVGTPVNFRITSDSVMNSFFIPQLGGQVYAMAGMQTRLHLIADEPGNYAGTSANFSGRGFSDMKFRTLAEPREQFDAWVQKVKASPDRLDATLYGSVAQPSEKAPVRYFSSVDPRLFHNIIAKYNDGHVLDLKDAACGTKG

SEQ ID NO: 47593 - protein, 416 aa, Burkholderia cepacia
MHRSFFNRAGNDAPCRAGLEEREMTDVVIVSAARTAVGKFGGSLAKVAAPELGATVIRAVLERAGVKPEQVSEVIMGQVLTAGSGQNPARQSLIKAGLPNAVPGMTINKVCGSGLKAVMLAANAIVAGDAEIVIAGGQENMSASPHVLPGSRDGFRMGDAKLVDTMIVDGLWDVYNQYHMGITAENVAKEYGITREEQDAFAALSQNKAEAAQKAGRFNDEIVPVSIPQRKGEPLQFATDEFVRHGVTAESLAGLKPAFAKDGSVTAANASGLNDGAAAVLVMSAQKAAALGLTPLARIKAYANAGVDPSVMGMGPVPASRRALERAGWTPGDLDLMEINEAFAAQALAVHKQMGWDTSKVNVNGGAIAIGHPIGASGCRILVTLLHEMVKRDAKRGLASLCIGGGMGVALAVERP

SEQ ID NO: 47594 - protein, 346 aa, Burkholderia cepacia
MNPCRARPAPSERAGRRRHPTKTGPTMTELLHGDGAIRRTTPYGSSIENTYAGVLSFMRRNYSRVLDGIDVAISGVPLDLATTYRSGARLGPAAIRAASVQLAELNPYPWGFNPFDDLAVVDYGDCWFDAHNPLSIKPAIVEHTRAILRSGAKMLTLGGDHYITYPLLVAHAERYGKPLSLIHFDAHCDTWADDDPDSLNHGTMFYKAVKEGLIDPATSVQVGIRTWNDDFLGIERLDAAWVHDQGARAAVERIVAIVGARPAYLTFDIDCLDPAFAPGTGTPVAGGLSSAQALAIVRGLGAVNLVGADVVEVAPAYDHADITAIAAAHVACDLLCLWRQKKVAAR

SEQ ID NO: 47595 - protein, 346 aa, Burkholderia cepacia
MSVRGQVARPRMRVVLPMLAVLLGVSIVVSAAFGPASIAMPDAVRIVAAHAASAFGGADAFAAVSGDDSIVWLIRMPRALLAALVGATLATVGVALQAATANRLADPHLLGVSAGAMLGAIAVTVVAGAAFGPFTLSVAAFAGALAATGCVVALAYRGGRLESDRLLLAGVSVSFMMAAFGNLLLYLGDQRAASSVLFWMLGGVGLARWDLLPVPAVCAVLAGGALYARRRELNALMSGDVAAASLGVPSARMRREVFVVASFATGAMVAVSGAIGFVGLVTPHLCRRVVGAEHGRLLPVTALAGAILLVWADVAARTLAAPEDLPIGIVTALFGSLFFVALLRRR

SEQ ID NO: 47596 - protein, 130 aa, Burkholderia cepacia
MIGNWNYGTGRRKSAVARVFIKAGKGDIIVNGKPIADYFSRETSLMIVRQPLELTNHGQTFDIKVNVNGGGETGQAGAVRHGITRALIDYDATLKPSLSSAGFVTRDAREVERKKVGLRKARRAKQFSKR

SEQ ID NO: 47597 - protein, 225 aa, Burkholderia cepacia
MRKFNVRIVVAYDWPLTLAGIEQIAGSTCAIELVAVYRSAAELVASLGGVDCDVVLVDYAIPGDEQMDGLALFDWLRRMRPNVGIVVLVANENPLIFRSILGIGRVSVVSKLDEVGHIVTAIHSSYSGGAYLSPSVRRAVDALGTRGDPPVKLSAREIEVIRLYLSGVPIKTIAQRLSKGKQTVSAQKISAMKKLGASNDVELIQRAAGLGLGSGEAARRAGSAA

SEQ ID NO: 47598 - protein, 668 aa, Burkholderia cepacia
MFGKLTLSAIPFDQPIIMGAGAFMGLVVLGILAALTITGRWKWLWTEWLTTVDHKRLGVMYIIVALIMLLRGFADAIMMRMQLALAYNAPGYLPPHHYDQIFTAHGVIMIFFMAMVFMVGLMNLVVPLQIGARDVAFPFINSLSFWMTAVSAILINVSLVIGEFAQTGWLAYPPLSELQFSPGVGVDYYLWALQISGVGTLLTGVNFFVTIIKMRAPGMTLMKMPVFTWTALCTNVLIMASFPILTATLALLGLDRYLGMHFFTNEAGGNAMLYLNLIWAWGHPEVYILILPAFGIFSEVIATFAKKPLFGYKTMVYATCAIMVLSFLVWLHHFFTMGSGANVNAFFGIMTMIIAIPTGVKVFNWLFTMYRGRIEFTTPVLWTIGFMVTFTLGGMTGVMMAIPGADFVLHNSLFLIAHFHNVIIGGVLFGYLAGFNYWFPKAFGFKLNEKLGKAAFWFWQVGFYVAFVPLYVLGFMGMTRRLNHYDNPAWHPWLLVAAFGAVLIAIGIACQLLQLVVSIRNRHLPEYRDTTGDPWGGRTLEWATSSPPADYNFAVIPQVRTLDAYADMKARGEGRPNPAAIRDIHMPSNTCAGLVIAIFSLVLGFALVWHIWWMAIGGLVGIIATLVIYSSRDNDGYYIPASTVRKTEDKQPTQRTAARVDDVELEAN

SEQ ID NO: 47599 - protein, 542 aa, Burkholderia cepacia
MEYNRLLHTLRVTAMAGVAAASLGVAGSAFAQIPNKTLVYCSEGSPAGFDSAQFTTGVDFTAATFTVYNRLVEFERGGTKVEPGLAEKWDVSSDGKVYTFHLRHGVKFHTTDFFKPTREFNADDVVFSFQRMLDPNNAFRKAYPVSFPYFTDMGLDKLITKVEKVDPYTVKFTLAEPNAPFIQNMAMEFASILSAEYGDQLMKAGRAADINQKPVGTGPFIFRSYTKDATIRFDGNPDYWKKGEVKLSKLIFSITPDPGVRVQKIKRNECQVMSYPRPADIATLKADSNVDMPSQAGFNLGYLAYNVEHKPVDKLEVRQALDMAINKKAILESVYQGAGQAASAPMPPTQWSYDKNLKMAAYDTAKAKALLAKAGFPNGFEITLWAMPVQRAYNPNARLMAEMIQADWAKIGVKAKIVTYEWGEYIKRAHAGEQDTMLIGWTGDNGDPDNWLGTLLGCEAIKGNNFSHWCYKPFDELVQKGRTTTGQDARTKLYTQAQQIFAQQLPFSPIANSTVYQPVRKNVVDMRIEPLGYARFDGVGVK

SEQ ID NO: 47600 - protein, 1515 aa, Burkholderia cepacia
MSDTPSYDEPSGSAQERLDQIAKLEDGEAAKAAEQPFYEHLNYGMLGADAGLTAVEGTAAGLSAAGTALAGGATGGAALGAGAVAAGTVMLPLAIAVGGAWALDKVGVTGWLSKEFTQVGDALGLTIGRGDPHPACIGDRIAHSSGFMGILAGIAVGVAIGVAVAATVATGGLAGALIVGACMAGGLTLGGALASASQSMGSNCGEIVTGSSNVYFEGKKVARVTDLVKCDHHSGAPQALVDGSKTVFVNGLPLVRIGHETHCSGKVNSGRNSIWIDKTTGNYGPKNPELSATQEFLAGLIGGIVGGGVGKVGGKGLRAVREKFRPEPTRSAEQRGIKDENRPKCKDPVDPVSGEMLEIRTDLAIPGILPLEFKRRYRTRSDDHGLLGHRWSDNWSQRLTFDGGRFVRFHDGAGLVIGFDAPDMALNGINLREPRYRLVGSRLEPRIFDRDTRQLRIFAPLVDGRSSRLERVEDLDGNAIVLSYDTAGRLSGMVHSDGYRLEIAYPGRDRQLQRIVLHDADGGSRTLVGYDYQNGMLTHVASFQFGQFYYAYDEHGWMTQWRDTDQTDVRYRYDTAGRVVETGTRQGYHTGRFIYEAGCTRVIDVDGEWTYAYNDEGLVTAETDPLGHCTYSEWELGRLMARIDPLGRRTDYRYDERGQLTSVVESSGRTVDFDYDDEQRLTGARLPNGGTIKLEYDHLSRLIARTEPDGNKTTYRYGPRGELLRVVQGDRETRLDYDDRLRLTDIELPTGARFRRKIDALGRLLEETSPDGHVTRYDYADGPANPRGLLSAVTRPDGSVSRARYNSESLPVEWIDPLGRTIQRTYGPFDLLTASIDAAGHATRFEYDHATRLTKVINALGETYTYRYDAAGRLAAEIDWGGRATEYDRDAVGRLLTKTLPDGGQWRYTYDASDRLIEIDAGDVKLAYRYDASGRLASAEVQGEHTHVTRFAYDRNGRLIGEDQHGELLRHVYDADGQRRLRMTPRRETTYAYDVSGALTQVGQLTIRRDGLGREIGREAGDFVAQQQYDALGRIRRQIAGPAVAFDALQADPARALEQLTRQVYHYDAAGQLERVDTGADTLTYQRDERGQIICAESLLQPSEHFRYDAVMNIAAHGQRAPVDAHHYRRGGLPEQVGYARYKYDARGRTIEKTVEQPGVRPKTWQYTWDGLNRLVRVVTPERGVWAYRYDAFNRRIEKQQVGGRETVKFLWDGPMLAERWIEQRDGTTGQVVTWHIEPGSFLPLAQETDDGLFPILTDQIGRPKTVFDEQGRPVWKAAYSLWGKLLPVKRPANDADCGATSIDTTLRFSGQWADDETGLNYNLNRYYDPDSGQYLSADPIGLLGGARTQAYVHDPSQWIDPLGLQGCKPAGKKISMRAYRYEMPERFDTTWDAHEWNVAARHRYTKKGLGGVYGADSPATALAEVTHWDVDLSTRELISKDVTLNNVLDLTDPSVRKQTAAAMDMPFTLEDITGNNYEYTHKLGDWASQNGYDGILAPSARNPDGANLISFGGF

SEQ ID NO: 47601 - protein, 263 aa, Burkholderia cepacia
MAGLARSTFYYQCKALAAPDRHASVKAKIRALFEQHKGRYGYRRITLALRRLGQMINHKTVARLMRKMQLKSCVRVKKYRAYRGNTCKTAPHLLQRQFHAARPNEKWVTDITEFSVGGQKLYLSPVLDLYNGEIIAYQTHTRPAFQMVTDMLRKALRRLQPDERPMLHSDQGWHYQMPGWRLMLEQRSLAQSMSRKGNCLDNAAMESFFGTLKSEFFYLNHFSSIEQLRIGLKRYIRYYNHERIKLKLKGLSPVQYRTQPHPA

SEQ ID NO: 47602 - protein, 233 aa, Burkholderia cepacia
IGPHVLRNNLFVAPMAGVTDRPFRQLCKRLGAGYAVSEMVASNAQLWKSAKTMRRANHEGEVEPIAVQIAGADPEMMAEAARYNVDNGAQIIDINMGCPAKKVCNVAAGSALLQNEPLVQRIVEAVVAAVGTGPDAVPVTLKIRTGWDREHKNAITVARLAEAAGISMLTVHGRTRADLYRGDAEYDTIAAVKAAVRIPVVANGDITSPAKAKAVLDATGADALMIGRAAQGR

SEQ ID NO: 47603 - protein, 243 aa, Burkholderia cepacia
MSKTHFGFESVEENEKAKKVAGVFHSVASNYDLMNDLMSAGMHRAWKAFTIAQANVRPGFKVLDIAAGTGDLTKSFAKAAGPTGEVWHTDINESMLRVGRDRLLDKGVVTPSLLCDAEKIPFPDNYFDVVTVAFGLRNMTHKDAALAEMRRVTKPGGRVMVLEFSKVWDPLKKAYDLYSFKVLPWLGDKFAKDAESYRYLAESIRMHPDQDTLKTMMEQAGLDAVKYYNLSGGVVALHLGTKY

SEQ ID NO: 47604 - protein, 652 aa, Burkholderia cepacia
  MISC_FEATURE (15)..(15): X=any amino acid
MCGIDGFLNSVALRXGDSARHARAMTASLAHRGPDGQGIWVDPEAGIALGHRRLAIVDLSVHGRQPMASACGRYVLVFNGEIYNHRELRAELERAGRAPAWRGHSDSEVLIAAIVAWGVEATLRRATGMFAFALWNRASRVLTLARDRIGEKPLYYGRIGDALVFASELKALRGYPGFDGTVDRDALCLYLRQSSVPAPYTIYRGIRKLPPGTYIQFEHARDTPRLRAYWTLEQVIEAGRAQPFEGTPDEAVGQLDAILRQAVARQMEADVPLGAFLSGGVDSSAIVALMQAQSATPVDTFTIGFHEAGYDEAGYAKAVARHLGTRHTELYVTADHALGVVPKLPSIYDEPFSDASQIPTFLVSELTRRHVKVSLSGDGGDELFGGYTRYFLTPRLWRKLHRVPGAVRARIAAALHALRPDHADQLAAVAQGAWGGGVEARESTSRIGDRLHKLGHVMTAESRIGLYRLLMSSVHHPERIALSGQEPPTPLDTVSAWPAHLSFAEQAMAIDTLTYLPTDILAKVDRAAMAVSLETRMPFLDHHVVEFAWRVPASVRLPEGQSKALLRRLLDRYVPSALIDRPKQGFCAPVDHWLRGALRDWAEALLRPSRLREEGFFDAAAVERLWRQHQTGRMNWQHQLWTVLMFQAWLEA

SEQ ID NO: 47605 - protein, 282 aa, Burkholderia cepacia
MREVNLEYANSYRLASTCEELLLPRCADDVAEMFERGGAASFPILGHGSNVILSRTRYPRVMKFGRRFGAVTRLAEHVVYADAGASLRRVGLACERFGLAGFEVLGNIPGSVGGGIVMNAGAFGDDISSVVQSVRVYAIHTRQVIELDRSECEWGYRSSGFQHGAYVVLGAYFRLHDGDPHELRIRRLANLALRRERFPGSEPNAGSVFKRPAHGMKIGEMIEALGHKGLTIGTARISPKHAGFIVVRRPGRANDICQLIDFMRSEMWKHFNVEAEVEQRIL

SEQ ID NO: 47606 - protein, 319 aa, Burkholderia cepacia
MHDSFDDARQALQPLPATLAKQAAAAYTVSNVPQIGTWVQQLQASNIVGTITSLSGFTNRYYTTSHGVAASDWLALQWKQLAGARADITVEQVAHTGFPQKSVILTIRGSDPAAGTVVLGGHLDSTVGRTTENTRSPGADDDASGIASLTEALRVLLANNYRPKRTIKFVGYAAEEAGLLGSKAIAKQFRTQNANVVGVLQLDMTNYKGDPKDIYLITDYTNAAQNTYVKNLAATYLPELAVGTSQCGYACSDHASWNAQGYPASFPFEADQNDSPYIHTVNDTLENSDRQANHALKFGKLALAYAVDLGGLAGATVKR

SEQ ID NO: 47607 - protein, 392 aa, Burkholderia cepacia
MRPLDGIKVITLEHAIAAPFCTRQLADLGARVIKIERPGSGDFARGYDERVHGLSSHFVWVNRSKESLTLDVKQPAAAAVLDALLADADVLVQNLAPGAAERLGLGYDALKHTHPRLIVCDISGYGDDGPYRDRKAYDLLIQSEAGFLSITGSPGQPAKAGCSIADIAAGMYAYTNILSALLMRGRTGAGCRIDVSMLESMVEWMGYPLYYAIDGQSPPAPSGASHATICPYGPFPAGDGKTVMLGLQNEREWKLFCEQVLRQPALADDPRFNANSKRHAARDAVDALIVDAFATLTAAEVMQRLDAAGIANAQMNTLDDVWRHPQLQARERWRSVDTAAGPVPALLPPGLPAGVEPRMDAVPALGQHTDAILAELGYDRARIAALRANGTI

SEQ ID NO: 47608 - protein, 413 aa, Burkholderia cepacia
MSTEPSSKPVFPITDEVRHALAVTKRGVDELLIEEEFAQKLARSAATGTPLRIKLGLDPTAPDIHIGHTVVLNKMRQLQDLGHTVIFLIGDFTSLIGDPSGRNATRPPLTREQIESNAKTYFEQAALVLDRDKTEIRYNSEWSMPLGADGMIKLASRYTVARILEREDFTKRFQGGVPISIHEFLYPLMQGYDSVALNADLELGGTDQKFNLLVGRELQKQYGQEQQCILTMPLLEGLDGVEKMSKSKGNYVGISEKPTDMFGKLMSISDTLMWRYFELLSFRSLDEIAGFKREAEGGRNPRDFKVLLAQEIVARFHSQPDAERALEDFNHRAKGGVPDDIPSVTLAGAPLAIGQLLKQAGLVPSTSEALRNIEQGGVKIDGATVSDKGLKVEAGEFVVQVGKRRFARVTLTA

SEQ ID NO: 47609 - protein, 176 aa, Burkholderia cepacia
MSRVGKSPIALQGAEVKLADGAITVKGPLGTITQAINPLVNVANNDGTLNLSPVDESREANALSGTMRAIIANAVHGVTKGFERKLTLVGVGYRAQAQGDKLNLSLGFSHPVVHQMPEGVKAETPTQTEIVIKGINKQQVGQVAAEVRGYRPPEPYKGKGVRYADEVVILKETKKK

SEQ ID NO: 47610 - protein, 136 aa, Burkholderia cepacia
EQHVPFICFTASGGARMQESLLSLMQMAKTTAMLTKLAEAKLPFISVLTDPTMGGVSVIFAFLGDVVIAEPKALIGFAGPRVIEQTVREKLPEGFQRAEFLLKTGAIDMIVDRRKMRDEIAQLLALLQRQPADALA

SEQ ID NO: 47611 - protein, 372 aa, Burkholderia cepacia
MQSSPSSLAAAVPADAPDWPDDFARRYRDAGYWQDTTFFDALDACAQRHPDALAVVDGALRLCYRDLLARIRRLAGGLARLGLVRGDAVVVQLPNGARFIETCFALFQLGVRPVLALPAHRHYEIGAFCRFAGARAYLGASQLGDFDCRPLAAALQAECPTLEHIVMAGDDHAFTSFDALYDAAPVLDCAARADDIACFQLSGGTTGTPKLIPRRHREYLYNVRACSAASGFDVDTVYLAALPMAHNFTLCCPGTIGALLAGGRVVTTARPEPDQSFALIAQERVTHTALVPPLALLWLDEQPQRLADLSSLRVLQVGGARLMDHAAERVTPVLGCRLQQVFGMAEGLICCTRVDDAPERIAHTPGPTALDG

SEQ ID NO: 47612 - protein, 615 aa, Burkholderia cepacia
MSRALEILDEVFGYSAFRGQQGEIVEHVAGGGDCLVLMPTGGGKSLCYQIPALLRREAGQGAGIVVSPLIALMQDQVAALSEVGVRAAYLNSTLSGAEAAATERALREGEIDLLYVAPERLMTGRFLELLERAKIGLFAIDEAHCVSQWGHDFRPEYIQLSVLHERFPSVPRIALTATADAITRDEIIHRLALDDVRVFVSSFDRPNIRYRIVEKDNARAQLLDFIRAEHTNADGTTDAGVVYCLSRRKVEETAEWLKAQGVRALPYHAGMEFEVRQKHQEMFQREEGIVMCATIAFGMGIDKPDVRFVAHLDLPKSVEGYYQETGRAGRDGMPANAWMAYGLGDVVQQRKMIDESDADDAHKRVQTSKLDALLGLCETISCRRVRLLNYFGEASQPCGNCDTCLEPPASWDATREAQMALSCVFRAQRASGFNFGSSHLIEILRGGRTEKVLQRGHDQLSTFGIGAALSEPEWRAIFRQLVAYGYLAVDHGGFGALMLTEAAKPVLKNEEKVTLRRYVKPQRTRQSSSRSGTRVDPTAGMGARERARWDALRAWRAETAKTDGVPAYVIFHDATLAEIARNAPETIDDLRHIPGMGVRKLERFGDEIIDVVESA

SEQ ID NO: 47613 - protein, 409 aa, Burkholderia cepacia
KFIHAADIHLDSPLHGLSAYPDAPAAQLRNASREALRQLVDRAIEEEVAFLVIAGDLYDGDWKDHNTGIFFGQQMGRLRKAGIRAFVLGGNHDAESEMTKKLTLPDNVTVFGHRKPETFRLPEFDVALHGQSFKDKAVVDNLAVGYPDPVPGYYNIGVLHTALEGYAAHANYAPCTLAELHAKGYDYWALGHEHEFQQWTGPSTVVFPGNLQGRHIRETGRRGAVLVTVEQGNTQVERLYLDVLRWEAVSVDASDCLSVADLSRKIGQSLEALLTVDGHVPRAVRVTVTGRTPAAWPLFRPRPQLRAEVLNQIGIIGNERLWLEKVRLATSAADRQPGESEPLEALEDLKQILADAAHDPDFLALLERDLKPFVGKVRSDVKEEVPLLTMVRAGELTALVEQVGPALLA

SEQ ID NO: 47614 - protein, 177 aa, Burkholderia cepacia
HVTASVGRSKVESGRDALAQLNPEVTVNAVAERVDDAWLDAHVPHASVVLDCTDNFATRHAINRACVAHGVPLVSGAALRFDGQISTFDFRDAAAPCYACVFPEDQPFEEVACSTMGVFAPTVGIIGAMQAAEALRVIGGIGKTLNGRLMMLDSLRMEWTTMKIARQADCPVCGGRH

SEQ ID NO: 47615 - protein, 426 aa, Burkholderia cepacia
MLPATRGGRHRPAPRPAHFDLIMQTVTLKPSKEKSLLRRHPWIYANAIDRVDGKPAPGATVLVRAHDGRFLARGAYSPQSQIRVRVWSFDEHEPIDHAFFKRRVQRAVAHRTTMVSGTGAVRLVFGEADGLPGLIVDYYVADTAEAGAAPRGQLVCQFMAAGVEAWKDAIVAALTGATGCPNVYERSDVSIRDKEGLEQTTGVLAGDAPPATLISNENGVRYHVDVPNGHKTGFYVDQRDNRALVAQYAADRDVLNCFCYTGGFSLAALKGGAKRVVSIDSSGDALALAQQNVVANGFDAERATWLDADAFKTLRRLVDEGERFDLIVLDPPKFAPTRDSVDRAARAYKDINLSGFRLLRPGGLLFTYSCSGAIDMDLFQKIVAGAAADAKVDARILKRLGAGVDHPLLAAFPEGEYLKGLLLQIV

SEQ ID NO: 47616 - protein, 286 aa, Burkholderia cepacia
MNRPDPDQLLDKLQRDEEKQRRGQLKIFFGASAGVGKTYAMLQAARQRRQDGVDVVVGIVETHGRSETAALLDGLDVLPPARIDYRGRTLAEFDLDGALARAPQLILVDELAHSNVQGARHLKRWQDVYELLDAGIDVYTTVNVQHLESLNDVVGAITGIRVWETVPDRVFDAADEVTLVDLPAEELLERMRDGKVYLAQQAERAVRNFFRKGNLIALRELALRRTADRVDAQMREYRADRSIQRIWQARERLLVCVGPGPEAPTLVRAAARLAASLKADWIAVYV

SEQ ID NO: 47617 - protein, 195 aa, Burkholderia cepacia
MPFNFPIFLTWVRIVLIPLVVGVFYLPDTVMGGAHRNLAAAAIFILAALTDWFDGFLARKWNQTSSFGAFLDPVADKLMVTAALLILVQISRVDAAIALVIVGREIAISALREWMAQIGASKSVAVNQLGKFKTACQMVAIPMLLFYGPLPLGIVTIDTRVWGEWLMYLAAVLTIWSMLYYMKLAWPQIRERGGA

SEQ ID NO: 47618 - protein, 150 aa, Burkholderia cepacia
MQIILLEKVANLGNLGDIVKVKDGYARNFLIPNRKARRATKEAIAEFEVRRAELEKIAAEKLAASQAVGEKLNGQSFEITQKSGVDGRLFGSVTNGDVAELLKKAGYEVEKLQVRMPEGPLKMIGEHNVQVALHTDVVVDVTINVIGDHA

SEQ ID NO: 47619 - protein, 316 aa, Burkholderia cepacia
MNTLREVVPVPREQLARSRVLVVGDVMLDRYWFGNVDRISPEAPVPVVHVQRQEERLGGAANVARNAVTLGGQAGLLCVVGCDEPGERIVELLGSSGVTPHLERDPALPTTIKLRVLARQQQLLRVDFEAMPTHEVLLAGLARFDVLLPQHDVVLMSDYAKGGLTHVTTMIEKARAAGKAVLVDPKGDDWARYRGASLITPNRAELREVVGQWKSEDDLRARVANLRAELDIDALLLTRSEEGMTLFSAGGELHAPALAREVFDVSGAGDTVIATVATMLGAGVPLVDAVVLANRAAGIVVGKLGTATVDYDELFH

SEQ ID NO: 47620 - protein, 155 aa, Burkholderia cepacia
MSTEKINLDIHKILTLLPHRYPILLVDRVLELEPHKGIKALKNVSINEPFFQGHFPKRPVMPGVLILEALAQAAALLTFAEEQPKDPENTLYYFVGIDGARFKRVVEPGDQLILNVTFERYIRGIWKFKAVAEVGGKVAAEAELMCTVKTADAAP

SEQ ID NO: 47621 - protein, 337 aa, Burkholderia cepacia
MTLQIGVIGCGAIGQDHIRRLTRTLSGARVVAVNDIDPQQARDAVTKYGLDAEIYGDGHEVVAAADVQAVLVTSWGPTHEAFVLDAIAHGKPVFCEKPLAVTADGCMRIVEAEVAHGKRLVQVGFMRPYDEGYRALKRVIDSGQIGAPLMLHCAHRNQSVGERYTTDMAITDTLIHELDVLRWLLGEDYTSAQVVYPKKTRHASAHLADPQIVLLETASGVRIDVEIFVNCQYGYDIQCEVVGEQGIAKLPDPPAVGLRHAARQSVEIMTDWKERFIASYDVELQAFIDGVRQGALTGPSAWDGYAAAVAADACVRAQQSGAVEPIAMAERPAFYRG

SEQ ID NO: 47622 - protein, 315 aa, Burkholderia cepacia
MNSRPTLNELRALSAVVSHRSFRKAAEELELAASTLSHMMRDLEERVGVRLLNRTTRSVSPTPAGERLVTKLHPILQDLDSALAEMDANRDHPSGTLRLTASETVSMLLVQKIIPEFLNRYPEMRVDLVAEPAFVDIVAEGFDAGFRLGEAVPQDMVAVHFGGPSRMIPVASKTYLAARKPPRTPVDLAEHQCICSRTPNGRPYKWEFKRRGHAVSIDVPGSLVLNRTELMLEAALQGLGVAFVPEQMARPYLDNGSLSALLSEWCPTYPGLYLYYPGHRQVPVGLRAFVGVLKELDATRSHRCSPKAPTETLAR

SEQ ID NO: 47623 - protein, 44 aa, Burkholderia cepacia
MKRTYQPSVTRRKRTHGFRVRMKTAGGRKVINARRAKGRKRLAI

SEQ ID NO: 47624 - protein, 693 aa, Burkholderia cepacia
  MISC_FEATURE (502)..(502): X=any amino acid
  MISC_FEATURE (503)..(503): X=any amino acid
  MISC_FEATURE (527)..(527): X=any amino acid
GDRAAFAATLAHAQASAPDDPDMLAAIGAQWIDAGEPERGLAPLRDWIAAHPREADADVRLRYGDLLGRAGRDDALAAWLDTLRRDSSLTPAQTARLEDQSLRLVLRQTDDAIARQDYAQARTLLDRASPAGRADKRYALELADLERAQGHYDAARDALAPVVARTPDDADVQLALARSDEDSGNRAAARARVQAVLARTPDDDVDTQLSAVRRLNALRRPDEAAQVTDRLQAAYPARADVTVAAGRVAEAQGRYDDAASLYRLSQSQERATGVSPGRDGLTPAQAAFADLQQRRNPEIETGWIPAYKSGDEGISSYRAQQVPIYMQMPVRYDGHVFAQIDTVHLDPGTLDTSNPDAYSLKTFGTYAALRAQNGLPPPFQLNQPAAALLANPPGSLHQSTTGVALGAGYLSDAWRVDLGTSPLGFPVHYLVGGVRYRFDAGPAIFSVNASRRPETSSVLSYAGMRDPWTGAVWGGVRRDGVNLRAPPQNEPHEPKKKIGAGXXSGRNVERNAEVTTGAPSFSGAPVXERATMKLSTGLVDNAWHYAQNLRYYTYGQGGYYSPQRYLSLGVPIEWAGRRDALSWDLTVTGGISNSYEKDSLYYPTFSDQRAAQVAAGFVYAGSSTRGVSFSYGVNGIVEYRVNPHLSVGAQLHIDRSHDYAPSSALVYLRYAFDARAPRSWLVTPTPVRLYSDY

SEQ ID NO: 47625 - protein, 273 aa, Burkholderia cepacia
MLKTRVITAIVMLAVLLPVTLFAPLAGFGALIGVVLVFAAWEWARLLKLGGAGPVVYALVAALALAATAPLGVDAASSRPLFMAAGVFWLLVGPFALRRKPELAGGVWRPFLLAAGLVVFAACWHALVAARAQGVPFVLSLLLVVWLADIGAYFAGKAFGKRKLAITISPGKSWEGAIGGWFAVMVVAGVAMAVHAFEPTLFSAFAMRYGMPGAWAALTLLVAYSVIGDLFESLLKRQAGVKDSSGLLPGHGGVLDRVDALLPVLPLAMLLLG

SEQ ID NO: 47626 - protein, 700 aa, Burkholderia cepacia
MARKTPIERYRNIGISAHIDAGKTTTTERILFYTGVNHKIGEVHDGAATMDWMEQEQERGITITSAATTAFWKGMGGNYPEHRINIIDTPGHVDFTIEVERSMRVLDGACMVYCAVGGVQPQSETVWRQANKYKVPRLAFVNKMDRTGANFFKVYDQLRLRLKANPVPVVVPIGAEENFKGVVDLIKMKAIIWDEASQGTKFDYVDIPAELAETCKEWREKMVEVAAEASEDLMNKYLEEGDLPEADIVKALRDRTIACEIQPMLCGTAFKNKGVQRMLDAVIDFLPSPVDIPPVKGELENGEEAERKASDEEKFSSLAFKIMTDPFVGQLIFFRVYSGVVNSGDTLLNSTKGKKERLGRILQMHANQREEIKEVRAGDIAAAVGLKEATTGDTLCDPANPIVLERMVFPEPVISQAVEPKTKADQEKMGLALNRLAQEDPSFRVQTDEESGQTIISGMGELHLEILVDRMKREFGVEATVGKPQVAYRETIRSTAKDVDGKFVKQSGGRGQYGHAVITLEPNEQGKGYEFFDEIKGGVIPREYIPAVDKGIQDTLKSGVLAGFPVVDVKVHLTFGSYHDVDSNENAFRMAGSMAFKEAMRKANPVVLEPMMAVEVETPEDYMGNVMGDLSGRRGIVQGMEDMVGGGKIVRAEVPLSEMFGYSTSLRSLTQGRATYTMEFKHYAEAPRNVAEAIISAKSK

SEQ ID NO: 47627 - protein, 259 aa, Burkholderia cepacia
MAKIFCVANQKGGVGKTTTSVNLAASLAAQEQRVLLIDLDPQGNATMGSGIDKAACEATVYEVLVDGVSVTDARVRPEGVTYDVLPANRELSGAEIELISIDNRERRLKAALERVADDYDFVLIDCPPTLSLLTLNGLCAAHGVVIPMQCEYFALEGLSDLVNTIKQVHANMNRDLKIIGLLRVMFDPRITLQQQVSDQLKAHFGDKVFDAVIPRNVRLAEAPSYGLPGVVFDRSSRGAQAYIQFGAEMIERVRAFEVS

SEQ ID NO: 47628 - protein, 282 aa, Burkholderia cepacia
KTSTGKPSNVVIRGVSPAGLALRPHVKLVAGRPFAPGSSEIVVGSAIAKGFSGTQLGDRLHFAQRDWTIVGIFDAGGSGFDSEIWGDVDQLMQSFRRTSYSSMVLRIPSADGFARFKADIDVDPRLTDEAKREQTFYGDQSKALSTFINILGITLSTIFSIAAMIGAMITMYASVANRVAEIGTLRALGFKRTSVLAAFLLEALLLGFVGGVAGLACASLMQFASFSTTNFQTFSDLSFRFVLTPAIVVKTLVFSLVMGLVGGFLPAMRAARLKIVDALRAQ

SEQ ID NO: 47629 - protein, 828 aa, Burkholderia cepacia
MRIRHSFLCVSVLVVGSQSQATEFNSSFLDIDGTSNVDLSQFSQADFTLPGEYMLDVQVNDLFYGLQAIEFIAVDASGAGKPCLRPELVAQFGLKPSLVKDLPRFQGGRCVDLGAIEGATVRYLKSDGRLKITIPQAALEFTDSTYLPPARWSEGIPGAMLDYRVIANTNRNFGAGGGQTNAIQAYGTVGANWDAWRFRGDYQAQSNVGNTAYADRTFRFSRLYAFRALPSIQSTVTFGDDYLTSDIFDTFALTGASIRSDDRMLPPSLRGYAPLISGVARTNATVTVSQAGRVLYVTRVSPGAFALQNINTSVQGTLDVAVEEEDGSVQRFQVTTAAVPFLARAGQLRYKAAVGKPRLFGGAGITPFFGFGEIAYGLPFDVTAYGGFIAASGYTSIALGVGRDFGAFGAVSADVTHARAKLWWNGATRNGNSYRINYSKHFDGLDADVRFFGYRFSEREYTNFAQFSGDPTAYGLANSKQRYSATLSKRFGDTSTYFSYDQTTYWERANEQRVGLTLTRAFSIGTLRNLNVSVSAFRTQSAGASGNQVSVTATLPIGGRHTVTSNLTTGSGSTSVNAGYIYDDPNGRTYQINAGATDGRASANASYRQRSSAYQLTAQASTLANAYAAASLEVDGSFVATQYGVSAHANGNAGDTRLLVSTDGVPDVPLSGTLTHTDSRGYAVLDGISPYNVYDATVNVEKLPLEVQVTNPIQRMVLTDGAIGFVKFSAARGSNLYLTLTDAAGKPLPFGASVQDAANGKELGIVGEAGAAFLTQVQPKSTLAVRAGERTLCTIAALPNQLQLEGTPIPMTCQPPGESHAAAARAER

SEQ ID NO: 47630 - protein, 358 aa, Burkholderia cepacia
MTPSTGRPAAPLLFQQARIRADTPPGRPERPDTRTGTEYGDRPMTRFLDVPATARLIARTGVTTFLRELVDTLRADYLHWADFDKSPRVACHSRDGVIELMPVANASLFAFKYVNGHPVNAARGMHTVMAFGALAEVDTGYPLLLAELTLTTALRTAATSVLAAQALARPDSRTMALIGNGAQSEFQAIAFHTLLGIDEIRVFDVDPRATDKLVRNLAAYPKLRVVRAASTADAVRGADIVTTVTADKAYATIVTADMIEPGMHLNAVGGDCPGKTELEAGVLHAGRVFVEFEPQSRIEGEIQQMPADFPVTELWRVLQRETAGRERADEVTVFDSVGFALEDYSALRYLYALAQQHS

SEQ ID NO: 47631 - protein, 458 aa, Burkholderia cepacia
MAKQKTVYVCSECGGQTPKWQGQCPSCQAWNTLVESVAESPAAHRFQSLAKRAPVQRLADIEAADVPRFSTGIGEFDRVLGGGLVPGGVVLIGGDPGIGKSTLLLQSLADIASERRALYISGEESAAQIALRAQRLALLDGGAPAAELKLLAEIQLEKIQAAIDTERPDVAVIDSIQTVYSDALTSAPGSVAQVRECAAQLTRIAKQSGTAIIMVGHVTKEGNLAGPRVLEHIVDTVLYFEGDTHSSFRLVRAFKNRFGAVNELGVFAMTERGLRGVANPSALFLSQHEQVVPGSCVLVTQEGTRPLLVEIQALVDTAHVPNPRRLAVGLEQNRLAMLLAVLHRHAGIAAFDQDVFLNAVGGVKITEPAADLAVLLAIHSSMRNKALPKGLIVFGEVGLAGEIRPSPRGQERLREAAKLGFTSALIPKANAPKQPIEGLNVMAVERLEQAIDRVRDLE

SEQ ID NO: 47632 - protein, 299 aa, Burkholderia cepacia
MGVAVMPTDHSFILKLSCPDRHGIVHAVSGFLFERSNNILDSAQFGDSRTSEFFMRVHFEQDGGGVDAASALDTLRKEFAPLAEQFSMRWELHDAAVKPRVVIMVSKIGHCLNDLLFRYRTGQLPIEIPAIVSNHKEFYQLAASYNIPFHHFPLIGGSSDAAKAAQEARVLEVIDEHQADLVVLARYMQILSPNMCEQLAGRAINIHHSFLPSFKGAKPYYQAFDRGVKLIGATAHYVTTDLDEGPIIEQEVERVDHSMTPDQLTAIGRDVECVTLARAVKWHVEHRIVLNGTKTVVFR

SEQ ID NO: 47633 - protein, 635 aa, Burkholderia cepacia
MVSIRLPDGSVRQYEHPVTVAEVAASIGPGLAKAALGGKLDGELVDTSTVIDRDASLAIVTDKDADGLDIIRHSTAHLLAYAVKELYPDAQVTIGPVIDNGFYYDFSYNRPFTPEDLEKIEKRMQELAKKDEPVTRRVVSRDEAAGYFRSIGEKYKAEIIESIPQSDEIKLYSHGGFTDLCRGPHVPSTGKLKVFKLMKVAGAYWRGDSKNEQLQRIYGTAWTKKEDQDQYLHMLEEAEKRDHRKLGKQLDLFHMQEESPGMVFWHPKGWALWQQVEQYMRRRVNEAGYLEIKTPMIMDRSLWEASGHWQNYRENMFTTESEKRDYAIKPMNCPGHVQVFKHGLRSYRDLPLRYAEFGSCHRNEASGALHGLMRVRGFVQDDAHIFCTEDQFISESIAFNTLAMSVYKDFGFDHIDIKLSLRPDQRAGTDETWDRAEQGLRDALTACGLTWEELPGEGAFYGPKIEYHIKDALGRSWQCGTLQLDMVLPERLGAEYVAEDNSRRRPVMLHRAIVGSMERFLGILIEHHAGAMPVWLAPYQAIVLNIAESQAEYAQSLAQSLQKQGVRVAADLRNEKISYKIREHTLEKVPYLLVVGDKERDAQTVAVRARGGVDLGVMPVEAFVERLQEDLRSFK

SEQ ID NO: 47634 - protein, 150 aa, Burkholderia cepacia
MGSRVIEGSRAGKREARTGNKEDPGGEPEGQRGERRRTRAKKEGRGGGGKNGGGGEGRRTQRAGRGRSAAGQGNNGGGAGERTERAGEKGAGDAASAKKNKPGRTREKAARTRTPSGQGTLNKTARALNRRTLVMGKKLNDSYRFSSDGA

SEQ ID NO: 47635 - protein, 634 aa, Burkholderia cepacia
MTSSRNPSPLALPEQRVVAVDDLSVTFRREGATFDAVRNVSFHVDRGETLAIVGESGSGKSVTSLALMRLVEHGGGEITSGRIAFRRRGGALVDLAQASAATMRGIRGADIAMIFQEPMTSLNPVFTVGDQISEAIALHQSKGTAEARAEALRLLDLVRIPEARRVFARYPHQLSGGMRQRVMIAMALSCRPALLIADEPTTALDVTIQAQILQLVRGLQDEMNMGVIFITHDMGVVAEVADRVLVMYRGEKVEEGESDRIFATPAHRYTRALLAAVPRLGSMEGTDAPEKFPLLKVDGTSATAPAPTTASAANDTQPPVDHAAPPILRVRDLVTRFPVKSGVFGRVSQYVHAVERVSFELRAGETLALVGESGCGKSTTGRSLLRLVESQSGSIEFDGRDISALKGPDLQALRRNIQFIFQDPFASLNPRLTVGFSIMEPLLVHGVASGAEAQARVDWLLDKVGLPPEAARRYPHEFSGGQRQRIAIARALALNPKVVIADESVSALDVSVQAQIVNLMLDLQRELGVAYLFISHDMAVVERVSHRVAVMYLGQIVEIGPRRAVFEAPQHPYTKKLMSAVPVADPARRHAPRQLAADEIPSPIRAVGDEPVVAPLVAVGPDHYVATHRVGGAY

SEQ ID NO: 47636 - protein, 151 aa, Burkholderia cepacia
  MISC_FEATURE (52)..(52): X=any amino acid
MNRLAKILPIENVVIDLSVTSKKRVFEQAGLMFENQNGIARSTVTDNLFARXRLGSTGLGEGVAIPHGRIKGLKHPLAAFVRLADAIPFEAPDGQPVGLLIFLLVPEQATQQHLEILSEIAQLLSDRDARERLHNETDIAELHRLLTQWQP

SEQ ID NO: 47637 - protein, 181 aa, Burkholderia cepacia
MLSDSPFSAPGATRGGDEVIPVSALNRAISTMLERSFPLLWISGEVSNFTRAASGHWYFSIKDQQAQMRCVMFRGRAQYAEFTPREGDRIEVRAVVTMYEPRGEVQLNVEAVRRTGQGRLYEAFRRLKAQLEAEGLFAPERKRPVPPHPRAIGIVTSQQAAALRDVLTTLARRAPHIPVIV

SEQ ID NO: 47638 - protein, 568 aa, Burkholderia cepacia
MTLRLSRRAYAEMFGPTTGDRVRLADTELLIEIERDFTTYGEEVKFGGGKVIRDGMGQSQRVAADVPDTVITNAVILDHWGIVKADIAIKHGRIAAIGKAGNPDIQPGVTIAIGAATEVIAGEGLIVTAGGIDTHIHFISPQQIDEALASGVTTMLGGGTGPATGTNATTCTPGPWHMERMLQAADGWPINLGFLGKGNASLPQPLVEQIAAGAIGLKLHEDWGTTPAAIDNCLSVADDTDTQVAIHTDTLNEAGFVESTVAAFKGRTIHTYHTEGAGGGHAPDILKVCGEMNVLPSSTNPTRPYTINTLDEHLDMLMVCHHLDPSIAEDLAFAESRIRRETIAAEDILHDLGALSMLSSDSQAMGRVGEVIIRTWQTAHKMKVQRGALPEDTARNDNFRAKRYVAKYTINPALTHGIAHEVGSIEPGKWADLVLWEPAFFGIKPSMILKGGMIALAQMGDPNASIPTPQPVHYREMFATRGGALARTSLTFVSQMAADAGIAERYGLAKRIVPVRNCRNVTKADMIHNAWRPSISVDPETYDVIADGQLLTCEPATVLPMAQRYFLF

SEQ ID NO: 47639 - protein, 129 aa, Burkholderia cepacia
AQTIDHTLLAPDASDAQIRELCRQAAEHRFYSVCVNSANVPLAARELADTGVLVCAVVGFPLGAGLSATKAFEATAAIAAGAGEIDMVINIGALKSARADDVKADIDAVHRACGTGPLKVILGTGLVTE

SEQ ID NO: 47640 - protein, 273 aa, Burkholderia cepacia
MKPNRYLQFAALFVGFAFLYVPIISLIVYSFNESKLVTVWSGFSFRWYAALAEDDELLTAAWLSLKIGVLTAFASVFIGTWAGFVLARMGRFRGFALFSGMINAPLVIPEVIQGISLLLLFIELAKWIGWPAERGVFTIWLGHVMLCISYVAIIVQSRVRELNPSLEEAALDLGATPLKVFFTITLPLISQALIAGWLLSFTLSIDDLVLSAFLSGPGSTTLPLVVFSRVRLGLNPEMNALATLFIIAVTAGVVIANFVMLRQERKRLAGFAA

SEQ ID NO: 47641 - protein, 513 aa, Burkholderia cepacia
MTESRNAILAIDEGTSGTRAALVDASGHVSCLEYLPLSVESPQPGVVEQDANAILDKTLAVCRATLAQAHQQHVRIVALALATQRATAVLWDTRTGRALVPAMVWQDTRHAAELDRLAADWDRVLVPQVGRPAGVRSPYLWAVHQLRTSRAVADAHRAGRLAFGTIDTWLLWHLSEARACMTTPTNATSASAYLLGEHRYFDPWLDALGFPRELLPALREDADAFGHTRADVLGIDVPILACAGDQFAGAVGLGCVERGQAMCVHGTGSFVDLLTGTARPDAGSHAQPGHAHDGTLAMTARRHGGVSHYSLETFVATTGSALRWVCEKLRWFDDPAQISALAGTVRSARGVTFVPALTGLRVPRMEPNARALLSGISIATTQAEVAHAVLEGIAHSVASCMEANEAVARAGVSELIVGGGLAGSDTLLQIQADVSGVPVRRMRDGDRASLRGAAFLAGASGLLWESLEAARATLVTDAVFEPSIDADSRQRRRAAWHARIASELAHAADFAHA

SEQ ID NO: 47642 - protein, 151 aa, Burkholderia cepacia
MLKNLDPLLHADILHTLRAMGHGDEIAICDANFPAESVAEHTVVGRALRIDGADSARVVRAVLSVLPLDTFVDTPAWRMEVVGDAAAVPPVQREVQAEIDRAEGRAVPLAGIDRFAFYERAQQAYAVIVTGETRGYGCFIFKKGVLLSDAG

SEQ ID NO: 47643 - protein, 313 aa, Burkholderia cepacia
MSGIDPKRFGKVAVLFGGESAEREVSLTSGRLVLQGLRDAGVDAHPFDPAERPLSALKDEGFVRAFNALHGGYGENGQIQGALDFYGIRYTGSGVLGSALGLDKFRTKLVWQQTGVPTPPFETVMRGDDLAARATDIVAKLGLPLFVKPASEGSSVAVLKVKTADALPAALEEAATHDKIVIVEKSIEGGGEYTACIAGDLDLPLIKIVPAGEFYDYHAKYVADDTQYLIPCGLPAQQEAELKRIARRAFDVLGCTDWGRADFMLDAAGNAYFLEVNTAPGMTDHSLPPKAARAVGISYSELVVKVLSLTLND

SEQ ID NO: 47644 - protein, 199 aa, Burkholderia cepacia
MRIALALKGLPYDTLPVNIRTGEHRDADYIAQVNPSAAVPALTDDDFRLGQSLAILDYLDQIQPTPRLIPLEPRRRARVLELAALIACDIHPVNNLRVLRYLDSELKVTPQQKSAWYRHWVAEGMAGVERLLARANAGPWCFGDAPTLADVCLVPQVANALRMDCDLSAYPRCLAVVEHARHEPAFEAAQPQRQPDYVA

SEQ ID NO: 47645 - protein, 341 aa, Burkholderia cepacia
MDMTVILSIGLAVGDARHHAEHFEREVRAGERGGAGRIVRRRYFDEVRADDVQALHAAHDLQALLHGQAADFRRAGARRERRVEAVDVEAQVHRRVADAFAHLRHQRRERLVPAVFRLHDGETLLPAPVEIVRVIAGAAQADLRDLVALQQAVFHRAAERRAVRDLLAEHRVVHVRVRIDVHDRDLAVLPVQCAQDRPRDRVIAAERDRPAAVRDDRVVCLLDAAHRVLQVVRVGRDVADVGHLQRIERRGAGGHVVRAQQHGFGADLARAEARARAVRRAEIERHADEARVEAVGRRGLRQPHHRGDAAKARHLVAAHRLVQFAGHGAVSSFWCQAIGRW

SEQ ID NO: 47646 - protein, 127 aa, Burkholderia cepacia
MRLLHTMLRVGDLDRSIKFYTELLGMKLLRREDYPEGKFTLAFVGYEDESTGTVIELTHNWETPSYDLGNGFGHLAVAVDDAYAACEKIKAQGGKVTREAGPMKHGTTVIAFVEDPDGYKIEFIQKK

SEQ ID NO: 47647 - protein, 265 aa, Burkholderia cepacia
MKIAIAGASGRMGRMLIEAVLNDADAQLVGALDRAGSPFLGQDAGAFLGKDTGIKLTDDLDAVFAQAEYLIDFTRPEGTMAHIAAALRHDVKLVIGTTGFTAEQKAELQAAAGKIGIVFAANMSVGVNVTLKLLEFAAKHFSHGYDIEIIEAHHRHKVDAPSGTALMMGEAVAGALGRSLDDCAVYGRHGVTGERDPSSIGFAAVRGGDIVGDHTVLFAGIGERIEITHKSSSRVSYAQGALRAVRFLSARGAGLFDMQDVLGLR

SEQ ID NO: 47648 - protein, 209 aa, Burkholderia cepacia
MLERGPAALTDDELIALLLGTGKPGHDVFVTARALVEQFGTLRGLLEASADDFEAYPGIGPARSARLVAVTEIARRMLVEKAEERMPIDSPGAVEDCLRLKIGTRQYEVFIAVYLDARNRLIDMEEIARGSLTRMAVYPREIVRRAMKHNAAALIVAHNHPSGAVQPSAEDRRLTRVLKDALELVDVRLLDHVVVGVSDTFSFARAGWL

SEQ ID NO: 47649 - protein, 302 aa, Burkholderia cepacia
MRIVLITGISGSGKSVALNALEDAGYYCVDNLPPHVLPELARYLAQDGQRRLAVAIDARSSASLDEMPGLIRELSREHDVRVLFLNASTQALIQRFSETRRRHPLSGSLSHDADVGLLSSLEEAIERERELVAPLAEFGHQIDTSTLRANALRTWVKRFIEQKNNDLMVMFESFGFKRGVPLDADLMFDVRALPNPYYDHQLRPLTGLDQPVIAFLDALPIVHQMIDDIHAFLMKWLPHFRDDNRSYLTVAIGCTGGQHRSVFIAETLAARLAREANVIVRHRDAPVDVDASSRLVSEVDRP

SEQ ID NO: 47650 - protein, 91 aa, Burkholderia cepacia
MPRPTGKKFDKRRQQQNPLFKRKKFCRFTAAGVEQIDYKDTETLKDFIGENGKITPARLTGTKAHYQRQLDTAIKRARFLALLPYTDQHKA

SEQ ID NO: 47651 - protein, 264 aa, Burkholderia cepacia
MRSTVRPLRRTLLRLLPIATLAAGFAFSAPASAADELVVSAAASLTNAFKAVGDAYEKQHPDTKVLFNFGASDVLMQQIAKGAPADVFASADQKAMDRAVNEKVIVPGTRRDFAANSLVLIVPADSHAAAPTSLNDLTAPGVKRIAYGDPASVPVGRYTEGALRAAGVWDAVSAKGVLAANVRQSLDYVARGEVDAGFVFGTDAAIMPGRVKVALTVPTRTAITYPIAVVKDSRHAAQAQSFIDFVASSQGQAVLSTFGFKPAK

SEQ ID NO: 47652 - protein, 684 aa, Burkholderia cepacia
MSTTLNENLLLAIPLAPLAGSLIAGLFGNAVGRKGAHRITILGVLIAFLLSAKVFFDVMGGASFNATVYEWMNVGSLKLEVGFLVDSLTAMMMVVVTFVSLMVHVYTIGYMAEEDGYQRFFSYISLFTFSMLMLVMSNNFLQLFFGWEAVGLVSYLLIGFYFTRESAIYANMKAFLVNRVGDFGFLLGIGLLLAFAGSMNYGEVFAKRAELASLHFPGTDWGLLTVACICLFIGAMGKSAQFPLHVWLPDSMEGPTPISALIHAATMVTAGIFMVSRMSPLFELSDTALSFITVIGAITALFMGFLGIVQNDIKRVVAYSTLSQLGYMTVALGVSAYPVAVFHLMTHAFFKALLFLGAGSVIMGMHHDQDMRNMGGLRKYMPITWITSLVGSLALIGTPFFSGFYSKDSIIDAVKLSHLPGSGFAYFAVVASVFVTALYSFRMYFLVFHGEERFRQPKHPESPMGMAAAHGHDDHGHGHGHDDHAHEPHETPWVVWVPLVLLAIPSVIIGAIAISPMLFGDFFQHGVAFDKVIFIGENHPALAEMAEEFHGWVGMGLHSVSGLPVWLALAGVVVAWFLYLKRPELPASIRRAFGPIYTLLDNKYYMDKINEVVFARGSVAIGRGLWKEGDVVVIDGLVNGSARFIGWFAGVIRFLQSGYIYHYAFAMIIGMLGLLTLFVTLGGK

SEQ ID NO: 47653 - protein, 568 aa, Burkholderia cepacia
MAHRREERGFRVVRGIGGARRFVELALDVLLRRDVGEVAQHDVRVAKARAHEIDEQVDGFAAGGGQRHVQIGLPRGGGGRAVEVFEQPSRQRRFTRTARIVVAHRVVLQQHRAVGERQQSDAGRRGFDDRPVQVLAVDHAARARVVGFQHAAVEAHQQPPHERDHREHDRDVPARAQADRREQRAQRERLHEGPVGFGNRLAQRKQPVAERRARAAAARGLSRTRIEAFDRGARGVVVVRAARAQQRAAVGIDDDRRVGRVARGQTRAQHVDRQRRQEHRARRLRVVHGAGDPEHVAPLHGIVDGRMPFVLPGRRRADAGGDLGDERGRIGGGRRGERIGRHRFGNHDREAAVGAIRVAGDRAVGVVLRDVRADAIAHVARHREIVRVAVGRVRGRQVGQHECRRESRAALDDQSAAAGREGGHAGGIDRARIPHGLVVRDERVHARRAHLEFDLDEELADREGRIARLDRFARHRIQHQPAREQDRDGHGRAAGIEQRALAAADAGGRGRRVRGGGAGGIGCGAVVHRERGGRPGCPHDNAVRSARNGACQGCGGRGRRVDRATHAR

SEQ ID NO: 47654 - protein, 398 aa, Burkholderia cepacia
MGGGLTGMFQWMVVRPGSQREGATHILVLTPIHEPQATDMATPVTILTGFLGSGKTTLLKRILNEQHGMKIAVIENEFGEENIDNEILVQDSNEQIIQMSNGCICCTIRGDLARALGDLAAKKREGKLDFDRIVIETTGLANPGPVAQTFFIDSEIADDFLLDAVITLVDAKHANAQLDEHEVVQRQVGFADRLFITKSDLVDDQTVAGLKHRLMHMNPKAAIKVVNFGEADIKEIFDLRGFNLNAKLEIDPDFLAEDDHAHHHHDHDHDHDHANCDHDHGQCAHDHDHGHHNHHHAHHDDKIKSFVYRNDRPFDPNKLEDFLGGILQIYGERMLRYKGVLYMKGVDRKVVFQGVHQMMGSDLAAKWLPVEKKTNKMVFIGVDLPQDLITDGLDACLA

SEQ ID NO: 47655 - protein, 602 aa, Burkholderia cepacia
MCRGFTCTEEVRVSFTLHGIPVSRGIAIGRAYLIAPAALDVAHYLIEANQIDAEVERFRTALDVVRRELEALRADLTDDTPSEVGAFIDVHTMILSDEMLVQETIDLIRTRRYNVEWALTEQLELLTRHFDDIEDEYLRERKADIEQVVERVLKALAGAPSASQALDGAARNGTNDMIVVAHDIAPADMMQFKTQSFQAFVTDLGGRTSHTAIVARSLGIPAAVGVQHASSLIRQDDLIIVDGDQGIVIVDPAPIVLEEYSYRQSEKLLEQRKLQRLKFSPTQTLCGTKIELYANIELPDDAKAAVEAGAVGVGLFRSEFLFMHQKEMPEEEEQFAAYKRAVEWMKGMPVTIRTIDVGADKPLEALDEGYETAPNPALGLRAIRWSLSEPQMFLTQLRAILRASAFGQVKILIPMLAHAQEIDQTLDLIREAKRQLDDAGLAYDPNVRLGAMIEIPAAAIALPLFLKRFDFLSIGTNDLIQYTLAIDRADNAVAHLYDPLHPAVLHLIAYTLREAKRAGVSVSVCGEMAGDPALTRLLLGMGLTEFSMHPSQLLVVKQEILRAHLKALEKPTADVLAAFEPEEVQAALQRLSVAEPRADAAA

SEQ ID NO: 47656 - protein, 250 aa, Burkholderia cepacia
MSHVVRRRPDARLILLLGALAACGPIATDMYLPSLPSIADSFSVSPGAAQRTLTSFMAGFSIGMLLYGPLSDTWGRRPVLLGGIALFTLASIGCFVSGSIDMLIVVRFLQALGAGAASVLARAIARDAHEPSDAAKVLSMVAIVTAVGPLLAPLIGGQILHFFGCAACFGCRPCLPPSSAFPLVSADPPLLSPSPVSPSFSLFPRSVAAAPAPVRPFPRGSPGCPAAPAAPFSSPRLCSGAVGARHFKTK

SEQ ID NO: 47657 - protein, 406 aa, Burkholderia cepacia
METYDIAVIGAGAAGMMSAAVAGQLGRRVVLLDHAPRLAEKIRISGGGRCNFTNLYAGPDNYLSSNPHFARSALARYTPRDFLGLLKRHHVTWHEKHKGQLFCDHGSDAIIDVLKHECDAGGIAWRRPVVVDAVRHAPSDGFTLDTQQAGPIGARALIVATGGLSIPKIGATDFGYRLAKQFGHKLVDTRPALVPLTFAPQDWAPFAPLSGVSLEVRVSTGDKKRGGEFVEDLLLTHRGLSGPGILQISSYWQPGDPIRVDLLPQRDTVADLLDAKRTSKRQIGSLLADWVPSRLAHAWLDTHRVAADARLADLPDKTLRQIGDALSGWTLTPNGTEGYKKAEVTKGGVDTRELSSATMMSARVPGLFFVGEAVDVTGWLGGYNFQWAWASGTAAGQAAAEYARGA

SEQ ID NO: 47658 - protein, 391 aa, Burkholderia cepacia
MQAFSGSSLAAPPVADHKEHVIDAMRGFAALLVAYFHCRQVVWVGMQSFHHAYGHALSPGVIAGYLTFPFAWGSAGVPIFFVISGYCIHRNAALKLAANPAYRLDAPNFWVRRFARIYPVLLAALLFTLALDAVSLQIEPVSHKIRDVGLVAFLVNLFSLQGVAGYTYGSNGALWTLSLEVQFYAVYPLLFALRRRIGMPAVVAAVALVNVASAWLLERHDLQFFTSYWLSWTIGAWIADVRAQQSRGMAVVPSRAWYVAAAVLLAAGCGAFHVGQYGAFQLWSAGFACFLYRALARPPRPTPPLRVLSWFGDFSYSLYLVHLPLFVCLGSVLFHSELQLSIWPSFAFMAVAIPVAYLFYRMFERPAMTWSASFKPTRAARVVASTPEQAV

SEQ ID NO: 47659 - protein, 253 aa, Burkholderia cepacia
NPVDLYPKPPFPHQVQAPPGLASRMQPRPDHGEQSYRGRGRLVGRKTLVTGGDSGIGRAAAIAFAREGADVAIGYLPVEESDAREVVALIRAAGRQAVALPGDIRDETFCQRLVARAAEALGGLDILVNNAARQQALDSIGEMTTEHFDATVKTNLYGMFWITKAAIPHLPPGASIINTTSVQAVRASANLLDYATTKAGIIAFTRSLAKQLGPRGIRVNAVAPGPYWTPLQSSGGEAPETDDKYGAGSPYGK

SEQ ID NO: 47660 - protein, 295 aa, Burkholderia cepacia
MLKVTKAVFPVAGLGTRFLPATKASPKEMLPVVDKPLIQYAVEEAINAGITEMIFVTGRSKRAIEDHFDKSYEIEAELEARGKEKLLELVRGIKPSHVNCFYVRQPEALGLGHAVLCAEKLVHGEPFAVILADDLLHGEQPVLKQLVDVFDHYHSSVIGVETIPREDSRSYGVVEGREWEEDIIKLSGIIEKPAPEDAPSNLGVVGRYVFMPTIFDHLRKLKPGAGGELQLTDAVQSLLANEQVLAYRYYGTRFDCGSKLGYLKATVELALQHPEVSREFEAYLRTCLPALAAVA

SEQ ID NO: 47661 - protein, 465 aa, Burkholderia cepacia
MSYTETIGPRTYRFADLKTLLAKASPLRSGDQLAGVAAASEEERVAAKIALAGVPLKAFLNEAVIPYEDDEVTRLIIDDHDAQAFADISHLTVGDFRNWLLSPAADGAALERIAPGLTPEMVAAVSKLMRNQDLIAAARKRRVVTRFRNTVGLAGRMSVRLQPNHPTDDVKGIAASMLDGLMYGCGDAMIGINPATDSLAAIVKLLAMIDGFRERYGVPTQSCVLTHVTNTIAAIEKGAPVDLVFQSIAGTEKANASFGISLALLGEAREAALALKRGTVGNNLMYFETGQGSALSANAHFGVDQQTCEVRAYAVARKFEPFLVNTVVGFIGPEYLYDGKQIIRAGLEDHFCGKLLGVPMGCDICYTNHAEADQDDMDTLLTLLGAAGINFIMGIPGADDVMLNYQSTSFHDQLYVREVLGLRRAPEFEEWLETMEIADAHGALRAATARVPLLAGANDWMGVSA

SEQ ID NO: 47662 - protein, 435 aa, Burkholderia cepacia
MSDSYFPRWRVQPTGASSRVVGPDERLAWPQMVAMGVQHVVAMFGSTVLAPLLMGFDPNLCIFMSGIGTLLFFVLVGGRVPSYLGSSFAFIGLVIAVTGYGGSGPNPNIPVALGGIVACGVVYVALGALVQAIGTRWIETLMPPVVTGAVVAVIGLNLAPIAVKGVSGSTFESVMALVTVLCVGGVAVFARGMMQRLLILVGLVIAYVIYAIATNGMGLGKPIDFAIVAHAAWFGVPSFRAPVFDPHAMLMLAPIAVILVAENLGHIKAVSAMTGTNLDRYVGRAFIGDGLATIVSGSVGGTGVTTYAENIGVMAVTRIYSTLVFALAALIAIGLGFSPKFGAVIQTIPGPVLGGVSIVVFGLIAVTGARIWVVNKVDFSDNRNLIVSAVTLVLGAGDFSLKIGGFGLGGIGTATFGAIILYAILRKEKEPGPVV

SEQ ID NO: 47663 - protein, 140 aa, Burkholderia cepacia
MTFFTNYTNLALIAILLVSGGLLAWPALRRGRGGLSAAEATQLINRRNAVVIDLRAASDFAAGHLPSARQVAAGEIGAKIAQVAKNKSTPVLLVCQNGQQSQKAAREVEAAGYAEVHVLEGGVAAWQQAGMPVVKQGVAK

SEQ ID NO: 47664 - protein, 454 aa, Burkholderia cepacia
MIEEADAQSREIVKSRALITVCIGFFMVSLDATVVNVALNSLRLSLHVGLSGLQWTVDSYTLAFAALLLSAGALGDIFGPKKVFNVGLIVFSLASALCGLSTSLGALLASRVLQGVGAALLVATSLSLLQKIFVEPADRARAFGVWGGVGGVAVAAGPVLGGFLISMFGWPSVFLVNVPFGILGVILSARYLPKMPGEARRINFGAQVLSAVALGALAFLFISAGAHGWSSRDVQIAAAAFAIATCLFLGIERFSANPMLPRGIFRSRIFSAATTVGMIINFGFYGQLFVLSLYFQQICKYSTMETGLALLPQAIVCSLTAFYCGRVTARTGPGFPMKVGLLAGALGLFGLTFANGNSSYVSVLIPMLAVGFGMSFTAPATVAAGMSAAPAGQAGIVSGVINAARQSGSVMGIAVLGGLIGLSSNFEYGMHLAFWVASVLFAGALLVTALRIRK

SEQ ID NO: 47665 - protein, 294 aa, Burkholderia cepacia
MTFEQWMRSVLDRVEDALGHYLPAETAMPAKLHEAMRYAVLGGGKRVRPLLCHAAGELTGATEAARNAAAAALEMIHVYSLVHDDMPCMDDDALRRGKPTVHVQYDEPTALLVGDALQSQAFVALTDADALSPVQQAALVRELALASGSIGMAGGQAIDLASVGLKLTREQLETMHRMKTGALLRAAVRMGALAGETPSTETMAALDVYAGAVGLAFQVVDDILDVTTDSATLGKTAGKDAANDKPTYVSILGLEASRELAAQLRAEAHDALKPFGARAQRLAELADLVVNRVS

SEQ ID NO: 47666 - protein, 403 aa, Burkholderia cepacia
MLNWDDEKTAVTPASGAQQNAMRTSAGMAVGMQAATPAAHQVRDIFEGDLAVPPQASAVPAGGTEARVNVADKRIINGQTDVNQLVPFKYKWAWEKYLAGCANHWMPQEINMSRDIALWKDPNGLTEDERRIVKRNLGFFVTADSLAANNIVLGTYRHITAPECRQFLLRQAFEEAIHTHAYQYIVESLGLDEGEIFNAYHEVTSIRAKDEFLIPFIHTLTDPAFKTGTLEADQKLLKSLIVFACIMEGLFFYVGFTQILALGRQNKMTGAAEQYQYILRDESMHCNFGIDLINQIKLENPHLWTAEFRAEIRELFKQAVELEYRYAENTMPRGVLGLNASMFKSYLRFISNRRCQQIGLDPLFPNEENPFPWMSEMIDLKKERNFFETRVIEYQTGGALSWE

SEQ ID NO: 47667 - protein, 169 aa, Burkholderia cepacia
MRRDRPHQPAANVKRRAHRVPARRQFSVIITTRLFRRAAAHCIVSARRSPGGTVPLASIASRRPIHHDTTEKNMQRSLIALAFAGLGLSLSGLAHAVNVDVNIGTPAPVVVAPAPVVVAPAPAIIVGWHGDRYWDGRRYWERREWEDHQRYRGRGGYHCPPGHAKKGEC

SEQ ID NO: 47668 - protein, 484 aa, Burkholderia cepacia
MTYQVLARKWRPKDFASLVGQEHVVRALTHALDGGRLHHAYLFTGTRGVGKTTLSRIFAKALNCETGVTSQPCGVCRACREIDEGRFVDYVEMDAASNRGVDEMAALLERAVYAPVDARFKVYMIDEVHMLTNHAFNAMLKTLEEPPPHVKFILATTDPQKIPVTVLSRCLQFNLKQMPAGHIVSHLERILGEERITFEPQALRLLARAAQGSMRDALSLTDQAIAYSANEVTESAVSGMLGALDQTYMVRLLDALAAGNGPEILAIADEMSLRSLSFSTALQDLASLLHRIAWAQFAPGSVLDEWPEAADLRRFAETLSPEQVQLFYQIATVGRAELGLAPDEYAGFTMTLLRMLAFEPAVGAGSAPGGQPSVPPRAVPAPRATAAPAAAAAKPVSAAPASAARPPAATPAAPVARSAPVQSSDETERPTAKPAAVQSPAEAAPEPVAADVQAVEPPQPETKAAPAGDTPPPARKEPEPPAVA

SEQ ID NO: 47669 - protein, 209 aa, Burkholderia cepacia
MAKEKFERTKPHVNVGTIGHVDHGKTTLTAAITTVLTKKFGGEAKAYDQIDAAPEEKARGITINTAHVEYETANRHYAHVDCPGHADYVKNMITGAAQMDGAILVCSAADGPMPQTREHILLARQVGVPYIIVFLNKCDMVDDAELLELVEMEVRELLSKYDFPGDDTPIVKGSAKLALEGDTGELGEVAIMSLADALDTYIPTPERAV

SEQ ID NO: 47670 - protein, 110 aa, Burkholderia cepacia
RCAARLFVTRRVYHELTRTPGQFPDIDAIAEILCMTSRTLRRKLEAEGTSYSELLTIFRKALAIFYLITTTLITEDIALTLGFSDAVGFRHAFKRWTGTTPSDVRRKRGG

SEQ ID NO: 47671 - protein, 295 aa, Burkholderia cepacia
MTALLELAHTQHYPDATLYVVATPIGNTADITLRALHVLGLADRIAAEDTRNTGQLLARYGISKPLVAVHEHNEREAAQRVIELLRGGERVAYVSDAGTPGISDPGARLVDAVRAAGFAVVPLPGASAAVTALSVAGDWAGAFTFAGFLPPKAKQRASALQALVSHPYALVFYEAPHRIAETVAALADAFGPARRLLIARELTKLHEQLFQGTLAEGQGWLAGDANRQRGEFVLVVEGAPAASGEADDAAHDALLRLLLEEVPVKSAAKLAAALTGASRNALYARALVLKEGTEG

SEQ ID NO: 47672 - protein, 140 aa, Burkholderia cepacia
MVRRWVASYREHGEQGLRKKHSHYDARFKLSVLQRMRRDELSYAQVAALFGIRNERSIPIWERLYHEGGIDALAPRRRGRPPKMTTSPPPKSPDDTVQKEPSREELLKEIVYLRAEVAYLKKLDALLQSKKQAAPRKKRK

SEQ ID NO: 47673 - protein, 354 aa, Burkholderia cepacia
MGGFARQDRMTLEMMGSMDLDQIVADAQQSFEQAADITTLENEKARFLGKSGALTELLKGLGKLDPEARKTEGARINVAKQQVEAALTARRQALADALLNQRLTAEAIDVTLPGRGAGAGSLHPVMRTWERVEQIFGSIGFDVADGPEIETDWYNFTSLNSPENHPARSMQDTFYVEGKDADGRQLLLRTHTSPMQVRYARMNRPPIKVIAPGRTYRVDSDATHSPMFNQVEGLWIDENISFADLKGVYTDFLKKFFERDDILVRFRPSYFPFTEPSAEIDMMFEQGKNAGKWLEISGSGQVHPTVIRNMGLDPERYIGFAFGSGLERLTMLRYGVQDLRLFFENDLRFLRQFA

SEQ ID NO: 47674 - protein, 375 aa, Burkholderia cepacia
MPAETRANEARVAATPETVKKYAAAGHRVSIAKGAGSAASYPDEAYVAAGAELTDQSAAFAADLVLKVQAPTDAELPLLKRGAVLVGMLEPFNGEQAAKLAAAGVTGFALEAAPRTTRAQSLDVLSSQANIAGYKAVLVAASLYPRFMPMLMTAAGTVKAARVLILGAGVAGLQAIATAKRLGAVIEASDVRPAVKEQIESLGAKFLDVPFETDEEREAAQGVGGYARPMPPSWLGRQAALVHERAKQADIVITTALIPGRPAPTLISVDTAQSMKPGSVLVDLAAGRGPEIDGRKGGNCPLTVADQVIVHHGVTIAGYTNLASMVASDASALYARNLLDFMKLIVTKEGTLNIDLTDDIVAATLLCRDGELARK

SEQ ID NO: 47675 - protein, 1001 aa, Burkholderia cepacia
MQTTDNATSQYESASSRPLGGTEQGAKALAPQATFADYKVIRRNGSVVSFEPSKIAIAVTKAFLAVNGGQGAASARVREQVEQLTHNVVRALVRSRPNGGTFHIEDIQDQVELALMRGGEHNVARAYVLYREKRHLERQHAGEEAAAAGGESTTGINVVDNGVTRPLDLNALRALIVSACDGLGAAVNPDPIVAETVKNLYDGVPMSQVYDSAILAARTMIEKDPAYSQVTARILLHTIRREILGEEVVQAEMSTRYAEYFPQFLKRGVDAGLLDDKLLQFDLKRLGEALDANRDLQFGYLGLQTLYDRYFLHVDGTRIEMPQAFFMRVAMGLSLNEIDRETRAIEFYNVLSSFDFMSSTPTLFNSGTHRSQLSSCYLTTVADDLDGIYEALKENALLSKFAGGLGNDWTRVRALGSHIKGTNGKSQGVVPFLKVVNDTAVAVNQGGKRKGAVCAYLESWHLDIEEFLELRKNTGDDRRRTHDMNTANWIPDLFMKRVMEGADWTLFSPSTCPDLHDKFGADFEKAYTAYEDKVARGEIKLFKKIPAQQLWRKMLGMLFETGHPWITFKDPCNVRSPQQHVGVVHSSNLCTEITLNTSDTEIAVCNLGSVNLVAHLVKQADGSYALDHDKLKRTISVAMRMLDNVIDINYYAVPKARNSNLKHRPVGMGIMGFQDCLHLLRTPYASEAAVEFADRSMEAVCYYAYYASTELAEERGRYSSYRGSLWDRGILPQDTLKLLTEARGGYVEVDTSESLDWTTLRSRIAAHGMRNSNCVAIAPTATISNIIGVSACIEPTFQNLYVKSNLSGEFTVVNEYLVRDLKERGLWDEVMVADLKYFDGMLSRIDRIPADLRAIYATAFEVDPTWLVEAASRRQKWIDQAQSLNIYMGGASGKKLDEVYKLAWLRGLKTTYYLRTMAATHVEKSTVAHGALNAVPTGGAGSGGSGSGGAQGAAGGFGAAGGDASSGAINAAPALAPVEADGPVCTMRPGDPGFDECEACQ

SEQ ID NO: 47676 - protein, 192 aa, Burkholderia cepacia
MSRREWLKLAALFTATGAAPLLSMANAHAAAEPDAPVRIGYLPITDAAPLLVAHNNGYFASEGLTVEQPKLLRSWAQLVEAFLSGQVNVVHLLSPMTLWARYGSRAPAKVVAWNHVNGSGLTVAPDIDSLRDLGGKTVAIPFWYSIHNVVLQDMLREQGLVPVLKRRGTPAANEVNLVVMAPSDMLPALAAR

SEQ ID NO: 47677 - protein, 156 aa, Burkholderia cepacia
MRLVGIENEPLGIVKLADAFRKSEELDVDLVEIAPQAVPPVCRLMDYGKFKYQESKKQHEAKLKQKVIQVKEVKFRPGTDDGDYNVKLRNLVRFLEEGDKTKITLRFRGREMAHQEIGMRMLERLRTDLEEVGQVEQMPKMEGRQMIMVLSPKKKK

SEQ ID NO: 47678 - protein, 667 aa, Burkholderia cepacia
MDDENDSAVLEAHVGTRSPCWRLGSDSNALELAAVRGLTNVAIALTVEQAARIRALTGVTSHLVLDILLFGNPVSLHLVGRKVNTVDWAGTASAYSDTESVAGDLSHGLAFAEQVVSEVNSLVVILDRNGMVQRFNRLCEEVTGKREVDVIGRSAFELFMSPEQGAQSRSNITGFFASNQSFAVERYINTVNGPRLFQFRNKFVQSGSGVDEQYLICSGIDITEERNAQQRLTELANTDVLTGLPNRHAISERIHAAIAAESEQTRGQVGILFLDLDNFKRVNDHYGHITGDRLLQDVSAIISGCLPSGATLARLGGDEFLVLFEQGTRPLLEATAQIILERLRTPIHLGLMEVYTSCSIGIAMHPQHGDSLETLIRSADTAMYVAKEEGKHTYRVFSLEMNQKVAKYMWLDTNLRKALEEEQFVLHYQPVVDIATGDVHGVEALIRWQSPDRGLVAPVEFIRFAEESGLIAPLGRWVMRTAAAQAAAWKAKGLGIRIAVNVSARQLQDMNIVHQFASILDGAGLKPGLLDIELTESCFIEDEDAAIGLMRQFRQLGAEIHLDDFGTGYSSLSQLSRLPLDAIKLDRTFITAIDRNPRSQALVRSVVSLAKALNFAVVAEGVETHAEAEFLKQLDVDHAQGYYYARPMPAQAFEAWLAETRKLRLIA

SEQ ID NO: 47679 - protein, 297 aa, Burkholderia cepacia
MATIGFIGLGIMGAHMARNLLKGDHQLVVNGAFPIPDDLRGSAKVVANSTEVAQHADIIISMVPDTPDVRNVLFADDGVAKGLTAGKLVIDMSSISPLDTQAFAKQINALGCDYLDAPVSGGEVGAREATLTIMVGGPEKAFERAKPLFEKMGKNITLVGDNGAGQTCKVANQIIVALNIEAVGEALLFAARSGADPERVRQALMGGFAASRILEVHGARMTKRTFDPGFRIELHQKDLNLALDGARKLGLALPHTASAQQLFSVCASHGGKAWDHSALVRALEIMSNFEIGQTPAA

SEQ ID NO: 47680 - protein, 656 aa, Burkholderia cepacia
MKKSASPLHAFRFRVVCAAIAGAVSLASCGGVDSDAPPSQAGATPAPTPTQAAKRPNILYIMADDLGYSDIHAFGGEINTPNLDALVASGRILSNHHTGTVCAITRAMLVSGTDHHLVGEGTMGVPTDERRGLPGYEGYLNDRALSFAQLLKDAGYHTYIAGKWHIGSGIVGSTTGSGQTPDQWGFERSYVLLGGAATNHFAHEPAGSSNYTEDGRYVQPGQPGQPGGAGGSPAVFYSTDFYTQKLISYIDANKQDGKPFFAYAAYTSPHWPLQVPDPWLHKYAGVYDAGYDAIRNARIARQKALGLIPADFKPFDGLPETTVASPATANNGTAGAKYINAVHSAADGYGDYGPGKVDKLWSSLSPAERKAQARYMEIYAGMVENLDYNIGLLIQHLKDIGEYDNTFIMFQSDNGAEGWPIDSGADPTATDTANAQEPTYSALGTDNGKQNAQRLQYGLRWAEVSAAPFRLTKGYSGECGVSTPTIVHLPGQSQPLPTLRAFTHVTDNTATFLAVAGVTPPSQPAPPLVNTLTGVDQNKGKVVYNNRYVYPVTGQSLLPVLTGSATGEVHTTPFGDEAYGRAYLRSADGRWKALWTEPPLGPLDGHWQLYDLASDRGETTDVSAQNPSVIGTLVDQWKAYMSNVGGVEPLRPRGYY

SEQ ID NO: 47681 - protein, 121 aa, Burkholderia cepacia
MARIAGVNIPNHQHTEIGLTAIFGIGRTRSRSICVAAGVDFSKKVKDLTDADLEKLREEVGKFVVEGDLRREVTMNIKRLMDLGCYRGVRHRKGLPMRGQRTRTNARTRKGPRRAAQALKK

SEQ ID NO: 47682 - protein, 300 aa, Burkholderia cepacia
MSSNLAVSVENLSKVFHIYDSPRARLMQMLLGSRKQFYREFWALRDISFDIVPGETVGIVGHNGSGKSTLLQVISGTLTPSAGRVATSGKVAALLELGSGFNPEFTGRENVMLYGQILGMSREEIEEKYPAIVEFSEIESFIDQPLKTYSSGMYVRLAFSVAIHVNPDILIVDEALSVGDAMFQAKCMAVMKKLMDRGTTLLFVSHDPGAVKALCDRAILLDHGNMLASGSTDDVIEAYYSSYVRKRQRVVSDEAQAVTQPLELDADISTGAEEFQKRAGFQRIRNGRATFVNVQLYDEW

SEQ ID NO: 47683 - protein, 262 aa, Burkholderia cepacia
MSESEKNRSAPRWTLDRQSLELDVRRTLEMPSRRLFNRRVLTLGGLAMLTGCTLQDDASVNTFLEKVSRMNDRVQAWLFNPDRLAPTYAEADITRPFPFNAYYGIDDVPHVDESTYRLVLSGRVTGKRVWTLDELRALPHAEQITRHICVEGWSAIGRWGGTPFGAFLARAGADTRAKYVGFKCADDYYESIDMPTALHPQTLLAFDYDGRRLPPEYGFPMKLRMPTKLGYKNPKHIMEIFVTDTFPGGYWVDQGYNWFGGS

SEQ ID NO: 47684 - protein, 363 aa, Burkholderia cepacia
MIGRTWLQQALPITLGLKFAQWLDALLRHRARFAELRERALVLQFGGAAGTLASLREHAAGVSAALAADLKLAVPAVPWHTQRDRIAEAAACFGMLTGTLGKIARDVSLQMQTEIGELGEPAAAGKGGSSTMPHKRNPVGCAAVLTAAVRAPNLVATVFAGMVQEHERALGGWQAEWDALPDLARLTGGALAQIAQIVAGLDVNTERLAANLELTHGLILGEAVMLALGDRIGRLDAHHVVEHASKEAVRTGATLFDVLSRCATVLVPLARAGLARSGAPALPLVPPGAWLLPRPAPAPLFLSPGPLLSLFFRLAALLPLPPPSPAARPPPLAPPVPPPPRPRPPPAPPPLPLPRPPHNPKKQ

SEQ ID NO: 47685 - protein, 345 aa, Burkholderia cepacia
MLTVYSSDHHLHRGVELKDGAITESFEHPLRAETVLAQVRAAGLGDVIAPRAFDRASYAGAHSARYVDFLAGAWDEWTATGRTCQALPLVWPVRAMPAAATPPGFIDGKLGFFAMDAGAPINAGTWDAVSASANSALTGADLLSEGGARAAFALCRPPGHHAGREYMGGYCYLNNAAIAAQHGIARGAARVAVLDVDFHHGNGTQDIFYERSDVLFASLHGEPSVSYPYFSGYADERGAGVGAGFNLNLPLPKGTRWDTYSAALDHAAAAIAKHAPDLLVVSLGVDTFEHDPISHFKLRSPDYLRIGETLARLNLPTLFVMEGGYMVDEIGINAVNVLLGFEGRA

SEQ ID NO: 47686 - protein, 62 aa, Burkholderia cepacia
MKTKKSAAKRFVVRPGGTVKRGQAFKRHILTKKTTKNKRHLRGATAVHDSDLNSVRAMLPFA

SEQ ID NO: 47687 - protein, 87 aa, Burkholderia cepacia
MPAYRRQLEERKLTQSMSRKGNCLDNAAMESFFGTLKSECYKGHRFTCVSHLRDTLDHYIHYYNHERIKLKLKGLSPVQYRTQPLGA

SEQ ID NO: 47688 - protein, 464 aa, Burkholderia cepacia
MNRVLLFKSMITALLALAILIPLQMVQSIVRERADYRQSALQSIWASYAGPQTVTGPVLVVRYTEVTRASDDVRAGGKAKTVLKSEAKRLLVFPKTLNVDGTLSVSTRYRGIHKALVYGLDSRMTGTLPLPDLKKLPQADGHVSFKIDSAVVALGIGDLRGLKAQPDLRIGGKRIDVEQGTRLESLRQGVHANVDLAALAEANAGATVVPFSIGLPLAGAESVAFAPVGDQNDFSLKSTWPHPSFGGEFLPAERTIDARGFVSNWHVTSFNTKAREQVASGNGNGDGGIEMASVSVIEPVNVYLQAERATKYGALFVMLTFASFFMYELVKRLRIHPIQYTLVGLSLALFFLLLLSLSEHIAFGYAYLAASGACIGLLGFYLSFVLHSVKRGATFTALLAMLYAALYGLLLSEDNALMLGSLLLFAILAGIMTLTRRVDWYSLGAAWQPLADKPTAMKPGAPAK

SEQ ID NO: 47689 - protein, 584 aa, Burkholderia cepacia
MGGGAVQGSWVTNLTAGAGIRTKNPSCSLTGDPNAFGCGAGANTNQWGYADNGDLNYRKGQPFSTYVSATSELLLKMPSEGLKFMVRGTGMYDFMAKNTNRTPLSSTAAAQVVYNAQLLDLWAQKDFTLGGRNAHVRLGNQVINWGESMFAQSGINATNSIDTQKLLIPGSQLKQALLPAPMVSLAADLSHGFSTEAYYQFQWNGNRYPPVGSYWSVTNGFGRGAEPFTINTNNLNVTGPSAGTIANAIGGSGAAGNQDTLNAIRNGLVNGAYAGPPFNDIGLPSTTTLPAKYRPQFGVKFNYSPRAFDANFAFYYLNYTDKSPVLASLANGTEQWSYLGRRQLFGVSANFGVGPWAIGTELSYRPRDAVALSSCYGAGGPLDLNTNGVAGIDCQQWVDKKKFQYDINGLLALTRSEYPFLKLLGADSAALTWELTWIYYPGLKSSGVTRTIDGQTVTQVPQTGYLPWLNNGSAAGYPIGMAQGTSSSVGATIDFNWTYDGSLIPGWQVTPGVTFSTGLYGYTPTFTANYVQGAKSLNVYVLFNQNPPNWQAGINFTSFWGGHNTVGQPYADRNFVGLFVTRNF

SEQ ID NO: 47690 - protein, 703 aa, Burkholderia cepacia
PSAPPPTPATPISMRRATPPTRSASVAAQRRADLLVRKMTLDEKLQFIHSQYEMSKVPGGGAGYIQGVPRLGIPDLNMVDSATGSGSTSQASTTFPATIAVAASWDRRLSYDFGKQVAIQLRAQGFGMGLGGGTNLAREPRGGRLFEYLGEDPLLAGDLLAERTLATQRQKVIATIKHYAGNEQEHGRMGGNTQIDERTLRELYLLPFEIAAKRGRPGSVMCSYNRLNGAYACENPHLLNDVLKNEWGFQGQVQSDWGATHSTAAAINAGLDEEEDVGPSVYLTPAAVKQAIANGSVSTARLDDMVRRKLAVMIRVGVMDDPAKGGGTIDFAAGNRFAQAASEQSIVLLKNDGNQLPLVASALSRIAVIGGHADAAVLSGGGSGNTRDPVTGSFAGCGGLTFGSSTGCSWWRNPWLKVDVPIVAAIRALAPAAQVTYAGNSDQQSPFRAYTQQEIDQAAALAGRSDVAIVVVAQPAGEDFGDLQSLSLANPSNQDALVEAVARANPHTIVVVQSGNPVLMPWKDNVSAIVEAWYPGEAGGKAIANVLFGAVNPSGKLPVTFPARDQDSPTWGQNGAFETDPVYAEKLNMGYRWYDARNIKPMFEFGYGLSYTHFAYSGLSVSKQWDGSLSVAFTVRNDGRVAGAEIPQVYLGVPYKDEPPKRLVGWEKIRLNPGEARRVHITVSPRMQSVWDTSRNGWRVVSG

SEQ ID NO: 47691 - protein, 238 aa, Burkholderia cepacia
MSPYIAEFIGTAILVLLGNGAVANVLLAKTKGKGADLIVIVMGWAMAVFVAVYVTASFSGAHLNPIVTISLALAGKFAWSKVGGYVLAQMLGGMAGALLVWLAYRQHFAKEADADLKLAVFCTAPAIRSVTHNVLTEAICTFVLILGVLYLASPQVGLGALDALPVGLLVLGIGISLGGPTGYAMSPARDLSPRIMHALLPIPGKRDSDWRYAWVPVVGPLLGGAAAAGLYLHLHTTI

SEQ ID NO: 47692 - protein, 410 aa, Burkholderia cepacia
MTTSTVTRQTFDEVMVPVFSPAPFVPDRAEGSRVWDTAGREYIDFACGIAVTSLGHGHPELLKVLDEQGRKLWHIGNGYTNEPVLRLAKRLESLTFADRAFFANSGAEANEAALKLARRVAFDRHGADKYEIVSFVQSFHGRTFFTVSVGGQPKYSEGFGPVPQGIKHLPFNDIEAAKAAIGPKTCAVIVEPVQGEGGVIPADPAFLKALREACDANDALLIFDEVQTGVGRTGQFYAYMDTGVTPDILTTAKALGNGFPIGAMLTTNELAAHFKVGVHGTTYGGNPLASAIADKVVELIGDPALLEGVRERSVRLKGALERINARFGIFKDVRGKGLLVGAELTAAFDGRAKDFVTAAAENGLIMLIAGPNVLRFVPSLVIPFDLLDEGVKRFEKAVEQVLAAQEATAR

SEQ ID NO: 47693 - protein, 653 aa, Burkholderia cepacia
  MISC_FEATURE (319)..(319): X=any amino acid
  MISC_FEATURE (327)..(327): X=any amino acid
IRKVAVLGAGVMGAQIAAHLINARVPVLLFDLPAKEGPKNAIALKAIENLKKLSPAPFGVKDDAKYLEAANYEDDIAKLAECDVVIEAIAERMDWKHDLYKKVAPHIASHAIFATNTSGLSITKLSEGFSDELKSRFCGVHFFNPPRYMHLVELIPTAHTRPEILDQLETFLTSVVGKGVVRAKDTPNFIANRVGIFSILAVITEAAKFGLRFDEVDDLTGSRLGRAKSATFRTADVVGLDTMAHVIKTMQDNLADDPFFPVYQTPAVLAELVKQGALGQKTGGGFYKKEGKAIKVLDAKTGTYVDRARRRTKRSAASXSVRRRNAXRLLRETDHPHAQFLWSIFRDVFHYIGVHLESIADNARDVDLAIRWGKGWNEGPFEGWQAAGWKQVAEWVQEDIAAGKALASVPLPSWVLEGPVAEKGGVHTAEGSWAPAAKRFVPRSDLAVYGKQVFRAPLLGEAGADPKTYGKTLFETDAVRAWVDDRAGEDDVVIVSFKSKMNTIGPSVIDGLVQAIELAEKDYKGVVIWQPTSLKLGTPGGPFSAGANLEEAMPAFMMGGAKGIEPFVKKFQEGMLRVKYANVPVVAAVSGIALGGGCELMLHSAKRVVHVESYIGLVEVGVGLVPAGGGLKEAALRAADAATAANATTDILS

SEQ ID NO: 47694 - protein, 1270 aa, Burkholderia cepacia
PRFGTVSPWASKATDIAQHCGLTQVRRIERGVEFTVTLKSGLLGGKKALSDDARAAVAAALHDRMTESVIAARDDAKHLFDELPAKPLSTVDVLGVGRGALERANVELGLALADDEIDYLVDAFRKLERNPTDVELMMFAQANSEHCRHKIFNAQWTIDGEAQDMSLFAMIRNTEKLSPQGTIVAYSDNSSIMVGAEASAGSRARPVRPASRASATAATPNSRTTLMKVETHNHPTAISPFPGAATGAGGEIRDEGATGRGARPKAGLTGFTVSNLDLPDARQPWENARDAAQPVAERNPNEQHGPYGRPDRIASPLQIMIDGPLGGAAFNNEFGRPNLGGYFRVYEQNVGGTVHGYHKPIMIAGGLGNIADQHTHKHDVPAGSLLIQIGGPGMRIGMGGGAASSMATGANTAELDFDSVQRGNPEIERRAQEVINGCWQLGAENPILSIHDVGAGGLSNAFPEIVDGAGKGARFELRKVALEESGLSPREIWSNEAQERYVLAIAPADLPRFEAICARERCPFAVVGVATDERQLKLVDDEATGADEYPVDMPMEVLLGKPPRMHRDVTRVNTERAPVDVTGIALSAVALDVLKHPTVGSKSFLITIGDRSVGGTSVRDQMVGPWQVPVADCAITALDYAGFKGEAMTMAERTPLAVIDAPASGRMAVGEAITNIASAPIASLDKLKLSANWMAACGTAGEDAALFDTVKAIGMELCPALGIGIPVGKDSLSMKTKWDEQGVAKEVVSPVSLIISAFAPVEDVRRHLTPQLRRVADAGDSVLIAIDLGRGKNRMGGSIFAQVTQQVGDTTPDVDDAEDLKRFFNAIQSLNAQDKLLAYHDRSDGGLWATVCEMAFAGHAGVSLNVDMLTLDPNHESDYGDAKDWAKQTSGRRDDRTLRALFSEELGAVVQVRASDRDAVLGALREFGLSTCSHVIGSVNDRDVIEVYRDAKKIFDAPRTELHRAWSEVSWRIARLRDNPACADAEYDALLDAADPGLSPVLTFDPADDIAAPFIATGARPRVAILREQGVNSHLETAYAFDRAGFDAHDVHMSDLLAGRATLADFAGAVACGGFSYGDVLGAGEGWAKTIRFNANLADMFSAFFARSDTFALGICNGCQMLSSIASMIPGAQAWPKFTRNKSEQFEARFSFVEVEKSPSIFFAGMEGSRIPVAVAHGEGYADFSQQGDIDRVAVAMRYVDHRGEATERYPFNPNGSPAGITSVTTADGRFSVLMPHMERVHRTVTMSWHPEGWGDASPWMRVFRNARRW

SEQ ID NO: 47695 - protein, 346 aa, Burkholderia cepacia
MCAVKPGVTAPGDQKQAPMSDISYTSSRSPDSAQQRAPSRLGDVLFGGLARLAAIVTLLLLGGIIVSLIIASMPTIQKFGIGFLWQSEWDPNSDVYGALVPIYGTIVTSIIALVIAVPVSFGIALFLTELAPVWLRRPLGIAIELLAAIPSIVYGMWGLLVFAPIFAEYFQKPLGRLFKDVWVLGPLTSGPPIGIGILAAGVILAIMIIPYIASVMRDVFEVTPVLLKESAYGIGCTTWEVMWKVVLPYTKTGVIGGVMLGLVCALGETMAVTFVIGNTNLLDSVSLFAPGNSITSALANEFAEAQPGLHTSALMELGLILFVITFIVLSISKLLLLRLEKGEGKK

SEQ ID NO: 47696 - protein, 939 aa, Burkholderia cepacia
MLSLHNIASAAQTRNYFSKDNYYTQDENTKHSAWFGAGAARLGLAGQVQPAAFLNLLEGRVEEQQLGKWVTDEETGERRQDHQPGIDITFSAPKSVSLMAEVAGDTAVRDAHEAAVQSALAYLEENVIRTRSTQNGVTSIEHTGNMVAALFKHNTSRDLDPQTHTHAVVMNATLRADGKWRSIDNREIYQTQKLAGAIYNAELVSGLQQLGYRLTNPDRHGNFEIQGISREQIEHFSQRRTAMKEKLGKRQLELDTASAADKERAALATRERKVDVDHEQLLADWQARALEQGIDLGALRATAAERKAEGIDPPTKLTGRQALAFAAAHLIEREAVVDKSDLVETAVVHGTGRVSPQEVMKAFRQLEKNGDLVPLPDEKYTTRKMLESERWALDFVKQEKGNAPVVLEATKVQERIAEAERLQQFSYTFGQRDAIVLALTSKDRFVAIQGLAGTGKTTMLRTLNDIAAAEGYVVRGMAPTGAAAKVMVKETGIAAETVAMFQIKERQLQKDIEFAQQFAPDFKRKPEVWVVDESSFLAQRQMAQLHRLAEHAGAKVVYLGDTLQLQGVEAGKPFELAQKDGIATAYMTDINRQKTDVMKEAVDIITGRNQLDAGTRLTDIELKRNGQSFQYLSQQGRVHETDEVVTSTVDKILAMSPEERARNITITPLNRDRVAINEGVRVGLQARGELSKNESTHEILVSKGFTRAQIKEAQYYERGDVVRFNRTYQQINADKGDYTRVIDVDHESGIVTLRKRDGSTLAWEPAKHNKVEVYDPDLRQLAVGDVIRLTRNDETFKNGETARVVQLTGEHAVLQVDDRGVISHHSVNLETSQHWDHAYASTVHAAQGASRNTTIFAINMPDNEDKKAQEREFQALAKVFGDRSYYVGVTRASHDISIVTNDIDLAQRAITGKLDKTTVIEAMNQEVREQTIQREQHEI

SEQ ID NO: 47697 - protein, 323 aa, Burkholderia cepacia
MKTTFLDFEQPIAELEAKIEELRFVQDDSAVDISEEIERLSKKSQQLTKDLYANLSPWQVSQIARHPQRPYTLDYVAELFTDFHELHGDRAFADDLSIVGGLARFGGHPCMVIGHQKGRDTKERAARNFGMPRPEGYRKAERLMRLAEKFGLPIFTFVDTPGAYPGIGAEERGQSEAIGRNLYVMAELKTPIITTVIGEGGSGGALAIAVADTVMMLQFSTYSVISPEGCASILWKSAAKAPEAAEALGLTAHRLKALGLIDKIINEPLGGAHRDPKGMAALLRRALADSLRQFQGMSIDALRERRFERLMAYGKFKETTPGA

SEQ ID NO: 47698 - protein, 249 aa, Burkholderia cepacia
MTHRSTWLRVAAAFCVAGAAWSAAPAHAGMFDDNEARRAVLDLRSKSDNLSSQLSAAQRTILDQSGRIDQLNQQVATLRGENEDLTNRLTTLERQQKEYYQDLDTRLKKFEPQQATIDGVEGTVQPGETDALSAAQQQFRNGNFKAAAASFRAFIAKYPQSPYQPTAQYWYGNAQYALRDYRGSTATWQGIVSKFPQHPRAADALVAIGTNQLEQGQKAAAKKTFEQVVSQYAGSNAAQTAQGKLETIK

SEQ ID NO: 47699 - protein, 262 aa, Burkholderia cepacia
MSGSNTGLGTGLKQRHVTMMSIAGVIGAGLFVGSGHAIAEAGPASILAYAIAGVLVVLVMRMLGEMAVAHPDSGSFSTYADRAIGHWAGFTIGWLYWWFWVLVIPIEATAAATILNAWFPGIATWIFALGITLLLTITNLFSVKNYGEFEFWFALIKVVAIVVFLCIGGAAIVGISPAPSVSGVSNLFVHDGFMPHGASAVLATKLKTMFSFLGTEIVTIAAAESDNPQRQIVRATNSVIWRITLFYLGSILVVAAIVPWND

SEQ ID NO: 47700 - protein, 70 aa, Burkholderia cepacia
MTIIRVKENEPFEVAMRRFKRTIEKNGLLTELRAREFYEKPTAERKRKKAAAVKRHYKRIRSQTLPKKLY

SEQ ID NO: 47701 - protein, 202 aa, Burkholderia cepacia
MEHEVSESIARNPVPNPKVALRKTLSGARRDAASQPAANAALDARLRMLLDRLAPRTVGFYWPLPGEFDARDAVLAWCAAGAGRCAALPVIGERHTPLAFHAWDAHTPMREGHHRIPEPASGIVVVPDLLLIPCVGFDPQRYRLGYGGGYYDRTLAAWPGDTLPVTVGIAYEACRVDALPAETHDLALRWIVTDGALYPAAG

SEQ ID NO: 47702 - protein, 202 aa, Burkholderia cepacia
MEYTFLSATVLLVLITDPLGNIPLFISAMRDVPRERRVKLILREVGIAFMILLFFMVVGDRFLRMMSLTDLSLRLGGGIVLFLIALRMIFPHPDGALGSDPRAGGEPFIVPLAIPALAGPSALATVMLLTSQAPGKMFEWVGALTVTMIVCAITLVLAERIQAWLGERTVAAFERLMGLVLVAISVEMLLAGIRAFVHQLQP

SEQ ID NO: 47703 - protein, 265 aa, Burkholderia cepacia
MIETPTSGSLTIDGKNVAGASRDTVADLRRRVQMVFQNPFASLNPRKTVEQTLAEPLEINANLTAAERAARIAQIMRTVGLRPEHAKRYPHMFSGGQRQRVAIARAMILDPRIVVADEPVSALDVSIQAQILNLFMDLQEQFKTSYVFISHNLSVVEHVADDVMVMYFGSVAELGDKATIYARPRHPYTRALMSATPAIFEEDRRVQIKLQGELPSPLNPPSGCAFHQRCPYAVERCRVEEPQLREVDGRRVACHRAEEVGEANA

SEQ ID NO: 47704 - protein, 295 aa, Burkholderia cepacia
MALPASPGIPVSRPISSKQESEKQMKRRSLLKVFSVLATGAALTLSAGAHAEDKVIKVGTVAGPDSEVWQVVQKVAKEKEGLNVKVIEFNDYVQPNAALDSGDLDANSFQHQPYLDSQVKQRGYKIVSAGLTYISPIGVYSKKFKSLKDLPQGAKLAVPNDPSNENRALLLLQTQGVIKLKAGAGTGGNNATVLDIAENPKKLKISELDAAQLPRVLSDVDAAVINTNYALAANLQPTKDAIALESLTSPYANLIAVRAKDKDQPWVKKLVKAYQSPEVKEFIKKQFKGSMVASF

SEQ ID NO: 47705 - protein, 297 aa, Burkholderia cepacia
MNATVQTAAPAAPTAIRTPWREFWRKFRKQTVALVAGGFVLALVVLAFVGPHIVPFDPENYFDYDALNAGPSAVHWFGVDSLGRDIFSRIVAGTRISLAAGFFSVALGAVIGTFFGLLAGYYEGWWDRITMRIADVLFAFPGILLAIGVVAILGNGMVNVICAVAIFSIPAFARLVRGNTLMLKHMTYVEAARSIGASDWTIIMRHILPGTVSSVVVYFTMRIGTSIITAASLSFLGLGAQPPTPEWGAMLNEARADMVTAPHIAVFPSLAIFLTVLAFNLLGDGLRDALDPKLERR

SEQ ID NO: 47706 - protein, 530 aa, Burkholderia cepacia
MNQPASSAPNNPGSVARTRQVGYAAFLLVLVLGAVYIATHLVADLAPVREGTLFPYLLLGAALLIALGFEFVNGFHDTANAVATVIYTHSLTPNVAVIWSGMWNFLGVMVSSGAVAFGILQLLPVELILQVGSGSGFAMVFALLIAAIVWNLATWYFGLPSSSSHTLIGSIIGVGLMNQLMHGPSGTSGVDWGQALGVGKSLLLSPIVGFLCASLLLLVLKALVRIPELYKEPPKDQPPPFWIRCLLILTCTGVSFAHGSNDGQKGMGLIMLILIGTVPTAYALNKAVTPAESQTFVAVANQAAATFGKYTNGIAPSANPRADVEHYVQHRELTPAVLPAVAQLSTSLATAVGASGSMAAVPQRDVDNVRNTMYLVSEAIRLIEKSGQPAFAAADKLAIDNYRKQLDHATKFIPTWVKVAVAIALGLGTMVGWKRIVVTVGEKIGKQHLTYGQGASAELVAMLTIGAADMYGLPVSTTHVLSSGVAGTMAANGSGLQWSTVRSLVLAWVLTLPASIALAAGLYWLFRSLA

SEQ ID NO: 47707 - protein, 529 aa, Burkholderia cepacia
MQPASPIGRGRTCGFSSRTIAKTHFRAGRRGAWRRYPTPMPFLFYRPILRFDVLGPNDISRMQPKGSQMNVSAFDLFKIGIGPSSSHTVGPMIAACRFASHVEDANLLGFVRRVRVELYGSLGATGKGHGTDKAVLLGLEGHLPDTIDPDLIEPRLAAIRAEKTLSLLGKQTVRFEEKEHIGFFRKLMSGTSIVHPNGMRFQAFDEHGQLLVEKEYYSVGGGFVVNRDGDRVNGVRAAVDVPYPFRTGDDLMRQCREHGLSIAELMLRNECALRPADEVRAGLLAIWRTMAACVERGCKVEGDLPGPMRVKRRAAELNGRLRARSEESLRDPLSMLDWVNLYAMAVNEENAAGGRVVTAPTNGAAGVIPAVLHYYVKFVPGSNEAGIVEFLLTAAAIGIIYKETASISGAEVGCQGEVGVACSMAAAALAAVMGGTPDQVENAAEIGMEHNLGMTCDPVGGLVQIPCIERNAMGAIKALNASRMALKGNGQHYVSLDSVIKTMRETGADMKTKYKETSRGGLAVNVIEC

SEQ ID NO: 47708 - protein, 299 aa, Burkholderia cepacia
MRLQRIKSQLHRCVRPRSERRRRQRRARRHARHHVLRRRRQRVDDREAPHQLVDRVVLHVAVQDVGFLRLRVRVLVAVRHRAVQRDRARRDQHGAVLARQRVVQRVEQRVFLRGAVLVERQRVLATRLPHAQHGVGVVRRLDDLRVAAGLDEAREPRLDGRRRTGHEQVLERVVLLAAQLEAACRQRDRAADEHQKRSADHLRSFWVRPTAGGRQTTMFTRRPGTTTIFFAGLPSLNFANASSATAAASIASRLASFATFSAPRTLPFTCSTSSISACSSAASSTFGHGASSSGPNSSA

SEQ ID NO: 47709 - protein, 1407 aa, Burkholderia cepacia
  MISC_FEATURE (458)..(458): X=any amino acid
  MISC_FEATURE (459)..(459): X=any amino acid
GGGNDPGARQALGQRIGGKSPHRARGNASRHAPVATARRGARRRPGALSVGTVHASTCGNGAAIASGGTCVLDSFNPTVNNDLVGATTVSGGDRVGLTGAWTGATGDMGYTPMPLANTSIISGNSNQPLVTLGGKTQSVGTPDSITGGRTSVATYDSSAFVSSNAGSTVVQVYHDVNGDQYVNTRIGTVASSGGTLDVSIGNAANAPAATGNVMTIAAKQSDLTYADGTGSVRASSTGIRATRSGSSPATISRAAAPSAASSSTCRPTRAPSPRSTAARGPSPMPRRSPRTTTFSCVRSATARSARRPPTTTHSARPVTLSPQTFEYANNVSPGDKNALPRNYPSAMHGTGANATLHIGEDGQIDFRGSNTIDASAAVVAENGAHFVNDGRLSGDFTLVRLLSGASGVNNGTISSGYTAGDNSTRAPPGPTTSGSARMSKAAACMRTARAPRSSTTAXXTSARGISPATGSTCRTTRWPRTDGAHASNAGTINVGVNATTLDSQVIGGLVAGGSFTNEAGGTIYLGRAAQYDVAAPEATNDVALAAHAYGILLGASGTASNLGTIVIGTQTQNGAALASIGSTSGTLTNAGAIVVNGAAAGTPLANVGMLAANTAATVTNTGTITLNGVNGIGIMVVGTGTNATAATSTGTINVAGGLDPASGTRNYGVWAEGPLAKATLDGALNLTGAGAIGVHARSGATIDVGANAVPAFMSGTNQIGFYAYGAGSKINVAAQHLSVDTDDSTLFRVAGGAAYTGASTAGVLTTDVNGQRSRGVLATDAGTTLSTGNAVYDVNGANGIAIAVEGGAKGTIDAGATINLNAAGATAGVVDGQAHDLAGANAGAPVATTLTNHAAVTSSTAGVTGFIAQNLGTLENRSTVLLTGAGSTGVVAGTLGTVNNASTIRVTNGTGALVQGASATLANAGSIEADDGVAGVRLTGAGASVALSGAGTVIANGNADGVLIDSTVTGGGIAAGATSIAVGGSGSGVRNLGANATIALSGTQVATTGNGADGLTSTGAGARIATDAATVVRTAGADARGVSVSGADSTLTANGTTIATTGANAHAIIMDGGATALLSGAKVTASGNAADGIVAQNGGRIADTGSSLASAAGSGATANSGGVLALTGTALTGATAGVLTSDTLANGATSSVLIDGGSVTSATGPAFAARGGTADIAVRNGTVVTAGNGTLLNLANGSNVTFSASAVNLAGDIVSDASSTGNVFLANGTTLTGKIDPVALTVDGTSTWRMTGSSVLSSLTNAGLVAFAAPTGSPTLTGSYKTLTTGGYVGNGGTIALNTYLGADASPTDRLIVNGGAATGTTGLKIANTAGAGAQTTGDGIAVVVTANGGTTTASAFHLAGRYRPARTNTGSIAAGKAMRTAGTCVRSSTRPTRSTRSTRPAAATAA

SEQ ID NO: 47710 - protein, 279 aa, Burkholderia cepacia
MSVETVSHRNRMHHAKERTMKRLIAAVSIALLAVSAGPAVAKDWTTIRFGTDASYAPFESKAPDGKLVGFDIDLGNEICARLKAKCVWLENDFDGMIPALKAKKFDAVLSSMSITPQRAQQIGFTTKIYNQPTRLVVKKGSPLLPTAESLKGKSIGVEQGTTQETYAKAYWGKQGANVVSYQNQDGVYADLIAGRLDAALQDEVQAAIGFLKSPRGANYTFVGPELVDEKVLGIGAGIGLRQEDTDLKAKIDRAILDMVKDGTYKRLASKYFDFDIYGS

SEQ ID NO: 47711 - protein, 286 aa, Burkholderia cepacia
MMRRARRRTRGLQGLNKMNQMNPAFVMPDVQSTVDTRQIPIQRVGVKAVRHPLTVCTESGDVQPTVGVWNLDVRLPADQKGTHMSRFVALLEENRAPLTVERFRAMLASMLEKLEAEAGRIEVTFPYFVNKTAPVSGVQSLLDYEVTLAGESRNGDTRLFLKVLVPVTSLCPCSKKISQYGAHNQRSHVTIDAELAADLPVEALIRIAEEEASCELWGLLKRPDEKFVTERAYENPKFVEDLVRDVAQRLDADERVVAYVLEAENFESIHNHSAYALIERDKRQAA

SEQ ID NO: 47712 - protein, 470 aa, Burkholderia cepacia
EGGAGAQANGAAAPAAAPAPAAAPAAAAPAAAPAASGGTLEVKVPDIGDYKDVPVIEICVKVGDTVEKEQSLVALESDKATMDVPSPAAGVVKDIKVKVGDSVSEGTLIVLLEAAGAPAAAPQASAPAPAAAAPAPAAAPAPAPAKAAPAPAAAAPAAAPSGESRASHASPSVRKFARELGVDVARVQGSGPKGRITKEDVTGFVKGVMTGQRAAPGAAAAPAGGGELNLLPWPKVDFSKFGPFEAKPLSRIKKISGANLHRNWVMIPHVTNNDEADITELEALRVQLNKEHEKAGVKFTMLAFVIKAVVAALKKFPTFNASLDGDNLVFKQYFHVGFAADTPNGLVVPVIRDADKKGLVDIAKEMSDLSKAAREGKLKPDQMQGGCFSISSLGGIGGTNFTPIINAPEVAILGLSRGQMKPVWDGKQFVPRLMLPLSLSYDHRVIDGAEAARFNAYLGALLGDFRRIIL

SEQ ID NO: 47713 - protein, 144 aa, Burkholderia cepacia
MNNMTRYDPFSLEPVSDLFQGLFRPLRGMTLADEPDLASMKIDVTENDNAYTVNAELPGVAKDDIDVQVTGNTVSINAKIERNNEQKDGERVIRRERYSGAVSRSFSLSGEIDDANATATYQDGVLSLTLPKKAPVGQKKLAIS

SEQ ID NO: 47714 - protein, 305 aa, Burkholderia cepacia
  MISC_FEATURE (56)..(56): X=any amino acid
MLKQRTIKSIVKTVGIGVHSGRKIELTLRPAAPGTGIVFSRVDLPTPVDIPASAMXIGDTRLASVLQNDGVRVSTVEHLMSACAGLGIDNLYVDVTAEEIPIMDGSAATFVFLIQSAGIEEQNAPKRFIKVKKPVEIRDGDKFARLDPYFGFKLKFSIDFRHPAVDKTGQELEVDFATTSYVREIARARTFGFAHEAEMLREIGLARGGSMDNAIVLDEYRILNNDGLRYDDEFVKHKMLDAIGDLYVIGHPLLASYTAYKSGHGLNNALLRELLAHEDAYEIVTFDDPQAAPKGFAFDAQTAFA

SEQ ID NO: 47715 - protein, 277 aa, Burkholderia cepacia
MLSKLTRWFDDRRRDRALRSHPIPDSLWQETVERLPFLAALPPDALGRLRELTSLFVAKKSFSTAHGLELTDAMIVAIAAQACLPVLNLDLSLYDGWVGVVVYPGEFVIRKTVQDEDGVVHEVEQDASGEAWEGGPVILSWEDAQMTDGRDAYNVVIHEFAHKIDMVNGAADGYPPLFRRWHAPHLDAQAWADVFEHAYDQFCARVDAVPDRAWARFERDSLIDPYAADHPSEFFAVCSEALFVRPKAFESEFPELYRLLARYYRQDPAGTGALDAP

SEQ ID NO: 47716 - protein, 452 aa, Burkholderia cepacia
MEGILIQHTTQRQLWFGALTALVILLTLGIAAPHANVALPPVEPFMPMCALTVFTTASIAAFFLGAQFTVTRQPVLGALGGAYAFTALAVALQLLTFPGVFAPHGLLGARPQSAAWMWVFWHAGFPCFVMAALFARERLTRAPVGAKETRRWTLALVGGPAIAAALLCVLALNVSLPPAFHPPRDAAVLPVNGIALVVWILNALALVAVLVTGRLRTTLDLWLAIAVLACLTDTTLNLLSTNRFTVGWYVARVFSMFTPGVLVCVLAWEVTMLYQQLFEAHATLIRSSARDGLTGAFNRSHFNDHFHTLFLQARRQGEPLSLLMVDVDRFKAYNDAFGHVKGDACLIAVANALAGAVRRPADIVARYGGEEFAIVLPNTGARGARVVADEVREAVLRLDLAMPDSPAGRVSVSVGCATVSADDLSTPDALIEAADAALYRAKDAGRNRVVVA

SEQ ID NO: 47717 - protein, 185 aa, Burkholderia cepacia
MSDTPASPSGKRWYVVHAYSGMEKSVQRALQERIERAGMQDKFGQILVPTEEVVEVKGGHKAVTERRFFPGYVLVEMEMTDETWHLVKNTAKVTGFVGGARNRPTPISPKEVEKIMSQMQEGVEKPRPKTLFEVGEMVRVKEGPFTDFNGTVEEVNYEKSRVRVSVTIFGRSTPVELEFGQVEKV

SEQ ID NO: 47718 - protein, 453 aa, Burkholderia cepacia
MSQSPKVGFVSLGCPKALVDSEQIITQLRAEGYEISGTYDGADLVVVNTCGFIDEAVQESLDAIGEALTENGKVIVTGCLGAKSSASGSNLIEEVHPKVLAVTGPHAVGEVMQAVHSHLPKPHDPFVDLVPAAGIKLTPRHYAYLKISEGCNHRCTFCIIPSMRGDLVSRPVAEVMLEAENLFKSGVKELLVISQDTSAYGVDVKYRTGFWNGKPIKTRMTDLVAALGELAAQYGAWVRLHYVYPYPSVDEVIPLMAEGPFKGHVLPYLDVPFQHAHPEVLKRMKRPANAEKVLERVQKWREICPDLTIRSTFIAGFPGETEEQFETLLDFVREAELDRVGCFAYSPVEGATANDLDGALPDEVREERRARFMEVAEEVSAHRMQRKVGKTLKVLIDEVGEEGGIGRTAADAPEIDGVVYVEPAAKASKRYKVGDFVSVKITGADGHDLWGEV

SEQ ID NO: 47719 - protein, 116 aa, Burkholderia cepacia
  MISC_FEATURE (102)..(102): X=any amino acid
MARYTEQFKLSVVKRCIGGEAIRAVARTHGLSHSTVSQWYATYQAHGKDGVRRKYNSYDVAFRLKVVQHMREHGVSSQEAAAPVSFSHIRARCLQWARRYLXGWFTTYGPRSAYYP

SEQ ID NO: 47720 - protein, 186 aa, Burkholderia cepacia
MSVADVKKGVEQKMQRSIEAFKNDLAKIRTGRAHTGLLDHVQVDYYGSMVPISQVANLTLVDARTIGVQPWEKNMVAKVEKAIREADLGLNPATAGDLIRVPMPALTEERRRELTKVVKSEGETAKVAIRNLRRDANEALKKLVKDKEISEDDERRASDDVQKLTDKHVAEVDKLVQTKEAEIMTV

SEQ ID NO: 47721 - protein, 194 aa, Burkholderia cepacia
MGVSRQQAAENRSAIVAAAERLFRVRGVDAVGLTELMKEAGFTQGGFYNHFKSKDALVAEVMEKAMHDRADSPNAGSLDAQVAAYLSPAHRDNLEAGCPLSGFAGDAPRLTETARACYAHGLAAYLDRLERMVATDGATPEQTRRDALAVFSQMVGALVLSRAIAGSDPALADEILDAGRDALTGRRGDPVTSA

SEQ ID NO: 47722 - protein, 397 aa, Burkholderia cepacia
MYNLPDDRGHFGPYGGVFVAETLIHALDELRAAYEKFQNDPDFVAEFERELKYFVGRPSPIYHAQRWSEMLGGAQIYLKREDLNHTGAHKINNVIGQALLAKRMGKKRVIAETGAGQHGVATATICARFGMECVVYMGSEDVRRQAANVYRMKLLGATVVPVESGSRTLKDALNEAMRDWVTNIESTFYIIGTVAGPHPYPMMVRDFQRVIGDECKVQMPELAGRQPDAVIACVGGGSNAMGIFYPYIDDTSVQLIGVEAAGDGLDTGHHAASLIAGSPGVLHGNRTYLLQDDNGQIIETHSVSAGLDYPGVGPEHAWLKDSGRAQYVPISDDEALKAFHDCCRIEGIIPALESSHAIAYGVKLAPTLPKDKILLVNLSGRGDKDMHTVAERSGIEL

SEQ ID NO: 47723 - protein, 595 aa, Burkholderia cepacia
MGQYAAPLRDMQFVLHELLNVEAEVKQMPKHADLDADTINQVLEEAGKFCSEVLFPLNQVGDREGCTYEGDGVVKTPTGFKEAYQQYVEAGWPALGCDPDYGGQGLPAFVNNALYEMLNSANQAWTMYPGLSHGAYECLHAHGAPELQQQYLPKLVSGEWTGTMCLTEPHCGTDLGILRTKAEPNGDGSYSISGTKIFISSGEHDMSKNIIHLVLARLPDAPQGTKGISLFIVPKFIPDAAGEPGERNGIKCGSIEHKMGIHGNSTCVMNLDGAKGWMVGEPNKGLNAMFVMMNAARLGVGMQGLGLTEVAYQNSLTYAKERLQMRSLTGPKAPDKPADPIIVHPDVRRMLLTQKAYAEGARAFTYWSALQIDKELSHADEAVRKEAADLVALLTPIIKAFLTDNAFESTNHAMQIYGGHGFISEWGMEQYVRDARINMIYEGTNSIQSLDLLGRKVLGDMGAKLKKFGKLVTEFAEAEGVKPEMAEFINPLADIGEKVQKLTMEIGMKAMQNPDEVGAAAVPYLRTVGHLVFSYFWARMARLALDKEASGDPFYKSKLATARFYFARLLPETASTIRAARAGSKTLMEVDESLF

SEQ ID NO: 47724 - protein, 256 aa, Burkholderia cepacia
MPPGTAPARYAPDFRAQLDALVALRVPVASFTFGVLDAADVARLKAAGTYVIGTATHVAEGLAWQAAGADALSAQGAEAGGHRGTFIGSADDALIGTLALVPQLVDATGLPVLAAGGIMDGRGIAAALALGAQAAQLGTAFLTCAESAIAADWKARLLASADTSTQVTRAITGRHARGLRNTLMARLGEHVADAAPYPVQNALTQPLRQAAARANDGDYLSLWAGQGAPLARRRGDTLTTSQLVAALDAEWRASAA

SEQ ID NO: 47725 - protein, 164 aa, Burkholderia cepacia
MYDAARRKVGCLADCLCSDHPHRFDDGISDRRAVVQNPPEEAQGAEKSNRFSKELLNVRAAHRHHSVRPHHADERQSPEEPRSVAHHDAAPRTGRRLVLAHHRINDIDVHRCGKGSRNVKEHHQTERKKIASFEKHGSHSVALTDFSSVVETVHRPTSSSSAES

SEQ ID NO: 47726 - protein, 507 aa, Burkholderia cepacia
MPISDLSARFAPRARVCLRAAAVVATCTALAFAPSAQARKKSHKETRKTAVVSPAARAAGLPASVLVALQRAKVPASAMSVVVERVGDPQPLIAWNASRPMLPASTMKLVTTFSGLSILGPDYRWRTTAYTDGTVDPDGTLQGNLYIKGTGDPKLVPEELIDLVDKLRKAGVKRVAGGLVLDKSYFAASTRDLPSFDDDASAPYNVGPDPLLYAFKAVSFTVTPGDDGKVAVDVLPPLADLSIDNQLVEGSGSCSAAARPTLTAGGGIMTASFAGDYPLRCGAHTTNLAILDHTTFFARGFLALWQQDGGTIAGPVSEGKVPTTARPLAVHHSPVLGSIVYDINKFSNNVMARNLFLTIGAVSGKPPATPEQSSRAIQAFLQKNGIAMPDLVLENGSGLSRQEHVSALSLAALLQAANASPVAQAFIDSLPIAGIDGTMKNRLTNAGVLGNAHIKTGTLRDVRAIAGYVAGADGQSYIVVSFINNDHAEAARAAHDTLLEWIYAGAH

SEQ ID NO: 47727 - protein, 450 aa, Burkholderia cepacia
MPPRAPPGAPAFEAVFARLSPHAMKAAEIREKFLKFFESKGHTIVRSSSLVPGNDPTLMFTNSGMVQFKDVFLGTDPRPYSRATTAQRSVRAGGKHNDLENVGYTARHHTFFEMLGNFSFGDYFKHDAIKFAWELLTAVYQLPKEKLWVTVYQEDDEAYDIWAKEVGVPTERIIRIGDNKGARYASDNFWTMGDTGPCGPCTEIFYDHGPDVWGGPPGSPEEDGDRYIEIWNLVFMQFNRDAQGNMTRLPKQSVDTGMGLERLAAVLQHVHSNYEIDLFQNLIKAAARVTEISDLTNNSLKVIADHIRACSFLIVDGVIPGNEGRGYVLRRIVRRAIRHGYKLGRKGAFFHKLVADLVAEMGTAYPELKEAEQRVTDVLRQEEERFFETIEHGMSILEAALADVDAKGGKVLDGELAFKLHDTYGFPLDLTADVCRERGMTVDEPAFDDG

SEQ ID NO: 47728 - protein, 216 aa, Burkholderia cepacia
MKQDSRFPNLFITDHPLIQHKLTHMRDKDTSTRTFRELLREITLLMGYEITRNLPITTKRVETPLVAVDAPVIAGKKLAIVPVLRAGIGMSDGLLDLVPSARVGHIGVYRADDHRPVEYLVRLPDLEDRIFILCDPMVATGYSAVHAVDVLKRRNVPAANIMFVALVAAPEGVQVFQDAHPDVKLFVASLDSHLNEHAYIVPGLGDAGDRLFGTKN

SEQ ID NO: 47729 - protein, 412 aa, Burkholderia cepacia
MRLRASRLLLALTTAAACAAGMADAGTLKVNVAARGNQRATWQAVFDQFHKANPDVDLKISYVGEEAYKVQMSGWLATDPPDVLSWNNGERLAYFAKRGLIEDLGADWQKNGWNDTYASVKQSSTYGGKVYSLPLGYDAYGLFYRKDLFEKAGIHGEPADWPQFLDACRKLKAAGIAPIAVAARDAWTLAAWFDYLDLRINGYAFHQKLMAGDVAYTDPRVRAVYAAWKKLIDDKYFIDNALSYDVDSLSPLIVNGQAAMTLMGTWYSAGLLGAARNPIGFFRFPVIDASVPLAEDGPVNVLIVPAKAHNKADARRFLAFMGQPAVNGEFAKGMGQLPSNNKAPEPQDPISKIGFRTLATTPGGIAQFYDRDMTKEMADEGMKAMQQFLSDPTQLDAILQRLEQTRKRIYRK

SEQ ID NO: 47730 - protein, 763 aa, Burkholderia cepacia
MRYSVEIRKFFYSQYFFGGLRIAVGVSLPAVLCLIVFHNRELGFTISTGALGACVVDMPGPLKYKHNEMLACSVIGFLAALATGLATPNIFALWLTIVPLTFVLSLIVVYGNRWPQISFATLFMMVMTLEEKFTPLQAFVNAGWILAGGLWYTYWATLVSQWQARRIEQQALAESLFACADYLLARAQFYDLDADLDECYRNLVARQITAVETQETARDIVLRNLPKLRRGKLDPGRTTMYNLFINSVDLHELFVGAHTDYPLVRNTFGGTDLIIFYRDLIRKAAADLEEIGLAVLENRAPHSRISVKAELRAIEYEIELMRKKNFAATNAEAYAAVLATFRRIWSATRLIDRMRRNLSGHADPQQTELKIDKALTRFLQRRRMSPLLIFSNLNMRSPSFRHALRVTIAVAVGFWIGRLLPLTNAYWIVMTTIIILKPGYSLTKQRNAQRIIGTLIGCAASIALIYTVKEPHLLIAIMFGSMVMSYSLLLFNYAASVVFTSSYVLLMFHLLAPGSMRIIGERAIDTVVGCMIAIAASRLFPYWEYRLMGKLVTDMLTSTRKYFEAVWRAGRGMSPPPVPAADGAAVVAGVAAAVEAPVTSLDDDYRYRLARKDVHIAFANLGQAFQRMMIEPKAHQRFVPELNDLLVQTHVLGAQITAAAPLIRSACAADGGLVHDDALQRGLAAVLDNLEKAEAGEPPPADQLEASKQITRDLDAMVVSAEQSDAVGAELTHDLKVLAHQCKQMLASSLLIRKDASVIRLPA

SEQ ID NO: 47731 - protein, 231 aa, Burkholderia cepacia
MSAPVYQEIKDFILARIHAGEWEEGDQVPSENELAREFKVARMTVNRALRELTAEQVLTRMKGAGTYVARPKYESTLVAIRSISEEVGARGHAYRASVLGLDTIRADDALADEMQVAVRTKLFHSQVLHFENDEPVQLEERWVNPAVAPDYAEQDFTNTTPNLYLMRAAPLQRVEYRIEAAAPAPERREQLRMDDVEPCLVLHRRTWSQGVVASVANLWHPGSRYRFTGHF

SEQ ID NO: 47732 - protein, 294 aa, Burkholderia cepacia
MMAAITASMVAELRAKTDAPMMECKKALTEADGDLAKAEELLRVKLGNKASKAASRVTAEGVVASFVGGNAGALVELNCETDFVAKNDDFLAFSKTVAELVATQNPADVAALSALPLDGSTVDAVRLALIGKIGENVSIRRFVRFETANKIATYLHGARIGVIVEYTGADEQVGKDVAMHIAAMKPVALSSADVPAELIETERRVAEQKAAESGKPAEIVAKMVDGSVQKYLKEVSLLNQTFVKNDKQTIEQMLKAANAAVQKFALFVVGEGIEKRQDDFAAEVAAQVAAAKQQ

SEQ ID NO: 47733 - protein, 135 aa, Burkholderia cepacia
MSYSNKVLDHYENPRNVGSFAKDDDTVGTGMVGAPACGDVMKLQIRVGADGVIEDAKFKTYGCGSAIASSSLVTEWVKGKTLDEALSIKNTQIAEELALPPVKIHCSILAEDAIKAAVADYKKRHDTKEGDQAAA

SEQ ID NO: 47734 - protein, 385 aa, Burkholderia cepacia
MNPFQFRTVPTQIVEFGAARRLGALLRERFPALARLCVVTDAFLHRSGVLAPALESLAAHGWQVTVIDDVIADPPEHVVLDATERAVAADAEIVLGLGGGSSMDVAKLIAVLAPGQQALADMYGVDKVASARLPLVQMPTTAGTGSEVTAVSIVTVGEARKMGVVSPHLFADVAILDAELTLGLPRAATAATGIDAMVHAIEAYTSARLKNPVSDMLATHALTLLSRNLLAACDDGRNRHAREAMLVGAMFAGQAFANAPVAAVHALAYPVGGIFHVPHGLSNALVLPHVLRFNAPAAAPLYAELAAIVAPSATGSDEAKTHALIAEIDRLIVATGIPRTLREVGIGEADLPRMASDAMLQTRLLVNNPREVAEADALEIYRQAW

SEQ ID NO: 47735 - protein, 146 aa, Burkholderia cepacia
MVVFLVLAWFTMKFVWPPLINALDERSKKIADGLAAAEKGKAELDAAHKRVDQELAQARNDGQQRIADAEKRAQAVAEEIKANAQAEAARIVAQAKAEAEQQIVKAREALRGEVAALAVKGAEQILKREVDQTAHAQLLNQLKAEL

SEQ ID NO: 47736 - protein, 410 aa, Burkholderia cepacia
VVSMSFDSLGLAEPLAKAVNELGYTSPTPIQQQAIPAVLGGGDLLAGAQTGTGKTAGFTLPILQRLHTFYAEHRGAKRAVRALILTPTRELAAQVEESVRAYSKYLKLRSTVMFGGVSINPQIDALKRGVDIVVATPGRLLDHMQQKTIDLSDLDILVLDEADRMLDMGFIHDIKRVLAKLPPQRQNLLFSATFSDEIKALADSLLDSPALIEVARRNTTAESVAQKIHPVDRDRKRELLTHLIREHNWFQVLVFTRTKHGANRLAEQLTKDGISAMAIHGNKSQSARTRALAEFKNSTLQVLVATDIAARGIDIDQLPHVVNFDLPNVPEDYVHRIGRTGRAGATGEAVSLVCVDEKQLLRDIERLIKREIPQEVIAGFEPDPNAKPEPIQQRRGQQQPRGGGGGGNRQ

SEQ ID NO: 47737 - protein, 235 aa, Burkholderia cepacia
  MISC_FEATURE (2)..(2): X=any amino acid
  MISC_FEATURE (3)..(3): X=any amino acid
  MISC_FEATURE (4)..(4): X=any amino acid
MXXXNARAGLESNGERQVNFDWSAIWAALPDLMDGVRLTVFIAFFGLVGGFVVGMIAGMFRAYGPKAMNVLAQVYIELIRGTPIVVQVMFLYFALPLLAHIRIDGLTAAIIAITVNSGAYLAEVVRGALLSIPKGLTEAGLAMGLSMPRVLLKVVGPLAFRRLIPPLGNQCIVSLKDTSLFIVIGVGELTRKGQEIIAGNFQAVEIWTAVAVIYLLLTGAMTLTLRLVEKRMKIL

SEQ ID NO: 47738 - protein, 462 aa, Burkholderia cepacia
MSRESSLPDGRPGWPSPGGRPPLPHEFMPLRAARFSSHTMDIDQYMTDLGRRARHASRAMARASTAAKNAALDAVARAIERDAQALKEANARDVARAREKGLDAAFVDRLTLSDKALKTMVEGLRQVASLADPIGEIGNLKFRPSGIQVGQMRVPLGVIGIIYESRPNVTIDAAALCLKSGNATILRGGSEALESNAALAKLIGEGLEAAGLPQDAVQVVATADRAAVGKLITMTEYVDVIVPRGGKSLIERLINEARVPMIKHLDGICHVYVDDRADLDKALTVCDNAKTHRYGTCNTMETLLVSSGIAAKLLPPLGKLYRDKQVELRVDATARAVLADAGVGPLVDATEADWHTEYLAPVLAIKVVDGLDAAIEHINHYGSHHTDAIVTEDHDRAMRFLREVDSASVMVNASTRFADGFEFGLGAEIGISNDKLHARGPVGLEGLTSLKYVVLGHGEGRQ

SEQ ID NO: 47739 - protein, 208 aa, Burkholderia cepacia
MTDSTHHYYEPSQGHGLPHDPLNAIVGPRPIGWISSRGSDGTLNLAPYSFFNAFNYRPPIIGFSSTAAKDSLRNVQETGEFVWNLATRDLAERMNQTCAAVPYDVNEFELGGLTAVPSRLVDVPRVAESGVNFECKVTDVIRLRDHRGVETPATLVLGEVVAVHIRHDLLKDGVFDTFGAGIILRAGGPSAYAHVTPDSRFDIFRPDA

SEQ ID NO: 47740 - protein, 421 aa, Burkholderia cepacia
MLYVQVIFAIIVGVILGHYYPALATDMKPLGDGFIKLIKMVIGPIIFCTVVTGIAGMEDMKKVGRVGGKALLYFEIVSTFALLLGLAATHLLRPGVGFNIDPATLDGKAVASYAAKAHGQSTVDFLMHIIPNTMVDAFAQGEILQILLIALLFGSVLAHLGERGRVVTDFIDGLTRVLFGIVHIVTKLAPIGAFGAMAFTIGKYGVGSLVPLLKLIGTFYLTSVVFVLVVLGAIARFTGFSIIRFVSYIKEELLIVLGTSSSEAALPQLMEKLEKAGCSRSVVGLVVPTGYSFNLDGTNIYMTMAVLFIAQATNIELTWMQQLTLLAVAMLTSKGASGVTGAGFITLAATLAVVPTIPLSGMVLILGIDRFMSECRALTNIVGNGVATVVVSAWEKELDRNKLRQALKGGSEVAPTETAGV

SEQ ID NO: 47741 - protein, 284 aa, Burkholderia cepacia
MAIETVGVVGAGTMGNGIAQTAAVAGLNVVMIDVSDAALDKGLATLKGSLERLVSKDKLDAAARDAALARITTSTDYAKLAAVDIVIEAATENVELKGRILKQIEAVARPDAIIATNTSSISITALAAPLADPSRFLGMHFFNPVPLMPLVEIIRGLQTSDATASAVRALTERFDKSPIGVRNSPGFVVNRILVPMINEAFFVLAEGIASAEEIDAGMKLGANHPIGPLALADLVGLDVCLAVMDVFVKDFGDPKYRACPLLREMVSAGRLGRKTGRGVYDYSK

SEQ ID NO: 47742 - protein, 162 aa, Burkholderia cepacia
MAKKGNATQINIGISDKDRKNIADGLSRLLADTFSLYLKTHNFHWNVTGPMFNTLHLMFEEQYNELWLAVDSVAERIRTLGVVAPGTFGEFAKLSSVPEAKGVPAAEEMIRQLVEGHEAVVRTAREIFPIADAASDEPTADLLTQRLQTHEKTAWMLRSLLA

SEQ ID NO: 47743 - protein, 209 aa, Burkholderia cepacia
MTNPSDATALRAAAPVGIFDSGLGGLSVLRAARAHLPDESFVYVADSHHAPYGPRDEAFITERTLAIGEWLAREGAKALVIACNTATARAIAAIRERLSIPLVGVEPGIKPAAALSATGVAGVLATQSTLNSPRFQALLDRYGAGRRFICQPGHGLVEAIERGDTNSPALRALLERYIQPMLDDGADTLVLGCTHYPFFTETIRDLVGE

SEQ ID NO: 47744 - protein, 242 aa, Burkholderia cepacia
  MISC_FEATURE (61)..(61): X=any amino acid
VNGTQATERLSLARWAVYAGSVFAGAWLATQLFYLAQIALWSFVNPGSTAFMRTDAWWLSXDTPPAQIRHQWVPYDQISRNLKRALIASEDSTFATNNGYDVDAILQAWEKNKARGRIVAGGSTITQQLARNLFLSREKSYIRKGQELIITWMLETVLDKERIFEIYLNSVEWGRGVYGAEAAARYYYKIPASRLGAWQSARLAVMLPKPRWFDAHRGSAYQAQRAAVIARRMGAAELPQSE

SEQ ID NO: 47745 - protein, 683 aa, Burkholderia cepacia
MTKKLNEVSVEDDANQSDEQPAAAAAPGKSKVRDRRAKEKALLKEAFATSTPGTAEELEERRVKLRALIKLGKERGFLTYAEINDHLPDNFTETEALEGIIGTFNDMGVAVYEQAPDAETLLLNDNAPAASSDDEVEEEAEVALSTVDSEFGRTTDPVRMYMREMGTVELLTREGEIEIAKRIEDGLRHMVMAISACPTTIADILAMAERVANEEIRVDELVDGLLDPNAADAADTDGFSAKEAEAIENEDEEAEEEEEEEEEEEDDGAAQASANAAQLEALKRASLEKFSQISEWFDKMRRAFEKEGYKSKAYLKAQETIQSELMTIRFTARTVERLCDTLRAQVDEVRQVERQILHIVVDKCGMPRSEFIARFPGNETDLDWAEKITAEGHSYSAVLSRNVPAIREQQQRLLDLQARVVLPLKDLKETNRQMAAGELKARQAKREMTEANLRLVISIAKKYTNRGLQFLDLIQEGNIGLMKAVDKFEYRRGYKFSTYATWWIRQAITRSIADQARTIRIPVHMIETINKMNRISRQILQETGLEPDPATLAEKMEMPEDKIRKIMKIAKEPISMETPIGDDDDSHLGDFIEDTNTVAPADAALHASMRDVVKDVLDSLTPREAKVLRMRFGIEMSTDHTLEEVGKQFDVTRERIRQIEAKALRKLRHPSRSDKLKSFLEGN

SEQ ID NO: 47746 - protein, 195 aa, Burkholderia cepacia
  MISC_FEATURE (28)..(28): X=any amino acid
MPATHRSPTTAGRGDKPDKGGEERGGEXGATHNKGIMNGIDPVVVATGNDWRAVEAGAHAYASRSGRYTSLTTWEKAANGDLVGTIEMPMPVGLVGGATKTHPLARLALKIMNVTSAQELGEIAVAVGLAQNLGALRALATEGIQRGHMALHARNIAVAAGATGADIDRIAQRMVAAKDVRTDFAVELLAGRSDG

SEQ ID NO: 47747 - protein, 176 aa, Burkholderia cepacia
MPTEKEQGEPAPRLEAHTDKQEEHIGQSIFFGSIMKTFSAKAHEVTREWYVIDATDKVLGRVASEVARRLRGKHKPEFTPHVDTGDFIIIINASKLKVTGNKTLDKKYYRHSGYPGGIYETTFGKMQERFPGRALEKAVKGMLPKGPLGYAMIKKLKVYAEATHPHSAQQPKALEI

SEQ ID NO: 47748 - protein, 426 aa, Burkholderia cepacia
AFRSQLLTFNGDPAQSSQAANHETDGLLIVDDGKVVAAGPYAALAATLARDAVVHDLRDKLIVPGFIDTHIHYPQTDMIASPAPGLLPWLDKYTFPTERQFGDPEHAREVADFFVDELLACGTTSALVYCTVHKQSADALFAASDARDLRMIAGKVLMDRNCPEFLRDTAQSGYDDSAELIDRWHGKGRQMYALTPRFAPTSTEAQLEACGELARRHPDVFVQSHVAENVDEVKWVAELFPGHRSYLDIYDRYGLLRPRAVYGHCIHLDDEDRRRMAETRTVVAHCPTSNFFLGSGLFDFDKAGEHDVPVTLATDVGGGTSFSMLQTMNEAHKVARLSGHHLTATRMFWLATAGAAQALDLADTVGTLKPRTEADFVVLDPQATPLLARRTKRAESLEELLFAFALLGDDRAVYRTYAAGELVHER

SEQ ID NO: 47749 - protein, 491 aa, Burkholderia cepacia
MSREVLMLVDALAREKNVDKDVVLGALEAALASASKKLFDEGAEIRVHIDRESGEHETFRRWLVVPDEAGLQEPDREILLFEAREQKPDVEVGEYVEEPVPSIEFGRIGAQAAKQVILQKVRDAEREQILNDYLERGEKIMTGTVKRLDKGNFIVESGRVEALLRRDQLIPKENLRVGDRVRAYIAKVDRTARGPQIELSRTAPEFLMKLFEMEVPEIEQGLLEIKAAARDPGVRAKIGVIAYDKRIDPIGTCVGIRGSRVQAVRNELGGENIDIVLWSEDPAQFVIGALAPAAVQSIVVDEEKHSMDVVVDENELAVAIGRSGQNVRLAGELTGWQINIMTPDESALKQGEERDRLRALFMARLDVDEEVADILIDEGFTSLEEIAYVPLNEMLEIEAFDEDTVHELRNRARDALLTMAIANEEKVENAALDLKSLDGITPELLAKLAEHAVQTRDDLAELAVDELVDMTGMEEDAAKALIMKAREHWFQ

SEQ ID NO: 47750 - protein, 241 aa, Burkholderia cepacia
MTAPNALSAIELLQSQSLAMIVQDMLERAIVSGEYAPGEKLNEVEIATRLNVSRGPVREAFRALEQAGLLRNEKNRGVTVRVVPLREAEEIYEVRAMLDESVARALAKRISPETLKVLKGIIQSMKDAAKTHDVTRYTELNVQFHDAMVVGVGNTHLTDTYRRLVRQLGLLRQAAIEAEEDAIAVSAAEHDKIVQALAAGDEDKAVALVREHVAHGLARMRRTHEQGLPATGKAAREKAGA

SEQ ID NO: 47751 - protein, 555 aa, Burkholderia cepacia
MRSAVSPTPAKIHGFPSISLLTGPAVLSTANITMQFGPKPLFENISVKFGEGNRYGLIGANGCGKSTFMKILGGDLEPSAGNVALEPNVRLGKLRQDQFAYEDVRVLDVVMMGHTEMWAAMTERDAIYANPEATDDDYMHAAELEGKFAEYGGYDAEARAGALLLGIGIEEKFHNGTMADVAPGWKLRVLLAQALFSKPDVLLLDEPTNNLDINSIRWLEHTLNEYNSTMIIISHDRHFLNSVCTHMADMDFGTLKVWPGNYDDYMLASAQARERQAAANARAKERVAELQDFVRRFSANKSKARQATSRAKQIDKIKIEEFKPSSRQNPFIRFEFEKKLHNVAVVAEEITKKYERTIFQNFNLSVQPGERIAIIGENGAGKTTLLRSLLGALPLDHGTVKWSENANVGYMPQDTYEEFPNDITLMDWIDQYRKDGDDETMVRGTLGRLLFSSDDIKKSVKVLSGGEKGRMIWGKLMLGRHNVLLMDEPTNHMDMESIESLQIALEQFEGTLIFVSHDREFVSGLANRIIEVKTDGTLFDFGGNYEEFLTSQGQE

SEQ ID NO: 47752 - protein, 275 aa, Burkholderia cepacia
MRPPERPHGASSAYESRRPCAAARRLPAPETHGTKEVRRAVVNARETSPYTACHKAVSYCNAQGHPIHKVYLRKKRDHAAYDAFVERWRAPSQEPGLEVAPAAAKTPERADTEIDVAGFRAAWDAMTDTHQFFGITQRFGVSRMQALRLADPRYAYPVETAHALRHVLEQAAKSGQPIMVFVGNAGMIQIHTGPVANVREVGAWINVLDPGFNLHVREDLIAAAWVVKKPTSDGIVTSLELFDRQGDHVALLFGERKPGKVERDDWRALVATLPA

SEQ ID NO: 47753 - protein, 208 aa, Burkholderia cepacia
MAIEKEIKLALPAGQADAARRFFETLTGEPGHAITLANVYYDTPDLALARSKSAVRVRRTPDGWLQTFKTVGSAEGGLHRRHEWELPVAGDALEIDALVAACDVPEAAAALNDAAGALYALFRTDFSRTLWRIAIGGATVEAAVDLGEIVVQAERDTRREPISEIELELIDGPETALATLAAELQQALPGLVPENISKAQRGYRLRAQ

SEQ ID NO: 47754 - protein, 227 aa, Burkholderia cepacia
MTDALPLTTDPESGLQYRLRPAAGRAAARLLLLHGVGGNETNLLNVADAIDPRIEIAFLRGPLTFGPSQHAWFPVRFGPNGPEIDAARADESRVQLVTLLHAFRAQDGAAPALPTVIAGFSQGGIMSASVGLTSPGDVSAFAVLCGRILPEIDPLIAPRDALRPLHALIMHGRFDDKLPVSWADKADATLAALGVAHDTRLYAAGHELTAEMAGDFGRWVGERTGLN

SEQ ID NO: 47755 - protein, 608 aa, Burkholderia cepacia
MTRALRNIAIIAHVDHGKTTLVDQLLRQSGTFRDNQQVAERVMDSNDIEKERGITILAKNCAVEYEGTHVNIVDTPGHADFGGEVERVLSMVDSVLLLVDAVEGPMPQTRFVTKKALALGLKPIVVVNKIDRPGARIDWVINQTFDLFDKLGATEEQLDFPIVYASGLNGYASLDPAAREGDMRPLFEAILEHVPVRPADPEAPLQLQITSLDYSTYVGRIGVGRITRGRIKPGQPVVMRFGPEGDVLNRKINQVLSFKGLERVQVESAEAGDIVLINGIEDVGIGATICAVDTPEALPMITVDEPTLTMNFLVNSSPLAGREGKFVTSRQIRDRLMKELNHNVALRVKDTGDETVFEVSGRGELHLTILVENMRREGYELAVSRPRVVMQEIDGVRHEPYELLTVDVEDEHQGGVMEELGRRKGEMLDMASDGRGRTRLEYKISARGLIGFQSEFLTLTRGTGLMSHIFDSYAPVKDGSVFERRNGVLISQDDGAAVAYALWKLQDRGRMFVKPGDALYEGMIIGIHSRDNDLVVNPIKGKQLTNVRASGTDEAVRLVPPVQMSLEYAVEFIDDDELVEVTPQSIRLRKRFLKEHERRRASREGAVD

SEQ ID NO: 47756 - protein, 192 aa, Burkholderia cepacia
  MISC_FEATURE (134)..(134): X=any amino acid
  MISC_FEATURE (138)..(138): X=any amino acid
  MISC_FEATURE (159)..(159): X=any amino acid
GRRQCGHRYAIRAGRNLPDKEFRYLRTVIVTAAVYRDFNQELAPHHLIFRHRAGVTPYTSTFVFAECCVFIKQSQPPVYCNPFTLLAQASQATRAYLIPKLRYQFAEFLLPSSLKRLRILISPTCVGLRYGHRXTEAXRLFLEPLPIASLPKELAPHPXITRPDLPKRLLQCSDRDFQHPDNLPRSVPPSHL

SEQ ID NO: 47757 - protein, 155 aa, Burkholderia cepacia
  MISC_FEATURE (71)..(71): X=any amino acid
MRRPLAQTLRRGDAEKRRRIVGNQVLALLRVGTAEGMSMIAGVEAKLEKHQGNLTRAPVELGKDWRTDRMXRRLEAMLITADATTTLVITGNGDVLDPEGGICAIGSGGAYAQAAARALVENTDLSPREIVEKSLGIAGDMCIYTNHNRIIETIE

SEQ ID NO: 47758 - protein, 329 aa, Burkholderia cepacia
MDLRQLPALNAIRAFEAAARHENFSRAADELFVTHGAVSHQVRALEEELGVQLFTRNGKRLCLTDAGMRYAQQIRTALMVIADATRDVRASDRDRRLVVSMLSSFAARFITPRIGTFIERHPEIDVELQSTNSLTDFARDDVDLAIRFGFGSYPGLHVEPLFEEVFFPACAPTLNGGKLPQTPADLVHYPLLRSDDELWRPWFDAAGLDTLTEPKRGILYQDSSNLLLAAIEGQGIALVRRSLAVHDLLDGRIVRLFDIDGPSPWHYFFVCPPPLLNTPRVQAFRTWLFEEVAEYKRLCDELDARRAAGKCPAECALEGGWKGISGRLR

SEQ ID NO: 47759 - protein, 133 aa, Burkholderia cepacia
MRLLDALVEQRIAAAAARGEFDDLPGTGAPQALDDDLLVPEEVRVANRILKNAGFVPPAVEQLRALRNLHDEVQAVSDRAARCRLQAKILALDMALESLRGGPMVMPRDYCRRIAERLCERGLDDASAEAGTM

SEQ ID NO: 47760 - protein, 487 aa, Burkholderia cepacia
MTELFIDGAWVAGSGPVFASRNPGTDAVAWQGDSASAADVDRAVASARRAFAGWSALDFEARCEIVKRFAALLTERKEAIATAIGRETGKPLWEARTEVASMAAKVGISIQAYQERTGEKRQDMADGVAVLRHRPHGVVAVFGPYNFPGHLPNGHIVPALIAGNTVVFKPSELAPGVARATVEVWQAAGLPPGVLNLVQGEKDTGIALANHRQIDGLFFTGSSDTGTLLHKQFGGRPEIVLALEMGGNNPLVIGEVEDVDAAVHHTIQSAFLSAGQRCTCARRIFVPQGAFGDRFLARFADVTSKITADVFDADPQPFMGAVISARAAAKLVDAQSRLVEQGAKPIIAMTQRDPRLGFVNAAIADVTGVANLPDEEHFGPLAQVVRYTTLDDAIERANDTAFGLSAGLLADDPKVWEHFRRTIRAGIVNWNRPTNGASSAAPFGGTGRSGNHRPSAYYAADYCAYPMASVESTQLTLPASLSPGLHF

SEQ ID NO: 47761 - protein, 447 aa, Burkholderia cepacia
MLQIFALIGALFLVALNGFFVAAEFGLVKLRATRVKTLARKHGMRGRILAVVHGRLDAYLSACQLGITLASLGLGWVGEPAFAQLIGPLLDLIGVQSERVVHLISLVFAFSLISFLHIVVGELAPKSMAIRQSEKVGLWVALPLYAFYWAMYPAIWVLNTSANAVLRLAGLSADHGGDAHYSTDELKLILRSRRSAAGNAAQPARGTYSNDEWNTLAHSLDFSSMTVSDLMRPAHEMIGLRRDLPLPDNMEIVARHRFSRYPLFEDASREQVSGLIHLKDLLLARHAGAALDDLSDYVRPVQYVKPDTPALELFRRFRKGAPHFALVGNKGEKPIGFLTLDNLLGALVGQIHDEFRQGDADWSRLDDGTLMGKGSLPVVSLEQALGIDIDEGRAESVGGLVIQALSDLPTEGQRVSFDRFDVVVKKMNGPRIVLVRVYPKIAKEADE

SEQ ID NO: 47762 - protein, 1164 aa, Burkholderia cepacia
MHATPVVPMPDNASTPSASPVARVKPGQRFAFDGAHGSADALAIARYLADNRQDVPLLAVICANAVDAQRLSQEIRYFSPDARVRLLPDWETLPYDTFSPHQDLVSERLATLHDLGEGRCDILLVPATTALYRMPPASFMAAYTFAFAQGERLDEAKLKAQLTLAGYEHVSQVVRPGEYCVRGSLIDLYPMGSPLPYRIDLFDDQVDSIRAFDPDTQRSLYPVRDVRLLPGREFPFDEAARTAFRSRWRETFEGDPSRAPIYKDIGNGVPSAGIEYYLPLFFDETATLFHYLPQDAHLVFTGDLEASIRRFTADTKQRHAFLAHDRERPILEPQRLFLSDEDFFAFAKPFARVVLPAQPAGGWATALPELTVDRHADDPLASLRTFVESSGKRVLLTVESAGRRETILQLLAEHHLRPASNDDFASWLASDERFALGVAPLANGFAVPGEGYAIVTETELYGALGRRAGRRRQEQASNVDAMVRDLSELKVGDPVVHAQHGIGRYMGLVSMDLGEGETEFLHLEYSGDSKLYVPVAQLHVISRYSGADPDSAPLHALGSGQWERAKRKAAQQIRDTAAELLNLYARRAAREGHAFSLDPRDYVKFAESFGFEETPDQAAAIAAVIGDMTSGKPMDRLVCGDVGFGKTEVALRAAFIAVLGGKQVALLSPTTLLAEQHTQTFADRFADWPVRIVELSRFKTAKEVNAAIAQINEGSVDIVIGTHKLLSSDVQFKRLGLVIIDEEHRFGVRQKEALKALRAEVHVLTLTATPIPRTLGMALEGLRDFSVIATAPQKRLAIKTFVRREEESVIREAMLRELKRGGQVYFLHNEVETIENRKAMLEALVPEARIVIAHGQMHERELERVMRDFVAQRANVLLCTTIIETGIDVPSANTIIMHRADKFGLAQLHQLRGRVGRSHHQAYAYLLVHDPQSLTKQAQRRLEAIQQMEELGSGFYLAMHDLEIRGTGEVLGDKQSGEIHEIGFQLYTDMLNDAVKALKNGKEPDLTAPLAATTEINLHAPAILPADYCADVQERLSLYKRLANCEHGDAIDGIQEELIDRFGKLPPQAHALVETHRLRIAAKPLGIVKIDASEVAIGLQFEPNPPIDPMRIIEMVQKHRHIKLAGQDKLRIETRSPDLAIRVSTIKETLRALGPKQGAAVAAR

SEQ ID NO: 47763 - protein, 440 aa, Burkholderia cepacia
MAGRRLLRLSLASGGLQRAARFHLRFHGLAELVHGERVEEAAVVARQHIEVLQAEHVFGRAPRRRQVDHGHRRAGFGRDVDRRLVQRHARAQQLRQRPVRFGLAVGGGLCDAQAARVGRDLPDHRAVGFPAVLLQVVRDTADRIDRTAAQIDMARAVEVDRIFADAARQELRNPDRAGVRAEHGGRVELVVAGPDQEVFEVLAEGCLAAVAIRRVRVVERERRQRVEHAEIAHVAAVDGLDADDADDHLGRHAELLGCALQRRLVRLPELHARVDADRLDEARAIHAPVLDRRRRGRPHELDGRRRVADAREQRMQARRIEAVATHHLVDERVDLRVARVTLWNDFLFEGLTLRCRLLRLGLGDERAGGLRRLRLRHGRRGAESRGDGSDDERSANTEQRGEKGGRLAGIHVEAGGQGDGVRRSIPDASGAPGRSWPPLW

SEQ ID NO: 47764 - protein, 553 aa, Burkholderia cepacia
AGAGKRKRAPARANTAPRAPAAAGDAAAQHHEIQNKAMPGASTGTPPGTAAAGPADSGSRSVSPSASTLIQMRSFMQRATKIVATIGPASSSPEILLQMMQAGLDVVRLNFSHGTADDHRQRAEMVREAARKVGREIAIMADLQGPKIRVGKFENGKTTLVPGQPFILDAGCELGNDERVGLDYKELPRDLKPGDLLLLNDGLIVLTVERVLGDEIHTIVKVGGELSNNKGINRQGGGLSAPALTAKDMEDIRTAMSLGADLVAVSFPKNATDMEMARQLANIAGAPYGIKPKMIAKIERAEAIPALQSILDASDGIMVARGDLAVEVGNAAVPALQKRMIRMARESNKLVITATQMMESMIHAPVPTRAEVSDVANAVLDGTDAVMLSAETAAGKYPVVTIETMAAVCVEAEKSEEVELDKDFLDRTFTRIDQSIAMGALFTAYHLGAKAIVALTESGATALWMSRHYTHVPIFALTPRVGSERTMALYRNVTPLHVDFNSDRDSALQAALEIVVKQGYVQHGDMVVLTVGEPMGQAGGTNTLKIVRVGEHY

SEQ ID NO: 47765 - protein, 343 aa, Burkholderia cepacia
MAFNVTLKQSGRQFQVESDETVLAAALRQNVHLPYGCKNGACGSCKGQIVSGQIEQGPHAASALSNDERTRGLALLCCSKAQCDLEIDVREIAGVDGVQVKKLPCRIAALERKADDVMVVKLQLPANERLQYLAGQYVEFILKDGSRRSYSMANAPHEEGPIELHIRHMPGGKFTDHVFGAMKERDILRFEGPLGTFFLREDSDKPIVLLASGTGFAPIKAIIEHVKHSGITRPMTLYWGARRKKDIYLAELAEQWAREIPNFKYVPVLSEPDDADQWTGRTGFVHRAVIEDLPDLSGHQVYACGAPVMVESAQRDFTQHHALSADEFYADSFTSAADLAHPV

SEQ ID NO: 47766 - protein, 274 aa, Burkholderia cepacia
MRAMTSNQANTANQTGAGGPGQPGAGDPAASPAASASPTFSPLYQQIKSLITQSLESGEWKPGEIIPSEVELAARYKVSQGTVRKAIDELAAENLVVRRQGKGTFVATHNEDRAQFRFLRLLADDGAEHPHVSRLLECRRLRAPAEIARQLDLKPADPVVQVRRLLEFESEATVLDEIWLPGAMFRGLTFERLSEYKGPLYAMFETEFGTRMIRATEKIRAVAADPAVADLLHVPAGFPLLSVERVSYTYGDRPVEVRRGWYVTTGYYYQNDLS

SEQ ID NO: 47767 - protein, 343 aa, Burkholderia cepacia
MRGMTDATSAPASPASPPFAGLTPECVLDALDSVLMPAGLRTDGRLLALNSYENRVYQVGIEDGPPVVAKFYRPARWSDDAILEEHAFVAELAAREIPAVPARSFDGRTLHAFDGFRFSIFERRGGRAPDLDRSDTLEWLGRFIGRIHAVGATQPYVARPVLDIGTFGYEPRDYLLAHDFIPDDVRPAYETAVALALEGVEAAFERAGEIRLLRTHGDCHPSNVLWTDAGPHFVDFDDSRMAPAVQDLWLLLPGDREGASRALADLLAGYEDFCEFEPRELYLVEALRTLRLIHYAAWLARRWDDPAFPAAFPWFNTHRYWEARVLELREQIGAMQEGPLWPV

SEQ ID NO: 47768 - protein, 244 aa, Burkholderia cepacia
MLWSSTIAFSASRFAANFATRRARFFSRSISASLATVTSVSERELEAGEQSLCFVVGLRSRRDADVQPTQCVDLVVIDFGENDLLFHTDVVVATAIESTTRHAAEVTHAGQGNRHETVEEFVHRAATQRHHRADRVTLADLEACDCLAGLRDDRLLAGDLREVANGVLDDLLVSDRFAKTHVQRDLGDARHFHDRLVTELLDQAGHNLFFVKLLKTSHFLLRCVRRSVRHRSSSGSEPSCLPRP

SEQ ID NO: 47769 - protein, 713 aa, Burkholderia cepacia
MFNKVVKEFQWGQHKVRLETGEVARQASGAVIVDVEDTVVLATVVGAKSAKPGQDFFPLTVDYLEKTYSAGKIPGGFFRREGRPSEHETLTSRLIDRPLRPLFPEGFYNEVQVVIHVLSVNPEIPADIPALIGASAALAVSGLPFNGPVGAARVAYIDNAYVLNPTRDQIKASSLDLVVAGTERAVLMVESEADQLSEDVMLGAVVFGHEQMQIAIDAIHELVRDGGKPEWDWQPAPKNEALIARVTELAQNDLLAAYQLRDKQARSAKLKEVYAATSAKLEEDALAAGTVAADKATVGNILFDIEAKIVRSQILNGEPRIDGRDTRTVRPIEIRTGVLPRTHGSALFTRGETQALVVATLGTKGDEQIIDALEGEYRERFMLHYNMPPFATGETGRVGSPKRREIGHGRLAKRALVKCLPSADEFGYSIRVVSEITESNGSSSMASVCGGCLALMDAGVPMKAHVAGIAMGLILEGNKFAVLTDILGDEDHLGDMDFKVAGTEQGVTALQMDIKIQGITKEIMQVALAQAKEGRMHILGKMTSAVSGANTQLSEFAPRMITIKINPEKIRDVIGKGGSVIRALTEETGTTIDISDDGVVTIASTSSDGMAEAKKRIEQITAEIEVGQVYEGTVLKLLDFGAIVNLLPGKDGLLHISEIVNERVKDINDYLKEGQQVKVKVIQTDEKGRVRLSAKALLNEAAAAAQSDTPPQQ

SEQ ID NO: 47770 - protein, 384 aa, Burkholderia cepacia
MTAISMKDVSKRYGDHAPVLRDVNLEIASHEFCVFLGPSGCGKSTLLRMIAGLEDVTEGELRIGGARMNDTPPAERGVAMVFQSYALFPHMTVFDNIGFGLRIAGTPKDEIRRRVTEAARVLQLEALLDRKPKALSGGQRQRVAIGRAIVREPRVFLFDEPLSNLDATLRGQTRVEIARLHARFTQSSSVYVTHDQIEAMTLADRIVLLHAGDDVARFGSIAQAGAPLELYHRPANRFVAGFIGSPRMNFLPAVVDAGDAHGCRLTLEGTGETLTLRDRALPRHVGRGARVTLGVRPEHLTIGAASDTDLPALVRDVALVEQLGEAAYVHLDQPGGVPLLAKLPGQATLRRGERHAFHVPPSRCHLFDEAGIAVPALHAEAAFA

SEQ ID NO: 47771 - protein, 699 aa, Burkholderia cepacia
MNRPLNRILPRVTGPASVWTWVKWSLLAALLIAVAIVARLVQTEIETSRLQAHYLSELTRDVGYTVEAGPSDHIRFPANGPYDQRFGYAMIPAFQQRLLARGFVVSEQARDSQRMLSLGERGLFLPYEEKDQTGLMLFDSTGSPLFATVFPQRVYADFDTVPRVITDSLLFIEDRYLLDANEPNRNPAIDWGRFSRALADQALHVVNRHQARPGGSTLATQIEKFRHSPEGRTATPPEKLRQIASASVRAYLNGPQTMLARRTIVVRYLNSVPLAARPHVGEITGIGDGLAAWYGRDFNDVNRVLSAPTTGDNVDQQGKTFREVLSLLIAQRAPSYFLNRGYPALQKLTDSYLRLLSNGGVISPALRDAALAAQIERSAPPAAARVQSFVSRKAVTSARASLLSALGISDLYQLDQLDLQATSTLDNGVQQAVAARLAQASTREGAQAAGLYGFEMLAPKDDPSHLTYSFTLYEHRNGANLLRVQTDSVNQPFDVNRGGRINLGSTAKLRTLITYLQIVSDLHARYANLSNAELARVKPDPIDGLSRWALDYLSHTRDRSLQAMLDASVERKYSASPDVFYTGGGAQVFSNFEKSDNGRIMTLHAAFEHSVNLVFVRLMRDIVHYETLQAAGPSSSWLNDPAQRQHYLQQFVDGESQVYVKRYYTRYAGKAPDDALALMLRDVRKSPPKLATVLRSVAP

SEQ ID NO: 47772 - protein, 688 aa, Burkholderia cepacia
MPPSVTRLARMLRFPERRQESHECMETRLSKIESVLHETRQFAPPAALEKTAAISGMPAYRALVAEAEQDYEGFWARLAREGLTWHKPFTKVLDERNAPFYTWFDDGELNASYNCLDRHVEAGHGERVAVIFEADDGTVTRVTYADLLARVSRFANALKKRGIGKGDRVVIYIPMSIEGIVAMQACARIGATHSVVFGGFSAKSLNERLVDVGAVALITADEQARGGKTLPLKSIADEAIALGGCEAVKSVIVYRRTGGKIDWHADRDLWMHELVDGESDRCEPTWVGAEHPLFILYTSGSTGKPKGVQHSTGGYLLWAAQTMKWTFDWKPDDVFWCTADIGWVTGHTYITYGPLACGGTQVVFEGVPTYPDAGRFWKMIGDHKVTVFYTAPTAIRSLIKAAEADDKVHPKSYDLSSLRIIGTVGEPINPEAWMWYHKHVGHERCPIVDTWWQTETGGHMITPLPGATPTVPGSCTLPLPGITAAVVDETGQDVPNGQGGILVVKRPWPAMIRTIWGDPERFKKSYYPEELGGTLYLAGDGTVRDKETGYFTIMGRIDDVLNVSGHRLGTMEIESALVSHELVAEAAVVGRPDDTTGEAVVAFVVLKRSRPEGDEAAALAKTLRDWVGKQIGPIAKPKDIRFGDNLPKTRSGKIMRRLLRSLAKGEAITQDTSTLENPAILEQLNRSM

SEQ ID NO: 47773 - protein, 415 aa, Burkholderia cepacia
MFDRAQSTIANVDPEIFAAIEQENRRQEDHIELIASENYTSPAVMAAQGSQLTNKYAEGYPGKRYYGGCEYVDVVEQLAIDRVKQLFGAEAANVQPNSGSQANQGVFFAMLKPGDTIMGMSLAHGGHLTHGSPVNMSGKWFNVVSYGLNENEDIDYDAAEKLANEHKPKLIVAGASAFALKIDFERLAKIAKSVGAYLMVDMAHYAGLIAAGVYPNPVPHADFVTTTTHKSLRGPRGGVILMKAEYEKPINSAIFPGIQGGPLMHVIAAKAVAFKEALSPEFKEYQQKVVENARVLAETLVKRGLRIVSGRTESHVMLVDLRAKHITGKAAEAALGAAHITVNKNAIPNDPEKPFVTSGIRLGSPAMTTRGFGPAEAEQVGNLIADVLENPEDAATIERVRAQVAELTKRFPVYR

SEQ ID NO: 47774 - protein, 297 aa, Burkholderia cepacia
MLDYALLDALAAVIRHGSFERAAKELNVTPSAVSQRVKLLEERVGSVLVKRGQPCVATTSGALLCRHTERVQLLEAELGGRMPALPGQIASAWPTLRVAVNDDSVATWFIDAVGPFCTERETLLDLVIDDQDYTASRIRDGSVQGAVTAQAEPIQGCRSERLGRIRYRAVCSPAFYARYFDAGITRDALRRAPCVMFNPKDGLQARFIRRVTRADLDPPQHWIPHVAGYLRACETGLGWGMCPDRMVDRQLAAGELIDMSRGRTIDIDLYWQSWRLSIGWLDDFSAALKARAALFLD

SEQ ID NO: 47775 - protein, 272 aa, Burkholderia cepacia
MAEAATKDAPLNQWTRNIMEIDLNADLGEGCGSDEALLDLVTSANIACGWHAGGANAMRDCVRWAVQKGVSIGAHPSFHDPENFGRKEMQLPAGDIYAGVLYQLGALSAIAQAEGGRIAHVKPHGALYNQAARDPLIADAVVSAIHDFDPSLAVFGLANSVFIAAARQAGLAAVEEVFADRGYRADGSLVPRSLPGALIDDEDAVLARTLDMVRNRQVRALSGEWVPLNAQTVCLHGDGPHALAFAKRIRAALEAAGVDVVAPGALQADEGA

SEQ ID NO: 47776 - protein, 392 aa, Burkholderia cepacia
LPILCAGLLTADPVRSRNVPNLKDVRTTLKVLNQMGVKSETDGCRVQLDASRVDNLVAPYELVKTMRASILVLGPLLARFGEAKVSLPGGCAIGARPVDQHIKGLQAMGAEISIEHGFIEARAKRLKGARIVTDMITVTGTENLLMAATLADGETVIENAAREPEVSDLAHLLVAMGAKIDGIGTDRLVIQGVERLHGARHAVIPDRIEAGTFLCAVAAAGGDVMLTGVRPHILDAVIDKLREAGVSIEEGDSWLRVKMDRRPSAVTIRTSEYPAFPTDMQAQFMALNTVATGTAQVVETIFENRFMHVQELNRLGANITIDGNTALVTGVDKLSGANVMATDLRASASLVIAGLRADGETLVDRIYHLDRGYDRMEAKLTAVGANVRRLSG

SEQ ID NO: 47777 - protein, 206 aa, Burkholderia cepacia
MHAGERFNSISHLVGAVLSVAGLVALVTMGALEGDPYKVVSFSVYGAMLILLYAISTAYHSVRNPRLKAILQKCDHSAIYLLIAGSYTPFTLVTLRGPWGWSLFGVSWGLAVFGIVQELTLGRRTRLLSMILYVLMGWLALVAVRPLIHALPPIGTTWLVAGGLIYSAGIYFFINDERIRHGHGIWHLFVLAGSLCQFVSVAMYVA

SEQ ID NO: 47778 - protein, 181 aa, Burkholderia cepacia
DTEPREASMLIRVATLADAIPLAELKRDTFRETFLQDGFGIDYPPNDLAEYEARTYSVAAITEQLGDPQCRTWVAEGDDGTLVGYAHAGPCKLPHPEVADGSGEIHQIYLRRGTQGTGAGRALFDAALEYLAATRPGPVWLGVWSGNAKAIAFYEKAGFKRVGTYDFKVGASTDLEFIYRR

SEQ ID NO: 47779 - protein, 499 aa, Burkholderia cepacia
MVARYNARFGIAGPSGDCDPAVCRICLPRLLADSVPMTRPRSSAPTSSGRPARLAALHLAPDSLGFALDAAAQAVDAVRRGTALPAALSTVFAQMPSGAQALARGATQDVAYRTMRRLGSADWLIGKFVSKAPPAHVHAVLAGAFALLLDPPDEAAYPAFTVVDQAVTVIGARREFAFAKGMVNAVLRRFLRERDALVAAMQDDPVACWNYRAWWVDAVKRAWPDAWQAILAAGERQGPLTLRVNARRANVDAYLDTLRASGIEAVAIGRHAVRLASALPVDRIPGFADGVVSVQDAGAQLAAEWLGARDGMRVLDACAAPGGKTGHILELADAEVVALESDATRAARIGENLVRLSLAANVCVGDAGAPDAWYDGRPFDRILADVPCSASGIVRRHPDIRWLRREADIPALVAEQRRILSALWPLVKPGGELLYVTCSIFPEEGEGQARWFEAACEDAVRLDAPGQLLPGGVQGRAAAGALDQNTDHDGFFYARFQKR

SEQ ID NO: 47780 - protein, 1340 aa, Burkholderia cepacia
MSFDVRGAFDADAFARAFDAVLTHHDAFRQRFARGADGTWHASDAAKPYDALPFVEVAARDDADALARFDALQRRLDLGNGPLACACAARLPDGSTRLYLAIHHAIVDGVSWRILLDDLDSAYRAACERTPVRLSQPGLRADAWAARLARAATEPASPFAAEAAYWAGMAQGDDIVADHPDAAATNADASVVVQTIDAALTRAALTDAHAAYRTQAIELLGAALALALAGARGAASCRVELEGHGREALFDDADASRTIGWLTSHYPVTLPVAATARDTLCAVKDTLRAVPHKGLGFGVLAHYGDAATRAALAAVPRPRVTFNYLGQFDAPRDATLVPRFGGTGTERDPNGPLGNTLAIHAYLDTDGDGARTLKVHWVYGAPQFERATIDAFAERFAAALRELVDACASRVAHRGAGATPGDFPLAQAAGLTQGAIERAPLDWRTIDDVYPLSPMQQGILFHALFAPGHASYVNQLVATATALDADRLAAAFDASIARHDILRTSVMPDEAAPLQCVHRHARMPVEQLDWRTRGDTLDADFDAWLAADRTRGFDWREPPLMRLTLIRVTDDAWRVVWTRHHVLLDGWSTARLLADVLRDYRDPDAVSPFASRPALRYRDFIAWLGTRDRDADEHFWTGRLARLDAPTLIAERAADRAEAEMATWRATLDADTMTRVAQTARALKLTVNTLVQGAWALALQRMTHQPAVAFGATVAGRPDALADVDSVLGLFINTLPVITAPAPQQRAADWLHTLQRENAAAAEHAHTPLADIQRWARGSGGALFDTLVVFENYPVDESVRDADPRALALSGVRSIEATDFALTLVIESGAELTIDYGYDTARVDARQVETWHRAFACALDALARTPDARLGTLSIADEATRDALVRAQDTARIWPPGQRQPLHLQFVYAARATPDAIALEYADTHGRVQRATYRELDAATSRIAAALRRRGVRPDTPVALCVERSFDMVMALVGVLKAGAAYLPVDPDYPAERIAYLLRDARPAVAITQAHLREQVEAALGEGADTQLLTVADLLADEAGDVADETAAIDDAQLAYLIYTSGSTGKPKGAGNTHGALANRIAWMQHAYRLTRDDVVLHKTPFGFDVSVWEFVWPLAIGAKLAIAAPGDHRDPARLAAAIHAHGVTVLHFVPSMLAAFAAHLDDFSAAAQCDSVRLIVASGEALAPELVAKMARLLPNATLVNLYGPTEAAIDVSHWTCGPDDAQAVAVPIGHPIANLQLHVLDAAWQPVPAGATGELYLAGAGLARGYLGRPALTAERFVPDPFVPGARMYRTGDLARRRADGALDYLGRVDTQVKLRGQRIEPGEIEALLRAAPGVNDA

SEQ ID NO: 47781 - protein, 338 aa, Burkholderia cepacia
MSEPQPSNGAETNAAKPAPAGLESLAAVGSRLAQLRETKGWSVDDVSARLKVAPQKLRALEAGDISHLPGVTFALGVVRSYAKMLGVDPEPFAQALRRERGVPEVDLSMPASSGTDLPRGRVSIPLGGSSRHHPWLWGTGIVIVAVVAVLMWHTGGDSSSLLARFKGGDAEHASAASAATASSAAEEAATNAASGAVTNAVPAPAAASAAPAQAIASAVPAPAAPVATAAASQPVAATAAASTAAPAQPASVVVAAGQSMVELKVKQDCWFSVRDKNGKELFSALVRAGETKQVAGDGPFKVTIGNKAGLDAVAFDGKPVDPAKYSAARGNVARFTLP

SEQ ID NO: 47782 - protein, 555 aa, Burkholderia cepacia
MEIVFTVLILLLTVALSGAVTRLLPLQLPLPLMQIAFGAMLAWPKLNLHVTFDPEIFMLLFIPPLLFADGWRIPKRELYLQRRAILMLAFGLVFMTVLAVGYFAHWLIPELPLPIAFALAAVLSPTDAVALSGIAGKGRIPPQLMHILEGEALMNDASGLVALKFAIAAALTGVFSLRAASVTFVIVAAGGLATGAIVSWLFSALSTRFLNAEQEGDPAPGIVMTLLVPFAAYLFAEHLDLSGVLAAVSAGMMMNYTSFSRKSTVASRVRAESTWAMIEFVFNGMVFIMLGLQLPHIIGRALVDAHHTSDALVGRMIFNVCAMMLALYAIRFLWVWLLRWFASRRAARQGLAGTMAGVRTIAVMTVGGVRGAVTLAGVLSIPVALSDGAPLPGRDTAIFIASAVILGSLIVAVIGLPLLLRGVRSSRNPLGDEERIARSAAAQAAIRAIDSSHDAISADLDESGAARCADISARVMDQYRRRLAALAEDGPTPRAEAKQAETMELQMRIAAVRAERSALYRLRSDSKISDETLTKLIREIDLSETALSTRKKGIL

SEQ ID NO: 47783 - protein, 364 aa, Burkholderia cepacia
LTVQLVSVACFIAWPLRFGFERPDAGGVAGALFTLLMGFDKPFNQAPSLHIGLLVVLWAVYAKHLRGTFARVVLHLWFAAIGVSVLTTYQHHAIDVPTGAAVGCLALFLFPLRDAAGRLPGAEASPSAAGRALARRYACGAALVALAALACVPRAPGWALAAGWVALALACVAWAYRRGAPGAFQKDAHGRLPVFIGWLLAPTIAGAFVNSRLWTFRQPAPVRIDERVSIGRTPTTRDIRRDGFTALVDLTAEMPRWAAADAALAYASVPQLDLVAPTAAQLAQAVAALERLHGEGRDVLVCCALGYGRSVLCAAAWLAARRGLADARDALAAVRAVRPHAVWSDDGVAVLQQWIDRRRDAGRV

SEQ ID NO: 47784 - protein, 1287 aa, Burkholderia cepacia
  MISC_FEATURE (428)..(428): X=any amino acid
  MISC_FEATURE (431)..(431): X=any amino acid
  MISC_FEATURE (439)..(439): X=any amino acid
MTSFPTALHHRIRELARLAPDAPAIAVPFQNDLRLSRGALDARASQLARQLRAAGVGAEVRVGVCVERSGELFVALLAVLKAGGVFVPLDPRHPAARLDWIVQDAQLRHGIVDAAGRAALGTPFEHAFDATADASGVAQDHAFDDDTVAVHPRSAAYMIYTSGSTGTPKAVVVEHGPLAAHCDALAAALPIEAGDRLLHFASVNFDAAHECWLAPLAVGAGIVVAPPQPFAPDAAHALMVREAVNVAAFPPAYLREFAAVAARDGVPPALRVLAFGGEALPQQAFEFVRRTFPAVRLINGYGPTEAVISPMLWPVAPGEMPVLAADDAYASLPIGSVIGPRAARIDGAAADGVGELPLGGVCVARGYHGRPALTAERFVPDADGEPGARVYRTGDLARLRDDGAYDYLGRLDDQVQVRGVRVEPAEIXACXRSHPAVAXAAVIAETANGPTRLIACVALRAAADDVALKAHVAAQLPAAWQPHRFVRCDTLPYTLNGKLDRAALRERIAAARDTTQAAGDAPRTPTERQIAGLWQTLLGLDVMPSRDDRFFALGADSLAAMQLHAAIRAAVRVNLRLDTLFADPVLAELADTVDRAERETGEPLATITARRAPAAVAAPYVDRAASLAQQRFWVLAQTRDASAAYHIAAHWTIDGVLDRDALQRALDHVIGRHEAWRTTLVDNDDGVVMQRIHAHLPVSIATVDLRDQPPAARDAHAARLAERDAAEPFDLARGPLLRATLVVLADDRHRLLLTAHHAITDGWSSRCAFDELSAAYCAYADGREPSLPDLPIQYADYADWQRDMLAGGEGERQLDYWRGALRDVPGPLALPVDRQPGATRTLQGARVSVRLPDAVAADVRQLARDAQATVFTVLLAALDAWLSRLTGETDVVVAVPVAHRQRPETRALLGLFLNTVALRVRVAPTLPFRALVDAARTAALDAVAHQDVPFERVVDAVKPPVKRGDEWLRVKFAQQFDARHDSVLPRATAVATPGPDLAARFDFALDFTDDANGIELVAAYATDCIDADTARAWLDSYAALVGAAAHAPQHTTAALPCDASAASRQPRDGRALRIEHADIVAAFARQAAAYPHRVALSDASTSLTFAELDDASNRIARALAQRGVAAEAAVVVCIERSTRFVVGLLGALKAGALAVLLDPAQPAARLAAAAADCGARWALVAEPAAWPAGIDAQPLDVDALAQDATLAHAAGVRVAPHPEQGAYLIYTSGSTGTPKGVVVSHGALADYVQGMLDELAFAPDASFAMVSTVAADLGHTTLFGALCAGRT

SEQ ID NO: 47785 - protein, 323 aa, Burkholderia cepacia
MSTLHQDSIIIDGLNISKFEKPVFEDMRRGGITAANCTVSVWENFTKTVDNIGVMKKKIRDNGELLTLVRTTDDIFRAKKEGKTGIILGFQNAHAFEDNLGYIEAFADMGVRVVQLCYNTQNLVGTGCYERDGGLSDFGREVITEMNRVGIMVDLSHVGGNTSSEAIAFSKKPVCYSHCLPSGLKEHPRNKSDAQLKEIADAGGFVGVTMFAPFLKRGIEANIDDYIEAIDYVVNLIGEDAVGIGTDFTQDFAKEFFDMLTHDKGRYRQLTNFGKVINPDGIRTIGEFPNLTAAMERHGWKESRIRKIMGENWVRVFKDVWGA

SEQ ID NO: 47786 - protein, 631 aa, Burkholderia cepacia
HRINTPKALQEPTLHTVIRAVEASAKPVVAALHSVVMGGGLELALGAHYRVAAPGAQVALPEVKLGLLPGAGGTQRLPRAVGLETALNMIVSGAPVPSEQLAKSGLFDEMADGDLLDAAVAFARKVGAQKGPHPRVRDRKIVHDNAAGFIQFARNSARAAAPNYPAPHKCIDAIEAGVLNGFDKGSVAEREGFVALMMTPESRALRHAFFGERAASKIPDVPADTPLREIRRVGVIGAGTMGGGIAMNFINAGLPVTLLETKQDALERGLATIRKNYDAQVKKGKLTQEKLDARMALITPTLSYDDLKDADLIVEAVFEELGVKEQVFKKLDEVAKPGAILASNTSTLDVDKIAAFTKRPQDVVGMHFFSPANVMKLLEVVRGAQTAKDVLATVMAVAKKIRKTAVVSGVCDGFIGNRMIEQYIRQALFMLEEGALPAQVDRAIEKFGFAMGPFRMSDLAGNDIGWAIRKRRYVEQPGLQYSKIADRLCEQGRFGQKTGAGWYDYVPGDRKAKPSSLVDEMVVAYSKERGVERRKIGDDEIVERLVFALVNEGAKILEEKIASKASDIDMVYLTGYGFPLWRGGPMLYADTVGLYNVERAIRRYAAAPNGDAWQLAPSIAELAKAGRGFNG

SEQ ID NO: 47787 - protein, 507 aa, Burkholderia cepacia
MTVIKQEDLIQSIADSLQYISYYHPLDYIQALGRAYELEESPAAKDAIAQILTNSRMCAEGRRPICQDTGIVTIFVKVGMDVRWDGATMGLTDMINEGVRRGYTHPDNVLRASIVNPPEGARKNTKDNTPAVIHYEIVPGDKVDVQVAAKGGGSENKSKFVMLNPSDSIVDWVLKTVPTMGAGWCPPGMLGIGIGGTAEKAMLMAKESLMEPIDIQEIIARGPKDWIEELRVELHEKVNALGIGAQGLGGLATVLDVKIMAAPTHAASKPVALIPNCAATRHAHFVLDGSGPAKLEAPSLDAWPKVQWEPNTETSKRVDLNTLTPEEVASWTPGQTLLLSGKMLTGRDAAHKRIADMLAKGEKLPVDFTNRVIYYVGPVDPVRDEVVGPAGPTTATRMDKFTETMLAQTGLISMVGKAERGPVAIDAIKKHKAAYLMAVGGAAYLVSKAIRGAKVLAFEDLGMEAIYEFDVQDMPVTVAVDSSGTSVHQTGPKEWQAKIGKIPVATA

SEQ ID NO: 47788 - protein, 298 aa, Burkholderia cepacia
MNPGYRGRFAPSPTGPLHFGSLVGALASWLDARAHGGTWLVRIEDLDGPRTVPGAADDILATLAHFGMTPDEPPIWQSTRDAAYTAALERLVAAGLVYPCGCTRKEIADSLRAAHERHTTLAYPGTCRTGLHGKPARAWRLRVPDGNDAVVTFDDRWQHAQSQNLATEVGDFVLKRADGQWAYQLAVVVDDADAGITHVVRGADLLDSTARQIYLQRCLGVPTPAYLHVPVVVDANGEKLSKQTGATALERDDPLPALRAAAAHLGLAADGDRPVHTIDAFYAAATDAWARRFGPRAG

SEQ ID NO: 47789 - protein, 374 aa, Burkholderia cepacia
MTLAGTLEIVDELRAGRMVLLVDEEDRENEGDLVIAADHVTPDAINFMARFGRGLICLTLTAERCAQLRLPPMADHNGAPFGTAFTVSIEAAEGVTTGISAADRAHTIRVAVRSGARPDDLVQPGHVFPIAARPGGVLVRAGHTEAGCDLAALAGLTPASVICEVMNDDGTMARLPELKAFAAHHGLKIGTIADLIHYRREHESLVERVGERPLHTPWGRFRAIEYRDAVHDAPHLALVRGEPDPATPVLARVHECHSLLDLLDAEPSAHSWPLHAALQRIDAAGCGVAVLLDCDLRGDAPRMPAGTARRDGRVTGIGSQILRDVGMRRLNVLSSPFRLPALSGHDLEIMAFIPLGDDDPEGARAMPANSLRAA

SEQ ID NO: 47790 - protein, 193 aa, Burkholderia cepacia
SSGAEVRQHILNIAKPIMLHKGFSAVGLNEILAAAGIPKGSFYHYFGSKEAFGEALLESYFEGYLAHLDQPAQAPGRHGRRRLMTYWGNWLHTQCADDPEGKCLAVKLGAEVSDLSEAMRAVLRRGTSQIIERLAGGIEGGLADGSLSGVDDPSYTAAILYELWLGATLLEKIHRNRKPLERAMAETRRMLNL

SEQ ID NO: 47791 - protein, 130 aa, Burkholderia cepacia
MNLIAKLEQEEIERALAGKTIPDFAPGDTVIVNVNVVEGNRKRVQAYEGVVIAIRNRGLNSNFIVRKISSGEGVERTFQTYSPLLASIVVKRRGDVRRAKLYYLRERSGKSARIKEKLVSKDRAAAASQE

SEQ ID NO: 47792 - protein, 270 aa, Burkholderia cepacia
MQQANYDNTGATGTNALAAGVNASAAGASSVAVGDGSNAQTAGAVAIGQNASATGGKAVSIGSGNTASGDGAVAIGDPNVATGTGAVAMGANNTATGDGAVSLGNQNTATGASALALGSSNQATADNTIALGSQATASATGAQAYGSAAKATAADALAFGTNAQANVANSIALGANSVTAAAVGTSSATIGGVTYPFAGGSPVGVVSVGAPGQERQITNVAAGRISATSTDAINGSQLNATNNAINALSTSTASNVASLSTGINSLSTGM

SEQ ID NO: 47793 - protein, 237 aa, Burkholderia cepacia
MIHDGMISVGSAHVTAPGQTAEAVFRRPCDVLHLFFEDSFLDHCGSETIRLLSRAEARPQPCIQHDPAIAKLAFALTDATHIESSYSELYTESLSLAIVTRLLARATGGTVDTTVSRGLSRHRLNLIFEYIDAHLDHQLSLAEMSRVVGLTSMHFAAQFRLATGSRPHEYLLRRRIEYAQDMLRRSDAPLPDIALSAGFRNQSHFTAVFKRFTGDTPGRWRNMHAASVAMTPNATCV

SEQ ID NO: 47794 - protein, 779 aa, Burkholderia cepacia
MEERRHGAAAARVGVGRRVQRARLRHQPVVERASRARVDVQARHHAELRRRGQQPRIRRPARALRNRLPVAQPAVLARRSAMLQSRRTFMCGCLGTFAACSLFPGVTNAKMIDLLPPSDPADGKTFRVICMHDVRDNLMASFSSPTAIIDPFAVDTGTLTAIFSWLQTNNYHTITVKQIEESRHGGKPLPPRSVLLTFDDGFRSHYTKVLPLLERFKYPAVMGLVTAWIDTPADTPIRISDKVQVPRDYFLSWDEVKKLGQSEFVELGCHTHNLHHGAIANPQGNELPATTSHLYLQDQKRYETDAEFHARVHDDLQTCVRQIRERTGLVARSMVWPYGAENQPVRQISTSLGMDIQFSLDAGPNTPDVPLDRLRRILMMYDVDIGGFERSMREPASNRGDVDVPERTVQVDLDQVYDPDPARQEANLGKLIERIYRMQPKSVYLQAYADPKGTGVAEAVYFPNRHLPMRSDLFSRAAWQLNTRANVQVYAWMPVLAFRPPADKLRSLEAVSAFGGAPARENGTRVFRLSPFDPDARLMIQQIYEDLSKHASFSGILFSDDAVLDDYEDGGRHALRTYSQWGLPADIGKIRENPDLMKRWTHQKTRYLIDMTRQLEQIVLAHQNVGDVLTARNIFAMPVLKPESEAWFAQNYDDFLAAYDYVALMAMPYMEQAKDPDGWLDQLVKAVRTKQRGLQRTVFELQAYDWHGQKAVPAGTLLAQMRRLRSEGAVNFGYYPDNFLNGQPELDAMRDVMSLKSRLDPTSINALMQMQQSHGTKTP

SEQ ID NO: 47795 - protein, 164 aa, Burkholderia cepacia
MILLTGVGVFLAWAVLVALEDIRHRRIPNSLVIGGFVSAFVLAGHNPFGISVNQALIGALVGFLSLFPFFVLRVMGAADVKVFAVLGAWCGPYALLWLWIIASLLAFAHAGTLVFATRTPVSALWQRRSPTMQIAGFRASPYAAFLVIPAALWCLYRIAVGGMQ

SEQ ID NO: 47796 - protein, 383 aa, Burkholderia cepacia
MSEIRHYDVAIVGGGLVGASAALALTRRGLRVGLFERRDCGAQASGVNYGGVRCQGRPAEQLPLALRARHIWDRLPELIGIDGEFVVSGHLRLARSHDDLDALDAYAALAGAHGLPLQVMRGDAFRRRYPWLGRAALGGSLCETDGHANPRLVSPAFARAARAAGADVFEHTPVDAVHHDGTRFHLQAGGRAHTATWLINSAGAWANTIAERFGEAVPMEPIYPNMWVTEPLPPFIMHNLGVYGGGVYARQVARGNCVIGGGRGRGDGEFGQPSVDTTRAVMRDACALLPALRDALLIRTWSGVEGCTPDHNPIIGMSRTTPNLLHAFGFSGGGFLLAPGVGDVLADLVTTGETATPLDAFSIGRFFRQAAPTAPFRQEEPHN

SEQ ID NO: 47797 - protein, 250 aa, Burkholderia cepacia
ARPLVLHEQNSIAGLTNKVLAKLAKRVLVAFPGALPHAEWTGNPIRAELAHTEPPQARYASRGGPLNVLVVGGSLGAAALNEVVPRALALLAPGERPRVVHQAGVKHIEALKANYEAAGFAAGEDVRLVPFIDDMAAAYAAADLVICRSGAMTVSEIAAVGVAALFVPFPHAVDDHQTTNAAFLADAGAAVLVQQRDLSAELLADWLRGQSRASLADMAERSRSLAKPEATDEVARVCAKAAGANLEQLQ

SEQ ID NO: 47798 - protein, 347 aa, Burkholderia cepacia
MNSAEKKLYISDVTLRDGSHAIRHQYSVDHVRAIAAALDDAGVDSIEVAHGDGLQGSSFNYGFGAHTDVEWIAAAAQSVKKAKIATLLIPGIGTTHDLRHAFDAGARVVRVATHCTEADVSRQHLDFARELGMDAVGFLMMSHMTTPQKLAEQAKMMETFGATCVYVVDSGGALGMNEVRDRFRALKAVLKSDTQTGMHAHHNLSLGVANSLVAVEEGCDRIDASLAGMGAGAGNAPLEVFIAAAQRQGWNHGCDLYRLMDAADDLVRPLQDRPVRVDRETLALGFAGVYSSFLRHAEVAAGKYGLKTVDILVELGRRKMVGGQEHMIVDVALDLLKRQQPIMSDAH

SEQ ID NO: 47799 - protein, 220 aa, Burkholderia cepacia
MSMGKLKRRGGAKNGGGYRQGGGERGGARGWEERRKSGEGGVQNGKKGGEKKGGRGGGKKEKRGKGGGGKVGGNKKGGGKRVGGGRNRGKVKGRGRRKKKREKRVRERGGENGKRRIKGGGGGRQSSVRPAQTAERCREPVDEDPHARREMPAGRKHHRYGQRPGTPFRQHLDQRAVGEQRREPVARRLDQPEAREAAREIRLRTVDRHDAVHLHRMHLA

SEQ ID NO: 47800 - protein, 954 aa, Burkholderia cepacia
MSDVMKQFQLNSYLFGGNASYVEELYDAYLNNPASVPENWREYFDALQNVPATDGSNANDVAHFPIVESFAERAKANAFIPRESTSNLATARKQVHVQSLISAYRFLGSQWANLDPLKRRERPAIPELEPAFYDFSEGDLDQTYSASNLYFGFDQASLRDIVKGLRDTYCGTIGAEYMYISDPEQKRWWQERLESTRATPSFSIDKKKHILNRLTAAEGLERYLHTKYVGQKRFSLEGGESFIAAMDEVVQHAGKSGVQEIIIGMAHRGRLNVLVNTLGKMPADLFAEFEGKHVDDLPAGDVKYHKGFSSDVSTEGGPVHLSLAFNPSHLEIVNPVVEGSAKARMDRRGDEDGLQVLPVQIHGDAAFAGQGVVMETLNLAQTRGYGTHGTLHIVINNQIGFTTSDPRDARSTLYCTDVVKMIEAPVLHVNGDDPEAVVLAIQIAIDYRMQFHKDVVIDIVCFRKLGHNEQDTPAVTQPLMYKKIAQHPGTRALYAEKLVQQGVITAEDADNYVKAYRKAMDDGHHTVDPVLSNYKSKYAVDWVPFLNRKWTDAADTAVPLAELKRLGERITTVPENFKVHPLVERVINDRRNMARGDQPLDWGMGEHLAFASLVASGYSVRLTGQDSGRGTFTHRHAVLHDQNRERWNDGTYVPLQNIAEGQAKFTVIDSVLSEEAVLGFEYGYSTAEPNTLVLWEAQFGDFVNGAQVVIDQFISSGEVKWGRVSGLTMLLPHGYEGQGPEHSSTRIERFLQLCADHNMQVVQPTTPAQIFHLLRRQMIRLFRKPLIVATPKSLLRHKEAVSDLSELAKGSFQPVLGETDGGIDAKKVKRVLVCSGRVYYDLVAHRREAKANDVAIIRIEQLYPFAHKQFEAEMKKYENATEVVWVQDEPQNQGPWFYVEHHLKEGMKEGQKLAYSGRPASASPAVGYYAKHYEQQKALIEGAFGRLKSASIAK

SEQ ID NO: 47801 - protein, 275 aa, Burkholderia cepacia
MSNSRQHQGHFARKRFGQNFLVDHGVIDSIVATIGPARGQRMVEIGPGLGALTEPLIERLATPESPLHAVELDRDLIGRLQQRFGALLELHAGDALAFDFRSLAAPGDKPSLRIVGNLPYNISSPLLFHLMTFADAVVDQHFMLQNEVVERMVAEPGTKAFSRLSVMLQYRYVMEKMLDVPPESFQPPPKVDSAIVRMIPYEPHELPDVDPVLLGEIVSAAFSQRRKMLRNTLGDYRETIDFDALGFDLARRAEDVSVAEYVGVAQALAAVRKAG

SEQ ID NO: 47802 - protein, 1185 aa, Burkholderia cepacia
MRPRPFHTFFTSDTAVRLSSIKLAGFKSFVDPTHFQVPGQLVGVVGPNGCGKSNIIDAVRWVLGESRASELRGESMQDVIFNGSTARKPGSRASVELIFDNSDGRAAGQWGQYGEIAVKRVLTRDGTSSYYINNLPARRRDIQDIFLGTGLGPRAYAIIGQGMIARIIEAKPEELRVFLEEAAGVSKYKERRRETENRLHDTRENLTRVEDIVRELGANLEKLEAQAVVATKYKELVADGEEKQRLLWLLRKNEAAGEQQKQQRAIEQAQIDLEAQTAKLREVEAQLETLRVAHYSASDAMQGAQGALYEANAEVSRLEAEIKFIVESRNRVQAQIAALNAQREQWRAQAEKSQDELEEAEEARAMADEKAALAEDNAAAKHDALPALEAKWRDAQAQLNDERARIAQTEQSLKLEAAHQRNADQQLQQLQQRHERLKSEAGGLDAPDETQLEELRMQLAEQEEILAEAQARLADAQETVPRLDGERRAAQERVQAEAAQIHQLEARLAALKQLQENVQTEGKVQPWLDKHELGALPRLWKKLHVEAGWEAALEAVLRERLAALEVSNLDWVKAFASDAPPAKLAFYAPPAAGEPPAAVAGLRPVLSLVRIDDAGIRAVLNDWLGNVYVADDVAQALATRTQLPAGGAFVVKAGHIVTRVGVQLYAADSEQAGMLARQQEIENLARQVRAQALLADEARTAAVRAEAAHTQATQALGDVRAQAERATQRVHALQMDVLKLAQAHERYTQRSTQIREELEEIGAQIEEQRALRAESEANFERFDGELAELQARFEDNQLAFESLDESLTQARQEARDLERGANDARFAARNAVTRIDELKRTIQVAHEQSERVAASLEDARAELETINEQTAHTGLQDALEIRAVKEEALQAARIELDDLTAKLRASDEQRLVAERSLQPLRDRITELQLKEQAARLSVEQFAEQLATAEVDEAALAAKLTPDLKPSYLQGEVTRLNNAINALGPVNMAALDELKAASERKVFLDAQSADLIDAITTLEDAIHKIDQETRTLLQGTFDEVNRHFSDLFPRLFGGGQAKLIMTGDEILDAGVQVMAQPPGKKNATIHLLSGGEKALTATALVFAMFQLNPAPFCLLDEVDAPLDDANTERFANLVRAMSDKTQFLFISHNKIAMEMAQQLIGVTMQEQGVSRIVAVDMETAAGFAQN

SEQ ID NO: 47803 - protein, 267 aa, Burkholderia cepacia
MRAGLFPDHIMFTRLREDVATIRERDPAARSAWEVLTCYPGLHALVLHRFAHACWRAKRYWLARFASQAGRFLTGIEIHPGATIGRRVFIDHGMGVVIGETAIIGDDCTIYQGVTLGGTSLTRGAKRHPTLEAGVIVGAGAKVLGGFTVGAGAKIGSNAVVVKPVPPGGTAVGNPARIVMPAQPKPQPERAAFCAYGITPNADDPMSLAIHGLIDHAAKESRRVDEIVAALERLGTHLETLQGADAARLDLRRLSAVLEGKTVERQM

SEQ ID NO: 47804 - protein, 427 aa, Burkholderia cepacia
MSAIVDIIGREILDSRGNPTVECDVLLESGTMGRAAVPSGASTGSREAIELRDGEAGRYNGKGVLKAVEHINTEISEAIMGLDASEQAFLDKTLLELDGTDNKSRLGANAMLAVSMAVAKAAAEEAGLPLYRYFGGSGAMQLPVPMMNIVNGGAHANNSLDIQEFMIVPVSQPTFREALRCGAEVFHALKKILSDRGMSTAVGDEGGFAPNFGSNDECLSTILQAIEKAGYRAGEDVLLALDCAASEFYHDGKYQLAGEGLQLSSAEFTDYLATLADKFPIVSIEDGMHESDWDGWKLLTDRLGKKVQLVGDDLFVTNTRILKEGIEKGIANSILIKINQIGTLTETFAAIEMAKRAGYTAVISHRSGETEDSTIADIAVGLNAGQIKTGSLSRSDRISKYNQLLRIEEDLGDIASYPGKSAFYNLR

SEQ ID NO: 47805 - protein, 356 aa, Burkholderia cepacia
MRRLPAACRGFFAWGGVRGDHEPRHAYSIGAMGLPARVPVLVYNRSIDRPRTHGIPMAYKTIEDTIGNTPLVQLVRLPDDEIRARNNVVLAKLEGNNPAGSVKDRPALSMISKAEARGRIKPGDTLIEATSGNTGIALAMAAAIRGYKMVLIMPEDLSVERRQSMAAYGAEIILTPVKGGMELARDLAEQMQREGKGVILDQFGNPDNPIAHYEATGPEIWRDTEGRVTHFVSAMGTTGTIMGTSRYLKEQNAAIEIVGAQPEDGSRIPGIRKWPEAYMPTIFDRSRVDRVENVSQAAAETMARRLAAVEGIFAGISSGGACEVAMRIARQVENATIVFIVCDRGDRYLSTGVFPA

SEQ ID NO: 47806 - protein, 944 aa, Burkholderia cepacia
RAVVRHFLSTNGLMATPVNALGFTSSYVWSTIEGQPRVVATRTSEGEDWSFEYDVDGRQTRVRHADGRTAHWRFDAQFQIVEYTDFDEGLYRIKYNDAGMPVMLMLPGERTAEFEYDDAGRIVAETDPLGRTTRTRYDGNSMRPVEIVGPDGGAWRAEYDPQGRLLVSQDPLGRENRYEYPKGLTSLPLAHIDALGGRKTLEWNRLGELVARTDCSGKATRTTFDPFGLPVMRENALGQRITYHVRPTGEPLRITYPDGSSETFEYDAAGLMVRHVGLGGRVRQSLRNARGQVVEISDPAGRRTRYRYDADGRLRELLQDRACYAFTYSAGGRLLTETRPDGVERRFGYGDAGELLTLDIVGAPVNGANANRPIRTIRFERDRMGNLKVQHTPTEVTRFERDKGDRTVKVERTPTPAGIALGITPDVVSFEYDKAGRLMAEHGVNGTVEYVLDALDNVTTLALPHAQTLQILRYGSGHVHQIRCGDQVVSDFERDDLHREVMRTQGRLTQRSAYDPLGRKVWQSAGFQPEALGRGRGHLWRNYGYDAAGELIEMSDGLRGSTQYNYDPAGQLTRRVNTMDRQVEEFAWDGAGNLLDDAQRSSRGYVEGNRLLMWQDLRFEYDPFGNLTTKLRGANQTQRFTYDGQNRLIAVRTHDARGTVESRFEYDPIGRRIAKTDTSYDLRGVKLRSETKRFVWEGLRLAQEVRETGVSSYIYSPDASYSPAARVDAVIANALAAAAIDTAKLASRIYHFHTDLVGAPLEVTDEAGELAWAGQYTAWGKVKPNSRELTSARTDQPLRYAGQYADESTGLHYNTFRFYDPDVGRFINHDPIGLLGGDNLYAYAPNPTGWIDPWGWFGEKPLNSPDVTKWLEKGGTVHVEVESGTWVYTNAKGTVVRYPNGYPDFKPYEVRSVDVEGLKGNHSRAPAGDFGLADAKAGSPADYS

SEQ ID NO: 47807 - protein, 391 aa, Burkholderia cepacia
MKHVTTRLRRLFAPIGLHWYLALLLALDALMVLRPVVEHARLGLHRAWLADALNLVDNMGLVVLPQVVVAAGLATMAIGIVLRARVAWVLSILLLVAAAAISVLGGYRSHAVFVYTAVLVVALLYYWRHFDRASIAASSLFALLSIVSLLIYATFGVLYLGDEFTPPVHDLATAVYFSIVSMSTVGYGDIVPHAPTARLFTASVIVLGITVFATSISAVVGPVIGGNLKRIVKGGISNVIRKHHFLIVGATPVAHAVHDGLRKRGYAVTVVVPAGVEHNYPAATDLIVGDATDHAVLESAGAATARAVLALRSDDAENAFIILAIREIAPSVRTVALVNQQRNLERLRLLKPDMVFSPQQLAGELLASTLNDEPVDKSVISHLLFGTTDAA

SEQ ID NO: 47808 - protein, 222 aa, Burkholderia cepacia
MGIKGGVGGSICDDAGVRYGESGGVKCKTGKYIRRGGGAGERVGRKKWGGERRAGLVKKTQEKKKARRVREKSSGGCRRWELRGGEGLEEEAAEAPWYTHYRMESYVTGELRELVAAELPINGARLGHISPTAMHVARKADRRDLRALVGRQPRGRAHQRLPPGVGRDFRPARLRRRQRIRFARDRPLDAVGIERDEFDGAGAEVDSEQAHDVRGIRMNGCR

SEQ ID NO: 47809 - protein, 306 aa, Burkholderia cepacia
MTDDPIAAYLSNLKHVRQLSEHTLRAYTHELDELKKLAAGRPLDALTAADMRGAVARAHAGGLSARSISHRLSAWRAFYRWLAQRIEMPANPVAAVRAPKRPKTLPKALSVDDASALMDAPLAGTTEGIRDHAILELFYSSGLRLAELIGLDVTYTQADGYRSAGWLDLAEAEVTVRGKGNKERKVPVGRKAIDALNAWLAVRGEFVKHDPHPLFVSVRGNRMSPGVVRERVKRAALAAGIPANVHPHVLRHSFATHVLQSSGDLRAVQELLGHASVAATQVYTSLDFQHLAKIYDSAHPRAKKRD

SEQ ID NO: 47810 - protein, 670 aa, Burkholderia cepacia
MRVTVENGKAIKVTGDPDHPPTQGVLCTKVSRYADRVHHPDRLTVPLRRIGEKGEGRFVPISWDEAFDEIGRRLGEIAARAPEAIVPYSYAGTMGLVQGEGIAQRFFHKLGASRLERAICAAAGAAGLRYTYGGSVGMHLEHFEESELILIWGANPIASSLHFWTRAQEAKRRGARLVAIDPYRSLTAEKCHQHIALKPGTDGAFALGMMHVLITENLLDHDYIADHTLGFDELKARALTYPPERVAQICGIDASELVDLARRYGATRKASIRLNYGMQRVRGGGNAVRAIASLPALTGAWRDRAGGLLLSSSESAPVNQAALLRPDLMPGWPNKLPRIINMNAIGDALLHPGDATFGPKVEALIVYNSNPVAVAPDSSKVAAGFARDDLFTVVLEHFKTDTVDFADIVLPATTQLEHLDIHKSYGHTYVMANLPVIPPVGDARPNTEIFRGIARSMGLDEPALYHSDEAVARAALRWDDPVLDSDWDTLKQAGWLKLKLPEAPFANGGFRTPSGKCEFYSPRLEQMGMDPVPDYLPPFESVEAAPELAARYPLAMISPPARHFLNSTFVNVDSLRSTEGEPHLDMHPSDASARGIAEGDVVRIFNDRGSMQALARITDRARAGLVVGLSIWWKKLSPDGRNANEVTSQALTDLGNSATFYDCLVEVERI

SEQ ID NO: 47811 - protein, 336 aa, Burkholderia cepacia
MFRFVLRRVGMVIPTFIGITILAFALIHLIPGDPIEVMMGERGVDPAMHAEAMKRLGLDQPLPLQYLHYVGRALHGDLGTSIITNTSVGGEFFARFPATVELSLCALVFALAVGLPAGVIAALRRGSVIDHGVMGTALTGYSMPIFWWGLILIMVFSSYLGWTPVSGRIAVEYDFPHPTGFMLIDALLAPDEGAFKSAVSHLILPAIVLGTIPLAVIARMTRSSMLEVLREDYIRTARAKGLSPVRVVVVHALRNALIPVVTVIGLQIGTLLAGAVLTETLFSWPGVGKWLIDAIGRRDYPVVQGGILLIATLVIVVNLVVDLLYGVLNPRIRHTR

SEQ ID NO: 47812 - protein, 865 aa, Burkholderia cepacia
MRIDKLTTKFQEALADAQSLAAGRDNQYIEPVHVLAALVAQQDGSARSLMSRAGVHVQALQGALNEAISRLPQVTGTGGDIQIGRELAGLLNQADKEAQKLNDTFIASEMFLLAVSDDKGDAGKLARQHGLTRKALEAAIAAVRGGSQVHSQDAESQREALKKYTVDLTERARAGKLDPVIGRDDEIRRSIQILQRRTKNNPVLIGEPGVGKTAIVEGLAQRIVNGEVPETLKGKRVLSLDMAALLAGAKYRGEFEERLKAVLNDIAKDEGQTIVFIDEIHTMVGAGKAEGAMDAGNMLKPALSRGELHCIGATTLDEYRKYIEKDAALERRFQKVLVDEPSVEATIAILRGLQEKYELHHGVDITDPAIVAAAELSHRYITDRFLPDKAIDLIDEAASKIKMEIDSKPEEMDKLDRRLIQLKIEREAVKKEQDEASQKRLQLIEEEIERLGREYADLEEIWTAEKAAVQGSAQLKEEIEKVRADIARLQREGKLEKVAELQYGKLPQLESQLKQVTQAEEQEQHNPTRPRLLRTQVGAEEIAEVVSRSTGIPVSRMMQGEREKLLHIEEKLHERVVGQDEAISAVADAIRRSRAGLADPNRPYGSFLFLGPTGVGKTELCKALASFLFDSEEHLIRIDMSEFMEKHSVARLIGAPPGYVGYEEGGYLTEAVRRKPYSVILLDEIEKANPDVFNVLLQVLDDGRMTDGQGRTVDFKNTVIVMTSNLGSQVIQAMTGSPQDEIKDAVWLEVKQHFRPEFLNRIDDVVVFHALDRSNIESIAKIQLARLHDRLAKLDMALDVSPAALEQIAKVGYDPVFGARPLKRAIQQEIENPVAKLILAGRFGPKDVIPVDVNDGQFVFDRVVH

SEQ ID NO: 47813 - protein, 357 aa, Burkholderia cepacia
MARMEVAPQPAGFPERSIEMKAVGLTRYLPIDDPQALLDVELPQPVPGPRDLLVKVEAISVNPVDTKVRAPKPQVEETPRVLGWDAAGTVVAVGADVTLFRPGDEVFYAGSITRPGANSEFHAVDERIAALKPRTLDFAAAAALPLTALTAWEALFDRLRVSPQGADAGKSVLIIGGAGGVGSIAIQLAKTLGKLHVIATASRPASADWVRSLGADAVVDHFGDLPAQLREAGHPSVDYVLILNDTDHHFPAAAEVIRPQGGICTIVENGKPVPVELLKAKSAAFHWEFMFTRAMFETPDMIEQHRILGEVARLVDGGTLRTTLGEQLGTINAENVRRAHRMLEAGRAIGKLVLSGF

SEQ ID NO: 47814 - protein, 453 aa, Burkholderia cepacia
MEDEIRVLVVEDDENVRIGVEQAVALAGFPVDAFASAADALAHVAPGAPVVIVSDVRMPGIDGLQLLDRVMAIDAQIPVVLISGHADISTAVGAMQVGAYDFIEKPFSSDVIAGRVARAVEKRRLTLEVQGLRAALNNWQGIEAFVLGKSPAMADVRKKILRLADTSVSVLITGETGTGKELIARSLHDFGGRRDAHFVALNCGGLPEQVFESELFGHEAGAFTGAIKKRIGKIEWADGGTLFLDEIETMPIALQIKMLRVLQERVVERLGANDLIPVDCRVVAASKADLAELAADGRFRADLLYRLNVAQIELPPLRERREDVPLLFEHFVLAAARRFGQPAPVVTAAQVSELMTHAWPGNVRELQNVADRFVLGLTGDSLLSSGGTPTAGSTLAEQLAYFERMLIEDMLRRHHGNVADASEALGMPKKTLYHKLRNLRIPARGDAAADGGE

SEQ ID NO: 47815 - protein, 123 aa, Burkholderia cepacia
MSAIESVLHETRQFAPPAALEKTAAISGMPAYRALVAEAEQDYEGFWARLAREGLTWHKPFTKVLDERNAPFYTWFDDGELNASYNCLDRHVEAGHGERVAVIFEADDGTVTRVTYADLLARV

SEQ ID NO: 47816 - protein, 130 aa, Burkholderia cepacia
MLGICRVLGGDQGLDPAGMLRNVADNPLSYGLAFVGALIWAGYCTVTARIADGKNGVTPFFMLVAAVLWIKFAIEGGGGMTFSLHAVGYLVLAASALGFGYAAWNTGIMHGNVTVIVGASYFTPVLAAAA

SEQ ID NO: 47817 - protein, 1047 aa, Burkholderia cepacia
MAEFFIRRPVFAWVIALFIILTGLIAIPQLPVARYPSVAPPSVTITANYPGATPQTMNDGVLSLIERQLSGVKNLLYFESSADTSGSAQITVTFKPGTNPEMAQVDVQNKIKSVEPRLPAAVRQNGLIVESASSGFLMIVSLRSDNGRFDEGALADYMARSVSEELRRIDGVGRVLQFGSERAMRIWVDPQKLINFGLSMSDLTTAIGQQNVQIAPGSLGALPALPGQRVTVPLTAQGQLATSEEFAKVVLRANADGSKVVLGDVARVELGSQNYTFVSRENNKPATLAGVQLAPGANAVKTADAIRARMAELSKSMPSGMSYSIPLDTSPFVKISIEKVLHTLLEAMVLVFLVMYLFLQNVRYTLIPAIVAPVAMLGTFTVMLLTGFSINVLTMFGMVLAIGIIVDDAIVVVENVERLMAEEGLSPKDATSKAMKEITGAIVGVTLVLTAVFLPMAMASGSVGVIYKQFTLSMAVSILFSALLALTLTPALCATMLKPLAPGHHEKRGFFGWFNRRFDRLTKWYETRVGRLVGRTGRVMLVFVAISGALVLGFRSLPSSFLPDEDQGYFITSFLLPADATAERTHDVVKTLEKHLASRPAIQSSISVIGYGFSGQGPNAAINWSVMKDWKNRGGASTLEEGMLAQQAMAGVTEGTVMSLLPPAIDELGNSSGFSMRLEDRANQGTAALKAAEAKLLELAAQSKVVTGVYPDSLPAGTSIRLEIDRAKAQALGVSFTTLSDTLSTAMGSTYVNDFPNAGRMQQVIIQADAPARMQIDNVMKLYVRNAAGGMVPLSEVVRPVWTDTPLQMVRFKGYPSARISGNAAPGQSSGAAMAEMERLAAQLPPGFAVEWTGQSLQERQSASQAPMLMVLSMIVVFLVLAALYESWSIPLSVMLVVPLGLIGAIGAVLLRGMPNDVFFKVGMITVIGLSAKNAILIVEFAKQLREEGRGLIEAAVQASKLRLRPILMTSLAFGLGVVPLMIATGASAETQHAIGTGVFGGMVTATVLAIFFVPVFFVFVMSIQERIGAWRASRTQPATPTHGQEG

SEQ ID NO: 47818 - protein, 807 aa, Burkholderia cepacia
MSGTQLLPPERITLPLLPLRDVVVFPHMVIPLFVGRPKSIKALEAAMEGGKHIMLVAQKTAAKDEPTEKDMYEVGCIANILQMLKLPDGTVKVLVEGLQRAKALSIEEQETQFSCEVMPLEPDHADSAETEALRRAIVSQFDQYVKLNKKIPPEILTSLSGIDEAGRLADMIAERLPLKLDQKQHILEMFPVIERLEHLLAQLEAEIDILQVEKRIRGRVKRQMEKSQREYYLNEQVKAIQKELGEGEEGADLEELEKRINAARMPKEAKKKADAELKKLKLMSPMSAEATVVRNYIDTLIGLPWRKKSKVNNDLSNAEQVLDEDHFGLEKVKERILEYLAVQQRVDKVKAPILCLVGPPGVGKTSLGQSIARATNRKFVRMALGGVRDEAEIRGHRRTYIGSMPGKILQSLAKVGVRNPLFLLDEVDKMGMDFRGDPSSALLEVLDPEQNHTFADHYIEVDFDLSDVMFVATSNSLNIPPPLLDRMEVIRLSGYTEDEKVSIAQRYLLPKQKKNNGLKEGEIDVTEQAIRDIIRYYTREAGVRSLEREVSKICRKVVKMLLLKKASGAIKVDGENLDTFLGVRKYDFGLAAKENQVGQVTGLAWTEVGGDLLTIEAAVMPGKGNVIRTGSLGDVMKESVEAARSVVRSRSRRLGIKDEAFEKQDIHIHVPEGATPKDGPSAGGAMTTALVSVLTGIPVRADVAMTGEITLRGEVLPIGGLKEKLLAAHRGGIKLVLIPEENVKDLADIPDNVKNAIEIVPVRWIDKVLELALERSPTPLPPEEEAKAAAPVGEAAKDAGSTEVVKH

SEQ ID NO: 47819 - protein, 604 aa, Burkholderia cepacia
MKALLDLFKQVQQEEVFDAIKIGLASPDKIRSWSFGEVKKPETINYRTFKPERDGLFCAKIFGPIKDYECLCGKYKRLKHRGVICEKCGVEVTLAKVRRERMGHIELASPVAHIWFLKSLPSRLGMVLDMTLRDIERVLYFEAYVVIEPGMTPLKARQIMTEEDYYNKVEEYGDEFRAEMGAEGVRELLRAINIDEQVETLRTELKNTGSEAKIKKYAKRLKVLEAFQRSGIKPEWMILEVLPVLPPELRPLVPLDGGRFATSDLNDLYRRVINRNNRLKRLLELKAPEIIVRNEKRMLQEAVDSLLDNGRRGKAMTGANKRPLKSLADMIKGKGGRFRQNLLGKRVDYSGRSVIVVGPTLKLHQCGLPKLMALELFKPFIFNKLEVMGVATTIKAAKKEVENQTPVVWDILEEVIREHPVMLNRAPTLHRLGIQAFEPVLIEGKAIQLHPLVCAAFNADFDGDQMAVHVPLSLEAQMEARTLMLASNNVLFPANGDPSIVPSQDIVLGLYYATREAINGKGEGLSFTGVSEVIRAYENKEVELASRVNVRITEMVRNEDTSEGAPEFVPKITLYATTVGRAILSEILPHGLPFSVLNKPLKKK

SEQ ID NO: 47820 - protein, 144 aa, Burkholderia cepacia
MELNNLKPAAGAKHAKRRVGRGIGSGLGKTAGRGHKGQKSRSGGFHKVGFEGGQMPLQRRLPKRGFTSLTKEFVGEVRLGDLEKLPVDEIDLLALKQAGLVGELTKSAKIIATGELKRKIVVKGLGATKGARAAIEAAGGSFAE

SEQ ID NO: 47821 - protein, 372 aa, Burkholderia cepacia
MTALNHTPLNAAHRALNARMVDFGGWDMPVNYGSQIEEHAAVRTDAGMFDVSHMCVVDFTGSRVRAFFEHAIANNVGKLKTPGKALYSCLLNPQGGVIDDLIVYYFTEEFFRVVVNAGTADKDIAWFNQLNEQGGYGLTIAPRRDFAIVAVQGPNAREKVWATVPSARAATSELKPFNAAQVAGTPFGDLTIARTGYTGEDGFEVIVPAVHVEVLWNALQQHGVRPCGLGARDTLRLEAGMNLYGQDMDDTVSPLDAGLAWTVDLAAPRDFVGRAALEANGTRAAFVGLILQKENGKAGGVLRAHQKVVTPHGEGEITSGTFSPSMQESIAFARVPAAVQIGDTVQVQIRDKNLPARVVKLPFVRNGKVLAA

SEQ ID NO: 47822 - protein, 516 aa, Burkholderia cepacia
MEGDNGVQLEAIHRTGLGLGADDASHRTDTAARDPALSPRLHNPDLAPTRAEGRTWGRYSIFALWTNDVHNIANYSFAIGLFALGLSGWQMLASLAIGAVLVYCFMNLTGYMGQKTGVPFPVISRMSFGIYGALLPAMIRAVIAIAWFGIQTYLASVVLRVLLTAIWPGLAAFDQNAIFGLSTLGWITFVAIWLVQIGILTYGMEMVRKYEGLAGPVILVTTLSLAAWMFSRTGGQLAMSIGKPMTGLKMWTEIFAGGSLWLAIYGTLVLNFCDFARSSPSAKTVRVGNFWGLPVNILVFATISFVLAGAQFKLNGHIIHSPTEIIATVPNKLFLVLGCLAFLIVTVAVNIMANFVAPAFVLTSLAPHRLSFRRAGLISATIAVLILPWNLYNSPIVIVYFLSGLGALLGPLYGIITVDYWLVRKQRVNVPDLYTEAPTGAYFYTRGVNRKALAALVPSALISITLAVVPAFSAMTPFSWLLGAAIAGSVYWLLADRTRHYEERSGEHIAVACAQH

SEQ ID NO: 47823 - protein, 77 aa, Burkholderia cepacia
LSRSGTVGLQMATGRTLKNILGALGHVAEGVRCAQAVLALARAQSIEMPIAEAVCAMLSDRIDAREPVIGLVSPNAR

SEQ ID NO: 47824 - protein, 404 aa, Burkholderia cepacia
MSAARSSHPAHQQIAAALAWLRQHVAPAAQLHADTRSLQAGDVFVAYAVDGADNRAFMADAVARGAAAVLYQPDGLTDAPAVPVALAVPALDQLAGEIASGWYGDPSDSLLAVGVTGTNGKTSCTQWIATALTALHQPCAVIGTLGTGMPGQLVPTGFTTPDAPQLQRSLAQLRAAGAQAVAMEVSSHALHQGRVNGTAFDIAVFTNLTQDHLDYHGTFDAYEAAKAKLFAWRGLRAAVLNRDDAAGRRLLEKLAGRVRTIAYGIGDAPAPDADRELVALDVRATATGTAFRLRSSWGDADVEVGTLGTFNVSNLLAVLGSLLAADVPFDAALAEIERLESVNGRMQRLGGRLQNDEPLVVIDYAHTPDALDKTLDALRPIAAARGGRLVCMFGCGGDRDATKR

SEQ ID NO: 47825 - protein, 766 aa, Burkholderia cepacia
MSFAPNGGIPAGSGGNLLGSLSALGGLAGPVASTVAGQIGPLAGVASHIDTVQRAVQLAQTGFSLMNKTPAAIADALNNAAGGVARLTQLNRYVTIDSPLGPDVLLVSTAVIDEHVNRLPEIHLDLLSHQHDLVPDQLIGQPIKIRFDQSARQSTLERIVSSGGADSIRYFDGYVTSFDRAGNPGKVTQYQMTVAPWFWFLTRSTDCRIFQNKTAQDILTEIFQDHGFTDFEFDIRTAQKPLEYIVMYQESYYNFCARLMEQEGLIWTHRFEKEKHFLVIGDTNFVFRPIDGLANLPYNASAASEDNGIDQLHEGRRFGVGKIAFRDFNHQNPSSPLMLAQAEPENLRHAGLETTERFEHQSLFDHGDDGDRYARIAMQAEEASAHRYTGSGYAWRMSAAGSVTVTNHPVMANNQEYAVLHVRHEAVNDYTEHNAKLPYRNTFSLLPKKFPYRSPRNTPKPVIHGTQSAIVVGPKGEEIHTNGSAVKVHFLWDRRGKLDGSDSMWIRVSQPWAGDGWGAAAIPRINQEVLVAFNQGDPDNPVIVGRVYNGEQGNPYHGAAGQTMGIKSQTHKGAGSNELRFSDVNGAQEVFLHAQKDMNTVIKDSETHTVEAGGRTVSLLKGSETKQIAQGGLKETIALTRDTTANVINTKAIASKAGPGMQSHQASDGIEHRVGDGVVTMTPDSIKLTFGPSTIVINANGIYLDGPVIHLNRGSAQSAEQALALEWAAEQATIAKGLASPDPGTRAGAGQLASFVKGQQLGKLEG

SEQ ID NO: 47826 - protein, 211 aa, Burkholderia cepacia
MNLHTWWLFVATVFVVSAIPGPNMLLVMTHGARHGLRRSSATMAGCLSALVLMLAVSAAGLGAVLEAWPAMFNGLRFAGAAYLIYLGVKAWRARVDDTPAADVDAVSHGASASRAVLFRNGFLVAGSNPKAILFAAALLPQFINAAEPTLPQFGILVVTFAVIEVSWYLVYASFGTRIGATLKSQSVAKVFNRLTGGLFVGFGAMMALVRH

SEQ ID NO: 47827 - protein, 310 aa, Burkholderia cepacia
MTNAAPQRPRVPRRVLDGVLLLDKPVGLSSNDALIRAKRLLLAKKAGHTGTLDPLASGLLPLCFGEATKFSQDLLDADKTYEATMRLGQRTATGDAEGDVIDTRPVECDRAAVEAALVRFTGDIVQVPPMYSALKRDGKPLYEYARAGQTVEREGRNVTIHALELLACELPDVTFRVTCSKGTYVRTLAEDIGEALGCGAHLTMLRRTGVGALTLEHAVTLDALSDAAEAARDAWLQPVDALLSTFPAIRLDDASAKRFLHGQRLPLSALEPIDAADGERVRVYDATRLLGVARKANGVLAPERLVVTAQ

SEQ ID NO: 47828 - protein, 647 aa, Burkholderia cepacia
FFFVHARRPRNDQSGGDGKPPNRTTNQDAPAPAWPARMLIVHERVARRDERVDGYLSAKPDTWLHDLFSAQWKVLLDLGAGSLFGNLLAIATSLFAMQVWDRVVPARATHTLWVLASGVVLALALELLLRTARVSIADHFGKQADLKLSAMFFARVLDIRNDARPRSPGTLVAQLRDLEQLRELLTSSTMGVLIDIPFVITFLFIIWLLGGPLAFVPLAAIPLLILPGVLAQIPLAKLSNQGLEESALRNAILMEAIYRAEDIKALQAEPRFRQLWARTNRVNADIGLQQRRLAGLLVNLAQTVQQLAYAGVLVAGVYGILDASLSFGAVLACSILTSRTIAPLGQIPAVLSRIQNVRAGKKGLDNLLALPVDHDPAVDAYHKPALVGRYRFEQVGYSFDPQAKPVLGIPNLSIEPGERIAILGRVGAGKSTLLRLLGGLATPVQGRILFNDTPLPLIDVADVRRDVGMLLQESSLFYGTLRENLLIANPLATDDAMLAAMKVACADQLLLRQPHGLDLKLRESGLGLSGGQKQALMLARVILRAPNVLLLDEPTASLDEATERAIVERLRQWLGHRTLIVATHRYPVLSIVDRIIVLDGGRVVRDGPKDEVLAALRGAGTPEPAAASRAPAGESSPLPAQMAGEAR

SEQ ID NO: 47829 - protein, 94 aa, Burkholderia cepacia
MAGERALFEIPVLAIVNEVYFRNTQREPDYREGRERLREKIKLLGAKPEFADCKIADYGTRRRFSKVWHEEVALTLRDGLGPQFAGTSNVLYAI

SEQ ID NO: 47830 - protein, 414 aa, Burkholderia cepacia
MPLTDTTIRNTKPAEKPVKLFDGGGLFLLVTPAGQRYWRLKYRAAGKEKLLALGVYPDVTLAAARRKRDEAREKLAAGIDPGEAKKAEKRTARLSAENSFEAVAREWHIKYAPTWSESHGSRILRRLEVDAFPWIGSKPIAELAPPDVLEVLRRVEKRGALETAHRLHANVSQVCRYAVATGRAQRDVTADLRGALPPVQQEHMAAVTDPKQVAELLRSIDGYQGTFPVLCALRLFPLLFQRPGELRAAEWSEFDLDASTWEIPSERMKRTKQGKASGGAHIVPLSAQAVAILRDLHALTGNSRFLFPSVRTKDRPMSDNTINGALRRLGYDGDTMTGHGFRAMARTILDEVLGVPVAIVEAQLAHAVKDPLGRAYNRTAHLPQRREMMQRWADYLDQLKAGAEIIPITAAMGK

SEQ ID NO: 47831 - protein, 271 aa, Burkholderia cepacia
  MISC_FEATURE (267)..(267): X=any amino acid
IAALAAFLDCGFAPVDALVLALAWRDGDETHAADAWPVDAERFPCVAGLPPAPEPAFPPCPAQLGLYPVVPSAEWVERVLDGGARTVQLRVKDATPDTLRQEIARAVAAGRRYPDARVFINDHWQIAARRGAYGVHLGQEDLETADLAAIARAGLRLGLSSHGYYEMLRALHERPSYLALGPVYATATKAVAAPPQGLARIARYARFAGARAPLVAIGGVGLDALPAVLATGVGSVAVVSAVTGAADYRTALIALQQCFAGQFDNRXPEGP

SEQ ID NO: 47832 - protein, 328 aa, Burkholderia cepacia
IGIVNDLPLAVEAMRRAIARRPEHRVLWVATDGAQAVELCAAQPPDIVLMDLIMPKFDGIEATRRIMRSERPCAILIVTSCIGANAWRVFEAMGAGALDAVDTPRLGDGAADDTTKLLLAKIDQIGRLLDAPRRTPRIAGTAARNGGGPLVAIGASAGGPGALASILGSLPADFNAPIVIVQHVDRAFAEGMAQWLDGQTRLAVRVAREGDRPQPGVALLAATDDHLRITRAGTLEYTREPAATPYRPSVDVFFNSLTEHWPGRVIGVLLTGMGRDGAIGLKALRMKGYHTIAQDEATSAVYGMPKAAATLGAARAILPLGRIAGELA

SEQ ID NO: 47833 - protein, 360 aa, Burkholderia cepacia
MKTSMQRKLDQLSTRLAELNDLLSRENVTADLDQYRKLTREHAELGPVVEQYALWRQSRSDEAAAQELLADPSMRDFAEDEIRSAREGMARLETELQKMLLPKDPNDDRNIFLEIRAGTGGDESALFAGDLLRMYLRFAERQRWQVEMMSESASDLGGYKEVIVRIAGQGAYSRLKFESGGHRVQRVPATETQGRIHTSACTVAVMPEADEIGEVEINPADLRIDTFRASGAGGQHINKTDSAVRVTHIPTGIVVECQDDRSQHKNKDRALKVLAARIKDKQYHEQHAKEAATRKSLIGSGDRSERIRTYNFPQGRMTDHRINLTLYRLEAIMDGDLDELIGALVTEHQAELLASLGEAD

SEQ ID NO: 47834 - protein, 126 aa, Burkholderia cepacia
MPTINQLVRKGRQSETTKSKSPALQDCPQRRGVCTRVYTTTPKKPNSALRKVAKVRLTNGFEVISYIGGEGHNLQEHSVVLIRGGRVKDLPGVRYHMVRGSLDTQGVKDRKQARSKYGAKRAKAAK

SEQ ID NO: 47835 - protein, 271 aa, Burkholderia cepacia
MTYLQESSRPAVTVPKLQAMRDAGEKIAMLTCYDASFSALLDRAGTDVLLIGDSLGNVLQGHTTTLPVSLDDIAYHTACVARAQPRALVVADLPFGTYGTPAEAFANAVKLMRAGAQMVKLEGGEWLADTIRFLVERSVPVCAHLGLTPQSVHAFGGFKVQGKTEAGAAQLLRDARAIEDAGAQLVVLEAVPTLVASEVTHMLKIPTIGIGAGVDCSGQVLVLHDMLGVFPGKRPRFVKDFMQGQPNIQAAVEAYVRAVKDRSFPGPEHSF

SEQ ID NO: 47836 - protein, 457 aa, Burkholderia cepacia
EETDMLSVLARVIDIAMVVTGALIAAALHDGSIGLSDLQRTTVLFDCLLVVVFFPAVGIYQSWRGKRLVGLMGRVAFAWLAVELAGILMSFSFHQSGDLSRLWLGYWALVTMALLAGSKACVHVVLRQLRRGGYNLKAVAIVGGAALIAQMRARPEAGFNPVCVYDESEAPGEVALDDVRIERQFESLVWLVRSRAISELWLTLPITEERRIHQIVTVFRHDFVNIRFIPDVRTLSFFNQEVVEVLGVPAINLAASPITDVRILPKFVFDRLFALAALTALAPVMVLIAALIKLTSRGPVFFRQKRKGIDGHEFEIYKFRSMKVHQEVAGQVTQATKNDSRVTPVGRFLRRTSLDELPQFINVLKGEMSVVGPRPHALAHDDIYKDLVKGYMFRYRIKPGITGWAQINGFRGETDQIEKMMGRVKLDLYYMQNWSFWLDIKIVVLTLWKGFTGSNAY

SEQ ID NO: 47837 - protein, 372 aa, Burkholderia cepacia
PAEPAAHEAAAGRRTWRPGPGAAPANGGEADSMYERSKLNPVLTFDNFVTGKANQLARAAAIQVADNPGISYNPLFLYGGVGLGKTHLIHAIGNQLLLDKAGARIRYIHAEQYVSDVVKAYQRKAFDDFKRYYHSLDLLLIDDIQFFSGKSRTQEEFFYAFEALVANKAQVIITSDTYPKEISGIDDRLISRFDSGLTVAIEPPELEMRVAILMRKAQSEGVNLSEDVAFFVAKHLRSNVRELEGALRKILAYSKFHGREISIELTKEALKDLLTVQNRQISVENIQKTVADFYNIKVADMYSKKRPANIARPRQIAMYLAKELTQKSLPEIGELFGGRDHTTVLHAVRKIADERSKDAQLNHELHVLEQTL

SEQ ID NO: 47838 - protein, 457 aa, Burkholderia cepacia
MDNEQKPTPPSKDPAPAAARRPRRTLLLGTVAVVVIGGLLWWHPWNRTPAAGSSAQGAGASAAAGSHRGRGGPAAMANVPQPVQVATATQGEMPIVLSALGTVTPLANVTVKTQLSGYLQSVSFQEGQIVKKGDVLAQIDPRPYQVALENAEGTHARDAALLATARLDLKRYQTLLSQDSIASQTVDTQASLVKQYEGAVKTDQAAIDSAKLNLTYARITAPVSGRVGLRQVDPGNYVTPGDTNGIVVITQLQPMSVIFTTSEDNLPQILKQVNAGRKLSVTAYNRNNTVPLETGSLATLDNQIDTSTGTVKLRANFDNKEGMLFPNQFVNTRLLVDVLRNATIVPTSAVLTGSIGQFVYVVKPDNTVTVRKVTIGPVDGERTSIVSGVMLGERVVTDGSDRLREGSKISIPADKPKGASGAHGAGAASGASAASGAAGHRGGHRHGASQAAAPAAQ

SEQ ID NO: 47839 - protein, 147 aa, Burkholderia cepacia
MPAATPATLRFSTDKRELDIDAIFDFLHRDAYWSQGIPRDVVERAIDGSLCFGAYVGDRFVGFARLVTDQATFAYLCDVFVLPAERGNGYGRALIDHIFAQEMVRRLRRIMLATTDAHALYRPVGFGPPANPERLMEIRRPDIYTTR

SEQ ID NO: 47840 - protein, 469 aa, Burkholderia cepacia
MAQTLYDKLWNTHVVHTEEDGTTLLYIDRQLLHEVTSPQAFEGLKMAQRPVWRISANLAVSDHNVPTTDRSHGIADPVSKLQVDTLDANCDAFGITQFKMNDVRQGIVHIIGPEQGATLPGMTIVCGDSHTSTHGAFGALAHGIGTSEVEHVLATQTLLQKKSKNMLVKVDGALPRGCTAKDIVLAIIGKIGTAGGTGYAIEFGGSTIRALTMEGRMTVCNMAIEAGARAGMVAVDDTTIDYLKGRPFVPTGAEWDQAVEYWRQFKSDDGAHFDRVVELNAAEIVPQVTWGTSPEMVTSIDGRVPDPEREKDPVKRDAMERALAYMALEPNTPIESIKVDKIFIGSCTNARIEDIRAAAYVVKKLNRRIASNVRLAMVVPGSGLVKAQAEREGLDKVFTDAGFEWREPGCSMCLAMNADRLDPGERCASTSNRNFEGRQGAGGRTHLVSPAMAAAAAIEGHFVDIRQLG

SEQ ID NO: 47841 - protein, 396 aa, Burkholderia cepacia
MAKEKFERTKPHVNVGTIGHVDHGKTTLTAAITTVLTKKFGGEAKAYDQIDAAPEEKARGITINTAHVEYETANRHYAHVDCPGHADYVKNMITGAAQMDGAILVCSAADGPMPQTREHILLARQVGVPYIIVFLNKCDMVDDAELLELVEMEVRELLSKYDFPGDDTPIVKGSAKLALEGDTGELGEVAIMSLADALDTYIPTPERAVDGAFLMPVEDVFSISGRGTVVTGRVERGIVKVGEEIEIVGIKPTVKTTCTGVEMFRKLLDQGQAGDNVGILLRGTKREDVERGQVLAKPGSITPHTHFTAEVYVLSKDEGGRHTPFFNNYRPQFYFRTTDVTGSIELPKDKEMVMPGDNVSITVKLIAPIAMEEGLRFAIREGGRTVGAGVVAKIIE

SEQ ID NO: 47842 - protein, 158 aa, Burkholderia cepacia
MDGLAKRGLKRTARPEDLAQAVAEARRIADQEGKRRQLQYVGRVMRSLTDDETAALRTALDAQRGVNKAATARLHWIERTREQLLASDDALTEFLRQHPDADIQEGRTLIRNARKEAQQGKPPRYFRELFQWIKAAGGASDSDDEAAGDAGDDHDDEA

SEQ ID NO: 47843 - protein, 624 aa, Burkholderia cepacia
MTKGSPRAAAARARLGVLRAAGRVAAVLALHAALAVPAAHAAYAIAQYGEPKYPPGFKHFDYVNPDAPKGGTLVLANPNRLTSFDKFNPFTMRGNAAPGIDMLFESLATGSSDEPASAYGLLADDIAVAPDRRSVTFHLNPRARFSNGDRVTADDVKFSFDTLKSKQAAPQFGAYFAEIAKAVVVDPATVRFEFRSANRELPLIAGGVPVFSRKWGLRADGSRIPFDQLAFEQPIGSGPYLIERYDNGRTITYRRNPAYWGADLPVRVGTNNFERIVYKLYGDGVARLEAFKAGEYDVLVEYIARNWTRRDVGKRFDSGELVKREFRQHNGAGMQGFFMNLRRPLFRDVRVRQALDLAFDFEWLNRQLFYSAYTRLNSYFADTDLQATGTPGEGELKLLEPLRAQLDPAVFGPMVTQPDTHPPGSLRANLLKARALLAQAGWTYRDGALRNAKGEPFAFEILDDAGGAMEGVVTAYQRNLAKLGIAVRFRTADYALLQKRLDAFDYDMTTIRLPGVQVPGAEQYSRYASKFADEPGSDNFIGLKSPAVDALLRALGTAQTREELLDATHALDRVLMHGYYAVPQWYSTTHRIAYKRTLAYPQTLPLYYSAEGWVVSTWWAKPDH

SEQ ID NO: 47844 - protein, 375 aa, Burkholderia cepacia
VTQRRNSMQLVKTERDTLLRPLQTVSGIVERRHTLPILANLLITKNGPDVSFLSTDLELQITTRADFGVGGDQIATTVAARKLLDILRAMPDGQVTLSLADKRLTVQSGKSRFALQTLAADEFPTVAQAKDFGATLTVPQKSFRQLLGMVHFAMAQQDIRYYLNGMLLVVDGDQLMAVATDGHRLAFSSMKLEGGTFGRQEVIVPRKTILELQRLLEDIDDTVTIDIAQTQAKFTFGQVELVSKLVEGKFPDFQRVIPKAHKNTFEIGREELQRSLQRAAILTSDKFKGVRCIIAPGQLKIMSTNADQEEAQEELEIAYQGDTVDIGFNVTYLLDVLANLKVDTVQVSLGDASSSALITVPENDEFKYVVMPMRI

SEQ ID NO: 47845 - protein, 379 aa, Burkholderia cepacia
YKRIAFALFLAGFSTFSLLYCVQPLLPAFAREFNVGAASSSLSLSLSTGMLAVSILCAGALSERVGRRGLMFVFLTLAALFILVAAWSPNWHLLLVWRALEGFALGGVPAVAMAYLAEEIAADGLGFSMGLYVGGTAFGGMIGRIGMSALEEHFSWRTAMLSIGVVDLLAAIAFVMLLPPSRRFVKRTDLTLRHHLRLWHAQLQHGRLPFVFAIGFLVMGAFVTIYNYAGFRLMAAPFNLSPTACGLIFGAYLFGMVSSSSAGALADRLGRAPVLVSGIVVFAAGLALTLSHSLAAIVVGIVLVTIGFFVAHSVASGWVGALAGAAKGHAASLYLLAYYVGSSVLGSVGGAFWQRGAWTSVAAYFFCALVIALLAARRL

SEQ ID NO: 47846 - protein, 788 aa, Burkholderia cepacia
MSTTPSSASADSTTEATAQSPARQYIDAVLEQSFRHLFGPTATPEQPRKHGVVSIAKLTAALAEYLGPDEIKEVKAAFHFSDEAHLGQYRQSGEPYITHPVAVAEICAGWKLDAQAVMAALLHDVMEDQGVTKNELAERFGPKVAELVDGLSKLDKMEFRSREEAQAENFRKMLLAMARDVRVILVKLADRLHNMRTLGAVPMEKRRRVARETLDIYAPIAHRLGLNNTYRELQDMSFANFNPHRYATLEKAVKAARGNRREVISKILEAAQRAMADAKIDAEITGREKTIYSVYRKMRDKQLSFSQVLDVYGFRVVVDSPLDCYTCIGALHALYKPVPGKFKDYIAIPKINGYQSLHTTLVGPFGAPIEFQVRTRKMHEIAEAGVAAHWLYKNGSADLSDVQKRAHQWLKSLLDIQSEAGDSSEFLEHVKIDLFPDAVYVFTPKSKIMALPRGATALDFAYSIHSDLGNQCVAVKINNELLPLRTELKSGDIVEVITAPYSKPNPAWLGFVRTGKARSAIRHYLKTMRLNESVQLGERLVDQSLKGYGLALADVEPEVWEKLVQWTGNKSRQEIFADIGLGRRVAAVMAKRIEVLMSGRDADDDLPKSERHPAHHAPPVVITGTEGMSVQLSACCRPIPGDAIMGYIGIGLGMAIHTTDCRVAQRIHRRDPGRWIDVEWAPQPGRLFDVAVKALVKNTKGIFARVAADITSADANIVHIAMDEDLTHESTVLRFVIQVSDRVHLANVMRRVRTNPDVMRIMRERWTDDGAHARHDGGMRIERERQDY

SEQ ID NO: 47847 - protein, 425 aa, Burkholderia cepacia
MFLLLALIVYRIGAHIPVPGIDPDQLAKLFQSQAGGILGMFNMFSGGALSRFTIFALGIMPYISASIIMQLLAIVSPQLEALKKEGQAGQRKITQYTRYFTVVLATFQAFGIAAALENQPGLVTDPGMLFRLTTVVTLVTGTMFLMWLGEQITERGLGNGISIIIFGGIAAGFPNAVGGLFELVRTGSMSIISAIIIVVLIAAVTYLVVFIERGQRKILVNYAKRQVGNKIYGGQSSHLPLKLNMSGVIPPIFASSIILFPATILGWFSTGQPTGSWISNTLHNVAEALKPGQPVYVLLYTLAIVFFCFFYTALVFNSRETADNLKKSGAFVPGIRPGDQTARYIDRILTRLTLAGAIYIVFVCLLPEFLVLRWNVPFYFGGTSLLIIVVVTMDFMAQVQSYVMSQQYESLLKKANFKGGNIPMR

SEQ ID NO: 47848 - protein, 356 aa, Burkholderia cepacia
MEDSKKGSGMTAEKSKALAAALAQIEKQFGKGSIMRMGDGEAAEDIQVVSTGSLGLDIALGVGGLPRGRVVEIYGPESSGKTTLTLQVIAELQKLGGTAAFIDAEHALDVQYAAKLGVNVPELLISQPDTGEQALEITDALVRSGSIDMIVIDSVAALVPKAEIEGEMGDSLPGLQARLMSQALRKLTGTIKRTNCLVIFINQIRMKIGVMFGNPETTTGGNALKFYSSVRLDIRRIGSIKKNDEVIGNETRVKVVKNKVSPPFREAIFDILYGEGISRQGEIIDLGVQAKIVDKAGAWYSYNGEKIGQGKDNAREFLRENPEIAREIENRIRESLGVVAMPDGAGNEAEAMDEEE

SEQ ID NO: 47849 - protein, 156 aa, Burkholderia cepacia
MGLLSFIKEAGEKLLGHADAQAAEDPNAANQTAADAIKNYISSQGLDTSNLTVAFDGASRTVTLSGSVADLDTKAKVKVAAGNVQGVAGVNDDDLQPDDPEVQYHDVKPGDTLSAIAKEVYGDANKYPVIFEANKPMLSSPDRIYPGQKLVIPPQS

SEQ ID NO: 47850 - protein, 158 aa, Burkholderia cepacia
MTHPIASRRTFLKLSAALAGTALLPETGAFAAGGDAARRTVIIDTDPGQDDAIAILFALGAQDRLDVRALTAVAGNVPLDLTERNARIIRDWAGRTKTLPVYAGCPRPLVRDLVTAANVHGKTGLEGVELHAPRAPLAAGHAVSYLVDTLSRAAPNSV

SEQ ID NO: 47851 - protein, 521 aa, Burkholderia cepacia
HALQVEGRTDFPNLLMQFSALAFGFIILAVYGRYLRQMLGFRWRQWLTDRFLGQWLGDRAFYRIERDRLADNPDQRITDDLQSFATTTLALSLDLLSTVVTLVSFITILWSLAGALTFTLGATPIAIPGYMVWAAALYAVIGSLIIQKVGHPLVSINYQQQRVEADFRFGLIRVRENAEQIAFYDGEKTEAGNAQSLFMRIRDNWWRVMKYKKRLTFVLSFYGQIAIIFPLVVAAPRYFAGAFSFGVLMQISSAFGTVSDSFSWFINSYSTLVEWRATVNRLREFKRVMGTSHLKESLSPATEHGGINLHYIDAAKLSTSSLKLALPNGNALANIGDVTIEPGSRWLVVGKSGSGKSTFMRALAGLWPFGDGAIDAPVGARMMFVPQTSYLPIGTLKAALTYPATPDTFSDEACRDALRACRLEDYVERLDETAHWTRVLSPGEQQRLAGARVLLHKPDFLFLDEATSALDADNEARLYHLFAERLPKAAIVSIAHRESLAAFHVGTINVERVSSDDKVAA

SEQ ID NO: 47852 - protein, 208 aa, Burkholderia cepacia
TEERMRLKVGELAKRSGLTVRTLHHYHAIGLLTPSARADNGYRLYDRDDIARLHQIQALRRFGLSLAEIGDYLNRPGTPLVDVVAKQIASLDRQLAQTAQLRERLVSLHAQLTAGTEPELADWLTTLELMTVYDKYFSEEELAACRCTRRARRATAEWIALVADVRALHEAGVPAEDERVRALAARWMALLVRDTNNDPRLLAKLNLM

SEQ ID NO: 47853 - protein, 433 aa, Burkholderia cepacia
MTPSDVKATLSFSDNSPSVELPIYKGTMGPDVIDIRKLYGQTGKFTYDPGFMSTASCNSAITYIDGDKGELLYRGYPIDNLAQNADFLESCYLLLKGELPNAAQKKEFVDTVTKHTMVHEQMHFFFRGFRRDAHPMAILVAAVGALSAFYHDSLDINDPRHREVSAIRMIAKLPTLVAMAYKYSIGQPFVYPKNSLSYSANFMHMMFSNPCEEYKVNDVLVRALDRILILHADHEQNASTSTVRLAGSSGANPFACIAAGIACLWGPAHGGANEAALNMLEQIGSPDNIPEFIKQVKDKNSGVKLMGFGHRVYKNYDPRAKLMRETCYEVLNELGLHDDPLFKLAMQLEKIALEDEYFVSRKLYPNVDFYSGIVQRALGIPTSMFTCIFAMARTVGWIAQWNEMIADPEQKIGRPRQLFIGDTPREAKPLNAR

SEQ ID NO: 47854 - protein, 381 aa, Burkholderia cepacia
MNLLKRYAVPVACAAAVLALAACSSSKDARRVPTPLTEFKPVMDVQQVWKASVGKGGRYLFSPVAVGDAVYAAGENGSVEKIDAKTGQTLWRSKVGSDLSAGVGSDGNLTAVGALKGGVFVLGPDGKQLWKTSVQGEIFSPPLVGNGLVVVRTIDGQVIAFNAQTGEQKWNYRNRAVPLNLRVSAGMTFAGDAAVLAGFPGGGLVAINLQTGEPFWQTPVSFPKGVTEVERINDVSGPPTLVGAETCAVTFQGQLGCFDANSGRPLWEKPFSSRSGLAQDDSVVAGGDDWSVVTAYDAATGNQLWRNDKLKSRDVGVPYLLGHAVVMGDYKGFVHFLSREDGSFIARMKTDGSAITAAPVLAGNTLVVQTKDGGLYGFRPR

SEQ ID NO: 47855 - protein, 395 aa, Burkholderia cepacia
MTEGSSHDTHAPVQDRPANGLEFELLTTDGHARRGRVKLNHGTVETPIFMPVGTYGTVKAIQPRELHEIKAQIILGNTFHLWLRPGLDTIDAHGGLHGFMGWNKPILTDSGGFQVFSLGDLRKITEDGVTFASPINGDKLFLSPEVSMQIQKVLNSDVVMQFDECTPYATNGVPTTHQEAADSMRMSLRWAKRSLDEFNRLDNPNALFGIVQGGMFEDLRDESLAGLAELGFHGLAIGGLSVGEPKEDMMRVLRHVGPKLPANKPHYLMGVGTPEDLVEGVANGVDMFDCVMPTRNARNGWLFTRFGDVKIRNATHKNSLKPLDSTCTCYTCQNFSRGYLHHLHRVGEILGAQLNTIHNLHYYLQLMSEIREAIETHTFDAFRQRFAEDRARGVD

SEQ ID NO: 47856 - protein, 396 aa, Burkholderia cepacia
MDLTQVSSSRTASAPAPASSPLFDERPFLARLSLFDWLFALALVAGAGYALVHYNAHMDYYDKAVMIGTVPALVALGWRWKPARLMMASISVLSLLSIQIYQGDLARADSAFFLKYFLSSQSAILWMSAMFVLATIFYWIGLLARAETGAAIGQKLTWVAVLMGFTGLMVRWYESYLIGADVGHIPVSNLYEVFVLFSLITALLYLYYEGHYGTRSLGAFVLLVISAAVGFLMWYSVARDAQQIQPLVPALQSWWMKIHVPANFIGYGSFALSAMVSVAYLMKERGILADRLPTLEVLDDVMYKSIAVGFAFFTIATILGALWAAEAWGGYWSWDPKETWALIVWLNYAAWLHMRLMKGLRGAVAAWWALTGLLVTTFAFLGVNMFLSGLHSYGKL

SEQ ID NO: 47857 - protein, 103 aa, Burkholderia cepacia
MSDRQESAVAAPEAGPPKHDHPVLRRVFRVTLAVGIGTYFVASGAFLGLRYVLLPRIDEFRPRIERAVSDKLHAQLSIGKLSPNWSGMQPGVELTNLTIRGRT

SEQ ID NO: 47858 - protein, 649 aa, Burkholderia cepacia
MSLYSITGAQLAFGHVALLDHADFSLEAGERVGLIGRNGAGKSSLLKIVADLAKPDDGLVTRQQELVTVYVPQEPEFEPGATVFDAVASGLAHTRELLEEYDSIAHRLAEIPEGAEHDALLARMNALQSSLDAHDAWNWRTRVSMTLAQIGLQGVDASVDALSGGMQKRVALARALVLQPDVLLLDEPTNHLDFDGIRWLEELLVAQRAGLLFITHDRAFLDRVATRIVELDRGRLLSYPGNFSAYQTRKAQQLEVERVENEKFDKLLAQEEVWIRKGVEARRTRSVGRIARLVQMRNERAERRNAQGNVKLDVAQGEKSGKIVAELTDVTKRYGGRTVVDRFSTTVMRGDKIGFVGPNGAGKTTLLKLILGDLKPDEGTVRTGTNLQVAYFDQMRAQLDQEKSLADTISPGSEWVEIGGVRKHVMSYLGDFLFAPERARSPVKSLSGGERNRLLLARLFARPANVLVLDEPTNDLDIPTLELLEELLADYDGTVLLVSHDRAFLDNVVTSVIAAEGDGKWREYVGGFTDWQIQSERSEQLAQQEAAKRAVKEAAPAKDEPAKSAAGRNAQRTVKLSFNEQRELDSLPEKIAALEAEQKTINAQLEDGSIFAKDPQEGTRLTERFAAIDDELLAALERWETLEAKRKPV

SEQ ID NO: 47859 - protein, 605 aa, Burkholderia cepacia
MCGIVGAVAQRNIVPVLIEGLRRLEYRGYDSCGVAVLEPGAPKRARSVARVADLDTQVQESHLEGTTGVAHTRWATHGAPVTHNAHPIFSSNALALVHNGIIENFEPLRETLRAKGYEFVSQTDTEVIAHLVHSLYRGNLFDAVREAVQQLHGAYAIAVIHKDQPHTVVGARQGSPLVVGHGDGENFLASDALALAGSTDRFTFLEEGDVCELSLDGVTIVDRHGATVQREIRVVSAYGGAVELGPYRHFMQKEIFEQPRAIGDTVPQTDAFDATLFGDAAPAAFAEIDSLLILACGTSYYSGLTAKYWLESIAKIPTQVEIASEYRYRESVPNPRQLVLVISQSGETADTLAALKHAQSLGHTHTLAVCNVATSAMVRLTEMQFLTHAGTEIGVASTKAFTTQLVALFVLAATLGKLRGHVDAAQEAQFLKELRHLPAALNSVLVLEPQIIAWSEEFARKENALFLGRGLHYPIALEGALKLKEISYIHAEAYPAGELKHGPLALVTEAMPVVTVAPNDTLLEKLKSNMQEVRARGGELYVFADADTQIVNDDGLHVIRMPEHYGQLSPILHVVPLQLLAYHTACARGTDVDKPRNLAKSVTVE

SEQ ID NO: 47860 - protein, 559 aa, Burkholderia cepacia
MTTRHLHNESRGYEPRPSGDDTAGPAAPQQHGQAEPSPPAADLPGSGQKEARMNVAERKPLPCPSDWTFELLEEYDTHISQVAEQYELDIYPIQLELISAEQMMDAYASVGMPVNYRHWSFGKHFLATEKSYRRGQMGLAYEIVINSNPCIAYLMEENTMTMQALVIAHAAYGHNSFFKGNYLFRLWTDAHAIIDYLVYAKNYVAECEERYGLDRVEELLDSCHALMNYGVDRYKRPQKPSLSKEAALRREREAYLQSQVNELWRTLPGKKPELTEEQEDRYPPEPQENLLYFAEKNAPLLEPWEREVIRIVRKIGQYFYPQRQTQVMNEGWATFWHYTLLNTLYNQGKLEDGFMMEFLHSHSNVVYQPPVTKPYYSGINPYALGFSMMSDIRRICEAPTEEDYKWFPEIAGTPWLPAMHYAMRNFKDESFIAQYLSPNLIREMRLFSVLDDDMRDSLEVSAIHDDSGYQYVRQALSRQYDIHHREPNIQVWAVNTRGDRSLTLRHFMTDNRHLSNDSDEVLKHMARLWQFDVYLESVDEAGTVRKRYECRYVPPEVRV

SEQ ID NO: 47861 - protein, 106 aa, Burkholderia cepacia
MHHADWCIRICRPRRPLAILSTRRCGAGARRRRLSPKPSQEMTMDRNRVEGKLKQVKGSVKEALGKVTGDRETEAEGLAEQQAGKLQEKAGEAADAMRKHTGTDRH

SEQ ID NO: 47862 - protein, 477 aa, Burkholderia cepacia
MNVRIAIVGTGYVGLVSGTCLAELGHDVVCIDNNRGKIDALNEGRMPIYEPGLDAVVARNVERGTLRFSNDLAASVRDRDAVFIAVGTPTLPGTDHADLQYVEAAAREIAANLTGFAVIVTKSTVPVGTNRIVAQIVDCCAPDGVDAAIASNPEFLREGSAIDDFMHPDRIVFGAEHPRAIEIMKAIYAPLEAAGHLVLATEIETAELVKYAANAFLAVKISYINEISDLCEAVGADVELVANGMGLDRRIGASFLKAGPGWGGSCFPKDTRALKATASQHAVPLRIVSAAIESNALRKEQILRRIENACGGSIKGKRIAVLGLTFKGQTDDVRESPSIDVIQLLVGAGAHIRAYDPARPHEASRLLPQVFMEGSAVDAVRSADAVVVMTEWEAFETLDLADLADHMADPVMLDMRNLFSERLAADSGFRRYERVGRSCGERSPADPAAEPANASADTRTQRGLLNTDGATLTGDHH

SEQ ID NO: 47863 - protein, 397 aa, Burkholderia cepacia
MNPLLDLVRRHKQSSRHAPAGTPAIGIPSVCSAHPVAIAAALRECAARERPALIEATCNQVNQDGGYTGMTPHDFRRHVFDIAARERVSPDAILLGGDHLGPNAWRRLPAAHAMDKAETMVAQYVAAGFRKLHLDCSMSCADDPQPLPEAEIAARAVRLCRAAEAAWAAGAPRGDAPVYVIGTEVPVPGGAHETLDAVAVTTPEAAGSTLALHRDAFARAGLDDAWSRVIAMVVQPGVEFDHHKVIDYDAGNARELSAFIETEPALVFEAHSTDYQTPDNLAQLVRDHFAILKVGPGVTFAMRETLWSLAAIEREWLGGDDGFIATVLGVMRNEPAHWRDYYPAGAQLELDLAYRLSDRIRYYWAHPVMPRPCPDLLARLDACPPPLTLVCLPLPPQ

SEQ ID NO: 47864 - protein, 494 aa, Burkholderia cepacia
MNTRFLARGAVAVAVAAALSAGYFAGTRRADPQIITPAQAAALMPAEAAAKTGIPDFSGLVETYGPAVVNISAKHVVKQVARRAPQPQLPIDPSDPFYQFFKHFYGQVPGMGGDAQPDDQPSASLGSGFIVSSDGYILTNAHVIDGANVVTVKLTDKREYKAKVVGSDKQSDVAVLKIDASGLPIVKIGDPAQSKVGQWVVAIGSPYGFDNTVTSGIISAKSRALPDENYTPFIQTDVPVNPGNSGGPLFNLQGEVIGINSMIYSQTGGFQGLSFAIPINEAIKVKDELVKTGHVSRGRLGVAVQGLNQTLASSFGLQKPDGALVSSVDANGPAAKAGLQPGDVILSVNGSPVADSTSLPAQIANLKPGSKADLQIWRDKSKKSITVTLGAMADAKLASNDGGPVEQGRLGVAVRPLSPQERSADNLSHGLIVQQAGGPAANAGIQPGDVILAVNGRPVTSPEQLRDAVKGAGNSLALLIQRDNAQIFVPVDLS

SEQ ID NO: 47865 - protein, 371 aa, Burkholderia cepacia
MGGSIMSGNTLGTLFTVTTFGESHGPAIGCVIDGCPPGMGLTEADIQVELDRRKPGTSRHVTQRQEADEVEILSGVFEGVTTGTPIALLIRNTDQRSKDYGNIVETFRPGHADYTYWQKYGIRDYRGGGRSSARLTAPIVGAGAVAKKWLRERFGVEVRGYMSGLGEIDVPFVDWSHVHENPFFSPNAAVVPELEAYMDALRKEGDSIGARIDVVASGVPVGWGEPVFDRLDADIAKAMMSINAVKGVEIGAGFDSVAQRGSVHGDELTPAGFVGNHAGGVLGGISTGQDITVSIAIKPTSSIRTPRRSITKSGEEATVETFGRHDPCVGIRATPIAESMLALVLIDHALRHRAQCGDVETPTPKIAGSAT

SEQ ID NO: 47866 - protein, 125 aa, Burkholderia cepacia
  MISC_FEATURE (27)..(27): X=any amino acid
  MISC_FEATURE (30)..(30): X=any amino acid
  MISC_FEATURE (76)..(76): X=any amino acid
  MISC_FEATURE (81)..(81): X=any amino acid
QAAIAPRYKLFTINRVLSIDRILPYLXGMXDFFDSFGALVMAENSDSVWFIGTHRRGTSQHCCIKCRTYIITGTLXNALRXTSGGYVPSPYEVIELLRQHSCPYVLSNTLTPSIPSVSLKVLELL

SEQ ID NO: 47867 - protein, 350 aa, Burkholderia cepacia
MLNAPPAASVPPAPAQPAAPAVVMTVTPTNDGRDEVVETVEIVPPPLQDASAKKSWLARLKKKLAKTGSSITGVFVNTKIDEDLYEELETALLMSDAGVDATEYLLGALREKVRAGRLTDPQQVKAALHDLLVELLTPLEKSLMLGRAQPLVMMITGVNGAGKTTSIGKLAKHLQSFDQSVLLAAGDTFRAAAREQLAVWGERNNVTVVQQESGDPAAVIFDAVSAARARKIDVMMADTAGRLPTQLHLMEELKKVKRVIAKAHDGAPHEVLLVIDANTGQNALTQVKAFDDALGLTGLIVTKLDGTAKGGILAAIARQRPVPVYFIGVGEKVEDLQPFSAVEFADALLG

SEQ ID NO: 47868 - protein, 516 aa, Burkholderia cepacia
MNLFRALLTVSGFTLLSRVTGLARETLIARAFGASQYTDAFYVAFRIPNLLRRLSAEGAFSQAFVPILAEFKNQQGHDATKALVDAMSTVLAWALAVLSVVGIAGASWVVFAVASGLHSDGQAFPLAVTMTRIMFPYIVFISLTTLASGVLNTYKSFSLPAFAPVLLNVAFIAAAVFVAPHLKVPVYALAWAVIVGGVLQFLVQLPGLKKVDMVPLIGLNPLRALRHPGVKRVLAKMVPATFAVSVAQLSLIINTNIASRLGQGAVSWINYADRLMEFPTALLGVALGTILLPSLSKAHVDADSHEYSALLDWGLRVTFLLAAPSALALFFFATPLTATLFNYGKFDAHTVTMVARALATYGIGLVGIILIKILAPGFYAKQDIKTPVKIAIGVLIVTQLSNYVFVPLIGHAGLTLSIGVGACLNSLLLFLGLRKRGIYQPSPGWLRFFVQLVGAALVLAGLMHWCAINFDWTGMRAQPLDRIALMAACLVLFAALYFGMLWVMGFKYAYFRRRAK

SEQ ID NO: 47869 - protein, 458 aa, Burkholderia cepacia
MLVLRLPAHREVRDDDEDPHDHHERAAALREHQEQVAAAHEVNAEDRHADREAQHERVHRHALRVGAAEHRRRVAALAQREQHARVREQERVHHRHERHEQHDLHRDGGLREACHAEQRYVRRFQVGLVGPRHAQDQDRHRADVEHHHAHDHALDRADHVPARVFRFARGHCRDLAAAEREDHDHHAGEHGRDAVRHEAAVIREVHEPRRGNARLEAEQDRRAERHEHDDRRDLRERQPVFGFAERAHRIRVARDQRDEHEQRAAPDRQPRQEIVEDRAEQDRFDGDRHHRLEPVQPADREAGPFAEIAARIRGERSAVGIAGRHFAEHEHDQRDDHAADQVRQDRRGAGRCDDRAGADEQARADHAAERDHRDVPLLEALPQRVVLHLLPLVIVGRERIGRRGGKRSAAAGRRCRGSVCDAMCGAAGGESKWRPRCAGRCPREGDDGDKPDCRRTPP

SEQ ID NO: 47870 - protein, 297 aa, Burkholderia cepacia
MNFALILFVLVVVTGVAWVLDKLVFLPRRRKAADSAIEEFDRQQSRIDKRFADENAAQTRSKLRDEKLRQPWWLEYTASFFPVILAVFVVRSFVVEPFKIPSGSMVPTLLVGDFILVNKFEYGLRLPVTNTKITQGSPLSRGDVVVFRYPKDESVDYIKRVIGLPGDTVAYQDKQLTINGQPVPETPLPDFFDDERQNYAKQFEETIGNKKNAILNNPAVPPFVMGAYDYPYRDNCTYNSRGVICKVPPGHYFMMGDNRDNSADSRYWGFVPDQNIVGRAFFIWMNFSDLKRIGSFN

SEQ ID NO: 47871 - protein, 345 aa, Burkholderia cepacia
MRHPTAHSPDAASAIVKVFRGLPNAESRAPCALTIGNFDGVHRGHQALLARVRAAADARGLPVCVMTFEPHPREFFNPAGAPPRIAMLRDKLEALRDHGVDRVVVEHFNHTFASQSPQAFVERTLVNGLHTRWMMVGDDFCYGAKRAGTFDTLKAAGEQHGFEVEQMGTVAGSDGTRISSSGVRAALAAGDLDAAAQALGHGYAISGHVAHGLKLGRDLGFPTLNLPIAHKRPALAGIFVVQVHGLGPEPLPGVASLGLRPTVDDSGRVLLEVHLLDWHGDAYGKLIRVEFLKKLRDEAKFDDLEALSRAIALDVANARAYFIERDRAPGSRATGFATSATDRIS

SEQ ID NO: 47872 - protein, 223 aa, Burkholderia cepacia
MNDNDHRPVRFGIVGAGSIARRFAQSLAYVPGAMLAGAWARRADATAAFCETYGGTPAASPDALLASDLDAVYIATLHDSHAQYTLAALAAGKAVLCEKPAALNAAQLDTVLHAARDAGLLFMEAMKPPFFPLYRQLRAHLRDDPIGEIRLVRAGCASSSVPEDHSVYRLDRAGGALLDIGIYEAFLAVDWLGAARDVQTLGRVGATGVDLFASLNSVHANGE

SEQ ID NO: 47873 - protein, 438 aa, Burkholderia cepacia
MPFLPTTATAPFCPSEVKGSITIDAAAPRWQKLRRFFGPGLLVAIGYMDPGNWATDIQAGSQFGYSLLWVVAFSSLAAIFLQMLAARLGLVAGKDLAQASYDRYGRFGRVVQWITAEVSIIACDIAEVLGCALAFKLLLGVPLAWGVVLTALDTVIVLGLQGKGFRQIEAIVLGLIATMAFCFVAQVAITPPDWHAVVSGLVPGDPGHDRKDAIVLALGIVGATIMPHNLYLHSSVVQTRHVVGGARGVIRDTLALVRIDTCVSLFVAMLVNAAILVVAGAAFHATGQHNVTDIEQAYRLITPIAGGAAALLFGIALLASGQSSTLTGTIAGQVIMDGFLHTKIPCYQRRLITRGLALVPALIGVLWLGDGSVGQLLVWSQVLLSLQLPFAMWPLIRSVSDRRTMGEHAIGRGMQVAAWTLFAVITGTNLLLITGVAG

SEQ ID NO: 47874 - protein, 89 aa, Burkholderia cepacia
MLQQETTIVNKLGLHARASAKLTQLAGNFQSEVWMTRNGRKINAKSIMGVMMLAAGIGSTVTIETEGPDEREAMDALLKLIADKFGEGQ

SEQ ID NO: 47875 - protein, 355 aa, Burkholderia cepacia
MSLFDTINAGGAQLLGFAWPTVWAVVRILVVSVVILLCVAYLILWERKLIGWMHVRLGPNRVGPGGLLQPIADVLKLLLKEVIQPTAASRWLYLIAPIMTVVPAFAVWAVIPFQAEAVLANVNAGLLYAMAISSIGVYAVILAGWASNSKYAFLGAMRAAAQMVSYEISMGFALVLVLMTAGSLNLSEIVGSQQHGFFAGHGVNFLSWNWLPLLPAFVVYFISGIAETNRHPFDVVEGESEIVAGHMIDYSGMAFALFFLAEYINMIVISALAATLFLGGWDAPFEFLSFIPGIFWLVLKVFALLSVFIWVRATFPRFRYDQIMRLGWKVFLPVTVIWVVVVGCWMMSPLNIWVK

SEQ ID NO: 47876 - protein, 278 aa, Burkholderia cepacia
MLSTALIVFREVLEAALVVSIVMAATKGVPRRGWWVGGGLVGGVVGAGLIAAFADVISQWASGMGQEVFNAGVMFVATLMLAWHCIWMSRHGREMALHMGEVGRAVAAGSRPLTGLAIVVGVAVLREGSEAVLFLYGIAAGDPGQTPQMIAGGLLGVLGGAGLGYAMYAGLLQIPLKRLFSVTNGLIVLLAAGMASQCVGFLLAAGLVPSWGDAVWDTSWLLKETSIVGKALHTLIGYTARPAGIQIAAYVATLVAILVLARFVGRPQETVRPPRAAA

SEQ ID NO: 47877 - protein, 262 aa, Burkholderia cepacia
MTETATRMTEATTTAAVPRFFVDAALRADATLALPADVARHVQVLRLQPGDVLALFDGTGGQYRARLVEVDKRSALVQVDSFEPAEAEPPYRVTLAQGIAGGDKMDWVIEKAVELGVAAVVPLSTARGVVKLSGERADKRVAHWRGVVRASCEQCGRNRVPDVAPVIGFSAWLDALPAAPADGELRLLLSPRASIPFASLPDAPPAAAVTLLIGPEGGLSPDEENAARARGFTALSLGPRVLRTETAGAAVLAALAARWGGW

SEQ ID NO: 47878 - protein, 833 aa, Burkholderia cepacia
MAPQNRKISMSEQHNSQPDNSSYGASSIQILEGLEAVRKRPGMYIGDTSDGTGLHHLVFEVLDNSIDEALAGYCNDIHVTIHADNSISVTDNGRGIPTDVKMNDKHEPKRSAAEIVMTELHAGGKFDQNSYKVSGGLHGVGVSCVNALSSWLRLTVRRDGKKRFMEFHRGVAQDRVIEVVDGVEVSPMLVTGDTENRGTEVHFMADPTIFGTVEYHYDILAKRMRELSFLNNGVRIRLTDLRSGKEDDFAFAGGVKGFVEFINKTKSTLHPTVFFANGEKDGVGVEVAMQWNDSYNENVLCFTNNIPQRDGGTHLTGLRAAMTRVINKYITDNEIAKKAKVETTGDDMREGLSCVLSVKVPEPKFSSQTKDKLVSSEVRAPVEEVVAKALEEFLLETPIDAKIICGKIVEAARARDAARKAREMTRRKGVLDGVGLPGKLADCQEKDPAKCEIYIVEGDSAGGSAKQGRDRKFQAILPLRGKVLNVEKARYDKLLSSEQIVTLVTALGCGIGKEDYNLDKLRYHRIIIMTDADVDGAHIRTLLLTFLYRQMPDMIERGYVYIAQPPLYKIKAGKDERYLKDDVELNAHMLRLALQGSELVPGENAAAISGDALGELARSYLLSQSVIERLSRLYDPAALEAVMDGVVIDLSNEESTEASAKALHAALHDEALKNEVRVVPSYDPVREQRALHVERTHHGNVRVSVIDQEFQHTADYQQLVTTANTFKGLIGEGAVIKRGERSMAVADFKSAMKWLLADAERNVSKQRYKGLGEMNPEQLWETTMDPAVRRLLRVQIEDAIAADGIFTTLMGDDVEPRRAFIESNALRAGNIDV

SEQ ID NO: 47879 - protein, 66 aa, Burkholderia cepacia
MRELRQCHPVAALLKAAGLARSTFYYQLKALAAGDRYADLKAKIQTVYDHHKGRYGYRRITAAIRQ

SEQ ID NO: 47880 - protein, 241 aa, Burkholderia cepacia
MRCASARVAQDMNDFDTTIQIFLTHVTFGPLMNHAIRVIAGLYTFKGFVLVPVLCWLWFQPGPNRERQRERVVATVASGLVALAVGRVLAQVLPFRVRPIYNPDLHLHFPSAGLRAATLQTWSSFPSDHAMLWMAIATGIFIIARRVGIVALLYSVVFICLPRAYLGFHYPTDLIAGAAIGIAIAWLLTRDAIRSRFAPRVLEMIRRFPAPAYTLAFLLCFELITQFDELLTLAQSATRTM

SEQ ID NO: 47881 - protein, 861 aa, Burkholderia cepacia
MLENFRAHVAARAALGIPPLPLTAQQTAELVELLTNPPAGEEQTLLELITHRVPAGVDEAARVKAGFLAAVAKGETACPLISRAHATELLGTMLGGYNIQPLIELLSDEAVAAVAADALKKTLLMFDQFHDVKELADKGNAHAKAVLQSWADAEWFTSRPEVPESLTITVFKVTGETNTDDLSPAPDATTRPDIPMHALAMLKNARPGITPEEDGKRGPVKFIESLKEKGHLVAYVGDVVGTGSSRKSATNSVLWFTGEDIPFVPNKRFGGVCLGGKIAPIFYNTMEDAGALPIELDVSQMEMGDVVELRPYEGKALKDGKVIAEFQVKSDVLFDEVRAGGRIPLIIGRGLTAKAREALGLAPSTLFRLPHQPADSGKGFSLAQKMVGRACGLPEGQGVRPGTYCEPKMTSVGSQDTTGPMTRDELKDLACLGFSADLVMQSFCHTAAYPKPVDVKTHQTLPNFISTRGGIALRPGDGVIHSWLNRMLLPDTVGTGGDSHTRFPIGISFPAGSGLVAFAAATGTMPLDMPESVLVRFKGKMQPGVTLRDLVNAIPLYAIKHGMLTVAKQGKKNIFSGRILEIEGLPDLKVEQAFELSDASAERSAAGCTVRLNKEPIIEYLNSNITLLKWMIAQGYQDPRSLQRRIAAMEQWLADPQLLSPDADAEYAAVIEIDLADIHEPIVACPNDPDDVKTLSDVAGAKIDEVFIGSCMTNIGHFRAASKLLEGKRDIPVKLWVAPPTKMDQKQLTEEGHYGVFGTAGARTEMPGCSLCMGNQAQVREGATVMSTSTRNFPNRLGKNTNVYLGSAELAAICSRLGKIPTKEEYMADMGVLTANGDKIYQYMNFDQIEDFKEVADTVQM

SEQ ID NO: 47882 - protein, 391 aa, Burkholderia cepacia
MSKRRVVVGMSGGVDSSVTAWLLKEQGYDVVGLFMKNWEDDDDGEYCSTRQDWIDVVSVADLIGIDVEAVNFAAEYKDRVFAEFLREYSAGRTPNPDVLCNAEIKFKAFLDHAMSLDAEMIATGHYARVRERDGRFELLKAFDHTKDQSYFLHRLNQAQLSKTMFPLGEIPKTKVREIAAQIGLPNAKKKDSTGICFIGERPFRDFLNRYLPTKPGPMKTPDGKVVGEHIGLAFYTFGQRKGIGLGGSKSGSGEPWFVAAKDIASNTLYVVQGHDHPWLLSRELVAGNVSWVAGEPPADGFACGAKTRYRQADAACVFGLAATGAEAAGPAGEARFSLAFDDAQWAVTPGQSAVLYDGEICLGGGIIESAATGQPGQATSTGHAPALAEAR

SEQ ID NO: 47883 - protein, 208 aa, Burkholderia cepacia
MSHDDPNLIVRYTPNERTNHWITAITFVLLALSGLALFHPSMFWLTALFGGGQWTRILHPFVGLVMFVSFAILVVRFWHHNALDADDRQWLKQIGDVLTNQEDKLPPVGRYNAGQKLLFFTLVACLLLLLLSGIVIWRRYFSFYFPIGVIRAAAVVHAVAAFVLIASIIVHIYAALWVKGSIGAMVRGTVTLGWARKHHPKWFRESVK

SEQ ID NO: 47884 - protein, 169 aa, Burkholderia cepacia
MKHSFSRSFPRRALGVFATVGAMLAGAAQAAIVPDRTRVIFNEGEQAAIVTITNKSTTYPYLVQSWLEDAKGNKITSPLMVVPPLQRVEANERNVLRIAKLPGAQLPADRETVFYLNIREVPPKTDTPNTLQIALHTQMKLFYRPKAAQPARDEDWTLPMTLGVDADGD

SEQ ID NO: 47885 - protein, 72 aa, Burkholderia cepacia
MAKDDVIQMQGEVIENLPNATFRVKLENGHVVLGHISGKMRMHYIRILPGDKVTVELTPYDLSRARIVFRAK

SEQ ID NO: 47886 - protein, 419 aa, Burkholderia cepacia
MTIKHSVSVRSLRALDWLNFFVANVQTGFGPFIASYLASHKWTQGEIGMVLSIGTISAMVSQVPGGAAVDALKNKKGAAAWAIAAIILSAVLLASSPTIVPVIAAEVFHGFASCMLVPAMAAISFSLVGRADLGDRLGRNARWASIGSAVAAGLMGLTGEYFSARAVFWLTAVLALPALFALAMIQPTHQVIPQSSKPDDLDEAGERETLLELLRDRRMLIFAACVVLFHLSNAAMLNLAAGEVTAGMGENVQLVIAACIIVPQAIVAMLSPWVGRSAQRWGRRPILLLGFSALPVRALLFAGVSSPYLLVPVQMLDGISAAVFGVMLPLIAADVAGGKGRYNLCIGLFGLAAGIGATLSTAVAGYVADHFGNAVSFFGLAAAGALAVLLVWLVMPETRVENGDESAEELAAASPEQAH

SEQ ID NO: 47887 - protein, 133 aa, Burkholderia cepacia
MAKASNTAAQRVRKKVKKNVAEGVVHVHASFNNTIITITDRQGNALAWATSGGQGFKGSRKSTPFAAQVAAESAGRVAMEYGVKNLEVRIKGPGPGRESAVRALHGLGIKITAISDVTQIPHNGCRPPKRRRM

SEQ ID NO: 47888 - protein, 518 aa, Burkholderia cepacia
MTFWNLYFILKFALFATGHLQPFWLANLAFAVALAASAPLRARAWRIVRQVVAIAIAVPLLARELHAPPLARLAEAAREVSTFRLDYWMELLPRLLPPVLALTIVGVLIVYFIVNRWLRVATFVLAALIVMPLWQAGSGLMARVVAPAQPQANVAGATRVDQPEDHNAALATFRAQESQRQVAFGHLGSDPAAQFDVIVLHICSLSWDDLDAAKVRNHPMLSHFDYLFTNFSTAASYSGPAAIRVLRASCGQEAHADLYKPAPQQCHLFSQLAGAGYTVQSLLNHDGHFDNFLQVIHDNIGVPDAPMISNAAAPVAMHAFDGSAIKDDYATLANWYAQRAAVPGPVALYYNTISLHDGNRVVGSALTSIDSYPQRATKMMTDFDRLADLIAQSGRRAVIVFVPEHGAALRGDKNQVAGLREIPTPRIVHGPVGVRLVGFAGNHGATTVIEQPTSFLALAQLLSNLVSNSPFKPGATLAQYAADLPRTRMIGENEGTVTMQTAAGYAVKTPDGVWIDEQ

SEQ ID NO: 47889 - protein, 410 aa, Burkholderia cepacia
MSKDYKDLLVSLDIGTSKVVAIVAELKGEGHYEVIGLGQSESKGLKKGVVVNIEATVQSIQRALEEAELMADCKITNVFTGIAGSHIRSFNSSGMVAIKDKEVTQTDVARVIETAKAINIPTDQQVLHILTQEFIIDGQEDVREPIGMSGIRLEVKVHIVTGAVSAAQNIVKCVRRCGLEVNDLILQPLASSLAVLTEDEKDLGVVLVDIGGGTTDIAIFAEGAIRHTAVIPIAGDQITSDIAMALRTPTPDAEDIKVGYGIAKQALADPDEMVEVPGLGERGPRTLSRQALAAVIEPRVEELFSLVQQVVRESGYEELLSSGVVITGGASMMPGMVELGEDIFLKPVRIGAPEYAGGLSDVVRNPRYSTAMGLLVEGSAQRMRGRKVAVQSGNAGQVFSRMKEWFLSNF

SEQ ID NO: 47890 - protein, 373 aa, Burkholderia cepacia
MKQTTRLAAIAGGAALAFASQYAAAQSSVTLWGVADASIRYLTNANAKNDGLLSMSNGAITNSRFGIYGTEDLGGGLKAVFNLESGVNLQNGAFADSGRLFNRAAYVGLQSPYGTVTLGRQKTPLFDLLSDTYDPLTVGNYLENAWLPVALGGGLYADNQIKYTGKFEGLTAKAMYSTGTNYESTGAGGFSGQIPGSLGKGNAWGVSLSYVMGPLSIAAGAQQNSDNSARKQTIYHANIVYAFSKAKIYAGYLRSKDDTGFVDSLLAQQTIPVAKGTGRIDDGPFAGVSWQVSAPLTLTGAFYYDHMRNAMTTNGTLASGNRYAVVGIAEYALSKRTEIYGTVDFNKTTGAANVELPGRSNQTGIAIGLRNIF

SEQ ID NO: 47891 - protein, 230 aa, Burkholderia cepacia
MFGTTTKRLFAAACAALLVACGSAPVGPGFYRVERGDTLYKIARDNRTSVQSIVRWNQMTNPDAIEVGQVLRVAPPPGTTTASTTGTGSAGRARPAPSAPVESAVKPATSIALIWPAAGNVVRTFDGSKSKGIDIANSPGTPVVAAAPGVVVYAGNGLRGYGNLIILKHNADYLTAYAHNRALLVKEGQSVTQGQSIAEMGNSDSDRVALHFELRYGGRSIDPSRYLPAR

SEQ ID NO: 47892 - protein, 370 aa, Burkholderia cepacia
MKFIDEARIEVIAGDGGDGSASMRREKFVPFGGPDGGDGGRGGSVYAIADRNINTLIDYRYAKKHLARNGENGRGSDCYGKGGDDVTLRMPVGTIISDMDTGELIADLTEHDQRVMLAQGGAGGLGNLHFKSSTNRAPRQKTDGKPGERRMLKLELKVLADVGLLGMPNAGKSTFISSVSNAKPKIADYPFTTLAPNLGVVRVGPSKSFVIADIPGLIEGAAEGAGLGHQFLRHLQRTGVLLHLVDLAPFDESVDPVAEATAIVGELRKYDEALYEKPRWLVLNKLDMVPEDEREARVADFLDRFGWDGPVFEISALTGQGCEALCYAIYDYLSEHSDAHRAAEAEDLAADVRFRDAPPAKGGATPGDDA

SEQ ID NO: 47893 - protein, 107 aa, Burkholderia cepacia
MIAVGTTSMRALEAAARSADEAGRPLAATQAETDIFITPGYRFRVVDRLVTNFHLPKSTLLMLVSAFAGVETIRAAYRHAIEERYRFFSYGDAMLLTRRDTPEAPGA

SEQ ID NO: 47894 - protein, 240 aa, Burkholderia cepacia
MRLTQVSALSFDLDDTLWPFGPSVVRAEATLRAWLLEHAPNTERVLPTQQALSALREEYERLYPDLASDYRAMRIGSIRLALERANEDASLTDRAYDVFYAARNRVEFYEDALPALAWLSARFPLIAVTNGNADLRLTGGGEFFRTTLSARVFGFAKPEPEIFHAAADALGVRPAELLHVGDDFHLDIVGALNAGLQAAWVVREPRAGGEPAPPQAATPHLTLRDLAMLCRALGGPDTVS

SEQ ID NO: 47895 - protein, 304 aa, Burkholderia cepacia
MLLDEAVESLVTRPDGVYVDGTFGRGGHSRAVLARLAPAARLIAFDKDPRAIETAQGIKDARFSIVHDSFASMRDALAARGVEKVSGVLLDLGVSSPQVDDPARGFSFRADGPLDMRMDPTRGESAAEWLARASVQELTEVIRDYGEERFAFQIAKALVARRAESDRLGPLDTTGELAQIVGHVVKTREKGKDPATRTFQAIRIHVNQELADLQVVLDAALSLLEQGGRLVVISFHSLEDRIVKRFMQAHASAPAVDRRLPIRAVDLPSPPLKIISRQFPSEAEVAANPRARSAVMRIAERVTP

SEQ ID NO: 47896 - protein, 504 aa, Burkholderia cepacia
MLRHAVAAICVALSASPYAAELTRDTGAPVGDNQNSQTAGPAGPVLLQDSALIEKLQRFDRERIPERVVHARGTGAFGEFVPSADISDLTKAKVFTPGTRTPVFVRFSTVMGYRGSPEQARDPRGFAVKFYTQQGNWDMVGINWPVFFIRDGIKFPDFVHANKPSAVTGVQDPNLAFDFFAHTPEATHMLTRLYTDEGMPDSYRHMDGFAVHAFKFVNAQGDVHYVKFHWKSRQGVHGLRPQEIAASIGRDWNMMTNDLYGALKQGDFPKWDLYVQVLTPKDLNRFDFNALDDTKVWTGVPERKIGTMTLNRVPDNYFQSTEESAFAPSRLVPGIEPSEDRMLQDRLFAYADTQMYRLGANYMDLPINRPVVPVVNNNQDGKMNAGDRKGEVNYEPSTLNELAQDPQYKSVRMALDGTTQQEAIRKKLPFRQAGEYYRSLSQQDKDDLVTALSGDLGQVKNAQNQYAMLSYFYKADADYGTRLAQAVHANVQQVQSLAAKLSDN

SEQ ID NO: 47897 - protein, 131 aa, Burkholderia cepacia
MRHRHGLRKLNRTSSHRLAMLRNMSNSLIEHEVIKTTLPKAKELRKVVEPLITLGKKPSLANRRLAFNRLRDRDSVAKLFDVLGPRFANRPGGYLRVLKFGFRVGDNAPMALVELLDRPEVDETENVQEAE

SEQ ID NO: 47898 - protein, 347 aa, Burkholderia cepacia
MFGFLRSYFSNDLAIDLGTANTLIYMRGKGIVLDEPSVVSIRQEGGPNGKKTIQAVGKEAKQMLGKVPGNIEAIRPMKDGVIADFTVTEQMIKQFIKTAHESRMFSPSPRIIICVPCGSTQVERRAIKEAAHGAGASQVYLIEEPMAAAIGAGLPVSEATGSMVVDIGGGTTEVGVISLGGIVYKGSVRVGGDKFDEAIVNYIRRNYGMLIGEQTAEAIKKEIGSAFPGSEVKEMEVKGRNLSEGIPRSFTISSNEILEALTDPLNQIVSSVKIALEQTPPELGADIAERGMMLTGGGALLRDLDRLLAEETGLPVLVAEDPLTCVVRGSGMALERMDKLGSIFSYE

SEQ ID NO: 47899 - protein, 69 aa, Burkholderia cepacia
  MISC_FEATURE (30)..(30): X=any amino acid
RTFTPSSRTSLNGEQPYLWDRIQPQDEMSXHRGAKHRCRYELLGGISLLSPEYFLSVERWPFHTEPPDQ

SEQ ID NO: 47900 - protein, 397 aa, Burkholderia cepacia
RDSHTVGPGARATWPRRRGSAGARGRAERTGRKEGGDWVGHAAPQDRFFKRLGSARKERIVLPGFYHDTLGERDRAQALAPLRAFVLREFDAPSPRVSLVDADRRGAFHDEYAALGRPPANVFARAYWALTRAGLKAGGALSDGIALGLRLGFDSGSTLDYVYRNRAQGRLGIGALIDRTYLDSPGWVGIRQRKVHLQELIGAAIGRLRGHGSPVRIVDIAAGHGRYVLDAIAMAAERDGAAPDDITLRDYSPPNVEAGRVLIAQRGLEPIARFERGDAFDEASLVTLEPRPTLAIVSGLYELFGENALIERSLRGLAQAVPPGGYLVYTGQPWHPQLEFIARALNNHRGESTWVMRRRSQAEMDELVARAGFRKLDQRIDEMGIFTVSLAQRVDAS

SEQ ID NO: 47901 - protein, 79 aa, Burkholderia cepacia
MDNIEQRVKKIVAEQLGVAEAEIKNEASFVNDLGADSLDTVELVMALEDEFGMEIPDEEAEKITTVQQAIDYARANVKA

SEQ ID NO: 47902 - protein, 148 aa, Burkholderia cepacia
MSLKEQISEDMKAAMRAKDSERLATIRLLMAAIKQREVDDRVTLDDAGITAVIDKMIKQRKDSISQFQAAGRDDLVAKEQAELTVLGGYMPAQLSDAEVAAEVQAAVAQTGAAGPQDMGKVMGVLKAKLAGRADMTAVSAQVKAALTK

SEQ ID NO: 47903 - protein, 325 aa, Burkholderia cepacia
MDYTKSNSYSIADNGNRMHDDRKPVPTAVEDTDMNMVIWSLMQVIKAAALEGKSFDPASEETYSVFLNALKQLFPLREDMTGAVRYYAAVPAQRAEPVIYVPAFGLMEWLADRNYYRSLDCGQLVLSGSAARRGTVAADGSAKSKTDLRGLYDWAGENGLIVAAANWSPGVYAFCDIDANQFRLPDVRGEGLRLWDNGRGVDQARTLGSWQGGAIESHGHAANSGDAGAVADRRTGSGGGHNHNNGIFTRLLRAPYVGSITGSDTTNSGDEQAVGGGDSADIAAVGDHDHLIPGVGPHRHDISISATGGNETRMRNVAVAALIKI

SEQ ID NO: 47904 - protein, 442 aa, Burkholderia cepacia
MSAFGAARKAARPRGQWERAGLLNAAGVAMRFHEKKSAARPIASPRDPHDARYPAAIEEKDKNMWKRHVVKKNERALLMSEGDFVKVLEPGVFKAFDPFKRLSVQTARLDAPLADDALADYLRHDAPDVLARYFVAMDLADDEAGLRYEDDVLVEILAPGTRRLYWRGLTAHRLERIDLAQDSMLPAALVKRIAQPSLRARGVAGLTGVLLAQVPAYHVAVLKVDGKIERLLDAGASAFWRFNRDVAVELVDLRLQAIEVGGQEILTRDKVALRLNLSATWRYADVLHAFGQLQKPVEHLYRELQFALRSAVGTRSLDELLEDKQSLDEVVIAQVRARLDGSGVDVRSVGVKDIVLPGDMKTILAQVVEAEKSAQANVIRRREETAATRSLLNTAKVMEENPTALRLKELETLERVAERIDRISVFGGLDQVLNGLVSIKGT

SEQ ID NO: 47905 - protein, 237 aa, Burkholderia cepacia
MSNAYKRVLLKLSGEALMGDDAFGINRATIERMVADIAEVVRLGTQLAVVIGGGNIFRGVAGGAAGMDRATADYMGMLATMMNALALQDAMRHAGIEARVQSALRMDQVVEPYIRPRAIRQLEEGRVVIFAAGTGNPFFTTDTAAALRGSEVGAEVVLKATKVDGVYSADPKKDPSATRYTTISFDEAISRNLQVMDATAFALCRDQKLPIRVFSINKPGALKRIVLGEDEGTLVHV

SEQ ID NO: 47906 - protein, 665 aa, Burkholderia cepacia
MTVNAPPFRTGPAPRRIRPPARYAGLAALLTLALGLTATFAASRVLENNVRHATQVRFEQAATRATAGLRRSLLDAAVILRGTRAFASALSAEPSGAAWLRYLASLDLDALQSPVRSLGRIEPSAAEDNQATRQALQRAAETGKVALAANAIQDSIDTAFARTELTLYLPIGAKAEDGTSFEARHATATGYVYAALNPDRLVDPSLLDRLHLEIVADTPAAPVYTAGFSGDDATDSRKALERTDSLVFGGTPLSLHYRAASADTARTAMAVLLTGTVLSLTLAALVRQILSQRTRVAETAGNSQPTEARMMGIIRSSMEAIVTVDENQTIVIFNPAAEHVFGVSAMEAVGAPLSRFIPERFRAAHARHVEQFGVTGVSERQMGRQRVLFGLRGDGTEFPIEASISQIRDGAGKLYTVMLRDVTERVRAENALKQSREELRDLSANLQNVREEEKTRIARELHDDLGQQLTALKMDLSAVELGLAGVVAPHTGVREQLGAMHRLIDSTVASVRRIAADLRPVMLDDLGLIPAIEWLANDFTRRYRITVDRDIGPVDTKFTGAGATALFRIVQEALTNVARHSDATNVTLTLKTADGYCMLRVADNGHGAPKHPRDSQDRPSFGLIGIRERAHMLDGTVTIDNRPGSGFTITVALPLHAIQQGDVLS

SEQ ID NO: 47907 - protein, 525 aa, Burkholderia cepacia
MTTRIYVPRDSSALALGADALAAAIVAEAERRGVAIELVRNGSRGLLWLEPLVEVGTAAGRVGYANLSAADVPALFDANWLDGGTHPSSVGLVDALPYLARQQRLTFARIGLTDPLSIDDYLQHGGLAGLKNALALDGDAACETLIESGLRGRGGAAFPAGIKWRTVRQARAAQKYIVCNADEGDSGTFSDRLLMECDPYCLIEGMIIAGVATGATVGYIYVRSEYPHAIATLEAAIVRAREAGWLGEHVLGSAHAFELQVAKGAGSYVCGEETALLESLEGKRGVVRAKPPLPALAGLFGQPTVINNVITLATAPVIFARGAAFYRDYGMGRSRGTLPFQLAGNIRHGGLVELAFGVTLRELLFDFGGGTASGRPARAAQVGGPLGTYLPDHQWDVPLDYEAYTAIGAVVGHGGIVLHDDTSNLAELAEYAMKFCAIESCGKCTPCRIGSTRGVETIARIRDGDTSERQVTLLRDLCDTMLAGSLCAMGGMTPYPVLSALDHFPEDFGLAAGKDAASGPVKAAA

SEQ ID NO: 47908 - protein, 354 aa, Burkholderia cepacia
MLLLNPGPVTLTERVRRSLLQPDLCHRESEFFDLQDEARTRLVAAYELDPAEWAAVLMTGSGTAAVESMIAALVPQDGKLLVIENGVYGERITQIATQYGIAHDVLKHEWMQAPDLARIGAKLDAGGYSHVAVIHHETTTGRLNDLGAIAEVCRARGVKMLVDGVSSFGAEAIDFAGGVIDAVAATANKCLHGVPGAAFVIVRRSALTKAASRTYYLDLGRLAKLQDQRNTPFTPSVHAYYALVEALREFDEAGGWRARHAHYKALADQAQAGLAARGMPLVLPEGASSVVLRAYRLPQGVTYETLHDGLKARGFVIYAGQGGLSKELFRISTMGAIQAADVERLLEGFTALTR

SEQ ID NO: 47909 - protein, 827 aa, Burkholderia cepacia
ILPHALPFWVLTKPLKKKEISRLINTAFRKSGLRATVVFADQLMQSGFRLATRAGISICVDDMLVPPQKETIVGDAAKKVKEYDRQYMSGLVTAQERYNNVVDIWSATSEAVGKAMMEQLSTEPVIDRDGNETRQESFNSIYMMADSGARGSAVQIRQLAGMRGLMAKPDGSIIETPITANFREGLNVLQYFISTHGARKGLADTALKTANSGYLTRRLVDVTQDLVVVEDDCGTSNGVAMKALVEGGEVVEALRDRILGRVAVADVVNPETQETLYESGTLLDETAVEEIERLGIDEVRVRTPLTCETRYGLCAACYGRDLGRGSLVNVGEAVGVIAAQSIGEPGTQLTMRTFHIGGAASRAAVASSVEAKSNGIVRFTATMRYVTNAKGEQIVISRSGEAMITDDFGRERERHKVPYGATLLQLDGATIKAGTQLATWDPLTRPIITEYGGTVKFENVEEGVTVAKQIDDVTGLSTLVVIDVKRRGSQASKSVRPQVKLLDANGEEVKIPGTEHAVQIGFQVGALITVKDGQQVQVGEVLARIPTEAQKTRDITGGLPRVAELFEARSPKDAGILAEVTGTTSFGKDTKGKQRLVITDLEGNQHEFLIAKEKQVLVHDAQVVNKGEMIVDGPADPHDILRLQGIEALSRYIVDEVQDVYRLQGVKINDKHIEVIVRQMLRRVQITDNGDTRFIPGEQVERSDMLDENDRMIAEGKRPASYDNVLLGITKASLSTDSFISAASFQETTRVLTEAAIMGKRDDLRGLKENVIVGRLIPAGTGLAFHKARKAKESSDRERFDQIAAEEAFDFGTPSAPAEEPQHPAAE

SEQ ID NO: 47910 - protein, 448 aa, Burkholderia cepacia
MHDKILILDFGSQVTQLIARRVREAHVYCEIHPNDVSDDFVREFAPKAVILSGSHASTYEDHQLRAPQAVWDLGVPVLGICYGMQTMAVQLGGKVEWSDHREFGYAEMRAHGHTRLLDDIEDFTTAEGHGMLKVWMSHGDKVAELPPGFALMASTPSCPIAGMADEARGYYAVQFHPEVTHTVKGRQIIERFVLQIAGAKPDWIMKNHIEEAVAKIREQVGDEEVILGLSGGVDSSVAAALIHRAIGDQLTCVFVDHGLLRLNEGKMVLDMFEGRLHAKVVHVDASDQFLGHLAGVTDPEAKRKIIGREFVEVFQAEAKKLSKAKWLAQGTIYPDVVESGGTKTKKATTIKSHHNVGGLPETLGLKLLEPLRDLFKDEVRELGVALGLPPEMVYRHPFPGPGLGVRILGEVKREYADLLRRADAIFIEELRGTTATAQDAAAGLSARP

SEQ ID NO: 47911 - protein, 508 aa, Burkholderia cepacia
MTEPTQTQPAVTADENQIIAERREKLRALREQGVAYPNDFRPEHHAADLQAKFADSDKAALEANPVEVSVAGRMMLKRVMGKASFATVQDGSGQIQFFVTPNDVGAETYDAFKKWDLGDIVAARGVLFRTNKGELSVQCKELRLLSKALRPLPDKFHGLSDQEMRYRQRYVDLIVTPETRDTFRARTKTIASIRKFMDNADFMEVETPMLHPIPGGAAAKPFVTHHNALDMQMFLRIAPELYLKRLIVGGFERVFEINRNFRNEGVSPRHNPEFTMMEFYAAYTDYRWLMDFTEQLIRQAAIDALGTATIQYQGRELDLAKPFHRLTITQAIQKYAPDYTDGQLSDDAFLRTELKRFGVDVSQPAFLNAGIGALQLALFEETAEAQLWEPTFIIDYPVEVSPLARASDTVPGITERFELFMTGREIANGFSELNDPEDQAARFKKQVEQKDAGDEEAMFFDADYIRALEYGMPPTGGCGIGIDRLVMLLTDSPTIRDVLLFPHLRRED

SEQ ID NO: 47912 - protein, 596 aa, Burkholderia cepacia
MWSSIWPFQPAIPAGVAQRAMHNQIFMSDLQTSNPNTESFAALFEESLTRQDMRAGEVISAEVVRVDHNFVVVNAGLKSEAYIPIEEFLNDQGEVEVQSGDFVSVAIDALENGYGDTILSRDKAKRLASWLSLEKALDNNELVTGTITGKVKGGMTVMVNGIRAFLPGSLVDTRPVKDTTPYEGKTLEFRVIKLDRKRNNVVLSRRAVIEATQGEERAKLLETLKEGAIVNGVVKNITDYGAFVDLGGIDGLLHITDIAWRRVRHPSEVLSVGQEVTAKILKFDQEKNRVSLGIKQLGDDPWEGISRRYPSGTRLFGKVTNITDYGAFVEVESGIEGLVHVSEMDWTNKNVAPSKVVQLGDEVEVMVLEIDEDRRRISLGMKQCKPNPWDDFSRNFKKGDKITGAIKSITDFGVFIGLPGGIDGLVHLSDLSWSEAGEEAVRKYKKGDEVEAIVLGIDVEKERISLGIKQLEGDPFSNYVAMNDKGSIVDGVVKTVDAKGAVVTLTGDVEGYLRASEISQDRVEDARNVLKEGDKVNAMVINIDRKSRGINLSIKAKDSAEQQEAIRGLQSDSSAAATGTTNLGALLKAKLDGQNQ

SEQ ID NO: 47913 - protein, 487 aa, Burkholderia cepacia
MTASGTPTRDARGPTRLQTMLRQPFAAGVVALCAGAVLSLGVALLVREQWQGAVHTRFERRTSHVTAMLRHELQAGVAVLEGARGAFGLVPDMTPGQWRRYAETLDLDSGRSPVRQIGYAPLTPAARAALAGAKPLPADPLAAATLSAPVSNSPVVRFGASDAAPLTRALRTGDIALGVHPADDDTSRDARTLTLFLPVASSPLAAAKPSGTREGGADGMLFAALSPRRLIERALDAERGIDLWMTAGGDARAIASVETTTDEASASPDLMRRTDVLNFGGTALTLAYSADGRPSATGAQRAAGTVLAAGLIASFAFAALVHALLRGRADAGASSRGILNEARMMGIIRSSMEAIITIDEKQTVVIFNPMAEQVFGVSAMEAIGAPLSRFIPERFRAAHAKHVDQFGVTGVSERQMGRQRVLFGLRANGEEFPIEASISQIRDASGKLYTVMLRDITERQRAENALKQSREELRELSANLQNVREEE

SEQ ID NO: 47914 - protein, 401 aa, Burkholderia cepacia
MHYTAMAAAHFAPDARCGAANGVDAPWLATTVALFTMATLVVTLLVCRFDARTTFLRGMTDTLERLVRVRTSELERALHSYEQTTQMLQRTRENMATEIDERKAAHALLEQEKDEQRRLLHALEETHEQLLQSEKLASIGQLAAGVAHEINNPIGFVSANLNTLKTWVRSLLDVVAAHEAALPQLDPATRDALTAAHRAADLDYVRDEIATLIDESIDGALRVRRIVQDLRDFSRPASDEWSVVDLHAGLESTLNVVHNELKYKADIVRDYGDVPHVECLPSQLNQVFMNLLVNAAQAIPERGVITIRTSSDGEQVSIAISDTGAGMTPDVVRRIFDPFFTTKPVGQGTGLGLSVSHGIVERHRGAIDVTSEPGRGTTFRIRLPVRRAGDRADAAALEQRV

SEQ ID NO: 47915 - protein, 684 aa, Burkholderia cepacia
MAHAAAARLTPPPPARFRRRRRPVGCGIIAEFAQGAAQEVVRTGAREAFIPVPPPFSRDISSAITMPTYRSKTSTAGRNMAGARSLWRATGMKDDDFSKPIIAVVNSFTQFVPGHVHLKDLGQLVAREIEAAGGVAKEFNTIAVDDGIAMGHDGMLYSLPSRDIIADSVEYMVNAHCADAMVCISNCDKITPGMLMAAMRLNIPVIFVSGGPMEAGKTRLANPVTKTVELKKLDLVDAMVIAADQSYSDADVAEVERSACPTCGSCSGMFTANSMNCLTEALGLSLPGNGTVVATHADREQLFKRAGRRIVELTRQHYEQDDERVLPRSVGFKAFENAMTLDIAMGGSTNTILHLLAIAQEAGIDFTMKDIDRLSRTVPQLCKVAPNTNKYHIEDVHRAGGIMAILGELERAGKLHTDVPTVHAPTLKDALDQWDIVLTQDDAVRTFYLAGPAGIPTQVAFSQNTRWPSLDLDRAEGCIRSYEHAFSKEGGLAVLTGNIALDGCVVKTAGVDESILVFEGSAHVTESQDEAVENILNDKVKAGDVVIVRYEGPKGGPGMQEMLYPTSYIKSKGLGKACALLTDGRFSGGTSGLSIGHCSPEAAAGGAIGLVRDGDRIRIDIPNRTIDVLVSDEELARRREEQNAKGWKPAQPRPRKVSAALKAYAKLVMSADKGAVRDLSLLDD

SEQ ID NO: 47916 - protein, 550 aa, Burkholderia cepacia
MAVFQDSYGVPMLSRRYLAMWCAVLLLIAAAALASIHVLSWLWIILPVALVALGLYDLNQDRHAILRNYPLWGHFRFLFEFIRPEIRQYFVEDDTDEKPFSRAQRSLVYQRAKNVADNRPYGTELNVKAVAHEWISHSLAPTKLPNHDFRIRVGASRAQPYDISIFNISAMSFGSLSANAIRSLNLGAKKGGFAHDTGEGSLSKYHREHGGDIIWEIASGYFGCRNDDGTFNPDKFAKQAADPQVKMIEVKLSQGAKPGHGGVLPAAKITPEIAETRGVPMGKDCISPATHSEFSTPRGLLEFVERLRTLSGGKPTGFKLCIGHPWEFFGIAKAMLETGIVPDFIVVDGAEGGTGAAPLEFTDHVGVPLQEGLLLVHNTLVGIGVRDRVKLGASGKIITAFDIARTLAIGADWVNSARGFMFAVGCIQAQHCHTDRCPTGVATQDPVRQRALVVPDKAERVYNFHRNTLHALQELVQAAGLAHPSELRAHHIVQRVAPHEVRLMSQLLKYLKPGALLDGQTCGFSLYDKWWPIARSDSFTLGEAVYASIE

SEQ ID NO: 47917 - protein, 373 aa, Burkholderia cepacia
MKLKSGLLAVMAVASTSASAQSSVTLYGIISNGLGYVSNQGGHSNWTMISGANQNNRLGFRLTEDLGGGLSAIGVLENGFDSNSGKLGQGGRMFGRQAFVGLSSPTYGKITFGRQYDVLWDYLDRIEPQAMGPGLGVSVGSNDNIEGNFRYSNAVKYTSPVWGGFGFESLYAFSNKAGSFQQNRAFSAGVNFDQHTQRYALVYVEIDHPGTGNPNGAVSDDYAGAPFQLFHTSPLSSSVGVRKQRVIAGGAEYESEKLSLGAIVSDVRYNYLDSTSLHLDNLSVVGVYKLTPALFASAAYLYTHGSYGGVVSNPHWNQGQVSVDYFLSKRTDVYAYVNYIRASGSNAPAVLFLSSKSSTNAQTAVVVGVRHKF

SEQ ID NO: 47918 - protein, 200 aa, Burkholderia cepacia
MPAALSEFSLIERFFTRRAAQGARASTLGIGDDCALIAPRSGKLLAISTDMLVEGRHFFPDVAPDALGHKTLAVNLSDLAAMGAEPRAFTLACALPRADAAWLEAFSNGLFALAERYGCELIGGDTTSGPLNLCVTVFGEVAPDAALRRDAARDGDDVWVSGTLGDARAGLGVARGEWTAGADEAAAFRDALERTSRAVR

SEQ ID NO: 47919 - protein, 280 aa, Burkholderia cepacia
MKLLRFGDKHHEKPGLLDAQGHIRDLSGVIDDIAGDALTPASLARLRDIPPSSLPLVEGTPRLGACVGRVGKFICIGLNYSDHAAESGMEVPKEPVVFGKWTSAISGPNDDVEIPRGSEKTDWEVELGVVIGQGGRYIDEADALSHVAGYCVVNDVSEREYQLERGGTWDKGKGNDTFGPLGPWLVTADEVPDPHALRLWLDVDGHRYQNGSTATMVFRVPHLISYLSRFMSLQPGDVISTGTPPGVGLGQKPPVYLRAGQVITLGIDGLGEQRQRTVQA

SEQ ID NO: 47920 - protein, 86 aa, Burkholderia cepacia
MKPGIHPDYREVVFQDMSNGFKFITRSTIQTRENIELDGKTYPLAKIEVSSESHSFYTGQQKIMDTAGRVEKFKNKFGVRANGKAK

SEQ ID NO: 47921 - protein, 266 aa, Burkholderia cepacia
MGQKIHPTGFRLAVSRNWASRWYANNNNFAAMLQEDIGVREYLKKKLKNASVGRVVIERPAKNARITIYSSRPGVVIGKKGEDIEQLKTELQRRMGVPVHVNIEEIRKPETDAQLIADSITQQLERRIMFRRAMKRAMQNAMRLGAQGIKIMSAGRLNGIEIARTEWYREGRVPLHTLRADIDYATSEAKTTYGIIGVKVWVYKGDTLGRNDAPVVEEVAEDKRPRRNARPGDRRPRRDGEGGAPGARRGAPRRGAGKPEDGKTGE

SEQ ID NO: 47922 - protein, 917 aa, Burkholderia cepacia
ADLAARIKAERDAFVRFLRNGAWRDDPAHRHERFALTPVQAAYVLGRHESFEFGGSACHLYVEYDEPQDLDCVRFEAAWNACVARHPMLRAIVEDNAWQRVLPDVPWQPLTVHDLREADANAFDAHLNRVRERLDHAVHALDRWPVLQPEVSLGQEAAVLHLSVDFTLIDYASLQLLLAEWRRRYDDPQWQPAPLDATFRDYVLHEAQAGTRADHARDKAWWLARLDELPARPDLPVVPARRTDGRPRFTHRHARLDRAQWAALSGQASRFGLSAASVALAAFAEVVGRWSQTPAFCLNLTVLNRPPVHPRIDAVLGDFTALSLLAVDATHGRDFVERARTIGARMFDDLDHRAFTGVDVMRELARRRGKDAALMPVVFTSGIGSVERLLGEHAGHAARAAPPRTMISQTPQVWLDCQVTDQFGGLEIGWDVRDDLFPDGMPAAMFDAYVALLGRLADDAAWWSREGDIVLPSAAPVADVHPDADTHIAAGFAAQALRTPDAPVVIDARGPRTYREVAQQAAALRTALEQAGVGVDDTVAVLMPKCAHQLAAVLAIVQAGAAYVPVDSRQPALRQQAILRNARVRAVVSVQALAFDHDGCVRIDIDAVPIDPQWPPRAACDIAPDALAYVIYTSGSTGEPKGVMLSHAAVCNTLADISARHAVGAGDVVLGLAELSFDLSVYDFFGATARGACIVLPDPARGNDPSHWAELMARHRVTLWNSVPAQGQMLIDYLEGEPALDVPGPRRVLWSGDWIPVTLPARWWRRWPDSALFSLGGATEASIWSIEHPIRPEDTQLASIPYGRALTGQTMEVLDALGRPCPPGVRGEIHIGGVGLATGYANDPVRTDERFIRHPDGRRLYRTGDLGRVRADGSLEFLGRQDDQVKIRGYRIELAEIDAALTAHPLVGAAATIVLGE

SEQ ID NO: 47923 - protein, 193 aa, Burkholderia cepacia
MKAVCVYCGSSSGVRPVYADAARAFGRALVDAGLTLVYGGGRVGLMGVIADEVMAAGGRAVGVIPELLVDKEVGHTGLSELHVVPDMHHRKKMMADLSDAFVAMPGGAGTLEELFEVYTWAQLGYHRKPVALYNIDAFYDPLIALLRHTVDEGFMRPAYFDALCVESEPVALIERLRRYQPPARDKWAPDAAK

SEQ ID NO: 47924 - protein, 648 aa, Burkholderia cepacia
MVSNDSHVPSLPLVSVVIPCYNQAQYLIESVSSALDAYSGPLEIIIVDDGSTAARTGAYLRAAEALSPVVQVISQPNAGLSGARNTGIAAAKGEFIQLLDADDLIIPPKLDLQVAHFRVGNALDVSISNFLLCDDSRTVFSKHDEAIAHSTLDLQDFLYKWERGFAVPIHCALFRRAALPENPFDTSARAKEDWLFWCGLSARGARMAYVNAHNAIYRQHAQSMRRSYVRMGKSWLHAAAKIDAMVSAREPAFFESAVDWFENFYRKHPAYVEEIAQLRDEVGVGASGVSGRQAESEEQHSQKLERLQVALAEMSAEAPLVSVVIPAYNHFDYIDGCLLSVIEQKGVAIEIVCVDDCSPDKRTTALLTALQARHPNVRIILNDENKGISNTQNEAVQHARGEYIAFVDCDDALVPGALARVVRVLAEMPECDYLFTDRFDIDENGDEVRRADYGGYPNIAFRDDMNIKNDLLDGMVASHLKVIRRSTYLKAGGSDDAFSGIQDWELALKIAEFGRFHYLHEPLYRHRVHTRSVTSSDSVGQFRKTNIVRRRFTTRWLAGGRDRSGPVLRFSSEAGQMPSIDELKEAWRQGRRCEMLIAADASVPVLNFMREFNSYFDRIEWVSAEAYASLLGYVPPGVLAAQAPERHG

SEQ ID NO: 47925 - protein, 138 aa, Burkholderia cepacia
MLQPKRRKYRKEQKGRNTGKATRGNAVSFGEFGLKAIGRGRLTARQIEAARRAMTRHIKRGGRIWIRIFPDKPISQKPAEVRMGNGKGNPEYYVAEIQPGKMLYEMDGVTEELAREAFRLAAAKLPLKTAFIVRQLGA

SEQ ID NO: 47926 - protein, 540 aa, Burkholderia cepacia
AKDVVFGDSARSKMVEGVNILANAVKVTLGPKGRNVVLERSFGGPTVTKDGVSVAKEIELKDKLQNMGAQMVKEVASKTSDNAGDGTTTATVLAQSIVREGMKYVASGMNPMDLKRGIDKAVAAAVEELKKISKPCTTNKEIAQVGSISANSDSSIGDRIAEAMDKVGKEGVITVEDGKSLADELDVVEGMQFDRGYLSPYFINNPDKQVAVLDNPFVLLHDKKVSNIRDLLPVLEQVAKAGRPLLIIAEDVEGEALATLVVNNIRGILKTVAVKAPGFGDRRKAMLEDIAILTGGQVIAEETGLTLEKATLAELGQAKRIEVGKENTTIIDGAGEAASIEARVKQVRAQIEEATSDYDREKLQERVAKLAAGVAVIKVGAATEVEMKEKKARVEDALHATRAAVEEGIVAGGGVALIRARTAIAGLTGANADQNAGIKIVLRAMEEPLRQIVTNGGEEASVVVAAVAAGKGNYGYNAATGEYVDMVEAGVVDPTKVTRTALQNAASVAGLLLTTDAAVAELPKEDAPMPGGMPGGMGGM

SEQ ID NO: 47927 - protein, 177 aa, Burkholderia cepacia
MKRDLNDKIPPPAATPRHRPFDEEEPHADADVHAHEPLGPDDRLAPLPPNPYKRHRGITRAWFALKHSLNGFRVAIREESAFRQELTLAALMLPIGAFAPVPAASRALLIGSVLLVLIVELLNSSVEAAIDRISLERHELSKRAKDLGSAAVTVALFACVTTWGFVLGPVVARWLGF

SEQ ID NO: 47928 - protein, 204 aa, Burkholderia cepacia
MMKLIGSLSSPYVRKARIVLAEKKIDYKLELENVWAPETDIHASNPLGKVPCLVMEDGAAVFDSRVICEYVDTLSPVGKLIPPSGRERVEVRCWEALGDGVLDAAVAIRLEHTLREEGQRSPSWIARQQRKIDDALVAMSQGLGGKTWCVGNHYTLADIALGCALGYLDFRMPELNWRDRHPNLDKHFVKLQQRPSFADTLPQN

SEQ ID NO: 47929 - protein, 206 aa, Burkholderia cepacia
MASGKFITFEGIDGAGKTTHLAWFCERLQGRLAAAGRQVVVTREPGGTQLGEKLREILLNQPMDLETEALLMFAARREHLALVIEPALARGDWVVSDRFTDATFAYQGGGRGLPRDKLETLERWVQGGFQPDLTVLFDVAPQVASERRGAARMPDKFESESDAFFSRTRAEYLRRAEEAPHRFAIVDATRSIPEIRQQLERVLAAL

SEQ ID NO: 47930 - protein, 1331 aa, Burkholderia cepacia
  MISC_FEATURE (101)..(101): X=any amino acid
  MISC_FEATURE (236)..(236): X=any amino acid
  MISC_FEATURE (254)..(254): X=any amino acid
  MISC_FEATURE (256)..(256): X=any amino acid
  MISC_FEATURE (268)..(268): X=any amino acid
  MISC_FEATURE (282)..(282): X=any amino acid
  MISC_FEATURE (295)..(295): X=any amino acid
  MISC_FEATURE (303)..(303): X=any amino acid
  MISC_FEATURE (310)..(310): X=any amino acid
  MISC_FEATURE (312)..(312): X=any amino acid
  MISC_FEATURE (324)..(324): X=any amino acid
  MISC_FEATURE (461)..(461): X=any amino acid
  MISC_FEATURE (468)..(468): X=any amino acid
  MISC_FEATURE (488)..(488): X=any amino acid
  MISC_FEATURE (498)..(498): X=any amino acid
  MISC_FEATURE (528)..(528): X=any amino acid
  MISC_FEATURE (577)..(577): X=any amino acid
  MISC_FEATURE (942)..(942): X=any amino acid
  MISC_FEATURE (944)..(944): X=any amino acid
  MISC_FEATURE (962)..(962): X=any amino acid
  MISC_FEATURE (972)..(972): X=any amino acid
APKRRAAEGAGREEEEAARPAGKKRGTDARGQGTATQTDGNSYTGGANLNAGGLVIGNNSALGIGTLNVNASASLDTSTNVTLGNTVNLASGSTLSIGGSXSNGLTGAINGSGGLVKNGAATTTLSGVNTYTGGTTINSGTLALNGAGSLSATGTVNLTGAGATFDVSAASGAQTIGSLAGAAGTNVNLGVNSLTLGGTGNATYAGTIGGSGSVTLSGTGVQSLTGTNVYTAAPTXTAATSSSAAIRRSAAARXTXTARRRSTRRPTXPWQTASISRRAPRXRSAAAPISASAAXFPVAAVSXRTARPRXRXTARTITPVARRXTQAASCSATAPALGTGALTVGGAATLDTNASLSVGNAIGLGTGATLTLGGSNALGLSGAISGTGALVKNGASTTTLTGANTYTGGTTINAGTLALGAGGSLSSTGTVNLSMRVPRSTSARAARSRSARCRAASARAXASAPTRXRWAGPRAARSAARSAAPAAXRWRVPARRRXTAQIPIPAARISIAAAWYSATTGRSAPARXTSAGRRRSIRMRACRSAMRSISARAPRSRSAAATTSRWAARFPARAASXRTAWPPTTLTGANTYTGGTTINAGTLALGAGGSLASTGAMNLAGVGATLDLGGATGGQTLGALSGVAGTNINLGNNALTLGGTASGTFGGAIGGTGSLTLAGTGTQTLNGASTYSGGTNLNSGGVVLGNNTALGTGTVNVGGAATLDTNASLTVANAVNLGTGAALTLGGSNALDLSGAISGAGSLVKNGAATTTLTGANTYTGGTTINAGTLAVGAGGSLASTGAMNLASAGATLDLSAATGAQTLGALSGVAGTNLNLGGNALTLGGTASGTFSGAIGGTGSLTLAGTGTQTLSGANTYTGGTTIGGGSTLALGAGGSLASTGTVNLAGAGATFDLRGASGAQTIGALTGAAGTNVTSAATGXRXAATAATRSAARSAAPAAXRSPAAVRRRXRARTRIPAARRSAAAARWRWVAGGSLASTGAVTLAGTGATLDLSGATGAQTIGTLAGAGGTSVNLGANALTLNATTNGTFGGAIGGTGGVTVAGTGTQTLTGANTYTGGTTINGGSTLALGAGGSLASGGAVTLAGAGATFDVSGATAAQTLGTLTGAAGTNVNLGANALTLNGSGNGTFGGAIGGTGGVTFAGTGTQTLTGANTYTGGTTINGGSTLALGAGGSLASGSTLNLAGTGATFDMSAASGAQTIGALSGVGGTNVNLGANTLTLNGSGNNTFGGTIGGTGGVTLAGTGTQTLTGANTYTGGTTIHGGSTLALGAGGSLASTGAVNLAGTGATFDVSAATGTQTIGALSGAA

SEQ ID NO: 47931 - protein, 261 aa, Burkholderia cepacia
MSDILDRIIAVKREEVATAMRSTPLEALKLDASARDLRDFVGALRAKHAAGNAAVIAEIKKASPSKGVLREHFVPADIARSYAAHGAACLSVLTDEQFFQGGVRYLEEARAACSLPVLRKDFIVDAYQIVEARAMGADAILLIAAALDTPLMQDLEAYAHSLGLAVLVEVHDRHEMEQALTLKTPLLGINNRNLRTFETSIQTTLDMLDMIPADRIVVTESGILSRTDVDTMRAANVNTFLVGEAFMRADQPGEELARMFF

SEQ ID NO: 47932 - protein, 63 aa, Burkholderia cepacia
  MISC_FEATURE (19)..(19): X=any amino acid
MLSAVISSEHSYPAMPLAXQPVHQRFVHSGPLVLGAAPFKYPTPTADRDQTVSRRFKPSSRTS

SEQ ID NO: 47933 - protein, 102 aa, Burkholderia cepacia
MNKIRKGDEVIVVTGKDKGKRGVVLAVGAEHVTVEGINLVKKHVKPNPMKGTTGGVEAKTMPLHISNVALVDANGKASRVGIKVEEGKKVRFLKTTGAVLSA

SEQ ID NO: 47934 - protein, 417 aa, Burkholderia cepacia
MVQRTQRTFSGRHASPRFTLAPFLHTGRTRNRAPGTPATSPHARRQPDGDSNVSTPAPITPLSMKAAVWHGRHDIRVEEVPVPERPPAGWVTIRVHWCGICGSDLHEYVAGPVFIPVDAPHPLTGLKGQCILGHEFSGEIAELGAGVSGFAVGDRVTADACQHCGTCWYCRHGLYNICENLAFTGLMNNGAFAEYVNVPAELLYKLPDHFPTEAGALIEPLAVGLHAVKKAGNIVGQTVVVVGAGTIGLCTIMCAKAAGAGRVIALEMSAARKQKALEVGASVVVDPKTSDAIAEVRALTGGYGADVSFECIGHTATAKLAIDVIRKAGKSVMVGIFEEPAPFNFFDIVSTEKEVIGSLAYNGEFADVIRFIADGRIDVQPLITGRIALGDIVAHGFEELVNHKDRNVKIIVRPAVS

SEQ ID NO: 47935 - protein, 260 aa, Burkholderia cepacia
MRIVQDSDAMHAYRPIVAYLANDGQRREVAGNTASTVPAYDIGENVDVLLDPDHPERPALIDDFTQRWFPAAVPALLAVASFAIGGLLIARERRHRQSDPAPRRVVHTPARRRWDVAIVLIPIAIGTGFLAGAGAAGLRQWQIVHHYARSTGHVVEIAKNGRSSRSRTSLYSAVVAFTTDSGRLITFAQGSASSHPGLHEGDAVNVLYDPVTPERALVDRFWDRWGLTAILFAIGAPFLAAGLFVAATLWPDHRPHGTAQ

SEQ ID NO: 47936 - protein, 238 aa, Burkholderia cepacia
MDLESILYTQGFGSRRQCRGLIEAGRVAVAGAAATDPDAAFDTDGLVFSVDDAAWPFHARAYLALNKPAGYECSRDPQHHASVFSLLPAPLVARGVQCVGRLDQDTTGLLLLSDDGQFVHAYTSPKRKVPKTYVATVRHPLDDTQLHALRTGVQLHGEPKPIAAVAADARAPHALALTVLEGKYHQVKRMVAAASNRVELLHRESIGGFTLPADLAPGAWRWLDEADLAALRNPVKTL

SEQ ID NO: 47937 - protein, 458 aa, Burkholderia cepacia
LIGREPLAATQRERLQTVEGASSVLLDLINDILDLSKIEAGQMTIEAIPFDLAETIRQTGAMFEPLATAKGLQFDVFVDDALPARYLGDPTRIRQIAANLVGNAIKFTNHGEITLEVYLRDDTDPASPIAIGVSDTGIGMTDAQRAALFRPFTQADTSITRRYGGTGLGLALTKQLTQMMHGTVDVKSEPGKGSTFVVTLPLRPATDAQVAEHDAAQADDTTLPAVTARVLVVDDHPVNRTLLQGQLVTLGYAADSAEEGASALRRCADTRYDLVMTDLNMPGMDGYTLARVLRSQYPEMPVVAVTAHASAAEHARCAEAGIVAVLVKPVLLDTIDRTVRRHAHAAAAQAPARRALVDLAEGPLPPDVHALLEASLTQSLAATHDALAHDDLPALRHELHSLRGAFATIHEHAVADAIGELQAVVHGGDLTSFDARLADAEALARDALQRRATQAPSA

SEQ ID NO: 47938 - protein, 343 aa, Burkholderia cepacia
MTITPQEALQRTIEHREIFHDEMLHLMRLIMRGDLSPVMAAAIITGLRVKKETIGEIAAAATVMREFANHVEVQDNSNFVDIVGTGGDGSHTFNISTASMFVTAAAGAKVAKHGNRGVSSKSGSADVLEALGVNIDLQSDQVAASIAETGMGFMFAPNHHPAMKNIAAVRRELGVRTIFNILGPLTNPAGAPNQLMGVFHADLVGIQVRVMQRLGAQHVLVVYGKDGMDEVSLGAATLVGELRDGKVHEYEIHPEDFGLQMVSNRTLKVENADESRTMLLGALDNQPGVAREIVTLNAGTALYAANVAESIADGIQLAREAIASGKARAKVDELVRFTQQFKR

SEQ ID NO: 47939 - protein, 334 aa, Burkholderia cepacia
NTTIGNGSTLAVGASGALSGGSVFDLAGAGATLDLSAATSPQTTGGLVGAAGSAVNLGGNTLTLGGSGNGTFGGTIGGAGGLTMAGTGTETLTGANTYGGGTTINSGTLAIGAGGSLAAGGAVNLGGAGATFDLSGAGLPQAIGALSGVAGSTVNLGGNGLTLGGAGSGTFGGTIAGAGGSLTLSGTGSETLTGINTYTGGTNLTGGGTLVAGNGAALGTGALNLAGAGGTLAASVAGTTLNNAVNLGTGSALTLGGTNDLGLGGIIAGGGSLAQTGSGTTTLTGANLYTGGTTLGAGGLSVGNNTALGTGTLNVTGSGGALSASTANLLLANA

SEQ ID NO: 47940 - protein, 363 aa, Burkholderia cepacia
MTLQKPSRAAAGAFRKLALAACAAGLLQGAAMPAHAANAVVLYTADGLENLYRDVLPAFEKKEGVKVNIVTAGSGEVVNRANIEKNSPKADVIVTLPPFIQQAGQMGLLQPYQSVNYKNVPAIAKAEDGTWATFVNNYFSFAINPDVVKNQPKTFADLLAPAYAGKVAYSNPATAGDGMAVLILTTSLMGEDKAFDYLAKLSQSVKFHTKGTGYLNVLLSRNEISVANGDLQMDLDDAEHGALSIKPIFLAAKDGDQPTTFQLPYGIGLIKSGPNQDAGRKLIDYLMSTEVQSKVPDMYGIPGRTDVPLAGKNGEAVKKAIAGVKLIPVDWTQVMAKKPVWIERWKKDVIGSSGKQLDVVKPK

SEQ ID NO: 47941 - protein, 145 aa, Burkholderia cepacia
KPYRIHEGSIVLPNGFEDRTTNLFVPADTAAQPNLSVARDWLKDGETLAPYIDRQIALLKSRLQGHRVLSRQAERLGPETDGMPGERIDAAYRNGPKTVFQRQGAFIVAPGRVLIFTASSAKSFGETLDALWRNWLDGYRPAEQE

SEQ ID NO: 47942 - protein, 307 aa, Burkholderia cepacia
MKIKILGSGAGGGLPQWNCNCANCRRVRSGSGHVLPRTQSSIAVSDDGIDWVLVNASPDILSQLRADPDLQPARAIRDSGIAAVVLCDAQIDHVTGLLMLRERSTPLPLYASAPVLDDLSTGLPLVPLLGHYCGVAAHTIAPGEPFAVPAASGIRFTAIAVDSKPPPYSPRRASAAPGDNIALSIEDVASGRRAFYAPGLASVTDEVRAAMDGADLVLVDGTFWTGTEMIDLGLSHKHAADMEHLAQCAEHGQPGMIDWLDTLPARTRKVLTHINNTNPILDPHSVEHAHLRAHGIDVAHDGMQFQV

SEQ ID NO: 47943 - protein, 553 aa, Burkholderia cepacia
MPCVRGRHEDGEPARHRHEPRDLVHVRARRDAGGRRRRADRADDRQAESVYRLRRGHQGVHRRGARRDRQHSGRDARRRAAGPRRNLRRGLHAGRVQGRGRVRPARADPALPPDRPARQVGHRKGLRETQMSQVISVRRPAADASFGQALKNAVAAAILTAILTIPVLGLQLKLDGYQVVLTPHWRPVWIAVAAVFLFQLFKPWLMRAKAVVKLPAAPTMGARQQRVIIWVLLAVGLVWPFFGSRGAVDVATLALIYVILGLGLNIVVGFAGLLDLGYVGFYAVGGYTYAMLNQYFGLSFWECLPIAAIAAATFGFLLGFPVLRLRGDYLAIVTLGFGEIIRLLANNLTSLTGGPDGISSIPKPTVFGFEMARSASVEGAKTFHELIGLEYSGEHMVIFLYLIALLLVGFTLFVTSRLIRMPMGRAWEALRDDEIACRSLGLNPTRIKLSAFTLGAAFAGIGGAFFAARQGLVNPESFTFIESALILAIVVLGGMGSQLGVILAAILLTVLPEVARGFAEYRMLIFGLVMVLMMMWRPQGLLPASRPHVELPQ

SEQ ID NO: 47944 - protein, 140 aa, Burkholderia cepacia
MVRRWAASYREHGEQGLRKKHSHYDARFKLSVLQRMRRDELSYAQVAALFGIRNERSIPIWERLYHEGGIDALAPRRRGRPPKMITSPPPKSPDDTVQKEPSREELLKEIVYLRAEVAYLKKLDALLQSKKQAAPRKKRK

SEQ ID NO: 47945 - protein, 270 aa, Burkholderia cepacia
MRIALGIQYDGAAFCGWQAQPHGKTVQDRLEHALAEFARVPLHTTVAGRTDTGVHGLGQVVHFDTELEREVFSWVRGTNAFLPPTVSVQWAKPMPDTFHARFSAFERTYYYALYVHPVRSPMLAGRAGWIHTPLDDDAMRAAAAYLIGEHDFSSFRSSECQSKTPVKHLYQIDVRRAGHFIHFRFRANAFLHHMVRNLMGCLVAVGRGRYPADWLADVLAGRDRNLAAPTFMADGLYLAHVGYPAEFAVPPAQLGSVPWSSVWADLDSQT

SEQ ID NO: 47946 - protein, 462 aa, Burkholderia cepacia
MAVSVFDLFKIGIGPSSSHTVGPMRAALMFVQGLERDGLLDATAHVKVELYGSLGATGKGHGTDRGVMLGLLGDAPDTVDPDTIDARLEDVRKTKQLALLGTHPVPFVLKDNIAFYRQALPEHPNGMKLRASDANGAVLVERTYLSVGGGFVVTAGAPNTKVLSAAEQMTHPFRTGAELLALTASTGKSIAQLMWENERAWHTEEETRDGLLKIWAVMQSCVSRGCGIGNPDADGNLPGPFQVKRRAPQLYRTLTGSPERALQDPLSMIDWINLYAIAVNEENAAGGRVVTAPTNGAAGIIPAVLHYYTRFTPGANEQGVIDFLLTAAAIGILYKLNASISGAEVGCQGEVGVACSMAAGALAAVLGGTPQQVENAAEIGMEHNLGLTCDPVGGMVQIPCIERNAMASVKAVNAARMALRGDGSHYVSLDSVIKTMRETGADMKTKYKETSRGGLAVNIVEC

SEQ ID NO: 47947 - protein, 476 aa, Burkholderia cepacia
MNQQAEPFLSTLDPQADAAQVHVSRAHESAHLHVSGRATYTDDIPIVAGTLHAALGLSAKPHAKIVSMNFDAVRATPGVVAVFTADDIPGVNDCGPIIHDDPVLAKGVVQFVGQPMFIVVATSHDIARLAARRAQVDYEELPAILTAQEARAAETYVIPPLKLARGDAAARLAVAPHRESGEMLLGGQEQFYLEGQILFAVPKDDDGMHVYCSTQHPSEMQHLVAHVLGVASHNVLVECRRMGGGFGGKESQSGLFACCAALAAWKLLCPVKLRPDRDDDMMITGKRHDFHYRFDVGYDDDGRIDGVALDMTSRCGFSADLSGPVMTRAVCHFDNAYWLGDVDIAGYCGRTNTQSNTAFRGFGGPQGAFAIEYILDDIARSLGRDPLDVRYANLYGKTERNVTPYGQTVEDNVLQELLGELETTSDYRARRAGVRAFNARNTVLKKGIALTPVKFGIAFNVTHFNQAGALVHIYTD

SEQ ID NO: 47948 - protein, 165 aa, Burkholderia cepacia
MPLNREDKQAVVAEVSAQVAKAQTVVLAEYRGIAVGDLTKLRAQAREQKVYLRVLKNTLARRAVEGTPFAPLAEQMTGPLIYGISEDAIAAAKVVNDFSKSNDKLVIKAGSFDGKVMDKAGVQALASIPSREELLSKLLFVMQAPVSGFARALAALAEKKQAEAA

SEQ ID NO: 47949 - protein, 266 aa, Burkholderia cepacia
MTVIAQLSDIHVRPHGVLYQDAVDSNVMFSAAVDSLNRIRPEPDLVVISGDLTDEGTEDEYRKLRELLVELRRPFVVLPGNHDDRGNLRAAFPDHAWLPDEGALSFALDVGELRVVALDTSVPGLHHGELDAETLAWLDTELAEHRNRTVVIVMHHPPFMTGIPYLDIYGLRNAEAFAAVLARHSNVDRILAGHVHRSMQTRLGRVPVLTCPSTTTQIALRVEADAQPASFLEPPAYMLHRWAGRGQPAVSHLCYVGHFEGPFPFA

SEQ ID NO: 47950 - protein, 154 aa, Burkholderia cepacia
MRRIAADLRPVMLDDLGLVPAIEWLANDFTNRYGIDVERHIETGGLTFTSAGATTLFRIVQEALTNVARHADATRVALRLDIEEGFCVLRVADNGRGAAPGGPAHEDKSFGLIGIRERAHMLGGTVTIDTALARGFSITVAFPLATVQQDTLIT

SEQ ID NO: 47951 - protein, 278 aa, Burkholderia cepacia
MDNRTAADLALPDYSEWLDGPALIALRGNDDPASAYRLGTRDYDWHAHARGQVLCVEAGLIHVHTPRGAWLLPPHRAGWVPPGMPHKVRVSGAPGGWVLLAAPPFCAGLPDEPCVIGISAVLRSLAHRAIEWNKHAPLAPEHARMAAVIHDEIRRTPREALHVPMPADPRLARVARALLDDPGSRRTLDAWAAFGAMSPRTLRRLMSAETGLSFAQWRQQARLARGLDLLARGCPVAEVSDLLGYASPSNFIAMFRKALGDSPAHYFATRPERQPDGR

SEQ ID NO: 47952 - protein, 561 aa, Burkholderia cepacia
  MISC_FEATURE (30)..(30): X=any amino acid
RRPRRRRQQSSPARTSRPRRQPSVRRRRPXSRQSAHPRPMQPRPPTQPNRPRADTPVRQPRPNAFEFHAPASFSVELPTLDLLEPASDDIETITEEHLAQTAQVIEQRLQEFKVPVTVVGASAGPVITRFEIEPALGVRGSQIVGMMKDLSRGLGLTSIRVVETIPGKTCMGLELPNAKRQMIRLSEILAAREYQHSPSQLTIAMGKDITGHPVVTDLAKAPHMLVAGTTGSGKSVAINAMILSLLYKATPEDVRLIMIDPKMLELSVYEGIPHLLAPVVTDMKLAANALNWCVGEMEKRYRLMSAVGVRNLAGFNQKIRDAEAKEKKIGNPFSLTPDDPEPLSKLPLIVVVIDELADLMMVAGKKIEELIARLAQKARAAGIHLILATQRPSVDVITGLIKANIPTRVAFQVSSKIDSRTILDQMGAESLLGMGDMLFLPPGTGYPQRVHGAFVADEEVHRIVEYLKQFGEPQYEEGILDGPAADGATQDLFGDAPDAEADPLYDEAVAFVVRTRRASISSVQRQLRIGYNRAARLVEQMEAAGLVSAMGINGSREVLVP

SEQ ID NO: 47953 - protein, 567 aa, Burkholderia cepacia
MAPARPVATRQPARPPNIFIRVPVDERIAPRFPFDGARMKHLLSRLFVSAALVALVPALPAQAATPPGIFVVATQLGEFTTLDPSGIYELVPSEYVANTYERLVRVDLKDPTRFDGQIAQSWTVGADGVTYTFKLRPGLTFHSGNPVTADDVAWSLQRTILLDKGPAGVLADLGLTKANVTQKVRVVDPQTVVLETDRKYAPSFVLNVLSACPASVFDKKLLLSHQQGSDFGSGWLRTNDAGSGPYQLVKWTPNETIVLQRFDKYRTPYPMKRVVLRHVPEASAQRLLLENGDADAARNLSPDSLAALSKAGKIKVASWPVSALLYLSLNTKNPNLAKPEVQQAMKWLVDYDGIQRNVVSTTYKVHQTFLPEGFLGASNARPYKQDVAKAKALLAKAGLPNGFDVTMDMPNDYPYLEIAQALQANFAQGGIRVKLIPGDAKQAIGKYRARQHDIFIGEWSPDYMDPNSNARGFAWNPDNSDQSPTKMLAWRNSWNIPQLTKDTEAALVEPSPAKRAQRYETLQKAVLANSPFIIMFEKVVQVATRPGATGPEIGPINDLVSYRTLAK

SEQ ID NO: 47954 - protein, 625 aa, Burkholderia cepacia
FGLDMMLPGWLQLVLASIVQFGFGARFYRAAWHAVKARTGNMDLLVALGTSAAYGLSLWMLLRDPAHPGHLYFEASAVIVTLVRFGKWLESRAKRQTTEAIRALNALRPDRARVVEHGVERDVPLSQVRVGTHVSIRPGERVPVDGRIVSGRSHIDESLITGESLPVPKDDGDAVTAGSINGEGALVVATTAIGAETTLARIIRLVESAQAEKAPIQRLVDRVSEVFVPAILGIAVLTLVGWLIAGAGMETAILNAVAVLVIACPCALGLATPAAIMAGTGVAARHGVLIKDAQALELAQRTTVIAFDKTGTLTEGKPSVTAFDAVGVPRDEALALAAAVQRQSDHPLARAVVAAHDADVAAQGGVAAPVVATDARAVAGRGVEAHVGGQQLALGSTRWRDELGIAVPPALDARAAELERAGNTISWLMRVDAPRAVLALIAFGDTVKPGARDAIAALSARGVASALVTGDNRGSAAAVAAALGIGEVHAQVLPDDKARVVAELKRTHGGVVAMVGDGINDAPALAAADVGIAMATGTDVAMHTAGITLMRGDPALVADAIDISKRTYRKIQQNLFWAFVYNLVGVPLAALGLLNPVIAGAAMAFSSVSVVTNALLLRRWKGRAR

SEQ ID NO: 47955 - protein, 706 aa, Burkholderia cepacia
MSFAPNGGIPSGLGGGALGSLSALGGLAGPVASSVAGSLGPLAGLAGHVDTVQRAMQLAQTGFSLMDKTPGAIAEAINGAANPARLTQLNRYVTLDTPLGPDVLLVSAAVVDEHVNRLPEIHLDLLSHRHDLRPEDLIGQQVKIRFDQQARLSTLERVVASGAVEGDRYFDGYVASFDRAGNPGNVTQYHLTAVPWFWFLTRSTDCRIFQNKTAQDILTEIFQEHGFSDFTFDIRTSQKPLEYVVMYQESYYNFCARLMEQEGLVWTHRYEKDKHFLVIGDTNLLFRPIDGLATVPFAATEASEDSGIDQLHEGRRFGVGKVTFRDFNHQNPSSPLMLVEAGPQNLKHARLDATERFEHQSLYDHGDDGNRYARFAMEAEEAQAHRYTGGGYAWRMTTAGAVTVANHPVLENNQEYVILHVRHEAVNDYTQHSAKLPYRNSFSLLPKKIPYRAPRATPKPVIHGTQSAIVVGPKGEEIYTNGSAVKVHFPWDRRGKKDGSDSMWVRVSQPWAGDGWGAAAIPRIKQEVLVAFNQGDPDNPVIVGRVFNGEQGNPYHGAAGQTMGIKSQTHKGQGSNELLMSDVNGAQMLYMHAQKDMHTVVEDAQWTQVLKGDRTVEVGKGNHTTAVAVGNLSDVVVQGNTLHQTPQGVHTLEAKELWIKIGGDGGTRIHMTADSIDIYKGDSVIHLDDSNINIQAARTDINPKNG

SEQ ID NO: 47956 - protein, 67 aa, Burkholderia cepacia
MTSREISVFGVYFPAVMLTFIAGALISLVANRLLSRTRFCEHVWHPSLFRASLMLCICCALGLTIYS

SEQ ID NO: 47957 - protein, 373 aa, Burkholderia cepacia
MNVGLVGWRGMVGSVLMQRMQEEGDFDLIEPVFFSTSNTGGKAPSFAKNETTLKDATNVDELKKCDVIITCQGGDYTNDVFPKLRAAGWNGYWIDAASSLRMKDDAVIILDPVNLDVIKDALVKGTKNFIGGNCTVSLMLMALGGLFRENLVDWMTAMTYQAASGAGAQNMRELLSQMGALHGSVQEQLADPASAILDIDRRVLATMNSDAMPTSQFGVPLAGSLIPWIDKDLGNGMSKEEWKGGAETNKILGKPAMGEPGAIPVDGLCVRIGAMRCHSQALTIKLKKDVPLDEINGILASANDWVKVVPNEREASMRDLSPAKITGTLTVPVGRLRKLAMGGEYLSAFTVGDQLLWGAAEPLRRMLRILLDK

SEQ ID NO: 47958 - protein, 239 aa, Burkholderia cepacia
MRDTTRETNMNRTFPIRIVIADDHPAVVIGARYELSATNTVAVVATAHNSTELMDALSHHPCDVLVSDYAMPGTEYGDGLAMFTILLKRFPGLKIVVMTMMENAVALRALMDIGIACIVSKSDMPNHLTMAIHAAYTNGRYLSPSMDRILRNTGSVGGKAPALSVREVEVIRLFASGLSVNEIAEKLNRSKKTISTQKSSAMQKLGIERDVDLVRYAIACGLVTDYGYAPPVRSDEANA

SEQ ID NO: 47959 - protein, 462 aa, Burkholderia cepacia
MSDTRPDTLFALTALSPIDGRYASKTEALRDWLSEAAFMRHRVTVEVHWLIALSRAGFAEVPRFSDASEQFLLQLAERFTAHDAARIKEIERVTNHDVKAVEYWLKESVKGQAELEKASEFIHFACTSEDINNTSHGMMLAGAREHVILPALRTVYQRLVALAHAHAEQPMLSRTHGQPASPTTLGKELANVAARLARAITRIEKVEILGKMNGAVGNFNAHLSAYPEFDWEAFSRDVIENRLKLTFNPYTIQIEPHDYMAELFDAVARANTILLDLDRDVWGYISVGYFKQKTKAGEIGSSTMPHKVNPIDFENSEGNLGLANATLRHLADKLPVSRWQRDLTDSTVLRNMGVALGYSLLAYDSLIRGLDKLEVNPQRLNEDLDNCWEVLAEPVQTVMRRYGIENPYEQLKELTRGKGITREALQEFVGTLAIPQDAKERLLAMTPASYIGKAVELAKRIA

SEQ ID NO: 47960 - protein, 469 aa, Burkholderia cepacia
ATATHNWRRRQILCAGASTLVLGLVAPRLAHASSVLGVRVWPARDYTRVTIESDQPLQNSQQLLQGPDRLVVDLSGLDLDQALRDLVSKIAPNDPQIQSVRVGQYQPHVVRMVFDLKGSVKPQVFTLPPVGTYKYRLVFDLYPAVAPDPLSDLIAQTERKEQALNDTARAQQMQPPSTLAGPGTPPPGAGDNSDAFFQRFAQNTPTTPHTPPAAGTPSTPAKPAVKPPPVIARRDDGDDDGDTYKFTAPKSGKGGTVRLLTVAIDPGHGGEDPGAIGGNGTYEKHIALDIAKKLRAKIDAAPNMRAMMTRDADFFVPLNVRVQKARRVGADLFVSIHADAFTTPSARGSSVFALSDHGATSAAARWMANKENSSDLIGGINIKTADAAVNRALFDMSTTAQIRDSLRYGNYVLKEVGGINKLHKGSVEQAGFAVLKAPDIPSILVETAFISNPDEERRLNDDSYRDEMA

SEQ ID NO: 47961 - protein, 240 aa, Burkholderia cepacia
MPVRPAIVHIMKNVPHTVTDAAIATIRDRIEAGVYPVGSLLPAQRQLSEELEISRASLREALSTLEALGMLRIRAGKGVYVESAQASAAHPWQFAEQSSPPDTYQMRYALEGFAARMAAHVVSDADIAWFEDNLADLHVALTESALDEASRLDFDFHMRIIHLAGNAAIESILRSSADIMKESQRMPFYRRELLLSTWHEHRAIVDALIARDAAAAGTAIETHIANAAQRAGIFFPTPGA

SEQ ID NO: 47962 - protein, 90 aa, Burkholderia cepacia
MNKSDLINHVAAETGMTKTDSGFALEAVLEGITKSLRKGDTVTLTGFGVFSVGARAARTGRNPATGEEIKIPASKAPKFKAGKGLKDAVK

SEQ ID NO: 47963 - protein, 582 aa, Burkholderia cepacia
MSLIEVKVPDIGDFSGVDVIEVNVKPGDVIEKEQTLITLESDKASMEVPSDVAGTVKEVKVKAGEKVSQGTVIAIVEASAGAAAPAPAKAPEAPKAAAAAPAPAAAPAPAPQAGSYSGAADIECDMLVLGAGPGGYSAAFRAADLGMKTVLVERYSTLGGVCLNVGCIPSKALLHTSLVVEEAAALASHGITFGKPQVDLDKLRDFKGGVVKKLTTGLAGMAKARKVEVVTGVGAFVDPFHMEVQGENGKKVVKFKQAIIAAGSQAVKLPFMPEDPRVVDSTGALELRQLPKRMLVIGGGIIGLEMATVYSTLGAEIDVVEMMDGLMMGADRDLVKVWEKYNAKRFGNVMLKTKTVGAEAKEDGIYVKFEGEKAPAEAQRYDLVLVAVGRSPNGKKIGADKAGVAVTDRGFIEVDKQMRTNVPHIFAIGDIVGQPMLAHKAVHEGHVAAEAAHGEKAYFDALQIPSVAYTDPEVAWAGKTEDQCKAEGIKYGKAVFPWAASGRAIANGRDEGFTKLIFDEETHRVIGGAIVGLNAGDLISEVCLAVEMGADAEDIGKTIHPHPTLGESVGMAAELYEGVCTD

SEQ ID NO: 47964 - protein, 244 aa, Burkholderia cepacia
MTVYFIGAGPGDPELITVKGQRLVRTCPVILYAGSLVPAAVLDGHRAEQVVNTAELDLDAIVALLAAAHANGQDVARVHSGDPSLYGAIGEQIRRLKALGIPYEIVPGVTATAACAATLGVELTLPGVAQTVILTRSAGKTTLPEGEALGGLAAHRATLAIHLGVRHLARIVDEVLPHYGADCPVAVIYRASWPDEERVTGTLADIVGKVQGTQIERTALILIGRVLDAEGFADSTLYRAQAEH

SEQ ID NO: 47965 - protein, 264 aa, Burkholderia cepacia
MNQVTESAVQFDVITLFPEMFRALTDWGITSRAVKQGRFGLRTWNPRDFTTDNYRTVDDRPYGGGPGMVMLARPLEAAIDAAKAAQAEQGIASTRVVMMSPQGAPLTHDRAVRMAQEPGVVVLCGRYEAIDQRLLDRCVDEEISLGDFVLSGGELPAMAMMDAVVRLLPGVLNDSLSAVQDSFADGLLDCPHYTRPEEYDGVRVPDVLLGGHHAEIEKWRRQEALRNTLRKRPDLIVRARREKLLSRADEAWLANLAREAKDAS

SEQ ID NO: 47966 - protein, 249 aa, Burkholderia cepacia
MPATAPAIRLPTERGHPMSAYVIDAAERPSVEVDQSSARFPVRRVFCVGRNYADHAREMGADPDREPPFFFTKPADAIVPASGTVAYPPLTNDLHHEIELVVAIGKDGRSIDPADALSHVWGYGVGVDLTRRDLQAEAKKLSRPWDWAKGFDASGPVTALRAATATGHPAAGRIWLAVNGDTRQQGDLADMIWPVPDVIAYVSRSVELKAGDLIFTGTPAGVGALQPGDRVTGGVDGIATFEFVVGAKP

SEQ ID NO: 47967 - protein, 317 aa, Burkholderia cepacia
YASNAKVDAFIDEMVSRNGFDSASLHALFSRVSYSATAVKLVRPAPSPTVKNWRVYRSRFIEPIRINAGVKFWKANQATLQRASEQFGVPPEVIVGIIGVETIYGRYMGNFRVLDALTTLTFDYPDTPNRDSRQATFRKNLEDFLVWTRDNQLDPTTVLGSYTGAIGIPQFLPSSIREYAVDFDGTGHVDLRSSPVDAIGSVANYLKQHGWETDRPVVWQITPDTGSLGIAQAAADGQPEPHWALSQLAARGHDAERADGQHHDRSRHAGDRGRPADAGARDEYMLGLKNFYVLTRYNRSFFYALTVYQLGEAVKAQ

SEQ ID NO: 47968 - protein, 258 aa, Burkholderia cepacia
MNALPNRQPAGTTSSLVVRNLKKRYGSRTVVKDVSLDVKSGEVVGLLGPNGAGKTTSFYMIVGLVPTDAGEITLNGSSISLLPIHKRASLGLSYLPQEASVFRKLTVEENIRAVLELQHDEDGKRLSKDAISSRTEALLDELQIGHLRENPALSLSGGERRRVEIARALATNPSFILLDEPFAGVDPIAVLEIQKIVKFLKQRNIGVLITDHNVRETLGICDHAYIISDGSVLAAGAPSEIIENESVRRVYLGEHFRM

SEQ ID NO: 47969 - protein, 239 aa, Burkholderia cepacia
MGSYLIRVVLADDHPAMLVGVEHGLSSVPTIQLTGKAVNSTELIRLVEAGVCDVVVSDYAMPGSAHGDGITLFSYLQRNHPAVKLVVLTMLDNPAVIGALTRLGIECIVSKSDTIDHLIPAIHAAATGGSYFSPSVEKVVRTLTSHSSARAADQKRELSDRELEVVRLYASGLTVNEIADQLSRSKKTISTQKARAMEKLGIEKDIDLLRYAIEHGIVAASASEGRGGDANEEGRVDPA

SEQ ID NO: 47970 - protein, 480 aa, Burkholderia cepacia
MTYRNESAWIQPAAPTATAAAPRATQARSTAEYRALDAAHHIHPFSDMGALNRAGSRVIVKADGVYLWDSDGNKVIDGMAGLWCVNVGYGRKELADAAYRQIQELPFYNTFFKTTHPPVIELSAMLAEVTPAGFNHFFYCNSGSEGNDTVLRLVHQYWRVQGKPQKKYVISRKNGYHGSTIAGGTLGGMGYMHEQMPSKVEHIVHIDQPYFFGEAQAGETLEAFGLARAQQLEAKILELGAENVAAFIGEPFQGAGGVIFPPSTYWPEIQRICRKYDILLVADEVIGGFGRTGEWFAHQHFGFEPDLITMAKGLTSGYVPMGAVGIHERVARPIIDNGEFNHGLTYSGHPVAAAVAIANLKLLRDEGIVERVKTDTGPYFQALMRETFARHPIVGEVHGHGMVASLQLAEAPAARLRFANGGDVGTICRDFCFNGNLIMRATGDRMLLSPPLVISRQEIDELVSKAKKAVDATAQQLGIS

SEQ ID NO: 47971 - protein, 298 aa, Burkholderia cepacia
MLDGLASAMEDTALPDVWVLELSSFQLETARTFAPDAAAILNITQDHLDWHGSFDAYAQAKGRIFGATTTRVLNRDDAAVMKFAPVAGAADAPRTVTFGLNEPTQDGDYGLSRDNGIAWLVEAVDRDAPDEATTTRRRKRDAAHTPDIAQKRLMPADALRIRGLHNAANALAAFALARAIDLPAAPLLHALREYRGEAHRVEVIATIDDVDYVDDSKGTNVGATVAALDGLAQKIVLIAGGDGKGQDFAPLVAPVARWCRAVMLIGRDAPAIRDTLAETGVPLVDHATLEGAVHAAAD

SEQ ID NO: 47972 - protein, 77 aa, Burkholderia cepacia
MKKTLASIIAAAFALASVSAFAQASAPAADTSAAAPAPAKKDHSKPKHQLKHHGSKKGQAKAAAASAAGTNDAGTQN

SEQ ID NO: 47973 - protein, 526 aa, Burkholderia cepacia
QYVFTMNRVGKIVPPKRQILKDISLSFFPGAKIGVLGLNGSGKSTLIRIMAGVDKDIEGEPRPMPNLNIGYLPQEPHLYPTKTVREAVEEGLGDLFQANKKLEEIYAAYAEPDADFDALAAEQAKYEAILASSDGGSPEQQLEVAADALRLPPWDAKIEHLSGGEKRRVALCKLLLEKPDMLLLDEPTNHLDAESVDWLEQFLVRFPGTVVAVTHDRYFLDNAAEWILELDRGHGIPWKGNYSSWLDQKEERLKQEEASESARQKAIKKELEWVRQNPKGRQAKSKARIARFEELSSQEYQKRNETQEIFIPAGERLGNEVIEFKNVSKSFGDRLLIDNLSFKIPAGAIVGIIGPKGAGKSTLFKMLTGKEQPDSGEVVMGPTVKLAYVDQSRDALDGSKTVFEEISGGADVLTVGKYETPSRAYIGRFNFKGGDQQKIVGNLSGGERGRLHLAKTLISGGNVLLLDEPSNDLDVETLRALEDALLEFAGSVMVISHDRWFLDRIATHILAFEGDSQVTFFDGNYQ

SEQ ID NO: 47974 - protein, 364 aa, Burkholderia cepacia
MQRALALAARGMYTTAPNPRVGCVIVKDGDVIGEGFTQPAGQDHAEVQALKDARSRGYDVAGSTVYVTLEPCSHFGRTPPCANALIDARVAKVVAAMEDPNPQVSGRGLGMLRDAGIDVRCGLLAHEAGELNIGFVSRMTRGRPWVRMKTAASLDGRTALPSGESQWITGEAARLDGHAWRARACAILTGIGTVREDNPLLTVRGIDTPRQPQRILVDSRLDLPLDARLLEGAPLLIFCGRLDAAGEVRANVLKSRGAEIVPLANAHGKVDLPAMLAALGARGVNELHVEAGHKLNGSLLRERCVDELLVYLAPSLLGADAAGMFDLAAPASLDARTRLSFHGIERIGDDLRILARIAPPDASH

SEQ ID NO: 47975 - protein, 571 aa, Burkholderia cepacia
MPHDVSLIALLAAGFGLAMIFGYLASLLKMPPLVGYLLAGIVIGPGTPGFVGDLSLAQQLAEVGVMLLMFGVGLHFSLGDLLAVRKIALPGAIVQITVATLLGGGLALTWGWSLGAALVFGLALSVASTVVLLRALEGRGLVETVNGRIAVGWLVVEDLVMVLVLVLLPPVAGLLGGTPPGDAHAAGGSVWSTLGVTMLKVAAFIALMLVVGKRVFPRILWLVARTGSRELFTLCMIAAAVGIAFGAAKLFDVSFALGAFFAGMMMRESEFSRRAADETLPLRDAFSVLFFISVGMLFDPKVLLDEPLHVIEVAAIVLIGKTVAAVALVIAFRYPLNTALTVGAGLAQIGEFSFILAGLGRALGLLSAEGQSLILAVALISIAMNTLLFAMIDPALAWIRKHSAFARKLEARDDPLAALPMSTPQTHLTGQVVIVGYGKVGTRIAHALDERGIAYVVVEQNRELVEKLRADGIAAVSGDAIEPIVLVQAHIARAGMLVVTLPDVFDVRQIVEISRTLNPTLEVVLCTNSSDEAALLSNEGIGTVFMGETELARGMTEHVLGRMAKPVAAAH

SEQ ID NO: 47976 - protein, 280 aa, Burkholderia cepacia
MGQILFIVWRESVEALLVVGILYAWLKNGDDDARRGLPFLWAGVAVGLLMAVGLGAALVGFTEVLSGDAQDYFQTAMVLIACVLIVQMVLWMRRHGRTLKRDMEQSLQQSTRDSNWWGVAVLVALAIAREGSETVIFLYGLGFGQSGHVDGSQMLAVVIGLGLAFLTFYLLQLGGKYFSWRHFFRVTEVMLLFLGAGLFQTGVDKLIDKEILPLGISQVWDTSAILDDSGTFGSLVATLTGYRAHPALTNLVAYAVYWAVVWLLMKRASRRPAVAAGRAA

SEQ ID NO: 47977 - protein, 68 aa, Burkholderia cepacia
MFSDLGSDLRSAGRYLGQALRLMVGLPDYDTYVAHMRETHPDREPMTYEEFFRERQNARYGSGAGKCC

SEQ ID NO: 47978 - protein, 381 aa, Burkholderia cepacia
MRVNDCHNFHDFRELARRRLPGPIFNYIDGAADDEATYRRNTRAFERCDLVPNVLRGVRDVDLSVTVMGQKLGMPVYCSPTALQRLFHHDGERAVAAAAAKFDTMFGVSSLGTVSLEEARAISQGPQVYQFYFHKDRGLNREMMNRSRDAGVNVMMLTVDSITGGNRERDKRTGFSIPFRLTLAGLTEFALKPAWAINYLTHERFRLPQLDRHVDMGGGAMSISRYFTDMLDPSMSWDDVAAMVREWNGQFCLKGVMSVDDARRAVDIGCTGIVLSNHGGRQLDGSRAAFDQLAEIVDAVGDRIDVMMDGGVQRGSHVLKALALGAKAVGLGRYYLFPLAAAGQPGVERALQLMRAEIERDMRLMGCASVAQLGRDQLRFR

SEQ ID NO: 47979 - protein, 161 aa, Burkholderia cepacia
MISAEGLKEIDRALTKYPADQKQSAVMSALAVAQEEHGWLSPELMQFVADYLGMPAVAVQEVATFYTMYELKPVGKHKITLCTNLPCQLGPHGGAEATADYLKQKLGIGFGETTPDGKFTLKEGECMGSCGDAPVLLVNNHRMCSFMSREKIDQLLEELSK

SEQ ID NO: 47980 - protein, 349 aa, Burkholderia cepacia
MRQLLDHAAEHGYGLPAFNVNNLEQVQAIMAAADQVGAPVIMQASAGARKYAGEPFLRHLIEAAVESYPHIPVVMHQDHGQSPAVCTAAIRSGFTSVMMDGSLEADGKTVASYEYNVDVSRKVVEMAHSIGVTVEAELGVLGSLETMKGDKEDGHGAEGTMTREQLLTDPEQAADFVKLTQCDALAIAIGTSHGAYKFSKKPTGDILSIQRIKEIHARIPNTHLVMHGSSSVPQELLAEIREFGGDMKETYGVPVEEIQEGIKHGVRKINIDTDLRLAITGAIRRYLFENPGKFDPRDYLKPAREAAKKVCVDRYLAFGCEGQAGKIKPVSLDKIAEQYKSGALAQVVR

SEQ ID NO: 47981 - protein, 527 aa, Burkholderia cepacia
MSGERVGGAVPLSPGRARGGGARWSGDGDCRTECVPYERRWQETSSGLRNFAIAGRQARGHDPANRIRPRASPRRALRCNKNPHGDAMSYFEHIPAIRYEGPQSDNPLAYHHYDPDKRVLGKTLAEHLRIAVCYWHTFVWPGHDIFGQAAFRRPWQQPGDALERARMKADAAFEFFTKLGTPFYTFHDTDVAPEGDSLREYAANFARMVDYLGERQQASGVRLLWGTANLFSHPRFAAGAATNPNPDVFAWAATQVCHALDATHRLGGENYVLWGGREGYETLLNTDLKRERDQFARFLSMVVEHKHRIGFKGALLIEPKPQEPTKHQYDYDVATVHGFLVQYGLQNEIRVNIEANHATLAGHSFHHEIANAFALGVFGSVDANRGDPQNGWDTDQFPNSVEELTLAFYEILRHGGFTTGGMNFDAKVRRQSIDPEDLFYGHVGAIDVLALALERAAVLVENDRLDALRRQRYAQWDDAFGRKILAGGYTLESLAADALARGVDPQHASGAQERLENIVNQAIYGLR

SEQ ID NO: 47982 - protein, 124 aa, Burkholderia cepacia
MRHYEIVFIVHPDQSEQVPAMIERYKSTITSHGGQIHRVEDWGRRQLAYMIEKLAKAHYVCMNIECDQTTLDELEHAFKFNDAVLRHLIVKMKKAETGPSPMMKEVQREEAKKAAAAQPAEAQA

SEQ ID NO: 47983 - protein, 437 aa, Burkholderia cepacia
MGDAPITPDFVLRLGYAAGKVLAGSADVAAGSRPTVLIGKDTRVSGYMLEAALEAGFSAAGVDVMLAGPMPTPGVAYLTRALRLSAGVVISASHNPYHDNGIKFFSADGNKLPDDTEAAIEAWLEKPLECAASDGLGKARRLDDAAGRYIEFCKSTFPAAFNLRGLKLVIDCAHGAAYQIAPHVFHELGADVIPIGVAPNGFNINDGVGATAPDALVRAVRANHADLGIALDGDADRLQVVDAAGRLYNGDELLYVLVKDRIVTDGKVEGAVGTLMTNLAVEVALQREGVKFVRAAVGDRYVLEQLREHGWQLGAEGSGHILSLDRHSTGDGIVSALLVLAALKRSGRTLAQMLDGVTLFPQKLINVRMKPGADWKGSASIRAAIDAAEAALAGSGRVLIRASGTEPVLRVMVEAQQAADAVRHAETIADAVRAATT

SEQ ID NO: 47984 - protein, 138 aa, Burkholderia cepacia
MLFFFFSCPAVPCLGVCSFLVCVCFALVSSVGGCSSLFSLLCFLVPVRLVSFIIFVVVCLLSFIFGVGGMVFFFFFFVSFSVCFFFCVFFVSFFFFFFFVFRLVGFFFFFVFSVLCSSDGGGGGGSCFSFGCLVLFYL

SEQ ID NO: 47985 - protein, 445 aa, Burkholderia cepacia
MCRAAGANRRRPPTRRATATAIAPVGPTRAVAPCRRHNDELISMQELNMTDVVIVSAARTAVGKFGGSLAKVAAPELGATVIRAVLERAGVKPEQVSEVIMGQVLTAGSGQNPARQSLIKAGLPNAVPGMTINKVCGSGLKAVMLAANAIVAGDAEIVIAGGQENMSASPHVLPGSRDGFRMGDAKLVDTMIVDGLWDVYNQYHMGITAENVAKEYGITREEQDAFAALSQNKAEAAQKAGRFDDEIVPVSIPQRKGEPLQFATDEFVRHGVTAESLAGLKPAFAKDGSVTAANASGLNDGAAAVLVMSAQKAAALGLTPLARIKAYANAGVDPSVMGMGPVPASRRALERAGWTPGDLDLMEINEAFAAQALAVHKQMGWDTSKVNVNGGAIAIGHPIGASGCRILVTLLHEMVKRDAKRGLASLCIGGGMGVALAVERVGAAA

SEQ ID NO: 47986 - protein, 217 aa, Burkholderia cepacia
MTAPLTLALSKGRIFEETLPLLAAAGVQVAEDPETSRKLILPTTDPNLRVIIVRASDVPTYVEYGAADFGVAGKDVLVEHGGSGLYQPIDLNIARCRMSVAVPAGFDYANAVRQGARLRVATKYVETAREHFAAKGVHVDLIKLYGSMELAPLVGLADAIVDLVSSGGTLKANNLVEVEEIMAISSRLVVNQAALKLKRAALKPILDAFERASQNGG

SEQ ID NO: 47987 - protein, 440 aa, Burkholderia cepacia
LPPVRPMSPRRPGTAWALPALCIAVLIAQIDTAIVNLATEPIGTAFGTRVGALQWVIDAYNLAYAVLLLTGGLIGDLYGRRRAFVLGATVLSGASVVCALAPTLGVLIAGRALAGAGAALLILWSFAIVRVLWRHRAERARALGIWAACGGIAMIVGPTLGGVLIHALGWRSIFGVVIPFGIAAIALTSAVVPESADPRGRRFDPAAQVLGAIAIGCVVFATIDARHDPQRAALLIGTGAAAIALFVRIERRLGTAALVPLDLFANRAFRGMLVGNGAMTFGGYGMLFVLPLAWQSHHVLDASGASLALLPMSVPFALVSFGSGAVAARVGARTAGAGGVALMGLGLAAIGIGAAGSTNPHAPMLAWAEAGLALTVLALGLAVGSLAATAVGAVDAARAGTAASVDERTRMIGAVFGVALLGALYDACGGGASGLRVSDA

SEQ ID NO: 47988 - protein, 332 aa, Burkholderia cepacia
MAGNGRAAGLCSDSMRAAHVGCRPAFVRWFHNKEFGDMKSVTRRTVLSSLAGAAALAILALGTPIAHASKDKPEIGFCIDDLRVERWSRDRDYFVAAATKLGAKVSVQSADASEARQISQIENLISRGVDVIVIVPFNSKTLGNVVAEARKAGIKVVSYDRLILDADVDAYISFDNEKVGELQAQGVFDAKPKGNYFLLGGAPTDNNAKMLREGQLKVLKPAIDRGDIKVVGQQWVPEWSASTALRIVEDALTANNNKIDAIVASNDGTAGGAIQALAAQHLAGKVPVSGQDADLAAVKRVIAGTQTMTVYKPLKLIASEAPEAWGGCREWC

SEQ ID NO: 47989 - protein, 437 aa, Burkholderia cepacia
MGIHVIKMPDIGEGIAEVELVAWHVEVGQTIKEDQPLADVMTDKAAVEIPSPVTGKVIELGGRIGEMMAVGSELIRLEVEGDGNLKAGAPVRETKVETAPVAVAAPSKPVTDASVESSAQPAAPRAPAKPRREEPVAQPRAALAPGERPLASPAVRQRAWDMGIELRYVRGTGEAGRILHADLDAYARTGGGSAHGAQPRGYDERHDETEVPVIGLRRAIARKMQEAKRRIPHFSYVEEIDVTELESLRTELNRRHGDTRGKLTPLPLLIRAMVIALRDFPQINARFDDEAGIVTRYGAVHMGVATQTDGGLTVPVLRHAEARDVWSISAEIARLADAVRANRAQRDELSGSTITISSLGALGGIVSTPVINHPEVGIVGVNRIVERPMIRDGAIVARKMMNLSSSFDHRVVDGADAAEFIQAVRAALERPALLFVE

SEQ ID NO: 47990 - protein, 213 aa, Burkholderia cepacia
MQILLAALVAYLIGSVSFAVVVSSVMGLADPRSYGSKNPGATNVLRSGNKKAAILTLVGDAFKGWIAVWLARHFGLPDVAVAWVAIAVFLGHLYPVFFRFQGGKGVATAAGVLLAVHPVLGLATALTWLIVAFFFRYSSLAALVAAVFAPVFDVFLFGTPGHNPVAWAVLAMSVLLVWRHRGNISKLLAGQESRIGDKKKAAADGGAQDGGKA

SEQ ID NO: 47991 - protein, 276 aa, Burkholderia cepacia
MNADLHCHSNVSDGLLSPADVARRAHAGGVTLWALTDHDEIGGQAAARSEAEALGMRYLSGVEISVTWASRTVHIVGLHIDPAHPALVDGLYRTRHGRAARALAIAEQLATLGIPGAYEGALKYVSNPDLISRTHFARFLVENGHAESTSDVFDRLLGDGKPGFVPHRWASLSDAVGWIRAAGGEAVVAHPGRYRYTPVEFDAFFGEFIDLGGRAIEVITGSHTPDQYREYADVARRFGFEVSRGSDFHAPGEGRIELGSLPPLPPDLTPVWERWL

SEQ ID NO: 47992 - protein, 175 aa, Burkholderia cepacia
MTDSITPAVGPDTIDAAAGLREGDAVAALRRARDKVLLPTQLSEAALFDPALPDLSLIERLHAARYVARQSNAHALADIYRARLLDAGGTLDDIERADADALDALPRRLGAILLHAKRLTHAPADARASDLDALKSAGLTTSAIVALSQLVAFVAYQLRVAAAARALQARAAEAA

SEQ ID NO: 47993 - protein, 251 aa, Burkholderia cepacia
MILYEYPFNERIRTLLRLEDLFERFAFFLAQEDPREHHVALTTLFEIAEVTGRADLKSDLMKELERQRQTLAPFRGNPGIEQNALEAVLGEIEQTLANLAQMQGKTGQHLVDNEWLASIRSRAVIPGGTCKFDLPSYYAWQQWPAEQRRQDIAKWVLPMLPLRDAAAIVLRLARESGQASKVMAMQGSYQQMLSGRTYQLMQVRVAPELRVIPEASANKYMLWVRFTMQDGDVRPRAVDIDVPFHLTLCNL

SEQ ID NO: 47994 - protein, 385 aa, Burkholderia cepacia
MTPVPDVPEVPDVPEVPEVPDVPEVPEVPDVPEVPDVPEVPDVPEVPDVPEVPDVPEVPEVPEVPDVPEVPEVPEVPEVPEVPEVPEVPEVPEVPEVPEVPEVPEVPEVPEVPEVPDVPEVPEVPEVPEVPEVPEVPEVPEVPEVPEVPEVPEVPEVPEVPEVPEVPEVPEVPDVPEVPDVPEVPEVPEVPEVPEVPDVPEVPEVPKVPEVPEVPDVPEVPDVPEVPEVPEVPDVPEVPDDPDDPEVPELPPPEVPDEPPPDVPEVPDVPLVPDVLGLIVGGVVGPSTEPQPYSASSDETAIVTVVFLKRFCMLASTLEVCPGLLCKFRATTCLAKRCRDLLRKSGLSTRFKRRKGGFARQARAVRERRGCDVPVRRRNARPDVT

SEQ ID NO: 47995 - protein, 703 aa, Burkholderia cepacia
MQMSEIASFFQLQSNRLFTIETPLKGRSDLVLVDFHCTEGLSQNFEMHVRLASQDKNIELKKLIGQPVTITLQLTDALASSEERYFHGYVAAFSHLDTDGGFAMYSATILPWLWMLSRRQDIRIFQEENTEAILARVFREYGKLASFEFRLSKGTQNRSYCTQYRETDLAFVERLMREDGLFYYFEHAKDGHKLIIADNSVTAKPIDGRSPSLQYNQGEAMDNLAVITSFQAQRQLAPDTVGLKTFDYKIPHARRFVSGGTEVNQGDVPSYEIYDYLGEHGFADSDRGEELARFRTEALAAHSKTFVGVTTGRRMMPCRYFELDDHYDHASTKQEDRQFLLLTVSHTGTNNYEPGEGTSAYSCSFTCIRKKIPYRPAFEGERPTIVGPQTAIVVGPKGEEIYTDSLGRVKVQFHWDRLGKRDQGSSCWVRVSQPWAGSGFGMIQIPRIGDEVVVSFLDGNPDRPLVTSRVYNSQNMPPWALPANATQSGILTRSTKTGNVNTANAIRFEDKKGEEEVWLHAEKDQRIEVEHDESHWVGNDRTKNIDHDETVHVGHDRTETVDNNETIHVGVDRTETVGNNETLTVGGNRNETIEGMENLLIALTSTETVGLAKALTIGGAYTVTVAGAINTAAGLASAEEVGLSKTTMVGKTYTVTAGDRIELRTGKASIVLESSGHITISGTSIDILGSDAVKVDGKTVDLN

SEQ ID NO: 47996 - protein, 625 aa, Burkholderia cepacia
MRLAQEARPSNWTRRLNPSHKPGREHPINFLPKIRKVKMNMPSAEFSTSEPLSPPDSDSIGGTVLMKALADENVEFIWGYPGGSVLYIYDELYKQDKIQHVLVRHEQAAVHAADAYARSTGNVGVCLVTSGPGVTNAVTGIATAYMDSIPMVVISGQVPTAAIGQDAFQECDTVGITRPCVKHNFLVKDVRDLAETVKKAFYIARTGRPGPVLIDIPKDISKTPCQYEPIKSVSLRSYNPVTKGHSGQIRKAVSLLLTAKRPYIYTGGGIILADASRELNQFADLLGYPVTNTLMGLGGYRASDKKFLGMLGMHGTYEANMAMQHCDVLIAIGARFDDRVIGDPAHFASRPRKIIHIDIDPSSISKRVKVDIPIVGDVKEVLKELIEQLQTAEHGPDTEALAQWWKDIEGWRAKDCLKYDRESEIIKPQYVVEKAWELTDGNAFVCSDVGQHQMWAAQFYRFNKPRRWINSGGLGTMGFGLPAAMGVKMAHPDDDVLCITGEGSIQMCIQELSTCLQYDTPVKIISLNNRYLGMVRQWQQIEYSKRYSHSYMDALPDFVKLAEAYGHVGMRIEKTSDVEPALKEALRLKDRTVFLDFQTDPTENVWPMVQAGKGITEMLLGSEDL

SEQ ID NO: 47997 - protein, 354 aa, Burkholderia cepacia
MTQPIPQSRPGQENEMTQAQTVAVQSDAIPMAAPAPQRWRVADVVALFELPFNDLMFRAQQVHREHFDANAVQLSTLLSIKTGGCEEDCGYCSQSSHHDTGLKAEKLMDVDTVLDAARAAKANGASRFCMGAAWRNPKERHMPALTEMVRGVKELGLETCMTLGMLEDEQARQLADAGLDYYNHNLDTSPEFYGQVISTRTYQDRLDTLDRVRDAGINVCCGGIIGMGESRRERAGLISQLANLNPYPESVPINNLVAIEGTPLEGTAPLDPFEFVRTIAVARITMPKAVVRLSAGREQLDDAMQAMCFLAGANSMFYGDQLLTTSNPQTQRDRALFERLGIRASQADALSDNA

SEQ ID NO: 47998 - protein, 359 aa, Burkholderia cepacia
MALTLEELVKRFGGEIAGDAQCKVGGLAPLDQAGPQQLAFLANPKYLSQVESTRAGAVLIAPKDLEKLGAAAAGRNFIVTPNPYAYFARVAQMFIDLATPPRAAGVHPSATIDPAATVAATAVIGPHVTIEAGAVIEDGVQLDANVFVGRGTTIGAGSHFYPNASVYHGCKIGPRAIVHAGAVIGSDGFGFAPDFVGDGDARTGSWVKIPQVGGVTIGPDVEIGANTTIDRGAMADTVIEECVKIDNQVQIGHNCRIGAYTVIAGSAGIAGSTTIGRHCMIGGAAGIAGHVTLGDYVIITAKSGVSKSLPKAGIYTSAFPAVDHGEWNKSAALVRNLDKLRERIKALEAALAAQGGTHA

SEQ ID NO: 47999 - protein, 720 aa, Burkholderia cepacia
MKTAMRDASGQGVGTRAACIATTGEGAARRPVRHATESVAQVQRRQARDRDARIVRLRRRVGRRAHLVARAEVRFHVDLDRLAAVAVLGDFGAVLALFVEARRAADVGEVHFRRDFGARPVDLAEIGQAGGFVGLGPGLRVGVRRAAGGVSDAGGGKRDGSGDENERLHDESPVNLPILANTARHPAPACAGAAIRATGFRGNVVGSDEVMKMKNDLSRRHRVLSPESPSVEAFDDPVAAVARLSAIYDTNTGFLRDAFARYRRHEAITEHVRACYPFVRIRTDVNTHVDSRRSYGFVAGPGVFETTVTRPDLFANYYREQLRLLSKNHHVKIEIGVSSQPIPIHFAFPEGIHLEGELDRDRLLAMRDIFDTPDLSYLDDRIVNGTFEPAPGEPHPLALFTAARVDFSLHRLRHYTATSPTHFQNYVLYTNYQFYIDEFVKLGRTLMTESDDPEVRAYRSEYSAFVEPGDVVTYNANLGSEPAEGTAPPRLPQMPAYHLKRADGSGITMVNIGVGPSNAKTITDHIAVLRPHAWVMLGHCAGLRNTQRLGDYVLAHGYVREDHVLDADLPLWVPIPALAEVQLALERGVAEVTRLEGAELKRVMRTGTVASVDNRNWELRDHREPVQRLSQSRAIALDMESATIAANGFRFRVPYGTLLCVSDKPLHGELKLPGMADTFYRGQVDQHLQIGVKAMEILRTNGLDKLHSRKLRSFAEVAFQ

SEQ ID NO: 48000 - protein, 557 aa, Burkholderia cepacia
MTTQDLLAQYGPRESMEYDVVIVGGGPAGLSAAIRLKQLAAEKGAEIGVCVLEKGSEIGAHILSGAVMDPRAITELFPDWKERGAPLDVEVTEDRFLFLSEKSAVTTPNWALPDNFKNHGNYVISLGNVTRWLGQQAEALGVEIFPGFPAAEILYNDDGSVKGVATGNMGVGKDGEPTENFQLGMELHAKYTLFAEGCRGHLGRQLISKFKLDANADPQAYGIGIKELWEIDPAKHKPGLVIHTAGWPLKSDTYGGSFLYHMDNNQVVVGFVVGLGYTNPYLSPFEEFQRYKTHPSIRAFLEGGKRVSYGARAITAGGLLSLPKTVFFVGALIGDDAGFLNASRIKGSHAAIKTGMLAADAAFDAVQAGRQSDELNAYPDAFKQSWLYTELYRARNFKQWMAKGLYLGTLMVGLEQKVMGGNVPWTLHHQHADHEMLKPASQCEPIAYPKPDGKLTFDRLSSVFISNTNHEENQPAHLTLKDASVPVNVNLRTYAGPEARFCPAAVYEFVKNDDGGERLVINAQNCVHCKTCDIKDPTQNIVWVTPEGGGGPNYPNM

SEQ ID NO: 48001 - protein, 451 aa, Burkholderia cepacia
MDFDYDLFVIGAGSGGVRLARMAASYGARVGIAEEEQIGGTCVLRGCIPKKLLVYASHYPHEVDDAKGFGWTFGAGTLDWSALIAAKDREINRLSDIYVNLLRQSGVDMHAGRATLVDAHTVAIGTRTIRARHLAIATGSRPSLPPRPGIEHAITSREALSLAALPKRIAVVGGGYIAVEFAGIFNGFGSHVDVFYRGEKILRGFDDDVRQFLTDEMTKQGVTIHARAVIESIERVDDGALFVRVGDARHGPYDQVLYATGRVPNVDGIGLEQAGILLDARGAIAVDAYSATSVPSIHAIGDVTSRPQLTPVATRDGALLARTLFGGSRVAVDHAYVPSAVFIQPEVATVGLTEAGARHAHGDVDIYRTSFKALRHTLSGRDERTLMKLVVARDSQRVVGAHMVGRDAGEIIQGIAIAIRAGATKAQFDDTIGIHPTAAEEFVTMRQKVAD

SEQ ID NO: 48002 - protein, 198 aa, Burkholderia cepacia
MKQPSALSALVEALRVLPGVGPKSAQRMAVHLMQHDREGAERLGRSLLFATEHLQHCEKCNTFTEAQICEVCSDEERDPTLLCVVETPADQIMLEQTMTYRGLYFVLMGRLSPLDGIGPKEIHFDRLVRRASDGVVKEVVLATNFTNEGEATAHYLGQTLKARGLAVTRLARGVPVGGELEYVDAGTIARAMLDRRTM

SEQ ID NO: 48003 - protein, 340 aa, Burkholderia cepacia
MNGASQWRMATGTINGSRFGLRGTEDLGGGLKALFVLENGFNVNNGGLGQDGKLFGRHAYVGLSRAGYGTLTLGRQYDTMVDFVAPLSATAGDLGDAGFAHPFDNDNLNHSLRINNAVKYTSDTIAGFKVGALYAFSNSANFSANRAYSVAASYTNGPLKLAGAYLQMNGTKGSTSASPGATDSAEAKSLNQGGWSIGSDRMRTYGGGVSYVFGPATVGFVYTRSQYDNTGSFGSSGQIAFNNYDVNVRYAVTPAVSLGAAYVYTDASVSNPDSKHGTDPKWHQVDLQAVYKLSRRTDLYAEAMFQHASGRGYQAFINTSGGASSTANQVVGTIGMRTRF

SEQ ID NO: 48004 - protein, 613 aa, Burkholderia cepacia
DSRTDWYAALRGFTPTLYVDGLPAPNTAVIANWRVDPYTIDSIAVLRGPTSVKIGAGEPGAIVDAHTKLADGERVREAGVQIGNDARKQAMLDVGDRLDPDGRYAYRFVGVARDGNAVTGPNGDRRVALAPSFRWRPNADTSLTFSATFLQDSGDISSNFLPASGTVLPNPNGRLSQDLYMGDPSFNDYRKKQWSLGYALEHRVNAIWTLRQDVRWSHLSLDDATVFGNGLAPRSTTNMMRFAGLFQLNYSRLDIDNHAQARFGTGPLEHTLLFGAQFDRQTTTNSVWLALAPSLDLYHPVYRPVTAAIFSGPTSLGHVDQYTAMNAFGVYAQDQIRWRRWTLTLGGREDVVNARFDDRSAGTHVQQDVSAFSGRVGLTYRGDAGWSPYVSYSTSFDPVIGVRMFGGGLPKPTRGAQTEVGLRWQPPGRNLMLNAAVYQIDQTNVVTPTPVNLDPTATTSVQTGKVRSRGIELSAVGKVTRELSIVASYLYQDVKNVQANDASLNHWPVSVPLPRQMASMWADWTWHTGALAGVGVGGGVRYQSASAGAPDNSLTVPSATLYDLAIHYDLPRWRFAVNVANLFDRRYVSGCQSYAVCVFGNERTVLASAKYSW

SEQ ID NO: 48005 - protein, 229 aa, Burkholderia cepacia
MFLQGYGPLILAGTWQTVKLAVLSLALSFLLGLLGAGAKLSRNRVTNGVGTVYTTLIRGVPDLVLMLLLFYSLQIWLNMATDALGWDQIDIDPFLAGVLVLGFIYGAYFTETFRGAFLSVPRGQLEAGSAYGMTNWQVFTRIMFPQMMRFALPGIGNNWQVLVKSTALVSIIGLADVVKASQDAGKGTLRFFFFTLIAGAVYLAITTISNFVLMWLEKRYSTGVRKADL

SEQ ID NO: 48006 - protein, 453 aa, Burkholderia cepacia
MGAVQGSMLLVFTLIAIAALILMIARYKIYPFLVLIIVSLGLGLVVGMPMDKIVKSFETGTGGTLGHIAIVVGLGTMLGKMMAESGGAERIATTLIDWFGEKNIHWAMMFVAIIVGLPVFFEVGFVLLIPIAFNVAKRTGKSLLVVGLPMVAGLSVVHGLIPPHPAALLAVQQYGADIGKTIAFGLVVGVPTAIIAGPLFALTISKFVKLPENNPLASQFVDSNADGRKRELPSFGITLFTILLPVVLMLVGSWADLVFAPKSLPNNLLRFAGNSDVALLIAVLVSFFTFGKLQGFNRDQIQKFCGECLAPIAGITLIVGAGGGFGGVLRDSGISQQIVETAKHAHLSPLLLGWFVAALMRLATGSATVAMTTACGIVAPIAAASGASVSPELLVLATGSGSLIFSHVNDGGFWLIKEYFGMTVGQTFKTWSLLETIISVLGLSFTLLLSMVL

SEQ ID NO: 48007 - protein, 367 aa, Burkholderia cepacia
MLTGNILTPDGWIHGSLDSENGRITTLDGAPVDPAKNDAPYILPGFIDLHVHGGGGADVMEGGDAIETIVRTHAQFGTTSLLATTMTAPRDELMEVVANLGTAARARTPGGARVLGVHLEGPYINPGKLGAQPDAAVSAVLDEVLKYLSIAPIRVVTLAPEIAGHIEIIGEMAARGVRVQLGHSLATYDDAVAALKHGACGFTHLFNAMSPLHHRNPGLVGAALAHAEYAEIIPDLLHVHPGAIRAALRAIPRLYVVTDSTSATGMPDGEYRLGSQHVTKCLGGVRLADGTLAGSTLTMDQALRNLVSLGLPIADVSNRMSRYAADYLGVTDRGRLERGAWADLAVFDRDLNLTATYVEGESIVEYA

SEQ ID NO: 48008 - protein, 658 aa, Burkholderia cepacia
MTTGFLQKIFGSRNQRLVKQYQKTVATINALETQIEKLTDDQLRGKTDEFRQRVAAGESLDKLLPEAFAVCREASRRVLKMRHFDVQMIGGMVLHYGKIAEMRTGEGKTLVATLPVYLNALAGRGVHVVTVNDYLAQRDAEWMARLYNFLGLSVGINLSGMEHDQKQQAYAADITYGTNNEFGFDYLRDNMVYETDARVQRALNFAVVDEVDSILIDEARTPLIISGQAEDHTELYVRMNALPPLLERQIGEEKADGTGVEKPGDYTLDEKARQVFLTESGHEKAERLLAEWGLIGEGESLYAPQNITLMHHVYAALRAHTLFHKDQHYVVQNGEVVIVHEFTGRLMAGRRWSDGLHQAVEAKEHVKIQSENQTLASITFQNYFRMYAKLAGMTGTADTEAYEFNEIYGLETVVIPTNRPPKRIDKQDQIYKTAKERYDAVIRDIRDCYERGQPVLVGTTSIENSELLSHLLKQAGLPHEVLNAKQHEREAAIVAEAGRPKRITIATNMAGRGTDIVLGGNAEKQAAFIEADDSIPADEKARRIQKLHDEWETLHEEVKAAGGLHIIGTERHESRRIDNQLRGRAGRQGDPGSSRFYLSLDDPLLRIFPGFRRLSLLARPRLPHPLPSPPLPPVPPHAPTSSRRPTLLVPLPIHTTKP

SEQ ID NO: 48009 - protein, 331 aa, Burkholderia cepacia
MSSSTASPTLSAAHLLAPITSDMEQVNRVIRQSLASDVLLINQIAEYIIGAGGKRLRPALLLLVAGALGETSHQRHVLAAVVEFIHTATLLHDDVVDESELRRGRQTANALFGNAASVLVGDYLYSRSFEMMVGVGKMRVMEILSEATTIISEGEVLQLLNMHDADVDETRYMQVIRYKTAKLFEASARLGAVLAGADAPTEAAAAEYGRRVGTAFQIMDDWLDYAGTAEAMGKNAGDDLREGKPTLPLIYLIERGTPEQSALAREAIEQGGTDRFDTIFEAITRSGALDHTLECARQEAQAAAAAIAAFPDSIYKESLLGLCSYSTSRQS

SEQ ID NO: 48010 - protein, 206 aa, Burkholderia cepacia
MTIVNLAAYHFVSLDANEQWRPLVTARCNELGLRGTILLAPEGINLFIAGTREATDAFIAYIRHDPLFEGKFATLQFKESLSDSQPFRRMLVRLKREIITMKKPAIKPELGRAPFVDARTLKSWLDRGHDDTGRPVVMLDTRNAFEVDVGTFDNALDYRIDKFSEFPEVIDANRADLEGKTVVSFCTGGIRCEKAAIHMKEIGIDN

SEQ ID NO: 48011 - protein, 369 aa, Burkholderia cepacia
MASVLLRNIAKRYDDTEVLRNVNLDIADGEFVVFVGPSGCGKSTLMRMIAGLEDISSGDLLIDGAKVNDVPSAKRGIAMVFQSYALYPHMTLYDNMAFGLKLAGAKKPEIDQAVKQAAKILHIDHLLDRKPKQLSGGQRQRVAIGRAITRKPKVFLFDEPLSNLDAALRVKMRLEFARLHDELKTTMIYVTHDQVEAMTLADKIVVLSGGAVQQVGTPNALYHAPANLFVAGFIGSPKMNFLKGTVESADAGGVLVRFDSGETQRVAVDAAGLQRGAAVTVGVRPEHLLVDAAAAGVAARTMAVESLGDAAYLYAESAVAPDGLIARIPPLDTYRTGEALRVHAQPEHCHLFDENGQAFRRLSAHAKAA

SEQ ID NO: 48012 - protein, 221 aa, Burkholderia cepacia
MLDIQLLRKDLDGVAKRLADRGYTLDVAAFSALEAERRAIQTHTEELQARRNSLSKQIGAMKGKGEDTSAVMAEVSGIGDDMKASEAKLGEIQARLSDLMLGMPNVAHESVPVGKDEADNVEVRRWGTPRQFDFEVKDHVDVGTPLGLDFETGAKLAGARFTMLRGPIARLHRALAQFMIDTHTQQHGYTETYTPYIVNPEILYGTGQLPKFADDMFRVEK

SEQ ID NO: 48013 - protein, 222 aa, Burkholderia cepacia
MKASRFFIGTLKEAPADAEIVSHKLMVRAGMIRRVAGGIYNYLPVGLRSIRKVEAIVREEMNRAGAIELLMPAVQPAELWQESGRWEQYGPELLRFKDRKDNDFVIGPTHEEVVTDIARNQIKSYRQMPVNFYQIQTKFRDEIRPRFGVMRGREFIMKDAYSFDKDAAGLNESYRKMYDAYVRIFSRLGLEFRAVAADSGSIGGNFSHEFHVIADTGEDAIA

SEQ ID NO: 48014 - protein, 400 aa, Burkholderia cepacia
MFRERIISGMRPTGSLHLGHYHGVLKNWVKLQSEYPCFFCVVDWHALTTHYETPEVIEKNVWDVLIDWLASGIDPAQATLFIQSKVPEHAELALLLGMSTPLGWLERVPTYKEQMEKLKDKDLSTYGFLGYPVLMAADILLYRGSLVPVGEDQVPHVEMTREIARRFNYLYGREPGFEEKALEAAKKLGGKRAKLYHELRNAYQQEGDDEALEQARAMLQESQSLSMSDRERLFGYLEGARKIILVEPQALLTEASRMPGLDGQKMSKSYGNTIGLREDAETITKKVRTMPTDPARVRRTDPGDPDKCPVWQLHQVYTDEATHEWVQKGCRSAGIGCLDCKQPVVEGILREQQPMLERAQKYMDDPSLLRAIVADGCDKARKYATETMRDVRDAMGLSYN

SEQ ID NO: 48015 - protein, 383 aa, Burkholderia cepacia
NPSLIAILTTVLLDAIGVGIVMPILPGLLRSLADAGSTDTHYGILLALYAFAQFLCAPLLGALSDRFGRRPVLLASLAGAALDYLLMALAPTLAWLYMGRLIAGITGANVAVATAYVTDVTAEPDRARRFGQLGAMMGIGFIAGPLIGGLLGALHLRAPFVAAAVLNALNLVLGWRALPESRAPSAREGHAVGALNPFASLRRLTGAPALAPLIGIYVIVALVSQAPATLWILYGQEHFGWSTPIAGLSLAGYGACHALAQAFAIGPLIARLGERRALALGLAGDALGLVAIAFATAAWVPFALLPLFAAGGQTLPALQAMLARQVDDARQGELQGALASVASLIGVAGPLVVTATYAATRATWPGLVWAAAALLYLLVPPLL

SEQ ID NO: 48016 - protein, 627 aa, Burkholderia cepacia
MLQSRASWLSLSAFLFDLTAVVAAWLFAYLVRFNGSVPHDFLSGALMALTWVLPVYALMFHGFGLYRGLWVFASLPDLMRIAKAVTGGGMIVMIGAVMFQPAPIIPRSVLLVSPLMLFLAMGGARALYRATKEYYLYGGLVGKGKPVLVLGAGTAGASLARELSRSGEWRLVGLLDDDVTKQGREIYGYKVLGSFNDLKHWTDAMKVEYAIIAIPSASVETQRRVATLCVRAGVKAMVLPSLTALMPGQGFLSQVRNIDLEDLLGREAVTIDTPHVEALLRGRVVMVTGAGGSIGSELCRQILRFAPAQLVAFDLSEYAMYRLTEELRERFPDLPVLPIIGDAKDSLLLDQVMSRHAPHIVFHAAAYKHVPLMEEHNAWQALRNNVLGTYRVARAAIRHDVRHFVLISTDKAVNPTNVMGASKRLAEMACQALQQTSGRTQFETVRFGNVLGSAGSVIPKFQQQIAKGGPVTVTHPEITRFFMTIPEASQLVLQASSMGHGGEIFILDMGEPVKIVDLACDLIRLYGFSEEQIRIEFTGLRPGEKLYEELLADDEATTRTPHPKLRIARAREVPDNFLDELLPWLMQHRVLSDDEVRRDLRRWVPEYQTAVAPVLQSVPSVRVASNG

SEQ ID NO: 48017 - protein, 477 aa, Burkholderia cepacia
MRGLIGLPGKIRHACVLRPSRPPRRPSTATSRVTERLRGLPSAPVRFLLQFRTTMALIVHKYGGTSMGSVERIKNVAKRVAKWHQAGHQMVVVPSAMSGETNRLLGLAKEISSQPSPRELDMIASTGEQVSVGLLSIALQEIGVEAVSYAGWQVPIKTDSAFTKARIHSIDDERVKDDLNAGKVVIITGFQGVDPDGHITTLGRGGSDTSAVAVAAALGAEECLIYTDVDGVYTTDPRVVEEARRLDRVTFEEMLEMASLGSKVLQIRSVEFAGKYQVKTRVLSSLTDPLIALDEEMRSGTLITFEEDETMEKAVISGIAFQRDEARIAVMGVPDKPGIAYQILGPVADANVDVDMIIQNQSVEGKTDFTFTVGRGDYQKAMDILTNQVQGHVSAERVQGDPKVSKVSVVGVGMRSHVGVASKMFRTLSEEGINIQMISTSEIKISVLIDEKYMELAVRALHKAFELDQASWGFVMH

SEQ ID NO: 48018 - protein, 250 aa, Burkholderia cepacia
NVLVTGGTGFIGETLVNQLLDAGHTVTLLARDPLRAAYLFQGRVRSVTSVEQLQPHARFDTVINLAGAPVLGARWSKRRQALLLASRVGVTQALMRWVETAEAKPRTWIQASAIGYYGVRPGDERLDERSGAGTGFMSALCRQWEAAAAPLARHGVRAVVLRLGVVFGPGGALRPMLLPHYFGLGGRFGDGAQVLSWIHRDDVLRIVARAMSQAGMHGVYNAVAPVPLTQRAFVQIVSKVLRRRAWLHVP

SEQ ID NO: 48019 - protein, 212 aa, Burkholderia cepacia
MLPQLNAARGRGAVSRRKGLKKHLIIAAGALAASLSFSAFAESATYQFDPSHTYPSFEADHFGGLSVWRGKFDKSSGTVTLDRAAKTGTVDVTTDIASIHTGSAKLDEHLQTAEFFDAAKFPQANYKGTIKFDGDKPVSVVGNLTLHGVTKPLTLKIDSFKCMPHPMLKREVCGVDAVGEFSRDDFGLDYGKQYGFKMKTKLLITAEAVKQQ

SEQ ID NO: 48020 - protein, 600 aa, Burkholderia cepacia
MSMRTEYCGLVTEHLLGQTVSLCGWVQRRRDHGGVIFIDLRDREGLVQVVCDPDRAEMFATAEGVRNEFCVQIKGLVRNRPEGTVNAGLKSGKIEVLCHELNVLNASVTPPFQLDDDNLSETTRLTHRVLDLRRPQMQHNLRLRYRVAIEARKYLDEQGFIDIETPMLTKSTPEGARDYLVPSRVNAGQFFALPQSPQLFKQLLMVANFDRYYQITKCFRDEDLRADRQPEFTQIDCETSFLGEQEIRDLFEDMIRHIFKTTIDVELDAKFPVMPYSEAMARFGSDKPDLRVQLEFTELTDAMKDVDFKVFSTPANAKDGRVAALRVPKGGELSRGDIDGYTEFVRIYGAKGLAWIKVNEKAKGRDGLQSPIVKNLHDASIAAILERTGAEDGDIIFFAADRAKVVNDSLGALRLKIGHSEFGKANGLVQAGWKPLWVVDFPMFEYDDEDARYVAAHHPFTSPKDEHLEYLETDPGRCLAKAYDMVLNGWEIGGGSVRIHREEVQSKVFRALKIGAEEAQAKFGFLLDALQYGAPPHGGIAFGLDRIVTMMAGADSIRDVIAFPKTQRAQDLLTQAPSPVDERQLRELHIRLRQPEQPKA

SEQ ID NO: 48021 - protein, 928 aa, Burkholderia cepacia
KYPVNLLDTPFPMRGDLPKREPQWVKEWEERGIYDKIRAASQGRPKFILHDGPPYANGDIHLGHAVNKILKDIVVKSRNMAGFDAPYVPGWDCHGMPIEIQIEKQFGKSLPAAEVMSKARAYATEQIEKQKVGFKRLGVLGDWANPYKTMNFVNEAEEIRALGKIIEKGYVYRGLKPVNWCFDCGSALAEAEVEYKDRTDPTIDVMFAFAEPEKTAQAFGLPALPRADGGIVIWTTTPWTIPANQALNLHPEIVYALVDTERGLLIIAEERVEACMSDFKLTGRIIATTPGVKLANLRFHHPLASAHPGYKRTAPVYLGDYVTTDTGTGVVHSSPAYGIEDFMSCKAHGMTDSDFINPVMGDGRYIESLPLFGGLSIWDANPKIVDALNAAGSLLRSEKYTHSYMHCWRHKTPIIYRATSQWFAGMDVTPRDGGKTLRETALEGVDATAFYPSWGKQRLFSMIANRPDWTLSRQRQWGVPMAFFVHKETGELHPRTLELLEEVAKRVEQSGIEAWQSLDPRELIGDDANLYEKNRDTLDVWFDSGTTHWHVLRGSHKDQLQFPADLYLEGSDQHRGWFHSSLLTASMIDGRAPYKGLLTHGFTVDGEGRKMSKSLGNGIDPHEVANRLGAEIIRLWIASTDYSGELAISEEILKRVTEGYRRIRNTLRFLLANLSDFDFAQHAVPVDEWLEIDRYAVAFSQQLQTELLGHYEKYEFHPVVAKLQTYCSEDLGGFYLDVLKDRLYTSAADSRARRSAQTALYHLTHGLLRVLAPFLSFTAEEAWKVFQPASDTIFTETYYAYPEVAGSAALIDKWALLRDVRGNVTKALEEARTANRIGSSLQAEVTVHASGARYDALTSLGDDLKFVLITSAATVVKVDDEAQESVDVAASKYQSASAAGTTAKMSARTPSIRRCAAAASRTCLKTAK

SEQ ID NO: 48022 - protein, 145 aa, Burkholderia cepacia
MKKSARRQSRELATQGLYQWLLSNAPSGEIDAQLRGALGYDKADKELLEAILHGVIREHATLVEALAPSLDRPIDQLSPVERAVLLIATFELTHHVETPYRVIINEAVELAKTFGGSDGYKYVNGVLDKLAAKLRPAETHARRNG

SEQ ID NO: 48023 - protein, 265 aa, Burkholderia cepacia
MIQIDLSGQVAVVTGGSSGIGLATAERFLQAGASVAICGRDDERLARAEAMLRGKYADARLLATRCNVLDEADVTAFAQAVSARFGCADMLVNNAGQGRVSTFADTTDDAWREELELKYFSIIRPTRAFLPLLRDAAAPTITCVNSLLALQPEPHMVATSSARAGVLSLVKSLATELAPQRIRVNSILIGIVESGQWRRRYDTQAQPGESWEDWTGALARKKNIPLNRFGKPDEAAWALFYLATHLSSYTTGSHIDVSGGFARHV

SEQ ID NO: 48024 - protein, 528 aa, Burkholderia cepacia
  MISC_FEATURE (8)..(8): X=any amino acid
MSAFPGEXNLDLLESLRRSKIKLVLTRHEQAAGFMAATYGRLTGRTGVCLATLGPGATNFVTAAAYAQLGGMPMLMITGQKPIKSSKQGHFQIVDVVDMMQPLTKFTRQIVSIGNIPSAVREAFRRAEEERPGAAHLELPEDIAHEEGDGKPIPRSYSRRPVAEEKAVAHAVDAIQAARHPLLMIGAGGNRKTTCKMLLEFVDKTGIPFFTTQMGKGVIDETHPLWLGNATLSDGDFVHRAIEHADCIINVGHDVIEKPPFFMRTDDKTVIHVNFLGAQVDPVYFPQIEVVGDIANAVWQMKEALTPQSHWDFERFKMIKAHFDAHLEKGQHDPRFPMYPVRIVNDLYNALPVDGIVCLDNGMYKIWFARYWRAHEPNSLLLDNALASMGAGLPSAIATKIVHPQRKVIAVCGDGGFMMNSQELETAVRLKLDIVVMILRDDAFGMIRWKQENMNFPDFAMTLQNPDFVSYAQSYGAHGHRVESADDLEPLLRECFSSPGVHVIDVPIDYSDNERVLNREIKRLSAQL

SEQ ID NO: 48025 - protein, 317 aa, Burkholderia cepacia
MKHFSTDEAPAAEQADYWSAALASSFVKLDFEPTTSRSGRPFTGHIDQGSLAYVDVAVVNSRAQEVHRTSRLVRQEDADLFLISVQVAGRGELEQDGRQAVLSAGDCSLYDTTRPYHLSFRDDFEQLVLSIPRDRLRIRIPAADRLTAIPIRGVNGLGSLFFDLVTSIPRNLESMTAQVRESVSNSVLDLVATALAGLPSPIPAPASNLKQFHLNRIKSYVIENLSDAELDIARIAQTLGMSVSSLYRAFASEGCPLSQWIWDQRLHACRKALLDESCANLSAKQIAMSWGFNDPAHFSRAFRRKFGESPNALRTRK

SEQ ID NO: 48026 - protein, 524 aa, Burkholderia cepacia
MKSRLDRWMMLLAIAAAGTAQAQTRVGGNPLDSLPQINAPKTGPNVTVQVAPQAPQLQELLSRHLTPKTFQVEGVKSIPFEEITRRFTPLVGKDITIGELIETANGVTTLYQERGYALSFAFVPAQTFENGVVRITVVEGYVSDVKVTGKPGAMEPKIRAIAAHITADRPLRRATFERYVNTFGLLPGLTVKANVPPPQTTDGATTLELAVDRKPFNVSTGIDFNHPGVQGLITATENGLTRFGEQLSISALAPPGRDKQTYFAFSGAVPVGSSGLITRLDASTYRGKPTDNPGLPSYVERTVKNEKLGLSASYPILLNNQRSLLGTVSGYASHNEDRYQNQINGASLDTRSQVRVLQMQLDYTSVQPKQVQKLSVNVAKGFNILGASKAQDITVGTTTTSVDSPISLTFVRTGATFTQTNEWPFRIGTSVSLTGQYSPDSLPTSEQISFGSTRYALGYQPGETSGDSGWGMSLEVNRGFTPGWTYLKSITPYIAYDMARVYLHSGTPSPNRMSSVGIGVRLTD

SEQ ID NO: 48027 - protein, 47 aa, Burkholderia cepacia
MYSTQVCPYCMQAERLLKLRGVEQIEKVLIDRDPARREEMMTRTGRR

SEQ ID NO: 48028 - protein, 134 aa, Burkholderia cepacia
MLMWGVRVGAGRMGGGGNRGGGDGGAGGKEERRKGRSERATETGRGGGEGEGNEKESNGEERKGRTGGKEKGGEREKGKGRRRTEESGGRGRRRRTGKRTGGRGGEAGKGERGGRGRNKKERESQRKERARAKE

SEQ ID NO: 48029 - protein, 205 aa, Burkholderia cepacia
PRPRPGPAGPPPHPAAPAPPPPRPTPTPPPPAPPPPRHPPPPPPPAPPPAPPHPPPAPRRRPPPPPPRPTPTAPPPPPPRPPPRKTPAPPPAAPPPAPPPPGGHDAARAAPPAARPRPPRRRGPAPPAPPAPPPPPPPPAPRNKNVPHATLEGAVHAAADLDEPGDAVLLSPACASLDMFTNYAHRAEVFRAAVDEIAIDKGATP

SEQ ID NO: 48030 - protein, 108 aa, Burkholderia cepacia
MRTIAASFPGGAAMAMKKTDLEKNKALKLTHAMKQSSSARFGKGADEAAKLDRRAQRKLDQEQGLVPFACKLNAALVEQLKARAATHPEGMTGLLSELLVNGLAQRDA

SEQ ID NO: 48031 - protein, 382 aa, Burkholderia cepacia
MMRDAANFEPADSRVTHPAFWNALPERWTSDVEETLVCCHVRQETHDVKSFFFRSPQGRTFSFEPGQFITLELDIDGETINRCYTISSSPARPHTISITVKRVPGGKVSNWLHDNLQPGAAVRVLGPAGEFTCARHPARKYLFLSAGSGVTPLMSMSRAHHDLAEDRDILFVHSARTPDDIIFARELDLIASNHTNFRTSFVVERVGARTNWPGVTGFLTLPLLKLIAPDFMEREIFTCGPAPYMKAVRDLLDEAGFDRKQYHEESFSFETLAQTASDEVLAELVPAAEGVDATTKQYTVSFAKSNREIACGSEQHVLDAARQSGVRLPASCTQGMCGTCKVKLVSGQVEMKHNGGIRQREIDQGMVLLCCSKPLSDLVIDK

SEQ ID NO: 48032 - protein, 282 aa, Burkholderia cepacia
MTRSTAALAARGLSVGYRDHVVIDGLDLSIAAGRVTALCGPNGCGKSTLLRTLAGLQPARAGHVEVNGRPLASFRRRALARELTMLAQFNQIPSGLTVRELVAYGRYAYGGFLRGLSRADQAAIDEALDTSGLADDAERDVGALSGGERQRAWIAMALAQQAPIVLLDEPTTYLDIHHQLDILDALRALNRARGLTIVWVLHDLNQAAAYSDEIVLMRAGRLVAQGTPDAMLDPARLRAAFGVEMLKLAHPQTGAPMCVPAYGPSTDGAPQASAVFDRDLAV

SEQ ID NO: 48033 - protein, 320 aa, Burkholderia cepacia
MSILGIEQITYGVDDLATCRRFFADWGMKEVAHDDTRARFETLNGCTVLAVKADDPALPPAFEAGPTLREVTWGVATQAELDALRTKLAGQPGYYAQDDAVGCIDPNGMAIRVEVTRKRALDIAGSPSNVWGQTLRVDQPSPVYARAEPVEVGHVVFFTNCLDAQEKFYHELLGFETSDRYPGRGAFMRCAPHGGHHDLFLLALPNGKRGLNHVAFTVRDIHEVFGGGMHIDRCGWETQLGPGRHPVSSAYFWYFQNPAGGLIEYYADEDVLTPEWQPREFEPGPTVFAEWAVDGGLDGNTRRQKNAKAPEGKFMTERKS

SEQ ID NO: 48034 - protein, 669 aa, Burkholderia cepacia
MTKTLSVPATAAAGTLVYRPDIDGLRAFAVLAVVVFHAFPSVLPGGFVGVDIFFVISGYLITGILLADLGTDRSSFRHFYARRIRRIFPALVVVLLATYGMGWFSLYGDEYRELGKHIVAGAGFVSNWASWTEAGYFDQTAEAKPLLHLWSLGVEEQFYIVWPLVLWAAYRLRLIGWVCAVVGLASFAANVILIGHHASAAFYWPVTRMWELLAGAAFAISAGAGRPITGNRANAWSAGGAMLCVASFALLTARDAFPGWWAVLPVVGTVALVAAGRDGWINRHVLAHPVSVWLGKISYALYLWHWPLLSFAFIVAGRTPSSAVRGALLVIAVALAWLTTTIIERPIRFGPPKRWKLIGPCMLMIGIVYLGGMTYVRGGLGFRKGYSPDADVTTAKLGAGHEFVNAMCGVSPDEQRLFPFCATDKRVRSHFAVWGDSKADALYWGLVRESAPGEGWTLIARPSCAPMAGVWRTSSNAGDDPSLCRDANITALRMLLNTPELKTVVLVMTDRDVIGQTFADRDQTAPRTSAALDGLDQAVTALERAGKRVALVLDNPRLRDPRQCMDRRPLAWPFVRHALGVTDMDAAQRCAIGYREHVARIAPFHALVDELKQRHPTLLVYDPAAALCDAKRDVCPMTLDRHYLYSYGDHLSDYGNGLVAKQFLPLLRR

SEQ ID NO: 48035 - protein, 321 aa, Burkholderia cepacia
MSYGEPARLPQPWSLDEAASRPFFRQALEAGINFFDTANIYSGGSSEEITGRALNDMARREEVVVATKAFFPWRNSPNTGFLSRKALLQSIDDSLTRLGMDYVDLYQIHRFDHGTPVEETMEALHDIVKSGKARYIGASSMEAWRFAKMQHVAERNGWTRFISMQPQYNLLYREEEREMLPLCADQGVGVIPWSPMARGRLTRDWSETTRRTQNDAFALQMYRNAEIQDQKVVDVVARIAEAHHVPRAHVALAWLLTKPAITAPIIGATKPEHLATAIGALDFSLTQDEIAALEAPYVPHPVDGIVPPLPEHPPTISMPRN

SEQ ID NO: 48036 - protein, 103 aa, Burkholderia cepacia
MYAVIKTGGKQYKVAVGEKLKVEQIPADIDAEITLDQVLAVGEGESIKFGTPLVSGASVKATVVSHGRHAKVTIFKMRRRKHYQKHGGHRQNYTELRIDAINA

SEQ ID NO: 48037 - protein, 822 aa, Burkholderia cepacia
AWRSFFTSIGSDGVADLDRRADALHRRMRENGLFYQLHEQRAGDGAAGPWSLDLLPLIVTPEDWVVIERGVLQRVRLLNATLADLYGPQTILQRGLLPPALVTGHPGYLRAMRGARVPGDTWLHVVAFDLARGPDGQWRIVAQHTQGAAGLGYLLENRLIVSRLFPRGFRGLRVQRLASAYRALLQSMQSLSPAAKNSRIVLLTPGPHSATYFEHAYLARYLGLTLVEGGDLTARDNHVFLKTLSGLEPVHGILRRVDDAWLDPLELRPDSMLGVPGLLQAVRAGNVLLANAPGSGFLESPAMLGFMPRLAEGLLGETLTLPAVHSWWCGEAAACDDALPQLARGIVKASYPPDVQAGGAFEPVIGARLTPAQLAEWRARILARPEHYTVQADLPLSQAPTWPRPDAPDGNGSARIVPKPLLLRVFALADGAQRWRLLPGGLSRVGTRDTLFNAPMPRGGSTVDTWVMTEGIVDSTTLLQTHLGPDDLVERPRAIASRAAENLFWLGRYTERATNLMRLARAALERLRGEDDVDSPAHLELIDTLCRDTGLIAADAPHAVDAPRAFQHALATSLTRGADRTSGIASCLFGMRGAAAAIRERLSSDQWRLIDDATQLFADSAGQPEAEEQIGNDALQLLERLGLLLGAITGAQTDNMTRDDGWRLLSIGRQIDRLDFLCSVLKFAFDEGAVHRQDGFELVLELFDSTITFRSRFQRGFDVAPLLSLVVLDTDNPRSLGWVVQALRGRLTKVERSEGYALSELAETIPDVPAWSLHELCETTEGGRHDKLLAALDTTAKAVWELSNRIGERYFSHVREAGRTLW

SEQ ID NO: 48038 - protein, 187 aa, Burkholderia cepacia
MNDHRLVEITPATHRVEIDLVYATDRNLTGKPIYRNAHCLLLEPAEAALRRAVEVAAQAGVTLRLYDAYRPPQAQQVLWDFLPDPNFVADLGRGSNHSRGTALDLTLVGANGAPLDMGTGFDAMVAASGHFHAGLPEHVQRNRLLLLGVMHAAGFAHIDSEWWHYELPGSRALPQIDNAASGPWRLM

SEQ ID NO: 48039 - protein, 432 aa, Burkholderia cepacia
MESKTLAAPAAEPASRERSGLFSWYADAQPRERRAFWSCKVGYMLDGMDTQMLSFVIPTLVATWGISLADAGFIGTITLLASALGGWIAGILSDRIGRVRTLQLTVLWFAVFTALCGLAQNYHQLVAARALMGFGFGGEWTAGAVLIGEVIRARDRGRAVGLVQSGWAIGWGLCALLYALLFSVLPAEQAWRALFLVGLAPALLVVAIRRYVKEPDVYEKEKAAQAKVADAPRLTEIFAPKLITTTLRAALLTTGAQGGYYAITTWLPTFLKTERHLTVMGTGGYLAMIIFGSWVGYLTSAYLTDRLGRKPNFILFAVGSMVIAFAYTSLNLTNASMLWLGFPLGFFASGIFSGMGAFLTELFPTRVRGSGQGFCYNVGRAIGALFPFLIGALSKQYGLGMSIGIFAVAAYGVVIVAALTLPETRGRELDAA

SEQ ID NO: 48040 - protein, 569 aa, Burkholderia cepacia
MSTERNDAPAASNFIRNIIDDDNRTGKWGGRVETRFPPEPNGYLHIGHAKSICLNFSVARDYGGVCHLRFDDTNPEKESVEYVDSIVDAVRWLGFDWRKDAVDHQYFASDYYDKLYEFAELLIKRGKAYVDSQSADEMRANRGSLTEGGKPSPFRERTPEENLDLFRRMKAGEFKEGEHVLRAKIDMASPNMNMRDPVIYRIRYAHHYRTGDAWCVYPMYDYTHCISDALEGITHSLCTLEFEDHRPLYDWVLNELAEAGVFTRPLPQQIEFSRLNLTYAITSKRKLLQLVTEGHVDGWDDPRMPTIVGVRRRGFTPESIHLFCERIGVTKIDSWIDMSIFEGALRDDLDDKAARTVAVLDPLKLVIDNYPEDLEEACTAPVHPHHPDRGVRTFPISRELWIEREDFVENPPKGYFRLFPGNKVRLRYGYVIECTGFDKDADGNVTAVHCNYFPDSKSGTEGANTYKVKGNIHWVSAKHAQPAEVRIYDRLFKEPHPDAGGANFLEALNPDSKKIVQAYLEPGNGDVAPETRLQFERHGYFVADRVDSKPGKPVFNRIVGLRDSWGKPA

SEQ ID NO: 48041 - protein, 90 aa, Burkholderia cepacia
MANSAQARKRARQAAKANSHNSALRSKFRTAIKSVRKAVEAGDQAKAAELFKAAVKTIDTIADKKIVHKNKAARSKSRLAAAVKGLQAAA

SEQ ID NO: 48042 - protein, 77 aa, Burkholderia cepacia
MARVCQVTGKAPMSGNNVSHANNKTKRRFLPNLQNRRFWVESENRWVRLRVSNAGLRLIDKNGIDSVLADLRARGEA

SEQ ID NO: 48043 - protein, 38 aa, Burkholderia cepacia
MKVMASVKRICRNCKIIKRKGVVRVICSSDPRHKQRQG

SEQ ID NO: 48044 - protein, 615 aa, Burkholderia cepacia
MKPSQKRQNVKFSSSPVLGVHLPMWRSKLVVFMLFMAFVALAARAFWIQGPGNAFYQKQGESRYQRTIELPATRGKILDRNGLVLATSLPVRAIWAIPDAVPDDLDADKINQLGKLLGMTSKELRVKLSEDKGFVYVKRQVPIDVADKVAALDIPGIYQRNEYKRFYPEGEITAHLIGFTNVEDEGQEGVELGDQKMLSGTSGMRRVIKDRMGHIIEDVAEQIPPHNGTDVDLSIDSKIQYIAYANLKAAVEKFKAKAGAAMVVDVRTGEVLALVNYPTYNPNDRSRMTGEQLRNRIMTDVFEPGSIMKPFTVSLALDLHRVTPNTLVETGNGHFVLDGAPITDDAGFGTLTVGGVIQKSSNIGATKIAMTMRPEEMWNMYTSIGLGQAPKVGFPGAVAGRLRPWKSWRRIEQATMSYGYGLSVSLFQLARAYTAIAHDGELMPVTIFKTDPNQPIAGTQVFNPTTAREVRAMLETVVAPGGTSPDAAVPGYRVGGKSGTAYKHEGHGYTRKYRASFVGMAPMPNPRVVIAVSVDEPTAGSHFGGQVSGPVFSAIAGDTMRALNVPPNMPIKQLVVSDDSPESPAAKGPQKLAAGSGAKHMIVSSTTRNSPGVVR

SEQ ID NO: 48045 - protein, 227 aa, Burkholderia cepacia
MHARVRGRRHFRENLRALHVPRRVAAADRRQLHPVVAGARGFVVVAERRVVGDRCIGGNLGQRRGIDRRERRQEPHFAARADAGPRQVRMREAGNERIVVLVAGCAIPVPRQRMRAAGRVRPELHHAERHGRARIHVAVAAHAAAPVRVDVEVGRADHRIDATQHRSLVRAAVFPLIVLIALVVLVALIVLVARCVRHLREHARIRRPLIAPAPRQHGKASDTHHVT

SEQ ID NO: 48046 - protein, 421 aa, Burkholderia cepacia
DVLCTDKTGTLTQDKIILEHHLDLSGHKNEDILRLGWLNSFHQSGQKNLIDIAVVARADEIGERVKPQGYKKIDELPFDFVRRRLSVVVEDTRGTHLLICKGAVEEMLAVSTHVQDEDGVRPLDYVARKRLLEQATAYNEDGFRVLVLATRTIPRGDERAQYRTADEHDLVVRGFLTFLDPPKESAAPALAALRENGVAVKVLTGDNPTVTMKVCRQVGLEPGKPMLGTEIEALDDDTLAKVVERTTVFAKLTPLQKARIVKALQANGHTVGFLGDGINDAPALRDADVGISVDSGADIAKETADIILLEKSLMVLEEGVIKGRETFGNILKYLNMTASSNFGNVFSVLVASAFLPWEPMLATQLLVLNLIYDTSQMLLPWDKMDPEFLKKPCKWEAGNLRRLMPRVRPPPCGFDVPTPPL

SEQ ID NO: 48047 - protein, 329 aa, Burkholderia cepacia
MAQSTLYSRVLGTGSYLPPDRVTNQQLTDRLAKEGIETSDEWIVARTGIHARHFAAPDVTTSDLALEASRRAIEAAGVDPQSIDLIIVATSTPDFVFPSTACLLQNKLGIKNGGAAFDVQAVCSGFAYAMATADSFIRSGQHRTALVVGAETFSRILDFKDRTTCVLFGDGAGAVILSASEEPGVLGSALHADGSYSNILCTPGNVNRGVIDGSAFLHMDGQAVFKLAVNVLEKVAIEALAKANLAPEQIDWLIPHQANIRIMTSTCRKLGLPQERMVVTVDQHGNTSAASIPLALDAAVRDGRIQRGQHVLIEGVGGGFTWGASVFRF

SEQ ID NO: 48048 - protein, 1129 aa, Burkholderia cepacia
WVAASELDRARGKRVASSRRVAEHVAQAGAAVRPGAHAGLSPRRIVMTLAAAYLGLFQAGAHAQYSAGGGSATGGASSISVGNGSVATQVNSTAFGNLSTAAGTSATALGPGAHAMGDGSTAVGINAQATGVDSASLGVQAIGSGAYSVAIGNLSSATQSGAVAMGSGAAATGVAAIGLGNNAFASGQYAAALGLGASAAGAQSVALGYATHATDTGTVAIGNQATSTGSAGVAVGSGALATGNSGVAMGVNSGAKGTSSIAIGWGGTAGVPGSGTQSLGTSSIAMGSNTTAGADNALAFGLNANASGVSSIAMGVQSTATALFGVALGNLALATGTSATALGPGATASAVGATSIGINSVAAADWTVAIGASNSVAAGAGAGSIAGGNNSKVLGGTGAVALGQGQTVSGDGAVAIGDPSSAIGTGAVTMGSNNTANGNGAVAIGNTNNAQGTGSLALGNTSTAAAAGAIAFGASAVANNANDVALGSGSVTDVPHPTATGTLGGVTYNYNGTNPTSVVSVGAAGTERQITNVAAGRVNSASTDAINGSQLAATNTALDSLSTSTASSITSLSTGVSSLSTGLSSTNSAVTSLSTSTSTGISSLSTGLSSTNSAVTSLSTSTSTGISSLSTGLSSTDSTVTSLSTSTSTGLSSANSSITSLSTSTSTGINSLSTGLSSTDSTVTSLSTSTSTGLSSANSSITSLSTSTSTGIGSLSTGLSSTNSAVTSLSTSTSTGIGSLSTGLSSTNSSVTSLSTSTSTGISSLSTGLSSTNSTVTSLSTSTSTGISSLSTGLSSTNSSITSLSTSTSTVVGSLSTGLSSTNSNLTSLSTSTSTVVGSLSTGLSSTNSSITSLSTSTSTVVGSLSTGLSSTNSNLTSLSTATSTGISSLSTGLSSIANNNTNLGNSTAGAIGGGATYDPTTGTISAPSYVTYNSDGSTTINNNVGSAIDNINAHGIKYFHANSTAPDSQAVGVDSVAIGPNAISKVDGSIALGSGSVADRAVVPSSGILRNGSASIPFDTTDQTLLGAVSVGDATNKTYRQITNVADGTGQQDAVTVRQLTGALQSFAVTGQKYFHANSTAADSFAAGAESVAVGPTTVVNGDHGVGIGNGAIVDQTAPGGVAIGHAA

SEQ ID NO: 48049 - protein, 179 aa, Burkholderia cepacia
HRTIRRRASSALTLALVAVGMFMAVLDSTIVNVALPAMRTSLGATVAELAWIVDAYTLSFAALILAGGALSDRFGAKHVYLAGLALFVAASAACGGASSVAILVVARFGQGMGAALFLPASLAIVRSTFDVPAERARAIAVWAGIASVAVAVGPVLGGILVDDFGWRSAFLINVPTGAV

SEQ ID NO: 48050 - protein, 371 aa, Burkholderia cepacia
MALETFVNSEPFTFGVELEIQVVNTHNYDLTKAASDLMRLIQGETFPGNITPEITESMIELSTGICHSHEQAVSELHAIRDVLVKAADQLNVGLAGGGTHAFQQWSDRQIYDAPRFQYISELYGYLAKQFTVFGQHVHIGCPDPDSALFLLHSMSRFIPHFIALSASSPFVQNVDTGFHSARLNSVFAFPLSGRAPFVLTWDSFEEYFTKMVNTGVVNSMKDFYWDIRPKPGYGTIEVRVMDTPLSVDRAAAIACYIQTLARYLLTDRPLKLSEDDYLVYTFNRFEACRFGLEGTCVNPQTGERRTIAEDILDTLDRIAPHAAALGSRAALDEIGALAKARVNDASWLRTVFKQEKSLNETVRQQCLRWRE

SEQ ID NO: 48051 - protein, 62 aa, Burkholderia cepacia
FRTTDVTGSIELQKDKEMVMPGDNVSITVKLIAPIAMEEGLRFAIREGGRTVGAGVVAKIIE

SEQ ID NO: 48052 - protein, 398 aa, Burkholderia cepacia
MNTTADSLVTLAARVDAIQPFHVMELMKEAQRLESLGRDVIHMGIGEPDFTAPEPVVEAAAAALRRGVTQYTSALGIAPLREAIAAHYAHAYGLTISPERIVVTAGASAALLLACLALVGRDDEVLMPDPSYPCNRHFVAAAEGRPVLVPSGPDARFQLTEHDVRTHWNDRTRGVLLASPSNPTGTSLEPDELKRIVEAVRARGGFTIVDEIYQGLSYDAAPVSALSFGDDVITVNSFSKYFSMTGWRLGWLVVPPALVGTFEKLSQNLFICPSALAQHAALACFEPATLDIYETRRLEFKRRRDFIAPALERLGFTVPVMPDGAFYVYAHCGGVAHPAAGDSAALTQAMLHDAGVVLVPGMDFGVHAPRDYIRLSYATAYSRLEEAVDRLATLFGEH

SEQ ID NO: 48053 - protein, 591 aa, Burkholderia cepacia
MAAIKTSLPRRKFDVVIVGAGGSGLRAALQLSRAGLSVGVLSKVFPTRSHTVAAQGGIGASLGNMSEDNWHFHFYDTIKGSDWLGDQDAIEFMCREAPNVVYELEHFGMPFDRNADGTIYQRPFGGHTANYGEKPVQRACAAADRTGHALLHTLYQQNVEAKTQFFVEWMALDLIRDADGDVLGVTALEMETGDVYIMEGKTTLFATGGAGRIFAASTNAFINTGDGLGMAARSGIALQDMEFWQFHPTGVAGAGVLITEGVRGEGGILRNANGERFMERYAPTLKDLAPRDFVSRSMDQEIKEGRGVGPNKDHVLLDLSHIGAETIMKRLPSIREIALKFANVDAIKEPIPVVPTIHYQMGGIPTNIHGQVVGTSRGHKDPVNGFYAVGECSCVSVHGANRLGTNSLLDLVVFGRAAGNHIVEHVKNQKEHKPLPADAGEFSLARLAKLDKSTSGEYTQDVANDIRSTMQKHAGVFRTSELLKEGVDQMAGLKARVENIHLKDKSKVFNTARVEALELENLIEVARATMVSAEARKESRGAHAHSDYEHRDDENWLRHTLWYSEGDRLDYKPVQMKPLTVESVPPKPRTF

SEQ ID NO: 48054 - protein, 228 aa, Burkholderia cepacia
MTARRAPAVNRDVLEQMLVEGTAALDLTLTDAQRNQLLDYVALLGKWNAVYNLTAIRDPKQMLIQHILDSLSIVPHLRGRTSARVLDVGSGGGLPGIVLAIVEPGWQVTLNDIVQKKSAFQTQMRAELKLVNLSVVTGRVESLQPGVEVPEKFDMIVSRAFADLSDFVKLARHLVAPGGSIWAMKGVHPDDEIARLPEGSHVKQTIRLAVPMLDAERHLFEVAVDDAN

SEQ ID NO: 48055 - protein, 1765 aa, Burkholderia cepacia
MLPASAVPASVGVVSSVVAPVVSSPTIEPTSSVTLTTIGAAGAVRSETVTEPDGPVLPAASVAVTPITVPIGSGVDGVYVHAPLGSAVTVASGVPSPFVSILTVAPASAVPDNDVPSVAFTVGNAGAVVSTVSSKAVLGVLTLPAVSVAVTVIECAPSPKPVAGVNVQFPDGSAVVVPSNVVPSYTLTVLPASAVPASVGVVSSVVAPVVSRPTIEPTSSVTLTTIGAAGAVVSPVTVTEADGPVLPAASVAVTPITVPAGSGVDGVYVHAPLGSGVTVASGVPSPFVSMLTVAPASAVPDSDVPSVAFTVGIDGAVVSIVRLKAVLGTLTLPAVSVAVTVRLCAPSPKPVVGVNVQFPDGSAVVVPSNVVPSYTLTVLPASAVPASVGVVSSVVAPVVSRPTVEPTSSVTLTTIGAAGAVVSPVTVTEADGPVLPAASVAVTPITVPIGSGVDGVYVHTPLGSAVTVASGVPSPFVSMLTVAPASAVPDNDVPSVAFTVGIAGAVVSIVTLKAVLGTLTLPAVSVAVTVRLCAPSPSAVVGVNVQFPDGSAVVVPSNVVPSYTLTVLPASAVPLNVGVASSVLPPEMIAPTTEPTSSVTVPMIGAAGAVVSPVTVTEADGPVLPAASVAVTPITVPAGSGVDGVYVHAPLGSAVTVASGVPSPFVSMLTVAPASAVPDSDVPSVAFTVGNAGAVVSIVRLKAVLGTLTLPAVSVAVTVRLCAPSPSAVVGVNVQFPDGSAVVVPSNVVLSYTFTVLPASAVPASVGVVSSVVAPVVSSPTIEPTSSVTLTTIGAAGAVVSPVTVTEADGPVLPAASVAVTPITVPAGSGVDGVYVHAPLGSAVTVASGVPSPFVSMLTVAPASAVPDSDVPSVAFTVGNAGAVVSIVRSKAVLGVLTLPAASVAVTVRLCAPSPKPVVGVNVQFPDGSAVVVPNNVVPSYTLTVLPASAVPLNVGVASSVLPPEMIAPTTEPTSSVTVPMTGAPGAVVSPVTVTEADGPVLPAASVAVTPITVPAGSGVEGVYVHAPLGSAVTVASGVPSPFVSMLTVAPASAVPDSDVPSVAFTVGNAGAVVSIVSSKAVLGTLTLPAVSVAVTVRLCAPSPKPVVGVNVQFPDGSAVVVPNNVVPSYTLTVLPASAVPLNVGVASSVLPPEMIAPTTEPTSSVTVPMTGAPGAVVSPVTVTEADGPVLPAASVAVTPITVPAGSGVEGVYVHAPLGSAVTVASGVPSPFVSMLTVAPASAVPDNDVPSVAFTVGIAGAVVSIVRSKAVLGTLTLPAVSVAVTVRLCAPSPSAVVGVNVQFPDGSAVVVPSNVVPSYTLTVLPASAVPLNVGVASSVLPPEAIAPTTEPASSVTVPMTGAPGAVVSPVTVTEADGPVLPAASVAVTPITVPAGSGVEGVYVHAPPGSAVTVASGVPSPFVSMLIVAPASAVPDSDVPSVAFTVGIDGAVVSIVRSKAVLGTLTLPAVSVAVTVRLCAPSSKPVVGVNVQFPDGSAVVVPNNVVPSYTLTVLPASAVPLNVGVASSVLPPEAIAPTTEPASSVTVPMTGAPGAVVSPVTVTEADGPVLPAASVAVTPITVPIGSGVDGVYVQTPLGSAVTVASGVPSPFVSMLTVAPASAVPDSDVPSVAFTVGSAGAVVSIVSSKAALGVLTLPAASVAVTVIECAPSPKPVVGVNVHFPDESAVVVPSSVVPSYTLTLLPASAVPPSVGVVSLVAPPIVTGCCASSLTAVIAGVFCTIVSTTIPTVLSSLVLPLLSVCVTVI

SEQ ID NO: 48056 - protein, 249 aa, Burkholderia cepacia
MITDRRSNPGEPALPPRIAPPALKVIEQETMADKVYQQLREALMSGRFAPGQALSLRSVAEAVGSSTMPVRAALTRLRAERALVDGPNRALVVPPMTLDMLDELRDVRIALEGCIAERACARMTDAQIAAVRKTCETMQAHAEAGRSRAYLQSNFAFHSAIYAHGASESTLAIVENLWMRVGPFLNMVALDIPHMRRSMDAHRAIVDALERRDGAGVRAGIALDIGGAAHDLAETLRAEQTPRTVNAKP

SEQ ID NO: 48057 - protein, 526 aa, Burkholderia cepacia
SSAHAADTKKVDVLLVGGGIMSSTLGVWLHELQPDWSMTMVERLDGVALESSNGWNNAGTGHSALAELNYTPEKADGKVDISKAIEINESFQISRQFWAWQVKQGVLKNPHSFINSTPHMSFVWGDDNVRFLKKRYEALQASPLFRGMQYSEDYDQIKQWVPLMMEGRDRNQKVAATWTPIGTDVNFGEITRQFVGYLKTQPNFTLSLSSEVREITRNADGTWHVSWVKLHSDEPPQAVDAKFVFIGAGGGALHLLQASGIPEAKDYGAFPVGGSFLVTDNPEVVKQHLAKAYGKASVGSPPMSVPHLDTRIIDGKKIILFGPFATFSTKFLKNGSYFDLAKSTNLHNVAPMMRVGVDEFPLVQYLAGQLMLSDDDRFNALKEYFPNAKKEDWRLWQAGQRVQIIKRDPVKGGVLKLGTEIVASQDGSIAGLLGASPGASTAAPIMLNLMKKVFKDKVATPEWQQKIRQIVPSYGTRLNDSPAKVVEEWTYTSDVLQLSPPRRSTSARRRRPPEPCRSPRRTLSPS

SEQ ID NO: 48058 - protein, 217 aa, Burkholderia cepacia
MMSLGLVGRKVGMTRIFTAEGDSIPVTVLDVSDNRVTQIKTVETDGYTAVQVAFGSRRASRVTKPLAGHLAKAGVEAGEILKEFRIDAAKAAELSNGAVVGADLFEVGQKVDVQGVSIGKGYAGTIKRYNFSSGRATHGNSRSHNVPGSIGMAQDPGRVFPGKRMTGHMGDVTVTVQNLEIARIDAERKLLLVKGAIPGAKGGKVFVTPAVKTKGAK

SEQ ID NO: 48059 - protein, 452 aa, Burkholderia cepacia
MRSMRRRRTIRLTYIAGASASDLAGRSRDGRRLHEAGQAVHRVLRSTALHGAGVSAKALTPVDNGERQMTLSITSNFDAGAIDVVSCERPDAIRLRVRGDNRSEFAQWFYYRLTGARGERCVMTFENAAECAYPSGWRNYHAVASYDRVDWFRVPTTFDGKTMTIDHTPEFDSIYYAYFEPYSEERHAAFLGAVQQLPQASVVELGRTVEGRPMSLLTLGTPETDDAPKKKVWIIARQHPGESMAEWFVEGLVKRLAGWGDWAGDPVARKLYDRVTFYIVPNMNPDGSVHGNLRTNAAGANLNREWMAPDAERSPEVLAVRDAIHAIGCDMFFDIHGDEDLPYVFVAGSEMLPSFTEQQGKEQAAFIDAFKVASPDFQTEHGYAASKYKEDALKLASKYIGHQFGCLSLTLEMPFKDNANLPDERVGWNGERSAALGAAMLAAILVHVDTFA

SEQ ID NO: 48060 - protein, 514 aa, Burkholderia cepacia
MRRPPFSSFASVSRPCGRARRGGDACAPFSPDRLPAPTSGQPRGSHGPRPRRRPLFRSSRSTLMANLAQARTDEDLDLSTLAIPDHARMPPFALTMAWWAVCSAVFYIVVGATLALTYGARNALIGMALSVVSYGIVNSIISRYAIRTGLSVALFSRVLFGSAGAALATLIFFATAIYYAVFEGSVIAVAAHHQFPALDYKWAALIVVCYSVPLVFGSVQHWLDKFNGVLLPFYLFGLLAAVGLATAEYGYHAAWLDFGPAGGAPAGGWWQCFVYYMGVWVLMMFTFDYARFGRKADARYHGRFNFGMPFYLVTFLVNGAAGIYLVSTIPGLGTLSEVSVVLALLKLMGVWGLLFVWVTQSRINTANYYLATVNMQAFFQKVAGLRAPKFVWAVVVGAVVYALMMADIFSRILQALAYQGIFVVAWVGVALAHILSARYGQLVGDDVECRDAHVPVFNPGGLTAWFAGAFAGLALNQATGFAASLSAPATFVVSWLVYRALLGTAKRTWFVRNT

SEQ ID NO: 48061 - protein, 455 aa, Burkholderia cepacia
MNADTGLPLPQRYWAIVCVALGITLAVLDGAIANVALPTIARDLHASDAASIWIVNAYQLAVTITLLPLASLGERIGYRRIYIAGLALFTAASLGCALAGSLPMLAVMRVIQGFGAAGIMSVNAALVRMIYPSSLLGRGLSINAMVVALSSAIGPTVASAILSFASWPWLFAVNVPIGIAAVLGSLRALPANPLHDAPYDFPSALMNACVFGLLITAVDGLGHGEGHAYVAAELAVAFVVGYFFVKRQLSQPAPLLPVDLMRIPMFALSVYTSTASFTSQMLAFVALPFWLQHSLGFSQVETGLYMTPWPLVIVFAAPLAGVLSDRYSAGILGGIGLALFAAGLLSLATIGAHPGTVDIVWRMALCGAGFGLFQSPNNRAMLSSAPRERSGGAGGMLSTARLTGQTLGAALVALIFGLAPDRGPTIALYVATVFAAVAAVVSLLRIASPRPDTAT

SEQ ID NO: 48062 - protein, 263 aa, Burkholderia cepacia
MSYQAIQLDIDQAAGVATITLNRPDKLNSFTRAMHRELQSALDEVEAAGARALILTGAGRGFCAGQDLADLDFTPGASTDLGTLIDEHFNPLIRRLQRLPIPVIAAVNGTAAGAGANLALACDLVFAARSSSFIQAFVKIGLVPDSGGTWFLPQRVGMARALGLALTGDKLGAEQAEQWGLIWRAVDDEALVATTRQLATQLAQQPTLAIASIKQSMRDSVTNTLDQQLDLERDLQRKLGQSHDYAEGVQAFIGKRAPRFEGR

SEQ ID NO: 48063 - protein, 226 aa, Burkholderia cepacia
MTTTELVALLHLASPALPIGAYSYSQGLEAALDANLIRDADSARDWIASGLTDVLAHGELPFLAHQLARWQTDDTHALAAENAWFVASRESAELRRETEQMGWSLAQLCASLEWGDAARRATLASLSPIALPTAFAYAAAAHDASADATLAAYAFGWVENQTSAALKAVPLGQLAGQRIIVALRGAIDAAVRRALATPPDAVNTFAPQLGILSARHETQYSRLFRS

SEQ ID NO: 48064 - protein, 648 aa, Burkholderia cepacia
RAVVFAYHNVGVRCLQVLLARGVDVALVVTHEDNPNENIWFGSVASVAAEHGIPVVTPADPADPALRRAVADAQPDFIFSFYYRHMLPVDLLAIAPRGAYNMHGSLLPKYRGRVPTNWAVLNGETETGATLHEMAAKPDAGAIIGQTAVPILPDDTAAQVFDKVTVAAEQTLWRVLPALLAGEASHLPNDLATGSYYGGRKPEDGRVDWSKPAAQVYNLVRAVAPPYPGAFTDIHGARFVIARARLAAPGSAAAAAAADLPPGLHVSDNALFGVCGDSRAPIHSRAPAAARRQRNRRDARGIRAVHSFFPSFMKAKKVLILGVNGFIGHHLSKRILETTDWEVFGMDMQTDRLGDLVNHERMHFFEGDITINKEWVEYHVKKCDVILPLVAIATPATYVQQPLRVFELDFEANLPIVRSAVKYGKHLVFPSTSEVYGMCSDEQFDPDASALTYGPINKPRWIYACSKQLMDRVIWGYGMEGLNFTLFRPFNWIGPGLDSIYTPKEGSSRVVTQFLGHIVRGENISLVDGGSQKRAFTDIGDGISALMKIIENKDGVASGKIYNIGNPKNNFSVRELAHKMLELAAEFPEYADSAKQVKLVETTSGAYYGNGYQDVQNRVPKIDNTMQELGWAPQATFDDALRNIFEAY

SEQ ID NO: 48065 - protein, 91 aa, Burkholderia cepacia
MARSVKKGPFCDAHLLKKVEAAAASRDKKPIKTWSRRSTILPDFIGLTIAVHNGRQHVPVYISENMVGHKLGEFALTRTFKGHAADKKAKK

SEQ ID NO: 48066 - protein, 385 aa, Burkholderia cepacia
ARPLRRGLGRYRHRRARGAPGRGARVRARMVWRASAGVIRIVRRPLVQRPLPAPLAGCDVPQWPTPGDLAGWLGVSAPELDWLSDHWRVDARSGATPLHHYTYVAVDKRSGGCRLVEIPKGRLREAQRRILRGLLDRIAPHGAVHGFRKGHGIVSFATPHADRDVVVRFDLADFFVSVRAARVHALFATLGYPAEVARILTGLCTNRVPSARLLAPDLRDRFDWIGRQRYRERHLPQGAPTSPALANLCAFRLDLRLAALARSVDATYTRYADDLAFSGGGALARDVERLQVRVAAIALEEGFALQLRKTRVMRRGTRQQLAGVVVNRHPNLSRDAFDRLKAILTNCIRRGPASQNRDAHPDFRAHLAGRVAHATALNAARGAKL

SEQ ID NO: 48067 - protein, 338 aa, Burkholderia cepacia
MWSHGRHASVAGHRRAGVPAIDREPPTMTGIVTVTLNPAVDVATSVEHIVDTHKLRCARPRRDPGGGGINVARTVHRLGGDCVALYLAGGPTGDVLTALLEAEHLPSERIRIAGETRENVCVTETATGREYRFLMPGPLVTGAEWRACAARTDAMQPSPRYLVLSGSLPPGAPDDLYATLARTAKARGSRVVVDAAGRALQAALKAGVHLVKPSIGELSALAGEPLDDTSACRKASELVARGQADIVALTLGARGAWVVTRDRTLRLPGRPAAVCSTVGAGDSFVGGMVWALACGVPFDDACRYALAASAASVERPGTALCTRDDVERIHAELVAQAS

SEQ ID NO: 48068 - protein, 213 aa, Burkholderia cepacia
MFDMFVQSFWETLIMVGISGAVGALVGLPLGVLLYLTDRQGVLQNLAVNRVLGGIVNAVRSTPFIILLVAVIPFTRLVTGSSIGTAAAVVPLTLAAAPFIARLVETALREVDRGLIEAAQSMGATTSQIVFKVLLPESLPGVVAGLTITFVSLVGYSAMAGAIGGGGLGDLGIRYGYQRYLPEVMWTVVAILIVFVQIVQSFGDWLVRRLSHK

SEQ ID NO: 48069 - protein, 628 aa, Burkholderia cepacia
MFSKAAVWLVIALVLFTVFKQFDKPRVQEGVSYSQFMDDAKNGKVKNVIVQGRNLTVTPADGQKYQIVSPGDIWMVGDLMKYGVQVSGKADDEPNALMSALYYLGPTILIIVFWFYMMRQMQGGGKGGAFSFGKSRARLIDENNNAVNFSDVAGCDEAKEEVSELVDFLRDPQKFQKLGGRIPRGVLLVGPPGTGKTLLARAIAGEAKVPFFSISGSDFVEMFVGVGAARVRDMFEQAKKHAPCIVFIDEIDAVGRHRGAGMGGGNDEREQTLNQMLVEMDGFEANSGVIVIAATNRSDVLDKALLRPGRFDRQVYVGLPDIRGREQIMRVHLRKVPIANDVDAAVIARGTPGFSGADLANLVNEAALFAARRGKRIVEMQDFEDAKDKIFMGPERKSAVIREEAKRATAYHESGHAVIAKLLPKADPVHKVTIIPRGRALGVTWQLPEHDNETYSKDYLLDRLAILFGGRVAEELFMNLVSTGASDDFNKATQTARAMVARFGMTDALGPMVYVDDENDASPFGRGFTRTISEATQQKVDSEIRRVLDEQYGLARRLLEENRDKVEAMTAALMEWETIDADQINDIMEGRPPRSPKSSPAVGGDSSGGGSSAEVKPGNAPAPATPAA

SEQ ID NO: 48070 - protein, 516 aa, Burkholderia cepacia
MKLNERLSTLPRDIVAGIVVFLVALPLCLGIANASGVEPFAGLVSGIVGGIVVALLSGSSLSVSGPAAGLVVIVVEGIAQLGSFSAFLLAVLLSGVLQFGFGMLRAGRFAAYVPSPVIKGMLAAIGLLLIVKQIPFAFGIGGSAAQSFANWPGLPVAWAATAIALASLALLVAWDTPALRRFALVRSVPAPLAVVVLGIGATLVLGVVAPAVAPGAAHRVTLPELGSFTAFAASLKHAELGPNFAQLVNPDVWRVAITLAVVASLETLLSLEAVEQIDPKRRPVQPDRELKAQGVGNLVAGAVGGLPITSVIVRSSVNVNAGAQSRMSAIVHGVLLLASVFALTGLINLIPLASLAAILIHTGFKLAKPALFRSVMKQGPAAFVPFAATIVGVLAVDLLFGIALGLACSVLAVAVANLKSPVTLAQHDDHFLLSFRKDVSFLGKVQVKHHLRHIPDRAAVIIDATRADYIDHDVLELLDAFVADAPRRGIAVEFRRRQPAPRTAARRWLFRAPAAE

SEQ ID NO: 48071 - protein, 347 aa, Burkholderia cepacia
MAYEAASERYAGMQYRTCGKSGLKLPALSLGLWHNFGDSTPISTQREILRTAFDLGINHFDLANNYGPPYGSAETNFGRLLKEDFRPYRDELLISTKAGWDMWPGPYGSGGGSRKYVLASLDQSLQRMGLDYVDIFYSHRFDAHTPLEETAGALASAVQQGKALYIGISSYSAAKTREMAALLAQYKVPLLIHQPSYNMLNRWIEEDLLGTLDDVGAGSIAFTPLAQGLLTSKYLNGVPADARVNKPGGGSLKQEHLSADNLEHVRKLNTIAERRGQSLAQMALAWVLRNGRVTSALIGASRAEQVRENVGALQNLEFSAEELAEIDRYATEGGINLWEKPSTDQAI

SEQ ID NO: 48072 - protein, 305 aa, Burkholderia cepacia
MADRDGKIWMDGKLIDWRDAKIHVLTHTLHYGMGVFEGVRAYKAADGSTAIFRLPEHTKRLLNSAKIFQMDVPFDRETLEAAQLAVVRENRLESCYLRPIIWVGSEKLGVAAKGNTIHVAIAAWPWGAYLGEDGLAKGIRVKTSSFTRHHVNVSMVRAKASGWYVNSILANQEATADGYDEALLLDVDGYVSEGSGENFFLVNNGKLYTPDLSSCLDGITRDTVITLAKDAGIEVIEKRITRDEVYTADEAFFTGTAAEVTPIRELDNRTIGSGARGPITEKLQSAFFDIVSGKNAKYAHWLTKV

SEQ ID NO: 48073 - protein, 320 aa, Burkholderia cepacia
MSSHSHDGLMVFTGNANPALAQEVVNILGIPLGKAMVSRFSDGEIQVEIQENVRGKDFFFLQSTCAPTNDNLMELMIMVDALKRASAGRITAAIPYFGYARQDRRPRSARVAISAKVIANMLEIAGVERIITMDLHADQIQGFFDIPVDNIYATPILLGDLRKQNYSDLLVVSPDVGGVVRARALAKQLNCDLAIIDKRRPKANVAEVMNIIGEVEGRTCVIMDDMVDTAGTLCKAAQVLKDRGAKQVFAYATHPVLSGGAADRIAASALDELVVTDTIPLSAESLACSKIRSLTSASLLAETFSRIRRGDSVMSLFAES

SEQ ID NO: 48074 - protein, 126 aa, Burkholderia cepacia
MTHTRPAFQMVTDMLRKALRRLQPDERPMLHSDQGWHYQMPGWRLMLEQRSLAQSMSRKGNCLDNAAMESFFGTLKSEFFYLNHFSSIEQLRIGLKRYIRYYNHERIKLKLKGLSPVQYRTQPHPA

SEQ ID NO: 48075 - protein, 126 aa, Burkholderia cepacia
MSSRLASRQGFRYDVNLQHDSTKGVAMSEINKEKLMSDIKTVLSDAEDLLKQAASSTGDRAAELREKAMSRLKQAKEKAADVQVVVVEKGKKAARATDDYVHEHPWTSIGEAAGVGVLIGLLINRK

SEQ ID NO: 48076 - protein, 125 aa, Burkholderia cepacia
THTRPAFHMVTDMLRKALRRLQPDERPMLHSDQGWHYQMPGWRLMLEQRSLAQSMSRKGNCLDNAAMESFFGTLKSEFFYLNHFSSIEQLRIGLKRYIRYYNHERIKLKLKGLSPVQYRTQPHPA

SEQ ID NO: 48077 - protein, 249 aa, Burkholderia cepacia
MDKTLDKQVAIVTGASRGIGRSIALELARLGATVIGTATSESGATAITAAFAEAGVTGRGAVLNVNDAAAAEALIDATVKEFGALNVLVNNAGITQDQLAMRMKDEDWDAVIDTNLKSVFRLSRAVLRPMMKARGGRIINITSVVGSAGNPGQVNYAAAKAGVAGMTRALAREIGSRGITVNCVAPGFIDTDMTKTLPEEQQAALKTQIPLGRLGSPEDIAHAVAFLASPQAGYITGTTLHVNGGMYMS

SEQ ID NO: 48078 - protein, 383 aa, Burkholderia cepacia
MGSNAGACKKARRVLRNLLDKHSQRRKSFDPICKNPGRRAIFADKSPDLPGILESRGPATGAVRAPPPQLLIQQVAAILPCRLPDVARPCHWVWRRTSSRPRNRPSRSTPRFMLPTVFIVSDGTGITAETFAHSILSQFDQKFRLVRVPFVDSLDKAYATVEKINEAAVHDGRRAIVFTTLVDSESNDIVKRSNALVLDMFQRFVEPLEQELELKSSHAMGRGHQNADTEEYKTRIEAINFSLAHDDGQSNRNLSEADVILVGVSRSGKTPTSLYLAMQYGVKAANYPLIPEDFERGKLPSALSPYSEKLFGLSIDPQRLSEIRNERRPGSKYAAPENCRYEINEAEAMMRREGIKWLSSTHKSIEEIATTILQEIRLDRQSY

SEQ ID NO: 48079 - protein, 247 aa, Burkholderia cepacia
MRFDDSDIAAVYRAIFERRDMRHFTPAPVDPAVLARLLRAAHHAPSVGFMQPWRFIRITDPALRTAIHALVEAERRATADALGERQDEFMRLKVEGVRECGELLVVALADGRERHVFGRRTLPEMDLASAACAIQNMWLAARAEGLGMGWVSLFDVDAVRTLLRMPDGAKPIAVLCVGHVDAFYAKPMLEEERWAARMPIEACLFENGWDAPAAIDGADSAASPAGPDSETKHTPDAMPDRSSERIA

SEQ ID NO: 48080 - protein, 330 aa, Burkholderia cepacia
MVSVEPARAEGRAPATSPIHPSQVPPPGMSLPGFHAPAVSDGTVSRGTVRVQPARMPFYVATKGKVTLYVLGTLHTGDPSDYPSAQPFRPRILAALAASPTLALELSPDDLLESQDDVSKYGVCRYPCLQRLLPEPLWQRLAARLRGNPAALAEIRKMRPWLAALVVETYDSLSAGLQTEYGTEAQLQNVFLKKKGGRVIGLETLAEQMRAFTGLTLAEQREMLAQDMVQTPAQNADDIKALHRLWRIGDADAISAWAVAKSERLARSKALSASLDNKIVYERNRRFVARMTAIAAPNRPLFVAIGALHLGGPRGVLELLRQQGYRVDAN

SEQ ID NO: 48081 - protein, 145 aa, Burkholderia cepacia
AARCIARGLAANVEIEPGPGRERKTGQRVAADAAAYWRDAAVAPLLSSFSFDALRQARATAPALPRGMLYEVVPDDWHAQVIDALDCVSLHADHTRLDESLVRAIKAAGLRILVYTVNDLERARELARWGVDAVCTDRIDLIAPD

SEQ ID NO: 48082 - protein, 350 aa, Burkholderia cepacia
MMDRRRRPTPLRFAAALARPVRTRRPARFFRIAMTTALDQLKQYTTVVADTGDFQQLAQYKPQDATTNPSLILKAVQKDAYKPILEKTVRDHRNESTDFIIDRLLIAFGTEILKLIPGRVSTEVDARLSFDTQRSIDKGRELIKLYEAAGVGRERILIKLASTWEGIRAAEVLQKEGIKCNMTLLFSLVQAAACAEAGAQLISPFVGRIYDWYKKQAGADWNEARDGGANDPGVQSVRRIYTYYKTFGYKTEVMGASFRTTSQIIELAGCDLLTISPDLLQKLQESNDTVARKLSPDTLQDKPAERVAIDEASFRFQLNDEAMATEKLAEGIRVFAADAVKLEKLIDALR

SEQ ID NO: 48083 - protein, 491 aa, Burkholderia cepacia
RRSRWSVRFTCWASFARAVSFGSRFISMESLRIYNTLARDKQVFVPRQSGEVRMYVCGITVYDYCHVGHARMLVVFDLVQRWLRAIGYRVTYVRNITDIDDKIIRRAVENGETIKSLTDRFIGAMHEDESALGIQRPDIEPRATQFIPQMLGMIETLETNGYAYQASDGDVNYSVRKFTNYGKLSGKSLDDLRAGERVAANDAKEDPLDFVLWKRAKPEDPEGASWASKYGMGRPGWHIECSAMGCSLLGNHFDIHGGGQDLQFPHHENEIAQSEGATGETFVNYWMHNGFVQVDNEKMSKSLGNFFTIREVLERYDAEVMRFFIVRTHYRSPLNYSDVHLDDARASLTRLYTALKDVDADTLALDWNEPHAQRFAAAMNDDFNTPVAVATLFELAGEVNRTRDASLARQLKQLAGLLGLLGREPRAFLQQASGAAQAGGLAADEIEAKIAARVAAKQAKDYAEADRIRAELLEARIALEDKPGGSTEWRR

SEQ ID NO: 48084 - protein, 321 aa, Burkholderia cepacia
KVLTVSCDVYRPAAIMQLKTVTEQVGADFFPSTPDQKPVDIALAAVDWAKRHYHDVLLVDTAGRLGIDEAMMQEIAALHGTLKPAETLFVVDAMLGQDAVNTAKAFNDTLPLTGVVLTKLDGDSRGGAALSVRHVTGKPIKFVGVAEKLDGLEVFHPDRMANRILGMGDILALVEEAQRGVDVQAAQKLADKVKKGGDFDLNDFRAQISQMKNMGGLSSLMDKLPAQFQQAAAGADMGQAEKSIRRMEGIISSMTPAERAKPEIIKATRKRRIAAGAGVPVQEVNRMLNQYDQMRTMMKKLKGGNMQKMMRGLKGMMPGMR

SEQ ID NO: 48085 - protein, 332 aa, Burkholderia cepacia
MKVAVLGAGAWGTALAGHLAARHDTLLWARDAALIAGLQARHENSRYLDGIALPDALRYDADLGVALAHGAADDALCVIAAPVAGLRTLCHAMRDAGCVPAHIVWVCKGFEADTHLLPHQVIAAELPGQQSNGVLSGPSFAREVGQSLPVALTVASTSAGCRERTLAAFHHGAMRIYTGDDVVGVEVGGAVKNVLAIATGISDGLGLGLNARAALITRGLAEMSRLGVALGGRAETFTGLTGLGDLILTATGDLSRNRTVGLQLAAGRTLNDILGALGHVAEGVRCAQAVLALARAQSIEMPIAEAVCGVLFDGIAPRDAVSGLLRRDARAE

SEQ ID NO: 48086 - protein, 185 aa, Burkholderia cepacia
  MISC_FEATURE (158)..(158): X=any amino acid
MASVNKVILVGNLGADPEVRYLPSGDAVANIRLATTDRYKDKASGDFKEMTEWHRVAFFGRLAEIVSEYLKKGSSVYIEGRIRTRKWQGQDGQDRYSTEIVAEQMQMLGGRGGSGGGGGGGDEGGYGGGYGGGGGGGRGEQAERGGGGRAGGGGAARXGAGGGGQSRPSAPAGGGFDEMDDDIPF

SEQ ID NO: 48087 - protein, 173 aa, Burkholderia cepacia
MYGVLFLLPLTWQSVGRLDSTGAGLALLPMALVFVVVSPWSGPLSERIGTRATTAGGVAVIASGLAAIGASAESASLLGAEIGLALTGLGMGIATGPLMTVAVGAVDAARSGTASALVNVARMTGATLGIAVLGTAFAAAHGGAAGLRVAMLAGAAVQLTGAAVSAVSVQRAA

SEQ ID NO: 48088 - protein, 215 aa, Burkholderia cepacia
GLPARADLMLPFLKSISYPLGVWGFIVLTYFVIVGASNAVNLTDGLDGLVIMPVVLVGASLGVFAYVMGSAVYSKYLLFPHIPGAGELLIFCSAMGGAGLAFLWYNTHPAQVFMGDVGALALGGALGTVAVIVRQEIVLFIMGGIFVAETLSVMLQVSWFKYTKKRYGEGRRLLKMAPLHHHFELSGWKETQVVVRFWIITLMLCLFGLTTLKLR

SEQ ID NO: 48089 - protein, 369 aa, Burkholderia cepacia
MTALPTPDTEPLRMRAESLHAFVAALWERAGSHPREATLVADHLVGANLAGHDSHGIGMIPNYVASWREGQLQLNGHASIVRDGGAVLTIDGGRGFGQVIAFEAMVEGIERARRMGICAIGLRDVHHLGRIGHWAEQCARAGLVSFHFVNVPGDLLVAPLHGTDPRFGTNPLCAAYPRAGKPPLLLDFATSAIAYGKTRVAYNQGKRVPAGSLIDHRGQPTDDPAVMHEQPFGALLPFGLHKGYALAAMCEIFGGALVGGHTTYGDTLQKTSAIVNGMLSVLIDPNAFDAADAEREADAFVAWAKASPRAGDAPVQVPGEPEEASRAARGTAGIPVDRATWRQIRESAAAVGVDAAEFDAWTQRCEASA

SEQ ID NO: 48090 - protein, 520 aa, Burkholderia cepacia
IFILPFVLFSATSGQIADKYDKATLTRFVKTFEIVLMLVGAAGFVTHSATLLYLCTFMMGMHSTLFGPVKYSYLPQHLGEHELVGGNGLVEMGTFIAILIGTIIGGAAARHRGQRRAVLAVSVVAIALAGRLVAQRVPSTPAPQPDLVINWNPISETWRNLGLARQNRTVFLSLLGISWLWFVGATFLTSFFNFAKDVLSASPDVVTILLATFSVGIGLGSLLCERLSQRRVEIGLVPLGSIGISVFAIELYFASHALPSPGHLLSVGEFLAGARHWRILADLFLLAMFGGFYSVPLYALIQSRSAPTHRARIIAANNILNALFMILSAVMAMGLTKAGVDIPGLFLVTALLNVVVATYIYLLVPEFLLRFVAWVLVHTFYRIRLVHAERIPAEGAAVLVCNHVSYVDALVLAAASPRPIRFVMDHRIFKTRFASWVFRHAKAIPIAPRHEDPAMLARAYDLCEAALKDGELVCIFPEGKLTKTGDINTFHHGITEILSRTPAPVIPMALRGLWGSYFSR

SEQ ID NO: 48091 - protein, 209 aa, Burkholderia cepacia
MKFRFPVVIIDEDFRSENISGSGIRALAEAIEKEGVEVLGLTSYGDLTSFAQQSSRASCFILSIDDDELMLGEIGPDGELPELATAIIELRAFVTEVRRRNADIPIFLYGETRTSRHLPNDILRELHGFIHMFEDTPEFVARHIIREAKVYLDSLAPPFFKELVKYADEGSYSWHCPGHSGGVAFLENPLGQMFPQFFGENMLRAAVCH

SEQ ID NO: 48092 - protein, 358 aa, Burkholderia cepacia
  MISC_FEATURE (21)..(21): X=any amino acid
  MISC_FEATURE (22)..(22): X=any amino acid
  MISC_FEATURE (24)..(24): X=any amino acid
MGHIRGEGSEGGESGSERFSXXKXVRQPPESPEERRFVGACFLEEIFVTQRILEPTEISALDHSAIPRFRLPERATAFAARAARLRKLADLNPISGYLRLMATVADAQHATLQALELPLPSKEAIARAQEHSMPLVPALDGERDARWRAVLYELLDRVESAGLVNPQLAKLLDRLRLMAPAELDAQADAILALRFAEVDPATAPFLMAALQVAWTDLASRVTPTDVPYLDQPGLCPVCGTHPVASVVRVGGQYQGYRFLQCGLCTTEWHMVRTKCSHCDSTKGIAYHGIEGGSEAIKAESCDECKTYRKIGYQEKDYEFEPLADDLASLTLDLLMNEAGYQRSSPNPLLWPDVSREAD

SEQ ID NO: 48093 - protein, 445 aa, Burkholderia cepacia
MKLVNVLATGSEASPDAKTYTIKLRPGVKFHDGTDFNAAAVKANFDRVTDPANHLKRYNMFRVIEKTEVVDPTTVKVTLREPFSAFINTLAHPSAVMISPAALKKWGRDIALHPVGTGPFEFVEWKQTDDLKVKKFAGYWKKGYPKIDAIDWKPVVDNNTRAALMKTGEADFAFRIPFEQAADLKGNAKVDVVERPSIVQRYVSLNMLQKPLANQKVRQALNYAVNKEALAKVAFSGFATPSTGVVPQGVDYATKLGPWPYDPAKARALLKEAGYPNGFETTLWSAYNNSTSQKAIQFVQQQLAQVGVKVQVQALEAGERVAKVESAPDPAKAPVRMYYIGWSSSTGEANWAITPLLAGASAPPKLVNTAYYKNDTVDGDLTKALETVDRTKKAELYADAQKQIWADAPWIFLVQEKIVYARSKRLQGAYVMPDGSFNFDEISLK

SEQ ID NO: 48094 - protein, 187 aa, Burkholderia cepacia
MSATRLDTNTALVVIDLQKGIVALPTAHPVAPVIARTRELLDAFRSRGLPVVLVNVAGGAPGRTEQAPRTAQLPADWTELVPELNRQPTDHVVTKQTWGAFTGTGLDAHLKAAGVTQIVLTGVATSIGVESTARQAHELGYNVTLAVDAMTDLNADAHVNSVERLFPRLGETGTTQDIVALLDRRGA

SEQ ID NO: 48095 - protein, 520 aa, Burkholderia cepacia
MNIIWARFLVSLVLLVLIGVLVGVFAGPTAGLVFVVVMLVAQGFFSTFHTQRLWRLLDAPVYGEVPSAPGIWGEIYYRLHKLAKQWHAQVRQVEQQHSRFIQAIQASPNGVAMLDDHDQIEWCNAIAEVHFGLDAKRDLRQHITNLVRHPDFVRYLNAQHYDETLLMRGMGDSRQNVLAVQVFPYGENRKLLLTQDITELERTDAMRRDFVANVSHELKTPLTVLSGFLETMRELPLNEEDRARYLDMMEQQASRMRHIVTDLLVLAKLEGESKPPVDHAIDMRAVFDHLKEDAQTLSSGHHDIAFSIDETLGVTGAQTELFSAFANLVTNAIRYTPDGGKIVVSWRREGAQGVFSVTDSGFGIPAADLPRLTERFYRVDRSRSRDTGGTGLGLAIVKHVLQRHDAHLYVQSEEGRGSTFTARFPGSRIIAIRRGRLRSMIASRSGVKKAARGLLFSWRCGTSPALHRRLTNRTSRAARVARCESSCPRGAGDSGRRCASAMPTGCRRGTPTAPRRSRAA

SEQ ID NO: 48096 - protein, 432 aa, Burkholderia cepacia
MTTPLPLEPIETASRDELTALQLERLKWSLRHAYDHSPVYRRKFDEAGVHPDDLKTLADLSRFPFTTKGDLRDSYPFGMFAVPQDRISRIHASSGTTGKPTVVGYTAADIDTWANLVARSIRAAGARRGDKVHVSYGYGLFTGGLGAHYGAERAGLTVIPFGGGQTEKQVQLIQDFRPDIIMVTPSYMLSIADEIERQGLDPVQSSLRIGIFGAEPWTNDMRVAIEQRMGIDAVDIYGLSEVMGPGVASECVETKDGPTIWEDHFYPEIIDPETGEVLPDGELGELVFTSLTKEALPIIRYRTRDLTRLLPGTARTMRRMEKITGRSDDMMIVRGVNVFPTQIEEQLLKQRALAPHYQIVLTKEGPLDVLTLNVEPCPETAPDTAAIQVAKQALAYDIKSLIGVTAVINVLPVNGIERSVGKARRVVDKRKG

SEQ ID NO: 48097 - protein, 337 aa, Burkholderia cepacia
MRACRPALSDAPGASTYPPRPRGHQTARRTMIYSMTGYASATRELVTATGNGGTSVSVELRTVNSRFLDLNFRMPDDVRACEPALREMLMNKLSRGKVDVRINLQRGEQSIGAGALNQSALGQLAELERAVLDSFPGVGRLRAGEILRWPGVLAESGVSAEAIRDAVLACGKEAIGELVVVRSREGAQLATMLLSNVTEMEAIVARITPLVPELIAKHQQKIVERLQEALGLAAPEGGSTVVTREEAAERIRQEVTMYGIRIDIAEELSRLTAHLNETRHVIEKGGRVGKRLDFMMQELNREANTLGSKAAAKELADASMALKLLIEQMREQVQNLE

SEQ ID NO: 48098 - protein, 204 aa, Burkholderia cepacia
  MISC_FEATURE (2)..(2): X=any amino acid
  MISC_FEATURE (3)..(3): X=any amino acid
MXXAPPSVVYVPPDQPEPITLADKIVLLHAGADTAQHGSIAQVGAPLDLYPPPASRFVAGFIGSPRMNFLPAVVTACDAQRTTVKLVPSGETFALPRDGSALSAGAAVTLGVRPEHLTLGAAADATTLARDVALVERLGEQTYVHLDSPGLPDATPLIAKVPGDAQVRTGERVHVHAPAAACHLFTEDGRAVPACADVHVHHYA

SEQ ID NO: 48099 - protein, 127 aa, Burkholderia cepacia
MHSHGIVLFGHGARDPRWAEPFERLAARLRGAGSPAAQVSLAFLELMTPSLGDAVAAQVAAGCTRITVVPVFFGQGGHVRRDLPQLVDACRAAHPGVEIRCATAVGEDDGVLDAVARYCVGQLGGDA

SEQ ID NO: 48100 - protein, 400 aa, Burkholderia cepacia
MPLTDVTIRKASPREKPYRLADGGGMYLEVSPSGGKYWRFKYRFAGKEKRLALGVYPDVPLAAAREKRDEARKTLAGGVDPGEAKKAEKRAALLAATNSFEAVALGWMEERKPYVTSGSWGKTKARFVKDVFPWLGKRPIAEIDAPEVLTVLKRIDSRGARFTAHKVRSEISRVFRYGIKEGYCKVDAARDLTDAIPPAQTTHFASITDPEKVGAMLRAFDGFSGTFPVLCALKLAPMLFTRPGELRKAEWAQFDLDKGEWRYLVTKTKTEHLVPLAQQAIQILRELHALTGSGRYVFPGARSALRPMSDAAVNAALRRLGYDTRTEITGHGFRAMARTILHEELEQKPEVIEHQLAHAVPDNLGKAYNRTKFIKERRAMMQKWADYLEKLKADIGAHTN

SEQ ID NO: 48101 - protein, 258 aa, Burkholderia cepacia
MTRFSDEARQRAGPERGDEPRQRSQQPVRERREAPRRSDDARQEKDRRVDGQLVAEVHEDREPDLRIAQRGAERMAAVRGDARVLFGGQLVLERTTGFRSEPRRGARPVRQSHPYDEREQDRRNAFDDEQPLPAVEAERAVELDQRAGQRPADDVGDAHAEQEIAGGARTFLAAEPVRQIQHHAGKQAGFGHAEQQAHHVERRFAADERHRDRQRAPRDHDPRDPEACADAMHDQVARDLEERVGQEKQPRAESVRGR

SEQ ID NO: 48102 - protein, 129 aa, Burkholderia cepacia
MTTDTHSQPSGQGPLRRLVGSAIGLLQTRLELVGIELAEEKERLMGVLFLGLAAMMLATMALISLTVLIAIAFWDTYRWQALAAITALYAVGGIVCALKARSGLRDAPTVFEATLAELEKDRDLFRGKP

SEQ ID NO: 48103 - protein, 247 aa, Burkholderia cepacia
MNLSQRLAAEVFGTFWLVLGGCGSAVLAAAFPGLGIGFAGVALAFGLTVLTMAFAIGHISGCHLNPAVSVGLTVAGRFPARDLAPYIVAQVVGATLGAFVLYLIATGKPGFDVVGSGFATNGFGDRSPGHYSLAASFICEVVMTGFFLFVILGATDKRGVPAGFAPIAIGLCLTLIHLISIPVTNTSVNPARSTGPALFVGGDAIGQLWLFWVAPLIGAVLAGIIYPLVAGRDDAVDLLPASARTSE

SEQ ID NO: 48104 - protein, 513 aa, Burkholderia cepacia
MQLNPSEISELIKSRIQGLEASADVRNQGTVISVTDGIVRIHGLSDVMQGEMLEFPGNTFGLALNLERDSVGAVILGEYEHISEGDIVKTTGRILEVPVGPELVGRVVDALGNPIDGKGPVNAKLTDAIEKIAPGVIWRKSVSQPVQTGIKSIDAMVPIGRGQRELIIGDRQCGKTAVALDAIINQKGKDLICIYVAIGQKASSIMNVVRKLEETGAMEYTIVVAASASDSAAMQYLAPYAGCTMGEYFRDRGQDALIIYDDLTKQAWAYRQISLLLRRPPGREAYPGDVFYLHSRLLERAARVSEEYVEKFTNGEVKGKSGSLTALPVIETQAGDVTAFVPTNVISITDGQIFLETDLFNAGIRPAINAGVSVSRVGGAAQTKVVKKLSGGIRTDLAQYRELAAFAQFASDLDEATRKQLERGRRVTELLKQPQYQPLQVWELAVSLYAANNGYLDDLDVKQVLSFEKGLRDNLKTSHADLIKRIEDTKDLSKDDEGALRSAIEAFKKSGAY

SEQ ID NO: 48105 - protein, 422 aa, Burkholderia cepacia
MLHQIIDRRLAGKNKSIANRERFLRRVKNYIRRAVSDAVRDRSIKDIQSTQSITIPRKDIAEPNFRHAPGGRREYVHPGNEDYVRGDKIPRPQGGSGGGGSQASNEGEGQDDFVFELSRDEFMQYFFDDLELPRLVKTHLLTVPSWKNVRAGWSAEGTPNNIDVVRSLRSALGRRIALGSPLVNELRELEAQLEALKNDPEDRRAEIATLEAEIHHLKGRIWRIPFIDPFDLRYINRVKQPQPSSQAVMFCLMDVSGSMDEQRKDLAKRFFILLYLFLKRNYERIEVVFIRHHTRAEEVDEDTFFHSTESGGTVVSSALELMRKVMSERYSPTEWNIYGAQASDGDNWTDDSPKCRKILEEDILTQTRYFAYIQVAPEEQNLWLEYAQLALSQPHLAMKKVESAADIYPVFRELFEKQVEMS

SEQ ID NO: 48106 - protein, 478 aa, Burkholderia cepacia
MPARDGDSSAMSLFRKKNVDRMIAGAQAAGLKKALGAIDLTFLGIGAIIGTGIFVLTGTGAVQAGPALMLSFVIAAIACGLAALSYAEFASTIPVAGSIYTYSYATLGELVAWIIGWDLMLEYGLASSAVSVGWSGYLQSLLQGFGLSLPTVLTAAPGAVPGVTTWFNLPAFLVMIVITTLLSIGIRESTRITNIMVFIKVSVVLLVIAVGLFHVTPANWKPFMPHGWNGVFGAAAVMFFAFIGFDAVSSAAEEVKNPKRDLPIGIIASLAVCAVLYVTVAAVATGIVPSAQYANISHPISYALQVAGEKWVAGFIDLGAVLGMLTVILVMSYGQTRVIFAMSRDGLLPAALSRVHPRYATPFLTTWLVGLFFGLIAALVPLNVLAELINIGTLAAFSMVSIAVLVLRRTHPELPRAFRCPGVPVVPILAVASCLFLMLNLQPVTWAAFGIWLVIGLVIYALYSRHHSKLAHGHPDAH

SEQ ID NO: 48107 - protein, 365 aa, Burkholderia cepacia
MAAFAGLAQFVDRAARQHFASVRQEALQDFLQVQQLRLTVDQRDHVHAERVLQLRRLVQVVQHHFRHFAALELDHDTHAALVGLVADVGNAFELLLVDELGDPLEQRALVHLVRQLVDDDRHPLAAVDLLEVRGRAHHDAAAPGAVAVAHAGDAVDDAGRREVRRRDDLDQLVDRRFRVAQQVLARVDDFVQVVRRDVGRHADRDARRAVDQQVRDARRQDRRLHFVAVVVRLEIDRFLVDVGEQLVTDLRHANFGVTHRRGIVAVDRAEVALPVDQHVAQREILRHPHDRVVDRGIAVRVVFTDHVTDDTRRLLVRTVPVVVQFVHREQHAPVHGLQAIADIREGTSDDHAHRVIEIRTAHFLL

SEQ ID NO: 48108 - protein, 309 aa, Burkholderia cepacia
MSRRRVVVTGLGLISPVGNNVADGWANLVAGKSGIATVTKFDASNLACHFAGEVKGFSAEEYIPAKEARNMDTFIHYGIAAGVQAIKDSGLEVTEANAERIGVLVGSGIGGLPMIEDTHQTYVDRGARRISPFFVPGSIINMISGHLSIMFGLKGPNLAAVTACTTGLHSIGLAARLIQAGDADVMVAGGAESTVSPLGIGGFAAARALSTRNDDPATASRPWDKDRDGFVLGEGSGVMVLEEYEAAKARGAKIYAEVVGFGMTGDAYHMTAPNMDGPRRCMVAALRDAGLNADEGQYLNAHGTSDAAG

SEQ ID NO: 48109 - protein, 144 aa, Burkholderia cepacia
MAIYGIGTDIAQVSRVAAVLERTGGRFAEKVLGPDELRVFHARRARSEARGIAFLATRFSAKEAFSKAIGLGMHWPMTWRALQTLNHPSGEPYVVASGELAEWLAARGITARVTVSDERDYAVSFVVAETDAAPGTAPVSRTSS

SEQ ID NO: 48110 - protein, 867 aa, Burkholderia cepacia
MDQFAKETLPTSLEEEMRRSYLDYAMSVIVGRALPDVRDGLKPVHRRVLFAMHELNNDWNRAYKKSARIVGDVIGKYHPHGDTAVYDTIVRMAQDFSLRYMLIDGQGNFGSIDGDNAAAMRYTEIRMAKIGHELLADIDKETVDFEPNYDGNEMQPSVLPSRIPNLLINGSSGIAVGMATNIPPHNLNEVVDACQHLLGNPEATIDELIEIIPAPDFPTAGIIYGVAGVRDGYRTGRGRVVMRAATHFEEIDRGQRMAIIVDELPYQVNKRSLLERIAELVNEKKLEGISDIRDESDKSGMRVVIELKRGEVPEVVLNNLYKATQLQDTFGMNMVALVDGQPKLLNLKEILQCFLSHRREVLTRRTIYELRKARERGHVLEGLAVALANIDEFIAIIKAAPTPPIAKQELMAKPWDSSLVREMLTRAESENAAAGGRSAYRPEGLNPAFGMQADGLYRLSDTQAQEILQMRLQRLTGLEQDKIIGEYRDVMAQIADLLDILARPERITTMIGEELTAVKAEFGDARRSRIELNATELNTEDLITPQDMVVTMSHAGYVKSQPLSEYRAQKRGGRGKQATQMKEDDWIETLFIANTHDYILCFSNRGRVYWVKVYEVPQGSRNSRGRPIVNMFPLQEGEKINVVLPVKEFSADKFIFMATSLGTVKKTPLEAFSRPMKKGIIAVGLDEGDYLIGASITDGAHDVMLFSDSGKAVRFDENDVRPMGREARGVRGMQLEDGQQVIALLVAGSEEQTVLTATENGYGKRTPITEYTRHGRGTKGMIAIQTSERNGKVVAATLVDAEDQIMLITTAGVLIRTRVSEIREMGRATQGVTLISLDEGTKLSGLQQIAEAEEGEGEADEASDGEA

SEQ ID NO: 48111 - protein, 278 aa, Burkholderia cepacia
MRELRQHHPVAALLKVAGLARSTFYYQLGTLNADDRHADLKAKIRTVFDHHKGRYGYRRVTAAIRQAGHLVNHKAVQRLMQQLQLKSLVRPKKYRSWQGEVGQAAPNLLQRQFSATQANQKWVTDVTEFNVGGQKLYLSPVMDLYNGEIVAYQMDQRPTFKLVSDMLKKALAKLRGKDKPLLHSDQGWQGAFNRSSQHSIVDQILDIRSELLPASSTRAPFEALCSVYVQRLGSLVHSIGIGLYPSESIVAIGRSYSHSCHVAMDYVGRRKIPVHRTR

SEQ ID NO: 48112 - protein, 638 aa, Burkholderia cepacia
MNDTTHATDAAHAPHSTQQHSMRALAIAAIGVVFGDIGTSPLYSLKEAFSPAHGIPLTEGSILGVISLLFWAIILVVGVKYLLFVMRADNNGEGGVLALMALSLRPLDSKTRVAGALMALGIFGACMFYGDAVITPAISVMSAVEGLEIATPHLSHLVLPITIVILIALFWIQRHGTALVGKLFGPIMVLWFVVIAALGVYHIVRVPGIIAAINPYYAASFMADHLLQAYVVLGSVVLVLTGAEALYADMGHFGAKPIRYAAYGLVMPSLVLNYFGQGALLIQNPKAIENPFFLLAPEWGLLPLVVLSTVATVIASQAVISGAYSLTSQAIQLGYVPRMKVLHTSELAIGQIYVPVVNWLLLAVILCIVVGFKSSDNLAAAYGIAVTATMVITTVLACVVMVKVWNWNRLLVGAIIAVFLAIDLGFFGANLLKVAQGGWLPLGIGALLFFLLMTWYKGRHIVKERTAADGIPLEPFLQGLLAHPPHRVSGTAIYLTGNDKLVPVSLLHNLKHNKVLHERTIFLTFVTRDIPYVRDDKRQSARDAGGGLYIVKAEYGFNETPDVKAVLEEFGRTHDMTFELMDTSFFLARETVVPTHLPGMSIWRERVFAWMHQNAAKPTDFFAIPANRVVELGTKIEI

SEQ ID NO: 48113 - protein, 127 aa, Burkholderia cepacia
GAGILTCFPSATHFCLALGADSPYADERCVGNLGLTARGPFTPFIATHVSIRTSDTSSTLYKAPSQAYGTLSYHASKLASAASVYSLAPLHLPRRTTRSVSYYAFFKGWLLLSQPPDCFSLPTSFPT

SEQ ID NO: 48114 - protein, 284 aa, Burkholderia cepacia
MGGRIEADSVPGVGSTFVVTLPLPLDRQPGALRSRADGDAPNARVLFVDDNPVNRSLIHDQLDVLGYQADVASNVAEALDLVDRHDYAVVLTDLNMPGLDGYAFARVLRERGRVQPILAVTAHAEPDELKLAWEAGIDEIVTKPTSLKSLEQAITKHAGTWRRPVHPPVPSRAAGPLPKDLHTVLVDATRRSNAAIARALQDGDLKVARSEIHSMRGAFAMIGERDISGLCASIEALALAGDAAAFAREFERYRQSASEILARRAASDAKQAADTFSNTSVMKR

SEQ ID NO: 48115 - protein, 179 aa, Burkholderia cepacia
MAELATIARPYAEALFRVAEGGDIAAWSTLVQELAQVARLPEVLSVASSPKVTRTQVAELLLAAAKSPLAAGAEAKNFVQMLVDNHRIALLPEIAEQFEALKNEREGAADAEIVSAFPLNGADLDSLVSGLERKFKRKLKPTVEVDSSLIGGVRVTVGDEVLDTSVRARLASMQAALTA

SEQ ID NO: 48116 - protein, 457 aa, Burkholderia cepacia
MSRTRIEHAPDGYYLNRTPLFAFTLLCCLFALWGTAANLNDVLIAQFKKSFFLSDFESAFVQSAFYLGYFFLAIPAATVVKKFSYKTTILVGLLLYTTGCLLFFPAASMAKYGMFLVALFVIAAGLSFLETASNSYSTLMGPRGTSTRRLNISQTFYPFGAMAGVYMGSFLIFKEGDASHAQLAAMSAADAHTHQLAMIQATLEPYKWLIVVLVAVFIVFALTPYPACKGNGTGAVTHRIDARGTLARLLGNRRFVAGVVAQFLYVGAQVGVWSFTIRLAMQIGGLTERGASRYLLATFFAFFVGKLVATLVMKRVGPAKVLIVYGILCIALLAYTISVHNITAVYAAVCVSVFLGPCWPTIYGLTIDGLGKDTEYGGSILVMSIVGGAVVPLIQGLISDHTGGNMQLAFVVPLVCFVVIVYYGFYCLRHLPAATPDAAADGHASTRYAATRNTSGA

SEQ ID NO: 48117 - protein, 690 aa, Burkholderia cepacia
MPPCPRFLDSFSGLDMTTSSPASTTLMANAIRALAMDAVQQANSGHPGMPMGMAEIGVALWSRHLKHNPTNPHWADRDRFVLSNGHGSMLLYSLLHLTGYDLPIEELKNFRQLHSKTPGHPEYGITPGVETTTGPLGQGLANAVGMALGEALMADEFNRDGAKIVDHHTYVFLGDGCLMEGISHEACSLAGTLKLNKLIALYDDNGISIDGDVVNWFHDDTPKRFEAYGWNVIPNVNGHDVDAVDAAIAKAKLSDKPTLICCKTVIGKGAATKAGGHDVHGAALGAEEIAKTREALGWKWEPFVIPQEVYAAWDAKEAGKRAESEWDATFAAYRAKFPAEAAEFERRMANKLPADWAEKAAAIIAGANERAETVATRKASQQAIEGLAAALPELLGGSADLTGSNLTNWKASKAVRANPEGAGVLLGNHINYGVREFGMSAAINGLALHGGHKPFGGTFLTFSDYSRNALRVAALMKVPSIFVFTHDSIGLGEDGPTHQSIEHVSSLRLIPNHDVWRPADTVETAVAWTHAVAADRPSSLIFSRQNLAFNPRTDAQIANIEKGGYVLKDWDEEIVARKIILIATGSEVELAMKAVEPLAQQGIAARVVSMPSTNVFDRQDAEYRERVLPHGVRRVAIEAGVTSFWHKYVGLEGGVVGIDTFGESAPAGVLFKYFGFTVEHVVETAKAVLA

SEQ ID NO: 48118 - protein, 283 aa, Burkholderia cepacia
DLDGMTLVDPATAPQRDAYADALHALRKAKGMTADAARDAVLDPLCHANLMVRLGDADGSVAGAVHATADVVRAAIQLIGVDPAFRIVSSFFLMMLCEPFHTIKGGLIFSDCALVVDPDAGQLAEIAMAAADSAHALLGEAPRVAMLSFSTSGSAHHAAVDKVTAATARVRELRPALAIDGDVQLDAAIVAEIAERKIAHSQVGGHANVLVFPSLEAGNIGYKLAERIGRAKAVGPLLQGLRRPANDLSRGCGADDVYHVIAATTVQAQAAMQRAATGEVAPA

SEQ ID NO: 48119 - protein, 292 aa, Burkholderia cepacia
MYSLPINLFTINNFFNKTFSPDEAKEFVAELGDKTIEDPQTFEEQALRFVGKELYGAFFKGYTTKQWGLHPSVLPASILKRLPIRFNYDDNYYASKFQGMPKHGYTYIVEKMIDHPSIKVHLGTKVEKDTLESYDHVFYSGPLDAWYGFEYGRLGYRTLDFVTERHEGDYQGNAVINYCEENVPWTRISEHKHFSPWEEHEKTVIYKEHSRTCGPDDVPYYPVRLVDDKELLNRYVALARKEENTTFVGRLGTYRYLDMHVTIGEALDVAEQYLSAVKSGVPMSPFVVDPLA

SEQ ID NO: 48120 - protein, 385 aa, Burkholderia cepacia
MQGGQITIQVPANEKAGKAAYEKTVNLTRAHLEEDAGKSLHEDFAGMTGIDLNRAGTPLLEIVTEPEMRSAAEAVAYAKALHGLVVWLGICDGNMQEGSFRCDANVSVRPVGQEKFGTRAEIKNLNSFRFLEEAINYEVRRQIELIEDGGEVVQETRLYDPDKRETRSMRSKEDAHDYRYFPDPDLMPLVIGQDWIERVQSGMPELPAAMQQRFVDEYGVSAYDAGVLTSSKAMAAYFEAVVAKAGAANAKIAANWLMGDVSSQLNRDGIEIDAIPVSAAQLALLLQRIADGTISNKIAKEIFATIWDEKATDEGAADRIIDAKGLKQISDTGALEAIIDEVLAANAKSVEEFRAGKEKAFNALIGQAMKATKGKANPQQVNELL

SEQ ID NO: 48121 - protein, 90 aa, Burkholderia cepacia
MMTANVSKGRALRTVLARLGVDTGHCIAFGDNMNDIDLLETAGHAFMMNNANPDLIARLPHVPRIGNNFDAGVARHLRTLFSLEDDVVAS

SEQ ID NO: 48122 - protein, 327 aa, Burkholderia cepacia
MAAPGAPAVPPHVARRAVEWWVDRQSGRTDDAFVAALARWRAEDPAHDAAWRHIEAMQGRFGRLAAGLDTQAAHAALLPKRAGRRAAAKALAVLLFAGGAAWMAEPARRAAIWPADLRTAVGERRTVTLADRTVVVLDTDTALDVRFDDAARRLRLLRGTIMVTSGHDDRLPARPLVVVTAQGELRPLGTRFAVRQRDGATRVEVFAGAVQVQPVDASAGMRVIAAGEGADFTRDAIDAPAPLDPYAAAWTNGMLVASRMRLADLVAELDRHRRGSLRCDPAVAELRVSGTYPLDDPQRVLDTLAATLPIDVHYLTRYWATVVPARS

SEQ ID NO: 48123 - protein, 400 aa, Burkholderia cepacia
  MISC_FEATURE (385)..(385): X=any amino acid
TPLASPDLLGVTGGAQLGLLAAMLVPALAGVASVPLLFVCGLAAAACAIVAAGGWRATPLRLVLAGSVCMLLFAALSTLVLAFFEQNIAGAALWTNGSLYQPGATGLALAARWLVVPLAALPFVIRPLNPLALGDDAAAAAGVRVDATRLTATIVAVAFTSVAVSIAGPLSYVGLVAPNLLRQVRGARAARLGVLVPLSALAGGALVLVTDSAVLASGLDATLSTGVAIALVGTPLMLAMIRRGAAWSGVLHADAERAAGGGATRLVGWLERLGWPLRTALFVVAGVLVVWVGVSAGPEWLSPARWFAALSGHDALARMLIDLRMPRLLCALLAGALLAVSGVAMQSVVRNPLAGPEVLGVTQGAGLVTLFALSTWPLMGHVTLXAFLGPEPRFFYYDMV

SEQ ID NO: 48124 - protein, 255 aa, Burkholderia cepacia
MTTRSSVGPKRPSLPAYVARAAALALLLVLLLRPAWLQGLFAPFADNGAPVIYDRASLLDLTLAHLGTVALSSLIGTIVAVSAGIAVTRPFGADFLPVARSVVDIGQTFPPVAVLALAVPAVGFGLKPVLIALVLYGLLPVFESTIAGLEDVPRDVVDAARGMGMSGWQQLVSVELPLAFPVIVNGIRLAVVINLGTATIGSTVAARGLGDVIIAGLQTSNTAFVLQGGVIVGLLAVLVSDAIGAIARVASARRA

SEQ ID NO: 48125 - protein, 253 aa, Burkholderia cepacia
MSTPLIGGDTMKRKLAITGAAALAFTFAGGTAHAQSAGDFYVSTGWLHLAPQDSSDPLFVYGVGGTPVNQSIPNTGAGISDADTLALATGYFVTDHIATEFIAGIPPKFDITGKGQFSKFGTLGRAYQWSPALLLKYYFNDANAKFRPYVGVGATYIWFTGAKITNSTFENGVLGGPTSATTSNQWAPVFNAGFTYNFTKHWFAGFSMSYIPVSVTATFTTARRTPVGTLTETSKAHISLNPIVTYLNVGYRF

SEQ ID NO: 48126 - protein, 399 aa, Burkholderia cepacia
MRDAFLAQVRGTLDQIRADGFYKTEREIASPQAAAVRLAGGAGVLNFCANNYLGLANDPRLLDAAKAGLDQDGFGMASVRFICGTQTVHKQLESALAAFLGTEDSILYSSCFDANGGLFETLLDENDAVISDELNHASIIDGIRLCKAKRFRYKNNDLADLEAKLKEADAAGARHKLIATDGVFSMDGIIADLKGICDLADRYGALVMVDDSHAVGFIGTHGRGTPEHCGVEGRVDIITGTLGKALGGASGGYVAARHEVIELLRQRSRPYLFSNTLTPSIAAASLKVLELLGSDEGAKLRERVRENGARFRKQMTEAGFTLVPGAHPIIPVMLGDAQLATNMADRLLGEGVYVIGFSFPVVPRGRARIRTQMSAAHTPEQIDQTVAAFVRVGKSLGII

SEQ ID NO: 48127 - protein, 358 aa, Burkholderia cepacia
MQIFYEARACGRRFAAGRRRRVKFERFLDRYFARETHYRLYFAYEITARARTAMTSEPIEFSAADGYVLHGTLWSPDAPPRALVLIHPATAVPERLYAGFARFLTERGFAALTYNYRGIGASRPARLRTLQARMRDWMELDVGAATAWARHAHEGLPLLAVGHSVGGHAIGLSGATTHLRAAVLVAAHAGSTRLIAQPAERVKVRLILRVLGPLTSALLGYVPGKRLGLGEDLPAGVFREWSRWTTLPHYFFDDPTLGAAERFSKQQLPILALGFDDDPWANPAAIGLLVSYLTRAKVERRQIDPRAAGSGPVGHMGFFRSRPGTVLWPDVADWLAQALDTPRAAGRPSLSIAAGNPA

SEQ ID NO: 48128 - protein, 338 aa, Burkholderia cepacia
MSTPVNRQLLLKTRPEGRVGRDHFSLVETPVPALADGEVLVRVLYLSMDPTNRVWMSDVPQYLPPVAIGEVMRALGIGRVVASRHAGFAEGDLVQGLVGWQDYAVVPAEQAAQLVKLPAQSGLPLPTLLGACGMSGLTAYYGLTDIAPVQPGETLVVSAAAGSVGSIAGQIGKIHGARVVGIAGGADKCRYLTDTLGFDAAVDYKADDFRQQLKAATPDGVHVNFENVGGEVMRAVLSRMVIGGRVALCGVISNYNSGRAADDVGVLISKRLTMRGFLILDYRKSREAVQTLAGWLRDGRLKAEETVADGLENAPDVLNRLFDGDHRGKLVLRVDPHA

SEQ ID NO: 48129 - protein, 589 aa, Burkholderia cepacia
MQGSGCMSRQPNCEGIMARQTMAEYLAKTLAAAGVERIWGVTGDSLNGLSFSLSQLGSIRWMHTRHEESAAFAAGADAASTGRLAVCAGSCGPGNLHLINGLYDCHRNHQPVLAIAAHIPSTEIGLGYFQETHPQELFRECSHFAELVTNASQFPRVLARAMRTAIDERGVAVIVLPGDIALGDGPDEAPAWSDAAPPAILPADADLDRLAALLNGSDAVTLLCGSGTQGAHDEVVALADTLGAPVVHALRGKQFVEWDNPFDVGMTGLIGFSSGYHAMESCDTLLMLGTDFPYRPFYPAHAKIAQIDWKGSQLGHRAPLALGLVGTVKETIAALLPRLTRKTQRRFLENALKHYAAARKGLDDLAVAEPPGRAIHPQYLTKIIDEVAADDAIFTADVGTPTLWAARYLTMNGKRQLHGSFNHGSMANAMPQALGAQGAHPGRQVVSLSGDGGLSMLLGDLLSARQLKLPIKIVVYNNSLLGFVSMELKAAGYLDTNVDLSPTDFAAIAKGAGIFSVRVEHSENVEHALRTAFEHDGPAVVDVVTSKYELAMPPKIELAHAKGFSLFMLRAILSGRGDEIVELARTNLR

SEQ ID NO: 48130 - protein, 410 aa, Burkholderia cepacia
MSLSEPLRLHVPEPTGRPGCKTDFSYLHLSPAGAVRRPPIDVAAADTADLARSLVRVLDDNGKAVGPWAPDLDDARLIAGLRAMLKTRIFDARMMIAQRQKKISFYMLSLGEEAIGTAHAMALRDGDMCFPTYRQQSILIARDVPLERMICQLMSNEGDPLKGRQLPVMYSDREAGFFSISGNLATQFIQAVGWAMASAIKGDTKIASAWIGDGATAEADFHTALTFAHVYRAPVVLNVVNNQWAISTFQAIAGGEGTTFAGRGVGCGIASLRVDGNDFLAIYAASSWAAERARRNLGPTLIEWVTYRAGAHSTSDDPTKYRPSDDWSHFPLGDPIERFKRHLIVKGIWSDSAHDALTAELEAEVIAAQKEAEKYGTLADDRIPSPASMFDDVYKELPAHLRRQRQELGA

SEQ ID NO: 48131 - protein, 643 aa, Burkholderia cepacia
MIRFNQFSLARGTKPLFESTSFVLNPGEKAGLIGANGAGKSTLFSVLRGELHSDAGDFSMPPSWRIAHVSQETPAVDRSALDYTLDGDTALREIEARIAAASAAHDGAAEADAHAAFADADGYTAPARAEALLLGLGFTLAQTRESVASFSGGWRMRLNLAQALMCRSDLLLLDEPTNHLDLDAIVWLEDWLHRYPGTLVVISHDREFLDSICNVTLHLENRQVKRYGGNYSQFEVLRAQQLALQQSAYEKQQKTIEHLQSFVDRFKAKATKAKQAQSRMKALEKMELIAPAHIASPFTFEFRTPDAAPNPMMVMEDVRCGYHADDGTDIPIVERVALSIQNGQRIGLLGANGQGKSTLIKTLAGTLAPLSGRVRDGKGLTIGYFAQHQLETLREDDSPLAHLARLAPDTREQELRDFLGGFNFSGDMATSPVGPFSGGEKARLALALIIWQKPNLLLLDEPTNHLDLETRHALTMALAQFEGTLILVSHDRHLLRATTDQFMLVAKHRLQPFDGDLDDYRDWLLQHAAEQRAAAKADSAAAAGADPGVNRKDQKRQAAEERQRLSQLKKPLQNRITKLEKEMETLHAEKARLDAFVADPASYEAARKTELTEAIRKLGEVNTRLETVEADWLAVQEELEQIG

SEQ ID NO: 48132 - protein, 424 aa, Burkholderia cepacia
MKAESNGRPAAGAKLSGQPALQQTLGTCQLWGIAVGLVISGEYFGWSYGWASAGTLGFVITALFVAAMYTTFIFSFTELTTSIPHAGGPFAYARRAFGPTGGYLAGAATLVEFVFAPPAIALAIGAYLHVQFPGLEPKHAAMGAYLVFMALNIVGVQIAATFELVVTLLAIFELLVFMGVVSPGFAWSNFTKGGWSGADHFSLGAFHGMFAAIPFAIWFFLAIEGVAMAAEEAKNPKRSIPIAYVAGILTLVALAIGVMVFAGGAGDWTKLANINDPLPQAMKYIVGANSGWMHMLVWLGLFGLVASFHGIILGYSRQIFALAREGYLPEWLAKVHPRFKTPYRAILAGGVVGIAAIYSDELIQFGGQTLTANIVTMSVFGAIVMYIVSMAALFKLRRSQPNLERPFRAPLYPIFPAFAILAAL

SEQ ID NO: 48133 - protein, 64 aa, Burkholderia cepacia
MKASELLQKDQAALNKELADLLKAQFGLRMQLATQQLTNTSQLKKVRRDIARVRTVMTQKANQK

SEQ ID NO: 48134 - protein, 773 aa, Burkholderia cepacia
MTTLSPEAFAGHTPMMQQYLRIKADHPDTLVFYRMGDFYELFFEDAEKAARLLDLTLTQRGASAGTPIKMAGVPHHAVEQYLAKLVKMGESVAICEQIGDPATSKGPVERKVVRVVTPGTLTDAALLSDKNDVYLLAMCTGHNKRGVAVNIGLAWLNLASGALRLAEIESEQLAAALERIRPAEILTPDGATDAIPAGAGASKRVPAWHFDIASGTQRLCDQLDVASLDGFGAHSLTSACGAAGALLLYAAATQGQQLRHVRSLKVENETEYIGLDPATRRNLELTETLRGTESPTLYSLLDTCCTTMGSRLLRHWLHHPPRASVAAQSRQQAIGALLDAPANASLDALRSALRQIADVERITGRLALLSARPRDLSSLRDTFAALPALRERISAIVANADALARVDAALAPPAECLDLLTSAIATEPAAMVRDGGVIARGYDAELDELRDISENCGQFLIDLEARERARTGIANLRVEYNKVHGFYIEVTRGQTDKVPDDYRRRQTLKNAERYITPELKTFEDKALSAQERALARERALYDSVLQALLPFIPECQRVASALAELDLLAAFAERARALDWVAPTFTDEIGIEIEQGRHPVVEAQVEQFIANDCRFGPERKLLLITGPNMGGKSTFMRQTALIALMAYVGSYVPAKSACFGPIDRIFTRIGAADDLAGGRSTFMVEMTEAAAILNDATPQSLVLMDEIGRGTSTFDGLALAWAIARHLLAHNACYTLFATHYFELTQLPAEFPQAANVHLSAVEHGHGIVFLHA

SEQ ID NO: 48135 - protein, 384 aa, Burkholderia cepacia
MKKHVIFAAALAAFAAPAFAETSVTLYGLIDEGFNYTNNVNVNGVGKTNYQLASGYAQGSRWGLKGSEDLGGGLKAIFTLENGFDVNNGRLGQGGRMFGRQAFVGLSESRFGTLTFGRQYDSVVDYLAPLTANGNWGGTLFSHPFDNDNTDNSFRVNNTVKYASADWNGLTFGGTYSFSNSTGFSNNRQYSIGAQYSLAGLQVAAAYLQANNPGIGSAGAIAADDANFVADRLRIFGGGVNYTFGPATVGFVYTKTDVKNPVSTVYLPASTFAGLGLTATKFQNFEVNGKYQLTPDFYLGAQYVYTDGKYDAAAGSFKPKYHTVGLMADYSLSKRTDVYLQGAWQKVAGDKTGTAADGGYVVGTDGPSASANQFSVRAAIRHKF

SEQ ID NO: 48136 - protein, 127 aa, Burkholderia cepacia
MLWVSLGVIVVFGGATLVLHDEKFIQWKPTVLYWLFAIGLLAARYAFSKNLIEKMMGKQLTLPSPVWDKLNLAWALFFAVLGVANLYVVHNFTESQWVNFKLFGTTGAMVVFIILQSLWLTKYLKDE

SEQ ID NO: 48137 - protein, 175 aa, Burkholderia cepacia
MNRHGHILEEANMRHIISVLLENEPGALSRVVGLFSARGYNIETLTVAPTEDQSLSRLTIVSIGSDDVIEQITKHLNRLIEVVKVVDLTDGAHIERELMLIKVRAVGKEREEMKRMSDIFRGRIIDVTEKTYTIELTGASDKLDAFIQGLDAGAILETVRTGSSGIGRGERILKV

SEQ ID NO: 48138 - protein, 503 aa, Burkholderia cepacia
MDFSIKGCDWSKGEAKGFLTGKSDCIVLGIFEAQTLSGAALDIDTATKGLISRVVKAGDMDGKRGKTLFLHEVSGIGASRVLLVGLGKQDAFNQKAYNDAVTAAWRALLATKVVQVTFSLAQLPVDERSSDWGVRAAILALRNETYRFTQMKSKPEPASHTLKRVVFSVDPADEKAAKVAVKQAVALANGMDLTRDLGNLPGNVCTPTYLGNTAKKIAKDWGLKAEVLGLKQIQALKMGSFLSVARASVEPPQFIVLHYQGAAAKAAPVVLVGKGITFDTGGISLKPGEGMDEMKYDMCGAGSVLGTIRAVAEMGLKINVVAIVPTCENMPGGNATKPGDIVTSMKGLTIEVLNTDAEGRLILCDALTYAERFKPAAVIDVATLTGACVIALGGHNSGLFSTNDALAGELLDASREANDPAWRMPLDDEYQDQLKSNFADLANIGGRPAGAVTAACFLSRFTESYPWAHLDIAGTAWKAGPAKGATGRPVPLLAQFLIDRAGQ

SEQ ID NO: 48139 - protein, 122 aa, Burkholderia cepacia
MIQTESRLEVADNTGAREVLCIKVLGGSKRRYAGIGDIIKVSVKEATPRGRVKKGEIYNAVVVRTAKGVRRQDGSLIKFDGNAAVLLNNKLEPIGTRIFGPVTRELRSERFMKIVSLAPEVL

SEQ ID NO: 48140 - protein, 226 aa, Burkholderia cepacia
AAEDEQQLFQRIAAYSKRLGFEYCCYGIRVPLPVSKPAVAIFDTYPDGWMAHYQAQNYIEIDSTVRDGALNTNMIVWPDVDRIDPCPLWQDARDFGLSVGVAQSSWAARGAFGLLSIARHADRLTPAEINMLTLQTNWLANLSHSLMSRFMVPKLSPAAGVTLTAREREVLCWTAEGKTACEIGQILSISERTVNFHVNNILEKLGATNKVQAVVKAISAGLIEAP

SEQ ID NO: 48141 - protein, 414 aa, Burkholderia cepacia
MGYQQGLSGLAGASSNLDVIGNNIANANTVGFKQGRANFADMYANSVATSVNTQIGIGTRLASVQQNFGQGTINSTKSSLDVAINGNGFFQMSSNGVTTYSRDGTFHRDKNGAIVDAQGRNLMGYAAGAGGVINTAQTVPLQAPTNNIAPRATSKITGQFNLNAQDKVPAKTPFNATDNTTYNYNSSIQVYDTLGGSQQVTMYFAKSAAGTWLAYAGVQGQTPTNLGTVTFDASGRISSTTSAATGQPTPSLGQFAFSIPNTTGGANPQNLTLDLGGTTQYGGKDGVTNLAQDGFASGTLTTFSIGTDGKLTGNYSNGQSAVLGLIALANFNNPNGLVNIGGNQYAETAASGVPQIAAPGSTNHGTLQGSALENSNVNLTTELVNLITAQRNYQANAQTIKTQQAVDQTLLNLR

SEQ ID NO: 48142 - protein, 273 aa, Burkholderia cepacia
MAVSQEGRPSAGRPSGARSSGTRQTGGTKARILDAAEDLFIEHGFEAMSMRQITSRAAVNLAAVNYHFGSKEALIHAMLSRRLDQLNQERLGILDRFDAQLGTHITCEHVLGAMFIPALKASRDPERGGPGFLRLIGRAYTDPSPFVRNFLTAHYASVAGRFFDAFQRALPHLPRTELGWRLHFAIGALSGALAGAETESLIDEFSQGRTMNDVQMIARLSSLIVAALKAPMPDSAQLSIFAAVLDDAGASEAFGLPQSGATAAEAATLHSTS

SEQ ID NO: 48143 - protein, 503 aa, Burkholderia cepacia
MSAALRFDNIGKVFPGVRALDGISFDVHAGEVHGLMGENGAGKSTLLKILGGEYQPDAGSVLVDGQPVQFANAAASIAAGIAVIHQELQYVPDLTVAENLLLGRLPNAFGWVRKREAKRYVRERLAEMGVDLDPDARLGRLSIAQRQMVEICKALMRNARVIALDEPTSSLSHRETEVLFKLVDDLRAQGRALIYISHRMDEIYRLCDACTIFRDGRKIASHEALADVPRERLVAEMVGREIADIYHYAPRALGDVRFSAEGIDGPALREPASFSVRAGEIVGFFGLVGAGRSELMRLVYGADRRRAGVLTLDGARIDVKRTGDAIRHGIVLCPEDRKEEGIIAIASVSENINISCRRHSLRAGLFINGKAESETADRFIQRLKIKTPNRRQKIRFLSGGNQQKAILSRWLAEPDLKVVILDEPTRGIDVGAKHEIYDVIYRLAERGCAIVMVSSELPEVLGVSDRVVVMREGRIAGELPRAQANEHAVLNLALPQTSAAEAA

SEQ ID NO: 48144 - protein, 510 aa, Burkholderia cepacia
MTHNHPAPLLVELLTEELPPKALARLGDAFAEGLAQRLAARDLVEGELVFERYATPRRLAVVVQNVRAVAPDRQVREKVLPVSVALDAEGKPTAPLAKKLAALGHPNLSIADLERAQDGKAEAFFINYSAAGATLADGLQAALDEALAKLPIPKFMTYQRPDGSDVKFVRPVHRLTVLHDDRIVPVTAFGVDAGDTTLGHRFLSDGLVAIQHARAYADTLRDKGRVIAHFADRRETIRTQLNEHANGDTVVMPESLLDEVTSLVEWPVVYPCRFEDEFLQVPQECLILTMQTNQKYFALTDVAGKLRSRFLIVSNIETKTPGEIIEGNERVVRPRLADAKFFFEQDKKKPLADRVPQLANVVYHNKLGSALARVERLEALAGEIAPAIGADTAHAKRAARLAKADLLTDMVGEFPELQGTMGTYYARHDGEADDVALACAEHYQPRFSGDALPTTPVSTAVALADKLETIVGIWGIGLAPTGEKDPFALRRHALGVLRLLLEKQLPLDLV

SEQ ID NO: 48145 - protein, 284 aa, Burkholderia cepacia
MKLCDFEVGLDQPFFLIAGTCVVESEQMTIDTAGRLKEICEKLNVPFIYKSSYDKANRSSGKSFRGLGMDEGLRILSEVKRQLGLPVLTDVHSIDEIEQVASVVDVLQTPAFLCRQTDFIHACARSGKPVNIKKGQFLAPHDMKNVIDKARDAAREAGLSEDRFMACERGVSFGYNNLVSDMRSLAIMRETNAPVVFDATHSVQLPGGQGTSSGGQREFVPVLARAAVATGVAGLFMETHPNPAEAKSDGPNAVPLNRMGALLETLVTLDQAVKRNPFLENDFN

SEQ ID NO: 48146 - protein, 343 aa, Burkholderia cepacia
MSFWDFTRSPASARLLADFGDERGVPPATLLAGTGLASAQLDDPKVEVTAAQELRLTGNLLRALGRAQGLGFEVGLRYHFSAYGVWGYGLISSATGSDALALAMRFLPLTYAYTVITYREAADTGVLNFGAPELDADLSRFLVERDMTAAAVLLQEIASGDFALSRFTLQAVRSPALVAPRIAGIEPTFAARANSLEFDRAFLDRPLPHANPLTVSMCEQMCGQLVEARRARVGTSEMVRQYLNATPGSAPFSLEDMARLMNTSPRTLKRRLQDEGTTFRALLAQARGAMAETLLADARLSLAEVAERLGFSDLSSFSQAFKRWYGVPPGAYRSAARRTGDPR

SEQ ID NO: 48147 - protein, 284 aa, Burkholderia cepacia
MSRPSFLIGLIGQGIGGSLSPAMHEEEGFRQGFGYVYRRIDLDALGVTVDALPQLLEAAQRMGYNGLNITHPCKQRVIEHLDALSDDARALGAVNTVLFKDGKRIGHNTDWSGFAKSFRRGLPDAKLDRVVQLGAGGAGAAVAHAALQMGAAELTIFDVDGTRATALAGELQQRFPAARVTPGSDLAAAMRATTGLIHCTPTGMAKHPGLPLPAELLHAGMWVADIVYFPLETELIHAARAAGCATLPGGGMAVYQAVDAFELFTGRTPDAERMFDHFQSLVAR

SEQ ID NO: 48148 - protein, 169 aa, Burkholderia cepacia
MMPTPPPFLLAVCEGNVCRSPLAAALLAAKLPHARTGSAGLAPPNGRPADPLARDMAAARGLNLDAHAARPVTAALCAQADLIFVMDGGQRRALEARHPFLRGRVFRLGEYARIADGAPLGLDIPDPYRGTRDDFVRCAALIDLAVGSWLPRLAARWPHITASFSGFQS

SEQ ID NO: 48149 - protein, 121 aa, Burkholderia cepacia
MDKTQSRLRRARQTRIKIAELQVARLAVHRTNTHIYAQVFSPCGTKVLASASTLEAEVRAELADKSGKGGNVNAATLIGKRIAEKAKAAGIESVAFDRSGFRYHGRVKALAEAAREAGLKF

SEQ ID NO: 48150 - protein, 2074 aa, Burkholderia cepacia
  MISC_FEATURE (1559)..(1559): X=any amino acid
  MISC_FEATURE (1571)..(1571): X=any amino acid
AVPAAQGLYDPQNEHDACGVGFVAHIKGKKSHEIIQQGLKILENLDHRGAVGADPLMGDGAGILIQIPDAFYREEMAKQGVNLPPAGEYGVGMIFLPKENASRLACEQELERTVKAEGQVVLGWRDVPVDHAMPISPTVKASEPLIRQIFIGRGKDIMVTDALERKLYVIRKTASHRIQALKLKHGKEYFVPSMSARTVVYKGLLLAGQVGVYYRDLQDERVVSALALVHQRFSTNTFPAWELAHPYRMIAHNGEINTVKGNVNWLNARTGAIASHVLADDLPKLWPLIYPGQSDTASFDNCLELLVMAGYPLVHAVMMMIPEAWEQHTLMDENRRAFYEYHAAMMEPWDGPAAIAFTDGRQIGATLDRNGLRPARYIVTDDDLVIMASEAGTLPIPESKIVKKWRLQPGKMFLIDMEHGRIIDDKELKDNLANAKPYKSWIDAVRIKLDEIEPKAEEVAAGRTQGAALLDRQQAFGYTQEDLKFLMAPMAAQGEEAVGSMGNDSPLAVMSNKNKTLYHYFKQLFAQVTNPPIDPIRENMVMSLVSFIGPKPNLLDTNNINPPMRLEVSQPVLDFKDIAKIRAIDQYTGGKFSAYELNICYPVAWGKEGIEARLASLCAEAVDAVKSGYNILIVSDRKTDAEHVAIPALLATSAIHTHLVQQGLRTSTGLVVETGSARETHHFALLAGYGAEAVHPYLAMETLAKMAEGLPGDLSPEKAVYNFTKAVGKGLQKVMSKMGISTYMSYTGAQIFEALGLSSDLVEKYFKGTASKVGGIGLFEVAEEAIRLHRDAFGDNPVLRDMLDAGGEYAYRVRGEDHMWTPDSIAKLQHATRSNSYQTYKEYAHLINDQTKRHMTFRGLFEFKVEPTKAIPIDDVEPAKEIVKRFATGAMSLGSISTEAHATLAIAMNRIGGKSNTGEGGEDEKRYRNELRGIPIKSGETLKSVIGDEIVSDIALKDGDSLRSKIKQVASGRFGVTAEYLASADQIQIKMAQGAKPGEGGQLPGHKVSEYIGKLRYSVPGVGLISPPPHHDIYSIEDLAQLIHDLKNVNPSASISVKLVSEVGVGTVAAGVAKAKADHVVIAGHDGGTGASPLSSVKHAGTPWELGLAETQQTLVLNRLRGRIRVQADGQIKTGRDVVIGALLGADEFGFATAPLVVEGCIMMRKCHLNTCPVGVATQDPVLRAKFKGQPEHVVNYFFFVAEEVREIMAQLGVAKFDDLIGRADLLDTRKGIEHWKAKGLDFSRVFYQPEECEDVAPRHVDVQDHGLERALDHVLIEKAKAAIENGEHVSFIQPVRNVNRTVGAMLSGVIAKKHGHDGLADDAVHIQLKGTAGQSFGAFLAKGVTLDLVGDGNDYVGKGLSGGRIIIRPTNDFRGKSEENIICGNTVMYGAIEGEAFFRGVAGERFCVRNSGATAVVEGTGDHGCEYMTGGTVVVLGETGRNFAAGMSGGLAYIYDPEGTFAAKCNKSMVALEPVLQQAEQERTVDRALWHAGTTDEALLKGLVERHFQFTGSPRAKSLLENWDAARRQFVKVFPHEYKRALGEIGAKKAAKEVLAAXATNDIANAARAXWPRAAPHPIHRTEEHLMGKATGFLEFERRHEAYEAPLTRVKHYKEFVAALTDADAKVQGARCMDCGIPFCNNGCPVNNIIPDFNDLVYRQDWQQAIEVLHSTNNFPEFTGRICPAPCEAACTLGINNDPVGIKSIEHAIIDKAWAEGWVKPLPAEHKTGKKVAVVGSGPAGLAAAQQLARAGHDVTVFEKNDRIGGLLRYGIPDFKLEKWLIDRRMRQMEAEGVRFRTSVFIGKEPLPESIGSLAKETISPDTLKEEFDAVVIAGGSETPRDLPVPGRELAGVHFAMDFLPQQNRVNAGDKLADQLLAKGKHVIVIGGGDTGSDCVGTSNRHGAKQVTQFELLPQPPEEENKPLVWPYWPIKLRTSSSHEEGCERDWAVATKRLEGKNGKVEKLIAVRVEWKDGKMQEVPGSEFEMKADLVLLAMGFTQPAAPVLDAFGVAKDARGNARATTEGDRSYYTSVDKVFAAGDMRRGQSLVVWAIREGRQCARSVDTYLMGHSELP

SEQ ID NO: 48151 - protein, 207 aa, Burkholderia cepacia
MAERGRPRSFDKEAALDRAMEVFWRLGYEGASMTDLTTAMGIASPSLYAAFGSKEALFRQALEHYGATEGREIWGGVERAASAHDAVQRYLMDTARVFTRRSKPAGCLIVLSALHPAERSDTVRQTLIAMREHTVDALRERLAQGVATGEISAHANLDAIARYYVTVQQGMSIQARDGASRRDLEAIAQAALAAWPALVGTSGAAGA

SEQ ID NO: 48152 - protein, 345 aa, Burkholderia cepacia
YYLDEHNRLDVANADLAADLQGARTTLYGALAALLAERVKRGAGPLTLQSCDNLRNNGARFRAGMREFLERRGEGGLLAWFDAHVATPSAMVDRITPRPTADVRERVLVATGVDDACPVMGESFIQWVIEDRFAAGRPRWELAGAELVDDVHPYEEAKIRILNATHSCIAWAGTLAGHTYIHEGTHDPAIRRFAHDYVTQDVIPCLTPSPLDLARYRDVVLERFGNPYVLDTNQRVAADGFSKIPGFIAPTLVESFARGAAPIATAVLPALFLRFLERWARGTLPYAYQDGVMDDSSARAIVGAADPVVALGANRALWGSLAGNAALFDALRAGLARVDAWLAAR

SEQ ID NO: 48153 - protein, 179 aa, Burkholderia cepacia
MYMREMGTVELLTREGEIEIAKRIEDGLRHMVMAISACPGTIAAPARNRRCASDPRNRARSHRPSATRPAHRAATRSGRRPHRMRCARSHRGSPPRAAPPRARARCRHLQPSDVRSRRTRLRESGAAPRVRRGRPAADDVAAAPDRPAPATPLSRPTRARPASRRACPRRASCPCRPPC

SEQ ID NO: 48154 - protein, 117 aa, Burkholderia cepacia
MPRSGSELREIAAEPLQRAVDPLVIRELADAGRLHEPGIREDAHVARGRGRRDAELLGDVRAAHAELVDVTMRLRREMLARLPEPAHHGQTAFVGERAEAGDVVHGGADSFNVLNIS

SEQ ID NO: 48155 - protein, 161 aa, Burkholderia cepacia
MSATFERKLITRDALVALRASLPSPVVFTNGVFDILHRGHVTYLADAKVLGACLIVGVNSDASVRMLGKGDDRPINREEDRAALLAALESVDWVVTFAEKTPVSLIEAVRPDILVKGGDYDMDALPESALVRGWGGRALAIPFEHDRSTTALLKKVRAQQP

SEQ ID NO: 48156 - protein, 326 aa, Burkholderia cepacia
MRGPARSGPVGAQPVLFVNELWCNAGMKTGNQFNTVALVGRSNTPGIAEPLATLADSIATLGFEVVFEGDTAREIGIAGYPALTPAEIGARADVAIVLGGDGTMLGIGRQLAPYRTPLIGINHGRLGFITDIAASDMQALVPVMLAGKFEREERSLLEARIVRDGEPIYHALAFNDVVVNRSGFSGMVELRASVDGRYMYNQRSDGLIVATPTGSTAYALSSAGPILHPQLAGIVLVPIAPHALSNRPIVLPDDSKIAIQIVGGRDVNVNFDMQSFTSLELNDTIEVRRSKHTVPFLHPIGYSYYTTLRKKLHWNEHASNEDDKAS

SEQ ID NO: 48157 - protein, 314 aa, Burkholderia cepacia
MPAAALLDDFLAFTLAGDAPAEQDGACAGGAVRWQWLGDGLLAFEPAAADAAARASVLVSAGVHGDETAPIELLSMLVRDLAAGALPLACRLLVVLGNVPAMRAGERYLDDDLNRLFSGRHAQVPASREAPRAAQLEAAAAAFFAAAPAGSARWHIDMHTAIRASVFEQFALLPHTGTPPTRAMIEWLGDARIAAVLLHTAKGNTYSHFTAEHCGALACTLELGKVRPFGQNDLARFAPADRAVRKLVSGGRAEVDAGGGHPSLPRVFTVIDQITKQSDALELFVEADVENFTAFARGTVLAQDCHYQYTAMHD

SEQ ID NO: 48158 - protein, 955 aa, Burkholderia cepacia
MSDNTLAKSFEPHTIESQWGPEWEKRGYAAPAFDPSRPDFAIQLPPPNVTGTLHMGHAFNQTIMDGLARYHRMLGENTLWVPGTDHAGIATQIVVERQLDAQGVSRHDLGREKFVERVWEWKQKSGSTITDQVRRLGASTDWSREYFTMDDKMSAAVRDVFVTLYEQGLIYRGKRLVNWDPVLLTAVSDLEVVSEEENGHLWHIRYPLVDGSGSLTVATTRPETMLGDVALMVHPEDERYAHLIGQRVTLPLTGREIPVIADDYVDREFGTGVVKVTPAHDFNDYQVGVRHKLAPIEILTLDAKINDNGPEQYRGLDRFDARKAIVADLDAQGFLDSVKPHKLMVPRGDRTGVVIEPLLTDQWFVAMTKPAPEGTFNPGKSITEVSLDVVRDGQIKFVPENWTTTYYQWLENIQDWCISRQLWWGHQIPAWYGENGEVFVARNEEDARAQAAAKGYTGALKRDEDVLDTWFSSALVPFSSLGWPNETPELKHFLPSSVLVTGFDIIFFWVARMVMMTTHFTGKVPFHTVYMHGLVRDAEGQKMSKSKGNTLDPIDIVDGIDLESLVAKRTTGLMNPKQAATIEKKTRKEFPDGIPAFGTDALRFTMASMATLGRNVNFDLARCEGYRNFCNKLWNATRFVLMNCEGHDCGNDKPEVCGAGDCGPGGYLDFSAADRWIVSLLQRTEADIAKGFADYRFDNIASSIYKFVWDEYCDWYLELAKVQIQNGTPEQQRATRRTLLRVLETVLRLAHPVIPFITEALWQKVAPLAGRYPQGKAEGEASLMTQAYPVANLQKLDEASEQWAADLKAIVDACRNLRGEMNLSPATKVPLLAAGDAERLRSFAPYVQALARLSEVQILADEAALDKEAHGAPIAIVGPNKLVLKVEIDVAAERERLSKEITRLTGEIAKCNAKLGNEAFVAKAPPAVVEQEQKRVAEFQRTLEKLRAQLDRLPA

SEQ ID NO: 48159 - protein, 519 aa, Burkholderia cepacia
  MISC_FEATURE (487)..(487): X=any amino acid
  MISC_FEATURE (491)..(491): X=any amino acid
  MISC_FEATURE (494)..(494): X=any amino acid
  MISC_FEATURE (496)..(496): X=any amino acid
  MISC_FEATURE (508)..(508): X=any amino acid
  MISC_FEATURE (510)..(510): X=any amino acid
LEDSVMRRLVVLTLLSAMSVCAFAASDPAVEAKNGMVVSSQHFASQIGVDILKAGGNAVDAAVAVGYAQAVTNSCCGNIGGGGFMTIHLADGRDRFINFRETAPAAASANMYLDAAGNVIPDQSLYGYRAVGVPGTVAGLDLAQRKYGKLTRRQVMAPAIRLARDGFVLTRGDTDILDTTVERFRKDPEAARIFLRPDGTALQPGDRLVQKDLARTLERIAEQGPDAFYHGEIPKIVEAAAKRGGGVITAADFASYRAQDMAPLTCTYRGYEFVSAPPPSSGGVTMCETLNILEGYDLRKLGYHSAAAVHYMTEAMRHAYEDRNTLLGDPDFIDNPIAKLTSKEYAAQIRKSIHADTATPSVDVQPGVGVHEKPETTHYSIVDHDGNAVSTTYTVNGRFGAVVIAPGTGFFLNDEMDDFTVKVGAQNLFGLVQGTRNSIAPGKRPLSSMAPTIVKKDGKVFMVVGSPGGARIITITLQTVLNVIDYXMTPXDAXAXPRIHHQWLPDAXYXETYRLVPDT

SEQ ID NO: 48160 - protein, 139 aa, Burkholderia cepacia
MARYTEQFKLSVVKRCIGGEAIRAVARTHGLSHSTVSQWYATYQAHGKDGVRRKYNSYDVAFRLKVVQHMREHGVSSKEAAARFNIRNPSAVLEWARRYDDGGLTALAPRPKGRRPTAMPKTPPAQPLNPTDGTDTRTR

SEQ ID NO: 48161 - protein, 212 aa, Burkholderia cepacia
MSDEAKLREEICVVGASLYARGHAVGSAGNISARLHDGWLITPTDACLGRLDPNDIAKVGADGQPVSGGKPSKTLALHRGIYARNAAANGVVHTHSTHLVALTLAGVWRDTDVLPPITPYYVMKVGHIPLIRYRRPGDPAVAAEVAALADQVRGVLLDRLGPVMWGPSVSHASYALEELEETARLWLMTQPKPEPLSDAALDELRQTFGARW

SEQ ID NO: 48162 - protein, 668 aa, Burkholderia cepacia
LLANLNPEQLAAVTLPNEPALILAGAGSGKTRVLITRIAWLIQQGYASPPTVLAVTFTNKAAREMMARLSAMMPIDTRGMWIGTFHGLCNRMLRTHWRDAGLPQTFQILDTADQLSAIKRLMKAANVDDEKYPPKNVQYFINNAKEQGLRPDKVDATDNFNRKFVELYQAYDQQCQREGVVDFPELLLRCYELLAYNAPLRAHYQARFRHILVDEFQDTNKLQYAWLKMLAGGENAIFAVGDDDQSIYAFRGANVGNMRDFEDEFRVRNLIKLEQNYRSHGNILDAANQLISNNAHRLGKNLRTDAGHGEPVRVYEASTDSQEAGWIVEEIRSLINTGMARSEVAVLYRSNAQSRSIEHTLMSSGIPYRVYGGLRFFERQEVKHALAYLRLIDNPNDDTAFARVVNFPTRGIGARSIEQLADAARLYGCSMAAAIPYVTGKAGTSLGGFANLIAKMRADTQHMNLPDTVEHIVRASGLADFYQGEREGQDRLENLQELVNAATAFIAEEGYGLDTPARSIPLRAGAIAAPELGTATDDPAVDVLDPASPADPAQNPDTMTPLAGFLSHASLEAGDNQAQAGQDAVQLMTVHAAKGLEFSAVFITGLEEGLFPHENSVLESDGLEEERRLMYVAITRAKERLYLSFAQSRMLHGQTRYNVRSRFYDELP

SEQ ID NO: 48163 - protein, 539 aa, Burkholderia cepacia
MSAVMLYDNWQRDHGRPSMFFPSATHTAPAAAGGASGTGATTAGDVPAAAAGAAPSTTAPAAQAQLVKFSTDVYDGEIDTRGGTLAKLTLKKQGDGKQPDLYITLFDHTAGHTYLARTGLLGGDFPNHNDVYTQLNPGSTSLTGDQNTLKLSFESPVKGGVKVVKTYTFTRGSYVIGVDTKIDNVGTAPVTPTVYMELVRDNTAVETPMFSHTFLGPAVYTDAKHFQKIDFSDLDKNKANFEKSADNGWVAMVQHYFASAWIPQQGAKRDIYAEKIDPALYRVGVKQPVAAIAPGQSADVQARLFAGPEEERMLEGIAPGLELVKDYGWVTIIAKPLFWLLEKIHGYVGNWGWAIVLLTVLIKAVFFPLSAASYKSMARMKEITPRMQALRERFKSDPQKMNAALMELYKTEKVNPFGGCLPVVIQIPVFISLYWVLLASVEMRGAPWILWIHDLSQRDPFFILPVLMAVSMFVQTSLNPTPPDPVQAKMMKFMPIAFSVMFFFFPAGLVLYYVVNNVLSIAQQYYITRKLGGVKKKPA

SEQ ID NO: 48164 - protein, 472 aa, Burkholderia cepacia
MAALLCAGAFALAGCGSDDGPTSSTPAPVKTAARNVIFFLGDGMGMTTLTAARIYGVGEDGALTIDTLPESAFVKTYSNDAQVTDSAPSMSAYMTGVKTNNEVISMSPDTKAIEPSAGLTGNCGANNGKSVSTLLEIAKANGMATGVVTTTRVTHATPAATYAHVCHRDAENDIAAQLVPGGAGYNGALGDGVDVVLGGGAQFFVPKDGGGKRTDGRNLVNELKAKGYAFAQNRDDLLAADATKRGKLVGLFASSHMSYDLDRGATREPSLADMATRALDVLQANPNGYFLMVEGGRIDHALHDTNAKRALQDTIAFDNAIKATLDKVRKTDPDLTNTLIVVTADHDHTLVLNGYAARTGKTEAGKPGVLGVLRSYQTGAIAKDADGAPYTIIGFGNGENRVQGSRAGTALTDAVTGADDYRQEAVVRMDKGNETHGGTDVFLGAIGRGADAFHGVIENNRVFELVRNAVQL

SEQ ID NO: 48165 - protein, 748 aa, Burkholderia cepacia
MKTSLFRCSTIASACALTVLLASCGGDDIHAPTDPDAAADQRAAALVAQLTTDEKLQLVHGTGMPALSLGGPFPADALNGASYIPGVPRLGIPAVSSADSAGGVNVKNARVTALPAPVALAATWDPALAGTYGTRIALELRALGFAEGLGGGVNLAREPRNGRTFEYMGEDPVLAGTLSAARTQATQAQKVIATIKHFAFNDQETNRMTVDSVVDERTMREAELLAFEIGVKDGQPGNVMCAYNKLNGVYACENPYLLTTVLKNEWGFKGVVQSDWGATHSTVAAVQAGLDEEQPGAADDGNAPLGSYFNSKLRAALQAGSVSVARLNDMVQRKLRTLIRIGVMDAPPKPGGAIDEAAGNADALAIARQAAVLLKNAAAPGDTQPVLPLAAGTLKSVVVIGGHADAGVLSGGGSGAVPAIDGNAVTTCQQPADTLFGGCATWYKSAPLAAIRAKAPNASVSYLDGTDANAAASAAAQADVAIVFATQWQTEGLDLASLSLPDAKADPSNQQYDQNALIAAVAAKAKRVIVVLENGSPVLMPWLANVHGVLDAWYPGAQGGQAIADLLFGDANPSGRLPLTFPKQEADLPQPTIDPSNLRNVYAEGLAYGYRWFDAKAIEPLFPFGYGLSYTTYVLSAMSAQADAAGNVTVGVTVTNTGARAGMQTVQIYAALPASLGEPPKRLVGWTKVALQPGEARTVSIAVPAQRFAVWDASAHAWRIGAGTYGLSAAASSRDPQALSQTVTLAAH

SEQ ID NO: 48166 - protein, 469 aa, Burkholderia cepacia
MTARPASYSLLRRLTLAFAAVAALVFALTGAYLYRSLSAELTRRDDIEISAKLNQFLQLARASGSTAALRADPAVFHDVLLSHPGVYLGIYDARHQPLVEHSDEAGNTLASVISAPHPAGSADGPFTCAPPGIGTSRCVYARETLPSGEAIEVALARTATDRQSLLESYRVDIWLAAAVGALLVGALGYAVASRGLRPVESLGRQTSRIEAHNLNARLDARGGPVELREFATSVNRMLDRLERAFVRLSQFSSDLAHDMRTPLANVISSSQITLSRARTVDEYEALIESNIEECERLQRMIENMLFLARTDNARQHLKTAELDAGSELRRLASYFQALADEAGVRIDVHGEAPVVADATLFRRAVSNLASNALEHADAASTIELAVSVQRGYAVVEVTNRGAAIPPEQVERIFERFYRIDSSRHGAARNAGLGLAIVKSIMELHRGKVEVASRDGRTTFALYFPRGADR

SEQ ID NO: 48167 - protein, 465 aa, Burkholderia cepacia
LLLVSGTLESINRIVDTSLSVTLFGRGIVSLVVALTVGASLLRANRARAALAAAGEAPEQRSTLAGLIHAGVTLAIVASLIALLIGYITVARFITYELVWFEIVLCATYILIQLTRDASESLFSSSLSTGQQIKHLFALEDRHLDQARTVLSGFGTSLLMLIAAIALVTGGFGTTPGDLLDSAVAMIGSQRLQSLNIMPDRIMNAVIGFAIGFYLLRSLRRWLDGEFMPALGMDTGMRVSLITLFTNVGYVLLVLMTLGLLGVRWNNLAWIVSALSVGIGFGLQEIVKNFVSGLILLTERPVKVGDMVSIAGVEGDIRRINVRATEIQLSDRSTVIVPNSQLISQNVRNVTMGNSTQGVATLVLTFPLNTDPEQVRDLLLDAYRAHQAILEKPAPSVTFSQLAPDGITLSVTGYVSSPRIASSTKSDLLFEILKQLRAAGITLSSPQMLVVQNMPANDGATRHES

SEQ ID NO: 48168 - protein, 278 aa, Burkholderia cepacia
MLELRQQFPLAGLLRVAGLARSTFYYQCKALAAPDRHASVKAKIRALFEQHKGRYGYRRITLALRRLGQMINHKTVARLMRKMQLKSCVRVKKYRAYRGNTCKTAPHLLQRQFHAARPNEKWVTDITEFSVGGQKLYLSPVLDLYNGEIIAYQTHTRPAFQMVTDMLRKALRRLQPDERPMLHSDQGWHYQMPGWRLMLEQRSLAQSMSRKGNCLDNAAMESFFGTLKSEFFYLNHFSSIEQLRIGLKRYIRYYNHERIKLKLKGLSPVQYRTQPHPA

SEQ ID NO: 48169 - protein, 364 aa, Burkholderia cepacia
MARPFLTTPPMTASNASSPATLSLARPDDWHLHLRDGDMLAAVLPHTARQFGRAIVMPNLKPPVTTTAQAQAYRERILAALPAGMTFEPLMTLYLTDNTPPDEIRRARESGFVHGVKLYPAGATTNSDHGVTDLAKCAKTLEAMQETGMPLLVHGEVTDASIDLFDREKVFIDRVMTPLRRDFPGLKVVFEHITTKDAADYVRDADAAPGLLGATITAHHLLYNRNALFVGGIRPHYYCLPVLKRETHRVALVEAATSGNPRFFLGTDSAPHARDAKETACGCAGCYTALHALELYAEAFDTAGALDKLEGFASFFGADFYGLPRSAETVTLRREPWELPREIFAGETPVVPLRGGETIGWKLA

SEQ ID NO: 48170 - protein, 131 aa, Burkholderia cepacia
FFYATLHFTTYLWFDKWFDVVAILKDVGKRPFITVGFAAFVLLIPLAATSPRAMVRRLGRHWATLHSAIYAIALFGVLHFWWMRAGKHDLAQPKLYAAIVAALLGWRLVTWGWRRVRRDGAAAEKQKAMTG

SEQ ID NO: 48171 - protein, 101 aa, Burkholderia cepacia
MAKLALIEREKKRARLVAKFAAKREALKAIVEDQSKSEEERYEARLELQQLPRNANPTRQRNRCAITGRPRGTFRKFGLARNKIREIAFRGEIPGLTKASW

SEQ ID NO: 48172 - protein, 277 aa, Burkholderia cepacia
MQKMKLAAIESEWETQPAPASFTLIGIPNQKEERTDYAIKIPYALGLIATRSIDEPVIGLRELAKHSEEHIQSGMVAYGALQKIKEGDTSDATRALFDQHKQYLGYGLMLKQFTPNVVDATPEQIKAAAKKTIPPVAPVFFSFRIMVFLGFLFLATFVAAFWFCARRQLLQDNRRWFLRYAVWAIPLPWLAAEFGWVVAELGRQPWTIAGILPTHLSASSLTSTDLYLSLAGFIAFYTVLFIIEIKLMFKYARLGPSSLHTGRYHHELAAAGERAAV

SEQ ID NO: 48173 - protein, 151 aa, Burkholderia cepacia
  MISC_FEATURE (128)..(128): X=any amino acid
MARYTEQFKLSVVKRCIGGEAIRAVARTHGLSHSTVSQWYATYQAHGKDGVRRKYNSYDVAFRLKVVQHMREHGVSSKEAAARFNIRNPSAVLEWARRYDDGGLTALPPRPKGRRPTAMPKPPLLSLXTLPMAPVPRTRKDLLQETDHLSM

SEQ ID NO: 48174 - protein, 330 aa, Burkholderia cepacia
MTDVTASPAPADTAATPAYDPTAKQKAQAKTARIPIKVIPIEKLKKPEWIRVKAATGSSRFNEIKTILREHNLHTVCEEASCPNIGECFGKGTATFMIMGDKCTRRCPFCDVGHGRPDPLDADEPKNLARTIAALKLKYVVITSVDRDDLRDGGAAHFVECIREVREQSPDTRIEILTPDFRGRLDRAISILNAAPPDVMNHNLETVPRLYKEARPGSDYAHSLKLLKDFKAQHPDVATKSGLMVGLGETEEEILQVMRDLRAHDVDMLTIGQYLQPSEHHLPVRAYVHPDTFKMYEEEAYKMGFTHAAVGAMVRSSYHADLQAHGAGVV

SEQ ID NO: 48175 - protein, 340 aa, Burkholderia cepacia
MDAVMRPAGRSAGRPPDPNRIAIVSKSSEKLDLATRAAWLYYVAGDTQNEIAEKLQVSRPVAQRLVAFAVEKNLIRVRVDHRLADCLDLGAQLSKRYGLAMCEVVPVDADAPDAIDRKLAVAGAQVMERYLNETRPMVIAVSSGRTLKAAVAQIAQIDRPQHRLVSMVGAIAADGSSNRYDVAQYISEKTGSKHFLLPAPLFADSDAERAQWCNHRLYRIVEALSGKADVAFVGIGNIGPHCPLYEDGFITEQERDEMTALGAVAELLGVPIDAQGTQITVSTSARVTSVALATPPKLPTIAFAGGPKKHDAVIAALRGGWLSGLVTDETCARAALAAKG

SEQ ID NO: 48176 - protein, 97 aa, Burkholderia cepacia
NTFPARTRNAFSQSRTVPGIEPSGDRILQGRMFSHTDTQMYRLGANFNQPPINRPRVRVTNNNQDGALNFGDRKGEANYESSTLNELAQNPRDKSEQ

SEQ ID NO: 48177 - protein, 421 aa, Burkholderia cepacia
MITQSSPASRTAPDPDVPLSLADAQALACRFAVPVDACDTVTLRDALDRVLAVDVSAPFDIPAYDNSAMDGYAFDGGSAALASPQGEVAMPVAGTAFAGHPFDGAVAAGACVRIMTGAPMPAGCDTVIPQERVRVEGDTIRFATRDVARGANCRKAGEDLARGACALAAGRVLRPSDLGLLASFGVTDVMVRRRVRVAVFSTGDELREPGEPLGRGALYDSNRGMLIAMLERLHVDAIDLGIVRDDPAAQADAVVTSGGVSVGEADFTRDVMARLGDVTFASLALRPGRPLACGTLARAADGAGHALFFGLPGNPVASAVTFYAIVRPALLTLAGAQTPPPAMYTARSTQPLKTRPGRTEYLRGIATRAADGQWHVVPAGSQSSASLSGLADANCFIVLGHDTAAVDAGAPVDILPLDGLI

SEQ ID NO: 48178 - protein, 897 aa, Burkholderia cepacia
MSDNASSTVIRRADYTPPAFLIDSVALEFDLAPARTIVRNTMRVRRNPDAAPAPHLELMGEALEFLGARLDGAPHGAVRAHEHGLTVENVPEAFELTLESACAPDQNTTLSGLYVSSGNFFTQCEAEGFRRITYFLDRPDVMASYVVTLRADKAAYPVLLSNGNLVDSGDLPDGRHFAKWEDPFRKPSYLFALVAGKLVAIEETITTGSGKEKLLQVWVEPADLDKTRHAMDSLIHSIRWDEKRFGLELDLDRFMIVAVGDFNMGAMENKGLNIFNTKYVLANPETATDTDFANIESVVGHEYFHNWTGNRVTCRDWFQLSLKEGLTVFRDQEFSADMAAGDAVESAARAVKRIEDVRVLRQLQFAEDAGPMAHPVRPESYVEINNFYTMTVYEKGSEVVRMYQTLFGRDGFRKGMDLYFKRHDGHAVTCDDFRHAMADANGRDLAQFERWYSQAGTPRVSVRTAYDAAARRYTITLAQGYGDASPAARETQQGPLLIPFAIGLIGRDGRDLPLRLDGEAAASGTTRVLEFTDTEQTFTFVDVPEAPLPSLLRNFSSPVIVEYDYSDDDLAFLLAHDSDPFNRWEAGQRLATRALLTLAARAAANAPLTLGENFVAAFRRVLTDESLSPAFRELALTLPSETYLADQMAEADPAAVHRARQFVRRQLATALRADWLATYEQHQTPGAYEPTPEASGRRALKNLALAYLAELDDPADAVRLATAQYDAANNMTDRAAALGALLSAAAAGANGPAEHALDDFYRRFEKEALVIDKWFAMQAAQRGTPAQPTLAKVRKLLAHPAFNLKNPNRARSLIFSFCAANPAQFHAADGSGYAFWAEQVLALDAINPQVAARLARSLELWRRFTPALRDRMREALEQVAAGAKSRDVREIVEKALA

SEQ ID NO: 48179 - protein, 497 aa, Burkholderia cepacia
MTVFRAARPLDWRQVAAVAAGAPLALPDDTRARVVAARELVDEIVARGIRAYGVNTGVGALCDVIVSPAQQSTLSHNILMSHAVGVGMPLGAAETRAIIAAAINNYAHGHSGVRPDVVEQLVALLEHDCLPEVPAHGSVGYLTHMAHVALVCVGHGHARHRGERMRGDEALRRIGREPLVLGAKEGLSLVNGTPCVTGLAALALARAERLLDWADWIAAMSFENLGGQLAAFDPASLALRISPGIGQVGARVRALLADSGMLAAASGRHTQDPLSLRTIPHVHGAARDVFDVTAEVVDRELASVTDNPVVAGTRDAPAVHSQAHAVGAGIALAMDSLAAAMAQVAAIAERRLDRLVNPLVSGLPAFLAAPGGSCSGFMIAQYTAVALVAQNQRLAAPASLDGGITSGLQEDHLCHATPAALKALDIIENTTRVLAIELLAAAQAYDLQPGDTARAASTDALWRHVRTRVPVYRDDRPLADDIAIAAGIVAGVPPSLQ

SEQ ID NO: 48180 - protein, 313 aa, Burkholderia cepacia
MDTLQNMRVFVRVVDAGSFTAAAQQMNSTTAYASRAVSDLEAHLRTRLLNRTTRRIALTEAGERYLQRCEQILAYVDQAEAEAGDAHARPSGKLKVHCFTSLGQHYLVPAIARYRERYPDVHVELTLAQRMPDLLDEGYDVAIVVGRDLPDSGLVSQRLGESYSVVCASPGYVESHGVPQRPADLAQHVCLGMVAPGFHFDEWALAGPNGDEVVPITAPPFRVNVAEALAVAVREGMGVGGLPLYSAIGWLRSGHIVRVMPEYRSHVMNIYALYPSRQYLDAKIRTWVDFLREKLPLTLEADEAALEQYTRAT

SEQ ID NO: 48181 - protein, 313 aa, Burkholderia cepacia
  MISC_FEATURE (246)..(246): X=any amino acid
MAHTGELAALAERAVKRRGVTLLTLCLAVLVAQVDTAVVNLATRAIGAYFHAGVGALQWVVDSYNLTYAVLLLTGGLLADLYGRRRIFMAGTAVFTLASLLCALAPSVSVLIAARALAGVGAALLLPASLAIVRVVWRDPVARGRALGIWAACNGVAMALGPTLGGVLIRHFGWRSIFFVVVPLSVAAMLLAIPAVPESSDPHGRHFDGAAQVAGALALGALAYAAIVFRDAPVACSIAGCIAVPXRRSARVTPSPRWRGAVAPLRLLVPALCTRRFPPPPLLLLVVLSSPPLPPAALCRSPRRLLKKNKKKK

SEQ ID NO: 48182 - protein, 391 aa, Burkholderia cepacia
MSRREWLKLSALFTATGAAPLLSMANAHAAAEPDAPVRIGYLPITDAAPLLVAHNNGYFASEGLTVEQPKLLRSWAQLVEAFLSGQVNVVHLLSPMTLWARYGSRAPAKVVAWNHVNGSGLTVAPDIDSLRDLGGKTVAVPFWYSIHNVVLQDMLRGQGLVPVLKRRGTPAANEVNLVVMAPSDMLPALAARQIAGYIVAEPFNATAELMKIGKILRFTGDVWKNHACCVVFMHEQDLTQRPAWSQKVVNAIVKAQLWARSHPQETAQLLSKDGTHRYSPHTLASLDRVLVPSASLADTYRASGAIRHADWHAKRIDFQPYPFPSYTEALVQRLKRTVVDGDSTFLASLDPAFATRDLVDDRFVRKSIDAVGGLTAFGQSGGFRREEIVVV

SEQ ID NO: 48183 - protein, 340 aa, Burkholderia cepacia
MATSVAARPHRPIGVTRVMDTSSINAQSIFDDNAATLKLSWLTGHEGWERGFSADTVGNATSSADLVGHLNLIHPNRIQVLGEAEIDYYQRQTDEDRSRHMAELIALEPPFLVVAGGAAAPPELVLRCTRSSTPLFTTPMSAAAVIDSLRLYMSRILAPRATLHGVFLDILGMGVLLTGDSGLGKSELGLELISRGHGLVADDAVDFVRLGPDFVEGRCPPLLQNLLEVRGLGLLDIKTIFGETAVRRKMKLKLIVQLVRRPDGEFQRLPLESQTVDVLGLPISKVTIQVAAGRNLAVLVEAAVRNTILQLRGIDTLRDFMDRQRLAMQDPDSQFPGKLV

SEQ ID NO: 48184 - protein, 362 aa, Burkholderia cepacia
  MISC_FEATURE (324)..(324): X=any amino acid
  MISC_FEATURE (351)..(351): X=any amino acid
LAGKWHYRLGALLGEGGNGVVFRATCDETGHAVALKLMRDDAALVAPERMRRRARFRRETSLCEALRHPNIVALLDQGEAPDGRLFAVFELVEGRTVRDRLAADGPLSAIDTGRLMTQVLDALAAAHRRGIVHRDLKPQNIVIAMADDGPHAKLLDFGIGALLPGTEDIARQTATLATEVLGSPPYCAPEQLRNEPPTPASDLYAWGLIVIECLTGEVVMQGASVAEILYQQLSPVDVALPPSIAALPLGAVLRHALNKNPRQRAASAERSRRSFVRSTSPRSSASSTPVAPAGTRVRDRLRRAARRSRRWASTGRSPPCAAAXRSPERAAGAMPEPSTGWCSTATRNSGXRSAPISPSVTA

SEQ ID NO: 48185 - protein, 390 aa, Burkholderia cepacia
MIDGQILLGHSIRWGMVGGGLGSQIGYSHRSAALRDGSFQLVAGAFDLDPERGRQFGVKLGVAAERCYPDYATMFDAEARRPDGIRAVSIATPNNTHFEICRAALNAGLHVVCEKPLCFTTEEAEALQRLSVEKNRIVGVAYGYSGHQMIEQAREMIARGDLGEIRIVQMQFAHGFHSEGVEAASAAARWRVDPKFAGPSYVLGDIGTHPLYISEVMAPALKIRRLMCSRQSFVKSRAPLEDNAFTIMEYDTGAIGYVWSSAVNAGSMHGQKVRVIGSKASIEWWDEHPNQLRYEIQGQPAQVLDRGMPYLHPHALREDRIGAGHPEGLFEAWSNLYARFALAMDAADRGDMAAVKAIRIPDVHAGVEGVRWVENCVRSADAGSVWVDYR

SEQ ID NO: 48186 - protein, 257 aa, Burkholderia cepacia
MTIRRRSGARQPVASLPMTDLSSLPASRDTDAADRSYIGLARQIHAMVAAGAFEAGARLPSERSLADQFGVSRTQVREAIIALEVQGIVEVRIGSGIYVSAADAARPVTFEVPRGPGPIETLRARGLIEAEVAALAATERKDADLDRLFFSLTTMREQMNDKAAYDAADRQFHLRIAESTGNTVLLHMVTAMWDCARSDPLWDKIEEHFHSTALREASQEDHQRIFAAIMARDADGARDAMRAHLSRVIAEFTQAWR

SEQ ID NO: 48187 - protein, 439 aa, Burkholderia cepacia
MRRNWRSSDWVLLARDGTPLQRTRIDLTERRGDWVSLADVSPAFREAIVVSEDKRFYEHSGVDWRGIAGAAWGNLWNERTRGASTVTMQLAGLLSDSPRRSGQRSLPQKATQAVNALWLERSWRKDQILEAYLNLVPFRGETIGLGALSQVLFGKAPSGLDAREAAIAAALVRAPNAAPAKIAERACRILRDMHAEQACASLDGYVQLVVARPANTVRDDGAALAPHFARRIAAEVKPAAGAQIRTTLDAPLQRFARDTLTRALTELDAPAHRRNVQDGAVVVIDNATGEIRAWVGSSGALSSARDVDAVLAPRQAGSTLKPFLYAQALDEKRLTAASLLDDAPINLAAGGGLYIPQNYDKDFKGWVSVRSALGGSLNVPAVRALVLVTPHRFARTLTALGLPLAQEGDYYGFSLALGSADVTLLSLTNAYRALANGGV

SEQ ID NO: 48188 - protein, 210 aa, Burkholderia cepacia
MPDTVCRPPRLILASSSRYRRALLERLGVPFDVVSPDLDETPLAGETPAATALRLAAAKARAVAATIDAPDGVLVIGSDQVATFDGHQIGKPGTHERALAQLVSMQGREVEFHSALCLYDSRTDEAQVEDIVTHVRFRSLPEAELDAYLHAETPYDVAGSAKSEGLGIALLDAIDSDDPTALVGLPLIALTRMLRAAGYPLFATTRGDRA

SEQ ID NO: 48189 - protein, 292 aa, Burkholderia cepacia
LEALPTVVIVLDRKTLRIAFANPSAEAMLDISRRQLAQRPWGEIFPNANELASTITAIGEERFHATHLDTVLDRPGREPLHVHAIVGFLENAPDFVLVELFENERQSRTDREERIHDLTAVNKQLIRNLAHEIKNPLGGIRGAAQLLEFELGERERGELREYTQVIIKESDRLQTLVDRLLEPHRHPHIVGDVNIHEVCERVRAVMLAEFPRGLTIERDYDVSVPDLRGDKEQLIHALLNIVRNAAQALRERIRTADPNIHLRTRIGRNATIPQRLCRLALDSPPSHTGPGL

SEQ ID NO: 48190 - protein, 89 aa, Burkholderia cepacia
MSVADIKKSEVVAQFARGTNDTGSPEVQVALLTARIVELTGHFKTHAKDHHSRRGLLRMVSRRRKLLDYLKGKDADRYRALIEKLGLRK

SEQ ID NO: 48191 - protein, 99 aa, Burkholderia cepacia
MNRLQLTASVVERAPVRYTPAGVPIASATLHHRTEVVEAGIPRQVEMTIEAVAAGEASGKLESREMGVETLFTGFLAKKSRNARTLVFHITALQDIGKD

SEQ ID NO: 48192 - protein, 82 aa, Burkholderia cepacia
MRILNRCPHCRTRATARSSREMSLTFREITFQCSNPECGHTYVVNMEFARTLSPSAIPNLSLQLPLSPHVRERLAAQLELPV

SEQ ID NO: 48193 - protein, 332 aa, Burkholderia cepacia
MTAAAIDQTFSIAWASQYVNNFLDTDGRIKKVYVQSDAPFRMTPEDMNIWYVRNSAGGMVPFSAFSTGHWIYGSPKLERYNGVSSIEIQGQAAEGKSTGQAMAAMEALASKLPEGIGYSWTGLSFQEIQSGSQAPILYAISILVVFLCLAALYESWSIPFSVIMVVPLGVVGALLATMLRGLENDVFFQVGLLTTVGLSAKNAILIVEFARELQAGGNMGPVRAAIEAARLRLRPILMTSLAFMLGVLPLAISNGAGSASQHAIGTGVIGGMITATFLAIFMIPMFFVRVRAIFSGETENVDDAWRLVQGDLHGGHDDANDPNWVVLCTNML

SEQ ID NO: 48194 - protein, 355 aa, Burkholderia cepacia
MSETPLAASAPLDARYTRGAALPALLKSRILILDGAMGTMIQRYKLDEAAYRGERFKDFPRDIKGNNELLSLTQPQIIREIHDQYFAAGADIVETNTFGATTVAQADYGMEDLVVEMNVASAKLARESAAKYATPDKPRFVAGAIGPTPKTASISPDVNDPGARNVTFDELRTAYYQQAKALLDGGVDLFLVETIFDTLNAKAALFALDELFEDTGERLPIMISGTVTDASGRILSGQTVEAFWNSLRHAKPLTFGLNCALGAALMRPYIAELAKLCDTYVSCYPNAGLPNPMSDTGFDETPDVTSGLLKEFAQAGLVNLAGGCCGTTPEHIAEIAKALAGVKPRRWPNQYSDNA

SEQ ID NO: 48195 - protein, 115 aa, Burkholderia cepacia
  MISC_FEATURE (19)..(19): X=any amino acid
MLSAVISSEHSYPAMPLAXQPVHQRFVHSGPLVLGAAPFKYPTPTADRDQTVSRRFKPSSRTSLNGEQPYPWDRLQPHDEMSRHRGAKHRRRYELLGGIRLVSPEDLLSVERWAF

SEQ ID NO: 48196 - protein, 380 aa, Burkholderia cepacia
MTLASTLDIIAELKAGRMVILVDEEDRENEGDLVIAAEFVTPEAINFMAKYGRGLVCLTLTQERCKQLHLPLMTYRNGTQYGTAFTVSIEAAEGVTTGISAADRAHTIATAVAHDVRPEHIVQPGHVFPILAQPGGVLVRAGHTEAGCDFTALAGLTPAAVICEIIKDDGTMARLPDLIEFAKEHNLKIGTIADLIQYRSRTESIIERIAERTMQTAHGTFRAVLYRDQPSGSPHIALVRGAPSPDVDTPVRVHEPLSVLDLLETGVSTHSWTLDAAMRDIAERDLGVIVLLNCGDTKEHLIDVFKAFDEEEKAAALKRRPVDFKTFGIGAQILRDVGVGKMQVLSNPRKLGSMSGYGLEVTGFIPMPGGEAKSCPASHA

SEQ ID NO: 48197 - protein, 130 aa, Burkholderia cepacia
MFPQAAAGQQRVVIALPALENEGDARVELMIGKTLQTDCNQQWFGGELTAEDVKGWGYTYYRLTDVKGPASTLMACPGQTPQQRFVQVRGDGQLLRYNSRLPLVVYVPDGFDVRYRVWHASKDVQQAVKQ

SEQ ID NO: 48198 - protein, 251 aa, Burkholderia cepacia
MIRIDSIHKRFQQHAVLKGVSLDVQPGEVVCLIGPSGSGKSTVLRCINGFETYDEGSITIDGVKVDAHSKRIHELRMRVGMVFQRFNLFAHRTALENVMEGPVHVRRVPVAQAREQARALLDKVGLAHRMNAYPSELSGGQQQRVAIARALAMEPQAILFDEPTSALDPELVGEVLGVMRGLARDGMTMVVVTHEMAFAREVADRVCFLHDGTICESGPARDVLTQPTHPRTQEFLRRLLASDGADNPDRT

SEQ ID NO: 48199 - protein, 115 aa, Burkholderia cepacia; identical to SEQ ID NO: 47422

SEQ ID NO: 48200 - protein, 156 aa, Burkholderia cepacia
MPRRREVPKREVLPDPKFGNVDVAKFMNMLMLSGKKSVAERIVYGAFEQIQTKGGKDPLEVFTVALNNVKPVVEVKSRRVGGANYQVPVEVRPSRRMALAMRWLREAAKKRSEKSMALRLAGELSEAAEGRGGAMKKRDEVHRMAEANRAFSHFRF

SEQ ID NO: 48201 - protein, 220 aa, Burkholderia cepacia
MRLILLGAPGAGKGTQANFIKEKFGIPQISTGDMLRAAVKAGTPLGVEAKGYMDAGKLVPDALIIGLVKERLKESDCANGYLFDGFPRTIAQADAMKEAGVAIDYVLEIDVPFSEIIERMSGRRTHPASGRTYHVKFNPPKVEGHDDVTGEPLIQRDDDKEETVKKRLEVYEAQTKPLITYYGDWAQRGEENGLKAPQYRKISGLGTVDEIRERAFDALK

SEQ ID NO: 48202 - protein, 416 aa, Burkholderia cepacia
MTYCAIDFGTSNSAVALPDGDGMRLAPVEGDHLTLPTAIFFNNDEETVEYGRAALASYIDGFDGRLMRSMKSILGSPLAETTTDLGDGSAIAYTDIIARFLTHLKRKAEARAGAPIGRAVLGRPVFFVDDDPRADRLAQDQLEAAARSVGFADVHFQYEPIAAAFDYESRQQAERLVLVADIGGGTSDFSLVRVGPQRMARLERKDDVLAHHGVHVAGTDYDRRVELAAILPAFGYRSLDPEGRELPNKIYLDLATWHLINTVYTPKRVGELKLMKHLYQDVRQYDRLTSVVEQRLGHALMARAEEAKIGVAAGGETMIDLNDVEEDLLIAFDADRLVDASQDDTARIVDAARETVRLAGVAPRDVGALYFTGGSTGLAFLSGALAGAFPDAQPVFGDRLASVATGLGIHAQRLFG

SEQ ID NO: 48203 - protein, 108 aa, Burkholderia cepacia
MLKGNLAGLMKQAQQMQENMKKMQEQLALIEVEGQSGAGLVKVTMTCRNEVRRVSIDPSLLADDKDMLEDLVAAAFNDAVRKAEATSQEKMSGMTSGLPLPPGFKLPF

SEQ ID NO: 48204 - protein, 445 aa, Burkholderia cepacia
MTTQPTGDIAAHRLSSTQLSCEFADIAPLLDPTAAAAAASRCHYCYDAPCVHACPTQIDIPSFIRKIGNGNLKGAATDILSANPLGGMCARVCPTEILCEGACVRNHQDAQPVAIGALQRHATDWAMQTGAVQFRRAPETGRHVAVVGAGPAGLACAHRLALAGHRVTLFDARPKAGGLNEYGIAAYKTVDDFAQREVEWLLSVGGITLQTGAALGRDVTLDALREQHDAVFLAMGLGGVRALAIDGEQLGGVMNAVDFIAQVRQADALANVPVGRRVVVIGGGNTAIDAAVQSRKLGAERVTMVYRRGVDAMSATWAEREFAQKSGVTLVTHAKPVRIAGTDGQVTGVEFEGASGERFTVDTDMVLKAIGQTLVPDGIAATLLTSDRTRIAVDADGRTALPDVWAGGDCAATDGIDLTVQAVQDGKRAAASIDATLAARDAKAA

SEQ ID NO: 48205 - protein, 388 aa, Burkholderia cepacia
MFPKEPPVLPSFSPALLALADGTVFRGYSIGAEGHTIGEVVFNTAITGYQEILTDPSYSRQIVTLTYPHIGNVGVNAEDVEATKVHAAGLIIRDLPTLASNFRMDRTLGDYLRDEGVVAIAGIDTRKLTRILRDKGAQNGCILTGSDDEAKAIELARSFPGLAGMDLAKVVSTTKPFEWKQTEWRLEGGYGMQEAPKYRVVAYDFGVKYNILRMLAERGCHVTVLPAQASAEDALALNPDGVFLSNGPGDPEPCDYAIAATKAFIERGVPTFGICLGHQIMGLAVGAKTLKMKTGHHGANHPVKDLGDGRVVITSQNHGFAVDADSLPANARVTHVSLFDGTLQGFELTDKPAFCFQGHPEASPGPHDIGYLFDRFTALMDAAKQRNA

SEQ ID NO: 48206 - protein, 401 aa, Burkholderia cepacia
MLRRFWLFFAQAVTVLLALMFIVVTLKPQWLQRQGQLGKQLATPIVALREVAPGIGGAPATTSYAEAAQKAMPAVVNVFSSKDGSLPPDPRAKDPLFRYFFGDRNARKQQDEPAANLGSGVIVSPEGYILTNQHVVDGADQIEVALADGRTATAKVIGSDPETDLAVLKINMTNLPTITLGRSDQSRVGDVVLAIGNPFGVGQTVTMGIISALGRNHLGINTFENFIQTDAPINPGNSGGALVDVNGNLLGINTAIYSRSGGSLGIGFAIPVSTARTVLESIITTGSVTRGWIGVEPQDVTPEIAESFGLQQKSGAIVAGVLQGGPADKAGIKPGDILVSVNGEDITDTTKLLNVVAQIKPGTPTKVHVVRKGKQFDVNIVIGKRPPPPKQTLDEQDSDSE

SEQ ID NO: 48207 - protein, 131 aa, Burkholderia cepacia
MDKSMKILVVDDFPTMRRIVRNLLKELGYSNVDEAEDGLAGLARLRGGGYDFVISDWNMPNLDGLAMLKEIRADATLTHLPVLMVTAESKKENIIAAAQAGASGYVVKPFTAATLDEKLNKIIDKMAKAGS

SEQ ID NO: 48208 - protein, 483 aa, Burkholderia cepacia
MNYISTRGAGIGERHTFSDILLGGLAKDGGLYLPAEYPKVSADELARWRTLSYADLAFEILSKFCDDVPADDLRAITRRTYTAAVYSNTRHGENASDITPLKTLGTEHGAALSLLELSNGPTLAFKDMAMQLLGNLFEYTLAKHGEALNILGATSGDTGSAAEYAMRGKAGVRVFMLSPHKKMSAFQTAQMFSLQDPNIFNLAVEGVFDDCQDIVKAVSNDHAFKAQQKIGTVNSINWARVVAQVVYYFKGYFAATQSNDERVSFTVPSGNFGNVCAGHIARMMGLPIAKLVVATNENDVLDEFFRTGAYRVRSAENTYHTSSPSMDISKASNFERFVFDLLGRDPARVMQLFRDVEEKGGFDLAASGDFARVAEFGFVSGRSSHTDRIATIRDVFSRYDTMIDTHTADGVKVAREHLEAGVPMVVLETAQPIKFGETIREALDREAERPAAFDGLEALPQRFEVVKADAQQVKDFIAAHTGA

SEQ ID NO: 48209 - protein, 207 aa, Burkholderia cepacia
  MISC_FEATURE (206)..(206): X=any amino acid
MKLTPREKDKLLIFTAALLAERRRARGLKLNYPEAVAFITAALMEAARDGRTVAEVMHYGTTLLTRDDVMDGVPEMIPDIQVEATFPDGTKLVTVHHPISVRPRMIPGEILTDDGEHELNAGRATRSLVVANTGDRPVQVGSHYHFFEVNDALSFDRAAARGFRLNIAAGTAVRFEPGQTRTVELVALAGERAVYGFQGKVMGPLXA

SEQ ID NO: 48210 - protein, 320 aa, Burkholderia cepacia
MARIVPARHRARAAASGRLPSPAILSGYVDLPAARPKRRAPPSPMLVLGIESSCDETGLALYDTQRGLLAHALHSQIAMHRDYGGVVPELASRDHIRRALPLLEEVMAQSGTRRDDIDAIAFTQGPGLAGALLVGASIANALALAWNKPTVGIHHLEGHLLSPLLVDAPPPFPFVALLVSGGHTQLMRVTDVGVYETLGETLDDAAGEAFDKTAKLIGLGYPGGPEVSKLAETGTPGAVVLPRPMLHSGDLDFSFSGLKTAVLTQMKKFEAAKFDGEALERAKADLARGFVDAAVDVLVAKSLAALKKTKLKRLVVAGGV

SEQ ID NO: 48211 - protein, 446 aa, Burkholderia cepacia
MTEQKRKIEKLTGVKGMNDILPQDAGLWEFFEATVKSLLRAYGYQNIRTPIVEHTQLFTRGIGEVTDIVEKEMYSFTDALNGENLTMRPENTAAVVRASIEHNMLYDGPKRLWYIGPMFRHERPQRGRYRQFHQVGVEALGFAGPDADAEIIMMCQRLWDDLGLTGIKLEINSLGLAEERAAHRVELIKYLEQFADVLDEDAKRRLYTNPLRVLDTKNPALQDIAQNAPKLIDFLGDESRAHFEGLQRLLLANNIPFKINPRLVRGLDYYNLTVFEWVTDKLGAQGTVAAGGRYDPLIEQLGGKPTAACGWAMGIERILELLKEEDLAPEQEGVDVYVVHQGETAREQAFIAAERLRDTGLDVIFHCSADGAPASFKSQMKRADASGAAFAVIFGEEEVANGTVGVKALRGAGAEGEKNVQQTVPVESLTEFLINAMVASAEDGDD

SEQ ID NO: 48212 - protein, 88 aa, Burkholderia cepacia
MALMITDECINCDVCEPECPNGAISMGPDIYVIDPNKCTECVGHFDEPQCQQVCPVECIPRDPQHDESHAQLMEKYHTLIAVKGGDAS

SEQ ID NO: 48213 - protein, 382 aa, Burkholderia cepacia
MPIVARRVDCCIRSDALTRINVLRFRNRILSRSSTRQERRMTQTMKAAVVHAFGAPLRIEEVPIPAPGPGQILVNIKASGVCHTDLHAADGDWPVKPSLPFIPGHEGVGIVAAVGAGVTHVREGDRVGVPWLYTACGHCEYCCTGWETLCHGQQNTGYSVNGSYAEYVLADPDYVGQLPAQVAFDEIAPILCAGVTVYKGIRVTDTRPGQWLAISGIGGLGHVAVQYARAMGLHVAAIDISPDKLALARQLGAHLTIDASIDDPATVIQKEIGGAHGVLVTAVSRSAFAQALGMVRRGGTVALNGLPPGDFPLPIFSTVLNGITVRGSIVGTRRDLQESLDFAADGLVRAHIHRDRLGNINDVFAKLREGKVDGRIVLTDMH

SEQ ID NO: 48214 - protein, 465 aa, Burkholderia cepacia
MKHIVKHIHFVGIGGAGMSGIAEVLANLGYAVSGSDLSRNAVTDRLEALGARIAIGHDAANIEGANAVVVSTAVRSDNPEVLAARAKRVPIVQRAVMLAELMRLKQGIAIAGTHGKTTTTSLVASVLAAGGLDPTFVIGGRLISAGANARLGTGDFIVAEADESDASFLNLYPVIEVITNIDADHMDTYGHDFARLKQAFIEFTQRLPFYGSAVVCVDDPNVRQIIPFISKPVVRYGLSPDAQVRAEDIDARDGRMHFTVIREGRAPLAVVLNMPGLHNVQNALAAIAIATDLGVSDDAIQLALAEFNGVGRRFQRYGEVPSADGGQYTLIDDYGHHPVEMAATIAAARGAFPGRRLVLAFQPHRYTRTRDCFDDFVNVLSTVDALVLTEVYAAGEAAIPTASGDALSRALRAAGKVDPVFVATVDDVPDALAKVARNGDVVITMGAGSIGGVPAKLVQHIQQKA

SEQ ID NO: 48215 - protein, 124 aa, Burkholderia cepacia
MFHVLLVSGDAISPRSFQGIVMQQQKIRIRLKAFDYRLIDQSAAEIVDTAKRTGAIVRGPVPLPTRIQRFDILRSPHVNKTSRDQLEIRTHQRLMDIVDPTDKTVDALMKLDLPAGVDVEIKLQ

SEQ ID NO: 48216 - protein, 339 aa, Burkholderia cepacia
MLKLAGTAALAAEGTRMKQYLDLVRTILDTGSWQENRTGIRTISMPGAMLRFDLQQGFPAVTTKKLAFKSAIGELVGFLRASRSAADFRALGCKVWDANANENAQWLANPYRQGVDDLGDVYGVQWRQWPGYKVLDAGADAQIADATRRGFRIVTRFDEDGAPKVLLYKAIDQLRQCLDTIMENPSDRRILFHAWNPAVLDQIALPACHLLYQFLPNATKREISLCLYIRSNDVGLGTPFNLTEGAALLSLVGRLTGYTPRWFTYFIGDAHIYENQLDMLQQQLTREPYESPRLEIAERVPDYAKTGVYAPEWLEQVEPSDFSLVGYRHHEPLTAPMAV

SEQ ID NO: 48217 - protein, 287 aa, Burkholderia cepacia
MQARLRFREFVRERRRDAVARREQRHAVEQVRVADHERHGHRFAERTDKTEHHAADHAGLRVGQHDLPHHFPGRAADPVCRFLQQHRRDFEHVAHHRCDVRDDHDREDHAGREDADADRRAGRQRAEHPHVLEQAAERLLEVFGEDRREHEQAPHAVHDRRDRGEQLDRDAERTAQPHGRQLGEEQCDAETDRHRDDECNDRRHDGAVDRHECAVHIRVRIPLGLPQEADAELLDGRHRRNDQGNDDPAQQQQGHDRGEPCEAAEQDIPETARRALLRTVGRSGGRV

SEQ ID NO: 48218 - protein, 148 aa, Burkholderia cepacia
MSIIDNRKAHFDYHIEERYEAGLVLEGWEVKALRAGRGQIKEGYVVVKNAEIFLIGTHISPLPEASTHIKPDPVRTRKLLLHREEIKKLIGKVEQRGYTLVPLNFHYKGGRVKCDIALAKGKKLHDKRETEKKRDWEREKARIMRAGT

SEQ ID NO: 48219 - protein, 244 aa, Burkholderia cepacia
METGWAELAPDPLDDTPLYLQLARNLASAIHAGAWQAGEALPSERLLSVSVGVSRITARRALALLVEQGLIKRARGAGSFITPRVADPLSRLVGFTAKMRQRGFVPDSVWLSRTLRTASRDELTHLGLAPGATVARLERLRRADGIVMAVEHSTLPAAVVPDPQVLGASLYEYLEARGMTVVRALQHFRAANATHAIAKWMAVKPGSALLVITRIGYGVDQRAIEMSETYCRDDYYDFVAELKR

SEQ ID NO: 48220 - protein, 1099 aa, Burkholderia cepacia
  MISC_FEATURE (6)..(6): X=any amino acid
GGSRTXTAHTARSGTKRLAPGSRHRNTIRHGASRTSRPSLPQYWPPSQCSRRSPAPIPSFQARPTVANSPFRRVRRAGGNGTVGRTTTGNTNAYPVDGSGTYSTVAGCNSSGNNNLAATAYGAFAQVTGTGGTATGFLSSAALWGTSAGLESTASGAGSTALGFGATANALNSVAIGGAAGNGTTPLSYANSTIASGAGAVAIGSNATKGAQSAASDGIAIGGQSSVASAATSGIAVGRGATVNGAYGIAQGDGVVSGATGRNVAIGSSGTTANSATSAGGAVAIGRGQSASGDGAVAIGDPNSATGTGALAIGANDTSNGSGAIALGNSSTATNSSVAIGSSASATGTNGAIAVGNAATANGTGAIALGNVGSFAANSIASGTDALALGNGSTASGSAGAVAVGAAAVASGSYGTALGSNSTASVANSVALGYNALTTSAATATSGGTTTVSSATIGGQTFGNFAGANSAGGVVSVGQSGSERRIQNVAAGLVTATSTDAINGSQLYSVASTTTSSITSLSTSASTGLSSANSSISSLSTSTSTGINSLSTGLSSANSSVTSLSTSTSTGLSSANSSIGSLSTSTSTGINSLSTGLSSTNSSVTSLSASTSTGLSSANSSIGSLSTSTSTGINSLSTGLSSANSSVTSLSTSTSTGLSSANSSISSLSTSTSTGINSLSTGLSSANSSVTSLSTSTSTGLSSANSSISSLSTSTSTGINSLSTGLSSTNSSVTSLSTSTSTGLSSANSSISSLSTSTSTGINSLSTGLSSANSSVTSLSTSTSTGLSSANSSISSLSTSTSTGINSLSTGLSSTNSSVTSLSTSTSTGLSSANSSISSLSTSTSTGINSLSTGLSSANSSITSLSSSTSTGLSSANSSISSLSTSTSTGINSLSTGLSTVSTKTDNLGSSTASALGGGSTYDPTTGKVSAPSYTTYNANGTTSTANSVGSAINNINSQGIKYFHANSTGADSTATGTDAVAIGSGAVASTINSVAIGLGAVASTDDSVALGADSKTVAATPTSSATVNGVTFSGFAGAKPVGVVSVGDAGKERQVTNVAAGQVTSTSTDAINGSQLYSVAQQVGTATSAISSLSTSTS

SEQ ID NO: 48221 - protein, 436 aa, Burkholderia cepacia
MSDLFQVEPRRPLAEALRPKTLAEVIGQTHLLGEGKPLRLAFESGKPHSMILWGPPGVGKTTLARLTALAFDCEFIALSAVLGGVKDIRESMEQAKDTLNRTGRHTILFVDEIHRFNKGQQDALLPFVESGLVTFIGATTENPSFEVNSALLSRAQVYVLKSLNDDEMRQLLKRAQEIALDGLAFDDKAIDTLVGYADGDARRFLNLLEQAQTAATSAGVATIDADFVSSAMTLNARRFDKGGDNFYDQISALHKSVRGSSPDGALYWFCRMIDGGADPKYLARRIVRMAWEDIGLADPRALQVANDAAETYERLGSPEGELALGQAVIYLACAAKSNAGYNAFNQAMAFVKQDKSREVPVHLRNAPTKLMKELGYGHAYRYAHDEPNAYAAGETYLPDGMREPRWYQPVPRGLESKIAEKLAWLRELDREAGKKD

SEQ ID NO: 48222 - protein, 423 aa, Burkholderia cepacia
MADKKGSNSEKLLYCSFCGKSQHEVKKLIAGPSVFICDECIDLCNEIIRDEAAAAGVEASLSRSDLPSPQEIRDILDQYVIGQERAKKILAVAVYNHYKRLKHLDKKDDVELSKSNILLIGPTGSGKTLLAQTLARLLNVPFVIADATTLTEAGYVGEDVENIIQKLLQNCNYEVDKAQRGIVYIDEIDKISRKSDNPSITRDVSGEGVQQALLKLVEGTMASVPPQGGRKHPNQDFIQVDTTNILFICGGAFDGLEKVITDRTEKTGIGFGATVKSKQERDAGEVLRETEPEDLIKFGLIPELIGRLPVVATLGKLDEAALMKILVEPKNALVKQYHKLFAMERVELEIRPGALQAVARKAIRRKTGARGLRSIIEQALLDVMYELPTMKGVSKVIIDENVIDGDGKPLLIYEDTPKVAGSN

SEQ ID NO: 48223 - protein, 447 aa, Burkholderia cepacia
MKRYETLAHTIADDIRNGNLAVGTRLPSLRQIIAQHGVSQSTVFRAYYLLEQWGLIRARERSGYYVAPGAQPAASPATKRRTRRTDATRKVDISNLVFSVLDAATQPGIVPLGSAFPAPQLFPLPRLAKSLAQATRLVSPWSTVVDLPPGNEALRQQIVRRYLATGISQPIDELVVTNGALEALNLCLMAVTRPGDVVAVEAPGFYAALQAIERLDLRAVEIPVDPRTGLDLAALANALDRHDIRACWFMTNFQNPTGVTLTVDKKRALVELLAARNVPLIEDDVYGELHFGPDYPLPARAFDRHGLVMHCSSFSKTLAPGYRIGWAAAGRFAEKVQRLKLMTTLSASIPAQAGIANYLEHGGYDRHLRVLRGALHAQLDRMDDALRRWLPADVEWVRPEGGYFLWLAFPDAIDAMALHREAIARGISFAPGPLFSAAHGFERCVRV

SEQ ID NO: 48224 - protein, 390 aa, Burkholderia cepacia
MSETKDAAAPAAAGAFKPKKSVALSGVTAGNTALCTVGKTGNDLHYRGYDILDVAESCEFEEIAHLLVHGTLPNLTELAAYKTKLRALRGLPSALKAALEQIPASAHPMDVMRTGVSVLGTVLPEKDDHNLPGARDIADRLMASLGSMLLYWYHFSHNGKRIETETDDDSIGGHFLHLLHGKTPSKSWVEAMHTSLILYAEHEFNASTFTGRVIAGTGSDIYSAITGAIGALRGPKHGGANEVAYEIQSRYSSPDDAEADIRRRVENKEVVIGFGHPVYTISDPRNKVIKGVAHKLSKEAGDLKLYDIAERLESVMWDAKKMFPNLDWFSAVSYHMMGVPTAMFTPLFVISRTSGWSAHIIEQRIDNKIIRPSANYTGPEDLQFVPIEKR

SEQ ID NO: 48225 - protein, 56 aa, Burkholderia cepacia
MKSATLAAALVAALVLVLSTGCTSSGSGVSQGPGMSRYGGSGGSGGGGGGGGGGGY

SEQ ID NO: 48226 - protein, 291 aa, Burkholderia cepacia
MILRKLFGFVATAVILLVAILIGRSLWVHYMDDPWTRDGRVRAEIVNVAPDVSGAIVELPVHDNQLVKKGDLIMQIDPSHYQIAVEQAQAAVAARRAELQMRRDDAARRADLDALVVSKENRENAAHSASSADAQYQQAIAALDAAKLNLARTRVVAPVDGYITNLQTFKGNYAVAGQAKLAIVDSHSFWVYSYFEETKLPRVKIGAPAEMRLMSGGVMKGHVESISRGIYDRDNPQSRDLVADVNPTFNWVRLAQRVPVRIKIDEVPADVVLSAGTTCTVIIDPDKQKKS

SEQ ID NO: 48227 - protein, 150 aa, Burkholderia cepacia
MLITRKLEFDAGHRIPDHRSQCRNLHGHRYVLEITLRGDLVDTEGAPDRGMVMDFADVKALAMEHLVSKWDHAFLVYARDEVVRSFLEQMADHKTVVIDRIPTVENLAAIAFDLLANVYDAHYGVNLRLERVRLYETPNCWADVERQPGR

SEQ ID NO: 48228 - protein, 136 aa, Burkholderia cepacia
MTDVNDDAPSQPTAFELVGGEARVREMVDRFYDLMDLEPEFAQIRALHPPSLDGSRDKLFWFLCGWLGGPDHYISRFGHPRLRARHLPFPIASVERDQWLRCMAWAMEDVGLPEPLRERLMHSFYDTADWMRNRPG

SEQ ID NO: 48229 - protein, 272 aa, Burkholderia cepacia
MTAARPSAVLRAGSDRRPTTVTEPRSDVPPPTAMDQPKRILIVEDDADIADVLSLHLRDERYEVVHSADGAEGLRLLEQGGWDALILDLMLPGVDGLEICRRARAMTRYTPIIITSARSSEVHRILGLELGADDYLAKPFSVLELVARVKALLRRVDALARDSRLDAGTLDVAGLAIDPIAREASVDGARIDLTPREFDLLYFFARHPGKVFSRMDLLNAVWGYQHEGYEHTVNTHINRLRAKIEADPAEPVRILTVWGRGYKLAAPGQRDA

SEQ ID NO: 48230 - protein, 452 aa, Burkholderia cepacia
MDNTTPTLATDRAPRVPRIVIVGGGAGGLQLATRLGDTVGRRGQTDVVLVDRYPTHFWKPLLHEAASGHRDPASHTIEYAAQAKRHGFRFVQGALRRVDRAARTATIAAVRDADGTEILPQRELDYDDLVLAVGSVTNFFNVPGAERHALPLENLDQAEDFRRKFLAACTKANHLAEQQPARRGAPICINVIGAGATGVELAAALRHAIQQLTTYRFKALVSARDVHIRLIEGGPRILPALDERLSGKMHAQLRALNVDVLTDTRVAEVGADAVTTAAGERLASDITIWAAGVAGPAMLRDIGDIALNRSNQVIVTDTLQTPDDPHVYAFGDCAACPSTGAGGFLPPRAQVAHQQAVYLVNAFARRVAGKPVAGFTFRDAGTVVSLGHAGAVYQADIGVRSRSLIVDGLAAIGLYKFLYRKHLFSVVGVKRALFQSLSHWLQSRNQPSIKLH

SEQ ID NO: 48231 - protein, 280 aa, Burkholderia cepacia
MPDTTADALLRTSPLDAVDARVLLAHALGWTRTQLITRGDAPLDAAAVERYRALEARRVAGEPVAQLVGMREFFGRPFDVTPDVLIPRPETELLVEAALDAIDGLPHAAVLDLGTGSGAIAVSIAAERPDARVWALDRSPAALAVAQRNADKLLDAQRPGGPLHWLQSDWYAALDPALAFDAIVSNPPYIAQHDPHLAQGDLRFEPRGALTDDADGLSAIRTIVAGAGAHLKPGGTLWIEHGYDQAEAVRAILVSHGFVAVESLTDLAAIERTTGGRLPG

SEQ ID NO: 48232 - protein, 122 aa, Burkholderia cepacia
  MISC_FEATURE (19)..(19): X=any amino acid
MLSAVISSEHSYPAMPLAXQPVHQRFVHSGPLVLGAAPFKYPTPTADRDQTVSRRFKPSSRTSLNGEQPYPWDRLQPQDEMSRHRGAKHRRRYELLGGISLLSPEYLLSVERWPFHTEPPDH

SEQ ID NO: 48233 - protein, 421 aa, Burkholderia cepacia
MSIIVTSYNYARFIGETIRSVIDQTLDSWELIIVDDCSTDDSWNVIQAFQDRRIHAVRFDKNRGACAAYNTALSLARGEFIASLDSDDVFNEDKLAVQVAFLDQHPEVDICGTYLEEIDDAGNPVPSESHMYAPWFNKELDLNSPDCWIWENHLCHSGVLMRKSVHDRVGSFREELTYSPDWNFWLRALTAGATFHVIPQELVRYRSHGSNITHRNFDALMWEYADTSARTLHPYLMRVGRPDLIAKNVQIFVKRFFEVDGDWRRYLELMDLLDWRNAHSDRFAIPSHLFDDPELTALVARLARGWSPQMVAGTLPLSSEFAAESADRERTIALSTVDASTFLLLVRNERDQARRDLENAEAAVRSGAEREARLESEQVALKAEHARLQAEIASLRTELERIGGTVWGKADRLYRRLGGRI

SEQ ID NO: 48234 - protein, 275 aa, Burkholderia cepacia
MPELPEVEVTRRGIEPFVAGRRVERVDVRTAMLRWPVPAGLAEQLRAREVLAVERRGKYLLFEVDAGWFIVHLGMTGTLRVLPAAGVPVAAKHDHIDWIFDEFVLRFRDPRRFGAVLWHPREAGDVHAHPLLASLGVEPFSPAFTGALLHARTRGRTVSVKQALLAGDMVVGVGNIYASESLFRAGIRPTTAAGKVSLPRYERLADAVRATLADAIERGGSTLRDFVGSNGESGYFQLDCFVYDRAGQPCRVCGTPIRQIVQGQRSTYYCPTCQR

SEQ ID NO: 48235 - protein, 136 aa, Burkholderia cepacia
MKAPAMTDSTLELPQKQPALRVVPQPHDANVHGDVFGGWIMSQVDIAGSIPASQRANGRVATVAVNSFVFKQPVFVGDLLSFYATIMRTGNTSITVDVEVYAQRMRLMGEVVKVTEATLTYVATGPDRKPRQLPPL

SEQ ID NO: 48236 - protein, 384 aa, Burkholderia cepacia
RFAEREADFRPGLGCTLAVGSPTGSAAATLPAGLPPLPDPAPAQPDPPAPATPPAGIDAHLLQTAIDRAFDEPDPARPRRTRAVVVMWRGQVIAERYAPGFTADTPLPGWSMTKTVTAALVGTLVAQHKLSPDASALLPEWRGSGDPRAAITLDELLRMTSGLQFNEDYDDPLSDVAVMLFTQPDTARFASAKPLVATPGTQWSYSSGTSAIVACVMREALGGNAGDYLALPRRALFAPLGMRSAVFEPDASGTLVSASYMYASARDWARFGQLLLQDGVWNGQRLLPEGWVGYLTRATPQSSRQEFGAQLWVKVPEPFNDRDPHARAMPADAFHAVGHEGQFVSVVPSRQLVVVRLGLSRPEAAWNHEAFLARVLDAVPAPGA

SEQ ID NO: 48237 - protein, 302 aa, Burkholderia cepacia
MNKSPFLLPFCAIALWAGNVVVSKLSASTIDPSAITFYRLLLAVALMSVFTLRPAWRNRAVLVAHLPKLAVLGFLAMALFQSLSYEAAKTTSATNMAIITALVPLMTMLLSSLLLGDPPGAGMIGGGVLSLAGVVYLIAEGHPTAIAARGVQLGDLLMLAASAAYALYGVLLKRWRIGALPAWQSTYVQALAALVFMAPMLLRLPAQAAWPTRASVPLILYAGVLASVVLPYLWMQGVRLLGPSRCAMFMNLLPVMTAGGAIVLLGESLRLYHLIGGGVALLGVALAQRFPFQAGASQGARQ

SEQ ID NO: 48238 - protein, 1177 aa, Burkholderia cepacia
MSDPRFVHLRVHSEFSIADGIVRIDDIVKAAAADGQGALALTDLGNAFGLVRFYQEARGKGIKPIAGCDVWIANPDDRDKPSRLLLLVKDKVGYLNLCELLSKAWLTNQYRGRAELDASWLDGELAQGLLALSGAQQGDIGLALAAGNEEAARRHAERWARVFPGGFYIELQRYGQPGAEAYIQQAATLAASLKLPVVATHPTQFMTDDDFTAHEARVCISEGDILANPRRQKRFTTDQYFRTQDDMAALFADLPSAIANTVEIAKRCNLKLELGKPKLPLFPTPDGMSLDDYLVQLSKEGLETRLAQLYPVEAERDAQRDTYYKRLEFECGTITKMGFPGYFLIVADFINWAKNNGVPVGPGRGSGAGSLVAYALGITDLDPLRYNLLFERFLNPERVSMPDFDIDFCQHGRDRVIQYVKEKYGADAVSQIATFGTMAAKAAVRDIGRVLDLGYMFTDGVAKLIPFKPGKHVTIADAMKEEPQLQERYDHEDEVHQLLDLAQRVEGLTRNVGMHAGGVLIAPGKLTDFCPLYTQGDDGGVVSQYDKDDVEAVGLVKFDFLGLTTLTILDWAERYIRRLDPSKADWSLAQVPLDDPASFQILKKANTVAVFQLESRGMQGMLKDAQPDRFEDIIALVSLYRPGPMDLIPSFCARKHGREKVEYPDPRVEPVLKETYGIMVYQEQVMQMAQIIGGYSLGGADLLRRAMGKKKPEEMVKHREIFAEGAAKNGLTREKSDEIFDLMEKFAGYGFNKSHAAAYALLAYYTAWLKAHHPAEFMAANMTLAMDDTDKVKILFDDCVVNNLAVLPPDINQSHYRFEPVAEADGKRSRTIRYGLGAVKGSGQNAIEEILRAREEKAFTDLFDFCERIDRRVVNRRTVEALIRAGAFDSLNPNRAQLIASVPLAMEAADQAEANAMQAGLFDMGAESPHAHALVDEPAWDDKRRLQEEKAALGFYLSGHLFDAYRDEVRRFVRQKVGDLKEGRDKLVAGIIASLRTQMTQRGKMLIALLDDGTGQCEITIFNEQFEANKALFKEDELLIVQGQARNDAFTGGIRFTADTVMDLERARSRYAQAVRLTMNGNADALALRRVLEPHVSKDDPAAANVIEAPAPRGGGRDGGRRPQAPLPNGLAVQIHYSNARAQGEMRLGDAWRVKPSDVLLAELRAAFDGSSAEIVY

SEQ ID NO: 48239 - protein, 603 aa, Bacteroides fragilis
MFLASLLQIGLSALVFEFSLWVWTTLFCVIFNVCFFHLNRTYVGVIRYSSFIDISRIFISLTLGYLVTCVGNLLWMGWSGREVLPISVILTAYIVNFSLMVCLRILVKMIHELMTFDRRHSIRVFVYGSKGSGINIAKSLRVSRSNHFRLKGFISDDTGFIGKQTMGCRVYANNESLFDILEEERIEAIIVSSEKVHRLETSGMIDRLIAEDIRILTVPPFNDLGKEGMQIKDIQIEDLLQRDPIHVDIRKISSHIEGKRIMITGAAGSIGREMVRQIAGLNPYKLILVDQAESPLHNVQLELLDNWRDIDAKMLVADVTNQTRMESIFKDYRPQYVFHAAAYKHVPMMEDNVSEAIQVNVLGTRIMADLAVKYGVEKFVMVSTDKAVNPTNVMGCSKRLAEIYVQSLAHQLSKYANDGALVKFITTRFGNVLGSNGSVIPRFKQQIEKGGPVTVTHPQVIRYFMTIPEACQLVLEAGSMGNGGEIYIFDMGNPVKIVDLARRMIYLSGQKNIKIEFTGLRHGEKLYEELLNVKEFTCPTYHEKIMIAKVREYDYEEVKQEIQKLIDLSYTSDTMGIVASMKKIVPEFVSKNSEFEILDKASF

SEQ ID NO: 48240 - protein, 327 aa, Bacteroides fragilis
MFGFPFFFIDRTGDSINWHAYLRHSAVPLSFVTVFYLNYFLLVPHLLFREQKNKYIIYNILLVCLIGLLLHIWQSLNAPAPTLKKPHMPPGWIFFVRDILSLIFTIGLSAAIRMSARWGQAEAARREAEKSRTEAELKNLRNQLNPHFLLNTLNNIYALIAFDSDKAQQAVQELSKLLRYVLYDNQQNYVPLCKEVDFIRNYIELMRIRLSGNVEVITQFDIQPDSRTEIAPLIFISLIENAFKHGISPTELSFIHILISENKEEIRCEIRNSYHPKTNTDKSGSGIGLEQVRKRLELSYPGRYQWDKAISPDGKEYISKLLIFNHP

SEQ ID NO: 48241 - protein, 202 aa, Bacteroides fragilis
RELNKHKLNFFTYITHEFKTPLSILMAVFEDISIGRNNTITGEEMKIINRNIQRLQFLINQLLEFRSVETDHARIEYVKGDIMTYGRSIFELFIPVFRQKQIVFQYATSADSYYTVFDRDKIEKIISNLLSNAFKHSDPQSEINFRIDVDKASGQLILSCHNSSSYIHPEQREAVMQPFHKTDSSDQKYSNTGIGLALVHGL

SEQ ID NO: 48242 - protein, 87 aa, Bacteroides fragilis
MSVFRSNKQIYVQIIDDLSGKTLAAASSLGMTEKLPKKEVAAKVGEIIAKKAQEAGITTVVFDRNGYLYHGRVKEVADAARNGGLKF

SEQ ID NO: 48243 - protein, 299 aa, Bacteroides fragilis
MKSDSWLHRFLHNQPLKHKLYVIIFESDTPAGKAFDVTLIICILLSILLAIIESLQGLPSWLSTPFIVLEYLFTVFFTFEYVTRIYCSPNPRKYIFSFFGIVDLLATLPLYLAFFLPGARYLLIIRAFRIIRVFRIFKLFNFWLEGERLLTSLRESSKKIAVFFLFVVILVVAIGTLMYMIEGTQPNTQFNNIPNSIYWAIVTMTTVGYGDITPATALGKFLSACVMLIGYTIIAVPTGIVSASMMKEYKKLKDLQCPNCHKTGHEENATYCKYCGHKLKNDEIYRQENTATDPDRTTS

SEQ ID NO: 48244 - protein, 481 aa, Bacteroides fragilis
MSLKENTIYGVLWSSFEKFGTLSIQFIYMIVMARLLSPSDFGIVGMLTIFISVGQVILDSGFGQALIRLQKYDDLHFSSIFIINVIMGVLLYGILFYMAPYISLFYREPSLTLISRISFLIFPINSLSIVQYTLLVKKMDFKSISKISLFSIILSTISGITYGYFYPNIFALLIQNVSFYFYRLLLLWYYGNWKLSCRISWSKLQDLMPFSFTLLATGFISTVVGELYSLSIGKFFSSSVLGLYSQAERFSKIPSFSITDVVQRVTYPALSVLQDDDQKLKHSYRMVIMCTFFIVLPVMLFLFISAGEIFELLFTEKWEQAGTYFKYLCFVAIMYPVNSINLNILKVKGRNKLILSLEIIRKLIMVIILVLSIGFGMEGVLIGQIVFSFIQLFFNCYFSGRQISYNLRSQFLDISPILFLGAGAILVTWYISSIYNSPYVFINIFLKFICFFCTYLFLAKFLNLSVLTIFKGVLFSFFKRR

SEQ ID NO: 48245 - protein, 157 aa, Bacteroides fragilis
MSLNKIMLIGRVGKDPDVRALDGGAKVASFTFATTDKGYTLANGTQVPERTEWHNVIMWNKTADLAERYIHKGDKLYLEGKLRTRSYDKNGVKHYIAEVFVDYMEMLTPKLQQPAAPAPIPAPVQQPTSSYQSPAPKPTYQSSSYQQDSVPLPDLPF

SEQ ID NO: 48246 - protein, 301 aa, Bacteroides fragilis
MLLFQTTQQVADSLQVAAEKLDQAIAQADGLDKLGLITQQLIDSGIQAGGHILKAVIVFLVGRFLIRMLNRLVGRVMDKRNVDISIKTFVKSLVNILLTVLLIVSVVGALGVETTSFAALLASAGVAVGMALSGNLQNFAGGLVILLFKPYKVGDWIEAQSVSGTVKEIQIFHTILTTADNKLIYVPNGALSSGVVTNYSNQKTRRVEWIFGVDYGEDYNKVEKVVREVLTADKRILNDPAPFIALHALDASSVNVVVRVWVESSDYWGVYFDINKTIYATFNEKGINFPFPQLTVHQAPN

SEQ ID NO: 48247 - protein, 199 aa, Bacteroides fragilis
  MISC_FEATURE (172)..(172): X=any amino acid
  MISC_FEATURE (181)..(181): X=any amino acid
  MISC_FEATURE (188)..(188): X=any amino acid
  MISC_FEATURE (189)..(189): X=any amino acid
EKEQEIERLRFENLQSRCDALANQVNPHFFFNSLNGISSLIRKKNDENTLTYVNQLSDIFRYILQSDRKGVVTLREELEFIQSFRYVMEVRFANKLSFTIDVDEAQKDVLTLPVLSLLPLVDNVTVHNRIDSEHKMDISIRLNEQYETGGIQSHLPQTVTSRHQRNGIKQPXKPLQLINEXTNPDRNXXKSVPGIFTSN

SEQ ID NO: 48248 - protein, 244 aa, Bacteroides fragilis
MLQEAKEKAEESNRLKSAFLANMSHEIRTPLNAIIGFSDLICQTDDAEEKEEYIRIVTSNNELLLQLIDDILDLSKIEAGTMDFSYAPTDINELMEDICLQMQQKNQRPEVQIMFTEKEPGCVINTDRLRLSQVIMNLMNNAMKFTSEGSITLGYRLTRQKDELYFFVKDTGIGIPADQAGKVFERFVKLNTFVKGTGLGLAICRVIIERLGGTIGVETREGKGSCFWFRLPVREDMLLESPVR

SEQ ID NO: 48249 - protein, 410 aa, Bacteroides fragilis
MRSTFKVLFYVKKGSEKPNGNLPLMCRLTVDGEIKQFSCKMDVPLRLWDVKNNRASGKSVEAQRINLAVDKIRVEVNRRYQELMQTDGYVTAAKLKDAYLGIGVKQETLLKLFEQHNAEFAKKVGHSRAQGTFRRYQTVCSHIREFLPHTYKREDIPLKELNLTFINDFEYFLRTEKKCRTNTVWGYMIVLKHVVSIARNDGRLPFNPFAGYINSPESVDRGYLTQKEIQTLMDAPMKNTCHELVRDLFVFSVFTGLAYSDVKNLTADRLQTFFDGNLWIITRRKKTNTESNIRLLDVPKRIIEKYKGLARDGHVFPVPSNGSCNKILKEIGRQCGFKVRLTYHVARHTNATTVLLSHGVPIETVSRLLGHTNIKTTQIYAKITAQKISQDMETLSHKLEEMEKNICRAI

SEQ ID NO: 48250 - protein, 265 aa, Bacteroides fragilis
  MISC_FEATURE (184)..(184): X=any amino acid
LPAILRVVLNNGIEMPQLGVGTSTLKETAAECVKHAIGLGYRLVDAAQGYDNEVEVWYGIKESGIGRSEVFIISKVSPDAVRSGKVRESLDRTIEAFGGTYVDLMLIHWSVARKVKERWRIMEKYVDVGKIRAIGVSNFNPHHVDELLAYARIKPVVNQIKIHPYMEHQEVVGNTFAKGIQVQXWAPLGQSKINEIYDDEVLQYIVDRYHKTVRQVVLRFQIQSGMVVIPKTTHIERMKENLEMFDNEMEILRALDKGQPLIGNP

SEQ ID NO: 48251 - protein, 388 aa, Bacteroides fragilis
MNGYICDSCATQAYEITQEAMGAGKQSAGATRLNLKELPKPVEIKNFLDQYVIGQDDAKRFLAVSVYNHYKRLLQKDSGDDVEIEKSNIIMVGSTGTGKTLLARTIAKLLHVPFTIVDATVLTEAGYVGEDIESILTRLLQVADYNVPEAEQGIVFIDEIDKIARKGDNPSITRDVSGEGVQQGLLKLLEGSVVNVPPQGGRKHPDQKMIPVNTKNILFICGGAFDGIEKKIAQRLNTHVVGYNASRKTATIDKNNMMQYIAPQDLKSFGLIPEIIGRLPVLTYLNPLDRNALRAILTEPKNSIIKQYIKLFEMDGVKLTFQPEVYEYIVDKAVEYKLGARGLRSIVETIMMDVMFEIPSEDQKEYEVTLDYAKHQLEKANLARLQTA

SEQ ID NO: 48252 - protein, 831 aa, Bacteroides fragilis
MSYTIESIVEKIGARRLGNKPAAIDWLLTDSRSLCFPEETLFFAIPTKRNNGARYIPDLYERGVRNFVVTSEDFKGLTMDSEQLKVTMAQECNFLIVPNTLKALQKLAEQHRGSFQIPVVGITGSNGKTIVKEWLHQLLSPDRVIVRSPRSYNSQIGVPLSVWQMNEESELGIFEAGISEMGEMRPLQNMIKPTIGILTNIGGAHQENFFSLQEKCMEKLSLFKDCDVVIYNGDNEMISNCVGKSMLTAREIAWSMRDIERPLYISRVEKKEDHTVISYRYLEMDNTFCIPFIDDASIENSLNCLAACLYLMVPADQITERMARLEPVAMRLEVKDGKNNCILINDSYNSDLASLDIALDFLYRRSQSKGLKRTLILSDILETGQSTTTLYRKVAQLVHSRGIEKIIGVGAEISSCASKFDIEKYFFPDTKALLASDVIKKLRNEIILIKGSRNFGFDLVSEELELKVHETILEVNLGAMVANLNHYRSMLKPETKMVCMVKASAYGAGSYEIAKTLQEHHADYLAVAVADEGSDLRKAGITASIIIMDPELTAFKTMFDYKLEPEVYNFHLLDALIKAAEKEGITNFPIHVKLDTGMHRLGFEEKDIPQLIRRLKNQNALIPRSVFSHFVGSDSAQFDAFTRQQIERYEKMSKELQDAFPHKILRHICNTAGIERFPGAQFDMVRLGIGLYGISPIDNSIINNVSTLKTTILQIRDVAEEDTVGYSRKGHLIRPSRIAAIPIGYADGLNRHLGCGHGYCLVNGKKAPYVGNICMDVCMIDVTDIDCREGDQAIIFGDELPITVLSDALETIPYEVLTGISTRVKRVYYQD

SEQ ID NO: 48253 - protein, 766 aa, Bacteroides fragilis
MNKKYSLLILLALLLPLGLQAQKPPQDMDRFLDNLLKRMTLEEKIGQLNLPVTGEITTGQAKSSDIATKIKRGEVGGLFNLKGVDKIRDVQRLAVENSRLGIPLLFGMDVIHGYETIFPIPLGLSCTWDIPAIEESARIAAVEASADGISWTFSPMVDISRDPRWGRVSEGSGEDPFLGALIARAMVRGYQGKDMSRNDEIMACIKHFALYGAAEAGRDYNTVDMSRQRMFNDYMLPYQAGVEAGAGSVMASFNEVEGVPATANKWLMTDVLRGAWGFNGFVVTDFTGISEMIEHGIGDLQTVSARAINAGVDMDMVSEGFIGTLKKSVEEGKVSVETVNTACRRILEAKYKLGLFDNPYKYCDPKRPARDIFTKEHRAAARRIAGESFVLLKNEGLSPTLAPVLPLSPTGTIAVIGPLANTRSNMPGTWSVAAVLDKSPSLVEGLTEWVGNQGKILYAKGSNLIGDAAYEERATMFGRSLNRDNRTDQQLLDEALKIASQADVIVAALGESSEMSGESSSRTNLNLPDVQHTLLEALLKTGKPVVLVLFTGRPLVLNWEQEHVPAILNVWFGGSEAGPAIGDVLFGAVNPGGKLTMTFPKSVGQIPLYYAHKNTGRPLKEGKWFEKFRSNYLDVDNDALYPFGYGLSYTTFRFSDITLNRSSIGMDNELVASVTVTNTGDRAGSEVVQLYIRDLVGSVTRPVKELKGFEKIYLQPNESRTVRFTIAPEMLKFYNADLKFVAEPGDFDVMIGPDSRNVKTARFTLR

SEQ ID NO: 48254 - protein, 616 aa, Bacteroides fragilis
MGKSFNIALIVIAVTLYSVTTYAADNKATRHVSALLDLIDNSLNYSKEAPNDSIIQWGNELAPLLKKQKEYKTLFQLKQLIVTAYASRGDMNMAIDHARRMYKEAKELNSPIGIALSSRAFGDAYLNANMQEPAIESYKEALELLDKIPGSEILEQEILPKFILTLIQTSHMDEVRIYLQKFENLYADNPNPTFHFFICACNAYYNIESGDPEKGKAELDKARKIHEQLNYLYLRSIYNYILAQYYQAVGKYELALQQYERLTKVPKAPAPNKHIGLQLECAQLLTQMGRTEEAYRIYQKANRQKDSLNALSYARQINDLRGMYQIDRMEIRNQIQRNQIILWIIIASIFILMLVLLLIVRIRQESNRLLRSKEELEIARKYAENSIRTKSLFLSNMSHEIRTPLNALSGFSSILTDESIDNDTRYQCNDIIQQNSELLLKLINDVIDLSNLDPGKLTFNFKECDAVNICRNVINTVEKVKQTQAGVSFVTSLDKLTLRTDEARLQQVLINLLINATKFTTEGSITLTLEKESETIALFTMTDTGCGILREKQDQIFNRFEKLNEGAQGTGLGLSICQLIIEQIGGRIWIDPDYTEGARFRFTHPVRPAKEKEAER

SEQ ID NO: 48255 - protein, 441 aa, Bacteroides fragilis
MNIAISGASGFIGKHLTEYLTEAGHRVIPLGRPMFREGTSGHLIQALSHCDVIINLAGAPIGKRWTPEYKKELYDSRIKVTHCIILAMDAVKTKPRLMISASAVGYYPEEGTFDEYTNTRGSGFLAELCYAWEKEARRCPSQTRLVITRFGIVLSPDGGAMEQMLRPLRITRVAGVIGPGTQPFPWIAIQDLCRAMEFIISHEEASGVFNLVAPQQVSQYAFTQAMAARYHVWMKVVVPRWFFRMRYGEAASFLASGQNVRPTRLLEAGFRFVKPTIEDFFEGTDHTAVDRLDLHRYMGTWYEIARFDHRFERGLSEVTATYTLMPDGTVRVENRGCKHKKPYDVCKTAEGRAKIPDPSQPGKLKVSFFLSFYSDYYVLELDQDEYNYALIGSSSDKYLWILSRVPILPEEIKKKLLDAATRRGYDVKKLIWVEQREKKIM

SEQ ID NO: 48256 - protein, 769 aa, Bacteroides fragilis
MNNAKLLHLMVYILTIILGQSCTEVDITMPKGPKGDRGMSAYEFWKENVENGVISWPKKETEITDFFKYLKGKDGLDGKSAFELWKEEVATGALDNPHRPGSMWPVSQNNLRDFWYYLTGASGENGQTPHIGNNMNWWIGNKDTGIRAQGRDGQNGEDAVPPVVTIGDNGNWLIDGVDTGKPSRGEEGVAGTTPTVTIGENGNWVINGKDTGKAAIGKDGRSPEVIIGTNGNWYINGKDTGIRAYGKDGINGKDGANGKDGINGKDGANGKDGINGKDGAAGKDGANGKDGANGKSAYELWVESVEAGCNNTGPKVKNPHNPSLDWDCGKTTLSDFWEFLRGADGKDGADGKDGKPGVPGKPGAEVTIIKGVPNVIALYSQQEFGEYVRTTDGGVAYRVYDESGNKAPKAVVKGIPGLDPAKTYTANEEGEFIIPKEDLPQIDDIDARWGKVKEVTINKVTKESAENTYVPNRMQIRMIYIGTSPYLDYEHNLQFRVERKTDPGAEWKTLPSYLPNVNAGFTAYQVTNPEDPTSLDKTKKIESTTPNMSSTSMSINPNRYVKENPAGIKNGITDFWDGKDNYFSIVKDTPYYGETIYWNGVCKMAPYQIPPTLKTLALTKASAESGDDVFLNKAQGEFDFSTIDFNIICKRELVKTVKPNGIDYIEPEFYAPEEAKELLLCYVKFTYTSPLGVQTATSELNKSSYKKPEYAALSPYLGATIYSVGASSAFIYSNNVSLGVLKKKADNGTYYVENTYKDMPEISVTYKEK

SEQ ID NO: 48257 - protein, 237 aa, Bacteroides fragilis
MTKRLTKIGVNPDFQELSSFVHELPTVFETGGKVIYKGRNELKEFDVEGKKLIVKSYQLPHLLNRIIYNFFRASKAKRSYSYALMLRKLGIGSPAPVGYYSTGSWLLFGRSYFVCLKSDCPYTYRDFEKTVFPNQEQILRAIARTTAMLHENGLLHKDYSAGNILFRTIDEKVEVEIIDLNRMRFGNVGIEAGCKNFERLPGTHEMFAILAEEYAKARGFDVQTCLELIEQAHSLSD

SEQ ID NO: 48258 - protein, 530 aa, Bacteroides fragilis
MKFVTLSLLATALTVGGNAAEQARSSKQPNILFILADDFGWRDLACTGSRYYESPNIDGIARNGVRFTQGYAACQVSSPSRASIMTGKFTARHGITNWIGEGSGEEWRKMGRHSKLLPAQYVWQLPKEDITLPEALKAHGYKTFMAGKWHLGGEGSYPEDHGFDINIGGHEAGGPYPGGYFAPYGNPKMKEGPDGENLSMRLAHETASFIETHTRRNKKQPFFAFLSFYAVHAPIETTEAKWRHFRNKADSMGIAPVGFEVDRTLPVRLQQDNPIYAGLIQQMDDAVGVVLAKLHELGLDENTIIVFTSDNGGVSSGDAYATSNYPLRGGKGRQWEGGIRVPLFIDFPGNTLKGDSCVVPVTGADLYPTFLDMAGIPLMPGQHQDGVSLLPLLQGKSIPERALYWHYPHYGNQGGEPSSIIRQGDWKLIHYYEDGRDELYNLRIDETESEPLNVQYPEKVEFLSKKLSVWLTEVGARYPEPDPQYNPAAEALYKKKTRERMMKTLEATRKKQLGKDFKPNADWWGSETKD

SEQ ID NO: 48259 - protein, 198 aa, Bacteroides fragilis
MKSQYRINEQIRAKEVRIVGDDVEPKVYPIFQALKLAEEKELDLVEISPNAQPPVCRIIDYSKFLYQLKKRQKEQKAKQVKVNVKEIRFGPQTDDHDYNFKLKHAKGFLEDGDKVKAYVFFKGRSILFKEQGEVLLLRFANDLEDYAKVDQLPVLEGKRMTIQLSPKKKESATKKPATPKPATPAAVKAEKPAGDNEE

SEQ ID NO: 48260 - protein, 472 aa, Bacteroides fragilis
MINNYLERQIKENFSYQPTFEQEIAVKSLSEFLLSTANDTVFVLRGYAGTGKTSLVGALVKAMDKLQQKSVLLAPTGRAAKVFSAYAGHPAFTIHKKIYRQQSFSNEVSNFSINDNLTTHTLYIVDEASMISNEGLSGSMFGTGRLLDDLVEFVYSGVGCRLLLMGDTAQLPPVGEEQSPALATEALKGYGLNVIEVDLTQVVRQVQSSGILWNATQIRQLIAEDECFSLPKIKVSGFPDIQVVRGDELIDTLTGCYEKDGMDETIVVCRSNKRANIYNKGIRAQILYREDELNTGDLLMVAKNNYFWTEKYKEMDFIANGEIAVVRRVRRTRELYGFRFAEVLLAFPDQNDFELEANLLLDTLHSDAPALPKTENDRLFYSVLEDYVDITVKRERMKKMKADPHYNALQVKYAYAVTCHKAQGGQWQNVFLDQGYMSDEYLTPDYFRWLYTAFTRASKTLYLVNYPEEQIE

SEQ ID NO: 48261 - protein, 625 aa, Bacteroides fragilis
MSDIIHLLPDSVANQIAAGEVIQRPASVIKELVENAIDAEAQNIHVLVTDAGKTCIQVIDDGKGMSETDARLSFERHATSKIREASDLFALRTMGFRGEALASIAAVAQVELKTRPESEELGTKIIIAGSKVESQEAVSCPKGSNFSIKNLFFNIPARRKFLKANSTELSNILAEFERIALVHPEVAFSLYSNDSELFNLPACHLRQRILSVFGKKLNQQLLSVEVNTTMVKVSGYVAKPETARKKGAHQYFFVNGRYMRHPYFHKAVMDAYEQLIPAGEQISYFIYFEVDPANIDVNIHPTKTEIKFENEQAIWQILSASIKESLGKFNAVPSIDFDTEDMPDIPAFEQNLPPAPPKVHFNSDFNPFKPSSSSGGGNYSRPKVDWEDLYGGLEKASKMNQPFSDSDPESEEFAVIEEESIATAAPETLYAGEPAVIEKGTQHLQFKGRFILTSVKSGLMLIDQHRAHIRVLFDRYRAQIQQKQGFSQGVLFPEILQLPASEAAVLQSIMDDLSAVGFDLSDLGGGSYAINGVPSGIDGLNPVDLVRSMLHTAMEKGNDVKEEIQDILALTLARAAAIVYGQVLSNEEMVSLVDNLFACPSPNYTPDGRVVLTTIKEEEIDKLFR

SEQ ID NO: 48262 - protein, 541 aa, Bacteroides fragilis
MSEGLQKVAGDRLRGILTAMTTNRVTGVLTGVLITALIQSSSATTVMVVSFVNAGLLTLAESISVIMGANIGTTVTAWIISIFGFKVDMAAFALPLLAIALPLIFSGKSNRKSIGEFIFGFSFLFMGLSYLKANAPDLNANPEMLAFVQNYTDMGFFSVLLFLFIGTILTMIVQASAATMAITLIMCANGWISLELGAALVLGENIGTTITANLAALTANSQAKRAALAHFVFNVFGVIWVLIIFHPFMVFVNWVVDTFFHPGSAEVAISYKLSAFHSIFNICNVCLLIWGVKLIERTVCAIIRPKEEDEEPRLRFITGGMLSTAELSILQARKEIHLFSERIHRMFGMVQDLLHTEKDDDFNKLFSRIEKYENISDNMELEIANYLNQVSEGRLSSESKLQIRAMLREVTEIESIGDSCYNLARTISRKRQTNQDFTEKQYEHIHFMMKLTNDALSQMIVVVEKPEHQSIDVNKSFNIENEINNYRNQLKNQNILDVNNKEYDYQMGVYYMDIIAECEKLGDYVVNVVEASSDVKEKKAS

SEQ ID NO: 48263 - protein, 192 aa, Bacteroides fragilis
MVVVAVLIVVGTLKGLDIYTRHGEAVIVPDVKGMSVSEAEKMFRNHGLTCVVSDSSYVKNKPSGIILDLNPSVGQKVKEGRTIYLTINTLSTPLSVVPDVADNSSVRQAQAKLIAAGFKLTENRMVSGEKDWVYGVIYQGRQLQIGDKAPIGATLTLMVGDGVQSTATDSVDMVENAAMSVEDSGTDDDSWF

SEQ ID NO: 48264 - protein, 314 aa, Bacteroides fragilis
MKKELLTRFMEKRIVELKKEQRNGTAHVYQSTLNRLKNFMNGREITFSQLTPEWLALFEQKLLADQLKWNTISTYMRMLRSVYNQALERGVATYVPRLFNKVHTGIDCPVKRAVSPEVICRLMTDRKPLPGKLAFSRDLFVLLFLLRGMPFVDLAFLRRCDLQGNVITYHRRKTSRKLTVVVGKEAMEIIQKYMYAIPDSPYLFPIIQNPGKDEYGQYARMLRLQNYRLTQVANILGIRDRLSTYTARHTWATTALRQNYNSSLICDAMGHSSVKVTETYFQPYRDDEVNRMNSSLITYILSKKKRGTDKKIRS

SEQ ID NO: 48265 - protein, 332 aa, Bacteroides fragilis
MNNLSEDILMRYLTGECSDEDFARVNAWIKESDDNARRLFRMEEVYHLGRHDSFPDQKKVARAEARLYKKLAQEDAHSRKVIRMHQWIRYAAIIVLVLMIGTGGGYLYYQADPTRNMITASSTDGKVKEVMLPDGTKVWLNQSATLRYPKKFSESERDVYLDGEAYFEVTKNRRCPFVVESEAMRIKVLGTTFNFKCDKSHKLAEATLIEGEIEVRGNHDEGMIILSPGQKAELNKTTRRLVVKQVDAKLDAVWHNDLIPFEQADIFVITRTLERFYDVKIILSPDIKSDKTYSGVLKKKDNIESVLQSLDNSIPINYKIVGDNIFISSRNK

SEQ ID NO: 48266 - protein, 286 aa, Bacteroides fragilis
MDSTIFKSLNVNGRLLDLSIPQVMGILNVTPDSFYAGSRSRTEADIAARARQILDEGASMIDIGAYSSRPNAGHISPEEEMRRLRTGLEILNRNHPSAIISVDTFRAGVAEECVKEYGVAIINDISAGEMDEQMFPTVARLNVPYIMMHMQGTPQNMQKEPHYENLLKEVFIYFARKVQQLRDLGVKDIILDPGFGFGKTLEHNYELMAHLEEFGIFELPLLVGVSRKSMIYRLFGTTPQEALNGTTVLDTVALMKGADILRVHDVREAVESVRLIEKLKSVSACS

SEQ ID NO: 48267 - protein, 449 aa, Bacteroides fragilis
MRYDIAIIGGGPAGYTAAERAGANGLRAVLFEKKAMGGVCLNEGCIPTKALLYSAKVLDGIKSAPKYGVSVEGAPAFDMEKIIGRKNKTVQKLTGGVRMTVNSYGVTIVDKEAVIEGEGEEGFHIRCDGEVYEATYLLVCTGSDTVIPPIKGLSDVDYWTSREALDSTVLPSSLAIIGGGVIGMEFASFFNSMGVRVKVIEMMPEILGAMDKETSAMLRADYTKKGVNFYLNTKVTEVSDKGVTVEKDGKSSFIDADRILVSVGRKANITQVGLDKLNIELHRNGVVVDEHMLTSHPRVYACGDITGFSLLAHTAIREAEVAINHILGIDDRMDYDCVPGVVYTNPELAGVGKTEEELIAKGIYYRIQKLPMVYSGRFVAENELGNGLCKLIIDHNDRIVGCHMLGNPASEIIVVAGIAIQRGYTVDEFRKSVFPHPTVGEIYHETLFA

SEQ ID NO: 48268 - protein, 499 aa, Bacteroides fragilis
MEEYLSTDIYVSKRNNSLINGKMIGRVLGVLLFIEAGMFVLCSGISVVYGESDYKYFLYTAGINLLSGALLMFYGRGAENRLSRRDGYCIVTLSWVFFTLFGMLPFYLSGSIDSLTNAFFETMSGFTTTGATILDDIESLSHGMLFWRSLTQWIGGLGIVFFTIAVLPVFTSGGVQLFSAESTGVTHDRTHPKINVMAKWLWTVYLILTLAETILLMLGGMSLFDAVCQSFATTATGGYSTKQASISYWNSPFIEYVVAIFMLLSGVNFALFLMCLRGKVSRLLRDEELRWFLGSVAILTFLITFALVFQNHYDWETAFRKSLFQVATAHTSCGFATDDYNLWPAFTWLLLLIAMLSGGCTGSTSGGIKNMRLLIIARSIRNEFKHLLHPNAVLPVRVNKQSVSPSIVSTVGMFFAFYLIIVILGWAVLLFLGVGFSESIGTVISSIGNVGPGLGSCGPAYSWNGLPDAAKWVLSFLMLIGRLELFSVLLLFYPGFWKS

SEQ ID NO: 48269 - protein, 667 aa, Bacteroides fragilis
MIDQATIDRILDAAQIVEVVSDFVTLRKRGVNYVGLCPFHNEKTPSFSVSPSKGLCKCFSCGKGGNAVHFIMEHEQMSYPEALRYLAKKYNIEIKERELTNEEKEVQSNRESMFIVNNFARDYFQNILKNHVDGRSIGLAYFRQRGFRDDIIDKFQLGFSTEGRDALAQEALRKGFKQEFLVKTGLCYETDDHKLRDRFWGRVMFPVHTLSGKVVAFGGRVLSTENKKLAKYVNSPESEIYHKSNELYGIYFAKQAIVKQDRCFLVEGYTDVISMHQSGVENVVASSGTSLTPGQIRLIHRFTNNITVLYDGDMAGIKASIRGIDMLLEEGMNIKVCLLPDGDDPDSFAWKHNATEFQNFIQEHETDFIRFKAQLLMEDAGKDPMKRAELINDIVRSIAVIPEAIVRDVYIKECGQLLRIEDKLLVSEVAKRRELQAEKGNKPIASNNAPTPQPGEMPPPFPPEEMEADTYQSFIPQEGKEGQEFYKYERLIIQMIVRYGEKVMCNLTDEEGNEVPVTVVEYVINDLKEDELAFHNPLHRRILSEASEHIHDQEFASERFFVAHPDPKISTIATELASDRYQLSKYHSKTQKLVTDEERLYEMVPMLMINFKNAIVAEELKHIMYALQDPSIANDNAQCDAVMQRYKEMKEIQNLMAKRLGDRVVLR

SEQ ID NO: 48270 - protein, 86 aa, Bacteroides fragilis
MSKICQITGKKAMIGNNVSHSKRRTKRTFDLNLFNKKFYYVEQDCWISLSLCAAGLRIINKKGLDAALNDAVAKGYCDWKTIKVVG

SEQ ID NO: 48271 - protein, 153 aa, Bacteroides fragilis
MKVYLGLGTNLGDKELNLRVALQKIEERIGKIISLSAFYATAPWGFQSENNFLNAAVGVETVLSPVGILESTQRIEQEIGRLHKSRDGVYSDRLIDIDLLLYGDKILQDESLIVPHPLMTDRKFVLEPLAEIAPDVVHPVFHKTIKELFLALS

SEQ ID NO: 48272 - protein, 719 aa, Bacteroides fragilis
MVILITGLLYMSCTDSMEVSGDADRNNTEDISVRLVITIPASTTYARTRGTFATTDHESKISEIQVLVFEEGKYKYRVPGISINNTSSAASFKALLKSSSSPLKLLILANATDAVIANGPSVDDSEDLVKKNINLRFNNITSDFPMYGEYELPGGLEATVINNITGIKMLRSIARVDVKATEVANFKLSGVKAYRANDHLQIIPDETGVVRVTLPSVPAGSSGNVNSILYPVPAENLNEFSAQLYLPEADSPTPDNRVSQATCIVVEGYYEGSDQPGYYRMDFDPDNVENAFGKVLRNHKYIFNIKKVSGPGWGSPDEAANNRSAHIVAEVQAWDDYTIDMNFDGEHHFGVSTREIVLKNKAGSAGIINVSTDLPDYTLQWADAAGTPTGTGSQSLANEYFTVTKAQNGSQLVITALQSNSTNDTSRIQNFVITAHRWRILVNIQQKYDAAAYQTIHLLTFNTGLGYLGTNIIGSGSAEARATGLRGILNNQNNFGPTGTVECGGYNLIGVNANYNNLTDALFASFDVVYVHYMGNLLFGTSDAQKAHNWVKSKKNRVLIVSYDALDVSQNLLKEILGGNNGISFLTSNTGPYPLATPENGNSYFSTTGPFTSAPYTPINTDFSLRNYDAYHGEIQLNTEASKGITPILMGPAGGIVLGIDYSRRIVYWGDTDIGSSASSSTSTTDNRINNNSGTINNNASKLIANVFAWIAETVLYGE

SEQ ID NO: 48273 - protein, 313 aa, Bacteroides fragilis
MQIIRNIPGVLPEPCVATIGFFDGVHMGHRFLIEQVRELAAARGLRSALITFPIHPRKVMNADYRPELLTTSEEKLALLEETGVDYCFMLDFTREVSHLTAHEFMSDILRDRYRVQTLVIGYDHRFGHNRSEGFEDYCRYGSEMGIEVIRARACVCDDLHISSSVIRKMLHQGEVDRAARCLGYDYFLDGTVVSGYQVGRKIGFPTANLSVDDPDKLVPADGVYAVHVTFDGYTYNGMLNIGTRPTIGNGPERSIEVNILHFHSDIYDKFIRLSFVKYLRPELKFDGIEGLIAQLHQDAADVEALLGKIQNVN

SEQ ID NO: 48274 - protein, 939 aa, Bacteroides fragilis
MDTLLYLIFGIASAVNILYFCELIESKMIRKIAYTFFSFLICCNVSLAWGQTFAFRGTVLDEQTHKALDYATIQLFVEKQFAYGGITDANGHFGLLHIHPGTYRIIISYLGYDSTEKEIKVVGNTSDIFYLKPSNMALNEVVVTASESKRATSASIVDRTAMKHLQPSSFSDLMELVPGGKSADPQMGQANLIRIRETGKTEDISSLGVGFYIDGIFQNTDANLQYMPSSTSAVNATSTMSKGVDMRTIPTDNIEKVEIIRGIPSVAYGNVANGAVIIQRKTSESPLSARFKADKTSKLFSVGKGFRLDGNGRYVLNTDLSYLDSKIDPRNSVKNYTRLTASARLDGKWLWNERNIHWNLSTDYTGSFDDAKRDKDATVKEDSYKSDFSSFKMAGKWNLKFSNHSWIREIHAATSVSWQWEKMRETKSVSLNRPAAIATQTETGESDGIYLPYNYVAQMEIDGKPLYVTVSARTHLAFPLGGLQNRMNLGVEWNYQKNLGKGQVFDVTRPISEGLSTRPRRFKDIPGLQPFAFYAEEVLNLPVKRHKLAFTAGIRLQSLLGLDRKYEMQGKIYPDLRLDLQWSLPTSNGWNIAFSGGLGWISRMPTTAQLYPDFKYVDLIQLNYYHNHPDYRRINMMTYKWDNTNYQLEPARNMKWEVRADIGYKGNRLSATYFRERMNNAFDDLTYYKSLAYKLYDPASIDGSALTAPPELSQLTYANEYNLDVYSTQGNGMKVHKEGVEFQFASRRIESLKTRVTVYGAWIKTVYSSDSPKYKASSILLDNKQLKYVGLYQGENGTESQAFNTNFMFDTYIQRLGLTFSTSAQCTWYTNRRNLWNNGVPVSYIDQSGETHLFREEDKNNIQLQHLVEKYSATYFERTTVPFYMDINLKASKRIGKYLNLAFYVNRLLGIYPDYTLRGVLQRRTSESPYFGMEMNLTF

SEQ ID NO: 48275 - protein, 651 aa, Bacteroides fragilis
MISVEGLTVEFNATPLFEDVSYVINKKDRIALVGKNGAGKSTMLKILAGLQSPTRGVIAIPRDVTIGYLPQVMILADNHTVMEEAELAFEHIFELQADLERMNQELADRTDYDSEEYHKLIDRFTHENDRFLMMGGTNFHAEIERTLIGLGFSREDFNRPTSEFSGGWRMRIELAKLLLRKPDVLLLDEPTNHLDIESIQWLETFLSTRANAVVLVSHDRAFLNNVTTRTIEITCGQIYDYKVKYDEYIVLRQERREQQLRAYENQQKQIEDTEAFIERFRYKATKAVQVQSRMKQLEKIERIEVDEVDNSALRLKFVCSSRSGNYPVICEDVKKAYGAHVVFHDVNLTINRGEKVAFVGKNGEGKSTLVKCIMSEIDYEGKLTLGHNVQIGYFAQNQAQMLDENLTVFDTIDRVAVGDIRLKIRDILGAFMFGGEASDKKVKVLSGGERTRLAMIKLLLEPVNFLILDEPTNHLDMRSKDVLKEAIREFDGTVIIVSHDRDFLDRLATKVYEFGGGVVKEHLGGIYDFLQKKKIENLNELQKANPSSASPANGKKEEGAEEGISENKLSYEAQKELNKKIKKLERLVADCEAAIEQTESAIAILEEKMATPDGASDMSLYEQHQKLKQQLDHTVEEWERVSMELEEMNEK

SEQ ID NO: 48276 - protein, 90 aa, Bacteroides fragilis
MNKAELINAMAAESGLSKVDSKKALEAFFSSVTKALSAGDKISLVGFGTFSVAERSARMGINPSTKKAIEIPAKKVAKFKPGAELTDAIK

SEQ ID NO: 48277 - protein, 85 aa, Bacteroides fragilis
MEARNLRKERTGVVLSNKMEKTITVAAKFKEKHPIYGKFVSKTKKYHAHDEKNECNVGDTVRIMETRPLSKTKRWRLVEIIERAK

SEQ ID NO: 48278 - protein, 339 aa, Bacteroides fragilis
MSTIILGIESSCDDTSAAVIKDGYLLSNVVSSQAVHEAYGGVVPELASRAHQQNIVPVVHEALKRAGVTKEELSAVAFTRGPGLMGSLLVGVSFAKGFARSLNIPMIDVNHLTGHVLAHFIKEEGEANEQPDFPFLCLLVSGGNSQIILVKAYNDMEILGQTIDDAAGEAIDKCSKVMGLGYPGGPIIDRLARQGNPKAYTFSKPHISGLDYSFSGLKTSFLYSLRDWMKEDPDFIEHHKNDLAASLEATVVDILMDKLRKAAKQYKINEVAVAGGVSANNGLRNAFREHAEKYGWKIFIPKFSYTTDNAAMIAITGYFKYQDKDFCSIEQPAYSRVTL

SEQ ID NO: 48279 - protein, 233 aa, Bacteroides fragilis
MNFKEGEVLYFNKPLGWTSFKVVGHARYHMCRRMKVKKLKVGHAGTLDPLATGVMIVCTGKATKRIEEFQYHTKEYVATIQLGATTPSYDLEHEIDATYPTEHITRELVEKTLKTFVGEIQQIPPAFSACKVDGARAYDLARKGQEVELKPKLLVIDEIELLECNLPEIKIRVVCSKGTYIRALARDIGEALQSGAHLTGLIRTRVGDVKLEQCLDPAKFAEWIDQQDVEISD

SEQ ID NO: 48280 - protein, 224 aa, Bacteroides fragilis
MKGDEIEVMKHFLFNARTADECWASYLIAKRHKYRIDNFSMWCDYLRMLNKLGQDLRNPKNICPEDFMAAHDNATRKIEAIHEKERAEQRRRWEIERREREQQRQLQREKDAEDFIANKSKFFGLVITDEEIIVKVLESIDEYYSEGKAQNICVFGSEYYKKADTLILSARIGGEIIETVEVDLRTLKVVQCHGKYNQDTEYHERIIDLVNKNANLIRERMKAA

SEQ ID NO: 48281 - protein, 637 aa, Bacteroides fragilis
MAMAHTLDSFPDTGDLENLKDNYQKITSVLAGHQIAFWEYDIPTGECNFTDEYFHILGLKEAGIIFRDINDFYRFAHPEDVISYQTTFARMLESETKISQIVVRCVGRQGETIWLEDNFIAYKKNKENGSDKIIAYTANITSRCEKEVQIRQLEERNRKIIEALPEFIFIFDDNFFITDVLMAPDTELLHPVEVLTGADGRSIYSSEVSDLFISSIHECLKSGKLKEIEYPVDVEAGRHFFQARIAPFEGNKVLALIHDIGDRMRRSQELLEAKQRAEEADRMKSVFLANMSHEIRTPLNAIVGFSEIIALTEDEKEKEEYLGIIQQNSNLLLQLINDILDLSRIESGKSEMHCQLTEMSGLVDEVDKVHRLKMKKGVKLNVIRPSEEIWISTDRNRVTQVLFNFLSNAIKNTIEGSITFGLVKEEEWVKLYVTDTGCGISKEKLPLIFTRFEKLNDFVQGTGLGLPICKSIVERLGGRIEVESELGQGSTFILYLPNRQVQEVVVGKRENAAGNMGVENRQKKILIAEDVESSYLQINAFLKKEYTILWVPNGEEAVKSFIREKPDLILMDIRMPVMNGIQATAKIRAISQEIPIIAITAYAFCPEGERALEAGCNEVIAKPYPLEKLKETIETYL

SEQ ID NO: 48282 - protein, 1361 aa, Bacteroides fragilis
MKKLNLFLLVLFICNCPVVSGYAFFDRDIRLLTMQDGLADNTITSIYKDRDGFMWFGTNNGLSRYDGKLIKNFSSSPAYMYVSEIVEMSDRYLGVIAGNTLYCFARSLEKFIPIVHATDYSSVHVSHLLPIDNNSFWGLSGNKLYLYTQEEVKNEKGEVVQIKLKCEKQYKDLIDSGDNFCAMCYTDNHEMLCLVTQQGNLLLFQPESSEKSKKISLWKNKTWDATSVLYDKGVVWVSTIGHGILRYYVSSGYIDRITYKENNKENSLSHTDVFQVIPINNNRYLAVTWSGYTLLFQDKNDPKRMMTEIYYNTASQLHRNLETRMISAYYDPSGIVWIGTNGGGVIYSDLRSQFYNQFHQERHNEICGIVMDNRKYVWMATFHQGIMKSEQPFEPGRRMNFTRVGTPDIQSKNTVLCAINDNRGSLWFGNRDGTLTSYNEATKQFRLHFLQDRGKVNTVSIWALYWDTNRNLWVGTNDGVWKLNIDSGFCKKIPIEILFKDPTPICIRAIAGTKDGTIWLGTSNAGVCKLKIDSRGEMSLETGYEKKANIKNNSVRSLLVSSDGNVYVGYMDGFAILSPKKDAIREYYTTRNGLCSNFIGCLVEDNRGHIWLGSNSGVSRYSRHQHLFYNYYISGSNRSALLADNTLFFGNNKSLTYFDPDDVGGHLDEDQVLITGLEVDGRPVGIGDKINGQTVLAEGISYTSSITLNNENRDFVLSFNNLSYAEEQQKYNYRLLPYQTHWLVSNDGEKATYMNLPEGDYTFEVKNIYPDGKDGKVTSLQIHILPHWSRTLPFRLFILLLLAGGVAYLIRLVKHRQMRMEREMRMEHELLSVNLEREKERQIRMERENFFTSAAHELRTPLTLILAPLQELLEHIKASDPLYSKLYTMYKNSSSLHTLVDQLLYVQKIEAGMVKLRLSEADIVELVREVAESFRQMAGIKGCTFQVRLPEDPVFLWIDTEKITSSVGNLLSNAFKYTSPNGEVLLTLTRMEQDGKPFCQITVSDTGEGIPDEFQKRIFDSFITGDNSPAFSTKVGIGLRIVKNTMDLHHGQVILDSEPGKGSTFVLLIPEGKSHFTGDLYEIVDYRGHETEPQFQPLSVQEKLEEGVPVTKKTLLIVEDNVDVRQYIRSLFVTKYTVLEAADGEEGVRIATNEIPDLIISDVMMPVKDGFACCREIRERQETAHIPILMLTAKAEDADVLQGSYSGADDYMMKPFNPEVLKAKVENLILQRERLKRIYTKALMLKRESVEDEEADDEFIQKLIHVVEKNLSNENFNVKMLAEQLHMSQPTLYRKVKQRSELSVVDMIRSVRVSKAASLIMENRYSIQEISEKVGFSDARTLRKHFTEQFGVPPSKYMENK

SEQ ID NO: 48283 - protein, 497 aa, Bacteroides fragilis
MAKELKDLTKRSENYSQWYNDLVVKADLAEQSAVRGCMVIKPYGYAIWEKMQRQLDDMFKETGHVNAYFPLLIPKSFLSREAEHVEGFAKECAVVTHYRLKNAEDGSGVVVDPAAKLEEELIIRPTSETIIWNTYKNWIQSYRDLPILCNQWANVFRWEMRTRLFLRTAEFLWQEGHTAHATREEAEEEAIRMLNVYAEFAEKYMAVPVVKGVKSANERFAGALDTYTIEAMMQDGKALQSGTSHFLGQNFAKAFDVQFVNKENKLEYVWATSWGVSTRLMGALIMTHSDDNGLVLPPHLAPIQVVIVPIYKNDEQLKLIDAKVEGIVARLKQLGISVKYDNADNKRPGFKFADYELKGVPVRLVMGGRDLENNTMEVMRRDTLEKETVTCDGIETYVQNLLEEIQANIYKKARTYRDSRITTVDSYDEFKEKIEEGGFILAHWDGTVETEEKIKEETKATIRCIPFESFVEGDKEPGKCMVTGKPSACRVIFARSY

SEQ ID NO: 48284 - protein, 372 aa, Bacteroides fragilis
MIDALENNDSAIHFPEEQIMPETREVNRALNRVGRILYNVKSETVQQEKYYELIMDCVNTGVLVLNENGAVYQKNNEALRLLGLNVFTHIRQLNKVDIQLMKKIEFCRPGDKIQTIFNNERGTINLSIRVSGITVREEQLRILAFNDINSELDEKEIDSWIRLTRVLTHEIMNSVTPITSLSETLLSLADTRDEEIRRGLQTISTTGKGLLSFVESYRRFTRIPTPEPSLFYVKAFIDRMVELARHQNKCDNITFHIDIAPADLIVYADENLISQVVINLLKNAIQAIDAQADGKIEIQGRCNAAEEILIEIKNNGPAIPSDIADHIFIPFFTTKEGGSGIGLSISRQIMRLSGGSITLLQGKETKFILKFK

SEQ ID NO: 48285 - protein, 258 aa, Bacteroides fragilis
MLVDSHSHLFLEEFAEDLPFVMERARAAGVTHIFMPNIDSTTIEPMLSVCDTYRDFCFPMIGLHPTSVNESYEKELEIVAANLETSGRFVAVGEIGIDLYWDKTWLKEQLIAFEKQVQWALHYQLPIVIHCREAFDYIYKVLQPYKNSGLTGIFHSFTGTPGEAVRMMEFPGFKIGINGVVTFKKSTLPETLKSVPLERIVLETDSPYLTPVPNRGKRNESANVKDTLIKVAEIYNEDPEKVAELTAVSALKVFGMLK

SEQ ID NO: 48286 - protein, 870 aa, Bacteroides fragilis
MNKRLYTIFLISVFLLLPGFSTAAERIYNVLFVQSYAPETPWHNDLVRGLKDGFGESGLKVNITTEFLDANFWTYQSEKLIMRRFCERARERGTDLIVTVSDEAFHTLLTCGDSLALQLPVVFFNIKYPEGSLIDSLPNVCGYTANPDFGELLRQASRLFPTRTEVVCISDNSLLSSKGKDDFMNEWEGFVEEHPEYTVTFYNSQTDTTNKIIASTCYPRNTHKTLIIAPKWSSFMSFIGRNSKAPFFSCENLALTNGAFGAYDADSYASAHEVGRTAADVLRGKSPSEVGIIESPLKFMYDFKQLVFFKVDPKQASAIGGTIINEPYMEKYRMLYILLYSSILALLVFLIVWLYRINRRESRRRIHAQTRLLIQNRLVAQRDEFDNVFHSIRDGVITYDTDFRIHFTNRSLLKMLHLPKDEAARPYEGLPAGSIFKIYNNGKEILRPMLKQVVTEESSVVIPENSFMQEVHSGSYFPVSGEVVPIRAHGKITGMALSARNISDEEMQKRFFRMAVDESSIYPWQYNIRTGLFTFPAGFLTRFGFAENKTTISRGEMDRMIHPDDQESAYEIFNRALAGLSQSTRMSFRQLSGDGNYEWWEYRTSVLAGLTTDTPYSILGVCQSIQRYKTTEEELTAARDKALQADKLKSAFLANMSHEIRTPLNAIVGFSDLLSDTSGFTEEEVKLFIETINKNCGLLLALINDILDLSRIESGTMDFQFAGHNLPLLMKNVYDSQRLNMPPGVQLVLKLPENSKKYLVTDNVRLQQVVNNLINNAVKFTTQGSITFGYTEEEPGYTSLFVEDTGKGISEDGLRHIFERFYKVDSFTQGAGLGLSICQTIVGRLNGTITVTSEEGHGTRFTVRLPDICE

SEQ ID NO: 48287 - protein, 219 aa, Bacteroides fragilis
MCRTALIVAGGKGLRMGSELPKQFLPIGGKPVLMRTLEAFHRFDEKMQIILVLPREQQDFWRELCEEHGFDIKHLIADGGETRFHSVKNGLALVNGIGVVGIHDGVRPFVSQEVIARCFREAVVRKAVIPVIDVVETVRHLTESGSETVSRNDYKLVQTPQVFDADLLKRAYEQEFTPFFTDDASVVEAMGVPVYLVEGNRENIKITTPFDLKVASALL

SEQ ID NO: 48288 - protein, 931 aa, Bacteroides fragilis
  MISC_FEATURE (671)..(671): X=any amino acid
YQELYIKNNINERTINSAIKYYVRSCTRCTPYGIFAGCDIVPIRIDDNYSNIIMSDLKNYKTYTRIDMNYLCELIRKLDLMPQIQNAITYHVNTTSYFLGKNLRYIEYRINKSKRNYTFSEISHTPYLNNIIKALKKTPLTKKEIIRLLIKNKEIEEEEALNFVQTLIDEQILISNLEPSVVGEDLIQQLHHNLSEINYNLEFINSLIYLLKECDKESLGNKESIINNIYRLLSDGMLFEQDTLMQVDTLNKVKQGIIGNNITKVIDKCIYFFSKFQPSHKSETFELFKRRFYEKYEEQEVPLVVALDPQVGIGYGNWTENNGDINPLLQGLPNPFLDRSYKIDMDLTPVTMLLIKKYEEAIKQGLHEIEILDEDLNEFEERDLKLPQCSVMLSVLSNDDTPSILLKGIIGGATSRLISRFEYLDSKIENFVNEINKRDELYYKDCIVAEVMHLPEDRIGNIQMHPNNRQYGICYLSSPTTKYVKKIIPIDDITISVYHGQEVILKSKKNKKRIIPMLSTAHNTKNGLPIYSFLSDYINQESMSYSFDWGSYFHNKSFLPRVIYSNVILKPARWLIHPNEFPQNKNLNSDELYSWKLKQRIPDEILITLGDNQLYINFNKEHLVKIFISELKKKRPIILEEFLYSSKNINLVESQEGFFANELIINLYKKXHQRIFIIGGEWIYFKIYSGPKTIENIFINDIMCKINLLIEQRVRDSFFFVRYMDPNYHIRLRLHCTNINNYAFILHLIYETLNRYVKDLIITKVQLDTYTRELERYEYNEIVHFETFFYYDSCLITKCLKRLNCTDQDRYKISMKFIDSIMDICNFSLDEKINFTEKNSKAYFLELYQSDCTIGHILNLKYRKYRNEIEKCLNDESKHCWWNKEIKKNIYIMRTIPLNILTGKNNKLSSIIHMHVNRMYRINQRTVELVI

SEQ ID NO: 48289 - protein, 332 aa, Bacteroides fragilis
MPYLIKRTRKNTPGKSKNLQTATFTDMKQILTYLLFIWILLPLKAEEKIYTVDNIPKVHLQNKMQYVCNPAGILSQQACDEIDAMLYALEQQTGIETVVAIVPSIGDKDCFEFSHQLLNQWGVGKKGKDNGLVILLVTDQRCIQFYTGYGLEGILPDAICKRIQMQEMIPYLKKGEWNQGMLAGVKAVCQRLDGSMVNDDEGRGEEGISVSMLLVVILGFITIAGVVGILAVRASTRCPKCGKHQLQRSSTKLISNRNGVKTEDIIYTCRNCGHTVVRRQQSYDDNYRGRGGGGPFIGGFGGGSFGSGGGGGFSGGSFGGGSGGGGGAGSRF

SEQ ID NO: 48290 - protein, 701 aa, Bacteroides fragilis
MQIINLTLMNMNHIIKLLFLCLFFATACSQEEMNEVLKNHAEMEGQVNSIEELCKNMNRDIVALKLIINSSESGDYITGFKELADGSGYTISFFKSGTIVIKNGKKGDDGKKGEDGQDGQNGQNGTDGKDGQDGTDGKDGQDGIDGQDGQDGTDGKDGQDGTDGKDGQDGTDGKDGQDGTDGTDGPEGDKGQNGTAPVVTMKMDTDGHLYWAIKNADGTSSFLLDNNGQKVRASGTDGIVPVIGVNAAGYWTLDYGSGPVELKDAAGNPMKAKGVSGDPMFRKVVSEDGYIVFYLTDGTIFKVPEWGGAQVELAASGVTYFHRSESLTFTFTCSGVNKSIAPVCTAPVGWTVTAQYTSDTTGEMTVIAPDKSSADGALSGTAILELTAKDGKKLSATLGVTLLLEFKVPDSSRSFVYELYVEGVKVGELCHEFIPDYSFGSGKSASVFYPYNVYNKAFGEGMVLDNGGKVDYLTTVYTPGTNTQPFTSLFTEDGVSFITGDYIGYSDSQANGLRPYLTTDNEGNSYRVMKIGTQYWMADNLRTITNSAGVISSEWRKDANPRYAVYGFPAGITEDSRTIRNQYGLLYNAGVFSGSTSLVTEGWKIPNHLGDWDKLRNFLGGDSKVAEALSIAGFVGKPGGRRNADEPFAFQEKDEVGYWWFSSVDGHNCWALSINPSNVSVPQSTNTYSRGYGFSIRFIRQ

SEQ ID NO: 48291 - protein, 72 aa, Bacteroides fragilis
MAKQSAIEQDGVIVEALSNAMFRVELENGHEITAHISGKMRMHYIKILPGDKVRVEMSPYDLSKGRIVFRYK

SEQ ID NO: 48292 - protein, 363 aa, Bacteroides fragilis
MAMPSGLGKVFASEAKQTETSDVDTDAARIKGHRVLGTGKAAFEVSALGFGVMGMTYNRSQHPDKKECIRLLHEAVDRGVTLFDTAIIYGPLTNENLAGEALSEFKGRINVTTKFGHEVIDGKGTGRQDSRPATIRRYCEESLRRLRLESLPMFYQHRADPNTPAEEVAAIIADLIKEGKVQRWGMCEVSAETIRKAHAICPLTAIQSEYHLMHRLVEENGVLDVCRESGIGFVPYSPINRGFLGGCINEYTVFDVNNDNRQTLPRFQPEAMRANTRIVNALQAFGRTRGMTSAQVALGWLLQKVPWIVPIPGTTKLSHLEENLRTLDFNISSGEWKELEDAVAAIPVVGDRYNAEQQKQVGR

SEQ ID NO: 48293 - protein, 147 aa, Bacteroides fragilis
MEIILKEDVVNLGYKNDIVTVKSGYGRNYLIPTGKAVIASPSAKKMLAEELKQRAHKLEKIKKDAEAVAAKLEGVSLTIATKVSSTGTIFGSVGNIQIAEELAKLGHEIDRKIIVVKDAVKEVGAYKAIVKLHKEVSVEIPFEVVAE

SEQ ID NO: 48294 - protein, 290 aa, Bacteroides fragilis
MKFAIFGNTYQAKKSSHAATLFKLLEKHGAEICVCREFHRFLKSDLKLNVKADDLFDENNFDADMVISIGGDGTFLKAARRVGNKGIPILGINTGRLGFLADVSPEEMEETIEEVYQNHYTVEERSVLQLLCDDKHLQNSPYALNEIAILKRDSSSMISIRTAINGAHLTTYQADGLIIATPTGSTAYSLSVGGPIIVPHSKTIAITPVAPHSLNVRPIVICDDWEITLDVESRSHNFLVAIDGSSETCKETTRLTIRRADYSIKVVKRFNHIFFDTLRTKMMWGADSRV

SEQ ID NO: 48295 - protein, 994 aa, Bacteroides fragilis
MQRHQQKQHVFLIILVLLHTMVCFNLKFTYNFALLINMMLLMKKGILGCNIIYLFILICIGIALPIKSQNNYKVKLTGTVYEYDHNNKRLPLEFAAVSIPEIALGTTSDENGRYILENVPTGKIRMQIQYLGKVSIDTLINVNKDLVLNFTMRNEDFKLKEVTVTATNSRSGKSTSSHISRSAMDHMQATSLYDVMSLMPGGISQNQDMSSAQQINIRQVSSSSGPEAPMNAMGTAIIRDGAPISNNANLSAMSPTVLSGTETPASLAGGASPAGGTDVRSISTENIESIQIVRGIPSVEYGDLTSGAVIINTKAGREPLRVKAKANPNIYQVSMGTGFELGKKKGALNVSADYAYNTNNPISSYQHYQRATTKLLYSNTFFNNKLRTNSSFDFIYGKDQRERNPDDEQTKTASEGRDIGFTLNTNGTWNINKGWLKTLRYVLSGTYMDKDSYYETVYSSATSPYSMTTTNGAVLSNFAGQHIYDANGNQITNFGPEDINHYAVYLPSSYLGHYEIDSREVNLFAKVTSSLFKASGHVNNRILIGADFRSDGNVGKGKTYDPSTPPYRSQYGHNSSFRPRNYKDIPFINQFGAYVEDNFKWSISGTHDLNIQAGVRYDHTSVVGGIFSPRVNASIDLIPNLLSLQGGYGIAAKMPSLLYLYPENAYFEYININELTNENIPESQRLFMTTTEVRQVDNSDLKIAQNHKAEVGFNLRVGKTNLNVIAYKERLKDGYVMSQTFNTFNTFIYNEYQRTENGIELSSSLPVLSTYAKPTNNLNIETKGLEFDLNIGRIDAIRTAFQINGSWMRTKSWRQGYSFYDNSEDAASARKPVAIYSQEGNASYKQQFVTTLRATHNIPRIGFVVTMTAQAIWQQSNWNTFGNDSIPVGYLALEDASVNMFPKGKYTTTQQVKDAGYGYMLNNVSHNNAIKESYSPYFCFNLNVTKEISNMLRVSFFANNMFRSYPRRESKRNPGSYIQLNNRFFFGLELSLTL

SEQ ID NO: 48296 - protein, 964 aa, Bacteroides fragilis
MHTLFEHKSNNKTVNTVFFCTFTMKKLKNMNQNSKLFLLDAYALIYRAYYAFIKNPRINSKGFNTSAILGFVNTLEEVLKKETPTHIGVAFDPPGPTFRHEAFEQYKAQREETPEAIRLSVPIIKDIIKAYRIPILEVAGYEADDVIGTLATEAGNQGITTYMMTPDKDYGQLVTDHVFMYRPKYGDKEFEVMGVEQVKAKFDIQSPAQVIDMLGLMGDSSDNIPGCPGVGEKTAQKLIAEFGSIENLLEHTDQLKGALKTKVETNREMIIFSKFLATIKVDVPIRLDMNSLVREQADEDTLRKIFEELEFRTLMERIFKKESSPASPIAGTLFNQENGPVQGNLFEEFTPDHTNEEKKSNLESLNSLSYDYQLIDTEEKRNEIIKKLLTSEILALDTETTGTDPMDAELVGMSFSITENQAFYVPVPAEREEAIKIVREFEPVFKNEKSLKVGQNIKYDMLVLQNYGIEVRGKLFDTMVAHYVLQPELRHNMDYLAEIYLHYQTIHIEELIGPKGKGQKNMRDLSPQEVYLYACEDADVTLKLKNILEQELKKNDAEKLFYEIEMPLVPVLVNIESNGVRLDTEALKQSSEHFTTRLQSIEKEIYTLAEGEFNIASPKQVGEILFDKLKIVEKAKKTKTGQYVTSEEVLESLRNKHDIIGKILEYRGLKKLLSTYIDALPQLINPKTGRIHTSFNQTVTATGRLSSSNPNLQNIPIRDEDGKEIRKAFIPDDGCSFFSADYSQIELRIMAHLSEDKNMIDAFLSGYDIHAATAAKIYKVDIKEVTADMRRKAKTANFGIIYGISVFGLAERMNVDRKEAKELIDGYFETYPQVKSYMDKSIQVAREHGYVETIFHRKRFLPDINSRNAVVRGYAERNAINAPIQGSAADIIKVAMARIYERFKAEGLKAKMILQVHDELNFSVPAKEKEIVEQVVIEEMEKAYRMHVPLKADCGWGTNWLEAH

SEQ ID NO: 48297 - protein, 157 aa, Bacteroides fragilis
MLVEATLDHFESFYVLKCERTNIEWTGFSQAPSKDHFYKWYIKQLRSTKRNIYFFLIDNNLAGYCYLDTIDEYTVEIAYGISELYSGKGKGTELIAAIIDVLGKRGVRSVVAWVSEANIGSSKILLKNGFIKKSQSEYRQLPLIRNAALFYLWQREI

SEQ ID NO: 48298 - protein, 440 aa, Bacteroides fragilis
MMEDLFSLIRIPSISALPEHHDDMLACAQRWTQLLLKAGADEAIVMPSKGNPIVFGQKIVDPNAKTVLIYAHYDVMPAEPLDLWKSQPFEPEIRDGHIWARGADDDKGQAFIQVKAFEYLVKYNLLENNVKFIFEGEEEIGSPSLEAFCEEHKELLKADVILVSDTSMLGADLPSLTTGLRGLAYWEIEITGPNRDLHSGHFGGAVANPINVLCGMLSKVIDTDGRITIPGFYDAVEEVPQAEREMIAHIPFNEEKYKEAIGVKELFGEKGYSTLERNSCRPSFDICGIWGGYTGEGSKTVLPSKAYAKVSCRLVPHQDHHVISKLFADYIRQIAPATVEVKVTAMHGGQGYVCPISLPAYQAAEKGFEIAFGKKPLAVRRGGSIPIISTFEQVLGIKTVLMGFGLESDAIHSPNENFSLDIFRKGIEAVVEFHLIYGKK

SEQ ID NO: 48299 - protein, 340 aa, Bacteroides fragilis
MGLFSFTQEIAMDLGTANTIIITGGKIVVDEPSVVALDRRTDKMIAVGEKAKLMHEKTHENIRTIRPLRDGVIADFYACEQMMRGLIKQVNTRNRLFSPSLRMVIGVPSGSTEVELRAVRDSAEHAGGRDVYLVFEPMAAAIGIGIDVEAPEGNMIVDIGGGSTEIAVISLGGIVSNNSIRIAGDDLTADIQEYMSRQHNVKVSERMAERIKINVGAALTELGEDAPEDYIVHGPNRITALPMEVPVCYQEVAHCLEKSISKIETAILSALENTPPELYADIVHNGIYLAGGGALLRGLDKRLTDKINIPFHIAEDPLHAVAKGTGVALKNVDRFSFLMR

SEQ ID NO: 48300 - protein, 114 aa, Bacteroides fragilis
MNQYETVFILTPVLSDVQMKEAVEKFKGILQAEGAEIINEENWGLKKLAYPIQKKSTGFYQLIEFNAEPTVIDKLELNFRRDERVIRFLTFRMDKYAAEYAAKRRSVKSNKKED

SEQ ID NO: 48301 - protein, 592 aa, Bacteroides fragilis
MELFQSVSTHHRFKIKVNYRPDKPSVWAIGPDVIFKQLGEKVSIIMTHHESGEKTEFHGLISDIHVEGFDGNQGFVILEGGSPTILLDRDPAMDCYVEQNLNTIVSDILDKSGVKMNVTNNPKHTDIIPYVARYKETSYGFLSRLLRSYGEWFYYNGETLQIGDPEIDTESRAGYDVDLTGVSINATIRSLNHSTYEFDPVNDKFYYDYSGTPKGATLGSRSAEKCSEPIFPTEAKLPSIRPAYSAMDLEHYGDAGFHRNYSQLSQIKASSRYCGIRLGELVVTRVPESFPGVKITDLGRYRITEITHTVNYKGQYSNTFCGVPGGTPIMPWGDAVMPVAYPEMARVVSNDDPKNQGRVKVQFMWQEVDGGESYWMRVQSPDAGKSEQVAKNRGFVFIPEPGDLVMVGFEQGNPDRPYVTGSLFYKANSEGAATDNTVKSMRTRSGHTLEFKDDEGGDWGITLRDINGNVIHLNSKDKNIDITAPETITLTAKNVCINTEENVQITAKKNIDMTVEADINSSAKGNLLLQADKDVLTAAKGNVGIEAKSDINMVGKNIAVEGNSKITLNGGQTQVAGQQTTIQGAANKIEIM

SEQ ID NO: 48302 - protein, 335 aa, Bacteroides fragilis
MKCYLIGLLSMLSVHAAMGQQAIDVHCHNILPTFKELLDRHGATLEETFPLPDWDVASHLKFMKEAGIETSVLSMPAPQLWFGDVEESRRAVRQYNETCSRLKADYPGKFLFCASLPLPDVDAAIKEAVYVLDTLGADGIKLATNSRGQYVGDAALDTLMQVLNEHHAVVMLHPHKPSPVNDGIIATAPLAVYEYPAETTRTVVNLIARNVPARYPNLKFVVPHCGSFLPLALPRMKAVYPVMAAKGLMEPIDWDANLKAFYYDLAGGATPEVVKALLTITTPDRLLYGSDYPYQPATVLTGNLKQLRTWITDDAELTPFAEKILHDNALKLFSK

SEQ ID NO: 48303 - protein, 330 aa, Bacteroides fragilis
MGAFAQQHATGKDKEMTVDLNPVVVTGTGTHQRLKNTPAPVEVVTANEIKKAGITDFQQAMTMLVPSLSFSTNSMGSYLMMNGLSNKYVLILINGRKLTGDTANNIDLSRIDMSRVKRIEVLDGAGSSLYGSDAIAGVINIITNEPKELMQVTSTTRYEDHRQLTQMVNADIATEKFGSYTSYKHEQSAGWQNSDLAYVTDKKGNVSTVPTVSATSNGFHSNLVNQKFTFEPTEKLSFYANGGYYWKLTDRPVYTADIDGGSKYDLHYESYNFGLGGRYKINKRSSIQLDLMNDNYMRNYKYTVADDKNKIPIGDYANTKEQHFYGAELK

SEQ ID NO: 48304 - protein, 121 aa, Bacteroides fragilis
MIQVESRLTVCDNSGAKEALCIRVLGGTGRRYASVGDVIVVSVKSVIPSSDVKKGAVSKALIVRTKKEIRRPDGSYIRFDDNACVLLNNAGEIRGSRIFGPVARELRATNMKVVSLAPEVL

SEQ ID NO: 48305 - protein, 148 aa, Bacteroides fragilis
MNLSNLKPAEGSTKTRKRIGRGPGSGLGGTSTRGHKGAKSRSGYSKKIGFEGGQMPLQRRVPKFGFKNINRIEYKAINLETIQKLAEAKKLEKVGVNDFIEAGFISSSQLVKVLGNGTLTAKLSVEAHAFSKSAVAAIEAAGGNVVKL

SEQ ID NO: 48306 - protein, 510 aa, Bacteroides fragilis
MKDMDIAVERLNMAMGKKERILIYGDYDVDGTTAVALVYKFIQQFYSNLDYYIPDRYNEGYGISKKGVDYAAETGVGLIIVLDCGIKAVEEIAYAKEKGIDFIICDHHVPDDILPPAVAILNAKRLDNTYPYTHLSGCGVGFKFMQAFAISNGIEFHHLIPLLDLTAVSIASDIVPIMGENRILAYHGLKQLNGNPSVGLKAIIDVCGLSEKEITVSDIVFKIGPRINASGRIQNGKEAVDLLIEKDFSAALEKAGQINQYNETRKDLDKSMTEEANKIVAELEGLADRRSIVLYNEDWHKGVIGIVASRLTEIYYRPAVVLTRTDDMATGSARSVSGFDVYKAIEHCRDLLENFGGHTYAAGLSMKVENVQAFTERFESFVSEHILPEQTSAVIDIDAEIDFKDITPKFFNELKRFNPFGPDNQKPVFCTHHVYDYGTSKVVGRDQEHIKLELVDNKSNNVMNGIAFGQSSHVRYIKTKRSFDICYTIEENTHKRGEVQLQIEDIKPIE

SEQ ID NO: 48307 - protein, 461 aa, Bacteroides fragilis
MLKQKTLKESFSLRGKGLHTGLDLTVTFNPAPDNHGYKIQRTDLEGQPIIDAVADNVGETTRGTVLSKNGVKVSTVEHGMAALYALGIDNCLIQVNGPEFPILDGSAQYYVQEIEKVGIEEQNAVKDFYIIKSKIEFRDEETGSSIIVLPDENFSLNVLVSYDSTIIPNQFATLEDMKKFKDEIAPSRTFVFVREIEPLLSAGLIKGGDLDNAIVIYEREMSQENYDKLADVMRVPHMDAKLLGYINHKPLVWPNECARHKLLDVIGDLALIGKPIKGRIIATRPGHTINNKFARQMRKEIRLHEIQAPTYDCNRAPIMDVNRIRELLPHRYPFQLVDKVIEIGANYIVGVKNVTSNEPFFQGHFPQEPVMPGVLQIEAMAQIGGLLVLNSVDEPERYSTYFMKIDGVKFRQKVVPGDTLIFRVELLAPIRRGISTMKGYAFVGEKVVCECEFMAQIVKNK

SEQ ID NO: 48308 - protein, 206 aa, Bacteroides fragilis
MKLLLKYFPDLTEEQRKQFAALYELYIDWNSKINVISRKDIENLYEHHVLHSLGIARIIRFRAGSSVMDLGTGGGFPGIPLAILFPDTKFHLVDSIGKKVRVATEVANAIGLKNVTFRHARAEEEKQTFDFVVSRAVMPLADLIKIIRKNISPKQQNALPNGLICLKGGELEHEAMPFKHKTSMHNLNEDFDEEFFQTKKVVYVTI

SEQ ID NO: 48309 - protein, 299 aa, Bacteroides fragilis
MSPLNFTHILTQTVDELSESESYKGLFHQHKDGEPLPSPRVLCDVIELARSILFPGYYGNSTVNSRTINYHIGVNVEKLFNLLTEQILAGLCFGNGDRCDECTEAKREEAARLAAKFISKLPHLRRVLATDVEAAYNGDPAAQSFGEVIFCYPAIKAISNYRIAHELLELGVPLIPRIITEMAHSETGIDIHPGARIGTHFTIDHGTGVVIGATSIIGNNVKLYQGVTLGARSFPLDADGKPIKGIPRHPILEDNVIVYSNATILGRITIGRDATVGGNIWVTENIPAGARIVQTKAKK

SEQ ID NO: 48310 - protein, 334 aa, Bacteroides fragilis
MKHYRLFLLLIGLLVLAFLADIAIGSVSLSIRDVWNTFIGSNDNLIYREIILNHRLPKALTAILAGASLSVAGVLMQTLFHNPLAGPDVLGVTSGASLGVALLTLGTSSLPLWLITGWGQVTAAIIGAIGVLLLVIIVSIKIPQTISLLIIGMMFGNFAGAIVSILQSMSNPDTLKLFITWTFGSLSSVGWEQMSVMAPVIACGILTALLLQKQLNILLLGKNYANGLGVSVPRLRLWIILATALLAGTSTAFTGPIAFIGITMPHVARGLFGSPNHRIILPASMLCGAITLLVCDLISQLPGMQGTLPINAVTALFGSPIIVWIILRNSYINK

SEQ ID NO: 48311 - protein, 282 aa, Bacteroides fragilis
MNRIEKNKTQTDQAWNKLHNRLETDGLLPTVTERRFATRPTVWIGIAAIAAIISLCVYLPTVLRTDRHLSGGELLVKANKEESILVTTLEDGSVVYLSEQTSLEYPKHFSKKRREVSLKGNALFDIAGNRARPFFIETGKVQIEVIGTAFHVRNSGNSPFELAVQRGEVKVTQKQNGQEIHVKAGETATLLGDEWQLTVTENSKQFTRYMQNMRFKDEQLDHILHAINLRQTEIHLQSSPELGKHVLTVSFSEDSPEKMAELIGLALNLKCTRNQNIITLSE

SEQ ID NO: 48312 - protein, 389 aa, Bacteroides fragilis
MKQEKQTELLRTQQMLNEVNRKLLMTLGVAEVFPWKWELAEHMVWFDARPSDDPAGWEIFHNDSFPVSIARVYQGIYKEDRLRVIEACRGILKGKMKKVVVELRFWAKKREGFVLEWLEMHAIPGKVDENGRLLTVEGSLMSITRRKVMEEELTAAKEKAEEANRLKSALIANMNHEIRTPLNAIVGFASLLSIIDDEKEQQEYIGLIQSNTEHLLRLMNDVIDLSNIESGVMDIVGSDVVLDSLMKEMELTYVPKAETNNLVLAWDREQSNAHIYTDRDRLIQILEHLLDNAIKFTTKGTVRWGYQEKENGQIRFYVTDTGCGIPNDKKEVIFERFVKLDSFTQGLGLGLSLCKIIIERMHGTIGVESEVGEGSTFWFTIPNLSDNHI

SEQ ID NO: 48313 - protein, 431 aa, Bacteroides fragilis
MDLLKNIFKGDKVIWIIFLCLCLISIIEVFSAASTLTYKSGDHWGPITQHSIILMVGAVVVVLMHNIPYKWFQVFPVFLYPISVVLLAFVTLMGVITGDRVNGAARWMSFMGLQFQPSELAKMAVIIAVSFILSKKQDDEGANPKAFKYIMILTGLVCMLIAPENLSTAMLLFGVVVLMMFIGRVAFKKLAMLLGGLALVGCLGAVFLLAIPKDTDIPFLHRFDTWKSRITNFTEKEEVPAAKFDIDKDAQIAHARIAIATSNVIGKAPGNSIQRDFLSQAFSDFIFAIIIEELGLVGGAFVVILYIWLLVRTGRIAQKCERTFPAFLVMGIALMLVSQAILNMMVAVGLFPVTGQPLPLISKGGTSTLINCAYIGMILSVSRYTAYLEEKKENPAPLLTQSEGNEAIASEAQTAAEPTAEVLNSDAKFEE

SEQ ID NO: 48314 - protein, 172 aa, Bacteroides fragilis
MENVIQIQYYQSPCGELILGAYREKLCLCDWKIEERRIIIDRRIQKELQASYKEGISEVITRTIGQLDEYFAGRRTTFDIPLLLVGTDFQKTVWNELLNIPYGKTISYAGLSQKLGNPKAIRAIASANGANPISILVPCHRVIGSDRKLVGYGGGLPAKKILLDLESSDRLF

SEQ ID NO: 48315 - protein, 414 aa, Bacteroides fragilis
LVAIVGRPNVGKSTLFNRLTKTRQAIVNDEAGTTRDRQYGKSEWLGREFSVVDTGGWVVNSDDIFEEEIRKQVLMAVDEADVILFVVDVTNGVTDLDMQVAAILRRAKSPVIMVANKTDNHELRYNASEFYRLGLGDPYCISAISGSGTGDLMDLIVSKFKKESDEILDEDIPRFAVVGRPNAGKSSIVNAFIGEERNIVTEIAGTTRDSIYTRYNKFGFDFYLVDTAGIRKKNKVNEDLEYYSVVRSIRAIEGADVCILMVDATRGIESQDLNIFSLIQKNSKGLVVVVNKWDLVENKTDKVMKTFEEAIRSRFAPFVDFPIVFASALTKQRILKVLEEARKVYENRMIKIPTARLNEEMLPLIEAYPPPATKGKYIKIKYVTQLPNTQVPSFVFFANLPQYVKEPYRRFLEN

SEQ ID NO: 48316 - protein, 78 aa, Bacteroides fragilis
MSEIASRVKAIIVDKLGVEESEVTETASFTNDLGADSLDTVELIMEFEKEFGISIPDDQAEKIGTVQDAVAYIEEHAK

SEQ ID NO: 48317 - protein, 153 aa, Bacteroides fragilis
DEENEARKKKRGASTISQQAAKSVFLCRESSWIRKGFEVYFTFLIETGWSKERIMEVYLNSIEMGKGIYGAQATAKYKFKTTAAKLTRGQCALIAATLPNPIRFDSAHPSPYIKRRQGQILRLMNLVPKFPPVDKEKAKGQDTKKQKNKKKKK

SEQ ID NO: 48318 - protein, 1326 aa, Bacteroides fragilis
MRQFSNRAGLSNSAILSLHQDDRGIIWIGSCDGMNIFDGTDIHLYTPINSSKTLLSGNLINQIIESEKDILWVQTNYGLNRLDTKQQTSQSFTEFKGQYFMANNKDDMLFILKDDGYLYYYQREAQSFNRLEIPNLEFSHVLSMTVDSNDILWIFTSNEETQSYRIENTKQGLILTRKNLFTHSCKLYHAFAEKDMAYFIDETYALYEYDFNNRQAYYIADLRGQIEVHGEVSSIIKQKNDYYIGFKNSGLIVLKYMSSQKMKYQIQKTEIHSGIFCLMKDKFQDIVWIGTDGQGVYMYYNDTFSITNTLLDTPVYQISNPVRALYYDQEQTLWIGTKGSGILRIKKYTPDNSMPMSSDRITPYNSALADNSVYCFAPGCKDKLWIGTENGINYYSYLSRQLKELPIIANGEKVKYVHSIKQPNDTTLWVSTVGEGIVKVIFDASTATPTVKSASRTVIDNGRMASNYFFTSYRENDSILWFGNRGCGAYRMNVETGEMIPHRFDSIVSSQTANDIFAIYKNAKGYWLGTSSGLLHLEQDDSLYTKADLFLNNTVHGVLEDHQGDLWLSTNQGLIRFNPETRTGQTYNSGNGLEITEFSDGAFYKDVVSETLFFGGTNGFISIQTNDCITEEYMPQITLKGLSIFGKEHNIHKFLYEKEGKTILQLDYSQNFFQLNFMAIDYINGNNYSFYYKLEEMSNQWIENGTSTSAIFSNLAPGEYSLLVKYKNNINGQESQTQSVIIRITPPWYLSPLAYMVYFILFALLCTAGIYRLIYIYRRKQHRMLDKMNREKKEEIYESKLRFFTNITHEFCTPLTLIYGPCEKILANPEIDAYTQKYAKMIQQNTEKLNNLILELLEFRRLETGNKVLSIQQLSVSEKVRSIAESFEELAENKEMNYQLHISPGIEWNTDISCFNKIVSNLISNAFKYTPDKGIITIELKVENQSLIFCISNSGKGIAKENLSKIFDRYKILDSVEMNGKNSRTGLGLAICKSMITQLNGEISVNSVLYEMTTFTVTLPNLPITERETTQTTYETGLLHTATEEPIVLEKTAIEFDTGKRTIMVIDDDNSMLWFVSELFADKYNVCSFDNAKDALSSLEQKQPDLIISDVMMPGIDGLSFAQKIKQHKLWSHIPLILLSALHHEDDQVKGIESGAEAYVTKPFNVKYLEKIVYRLIKREADLKEYYSSIFSSFTMEHGNCIHKEDQEFLDKMLEIIEKNIANPDLQVELLSSEMGYSTRQFYRKLKPITEQSPADIIKEYRLTMAERLLIAKNLTIEEIMDQTGFNNRGTFYKLFSKRYGMPPRQYREQQKENVKKEKISGISDE

SEQ ID NO: 48319 - protein, 668 aa, Bacteroides fragilis
MRYIILLVLCAWTGIALAIDYHAKDSLLLQLKQTTIAAERINIYRNLADICFETPEEKTYLLNMYREAQKAGDTSGMLNALNDLVCGETKEYRMDSAYHYMELIKAIREPQETAPVLAYLQMRFFDTLCSHNETEEAITKELQFIEEKKSDEASLYSKIAQAYITGGSLHYNDMIKEALPYLETAMNLSKQLPPEKQILFASIIVWKLSNTYSMLNKCDSAIRILDENLQTQQQYYKDHYQTQRPFYNMAIHELRFYTSLLTNAISEAPEKMDYYWQQIVKLNEKLTNPYDRYNYFLSMDNYYLNQKPQPHYEKALMANDSLIQIAQEIIPNNLPGLYDIQSQTYEAMGNFKEALAYLRIATQYKDSLTTENMQKQLGELQIKYEVNKLNNEKSQLEIKNKRILVICLSIILIIVIFVCLYLYHDLKKEKKMKFHLRNLKQKAEESEKMKTAFINSICHEIRTPLNSIVGFSDLIFNDEIDKETREGFSQEIQKSTILLTSLIDNMLEISSLDVSQEKLPCKEANLNSICIQEMTLLNRSHKPDIDYRTDLPEHPIILTTHEKYLSLVIEHLLNNANKFTEKGIITLHCHIDEARQQVHISVTDTGCGIPADKHKEVFERFSKLNAFTPGNGLGLYLCQLIIRRLSGKISIDPTYTGGTRITVILPVQ

SEQ ID NO: 48320 - protein, 459 aa, Bacteroides fragilis
MRASSYNISVNVDKKKNLYVILNGYTRALDIVNKSVYDFLKNNGNLGHVSEDTKNKLIKRGYLTSLTHSEEIQLVKHLLDKAHKDMRFKKYNFHFILSYDCNLRCIYCYENPILNGSHCLPKAKISKEYIDRAFEIISEKIKDGSCSRTIALYGGEPFLADNYDMICYIVKKGKENKCNFSVTTNGYDIDKYLDFLKDNKIFSFQITLDGVEDVQNERKPHYKNNDSFTKITENIDALLKLGFPVAVRINTDSYTISRLDELFLFFKQKGWYRYRTFAPYCALLRKDIEENSMFETPFSQIDLVNTFYEKKKLGKLDEKAECQNYGTYNILKSLLLGKPLAYKGAFCGSQTGNIIFDPLGDIYPCWDVVGISKYKIGRYIPDFHLEDDRLKFWFYMNVSESNCCKCKYALFCGGGCIIGSLRKNGKVKPGNCNNYPQLFIRMIKIIYDEYIRKEISCDK

SEQ ID NO: 48321 - protein, 715 aa, Bacteroides fragilis
MRKDFKNLDIYAAFQPANGAEWQKANGIEANWKTPEHICVKPVYTKEDLEGMEHLDYAAGLPPYLRGPYSVMYTLRPWTIRQYAGFSTAEESNAFYRRNLASGQKGLSVAFDLATHRGYDPDHERVVGDVGKAGVSICSLENMKVLFDGIPLNKMSVSMTMNGAVLPIMAFYINAGLEQGAKLEEMAGTIQNDILKEFMVRNTYIYPPAFSMKIISDIFEYTSQKMPKFNSISISGYHMQEAGATADIELAYTLADGLEYLRAGVAAGIDIDAFAPRLSFFWAIGTNHFMEIAKMRAARMLWAKIVKQFNPKNPKSLALRTHSQTSGWSLTEQDPFNNVGRTCIEAMAAALGHTQSLHTNALDEAIALPTDFSARIARNTQIYIQEETYICKNVDPWGGSYYVESLTNELAHSAWEHIQEIEKLGGMAKAIETGIPKMRIEEAAARAQARIDSGSQTIVGVNKYRLEKEDPIDILEVDNTAVRKEQIENLKRLKEGRNQAEVDKALAAITECVKTGKGNLLELAVEAARVRATLGEISYACEQIVGRYKAIIRTISGVYSSESKGDADFKRACELTEKFAKKEGRQPRIMVAKMGQDGHDRGAKVVATGYADCGFDVDMGPLFQTPAEAAREAVENDVHVVGVSSLAAGHKTLVPQIIEELKKLGREDIVVIAGGVIPAQDYDFLYKAGVAAIFGPGTPVAKAACQILEILMDED

SEQ ID NO: 48322 - protein, 440 aa, Bacteroides fragilis
MKKIVLLSLFALCLPLLVMAQSNNDDLYFVPSKEKKQEAKKTPVKKEPEKKVVTTNIYTSPGTTVVVQDRKGNKRDMRDVDEYNRRYDAKDNEFAMEDDTLYVKEKAVSDPEGEWVNGFNGSQDDYEYAERIIRFRNPRFAVSISSPLYWDIVYGTNSWDWNVYTDGFYAYAFPTFTNRLWWDWRYNSYGSGWGWGWGWSSPYYAWGGYYPGYWGGYWGGYWGGWYGGGYWGHHHHYHPGWGGGGHYWASHNTYTNRRSYGPSRVSTSSRVNASSIRRTDSYTRSGNNISPSRGGDSRMNYGSRRVISVRDTERPDATTRTDASSSRRSTYTRPSSTRSSSSYNSNVHPNRSTNSGTYSRSTSRSSSTYTRGSSTTTPSRSYSNEGTRRSYGSSSSSRSYSSGSSTRSSSSYSSGSRSSGSSSRSTSGGGSYSRSSGGRR

SEQ ID NO: 48323 - protein, 194 aa, Bacteroides fragilis
MKRKLVFATNNAHKLEEVSAILGDKVELLSLNDINCHTDIPETAETLEGNAYLKSSFIYRNYGLNCFADDTGLEVESLGGAPGVYSARYAGGEGHNAEANMLKLLHELEGKDNRRAQFRTAISLILDEKEYLFEGIIKGEIIKEKRGDSGFGYDPVFVPEGYDRTFAELGNEIKNQISHRALAVNKLCEFLRSI

SEQ ID NO: 48324 - protein, 90 aa, Bacteroides fragilis
MAQQVQSEIRYLTPPSVDVKKKKYCRFKKSGIKYIDYKDPEFLKKFLNEQGKILPRRITGTSLKFQRRIAQAVKRARHLALLPFVTDMMK

SEQ ID NO: 48325 - protein, 345 aa, Bacteroides fragilis
MKNTFLLTFALILLAGSPLKAQEKEEAATLNKVVNTLKERITLAGYAQLGYTYDDAAKKMNTFDIKRIIFMAHGKITDRWTCDFMYDFYNGGMLLEVYTDYRILPGLKVRIGEFKVPYTIENELSPTTVELINCYSQSVCYLAGVSGSDVACGMTSGRDIGAMVHGGLLNDLLCYKLAIMNGQGLNIKDKNNQKDIIGNLMVNPLKWLSVGGSFIKGTGHAIADSEITGIRAGENYTKNRWSIGGIITTTPFSLRSEYLAGKDGGVKSDGFYATGCYRMLRNFDLVASYDYFNANKAVSRKQTNYIAGLQYWFYPKCRLQAQYTFRDRNKGKDSNLFQAQVQVRF

SEQ ID NO: 48326 - protein, 161 aa, Bacteroides fragilis
MRHNKKFNHLGRTASHRSAMLSNMACSLIKHKRITTTVAKAKALKKFVEPLITKSKEDTTNSRRVVFSNLQDKLAVTELFKEISVKIADRPGGYTRIIKTGNRLGDNAEMCFIELVDYNENMAKEKVAKKATRTRRSKKTTEAAPAAEVPATEEPKAESAE

SEQ ID NO: 48327 - protein, 346 aa, Bacteroides fragilis
MKEEKYMRRCIQLAKNGLCNVSPNPMVGAVIVCEGQIIGEGYHIRCGEAHAEVNAIRSVKDPSLLKHSTIYVSLEPCSHHGKTPPCADLIIEKQIPRIVIGCQDPFSKVAGKGIQKLRDAGCEVIVGVLETECRELIRKFITFHTLHRPYIVLKWAESADGFIDLERTEGQPVILSTPLTSMLVHKKRAESDAIMVGTRTALLDNPALTVRNWYGHNPVRIVMDRNHSLPQTSHLSDNSVSTLVFTEHPRAGKENLEYITLNYQTDILPQILSALYQRNLQSLMIEGGRILLESFIRSGIWDEVIIEKSDKLLYSGVKAPEISDKISYSEEKHFCTTFRHYLKRNT

SEQ ID NO: 48328 - protein, 601 aa, Bacteroides fragilis
MIQTLKTYFGYDSFRPLQEEIIHNLISKKDSLVLMPTGGGKSICYQLPALLMEGTAIVISPLISLMKDQVETLRANGIPAGALNSSNDETENANLRRACISGQLKLLYISPEKLLSEADYLLRDMTLSLFAVDEAHCISQWGHDFRPEYARMGFLRNQFPNVPMIALTATADKITREDIVRQLQLRQPQIFISSFDRPNLSLSVKRGYQPKEKSKAIIDFITRHRGESGIVYCMSRSKTETVAQMLQKHGIRCGVYHAGLSARQRDETQDDFINDRIEVVCATIAFGMGIDKSNVRWVIHYNLPKSIESFYQEIGRAGRDGMASDTILFYSLGDLILLTKFATESNQQNINLEKLNRMQQYAESDICRRRILLSYFGETTTEDCGNCDVCRNPPERFDGTIIVQKALSAIARTNQQVSITLLIDILRGNPTTEITEKAYTELKTFGAGRDIPARDWQDYLLQMLQMGYFEIAYNENNHLKITGSGSDVLFGRKKAMLVVIRREEPATAKRRKKSAATPTQAWAEESRSKEEDLFEALRALRKQLADQEALPAYIVLSDKVLHLLCLSRPTTVEAFGNINGIGEYKKKKYGKDFVALIRQFV

SEQ ID NO: 48329 - protein, 245 aa, Bacteroides fragilis
MNYPQEKIKPYSNDGKKSEQVEQMFDNIAPAYDQLNHTLSLGIDRSWRRKAINWLKPFRPQQIMDVATGTGDFAILACHELQPEQLIGTDISEGMMNVGREKVKKEGLSEKISFAREDCTSLSFADNRFDAITVAFGIRNFEDLDKGLSEMYRVLKTGGHLVILELTTPDRFPMKQMFTIYSKIVIPTLGKLLSKDNSAYSYLPQTIKAFPQGEVMKNVISRVGFSQVQFRRLTFGICTLYTATK

SEQ ID NO: 48330 - protein, 839 aa, Bacteroides fragilis
MEITKRNGTTEPYDREKIAVAIRKSFASTGQEVSNEIIYSVVEEVENFVGKDTANRSVEQIQDKVEQSLMEHGFYAEAKNYILYRWQRTERRKALNSIINELGDGTVMDVLKEIQKDFTTHEYSLVVLYEKFSGFCKQEMPHSERLAALIKAAVELTTQEAPDWEFIAARLLNFQLSKKLEKQAASAGIRSFYDKLRYLTEEGLYGSYILAAYSQQEIEEAAGFICPDRDKLFNYSGLDLLVKRYLIRTRLHEPAESVQEMYLGIALHLAMPEQKERMTWVKKFYDLLSRLEVTMATPTLSNARKPYHQLSSCFIDTVPDSLEGIYRSIDNFAMVSKFGGGMGMYFGKVRAAGGNIRGFKGVAGGVIRWMKLVNDTAVAVDQLGMRQGAVAVYLDVWHKDLPEFLQLRTNNGDDRMKAHDIFPSVCYPDLFWKMAKEDLNQPWYLFCPNEIMTIKGYCLEDYYGEEWEKRYHDCVNDTRLSKRSISIKDIVRLVLRSAVETGTPFTFNRDTVNRANPNAHRGIIYCSNLCTEIAQNMAAIETVSTEIRTEEGDTVVVKTVRPGDFVVCNLASLSLGHLPLEDEEQIKEKVSTVVRALDNVIDLNFYPLPFAQITNQRYRSIGLGVSGYHHALAIRNIRWESEEHLRFVDRVFEQINYAAIEASADLAKEKGRYEYFEGSDWQTGAYFGKRGYTSPEWNRLAAKVAENGMRNAYLLAIAPTSSTSIIAGTTAGTDPVMKRFFLEEKKGAMLPRVAPALSDKTFWLYKDAYTLDQKWSIRAAGTRQLHIDQSQSLNLYITNEFTMRQVLDLYLLAWECGVKTVYYVRSKSLEVEECESCAS

SEQ ID NO: 48331 - protein, 505 aa, Bacteroides fragilis
MAATGQKGGKAKQKINDRQLPNVVFIYADDLGYGDLECYGAKNVQTPNVNRLAAEGIRFNNAHATAATSTPSRYSMLTGEYAWRRPGTDIAAGNAGMIIRPERYTMADMFKNAGYATAAIGKWHLGLGDKDGEQDWNAPLPTALGDIGFDYSYIMAATADRVPCVFIENGKVANYDPSAPIEVSYRKPIEGEPLGKDHPELLFNLKSSHGHDMAIVNGIGRIGYMKGGGKALWKDENIADSITSHAIGFIREHKDEPFFMYFATNDVHVPRFPHDRFRGKNPMGLRGDAIVQFDWSVGQIMETLDKLGLSENTLIILSSDNGPVVDDGYRDRAEELLNGHSPAGPLRGNKYSAFEGGTRIPAIVRWPKGAASSQVSNALVSQIDWFASLASLVGAGLPKGAAPDSFNYLDTWLGKNQSDRSWVIEQASNHTLSVRTKDWKYIEPNDGPAMITWGPKIETGNLSTPQLYHVVDDVAEQKNVASLHPDLVFELQNILRHVRMKNLKP

SEQ ID NO: 48332 - protein, 1010 aa, Bacteroides fragilis
MKLKFKHQKFQEDAAKAVCDVFGGQPYKTFDYQVETRKKDGQTSFEKFTGFRNHPIVPQLTDEIVLKHIRDIQRAQQIKPSEALEGKYNLTIEMETGVGKTYTYIKTIFELNKRYGWCKFIIVVPSVAIREGVHKSLEIMKEHFASDYSTPLSYFIYDSKQLGELNAFVTDSKIHVMIINSQKFNATNKDARRIYMKLDDFGGNCPIDVIAQMNPILIIDEPQSVEGAKTKEGLKRFNPLFTLRYSATHRELYNLVYRLDAMEAYNLQLVKKIAVKGISISGTTATEGFVYLEGLNLYPDKNPTANIGFEVKRTKAVNQVVRALKINDDLYAKSNHLEEYRNDYVITDINGVEDSVTFRNGIKLYAGDVAGSVNETQLRRIQIRETILSHIEKEQELFEKDIKVLSLFFIDEVAKYRRYNPDGKGEYAEIFEQEYTDIIKHLDLSLFNQPEYIDYLKSTVASKAHEGYFSKDKKGKLIDSKTERGTKESADEDAYDLIMKNKERLLDRKEPIRFIFSHSALREGWDNPNVFQICTLKQSSAEVRKRQEVGRGLRLCVNGQGDRMDVNVLGEEVHRVNLLTVIASESYESFAKGLQTEMAEAIADRPQKVTIQLFKDQSLRLANGETIIATEDIAQSIYDSLLENKYIKKGELTDKFYEDRKQGEVIFDDELTDYKASIMTILASIYNPREMQPNDARKSKINLRLSKDKLENSKLQELLKLLCSKSTYTVKFDEKELVERAIESLNEKLRVSQLYLSVITGQMEKIKSKAALISGEAFKVDANQAHYEKIDAMANDQVKYDLLGKLTDATNLTRQAVAQILSRIKPNVFGQFKNNPEDFIIKASELINEEKACLIVKHIEYTPIDQYYDVSVFTRATIQGRLGVNTIKADKHLYDHVRFDSQNEKTFMERLEENDEIEAYVKLPGNFYIPTPMGKYHPDWAIVFKQKLSKYPYFIAETKASDSSLQDRRIEEAKIECAKKHFAKTNGGKLKYNKVSSFEELLKIVTQESV

SEQ ID NO: 48333 - protein, 247 aa, Bacteroides fragilis
MQKYGLIGYPLKHSFSIGFFNEKFKSEGIDAEYVNFEIPEINDFMEVIEENPNLCGLNVTIPYKEQVIPFLDELDRDTAKIGAVNVIKIIRTPKRKIKLVGYNSDIIGFSQSIQPLLQPYHKKALILGTGGSSKAIYHGLKNLGIDSVFVSRTKKEGMLTYEELTPEVMAEHTVIVNCTPVGMYPKVDFCPAIPYELLTPNHLLYDLLYNPNITLFMKKGEEHGAVTKNGLEMLLLQAFAAWEIWNK

SEQ ID NO: 48334 - protein, 343 aa, Bacteroides fragilis
MGDDKNKRIDFVDLTKGVCIILVVMAHIGGAFEKLDYHSMIASFRMPLYFFISGIFFKSYEGLFGFFIRKINKLIIPFLFFYLSAFFLKYIVWKIAPGVFQLPVSWTELLVVFHDHALIKFNPPIWFLLALFNCNILFYLVHSLRNRRLGLMFALTLLIGTAGFYMGKHQIELPLYMDVAMSALPFYVAGFWIRRYNFFLFPHRFDKLIPLCILAALAVMYFTATFVGMRTNNYAGNIFQFWASAFAGIFMIMLFCKKFKKLPVISYMGRYSVITLGIHAPLLHFEYPVVSRFIHNEWGQAIALLLLTLTVCIIATPIFLKLIPQAVAQKDFIKTKQSTQQGS

SEQ ID NO: 48335 - protein, 227 aa, Bacteroides fragilis
LQKAKRLAEESVRNKSVFLSNMSHEIKTPLNALAGFSEILITPGIDDEVRAQCNDVIRLNSDLLLHLVNDVVDVSCLDVANMRFSVVPHEVVALCRNVVEMLRNVKQTSAEMIFETELSALENGNDPCRLQQVLINLLVNATKFTKEGYITLTLRINEAGVPEFMVTDTGCGIPLENQEAVFSRFEKLNEGIQGTGLGLSICKLIINRMGGDIRVDSTYSKGARFIF

SEQ ID NO: 48336 - protein, 625 aa, Bacteroides fragilis
MDFKYDVIVIGAGHAGCEAAAAAANLGSKTCLITMDMNKVAQMSCNPAVGGIAKGQIVREIDALGGYMGLVTDQTAIQFRILNRSKGPAMWSPRAQCDRNKFIWAWREILENIPNLHIWQDTVKEIIVENGEVVGLKTFWDVTFHARCIVLTAGTFLNGLMHVGKTQLPGGRMAEPASYKLTESIAKHGIEYGRMKTGTPVRIDGRSVHYELMDTQDGECDFHKFSFMNTSVRHLKQLQCWTCFTNEEAHNVLRNGLADSPLFNGQIQSIGPRYCPSIETKIVTFPDKEQHQLFLEPEGETTQELYLNGFSSSLPMEIQIEALKKIPAFKDLVIYRPGYAIEYDYFDPTQLKHTLESKKIKNLFFAGQVNGTTGYEEAGGQGIIAGINAHINCHGGEPFTLARDEAYIGVLIDDLVTKGVDEPYRMFTSRAEYRILLRMDDADMRLTERAYKLGLVKEDRYALLKSKREAVENIVNFTRNYSIKAALINDALENLGTTPLRQGCKLIDLINRPQITIENISEYVPAFKRELDKITDERKEEILEAAEILIKYEGYIGRERIIADKLARLESIKIKGKFDYDSLQSLSTEARQKLKKIDPETIAQASRIPGVSPSDINVLLVLSGR

SEQ ID NO: 48337 - protein, 58 aa, Bacteroides fragilis
MSTIKIKQVKSRIGAPADQKRTLDALGLRKLNRVVEHESTPSILGMVDKVKHLVAIVK

SEQ ID NO: 48338 - protein, 529 aa, Bacteroides fragilis
MDFSLDKSTIIWLIAIVAGTCSLYLYIKKLKDKNKLISNRRLVENIPSIISTIGVLGTFYGITSGLLSFNSDDLDTSIPALLDGLKTAFFTSIAGMVCSLIMSKIINSYFDKADDGISDANQAASQICKAVQEMSQKNIAILNALKEQSENQAKNQTAFYRSVGDILIALQTSHNNTESAINSMVILSRSQETTVNDLRSKVESMTLSLGAVEENSTIQTATLSNIQQQTKELSNTDRNISEMLDILSGMSNIQEEISEETKAFGGKLHSEVVEIEDKMDATNQLLTSKFDEFSELLKKSNTEALVEVMKTVTEEFQKQMNSLINKLIQENFDQLNKSVEKLNTWQQENKAMISSLTQQYKEMASNFESTSTTLSQVGDDTRTLVSEGGKLKQLIDSLNQVIVEDQKFIDVSNKLQETANISKENMEKFDESTKILNDWVRKQRNFVDGVQLLIEKLDELNKIRDYSEQFWKGTKEKMEEGVSIITQGSQTLNSQLTSLDRQFYNRLGATLAELDNCITKMVEHVNNRK

SEQ ID NO: 48339 - protein, 605 aa, Bacteroides fragilis
MRKLLYVILLLLFRLLMFPGAVCAEILSLPDSLITDDNVYKYTFSDFDKAQQIMEQLRKRKSLSMFRMDVVEGDLYFNVGQYYKALKFYKRALDSDSVRNNDKNYMEQVHRMISCYDCLHNENKKSLYVYLLLKRAEQCGDKAMQSVALFNMGKMLYYQGNKEKGYEYLEQAIEMMSKTDYRYKYDNLRYDYNTLLIFQKSDRCNEEALRTLAALEKVVTEETGSETPMEGLSAKEKKAMYAHYAVVLFRLGQAEEAERYYRKFLAASEEYDRDDYLIMPYLFDRKMYDQVIRMNAAREKMYIMRGDTVNYYMTTIKRSLGWAYRDKGDYRTAARYFEQLAVLRDSIKNREQKSAALELAAVYETNEKDLFIQQQAADMQKRNLLLAFILCIVFLLGVLLWRTIRHNRIIRRKNKAMVGTIEDLLIHKEELYRKKEENLILKEQLEREQNLRMSAGGGSLSTDKDGKAETTVVPAPEAGDGNDIHDRILFDKLEHEIISRQLYLQPDFSREELIKTIYIPKNKFAPLFKQYAGMSFSKYINNLRLEYAAKMLKNHPDYTVDTIAQECGMSTQSLYRLFSGKYGVTPTDFQVGVQHINNKNITEDK

SEQ ID NO: 48340 - protein, 232 aa, Bacteroides fragilis
MKLRCAIVDDEPLALSLLESYVNKTPFLEQAGKYSSAVQAMKELPGNQIDLLFLDIQMPELNGLEFSKMVSPRTRIVFTTAFGQYAIDGYRVNALDYLLKPISYVDFLQAANKALQWFELVQKPEEVDSIFVKSDYKLVQVELKKILYIEGLKDYIKIYTEDAPKPILSLMSMKSMEELLPPARFMRVHRSFIVQKDKIRIIDRGRIVFDKTYIPVSDSYKQTFQTFLDERS

SEQ ID NO: 48341 - protein, 466 aa, Bacteroides fragilis
MKRLFYFFLFVCVAVIANAQAKYVFYFIGDGMGVNQVNGTEMYRAEIQKGRIGVEPLLFTQFPVGTMATTFSATNSVTDSSAAGTALSTGEKTYNGSIGMDDQKNPLQTVAEKAKKAGKRVGVTTSVSVDHATPAAFYAHQPDRNMYYEIATDLPKAGFDFYAGAGFLKPTTTYDKKEAPSIFPMFEEAGYTIARGYNDYKAKAAAAGKMILIQEEGADTGSLPYAIDSKEGDLTLAQITESAIDFLTKGKNKGFFLMVEGGKIDWACHGNDAATVFHEVADMDNAIKVAYEFYKKHPKETLIVVTADHETGGIALGTGKYALNLKALENQKASAEVLSKKISDLRKAKNNHVAWEDIKNLLSEEMGFWSVLPITWEQEKKLRDEYEKSFVRNKVEFAESMYAKTEPMAAKAKEVMDQIAMVGWTSGGHSAGYVPVFAIGAGSDLFIGKMDNTEIPKRIAKAGGYK

SEQ ID NO: 48342 - protein, 261 aa, Bacteroides fragilis
MIKALFFDIDGTLVSFNTHEIPSSTLAAIAEAKAKGIKIFIATGRPKAIINNLTALQERELIDGYITMNGGYCFVGDEVIYKHSIPVQDVKALAALSDERNFPCIFVAEHTVAVCNTNKLVNEIFHDFLHVDILPIQTTAEATQPEIFQMTPFITTEEEKTVLPLLPNCESGRWFPAFTDIVAKGIRKQKGIDEIIRHFGIGQEETMAFGDGGNDISMLRHAAIGVAMGNANDDVKETADYITTSVDEDGIQKALKHFGII

SEQ ID NO: 48343 - protein, 352 aa, Bacteroides fragilis
MKLSQFKFKLPEEKIALHPTKYRDESRLMVLHKRTGEIEHKMFKDILNYFDDKDVFVFNDTKVFPARLYGNKEKTGARIEVFLLRELNEELRLWDVLVDPARKIRIGNKLYFGDDDSMVAEVIDNTTSRGRTLRFLYDGPHDEFKKALYALGETPLPHTILNRPVEEEDAERFQSIFAKNEGAVTAPTASLHFSRELMKRMEIKGIDFAYITLHAGLGNFRDIDVEDLTKHKMDSEQMFVTEEAVKIVNRAKDLGKNVCAVGTTVMRAIESTVSTDGHLKEYEGWTNKFIFPPYDFTVANAMVSNFHMPLSTLLMIVAAFGGYDQVMDAYHIALKEGYRFGTYGDAMLILDK

SEQ ID NO: 48344 - protein, 361 aa, Bacteroides fragilis
MKTTPFTEKHIALGAKMHEFAGYNMPIEYSGIIDEHLTVCNGVGVFDVSHMGEFWVKGPHALDFLQKVTSNNVAALVPGKIQYTCFPNEDGGIVDDLLVYQYEPEKYLLVVNASNIEKDWNWCISHNTEGAELENSSDNMAQLAVQGPKAIQALQKLTDINLADIPYYTFKVGEFAGEKNVIISNTGYTGAGGFELYFYPDAAMKIWDAVFEAGAEFGIKPIGLGARDTLRLEMGFCLYGNDLDDTTSPIEAGLGWITKFVDGKNFTNRSMLEKQKAEGTVRKLVGFEMIDRGIPRHGYELTTAEGDKIGVVTSGTMSPIRKIGIGMGYVKPEYSKIGTEICIDMRGRKLKAVVVKPPFRK

SEQ ID NO: 48345 - protein, 466 aa, Bacteroides fragilis
MSTENEEWREDSKSENTDAGRDGNRSFNREGGYSRPSYNREGGDRPYRPRFNSNSEDRPQRSYGDRPQRPSYNREGGDRPYRPRFNSEGGDRPQRSYGDRPQRPSYNREGGDRPYRPRFNSEGGDRPQRSYGDRPQRPSYNREGGDRPYRPRFNSEGGDRPQRSYGDRPQRPSYNREGGDRPYRPRYNNDNRSQGFSRPIRRTGDYDPNAKYSKKKQIEYKEQFVDPNEPIRLNKFLANAGVCSRREADEFITAGVVSVNGEVVTELGTKIKRADVVKFHDETVSIERKVYVLLNKPKDCVTTSDDPQARLTVMDLVKGACAERIYPVGRLDRNTTGVLLLTNDGDLASKLTHPKYLKKKIYHVYLDKNLTKADMDQIAAGIQLEDGEIHADAISYSDEVKRDQVGIEIHSGKNRIVRRIFESLGYKVVKLDRVFFAGLTKKGLRRGEWRYLTEQEVNFLRMGSFE

SEQ ID NO: 48346 - protein, 273 aa, Bacteroides fragilis
MAGYISDDTRKVTTHRLIEMKQRGEKISMLTSYDYTMAQIVDGAGIDVILVGDSASNVMAGNVTTLPITLDQMIYHGKSVVRGVKRAMVVVDMPFGSYQGNEMEGLASAIRIMKESHADALKLEGGEEIIDTVKRILSAGIPVMGHLGLMPQSINKYGTYTVRAKDDAEAEKLIRDAHLLEEAGCFGLVLEKIPAALASRVASELTIPVIGIGAGGDVDGQVLVIQDMLGMNNGFRPRFLRRYADLYTVMTDAISHYVSDVKNCDFPNEKEQY

SEQ ID NO: 48347 - protein, 239 aa, Bacteroides fragilis
MLDNPEDPNMRVEVVGTEALLDSKKVKEQKIDVAALPMKVKLVNESPSFYKQYRYQIWVGVGVLCILVIGLLVSIYFYLRTKRLKDDLECSQVALYEAKDRAEESNRLKSAFLANMSHEIRTPLNAIEGFADVLASGGSSEEDQRNYFRIIQSNSDLLLRLINDILDLSRLEANKVILTPEDCDVVQLCRQALSSVEMSRRESGNRFVFETKTDSFVLQTDIQRLQQVLINLLTNAAKF

SEQ ID NO: 48348 - protein, 94 aa, Bacteroides fragilis
MIRAYVAEHQHVWPEIKAGIREVGILDMQIYIHEHTLFMIVDTVDEFDWIKDNERLAKLPRQAEWEAYMSRFQRSLPGQASHEKWKMMERIFKL

SEQ ID NO: 48349 - protein, 1330 aa, Bacteroides fragilis
MKKILFLLLLLPLMVSAQTYKYIGVEDGLSNRRVYYIQKDKKGYMWFLTHEGVDRYDGKEFKRYKLMDDGEELNSLLNLNWLYLDHESTLWEIGKKGKVFRYDPLRDQFTLVYKLPEEKIKDRPAPISYSFIDRNNNIWLCNEETLYLYNTHTLQTLQIKNEIGEDITDIEQIDDTHFFIGTEQGIHHAELKNQGLHLLPCDKLDNLPIQINELYFHRPSRKLFIGTFERGIYVYDMNTKQSTQPHMSLTDVSITRIKPLNNKELLVATDGAGVYKININSYLTTPYIVADYNQYNEMNGNNISDFYVDDEQRIWLANYPIGITVRNNRHSSYNWIKHSIGNKQSLINDQVNSIIEDSERDLWYATNNGISYYNSETGVWHSFMSSFEKNGGNKNHIFVTLCEVEPGIIWATGYSSGIYQINKRTLSVEYITPSSLYGVNIRPDKYIRSIIKTADGDIWSGGYYNLKRIDFHKKTLRLYPKLNSITSIMEKDSKQMWIGTATGLYLLEKESGKYQRIELPVESMYIYSLYQARNGLLYIGTSGSGLLIYDPEKRTFTHYHRDNCALISNNIYTILSDTDDDIIMSTENGLSSYYPAEKLFHNWTKDQGLMASHFNAGSGTLRKNGNFIFGSSDGAIEFNKEMKIPRKYSSKMVLSDLTIFYQTVYPGDENSPLSTDIDDTKELELSYSQNIFSLKVSSINYDYPSNILYSWKLEGFYDQWSRPGNENIIRFTNLSPGEYTLHIRAVSNEDKRIVLEERTMKISIAQPIWLSFWAMLVYAIVLAVIAIITLRIIILRKQRKVSDEKIHFFINTAHDIRTPLTLIKAPLEEIREREALTKDGISNMNTALRNVNALLRLTTNLINFERADVYSSELYISEYELNTYLTETFNAFRPYASVKHINFTYESNFRYLNVWIDKEKMDSILKNIISNALKYTPENGSVHIYASETNDSWNVEVNDTGIGIPANEQKKLFKIHFRGSNAINSKVTGSGIGLMLVWKLVHLHKGKINLSSVEHQGSSIKVSFPKDSKHFHKAHLATRTRELSTEQVPHVSPAEIYEKAKKQHDQNLQRLLIVEDNDELRNYLTHTLSDNYTIQTCSNGKEALTIVKEYMPELIISDIMMPEMRGDELCAAIKNDIETSHIPIILLTALNDEKNILEGLKIGADEYIVKPFNIGILKATIANLLTNRALLKSKYANLEVSEEEEVSPNCATDLDWKFIATVKKSVEENIDNPAFNVDVLCNLLNMSRTSFYNKLKALTDQAPADYIRLIRLKRAAALLKTGQHSVTEISELTGFNDVKYFREVFKKHFKVSPSKYCKEGGKEDVEEQQE

SEQ ID NO: 48350 - protein, 1221 aa, Bacteroides fragilis
MRYLNKIIFINSARIQYAEIQIDGNVHFIGTQGVGKSTALRALLFFYNADKTKLGISKEKKSFDEYYFPYVNSYIIYEVVVDDASYCVLAFRSQGRVCFRFLGTGYKKEYFISPEGKAYEEWDQIRDALGSFVYKSRRIETYEEYRDIIFGNGRGLPPEFRKFAITESRQYQNIPRTIQNVFLNSKLDAEFIKQTIIMSLNEEDVRIDLGQYAHHLRRFDEEVTDISKWFRKNKNGEVTVRRQADRVIELYREMHYLEQQARTLAGELNYAFRTAREVLPSLQKQKEELLKEVAKEKRQLEELSGKFQSERDRLLGVVKVQNENLKTARERKERYESQDIHHVRERVNAESEAVLHKQMLEEQLTMLTARFDDINSQYKLLKEQAASAFERFRNGKNAELNTLHLRAIERKEAIRKEFDKILKEVREQEVGKLTLLREQTEKKKEGIYQLKMEREKCLHRTLYEEELQACRTERAALEKENHEHRLKQKEAEQQMELVRRRWELDQTACEQQFTARQKDIEQQITLAKERVAEIDRLLDNRQGSFYEWLSQNCQGWEDTIGKVVDEKQVLFSKELKPQSVPDAGQDSFYGIKLDLSAIRKEVKSVQEYAADQEIAGKEVSEWQQQLEKLGEEKEKELALIRKRHQATLSTCKEDVAQSTYCMEQNDKRIRLLKADEIRWEQKAGEEKRVLLEQLDKQLAEATRSLQGTVAELEQFNHLLETRVRQKEKERNQRMQEEDALIRNKQEEIHLSIASEKQKTDELLATMDKDLLHELSGKGVDTERITALRNEVARTEQELVFIDQHRRLVYDYEKDKREFFDRMDEFRNEKQLAEKELEGEKEKFRLKEEELNLKVTGLNKQLAETNTRLKHLDEDIRETENFKTLNICPPVLQTGVETENAKRCKKVIEELTQNHYRQIEQEKDFREAVGRFSGNFSEQNTFNFRTRLTKREEFMTFAADLKEFIDNDKIIDFERRSNEAYTDLIHRIGKETTDMLSKEGLIRKTISDINSDFVERNFAGVIKSIALQIVPSGNRIMQHFVTIKEFCDRNQPGGPGMFSLFGQEDFVERNRQAVSLLQSLVKELALNKEKELTLSDTFELQFRIVENDNDSGWVEKLANVGSDGTDILVKAMINIMLLNVFKEKASHQFNDFKLHCMMDEIGKLHPNNIKGILDFANNRNIILVNSSPTSYRASDYKYTYILNKDKRNITSVTRLIKQEVRE

SEQ ID NO: 48351 - protein, 781 aa, Bacteroides fragilis
MQKNLVIVESPAKAKTIEKFLGKDFKVLSSYGHIRDLKKKEFSIDIEKNFKPKYEIPAEKQELVNKLKEEASKAETVWLASDEDREGEAISWHLYEVLKLKPENTKRIVFHEITKTAILKAIEQPRDIDINLVNAQQARRILDRIVGFELSPVLWKKVKPALSAGRVQSVAVRLIVEREREIQAFKSEASYRVTAVFLVPDADGKLVEMKAELARRLKTKKEAQKFLESCKAATFSIEDIVTRPVKKSPAAPFTTSTLQQEAARKLGFTVAQTMMVAQKLYESGLITYMRTDSVNLSEYATEGSKVAIAQMMGDQYVHPRHFATKTKGAQEAHEAIRPTYMENQTIEGSAQERKLYDLVWKRTIASQMADAELEKTTATIGISNGNDKFTATGEVIKFDGFLRVYKESYDDDNEQEDESHLLPPLKKGQMLEHQGIVATERFTQRPSRYTEASLVRKLEELGIGRPSTYAPTISTIQQREYVEKGDKPGEERSFDILTLKDNQITDIKHTEIVGAEKSKLLPTDIGTVVNDFLTEYFPNILDYNFTANVEKQFDEIAEGDKKWTSIMKDFYKDFHPSVETTLATKTEHKVGERILGEEPKTGKPVSVKIGRFGPVVQIGTADDTDKPRFAQMKKGQSMETITLEEALDLFKLPRKVGEFEDKTVTIGTGRFGPYVYHNSKYVSLPKTYDPLEVTLDEAIELILAKREAEAKKHIKKFDEDAEMEILNGRYGPYIAYKGNNYKIPKDVVPVDLNYQTCLEIIKLQSEKAENAPKRGRYAKKK

SEQ ID NO: 48352 - protein, 1257 aa, Bacteroides fragilis
MHRSEIVREVTQQNLKIVSAKKINPTTIEVLFSNNQRMTFDFYGENIFRVFQDNAGGIIRDPEAKPEAQILVNNPRNTVSTLNLNDGSNLISITTGKIKVEIDKNTSLMKVIDLEKNTVAFEEVEPVLFDKGKVTVTLKENPNEYFYGGGVQNGRFSHKGKAINIVNENSWTDGGVASPAPFYWSTNGYGMMWYTFKPGKYDFGADEKGKVKLTHDSPYLDLFYMVSDGAVGVLNDFYQLTGNPVLLPKFGFYQGHLNAYNRDYWKEDEKGILFEDGKRYKESQKDNGGIKESLNGEKNNYQFSARAVIDRYKNHDMPLGWLLPNDGYGAGYGQTETLDGNIQNLKSLGDYARKNGVEIGLWTQSDLHPKEGVSALLQRDIVKEVRDAGVRVLKTDVAWVGWGYSFGLNGVADVGHIMPYYGNDARPFIISLDGWAGTQRYAGIWSGDQTGGVWEYIRFHIPTYIGSGLSGQPNISSDMDGIFGGKNMIVNTRDFQWKTFTPMQLNMDGWGSNEKYPHALGEPATSINRWYLKLKSELLPYTYSFAKEAVTGMPLIRAMFLEYPNAYTLGTATQYQFMYGTDFLVAPIYKATKADAEGNDIRDGIYLPEGEWIDYFTGEKYQGNCVLNNFAAPLWKLPVFVKNGAIIPMTNPNNNVAEINKGLRIYEIYPYKHMMTVEYDDDGISEAYKEGKGTTTFIESNVDSKNNVKISIRPTQGDFDGFVKEKATEFRVNVTAKPKKVSAQIGKGKVKLTEVSSMDDFRKGENVYFYDAAPNLNKFATKGSEFEKKVITKNPQVLVKLAATDITKNQVVMDIEGFQYAPADNYRVTSGSLTAPAARIAAEDIEAYTLKPTWNKVPNADFYEIEFNGMLYTTIKDTELLFDGLAAETDYTFKIRAVNKDGYSDWAEFGAKTKANPLEFALHGIKGETTAKNQEGFDIDRLFDFAELGDMWHTKYGAKALPYDMIIDLRTVNQLDKFEYLPRTDGGNGTILKGTVYYSMDKENWTEAGAIDWKRNGDVKVFTFTERPTARYIKLAVTEGVNNYGSGRELYVFKVPGTESRLQGDINNDGKIDNNDLTSYTNYTGLRKGDSDYEGYISVGDIDQNGLIDAYDISVVATQLEDGVSEEPIEKLDGTIEISTAKRNYSKGDVVEVLVKGVNLRSVNALSFALPYNQQDYEFVGVEPLNLKAMENLTYDRLHTNGTKALYPTFVNLGAKEALEGTNDLFILKLKAKRAVKFDLKAIDGVLVDKNLNTRKF

SEQ ID NO: 48353 - protein, 328 aa, Bacteroides fragilis
MKKIIIVSALVLLWTAGANAQTAYDAAKLVSKDLNGTARFVGMGGAMGALGGDISTMGTNPAGIGIYRSNDVMTSFSFSTYGTESKYGGKTFDNNNNRWSYDNIGIVFASKIGNHTPLRYVNFGFNYHRAKSFYKNMFMEGALNYSQIDYMTGQANGMLANGVSLKELSDNKLNPYSDNGVGWLGALGWDGLLFDFKNGEYIGVLPQTPYSTFRSREKGGIDQYDFNIAFNISDRVYLGLTIGAYDVDYTKSYYYSEDYGDKQNYNIGSMNRISGSGFDFKMGAIIRPFEDSPFRIGLAVHTPTFYRLTYTTSAYLESNIWMHNNDTG

SEQ ID NO: 48354 - protein, 651 aa, Bacteroides fragilis
MKRLILIIIVCCRALGWCHANTQTETDSLYRVAQSLPHDSTRLEMFKRLAQIEQLTPRCITFSGLLREEATLQKNDRYNAIAAYLHTVYYYNQNNRDSVKKWLDTMEPYARKSQTWDLYFDALRFQIDLCTYEEQYELAINEANLMYERAQKVNCARGLIGAKQCLGNAYISTERWDEGMKALEAAYQLSLQTDNAVVRISILCQLISITKDQKNNQLLSEYLAKLKETLHHHTSTNPMLKEAFYDVYLFCEVYYTYYYLYAGQPEQAHKNLVNAGKFLNGNTFFLYRVLYYDAYAAYFRACKAYDRALAKIDSTIILLQEDFNSNYIHQKLTKADLLAEAGRSAEAIPLYIETLHLKDSIETTVLDKQMQQIKAKYNIDKVALEEERLKSYIQLGTLIVVVIVLIILVAFMLRISHVRKALEQSEKETRETTRMAEEANEMKNRFLSNISYHIRIPLNGVVGFSQLIASEPNMPDELRKEYSSIIQKNSEELMRLVNDVLDLSRLEAGMMKFNIQEYGLAELCNEATYMARMHSEGCTVIRLENEIETDLNIRVDTVRFTQALMSALTYPQKYKEKREIDFKVTLDTEKHFINFRITNSPLADERFTSQEVCIRHEINRLLFEYFGGSYKVQTNPDGKPAILFTFPSGRN

SEQ ID NO: 48355 - protein, 378 aa, Bacteroides fragilis
MELKKKENIGWIDLLRVLACFFVVFSHSCDAFIGQFDANRESFLTGVFLGSLMRPCVPIFVMMTGVLLLPVQTDMAAFYKKRIGRLIPPMIFWSLVLPVLYFIYLNYINPDTQNPLISMPDHSLEALWFKLYTFIFNFNFDTVPLWYLYMLIGLYLIMPIISGWLEKVSKKELKLFLGIWGISLIAPYVKMFAPALGYQGNYGNMGLWGVCDWNDYGTFYYFSGFIGYLLLAYYLTKYPLKWSWKKLLSITIPMFLTGYLITSYGYVITQNYFPGNYAYLEIVWYFAGINVFMMTFPVFVIVQKIKVPSNHRLSHMASLAFGIYLSHYVFVFIAYDLLDTELLPYTVRIICMACIVFLTCYAIVWLMSKSKLTNRFIR

SEQ ID NO: 48356 - protein, 32 aa, Bacteroides fragilis
MLVGKRRALLDYLKAKDITRYRDIIKELGLRK

SEQ ID NO: 48357 - protein, 254 aa, Bacteroides fragilis
MKNVYFLSDAHLGSRAIEHGRTQERRLVNFLDSIKHKAAAVYLLGDMFDFWYEFRLVVPKGYTRFLGKLSELTDMGVEVHFFTGNHDIWCGDYLTKECGVTIHREPVTTEIYGKEFYLAHGDGLGDPDKKFKLLRTMFHSRTLQTLFSAIHPRWSIDLGLNWAKHSRLKREGGKEPDYMGENKEFLVLYTKEYLKSHPNINFFIYGHRHIELDLMLSATARILILGDWINFFSYAVFDGENLFLENYIEGETQL

SEQ ID NO: 48358 - protein, 370 aa, Bacteroides fragilis
MTEDKNINKTTPQSEEQEIDLIELAQKVWAGRKLVLKVCGVAVLVGLVVAFSIPKEYSTSVTLAPETGSKSSTGGMGALAAMAGINLGSSTGEDALSPELYPDIVSSTPFLLEMFDVKVADQKGKINTTLYEYLDKYQRAPWWGAVASAPFKALGWVVSLFKDAPEEQGDAKIDPFYLTADQAGIADALSHRISVSVDKKTGVTTLTVTMQDPLISAALTDTVMHCLQNYITDYRTNKARHDLAFTEKLFNEAQENYYEAQQKYARFMDGNQNIIMQSFRTEQERLQNEMNLAYGVFTQVSQQLQLAKAKVQEITPVYTVVQPATVPLRPAKPNKIMILIGFVFLAGVGSIGWILFVKDLLNGWKKQPEK

SEQ ID NO: 48359 - protein, 591 aa, Bacteroides fragilis
MKKEIKFSLVYRDMWQSSGKYQPRVDQLVRIAPLIIEMGCFARVETNGGAFEQVNLLYGENPNKAVRAFTKPFNDAGIQTHMLDRGLNGLRMYPVPADVRRLMYKVKHAQGVDITRIFCGLNEVRNIIPSIHYALEGGMIPQATLCITFSPVHTVEYYTAIADKLIEAGAPEICLKDMAGVGRPAMLGQLTKAIKERHPEVLIQYHGHSGPGLSMASILEVCENGADIIDVAMEPMSWGKVHPDVISVQAMLKDAGFRVPDINMKAYMKARAMTQEFIDDFLGYFMDPTNKHMSSLLLKCGLPGGMMGSMMADLKGVHAGINMILKSNNQPELSIDDLLVMLFDEVEYVWPKLGYPPLVTPFSQYVKNVALMNVMARVKGEERWSMIDNNTWGMILGKSGRLPGPLDPEIVALAKEKGYEFTDEDPQKNYPDQLDEYRKEMQENGWESGPDDEELFELAMHDRQYRDYKSGVAKKRFEEDLQRAKDAALAKQGFSEEDVKRMKRAKAEPITAMEKGRIIWEIDVESPSMPPEVGHKYEPDDVFCYIATPWNTYDRVLANFSGRIIEVCAKQGALVNKGDALAYVERCEEPA

SEQ ID NO: 48360 - protein, 671 aa, Bacteroides fragilis
MSSKPYRHFIALLLVLFCSRFEAQAEDLFAKTDSTLQQYLIRCKAQIKDPDFLQTNDTLTHMAQEKNDKRMQVIAVALKLDYYYYQNNPDSILVMVDRVKKISRRNNELKYFYFAWGSRLIIYYIKQHQTNTAIYEARKMLQSAEADNFIPGIVQCYRTLGTIYMTQSNPKLAYENFRKQIALIEENEIEDINLPTQYASLAQCALEMHRPDEALKALEKGSKCTRSSYQIFTVQKAYILYYLETKEYEKARKTLVELEQLFEKDKSLTLYKSGLFYIQIEYYRNTGQYRKALNVIEEIKNDSSSINKYLDYTLTQKQGDIYWEMNQKARAVQYYRDYILATDSIRSQEIQNSTNEFYTIMEVEQLHKEKNELLLHMQEEKLQKINIALVSLVIILVAGTMLLFHISKLNKKLKRSEAKVIQQNKELVENGEELRKAKEQAENASRMKTTFIQSMSHEIRTPLNSIVGFSQVLSNYFKEEDNDEIREFASIIEISSSNLLRLINDVLDISYLDQSEILPYDKPEDINNCCLLSIERTRNSIKKEVSLRFEPSCGPLMILTNPERVAQILTHLLHNAIKFTDKGNITLAYTISPTEKQIVYTVTDTGKGIPVEQQEYVFERFAKLNDFSQGTGLGLPICRIIAEKLGGSLIIDKTYTKGCRFILTLPLIKAD

SEQ ID NO: 48361 - protein, 1487 aa, Bacteroides fragilis
MKDVKIKTTSIPAKPRSKNYPAGAVITRTAGGITVNGGGGGGASVDIVKATDTKSFTDSNVLSSLRTLLEIRSRIIAESDTTTELTDDNTLSSKRTLKEIDAAIKEALKKIDDLYLSKVKADIAKEPITFLKGLFVGDGLTFINESGDTELQSLVAQMKVKAATLEVTGSANVGTLHSEGNISTGADIWAKGDTHTLNLLVQALAKTYDLNVEHVATLFQTIVKDYISSERFIPGLMGEGMKLYKAINGDWNLEIDNAVVRKAMTIFELIISKVRAVNGGLVISSANGRVKSVSETSGDPAYYVLGIEGDMMFVADDLVRCQVYTSGHVKYYWVPVASVNDDSILILKSVFPNGTTPAVGDDLVQMGNLTNPNRQGILYLTASEDGKPRISVLDGVNSTSLAGKNKVILGCLDGMTDTDFPADFQPSGYGLYAMNCFLKGIFILRNGKSIEQEFSNIATELAAIPGKIELAIRSMKVADVNLLYDSNHKLNANPYQMGSYKYDVHLEAGKTYTLTVCYKCADSDVIRAYNNPSYGWIGTLPKSAEETVLSQPITPINPDGAYFYFYKFPQQESTETYIKWAVITEGSVGVANWIPSATERKLNIGGENLMLQSQQALDGSGAQYAFQLSKAWTDLKGKTLTISFDYAYSNLKMGSSQRFGLEKAIYKSGTSQYYYIGAFKYVDSTSPTADKGRYVHTIKVPEDIEDSLDTDIIAYIQLGAGSVCRINNFQIEIGDTATGWKPAPKDSFTESKKYTDTQILAVDGKIELSVKTKVENLGIGANNLYSYTSSLLNTLYPSPTIERQMSLHGFYLVGSQGNGGAMRIPNIIPPIPGKYTVSGWIKGSQNTPVGFTIDVCDSENVIVKSTADNQWSYFKHTFNVTKNTEEQKDVYNFVDIERIDWAYIWVKDFKVEAGEIATAWSPNFQDAVYKGAEYTNSQISVVEGKITSTVEKINTVDGRVTGLASRVEQTEKSITSVVGDIGVINSTTNRHISKRIDLRGWDNNKFFPLVISIPVYHKTRVEISRPLDAGYGKPSYGTHDGGFSMNLTFEMSGSGWGSLPAVTNIFDYTKAWTSAGAKIVVDLGQITETSTCRMGIRGGSMYDVTVDDTIDPNVINVYQTDYHGSYNTSFPVRTDGTEPVRTYGYYTEIKQTQESIALTANKVDDQGRRLSAAELTLSSDHAKLSVVEQAANSANSLAGTANNKAEAADGRVTATQNGLVETGINITSRKIILKADNLLFQNNTGQQTAAINANGKLSANVIEAAEVVAQAFSAQRITTGNLTVTDGAKIGAWNISGGSLVSASNSQAKILLNMSGNKFLRINEEGDSPTTSRTALMSIRNDNYSGLSIESYGSSGFALRCLANAGTANSIESYGSHIFAQRGGEKWNAPGMLCTGYVYQAGTVTNEWGNGCTLTSAQKIATGKYRIYHSLKHLQYAVLVQGLGGYGWVFGQVETQNNSYFEVLMLDANKGPRDCPFRVFVVGRNVW

SEQ ID NO: 48362 - protein, 804 aa, Bacteroides fragilis
MKQIYSTLLLLVLLIFPSLLFATEPESVDRVPAIRGVVYDETDTPLASATVQIEGTTIGTTTNSEGRFILRNLARKVYKINVSFVGYVTQTRTVDLTSRSVAQLSFTLLPDDNLLSTVEVFGERYKQPKKLDAITRMPLRPSEQIQSISVISEKSITEQGALTVTDVARNVPGVTLFGSYGGVRESMSIRGYRGVPILKNGVRIDSDFRTGSALSEMQGVESIQVIKGSAAVTQGIGNDLGSAGGVINVVTKTPKFTNEGEVSLRAGSWGLFRPTFDVQSVLDKNQTIAFRMNGAFERSDNYRPVIHSNRVYINPSLEWRPDDKTSVTIEMDYLNDNRTPYTSSVNLSKDTEENLYDMPHNKFLGFKNDNVNNKTLTYAARITRQLTDNISVRAAYFGSSYKVDNTSTSVKTVVNKEYNMRRRTISRSLRDDRNSTFQLDFIGRDIFTGPVKHTFQLGFDYKNTDLSITNYTPVNIDTINVLAPSISNVLPVAVKFVPETPVESNSSSYGIMAQEVMTFNKYIKAILGLRYSYISSQDGTSAGPTTGDAWNPMLGIMLTPIKNINLFGSYTTTTSLLHAARRMENGDEIGPSKTRQFEVGIKSDWLNNRLRFNLTYFDILTKNLSYSTYHPGTTQPTGYFDKAGSLKRKGIETELSGSILENLQVMMGYAYLDAKYENSPAFKNGSAPMNTPKHTANGWIQYRFDKGVLKRLSAGIGVYFVGKRPVNDFAIKPDGHGSMTNEKPFDMPGYTTINAQLAYSIHKFTARVYLNNLFDALGYNSYYRGGYINQIDPRNFSAVISYHF

SEQ ID NO: 48363 - protein, 401 aa, Bacteroides fragilis
MNPKKIDANVSVSYVSGVIAYYQADYELAEQHLQDGLRELKRMDEEQEVDYYHALIEFYTLLAKVYEKQELYNKALEAARNSLKYETRLFDKNSNKTIQKLRTQYNLNEKERVVEQLSAINEKNRRINILSAILIVLALVTIFLLLKRYRSRQRIHEGMLQIAKLKQQEAELLVKLQKTKLEEREREFQSLVHEAQQRKVQYYLEGLEVERKRLAKELHDNVSNELLAIKMKITDGTSSCEEIMDTLQTLQAEVRGISHDLMPPIFKYASLSEILQDYVYQHNQPGQTELELLLEPEDNFDNLSQKVSLEIYRIVQEAVGNSLKHAQATLVKIILVREDNKVKLTVSDNGRGFEQQTGKTGIGLTIIKERVENLRGTLTLNSAPEKGTELIVEIDLENLEK

SEQ ID NO: 48364 - protein, 347 aa, Bacteroides fragilis
MKYKNIREGEQLHFDLHFLNRIKKQFPGIKAISPEITGPYSQVMNKAKSGLFKIIGINENYMGIKILKINEDGRYFNKGDDENTRNVTIIGENVSTTLFNNQKALGKSINIAGIDFKVIGVLKNDDIFSASEINSVYVPFSSYINCIDNKTPLRAFCLYLNKEVDSKRFENELRAFIANKYQFAYPDKQALQIINFETQTSAFEGLFDGLKMFIWIVGICFLISGIVGVSNIMFVVIKERSSEIGIRKAVGATPKSILVLMLTESVIITVISGIIGLISGAGILEIINWLLESARHATMIKHVEIDINVAVLALVILILSGVIAGAFPAMKASVIQPIDAIRNENIG

SEQ ID NO: 48365 - protein, 138 aa, Bacteroides fragilis
MFTVYCLPFVIIMANTLCKAERLNSKILIEKMFAGGSKSFSIFPLRVVYMPVENQDVQASILLSVSKKRFKRAVKRNRVKRQLREAYRMHKHQLLQILTDKQQQLAIAFIYLSDELTSSAEIEEKMKILLARISEKLV

SEQ ID NO: 48366 - protein, 528 aa, Bacteroides fragilis
  MISC_FEATURE (3)..(3): X=any amino acid
DDXNKRSFSYIAVFGFVLAFMTLLKTSCYFASSAVMIPLRTGVVRDIRIMVYSKVMSLPLGFFSEERKGDIIARMSGDVGEVENSITSSLDMLIKNPILIVMYFGTLIITSWQLTLFTLLVVPGMGWIMGKVGKKLKRQSLEAQAKWSDTMSQLEETLGGLRIIKAFIAEQKMINRFTECSNEFRDATNRVAMRQALAHPMSEFLGTLLIVVVLWFGGSLILGNHSSIDAPTFIFYMVILYSVINPLKEFSKAGYNIPKGLASMERVDKILKAENKIVEIPNPKPLNGLEEQVEFKDISFSYDGKKEVLQHINLTVPKGKTVALVGQSGSGKSTLVDLLPRYHDVQEGTITIDGVNIKDVRISDLRSLIGNVNQEAILFNDTFFNNIAFGVENATMEQVIEAAKIANAHDFIMEKEDGYHTNIGDRGSKLSGGQRQRISIARAILKNPPILILDEATSALDTESERLVQEALERLMKTRTTIAIAHRLSTIKNADEICVLYEGEIVERGKHEELLAKNGYYKRLNDMQ

SEQ ID NO: 48367 - protein, 420 aa, Bacteroides fragilis
MKKALPNTKVTVKLRRSNYKEEWYLIIESYPVYKRGSKRASRVVESINRTISTPIWDKSSIARILPDGTFNYKPKRDLNGIIQCRSTIDQEACIYADNVRKLRQHEYDSAILYTDKENEIAAQNERSEQDFIKYFNRIISTRHPNSSDSIIVNWRRVGELLKMYSQGQPIPFKAISVKLLEDIKMFLLRAPMGGNKKGTISQNTASTYFSILKAGLKQAFIDEYLTVDISAKVKGITNIEKPRVALTMNEVQMLVDTPCKDDVLKRAFLFSILTGLRHSDIQTLKWKQIQQTSKGTWQAVVIQQKTKRPDYKPVIQQALQLCGIRPDDDEALVFEGLTDASWISRPLKVWIEASGIKKHITFHCGRHSYASLLLENGVDIYTIKSLMGHTNVKTTQIYTHIVNEQKEKAANTLHIENLDL

SEQ ID NO: 48368 - protein, 520 aa, Bacteroides fragilis
MKKQYMNYMKSCLLVMIACLVSMVGAAQGFSPAAMEQLKTRRLWSHSQNAAGMPFDDIQNYSNVILGYDLQDGNYCRPQEGQKEAIVGVSSEGFINLKNAYVWGAFNFAQKNLTDAGYNASIADPFRGMPYYVADQHLSKWRNQYYDLKFRAATPLLGNHWALGLEGNYVATLAAKQRDPRVDTRFYTLGLTPGITYKLNNSHKFGASFKYSSIKEDSRMSNVNSYVDQDYYILYGLGTAIKGIGSGVTSNYIGDRFGGALQYNFSMPSFNLLLEGSYDVKAETVQQSYTTPKKIAGVKDKTAHVSLTMIQEGKDYTNYMRTTYTNRNIDGIQYISQRDNSESQSGWVELYNNIRSTYKAQTASLNYALSRNRGNEYSWKAELNVNYTKQDDEYLMPNSVQNAENLSLGLGGKKNFVLGNSLNRRLLIDVHVAYNNNLGGEYVYGGSHADYPTVTELQQGLTNYYTCDYYRIGGSITYSQQVRENRRMNLFAKVVFDRVNTSDYDYDGRTHLSISLGCNF

SEQ ID NO: 48369 - protein, 96 aa, Bacteroides fragilis
MLQIAKLKQQEAELLVKLQKTKLEEREREFQSLVHEAQQRKVQYYLEGLEVERKRLAKELHDNVSNELLAIKMKITDGTPLLSGKWGLLCLALPIP

SEQ ID NO: 48370 - protein, 390 aa, Bacteroides fragilis
MTKRIGNSRLYILIFIGIVSAFGPFVTDFYLPALPVLSEYFDTTASLVQLSLTFSMVGLAVGQLIIGPLSDKYGRKLPLMVSLVIFCISTVGCLYSPEIHGFIFARLLQGLSGAGGVVISKSIAIDLYQGKELTRFFAMLSSVQGLAPVCAPVLGGILLGAMDWKGIFWILLAIGILLIVALSAFKESLEIKKRQKGNVFSTFKYYLPVLRNRQFMRYVLIQAFAMGVMFTYIAASPFIFQNHFGTSPFAYSLCFGVNALGIMLGSLAVSRFKDATAALRFGVAGFTTMSLPVAAALIFSPSVWIVEGTLFFLLAFLGLILPGSTTLALDMERKNSGNASALLGFLMFVFGGLLSPLTGIGNMLYSTGIIIVACCVGTWFFTYKATLSAR

SEQ ID NO: 48371 - protein, 1015 aa, Bacteroides fragilis
MDIKDYILIINAYTESFPWSNRLISTATNFVKDDPKLAVYTEHMNMIMIDNDSILDQFKDSLFDRYGSHRPRMLLLLGNSSLILKDDLRKMWGDIPMVLCAGKDYTGPEHYYLTKQPIPLSERVPLAELSQSCNLTYLYANLYIHENVEMMFRTLPRMKRFIYVGDERFVNQVNSQEIQEILRTKHPDVHYTFLSSRDIKKTNQLIDSLNFVDPRSTGILFSSWFHKRQFAGNMMLTMILPEIVSTVSPPIFALNMIELNDKESGMVGGYTYDQNHFNEKLSNMFSEILSGKSPRDLPHYLPTDGTPLINYQVLVRKGLSPDEWPAHTRFLNKPITFWDKYKYFLPGTTVCIALLVWFFLYRIRTLTRLRQIQLKEIEAMANYKNLIDNMPLLYMQEKLIVNEQGVADDLIYLNVNPHFEKHFFRREDVVGKRASELFPESLPEFLHFIQISLKENRAITFPYYFTKIDRFYDIVLKGAHQENVIDIFCVDSTELHRAQQKLNATNHKLSMALEVADIIPWKWDLLSKTILCDINKPIELSAQGNNVSEEQLAVPDSQYFSKIYKEDRIRVEQAYKDLIEGRLEKVKEEYRVINIRNHTHKIEWVEAQAAVETRDENGTPVTLVGSSQVITGRKKMEMELTSAKDRAEESNRLKSAFLANMSHEIRTPLNAIVGFSGILASTEEEEEKQEYVSIIENNNALLLQLISDILDLSKIEAGTLEFQYSDIELNTELKKLESTLKLKLKSDDVQLEFVPGLPMCPVCTEKNRLSQLIINLVTNAIKFTSQGSIRFGYEHRDKELYFYVTDTGCGIPKDKQESIFGRFVKLNSFAQGTGLGLSICRTLVEHMGGHIGVDSEEGKGSTFWFSLPYKAASTSAGTMQKTEIQPISVEKDKLTILIAEDNESNYRLFESILGHDYHLIHAWDGREAVERFKRENPQIILMDINMPVMDGYEATQKIRKYSAKVPIIAVTAFAYASDEQRVMENGFDGYMPKPINARQLKAQITEIMQKRIILL

SEQ ID NO: 48372 - protein, 377 aa, Bacteroides fragilis
MKYYLIVGEASGDLHASHLMAALKEEDPEAEFRFFGGDLMAAVGGTMVKHYKELAYMGFIPVLLHLPTIFANMKRCKEDIVAWSPDVVILVDYPGFNLDIAKFVHAKTKIPVYYYISPKIWAWKEYRIKNIKRDVDELFSILPFEVGFFKGHRYPIHYVGNPTVDEVTAFKASHQESFADFIADSELADKPIIALLAGSRKQEIKDNLPDMIRAASAFPGYQLVLAAAPGISPEYYAKFVKGTELAVIFDRTYRLLQQADVALVTSGTATLETALFRVPQVVCYHTPVGKLVSFLRRHILKVKFISLVNLIAGREVVRELVADTMTVENMRAELECLLFREDYRRKMLDGYEEMARLLGPAGAPRHAAREMVKLLKK

SEQ ID NO: 48373 - protein, 324 aa, Bacteroides fragilis
MDSLSLIKSPITTELEDFKNLFDSSLSSSNLLLNNVIAHIRQRNGKMMRPILVLLVAKLYGEIKPETLHAAVSLELLHTASLVHDDVVDESTERRGQLSVNAIFNNKVAVLVGDFLLATSLVHAERTRNHDIIGVVACLGQDLAEGEILQLSNVSNREYSETIYFDVIRKKTAALFAACTKAAALSVEVTDEKAEFARLFGENIGICFQIKDDIFDYFESKEIGKPTGNDMLEGKLTLPALYVLNTTTDAWAQEMALRVKAGTATVDEITRLIEFIKQNGGIEYAVKVMYEYKERALDLLRTLPDSAVKTSLITYLDYVVDRDK

SEQ ID NO: 48374 - protein, 423 aa, Bacteroides fragilis
MSRKKLQELQLQRLKKTINIAANAPYYKKVFQEHGITPESIQSLDDIRKLPFTTKADMRANYPFGLVAGNMKEDGVRIHSSSGTTGTPTVIVHSQHDLDSWANLVARCLYCVGIRNTDVFQNSSGYGMFTGGLGFQYGAERLGALTVPAAAGNSKRQIKFITDFKTTALHAIPSYAIRLAEVFQEEGIDPRSTTLKTLVIGAEPHTDEQRKKIERMLGVKAYNSFGMTEMNGPGVAFECTEQNGMHFWEDCYYVEIINPETGEPVPEGEIGELVLTTLDREMMPLIRYRTRDLTRILPGNCPCGRTHIRIDRIKGRSDDMFIIKGVNIFPMQVEKILVQFPELGSNYLITLETVNNQDEMVVEVELSDLSTDNYIELEKIRKDITRQLKDEILVTPKLKLVKKGSLPQSEGKAVRVKDLRNNK

SEQ ID NO: 48375 - protein, 699 aa, Bacteroides fragilis
MTRYFFVILLMGLIGVAIVVKAGITMFAERQYWQDVADRFVKENVTVKPNRGNIISSDGKLMASSLPEYRIYMDFKAGGVKKDTMLMNHLDEICEGLHKIFPDKSASEFKTHLKKGRKQGSRNYLIYPKRISYIQYKEAKRLPVFNLNKYKGGFHELAYNQRKKPFGSLAARTLGDLYADTAQGAKNGIELAFDSILKGHDGITHRQKVMNKYLNIVDIPPVDGCDLLSTIDVGMQDICEKALTDKLKELNASVGVAVLMEVATGEVKAIVNMTKAGDGNYYEMRNNAISDMLEPGSTFKTASIMVALEDGKITPEDGIDTGNGIKMMHGRPMKDWNWYKGGYGYLTVTQILEVSSNIGTSSIIEKYYGSNPQKFVDGLKRMSIDQPLQLQIAGEGKPNIKGPKERYFAKTTLPWMSIGYETQVPPMNILTFYNAIANNGVMVRPKFVKAAIKNGEIVKEYPTEIINPKICSERTLKQIQEILYKVVHEGLAAPAGSKQFAVSGKTGTAQISQGAAGYKSGRVNYLVSFCGYFPSEAPKYSCIVSIQKPGLPASGGLMAGSVFSKIAERVYAKDLRLDIRNAIDTNTVVIPDVKAGEMIEARQVLEGLNIQTQAEFKAKKNKEVWGHAQAAPKAVILQGKEQLRNFVPSVIGMGAKDAVYLLESKGLKVTLSGVGKVKSQSLPQGTTIKKGQTISIHLN

SEQ ID NO: 48376 - protein, 439 aa, Bacteroides fragilis
MREFNNIKIAVAGTGYVGMSIATLLAQHHEVVAVDVLPEKVEKINQKISPIQDDYIEQYMAEKPLRLSATLDGTVAYSKADFVVIAAPTNYDPVKNYFDTHHIEDVIDLVLRVNPDAIMVIKSTIPVGYCRSLYVKYAQRGVKQLNLLFSPEFLRESKALYDNLYPSRIIVGTPKMMNSNQFDAENEAIRTIANLPMLVQAAKTFAALLQEGAIKEDIPTLFMGIKEAEAVKLFANTYLALRVSYFNELDTYAEVKGLDAQSIIEGVGLDPRIGTHYNNPSFGYGGYCLPKDTKQLLANYADIPQNMMTAIVESNRTRKDFIADQVLRKAGYYTASSQWDAQKEQDVVVGVFRLTMKSNSDNFRQSSIQGIMKRIKAKGAQIIIYEPALEDDTSFFGSTVVNDLAKFKQMSDAVIANRYDACLDDVADKVFTRDIFCRD

SEQ ID NO: 48377 - protein, 475 aa, Bacteroides fragilis
MGWQDTSLPFWTQKTHYNEVYETPNMERLAKQGMMFTQAYASSISSPTRCSLITGTNAARHRVTNWTYPKGQQTDRPSDVFNVADWNVNGVCQVPNIDHTFQATSLAEILKDNGYHTIHCGKAHFGAVNTPGESPYHMGFEVNIAGHAGGGLASYLGENNYGNRTDGKPNPWFAVPGLEKYWGTDTFVSEALTLEAIKALDHAKEYNQPFFLYMAHYAIHVPIDKDKRFYQKYINKGLTPKEAAYAALIEGMDKSLGDLMDWLDKNGEADNTIVIFMSDNGGLSSEPEWRDGKLHTQNSPLNSGKGSAYEGGVREPMIVRWPGVVKPDTKCDKYLIIEDFYPTILEMAQIKHYKTVQPIDGISFMPLLTHTGDPSKGRSLHWNFPNHWGNDGPGIGPTCTVRKGDWKLIYYYDSGKKELFNIPEDIGEKNDLAALHPDIVKSLSKELGDYLRKVGGQRPSFKATGKPCPWPDEIK

SEQ ID NO: 48378 - protein, 288 aa, Bacteroides fragilis
MTGYGKATAELPDKKINVEIKSLNSKAMDLSARIAPAYREKEMEIRNEIARVLERGKVDFSLWVEKKECADAATPINQVLVEGYYNQIKAISENLHIAVPTDWFQTLLRMPDVMTRTETQELSEEEWGIVYAAVKEAVSHLVDFRKQEGAALEKKFREKIANIHRLLESVTPYEKERVDKVKERITDALEKTLNVDYDKNRLEQELIYYIEKLDINEEKQRLGNHLKYFISTLESGSGQGKKLGFIAQEMGREINTLGSKSNHAEMQKIVVQMKDELEQIKEQVLNVM

SEQ ID NO: 48379 - protein, 196 aa, Bacteroides fragilis
MSPRKLMFWLFACIFLVCALRAGLLTSADQYIYHLRNMHASTFAYRYDDFLPYLPIVAMFVLKLTGVKSRSNWKRMLVSTAFSYILMGTIVLTMKSLAGVLRPDGSDFLSFPSGHTATAFTAATLLYKEYGFKTPLAGIATFLPAVVTGFTRQLNNRHWLSDVLAGAIIGIMMVELAYFLTDRLLMKTGAQTCSKS

SEQ ID NO: 48380 - protein, 339 aa, Bacteroides fragilis
MLNLINSIVARAQANRQRIVLPEGTEERTLKAANQILTDEVADLILLGNPEEINAAAAKWGLGNINRATIIDPENHPKKEEYAQLLCELRKKKGMTIEEARKLVLDPLYLGCLIIKSGDADGQLAGARNTTGDVLRPALQIIKTSPGITCVSGAMLLLTHAPECGQNGLLVMGDVAVTPVPDASQLAQIAVCTARTAQAVAGIAEPKVAMLSFSTKGSAKHENVDKVVEALKLAKEMAPDLNIDGEMQADAALVPSVGASKAPGSPVAGEANVLIVPSLEVGNISYKLVQRLGHADAVGPILQGIARPVNDLSRGCSIEDVYRMIAITANQAIAAKNGK

SEQ ID NO: 48381 - protein, 511 aa, Bacteroides fragilis
MSNSSIKSKTALLRNGETQKGNGYPEANDYSARILETMQTGVVFFNTEQIISGINNLACEDLQIPRDPSGHKITDIISIIHQEKDIFPELIARLKSSETDMEKLPIDTLIRSLETKVQFFASGCIMQLETGRYLLAFRNTMDEVTHEHLLSMILARTKIFPWFFDLKRNKMLIDAHWFSYLGIPAGDCEITIEKFFSRVHPNERDMLADALQKQLSEKEIPDSFSYRLQRGDGSWEWFSEQSMYLSKTNDGSPYRIVGVCHSIQEHKNTEDKLRAARNKAQESDRLKSAFLANMSHEIRTPLNAIVGFSNLIAGGIVDLDTEEARDYSALISKNCNYLLTLVSDVLDLSCIESDTMTFKFTVYPLTRLLTEIYQKYENRIPQEVQFNLLLPTDNVEIETDAVRLRQVIEHLLDNAAKFTVKGHIDIGYALSDHGEKIYVFVADTGCGIPSDQYKKVFERFYKINSFVQGAGLGLSVCKTIVEGLGGTINVYSQLKEGSRFSVILPLNRLHK

SEQ ID NO: 48382 - protein, 883 aa, Bacteroides fragilis
MIWRKKEKKKAQYQFNSERVFLVATQPAKTAYSYFQTSSVGLSEEEIGQRQSAYGKNEISREQKKNPLVLFIRTFINPFIGVLTALAVISLVIDVVMARPEDREWTAVLIIISMVVCSAILRFWQEWKASEATDSLMKMVKNTCFVKRFSGSEEVDIMELVPGDVVCLAAGDMIPADIRIIESKDLFVSQASLTGESDPVEKFPEINGRRHSHGSVIELDNICYMGSTVISGSAKGIVFGTGNDTYLGTIARSLVGERATTAFDKGISKVSFLLIRFMLVMVPFVFFVNGFTKGDWFEAFIFALSVAVGLTPEMLPMIVTANLSKGAVSMSKKKTVVKNLNAIQNFGAMNILCTDKTGTLTCDKIVLEKYINADGSDDHSRRILRHAFLNSYFQTGLKNLMDKAILAHVREENLEHLTEGYTKIDEIPFDFSRRRMSVVIEDQQGKRQIITKGAVEEMLNICSHAEFNGQVYELTDKLRSKAKRISDDMNRNGMRVLAIAQKSFISKARDFAVTDEDEMVLIGYLAFLDPPKPSSAEAIRQLREYGIEVKILSGDNDVIVNAIARQIGIDTCHSVTGVELEGKDGEELREIVGQATLFSRLTPLQKSEIIMILQQNGNTVGFLGDGVNDAGALRQSDIGISVDSAVDIAKESADIILLDKDLSVLKEGVLEGRKTFGNITKYIKMTASSNFGNMFSVMFASAFLPFLPMLPIHLLIQNLLYDISQTTIPFDRMDAEFLKQPQKWDASDLSRFMIYIGPISSVFDIATYCLMWYVFACNSPEHQTLFQSGWFVEGLLSQTLIVHMIRTRKIPFFQSRATWPVLGLTFLIMAMGIAIPFTSFGLSIGLEPLPLSYFPWLVLILVSYCVLTQFMKSWYIRRFSKWL

SEQ ID NO: 48383 - protein, 350 aa, Bacteroides fragilis
MSVLCSVPQIPAGACTGITLKSKDGATVVARTIEWAESVMNCMYVVVPRAQELQSLTPSGMDGLKFRAKHGFVGLAVEQKEFVVEGMNEKGLSAGLYYFPNYGRYPVYDAAQRDKSLADFQLVSYVLAECSTVDEVKEALSQVRVINIDPRSSTVHWRFTEASGRQVVLEIVNEMMNFYDNPLGVLTNSPGLEWHWTNLNNYINLQPGTLPEHNFGPLEPKSFGHGSGLLGLPGDFTPPSRFVRATFFQLTAPQQPDAKGSVFQAFHILNNFDIPTGSEQPWGKASANVPSATQFTVACDIRDQKVYYRTMYNSNIRCIDLKTINFDNVKYQADPLDETKEQPVEMKVIK

SEQ ID NO: 48384 - protein, 767 aa, Bacteroides fragilis
MKRYKKYMFIILSVLLAGGCVQEDINEALRREAELNVRMGKLREWISDTNNEVRLLATIVNTIPTHDYIESVTELPDGSGTLIVFHKGGDILIKNGLTGNKGENGNDGANGENGSDGANGTDGTDGKDGVDGQNGADGQNGSNGTDGTDGHNGSDGQDGANGENGSDGANGTDGTDGKDGVDGQNGADGQNGSNGTDGTDGHNGSDGQDGANGEDGKDGVDGNDGKDGVKGPAGDTPLLGAKRDTDGNYYWTVQIGGGAVEWLTDGEGNKVIMTPVNGVTPSVGIAKDTDGEYYWQVTVGGVTKWITGGSGEKIVATVTDGSPSIFASVNTGDPEYVVFTMTDGSIYKVAKTGDSKLIFNETGPLFFRRGVTQDVTFDCSSFRQIVKVAGTWDATINYQPKALQGTLTVKAPAAGSALPASERITIEGTDALGNTVRADILVTLYYRIELPKFNSSLVYDVLMEGVKVGEICREYVPVYSTTDRATVVYSYNAASRTFGSGLILENGASIQHDGTGYTPVAGNPSSTAILTEDGSRYVMAADGADGLVNGTVCGLKASLAVDVQGYAYRVVKIGSLYWMGENLKTTQFNDGTPIPTGFATSLDWGIQCGKGFPACQVDRAVNANAPGAMQYRNLYGVLYNQFAMKGNIAPQGWHVPSKAELQALVDFVGADARKLKSTAVGKGIGNWLEDTGIEANNLTGFTALPANTVDGGNGSTGAQETTGQWWSTETSYRIRMSYKSNSVELLTSGNALAGEGNSIRCVRDANY

SEQ ID NO: 48385 - protein, 130 aa, Bacteroides fragilis
MLYHSMKDEVQTHAFIEKWSRSKRIILPVVTGDELELRVYTGPQDLAIGSYGIAEPTGAPFTDYETIDLAVIPGVAFDRYGHRLGRGKGYYDRLLPQIPAPKVGICFPFQLIEEVPAEAFDFRMDTIIAQ

SEQ ID NO: 48386 - protein, 476 aa, Bacteroides fragilis
MSESSHVGLWNRCLEIIRDNVPESTYKTWFVPIVPLKYEDKTLIVQVPSQFFYEFLEDKFVDLLRKTLYKVIGDGTKLMYNVLVDKSSGATVNQESTTRSTAIPQSGLPRVDERKAPGLLRAPAVQDLDPHLNPNYNFETFIEGYSNKLSRSVAEAVAENPAKTVFNPLFLHGASGVGKTHLANAIGTRIKELYPDKRVLYVSAHLFQVQYTDSVRNNTTNDFINFYQTIDVLIIDDIQEFAGVTKTQNTFFHIFNHLHQNGKQLILTSDRAPVLLQGMEERLLTRFKWGMVAELEKPTVELRKNILRNKIHRDGLQFPSEVIDYIAENVNESVRDLEGIVISIMAHSTIYNKEIDLDLAQRIVRKVVRCETKAVTIDDIINVVCKHFDLESSAIHTKSRKREVVQARQVAMYLAKTHTDFSTSKIGKFIGNKDHATVLHACKTVKGQCEVDKGFRSDLENIETLLKKRNVSNGER

SEQ ID NO: 48387 - protein, 382 aa, Bacteroides fragilis
MRKNKFKSFASRLNKDGDHPEKISFESPEEQAEYDKLDFLWNRCLPEETGKPDIWAKVQAKINADNTPVRLALKSNKTARLFSILKYSAVAASVALLIGAGCFLLLNDEERHDLNKIAQSLQTEIPQDIKEVTLVVSDQKKIELDNNAQIVYSATGQVQVNSNKLVEDDIKEEYNQIIVPKGKRSQIVLADNSKIWINSGSKVIYPRAFEGKYREIYVEGEVYLNVTHDTSKPFIVNTSGFEVRVLGTSFNISAYKNQEKAAVVLVEGSVNVKDQQNHHIKMVPNEKVELNQEGISGKEKVNARDYISWIDGIWTLQGESLKQVLLRLQDYYGQNIRCDAAIENEQMFGKLFLNDDLNQVMKSILSILPAEYTMKNNVIYIE

SEQ ID NO: 48388 - protein, 404 aa, Bacteroides fragilis
MEPIRLNTIEEAIADFKEGNFVIVVDDEDRENEGDFIIAAEKITPEKVNFMLTHGRGVLCAPITEERCAELELDMQVSSNTSIYETPFTVTVDLLEGCTTGVSMHDRAMTIRALADPKTKPADLGRPGHINPLRARSRGVLRRAGHTEASVDLAKLAGLYPAAALIEIINEDGTMARLPQLVEVARRFGLKIISIKDLIAYRLQMESIVDRGVEVDMPTQFGHFRLIPFRQKSNGMEHIALIKGTWDTDEPILVRVHSSCMTGDIFGSCRCECGEQLHKAMEMIEAAGKGVIVYMNQEGRGIGLMNKIAAYKLQEEGYDTVDANLHLGFDADERDYGVGAQILREIGVKKMKLMTNNPVKRIGLEAYGLEITENVGIEIKPNPYNERYLKTKKDRMGHTLHFNK

SEQ ID NO: 48389 - protein, 293 aa, Bacteroides fragilis
MHKAGFVNIVGNPNVGKSTLMNVLVGERISIATFKAQTTRHRIMGIYNTDDMQIVFSDTPGVLKPNYKLQESMLNFSTSALADADVLLYVTDVIETPDKNNEFIQKVRQQSAPILLLINKIDLTDQEKLVKLVEEWKELLPQAEIIPISAATKFNVDYVMKRIKDLLPDSPPYFDKDQWTDKPARFFVNEIIREKILLYYDKEIPYSVEVVVEEFKEDAKKIHIHAVIYVERDSQKGIIIGKQGKALKKVATEARRDLERFFGKTVFLETYVKVDKDWRSSDKELRNFGYQLD

SEQ ID NO: 48390 - protein, 491 aa, Bacteroides fragilis
MATQNKTDIGLIGLAVMGENLALNMESRGWNVSVYNRTVPGVEEGVVERFINGRAKGKHIEGFTDIEAFVESIALPRKIMMMVRAGSPVDELMEQLFPYLSPGDILIDGGNSNYEDTNRRVKLAESKGFLFVGAGVSGGEEGALNGASIMPGGSEKAWEEVKPILQSIAAQAPDGTPCCQWVGPAGSGHFVKMIHNGIEYGDMQLIAEAYWVMKELLDMTNEEMASVFTRWNEGKLRSYLIEITGNILRHKDKTGAYLIDKILDAAGQKGTGKWSVINAMELGMPLGLIATAVFERSLSARKELREAAARQYQCRHSMAVYNKQDTEKEIFSALYASKLVSYAQGFAVLQRASDTFGWNLDLASIARMWRGGCIIRSVFLNDIAAAFEAKEKPKHLLLAPYFEEEIKGLLSGWKNLVAQAMREELPVPAFSSALNYFYSLVSADLPANLVQAQRDYFGAHTFERKDELRGVFFHENWTGHGGDTKSGTYNV

SEQ ID NO: 48391 - protein, 307 aa, Bacteroides fragilis
MVDTNDEWIMTRIGVKERRILNEEGLGTSYMARKAAKQLMKKTGSNPDDIDLVIVATTTPDYHFPSTASILCDKLGLKNAFAFDLQAACSGFLFLMETAANFIRSGRYKKIIIVGADKMSSMVDYTERATCPIFGDGAAAFMVEPTTEDLGIMDAILRTDGKGLPFLHMKAGGSVCPPSYFTVDNKMHYIHQEGRTVFKYAVSNMSDVSAAIAEKNGLTKDNIDWIVPHQANMRIIEAVAHRMEVPMEKVLVDIQHYGNTSAGTLPLCIWDFEEKLKKGDNIIFTAFGAGFTWGAVYVKWGYDGKKE

SEQ ID NO: 48392 - protein, 446 aa, Bacteroides fragilis
MKIIIAGAGAVGTHLAKLLSREKQDIILMDDDEEKLSTLSSNFDLMTVTASPSSISGLKEVGIKEADLFIAVTPDESRNMTACMLATNLGAEKTVARIDNYEYLLPKNKEFFQKLGVDSLIYPEMLAAKEIVSSMRMSWVRQWWEFCGGSLILIGTKMREKAEILNVTLAELGAPDIPYHVVAIKRGTETIIPRGDDTIKLHDIVYFTTTRKYIPYIRKIAGKEEYADVRNVMIMGGSRIAVRTAQYVPDYMQVKIVDNDINRCNRLTELLDDKTMIINGDGRDMDLLIEEGLKNTEAFVALTGNSETNILACLAAKRMGVSKTVAEVENIDYIGMAESLDIGTVINKKMIAASHIYQMMLDADVSNVKCLTFANADVAEFTVPENAKITKNKVKDLGLPKGTTIGGLIRNGEGILVTGDTLIQAGDHVVVFCLSMMIKKIEKYFN

SEQ ID NO: 48393 - protein, 862 aa, Bacteroides fragilis
MNFNNFTIKSQEAVQEAINLAQSRGQQAIETAHILYGVMKVGENVTNFIFQKLGLNGQQISLVLDKQIDSFPKVSGGEPYLSREANEVFQKATQYSKEMGDEFVSLEHLLLALLTVKSTVSTILKDAGMTEKELRGAISELRKGEKVTSQSSEDNYQSLEKYAINLNEAARSGKLDPVIGRDEEIRRVLQILSRRTKNNPILIGEPGTGKTAIVEGLAHRILRGDVPENLKNKQVYSLDMGALVAGAKYKGEFEERLKSVVNEVKKSEGNIILFIDEIHTLVGAGKGEGAMDAANILKPALARGELRSIGATTLDEYQKYFEKDKALERRFQIVQVDEPDNLSTISILRGLKERYENHHHVRIKDDAIIAAVELSSRYITDRFLPDKAIDLMDEAAAKLRMEVDSVPEGLDEISRKIKQLEIEREAIKRENDEPKLQTIGKELAELKEQEKSYKAKWQSEKSLMDIIQQNKVEIENLKFEADKAEREGNYGKVAEIRYGKLQELHKEIEDTQKKLHEMQGDTAMIKEEVDAEDIADVVSRWTGIPVSKMMQSEKDKLLHLEEELHQRVIGQDEAIAAVSDAVRRSRAGLQDPKRPIGSFIFLGTTGVGKTELAKALAEFLFDDETMMTRIDMSEYQEKHSVSRLVGAPPGYVGYDEGGQLTEAIRRKPYSVVLFDEIEKAHPDVFNILLQVLDDGRLTDNKGRVVNFKNTIIIMTSNMGSSYIQSQMEKLNGANNEEVVEETKKEVMNMLKKTIRPEFLNRIDETIMFLPLTEKDIKQIVLLQIKSVQKMLAGNGVELELTDAALDFLSQVGYDPEFGARPVKRAIQRYLLNDLSKKLLAQEVDRSKAIIVDAQGDGLVFRN

SEQ ID NO: 48394 - protein, 224 aa, Bacteroides fragilis
MGKLYVVPTPVGNLEDMTFRAIKVLKEADLILAEDTRTSGILLKHFEIKNVMQSHHKFNEHKTVESVVNRIKAGETIALISDAGTPGISDPGFLVVRECVRNGIEVQCLPGATAFVPALVASGLPNEKFCFEGFLPQKKGRMTKLKSLVDEHRTMVFYESPHRLLKTLTQFAEYFGPERQVSVSREISKIHEETVRGTLSELIEHFTATDPRGEIVIVLAGIDD

SEQ ID NO: 48395 - protein, 581 aa, Bacteroides fragilis
MGNEELIKQVTEKAEKWLTPAYDAETQAEVKRMLENEDKTELIEAFYKDLEFGTGGLRGIMGVGTNRMNIYTVGAATQGLSNYLNANFKDMKQISVVVGYDCRNNSSLFAKISADIFSANGIKVYLFEEMRPTPEMSFAIRHLGCQSGIILTASHNPKEYNGYKAYWDDGAQVLAPHDKGIIDEVNKIASAADIKFQGNPDLIQIIGEDVDKIYLDMVKTVSIDPEAIARHKDMKIVYTPIHGTGMMLIPRALKMWGFENVYTVPEQMIKDGNFPTVVSPNPENAEALTMALNLAKEIDADLVMASDPDADRVGIACKNDKGEWVLINGNQTCLMYLYYIITQYNKLGKMTGNEFCVKTIVTTELIKKIADKNHIEMLDCYTGFKWIAREIRLREGKKKYIGGGEESYGFLAEDFVRDKDAVSACCLIAEVAAWAKDNGKTLYQLLMDIYVEYGFSKEFTVNVVKPGKSGAEEIKAMIDNFRANPPKELGASKVVLSKDYKTLNQTDAAGHVTDIDMPEPSNVLQYFTEDGGKVSVRPSGTEPKIKFYIEMKGEMGCRNCFATADAEATEKVEAVKKSLGI

SEQ ID NO: 48396 - protein, 328 aa, Bacteroides fragilis
MVNGLVQLLSGTVEIESHQNSGTTFKVKLPLVEDSKDMIAPDETLDIVNSPDVVADTVYLLNNSGLKEDMNAANAEKKMTVLLVEDNPDINNILKSKLLRLYKVKTAYNGQEAVELLKTHIIDIIISDIMMPYMDGYELSKYIKTSREYSHIPVILITSQPSKENELQGLSAGADAYIEKPFTFDELNLRITNLLKAKNNIREHYHDMKIFQLNEELNNKDEEFIKSLTQFVIEHIEDPELSVDQLTTHMNISRTQLYNKLKKLLNLSATEFINKIKIDVAKVKIIKTNLTIAEISWQLGFNNPSYFSKTFKRFCGVTPNEFKNGKSQ

SEQ ID NO: 48397 - protein, 78 aa, Bacteroides fragilis
MTAEILNHNIFNNNKMIVVPVKEGENIEKALKKFKRKFEKTGIVKELRSRQQFDKPSVTKRLKKERAVYVQKLQQVED

SEQ ID NO: 48398 - protein, 812 aa, Bacteroides fragilis
MIISKNPLGDIAKLNRICASAQIGWWEVNFTTGKCFISETLLKSLEVSSEWLDIDELMSTVRQDYRKRITDEFTSIPRKGVFEQTFPVTSGRGNVFWIHCALSMEEENEEGQLIATGYGQRIESPETQGYQCAWNQRINNLLYCQNSIANSLLKLLSNDTGDELFEEMLADILYFFKGARVYIVRYNWKNGNQSCLYEVAACNVITLKEKLQNICSEDAPWFYQQIHANRPVILNSPDELPPLAVRDREVLAENGTNSMMLAPLMREEGVWGYMGIDIVDGYRKWNSEDYQWFSSLANIISICMELRIIKERVMHSEKLFHDIFTNIPVGLELYNKEGMLLDCNNRNLEIFGVGDKNRIVGLNLFESPNMTRDIHESLRAGRPGTFHLKYDFDEERRLFQSERRGVMDLDIRSLMLYDAEDNLSNYLLVNIDNTERNNALSKVHDFENFFSIISDYSKVGYAKINLLDHTGFAVRQWYRNLGESHDTPLADIIGIFSHMHPDDRKSVLDFYEKAKAGTERFFDGDLRIRPADGSDRWNWIHKSSMVTAYQSPNPRLELVEVNYDITVQKETEAELRAARDKAEESNRLKSAFLANISHEIRTPLNAIVGFSDLLMTVDDPAEQEEFRRTIQKNNTLLLQLFSDIIDLSKIDAGSFEYMSKPVCLYQFCAMMVQKMRNKVPEGVELQIDEDSPLDAWFSADSGYLNQVVTNFMSNAIKFTHRGTITVGYRIDARQQLEMFVEDTGIGISIENQEAVFDRFMKVDSFVQGTGLGLPLCKSIIEKMGGHIGVISELGKGSRFWFTLPAFSCIPTR

SEQ ID NO: 48399 - protein, 409 aa, Bacteroides fragilis
DTCEEILVTITRNKTRSLLTAFGVFWGIFMLVALMGGGQGMQEMMQAEFEGFATNSGFMASQKTGEAYKGFRKGRYWDIENADIERIRKKVKDIDVITPSIARWGSTAIYGEKKYDCSVKGLYPDYAKIENQDMAYGRFINDVDVREGRKVCVIGKRVYESLFNPGEDPCGKYVRVDGIYYQVIGMVCVRRNMNIQGRASEAVVLPFSTMQQAYNMGKRIDVICYTVKPGKKVSDLEPEIEAILKEAHYISPDDKQAVMKLNAEAMFSMMDNLFTGIHVLIWMVGLGTLLAGAIGVSNIMMVTVKERTTEIGIRRAIGARPKDILQQILSESMVLTTIAGMAGISFGVLILQLMEIGVNSGKDHYSHFQVSFGMAIGTCLLLVTLGLLAGLAPAYRAMAIRPIEAIRDE

SEQ ID NO: 48400 - protein, 384 aa, Bacteroides fragilis
MFDNLSERLERSFKILKGEGKITEINVAETLKDVRKALLDADVNYKVAKGFTDTVKEKALGQNVLTAVKPSQLMVKIVHDELTQLMGGETVEIDTKGQPAVILMSGLQGSGKTTFSGKLARMLKTKKNKRPLLVACDVYRPAAIEQLRVLAEQIDVPMYSEIDSKDPVSIAQNAIKEARAKGYDLVIVDTAGRLAVDEQMMNEIAAIKEAIQPNEILFVVDSMTGQDAVNTAKEFNERLDFDGVVLTKLDGDTRGGAALSIRSVVNKPIKFVGTGEKLDAIDQFHPARMADRILGMGDIVSLVERAQEQYDEEEAKRLQKKIAKNQFDFNDFLSQISQIKKMGNLKELASMIPGVGKAIKDIDIDDNAFKSIEAIIYSMTPGIH

SEQ ID NO: 48401 - protein, 379 aa, Bacteroides fragilis
MIHTNYTFHIFAVFNTHHIFNDENKKTIRQYEIMINTLTSLRFIFAIMVFGAHCYVIDNVFNTHFFKEGFVGVSFFFVLSGFIIAYNYQEKLKDNKIDKRTFWVARIARIYPLHWLTLFIAAILGSYVIASGTLDWLKHFLASLTLTNAYIPRADYFFSFNSPSWSLCCEQLFYICFPFLIPLAKNYKYLLSVFGIVAILMVVGMYFTPEDEIKGFWYVNPITRFPDFIVGMLLFQLYERLKNKNITVLQGSIIEISSIILFLIFYLYAADIPKVYRYSCYYWLPVAVILISFSLQKGIFSRILSNRFLVIGGEISYSFYLIHLFVLLTYSEWQKENNLHTEWYISVPILFSIIILLSLLSYYYFEKPMNKRVKTLLNR

SEQ ID NO: 48402 - protein, 336 aa, Bacteroides fragilis
MKVAIVGVSGAVGQEFLRVLDERNFPLDELVLFGSKRSAGTKYTFRGKQIEVKLLQHNDDFKGVDIAFTSAGAGTSKEFEKTITRYGAVMIDNSSAFRMDADVPLVVPEVNAADAKDRPRGVIANPNCTTIQMVVALKAIEELSHIKTVHVSTYQAASGAGAAAMDELYEQYRQVLANEPVTVEKFAYQLAFNLIPQIDVFTENGYTKEEMKMYNETRKIMHSDVKVSATCVRVPALRAHSESIWVETERPISIEEAREAFAKGEGLVLQDNPAEKEYPMPLFLAGKDPVYVGRIRKDLTNDCGLTFWIVGDQIKKGAALNAVQIAEYLIKEGNIG

SEQ ID NO: 48403 - protein, 389 aa, Bacteroides fragilis
MIQNSISDNRIVWLDVIRCVAMIMVIGVHCIDPFYISPTMRAIPEYTHWAAIYGSLLRPSVPLFVMMTGLLLLPVKKQPLGKFYKKRIYRVLFPFLIWSVLYSMFPWVTGVLGLPKEIIGDFFCYTQGQESQSLIDSLKDVAMIPFNFSHKENHMWYIYLLIGLYLYMPFFSAWIENADRKTKRAFLLIWIISLFIPYLKEYVANCLFERSGYVFGTDTWNEFGLFYYFAGFNGYLLLGHYVKKGNDWSLMKTFILCILMFAVGYYITYTGFSTTASNPNATETEMELFFTFCSPNVLLMTLATFLLLQKVVITNSTVIKVLANMTQCGFGIYMVHYFVVGPFFLLIGPSSLPIPLQVPLMAICIFLCSWAFTALIYKLMPQKAVWFMG

SEQ ID NO: 48404 - protein, 808 aa, Bacteroides fragilis
MKTSINKLCIAASILVTAAGISACVDDNKTLYDPEYKTPNPMEEISAPTGFDWSSTHAIKFNVEVNDEFDGQYYYTVEIVDKNPLEATTEEPYNTLAKGVARKGETYQTEVVSSKDTKYLYVRQTDPRGRDRIKQVEIDESTSHIQCSFTGTSAIKTRAFATTRGNNGGIDIPKRTEQSYDISRAIPVTSPSQVLQGGRAYIVTGNFSGKFTDTSLSNSNKATVYIQGTWELAQVTQDFLDIIVLKGGKINGKYLMLQNTSTLTIQSGAEVSLSDQLICNTYSTICNFGDLKTKNMKLNTNDILYNGHKTDITNSLDASQGGNIHNFGKLDVENTIKLNTPSIVYNAPECKIEAKTYEAAGSTNVNFGEMEFDTYDSGGAGGSLYNNCMLFVEHMKAGGIVYLDHGVIAEEKEDDEENELFEEADDIEFYDNAKVTLANGSMIKAKNIIAKSGLSVNGEGNETSLLKATEKVQIQNWDVRFNGRLCITGKISCSNPDMYQAGSEVTFSESPDVIITGCNGKAEVPDPAPEPSDPVFPIIVDDNHNYTYLFEDQWPLYGDYDMNDIVLEVKKRKISIDKHNKVTEFDLSVELRAVGAQKTIAAAIMFDEIPASAVTQAVTYADNYQPVSFELTDKNIEKGQEYAVVPLFDNAHTLMERPTGSFVNTISGSDNNQKNTQTIHFTLRFDSSVAPSSDALNINNLNIFIITDRGSKRKEIHVAGYRPTLLANTELFGGNNDASSLNGKKYYISKDNLAWGIMVPTQFKWPLEYTQIQKAYSQFAGWVTTGGADNKKWWNDFDNTKVFQTNKN

SEQ ID NO: 48405 - protein, 929 aa, Bacteroides fragilis
MDNDIERFRQMASMAQLGWWEADFTAGHYVCSEYLCDLLGLEGNTISFTDFRKRVREDYQEQIVREFNASIHREFYEQTFPIHSKEGIVWLHTRLGEREEIPGRGVVSFGIIQRVEAPNDTSERVLERVNDLLYRQNSISHSLLRFLKDDSVDLCIMEILKDILDLFHGGRVYIFEYDEYYRYQDCTYEVVAEGVLPEIDSLQRIPTDSLPWWRQQTLSGKPVILDSLDQLPKHAKAEYAILSRQNIKSLMITPLIAGEHVWGYMGIDLVKNYRNWNNEDFQWLSSLANIISICIELRKAKDEAVRERSFLRNLFRFMPMGYIRMTMVRDAAGLPCDYRIADANDLSSELIGMSLSDYVGCLASELHADFKAKVDYLLDVMEGSVHKETDVYFHRTQRSSHCIVYSPEKDEVVALFLDSTETIRAHRALDRSEKLFKNIFANIPAGVEIYDKDGNLLDLNNWDMETFGVKDKADVMGVNFFENPNVPLEIRERVRNEDLVDFRLNYSFNKASDYYHSDKSNIIELYTKVSKLFDSQGNFNGYVLINIDNTERIDAINRIRDFENFFLLISDYAKVGYAKLNLLSKRGYAIKQWFKNMGETEDIPLSSVVGVYDKMHPEDRQKVFDFYEKVLAGEEKDFRSEMRILKPGATNEWNWVRMNVVVTKFEPEHGEVEIIGINYDITELKETEAMLIEAKEKAETMDRLKSAFLANMSHEIRTPLNAIVGFSGLLVDTEDMEERCEYIKIVQENNDLLLQLISDILDLSKIEAGTFEFTYGETDVNMLCEDIVRSSQIKVPQGVELVFDPHPSDCTVISDRNRLHQVISNFVNNALKFTSSGSIHVGYEKKEEGVEFYVSDTGIGISKEQLTHIFERFVKLNSFIHGTGLGLSICKSIVEQLGGVIGVDSEEGKGSRFWFTIPYINSEQSIVND

SEQ ID NO: 48406 - protein, 344 aa, Bacteroides fragilis
MLLLTAYSPYINPEVHPVQSCLGLTFPIFLVINFCFLIFWLIVRYRFALVPLLGFLLCYPQLRTYMPVNPGTAGQPENSIKLLSYNIMSFGNMKKENGQNPILNYIKNSNADIVCMQEYAGSETAKIHLSNKEIRQALKDYPYHNIKQVGKTGAGSQLACYSKFPILSARMLDYRSNYNGSMVYEIKIGKDTVLLINNHLESNKLTREDKVVYEDMLKDPKAGKVKSGVRQLVNKLAEASAIRSAQARTIAQEIAHSPYPSVIVCGDFNDSPISYAHRVISQDMDDAFTESGCGLGISYNQNKFYFRIDNILVSKNLKASGCTVDNSIKDSDHYPIWCYITLPD

SEQ ID NO: 48407 - protein, 379 aa, Bacteroides fragilis
MNALKNLSLILLLSLAFTGCHNKSSKINDFNLLLYAPEYASGFDIKGAGGKESVLITVRNPWQGADSVTTWLFIVRNGEEVPEGFAGQVLKGDAKRIVAMSSTHIAMLDAIGEVRCITGVSGIDYISNPDIQARRDSIGDVGYEGNINYELLLSLDPDLVLLYGVNGASAMESKLEELDIPFMYVGDYLEESPLGKAEWMVVLSEVTGKREKGEKAFAAIPVRYNALKKKVADSTLGTPSVMLNVPYGDSWFMPSTQSYVARLITDAGGRYIYQKNTGNASIPIDLEEAYLLASDADMWLNVGMANSLDDLKASCPKFTDTRCFKNGEVYNNNARTNTAGGNDYYESAVVNPDIVLRDLVKIFHPELVQEECVYYKQLK

SEQ ID NO: 48408 - protein, 537 aa, Bacteroides fragilis
MITVSNVSVQFGKRVLFNDVNLKFTSGNCYGIIGANGAGKSTFLRTIYGDLDPTTGNITLGPGERLSVLSQDHFKWDAFTVMDTVMMGHTVLWDIMKQREALYAKEDFTDEDGLKVSELEEKFAELDGWNAESDAAMLLSGLGVKEDKHYTLMGELSGKEKVRVMLAQALYGNPDNLLLDEPTNDLDMETVTWLEEYLSNFEHTVLVVSHDRHFLDSVCTHTVDIDYGKINLFAGNYSFWYESSQLALRQQQNQKAKAEEKKKELEEFIRRFSANVAKSKQTTSRKKMLEKLNVEEIKPSSRKYPGIIFTPEREPGNQILEVSGLSKKTEDGVVLFNDVNFNVEKGDKIVFISRNPRAMTAFFEIINGHMKPDAGHFNWGVTITTAYLPLDNTEYFNTDLNLVDWLSQYGEGNEVYMKGFLGRMLFSGEEVLKKVSVLSGGEKMRCMIARMQLRNANCLILDTPTNHLDLESIQAFNNNLKTYKGNILFSSHDHEFIQTVANRVIELTPNGIIDKMMEYDEYITSDHIKELRAKMYK

SEQ ID NO: 48409 - protein, 775 aa, Bacteroides fragilis
MLLICVHTAAQQKVKLEVLEKGTEQPIIAANVIYADNEALRNPQYAITNTSGQAELKLPSKGICYYKVTYIGYVPVTGKIGGTQDEKVIYMKEDDLGINEVVVTGSRTARPIKMSPVTTQVLGGKALVDAGYSNLQQALQQETPGLNIQKVGFGNEISMQGLDARHVLFLMDGERMTGDMAGNLDYERFNLHAIDRVEIVKGASSTLYGSRAAGAVINLITKKTDKPLSIDAGIRYGQMNERNYKHPQPKDFLYMFEQNADRPNLQSWVSAGFKAGKFTSQTDVWYSESDAFYMYQAENDKKVYTKEANPFLPHDIIVVSNAVRPPMGIEGKEHITVSQKLYYNPNPNLSVLVYGSSFFMNTYDLIQDMTFSQARDWTAGTKVTYHVKDWFSVTGSLHADFYDRFKRHERIDKRQKDYESSIYQPRLTVTSNYFNGHSLILGMEHTSDELTSDRFSGNANHDLKTRALKETEYFLQDEWTINPRWMISVGIRTNFSKAFGFMGMPKVAAKYSPDKHWSLRANYSMGYRSPSIKELFFNWDHLGMFMIRGNENMRPEKNNYFSLGAEYSNDRLFVSGTAYGNYFRDKIEGVWRIYDMQYNFEYTNLSQQRQLGLEVQTRWSVLDCLTLNGTYSFVDVSKNKGIQVNTTSPHAATASMNYKYMKKNYRLNAVFSASYMGGKKFDVQDRVFVKEENKSYDAYFRCDLPQYVLCNLSVSQTFCNKVKLTLGMDNLFNYVPKTLGSGITMFNVPATAGARGWVQVEFMLDDVINSLKKKK

SEQ ID NO: 48410 - protein, 170 aa, Bacteroides fragilis
MRKEDKNTIIEQIAATVQEYGHFYLVDTTAMNAAATSELRRACFKADIKLMVVKNTLLHKALESIEGDFSPLYDSLKGTTAVMFCNVANAPAKLIKDKSKDGIPGLKAAYAEESFYVGADQLDALVAIKSKNEVIADIVALLQSPAKNVISALQSGGNTLHGVLKTLGER

SEQ ID NO: 48411 - protein, 749 aa, Bacteroides fragilis
METIYLCIIIFLFVLAVFDLMVGVSNDAVNFLNSAVGAKAASFKTILFIAGAGIFIGASLSNGMMDIARHGIYQPEHFYFAEIMCILLAVMLTDVVLLDVFNSMGMPTSTTVSMVFELLGGTFALALIKVHNSDTLGLGDLINTDKALSVIMAIFVSVAIAFFFGMLVQWLARMVFTFNYKSNIKYSIALFGGIASTAIVYFMVIKGLKDSSFMTPENKQWVQENTMMLVSCFFVISTILMQILHWLKVNVFKVVVLLGTFALALAFAGNDLVNFIGVPLAGYSSFIDYTANGTSVGPDGFLMTSLMGSAKTPWYFLIGAGAVMVYALCTSKKAHAVIKTSVDLSRQDEGEENFGSTPIARTLVRFSLTLANGISRITPPSAKRWIDTRFRKDEAIIADGAAFDLVRASVNLVLAGLLIAVGTSLKLPLSTTYVTFMVAMGTSLADRAWGRDSAVYRITGVLSVIGGWFITAGAAFTICFFVAMVIHFGGSIAIIALIGLAAFTLIRSQLMYKKKKEKEKGNETLKQLMQATSSHEALELMRKHTREELSKVLEYAEQNFELTVTSFLHENLRGLRRAMGSTKFEKQLIKQMKRTGTVAMCKLDNHTVLEKGLYYYQGNDFASELVYSISRLCEPCLEHIDNNFNPLDAIQKGEFGDVAEDITYLIQQCRQKLEGNNYSNLEEDLHRANDLNSQLSHLKRQELQRIQSQTGSIKVSMVYLTMIQEAQNVVTYTINLMKVSRKFQIETDI

SEQ ID NO: 48412 - protein, 353 aa, Bacteroides fragilis
MDIAALLSGGVDSSVVVHLLCEQGYKPTLFYIKIGMDGAEYMDCSAEEDIELSTAIARRYGLALEVVDLHREYWDNVAAYAIEKIRKGQTPNPDVMCNKLIKFGCFEQQVGKDFDLTATGHYATTLQLGGKTWLGTAKDPIKDQTDFLAQIDYLQVSKLLFPIGGLMKHEVREIALQAGLPSARRKDSQGICFLGKINYNDFVRRFLGEKEGAVIEFETGKKIGTHRGYWFHTIGQRKGLGLGGGPWFVVKKDIQDNIIYVSHGYDAEQQYGYEFRMKDFNFITDNPWEGSTGEEEVTFKIRHTPEFIKGRLLHDEEGYRIISSEKLQGIAPGQFGVIYDAESRVCFGSGEIG

SEQ ID NO: 48413 - protein, 713 aa, Bacteroides fragilis
MPDYIEELNESQRAAVLYGDGPSLVIAGAGSGKTRVLTYKIAYLLENGYNPWNILALTFTNKAAREMKERIARQVGEQRARFLWMGTFHSVFSRILRAEASHIGFTSQFTIYDSADSKSLIRSIIKEMGLDEKTYKPGSVQARISNAKNHLVSPSGYAANKEAYEGDLAAKMPAIRDIYSRYWERCRQAGAMDFDDLLVYTYILFRDFPDVLARYREQFRYVLVDEYQDTNYAQHSIVLQLTKENQRVCVVGDDAQSIYSFRGADIDNILYFTKIYPDTKVFKLEQNYRSTQTIVRAANSLIKKNERQIPKEVFSEKERGEAIGVFQAYSDVEEGDIVTNKIAQLRREHDYEYSDFAILYRTNAQSRVFEEALRKRGMPYKIYGGLSFYQRKEIKDIIAYFRLVVNPNDEEAFKRIINYPARGIGDTTVGKIITAATDNNVSLWTALCDPITYGLSINKGTHTKLQDFRALIEQFMADVTVKNAYEIGTEIIRQSGIINEVCQDNSPENLSRKENIEELVNGMNDFCAMRQEEGNTNVSLIDFLSEVSLLTDQDSDKEGDGEKVTLMTVHSAKGLEFRNVFVVGMEENLFPSGMAGDSPRAMEEERRLFYVAITRAEEHCFLSFAKTRFRYGKMEFGSPSRFLRDIDTRFLQLPQEAALGRSIDEGAGRFRREMEEGYSRRSSSERFSARPSADRPERERPKGRSSRRRSPVT

SEQ ID NO: 48414 - protein, 621 aa, Bacteroides fragilis
MIPYLQVDNLTKSFGDLVLFENISFGIAEGQRIGLIAKNGTGKTTLLNILSGKEGYDSGNIVFRRDLRVDYLEQDPQYPEELTVLEACFHHGNSTVELIKEYERCMETEGHPGLDDLLVRMDHEKAWEYEQKAKQILSQLKIRNFDQQVKHLSGGQLKRVALANALITEPDLLILDEPTNHLDLDMTEWLEEYLRRTNLSLLMVTHDRYFLDRVCSEIIEIDNRQVYQYKGNYSYYLEKRQERIEAKSVEIERANNLYRTELDWMRRMPQARGHKARYREDAFYELEKVAKQRFNNDNVKLEVKASYIGSKIFEADHLYKSFGDLKILEDFSYIFARYEKMGIVGNNGTGKSTFIKILMGQVQPDSGTLDIGETVRFGYYSQDGLQFDEQMKVIDVVQDIAEVIELGNGKKLTASQFLQHFLFTPETQHSYVYKLSGGERRRLYLCTVLMRNPNFLVLDEPTNDLDIITLNVLEEYLQNFKGCVIVVSHDRYFMDKVVDHLLVFNGQGDIRDFPGNYSDYRDWKEAKSQKEKEAEKPQEEKTARVRLNEKRKMSFKEKREFEQLEKEIAELETEKLQIEELLCSGTLSVDELTEKSKRLPEVNDLIDEKTMRWLELSEIES

SEQ ID NO: 48415 - protein, 316 aa, Bacteroides fragilis
MAKIAKKLTELIGHTPLMELSGYSRKYGLQENIVAKLESFNPAGSVKDRVALSMIEDAEERGVLQPGATIIEPTSGNTGVGLAMVATIKGYRLILTMPETMSLERRNLLKALGAQIVLTNGQKGMAGSIAKAEELKKSIPGSVILQQFENPANTEVHARSTGEEIWQDTDGEVAVFVAGVGTGGTVCGVARALKKHNPNVYIVAVEPASSPVLEGGKAASHRIQGIGANFVPGIYDASVVDEVMPVPDDEAIRGGRELASTEGLLAGISSGAVVYAARQLAGRPEFKGKMIVTLLPDTGERYLTTELFAFDAYPLD

SEQ ID NO: 48416 - protein, 597 aa, Bacteroides fragilis
LFKYRVYEEKTYPIVTTYFLFVLIFVLQKPIFMGYYHTLYNKVSWTDYFSVMGHGLPLDFSLAGYLTAIPGLLLIASVWIQPAVIRQIRRGYFMIIAILLSCIFIGDLGLYEYWGFRLDATPLFYLFSSPKDALASVSIWVVMAGLAAMAVYAALLYLIFYRVLIYQKQPVKIPFHRLSVSGVLLLATALLFIPIRGGFTVSTMNLSKAYFSSNQRLNHAAINPCFSLMESLSRQDNFDKQYRFMPAEEADKLFAELKDQPVAPTDSIPQLFTTERPNVILIILESFSSKLMETLGGESNVAINMDQFGREGVLFTHFFANSFRTDRGLAAIISGYPAQPTTSIMKYPKKTQHLPSIPGSLKKAGYDLQYYYGGDADFTNMRSYLIQAGIDNIVSDKDFPLSERLSKWGAHDHVVFNRLLDDLKQHTPQKPFMKILQTSSSHEPFEVPFRRLENPRLNAFAYADSCAGDFVRQFKETPLWKNTVIVLVPDHLGAYPQDIDNLTVDRYRIPLIFIGGAVKEPRQIGTYGSQIDIAATLLGQLGLPHEEFIFSKNMLNPNSPHFGFFTFPNAFGMMTPENEVVFNCESNSIVSDEGTHK

SEQ ID NO: 48417 - protein, 380 aa, Bacteroides fragilis
  MISC_FEATURE (294)..(294): X=any amino acid
KNGKTPIMGRITINGTQAGFSCKKEVSLALWDVKTNRAKGKSEEARTLNQELDNIKAQITRHYQYICDHDSFVTAKKVYNRYVGFSEECHTLMNLFREQLEPYKKKIGIEKAESTYCGLVADYKSLLLFMKSKKNAEDIVIEELEKSFIEDYYNWMLGTCALANSTVFGRVNTLKWLMYIAQEKGWIRVHPFASFECMPEYKRRSFLSEEELQRIIHIEPRYKRQRAMRDMFLFMCFTGLSYVDLKAITYDNIHTDSDGGTWLMGNRIKTGVAYVVKLLPIAIELIEKYRGYGXKERLPECVFPVGEYNAMRLSLGIIGRKCNSRGEVTPHIGRHAFAVLAILKGMLLETLQKVFGHKSITYVLRIHSLVRRRRGNLFLE

SEQ ID NO: 48418 - protein, 415 aa, Bacteroides fragilis
MNLNDTFAAVQAAGRHLALLPDDRINQILNAVAEAALEQTSYILSENRKDLERMSPDNPKYDRLRLTEERLRGIASDIRNVATLPSPLGRILKESIRPNGMRLTKISVPFGVIGIIYEARPNVSFDVFSLCLKSGNACILKGGSDADYSNRAIVEVIHQVLRQFNIDTHMVELLPADREATRELLHAAGYVDLIIPRGSSALINFVRQNATIPVIETGAGICHTYFDEYGDTAKGAAIIHNAKTRRVSVCNALDCVIVHESRLSDLPLLCEKLKADKVIIYADPSAYQALEGHYPAGLLKPATPESFGTEFLDYKMAIKTVNSFENALGHIQEYSSRHSESIVTENPERAALFTRMVDAACVYTNVSTAFTDGAQFGLGAEIGISTQKLHARGPMGLEEITSYKWIIEGDGQTRQ

SEQ ID NO: 48419 - protein, 537 aa, Bacteroides fragilis
MKNNCLICSLLFASGIQNAWGTQITDRKANPDQAKPNIILIMCDDMGFSDLSCYGGEVHTPHIDFLAENGIRFSQFKNTGRSCPSRAALLTGRYQHEVGMGWMTAVDEHRPGYRGQISDRYPTIAEVFRENGYHTYMSGKWHVTVEGAFTQPNGSYPVERGFEKYYGCLSGGGSYYTPKPVFSGLQRITEFPKDYYYTTAITDSAVSFIRQHPVDEPMFMYLAHYAPHLPLQAPKERVEACREKYKAGYDVLRKQRFERIRRNGLIDIEGELPVFEKEFGGKRPAWNSLTPQQQERWITEMATYAAMIEIMDDGIGEVIKATKEKGIFDNTIFLFLSDNGATNEGDMITQLRADLSNTPFRSYKQWCFQGGTSAPLIIMYGGGQPDGKKEAVRHEFTHIIDLFPTCLDMASIEYPREFRNHAIDAPGGRTILPALKGKKLSKRDLFFEHQTSCGIISGDWKLVRANGKQPWELFNLLQDPFEQNDLSARYPDRVKTLEKKWNQWAEKQQVFPFEYRPWTKRINYYKSLYPDQSGKDL

SEQ ID NO: 48420 - protein, 315 aa, Bacteroides fragilis
MGKIAKKLTDLVGNTPLLELSNYNASNGLKARVVAKLEYFNPAGSVKDRISLAMVEDAEAKGTLKSGATIIEPTSGNTGVGLAFVAAAKGYKLILTMPDTMSMERRNLLKALGAELVLTPGANGMKGAIAKAEELRAATPGSVILQQFENPANPAVHVRTTGQEIWRDTDGKVDIFVAGVGTGGTVSGVGAALKEHNPAVRIVAVEPVDSPVLSGGAPGPHKIQGIGAGFIPKTYHAAVVDEIRQVGNDDAIRTSRELAAKEGLLVGISSGAAVYAATELAKLPENEGKLIVVLLPDTGERYLSTILYAFEEYPL

SEQ ID NO: 48421 - protein, 491 aa, Bacteroides fragilis
MEHQLTIYNTLDRKKELFVPLHAPHVGMYVCGPTVYGDAHLGHARPAITFDVLFRYLTRLGYKVRYVRNITDVGHLEHDADEGEDKIAKKARLEQLEPMEVVQYYLNRYHKAMEALNVLPPSIEPHASGHIIEQIELVKKILDAGYAYESQGSVYFDVAKYNKDYHYGKLSGRNLDDVLNTTRELDGQEEKHNPADFALWKRAQPEHIMRWPSPWGDGFPGWHAECTAMGRKYLGEHFDIHGGGMDLIFPHHECEIAQSVASQGDDMVHYWMHNNMITINGTKMGKSLGNFITLNEFFSGSHKLLTQAYSPMTIRFFILQAHYRSPVDFSNEALQAAEKGMSRLMEAVDSLEKITPAATSNVDVKSLRTKCFEAMNDDLNTPIVISHLFDGAKMINNIIAGNNTISADDLKNLKEVFHTFCFDILGLKEEIGSSDGREAAYGKVVDMLLEQRVKAKANKDWATSDLIRNELTALGFEIKDTKDGFEWKLNK

SEQ ID NO: 48422 - protein, 1294 aa, Bacteroides fragilis
MTYVDNFLKFIFVSSCRHCNFMASNYQPITMQDFVHLHVHTQYSLLDGQASVSALVDKAMKDGMKGIAVTDHGNMFAIKEFTNYVNKKNGGPKGEIKDLKKRIAAIEAGEVECADKDAEIADCKAKIADAEGRLFKPIIGCEMYVARRTMDKKEGKPDQSGYHLIVLAKNEKGYHNLIKLVSRAWTKGYYMRPRTDRNELEKYHEGLIICSACLGGEVPKKITQGLLAEAEEAIQWYKNLFGDDYYLEMQRHKATVPKANHEAYPLQVNVNKHLIEYSKKYNVKLICTNDVHFVNEEHAEAHDRLICLSTGKDLDDPNRMYYTKQEWMKTKAEMNELFADVPEALSNTLEILDKVEYYSIDHAPIMPTFAIPEDFGTEEGYRQKYTEKDLFDEFTQDENGNVVLSEEAAKDKIKRLGGYDKLYRIKLEADYLKKLTFDGAKKFYGDPLSPEVKERLVFELHIMKTMGFPGYFLIVQDFIAAGRNMGVSIGPGRGSAAGSAVAYCLQITKIDPIKYDLLFERFLNPDRISLPDIDIDFDDDGRGEVLRWVTEKYGQEKVAHIITYGTMATKLAIKDVARVQKLPLAESDRLAKLVPDKIPDKKLNLKNAIEYVPELQAAEASPDPLVRDTMKYAKMLEGNVRGTGVHACGTIICRDDITDWVPVSTADDKETGEKMLVTQYEGSVIEDTGLIKMDFLGLKTLSIIKEAVENIRLSKGMELDIDSISIEDPATYKLYSDGRTIGTFQFESAGMQKYLRELQPSTFEDLIAMNALYRPGPMDYIPDFIDRKHGRKPIEYDIPVMEKYLKDTYGITVYQEQVMLLSRLLADFTRGESDALRKAMGKKLRDKLDHMKPKFVEGGRKNGHDPKVLEKIWADWEKFASYAFNKSHATCYSWVAYQTAYLKANYPAEYMAAVMSRSLSNITDITKLMDECKMMGVQTLGPDVNESNLKFTVNRNGNIRFGLGAVKGVGEAAVQSIMEERKENGPFKGIFDFVQRVNLNACNKKNMECLALAGGFDSFPELKREQYFAVNSKGETFLETLMRYGNRYQADKAAAVNSLFGGDNVIDIATPEILPAERWNDLERLNKERELVGIYLSAHPLDEYAIVLEHVCNTHMSELDDKSALAGREITMGGIVTSVRRGISKNGNPYGIAKIEDYSGSAEIPFFGNDWVTFQGYLGEGTFLFIKARCQPKQWRPDELDVKITSMELLPDVKEQLIEKITILIPLAELNSALVTELASLTKEHPGNTELYFKVTDTEGKMYVDLISRPVKLSVGRELISYLKERPELAFHIN

SEQ ID NO: 48423 - protein, 866 aa, Bacteroides fragilis
MNDEIQREALFYGGVKVETRTAHDDSRRQIEDIRYFIRQKVDLLIVAANEGMALTPVVEEAFDKGIPVIMVDRRILSDKYTAYIGADNYELGKAVGNYIAHRLKGRGKVVELSGLVGSTPAIERHQGFMSAISQYPDMTLLASEDAGWLQQPAEAKMDSLLQRFPEIDAVYGMNDRMAAGAFRAAGRRGREKEMIFVGIDALPGKGNGVELVLDSVLDATFIYPTEGDKVVQLAMDILEKKPFERETKLKTAVVDAVNAHVMELQTNHIGELDGKIETLNDRVGIYLSRVATQRIVLYGGLIILLLIVGLLIVVYKSLRSKNRLNRELSRQKEQLEEQRDQLIELSHQLEEATHAKLVFFTNISHDFRTPLTLVADPVEQLLADPSLEGDRRRMLLLVQRNVQILLRLVNQILDFRRYETGKMEFTPVPLDLLQCFVEWNDSFQAAARRKHIHFSFDSMPDTDYHTQADAEKLERIYFNLLANAFKFTPENGKVTVRLAALKKDSVPFFRFTVANTGSLISAEHIRSIFDRFYKIDRHHTGSGIGLALVKAFVEIHGGSISVESDERLGTVFTVDLPVRTCEEGACVVTAPMEESAPDRVDSLLREDEAENLNDPSKPSVLVIDDNADIRAYVHTLLNSEYSIIEAADGTEGIRKAMKYVPDVIISDVMMPGIDGIECCRRLKGELQTCHIPVILLTACSLDEQRIQGYAGGADSYISKPFSSQLLLTRIRNLIESRQRMKQFFGDRQTLAKEDICDMDKDFVERFKSLIEVKMGDSELNVEDLGKEMGLSRVQLYRKIKSLTNYAPNELLRMARLKKAASLLASSDMTIAEVGYEVGFTSPSYFAKCYKEQFGESPTEFLKRSGL

SEQ ID NO: 48424 - protein, 561 aa, Bacteroides fragilis
MKREVKFSLVFRDMWQSAGKYVPRVDQLVKVAPAIVEMGCFARVETNGGGFEQVNLLFGENPNKSVRAWTKPFHEAGIQTHMLDRALNGLRMSPVPADVRKLFYKVKKAQGTDITRTFCGLNDVRNIAPSITYAKDAGMISQCSLCITHSPIHTVEYYTNMALELIKLGADEICIKDMAGIGRPVSLGKIVANIKAAHPDIPIQYHSHAGPGFNMASILEVCEAGCDYVDVGMEPLSWGTGHADLLSVQAMLKDAGFQVPEINMEAYMKVRALIQEFMDDFLGLYISPKNRLMNSLLIAPGLPGGMMGSLMADLETNLESINKYKAKHNLPFMTQDQLLIKLFNEVAYVWPRVGYPPLVTPFSQYVKNLSMMNVIAMEKGKERWGMIADDIWDMILGKAGRLPGKLAPEIIEKAEREGRKFFEGNPQDNYPDDLEKYRKLMKEKKWETGEDDEELFEYAMHPAQYEAYKSGKAKEDFLADVAKRRAEKEQVPTEEAKPKTLTVQVDGQAYRVTVAYGDTELPVAPASQPSAAAGEGKEVLSPLEGKFFLVKNAQETPLKVG

SEQ ID NO: 48425 - protein, 396 aa, Bacteroides fragilis
MSKITKQQNGVLSVPDVPTIPFITGDGVGAEITPAMQAIVDAAVDMSYGGARRIEWKEVLAGERAFRATGSWLPDETMEVFKEYLIGIKGPLTTPVGGGIRSLNVALRQTLDLYVCLRPVRWFRGVVSPVKEPEKVNMYIFRENTEDIYAGIEWEAGTPEAKKFYRFLHEEMGVSKVRFPETSSFGVKPVSREGTERLVRAACRYALQHELPSVTLVHKGNIMKFTEGGFKKWGYELAEREFADALASGKLVIKDCIADAFLQNTLLIPEEYSVIATLNLNGDYISDQLAAMVGGIGIAPGANINYDSGHAIFEATHGTAPNIAGKNVVNPCSLILSAVMMLEYIGWQEPADLIVEALEASFAEGKATNDLARFMHKGQPLSTSEFTREIINRIKN

SEQ ID NO: 48426 - protein, 243 aa, Bacteroides fragilis
RYFIYLAYDGTHYHGWQIQPNGISIQECLMKALATFLRKDTEVIGAGRTDAGVHASLMVAHFDYEGEPLDVDKVAEKLNRLLPQDISVYKVCRVKPDAHARFDATARTYKYYITTVKFPSIVNIGIGYINPLDFQKMNEAALTLFHYSDFTSFSKLHTDVKTNICKIMHAEWTQEDEYTWVFTIQADRFLRNMVRAIVGTLLEVGRGKLSVDDFRKIIEQQNRCKAGTSAPGNALFLVNVEYP

SEQ ID NO: 48427 - protein, 263 aa, Bacteroides fragilis
MSTNVSDFSKSEAAERPAFITNLTELIDFRDKVNNGEDFKGKQIIQVCTIEDLKDWTPIGTMEHPFRGIYSGQNEVFKNITVQSNGVAGLFGCIEGATIEDVCIRSGSVTGNKAGGICGHIRFNGTIQRCVNGASVKGIGENAYAGGICGDSWGGTLIDCANNGEIANESKSVSALTAGIAGASYQGIIDKCTNKGRVSPIGGHCGGICASNNEGTIRYSDNGGVIEGGANNGSICGWNNGKVEKSSSSIDTAPIGDGYPMVV

SEQ ID NO: 48428 - protein, 423 aa, Bacteroides fragilis
MKVDVLLGLQWGDEGKGKVVDVLTPKYDVVARFQGGPNAGHTLEFEGQKYVLRSIPSGIFQGDKVNIIGNGVVLDPALFKAEAEALEASGHNLKERLHISKKAHLILPTHRILDAAYEAAKGDAKVGTTGKGIGPTYTDKVSRNGVRVGDILHNFEQKYAAAKARHEQILKGLNYEYDLTELEKAWFEGIEYLKQFQLVDSEHEINGLLDNGKSILCEGAQGTMLDIDFGSYPFVTSSNTVCAGACTGLGVAPNKIGDVYGIFKAYCTRVGSGPFPTELFDKTGDQICTLGHEFGSVTGRKRRCGWVDLVALKYSIMVNGVTKLIMMKSDVLDTFETIKACVAYKMNGEEIDYFPYDITDEVEPIYVELPGWQTDMTKMQSEDEFPEEFNAYLSFLEEQLGVQIKIVSVGPDREQTIIRYTEE

SEQ ID NO: 48429 - protein, 278 aa, Bacteroides fragilis
MNHVTTYIRQALHDIYPPGELRSLTKIICCDLLGQDAIDYYLGKDITLSANEQCDLESIVERLKKNEPIQYIQGETCFYGSMFRVAPGVLIPRPETEELVDLIVKEAATGTRLLDIGTGSGCIAISLAKHIPQAVVTAWDVSEEALAIAGENNRELKAGVHFEKMDVLSAEPVGDDQYDMIVSNPPYVTESEKNEMEPNVLDWEPRLALFVPDNDPLRFYRRIASLGRKMLRLHGRLYFEINRAYGEEVLQMLHEQGYEELRLIKDISGNDRIVTAKR

SEQ ID NO: 48430 - protein, 430 aa, Bacteroides fragilis
MNFVEELRWRGMVHDMMPGTEELLAKEQVTAYVGIDPTADSLHIGHLCGVMILRHFQRCGHKPLALIGGATGMIGDPSGKSAERNLLDEETLRHNQACIKKQLAKFLDFESDAPNRAELVNNYDWMKEFTFLDFAREVGKHITVNYMMAKESVKKRLNGEARDGLSFTEFTYQLLQGYDFLHLYETKGCKLQMGGSDQWGNITTGTELIRRTNGGEAYALTCPLITKADGGKFGKTESGNIWLDPRYTSPYKFYQFWLNVSDADAERYIKIFTSLDKAEIDGLIAEHNEAPHLRVLQKRLAKEVTVMVHSEEDYNAAVDASNILFGNATSDALKKLDEDTLLAVFEGVPQFEISRDALAEGVKAVDLFVDNAAVFASKGEMRKLVQGGGVSLNKEKLVAFDQVITTADLLDEKYLLVQRGKKNYYLIIAK

SEQ ID NO: 48431 - protein, 413 aa, Bacteroides fragilis
MGFLIYISETVVVKYLYIAEALMLLLMLYLILFYRKIVKPMNTIGSGMELLREQDFSSRLSHVGQQEADRVVNVFNRMMEQLKNERLRLREQNHFLDLMINASPMGVIIMTLDEEVSQLNPMAMKMMGVRPEEAEGRKLSEIDSPLALELAAIPNGETSTVRLNDSSIYKCTHSSFVDRGFQHPFYLMEGLTDEVMKAEKKAYEKVIRMIAHEVNNTTAGITSTLDTVEQALSESEGMEDICDVMRVCTERCFSMSHFITRFADVVKIPEPRFTPTNLNDLAFTCKRFMEGMCNDRNIRLQLICDESLDDVKLDASLFEQVLVNIIKNAAESIGQDGQIIIRTSLPTAIEVVDNGPGISKETEAKLFSPFFSTKPNGQGIGLIFIREVLSRHGCTFSLRTYADGLTRFRILFP

SEQ ID NO: 48432 - protein, 134 aa, Bacteroides fragilis
MEKYIYELTLKVRDYECDLQGIVNNANYQHYLEHTRHEFLSSVGVSFAKLHEEGVDPVVARINMAFKTPLKSGDEFVSKLYMKKEGIKYVFYQDIFRKSDDKVVVKSTVETVCVVNGRLSDSELFDQIFAPYLQ

SEQ ID NO: 48433 - protein, 476 aa, Bacteroides fragilis
MATTDFIAAIELGSSKIAGIAGKKNSDGSIQVLAYAREDSSSFIRKGVIYNLDKTAQSLTSIINKLEGALNNSIAKIYVGIGGQSLRTVRNVVSRDLEEETIISQELVDSICDENLEIPLIDMDILDVAPQEYKIGNNLQADPVGVAGSHIEGRFLNIVARASLKKNLERCFEQAKIEIADLLISPLVTADAVLTESERRSGCALIDFGADTSTISIYKNNILRFLTVLPLGGNSITHDLVSLQMEEEEAERLKIRYGNAFYEEEEGEEPATCQLEDGNRTIELGKLNNIIEARTEEIIANVWNQIQLSGYDDKLLAGLIITGGAANLKDLDEVLRKRSKIEKVRNARFVRNTIHADEDVVKKDGTQNTLFGLLIAGNENCCLLETPAPQPHIQPQPQPEPVNMFEEDESLKEQEAAARAAKKKKEEEEKKRKEEEKQRKLEEKKRREEERRNKPNWFKSTFDKLSNEIFSDEDMK

SEQ ID NO: 48434 - protein, 254 aa, Bacteroides fragilis
MEAFGRFLDILDELRVKCPWDRKQTNESLRPNTIEETYELCDALMRNDKKDICKELGDVLLHVAFYAKIGSETGDFDMKDVCDKLCEKLIFRHPHVFGEVKAETAGQVSENWEQLKLKEKDGNKSVLSGVPAALPSLIKAYRIQDKARNVGFDWEEREQVWDKVKEEIAEFQVEVANMDKDKAEAEFGDVMFSLINAARLYKINPDNALERTNQKFIRRFNYLEDHTIKEGKNLKDMSLDEMDAIWNEAKKKGL

SEQ ID NO: 48435 - protein, 354 aa, Bacteroides fragilis
LTLIKGPLENIILKKEVDSETKEDLYIMKQNTERLLNLTNQLLDFRKTETRGFRLNFTECDVVAVLRETYFRFTSLAKQKGLDFILELPQECFMADVNQEALTKIISNLLNNGVKYASTYLRISLETDEKVFHIRTFNDGEMIPDTMKEEIFKPFVRLDKEDEVTTGTGIGLALSRSLAELHQGSLMMEKGEEVNCFCLTLPVNQDSTITLSAENVSQVEENSCGWEQEETDTKEKKPMILVVEDNPDMLAFIRKQLTTEYSVLTAMNGIEALAVLDNHYVNLVVSDVMMPQMDGFELCKTIKSDLSYSHIPVVLLTAKTNIQSKIEGLELGADAYIEKPFSVEYLLANISSLI

SEQ ID NO: 48436 - protein, 419 aa, Bacteroides fragilis
MQTIDNFNFAGKKAFVRVDFNVPLDENFNITDDTRIRAALPTLKKILADGGSIIIGSHLGRPKGVADKFSLKHIVKHVSELLGVEVQFANDCMGEEAAVKAAALQPGEVLLLENLRFYAEEEGKPRGLAEDATDEEKAAAKKAVKESQKEFTKKLASYADCYVNDAFGTAHRAHASTALIAKYFDTNNKMFGYLMEKEVKAVDKILNDIKRPFTAIMGGSKVSSKIEIIENLLNKVDNLIITGGMTYTFTKAMGGQIGLSICEDDKLDLARELLQKAKDKGVNLVLAVDAKIADAFSNDANTKFCPVNEIPDGWEGLDIGPKSEEIFAEVIKNSKTILWNGPTGVFEFENFTHGSRSVGEAIVEATKNGAFSLVGGGDSVACVNKFGLANGVSYVSTGGGALLEAIEGKVLPGIAAIQE

SEQ ID NO: 48437 - protein, 383 aa, Bacteroides fragilis
MKQLRNIVAGMLVLIGGMLPATTFAQEPVPGDTTATLQQEIIVGKDTINQEANQVDVKGIVFGHIGDSYEWHITNIGKTSICIPLPIIVYSETSGWHAFLSSRLEENGGKYEGFYIAPAGSKYEGKVVERNATGEEVRPWDISITKVTLSLFINSAILLAIILSVAHWYRKREQGAYAPGGFIGFMEMFIMMVHDDVIKSCVGPNYKKFAPYLLTAFFFIFINNIMGLIPIFPGGANVTGNIAITLVLALFTFVIVNIFGTKHYWKDIFWPDVPWWLKVPIPMMPFIEFFGVFTKPFALMIRLFANMLSGHMAMLVLTCLIFISASMGPAINGSLTVASVLFNIFMNLLEVLVAFIQAYVFTMLSAVFIGLAQEGGKKEEVKE

SEQ ID NO: 48438 - protein, 225 aa, Bacteroides fragilis
MLPEIGEAGQLKLKAAKVLIVGVGGLGSPIALYLAGAGVGTIGLADDDEVSLSNLQRQILYTEEEVGDLKAICASMRISVLNREIKVNACPGRLSKENARDLIGQYDIIVDGCDNFATRYLLSDVCSELGKPYVYGAICGFEGQVSVFNYGEGTQRKTYRDLYPDEEGMLHMPPPPKGVVGVTPAVTGSVEACEVLKIICGFGEVLAGKLWTIDLRTLQSNIFSL

SEQ ID NO: 48439 - protein, 155 aa, Bacteroides fragilis
MLIAYFSATGTTAGAAEKLSKVTGGELYEITPAQPYTNADLNWNNKQSRSSLEMNDPKSRPAIRKSSIDIADYDVIFVGYPIWWNLAPRIINTFIESYHLKNKTIILFATSGSSSITNSMATLKKSYPELIWKEGKLLNGMNENDIREWISKLDY

SEQ ID NO: 48440 - protein, 336 aa, Bacteroides fragilis
MSYLKNIITYFFHHPASDGVVERVHQRLADTNSGQEKEEVLSGIWEQIGFPQADEHQTLRAFEKLEQQIGGDSLKSESSFSRFRIPRWSWIAASIIVPLLLLFGSAYLYKETLTIKNELSNVTFIQYYVSNGKREQVTLPDRSKVWLNSGSLLIYPSAFIGNEREVYLAGEGYFSVTKDKECPFIVKTNSVSVSVLGTEFNINAYPNIDKVVTTLEEGSIRMSLNRFDSSYLLEPDDQIVYIPSTGHIERKRVKASDYSDWRGGGLYFSNSPFKEVIQTIERTYSVQVHLQTSIYQSNNLTIHFYPNESIENIMMLIKEMIPGLEYQIEGKDIYID

SEQ ID NO: 48441 - protein, 208 aa, Bacteroides fragilis
ENQLHAAIVEIMVHDPARLGIKFLTLYTFSTENWNRPSDEVAALMSLLFDSIEEETFMKNNISFRIIGDINKLPENVRERLNACVEHTSKNTGMCLILALSYSARWEITEATRQIATLVQNGEMNPEEITSESIRTHLTTNFMPDPDLLIRTGGEVRLSNYLLWQCAYSELYFCETFWPDFKEEELCKAICDYQKRERRFGKTSEQIS

SEQ ID NO: 48442 - protein, 444 aa, Bacteroides fragilis
MNAAKVLEDLKRRFPNEPEYHQAVEEVLSTIEEEYNKHPEFDKANLIERLCIPDRVYQFRVTWVDDKGNVQTNMGYRVQHNNAIGPYKGGIRFHASVNLGILKFLAFEQTFKNSLTTLPMGGGKGGSDFSPRGKSNAEVMRFTQAFMLELWRHIGPETDVPAGDIGVGGREVGFMFGMYKKLSHEFTGTFTGKGREFGGSLIRPEATGYGNIYFLMEMLKTKGTDLKGKVCLISGSGNVAQYTAEKVLELGGKVVTMSDSDGYIYDPDGIDRAKLDYIMELKNLYRGRIREYAETYGCKYVEGARPWGEKGDIALPSATQNELNGDDARKLVANGVIAVSEGANMPSTPEAIKVFQDAKILYAPGKAANAGGVSVSGLEMTQNSIKLSWSSEEVDEKLKSIMKNIHEACVQYGTEPDGYVNYVKGANVAGFMKVAKAMMAQGIV

SEQ ID NO: 48443 - protein, 280 aa, Bacteroides fragilis
MKQSLPYQPGPIGVFDSGYGGLTILSKIREALPEYDYIYLGDNARTPYGTRSFEIVYEFTLQAVNKLFEMGCHLVILACNTASAKALRTIQMNDLPNIDPDRRVLGVIRPTAECIGSMTQTRHVGILATAGTIKSESYPLEVHKLFEDIKVSGEACPMWVPLVENNEANGEGADFFIRKYIDNLLAKDRQIDTLVLGCTHYPILLPKIQKFIPQGVKVVAQGEYVATSLKDYLHRHPEMDMKCTREGKCRFYTTEAEDKFIESASMFLNENITVQRITLE

SEQ ID NO: 48444 - protein, 410 aa, Bacteroides fragilis
MFAEIITIGDELLIGQVTDTNSAWMGRELNKVGIEVIRVVSVRDRADEIIEAVDASMKRANIVLVTGGLGPTKDDITKQTLCKYFGTRLIFSEAVFENIKRVLAGKIPMNALNKSQAMVPEDCIVINNRVGSASVSWFEKDGKVLVSMPGVPQEMTTVMSEEVIPRLCAKFRTDAIVHRTFTVQNYPESVLAEKLESWEMALPACLKLAYLPKPGLIRLRLTGRGQNRSEVEACVNTESAKLEAILGEDILDEEDTPIEILIGELLKKKNLTLSTAESCTGGSIAARITSVAGSSEYFKGSIVAYANEVKTELLGVSMETLEKRGAVSEETVIEMVKGAMKALKTDCAVATSGIAGPSGGTEEKPVGTVWIAAAYKSEICTMKQETNRGREMNVERASNNALLLLRKLVK

SEQ ID NO: 48445 - protein, 987 aa, Bacteroides fragilis
MPVALQAQTSEKITSPVNLYKEGKELFLQKNYAAAMPPLRTFVRQKADVNLKEEAEYMLVCSAYELKDRNAIAQLRNYLDTYPDTPHANRIYALIASAYFYQGNYDEALALFNSSRLDLLGNEERDDMTYQLATCYLKVGNVKEAAIWFETLKASSPKYANDCSYYISYIRYTQKRYDEALKGFLPLQDDAKYKALVPYYIAEIYAVKKNYDKAQIVAQNYLSAYPQNEHAAEMYRILGDAYYHFGDYHKAVASFRNYLEKENTPRRDALYMLGLSYFQTGVFSKAAETLGEVTTESDALTQNAYLHMGLAYLHLAEKNKARMAFEQAAASNANLKIKEQAAYNYALCIHETSYSAFGESVTVFEKFLNEFPNSEYAEMVSSYLVEVYMNTRSYEAALKSIDRIAHPGKRILEAKQRILFQLGTQAFANTQFEQAIGYFDRSLGLGQYNRQTKADALYWRGEAYYRLNRMEEAKRNFTDYLQLTQQTHNEMYALAHYNLGYIAFHQKDYTQAQNWFRKYISLEKGENKTALADAYNRIGDCYLDVRNFDEAKHYYSQAEAMNTPSGDYSFYQLALVSGLQKDYSGKITLLNRLAGKYPASPYAISALYEKGRSYVLMDNNQQAIASFKELLAKYPESPVSRKAAAEIGLLYYQNEDYDQAINAYKQVVQKYPGSDEARLAMRDLKSIYVDMNRIDEFAALASAMPGNIRFDASEQDSLTYMAAEKIYIRGRVEQAKESFGKYLQTFPDGAFGLNAHYYLCLIGKEQKNYDMILEHSGKLLEYPDNPFSEEALIMRAEVQFNKVQFADALASYKMLKEKATTAERRLLAETGMLRAAYLLKDDTETIHAATALLSEAKLSPELKNEALYYRAKAYLNQKADKAAMGDLKELAKDTRNLYGAEAKFLVAQELYNSQNYAAAEKELLNFIDQSTPHAYWLARGFILLSDVYVAMDKKLDARQYLLSLQQNYHADDDIESMIESRLNNLNK

SEQ ID NO: 48446 - protein, 278 aa, Bacteroides fragilis
MDSEDPIYQFDHFKSLLSTMGIEVGEASAWSPVGTIEVLSENIGKKIKFESNGIFYIDDNGSEHQGFMYKRDFYFHDYGERMPKFHIRYCHTLECFGKEAYRFANNEPIKVFARDKAIRHEVEVSGLHLCTYCSQILANELENEIHNSTDFVEFLKQAEGIDPNDNRDTEIDIFGYTKNWEQISQAYRSIHQFTCERCGLQITEPFDQHFMHTHHKNGNKTDNREANLECLCVRCHSEVDDRHKKRLCTGANRIILEDFNEKYPSFNKDSLEDNDLAF

SEQ ID NO: 48447 - protein, 389 aa, Bacteroides fragilis
MKQINKQKLLEQMVYLVIWLTVISVPLVGDYLFASISPVHTFSWQTIRMAWLLTLPFILLFVVNNYFLAPRLLLRKRYWAYALSLAGVVTLLFILYPSINPPQHKQFQNLMPMQPRRYPEGKVLPDREREFPNTFPEHSSLLLLPKQELDMRWRGPHPLPGYFLGRLSLALLVVGINVAIKLLFKSMRDEEALKELEHQHLQSELQYLKYQINPHFFMNTLNNIHALVDMDAGKAKRTIVELSKLMRYVLYEASNRTILLSREIQFLDNYIALMKLRYTGRVRIECCMPDEVPEVQIPPLLFISFVENAFKHGVSYQEESFIRVFMSVEDGRLAFRCSNSNHGRSVEQHHGIGLENIRKRLRLLFGQDYTLSINERDDSFNVLLIIPLL

SEQ ID NO: 48448 - protein, 844 aa, Bacteroides fragilis
MNNQFSQKVSDIIVYSKEEANRLKSSYIGPEHLLLGMLRDGEGKAIEILSKLKTNLTDIKKQIEAILKEHADDMLLPDADVPLSNGAAKILKLCILEARVMKSQVADTEHVLLAILKDKDNLAATVLEANHVNYQQVFEQLSLQPDISAGMGFTEDDDDEEEMNQSRSSHGSGERQQQAQTASRKPTNDTPVLDNFGTDMTKAAEEGRLDPVVGREREIERLAQILSRRKKNNPILIGEPGVGKSAIVEGLALRIIQKKVSRILFDKRVVALDMTAVVAGTKYRGQFEERIRSILNELQKNPNVILFIDEIHTIVGAGSAAGSMDAANMLKPALARGEIQCIGATTLDEYRKNIEKDGALERRFQKVMVEPTTADETLQILRNIKDKYEDHHNVNYTDAALEACVKLTDRYITDRNFPDKAIDALDEAGSRVHLTNVSVPKEIEDQEKLIEEAKNNKNEAVKSQNFELAASFRDKEKELAVQLDVMKKDWEERLKDNRETVDEEEIANVVSMMSGIPVQRMAQAEGIKLAGMKEDLQSKVIAQDDAIKKLVKAILRSRVGLKDPNKPIGTFMFLGPTGVGKTHLAKELAKYMFGSSDALIRIDMSEFMEKFTVSRLVGAPPGYVGYEEGGQLTEKVRRKPYSIVLLDEIEKAHPDVFNLLLQVMDEGRLTDSYGRMVDFKNTVIIMTSNIGTRQLKEFGRGVGFATQSRLDDKEFSRSVIQKALNKSFAPEFINRVDEIITFDQLSLEAITKIIDIELKGLYNRIESIGYKLVIEDKAKQFVASKGYDVQYGARPLKRAIQTYLEDGLSELIISADLNEGDTITVSLNEEKGELEMKNEAKTAE

SEQ ID NO: 48449 - protein, 246 aa, Bacteroides fragilis
MKVGLFIPCYINAIYPQVGVASYKLLKNLGVDVDYPLDQTCCGQPMANAGFQDESLKMAIRFDDLFRKYDYIVGPSASCVAFVKENHPGILAKEGHQCQSAGKIYDLCAFIHDVIKPTKIPARFPHKVSIHNSCHGVRELFLSAPSELNIPYFNKLRDLLQMVEGIEVFEPSHVDECCGFGGMFAVEEQAVSVCMGRDKIRHHMETGAEYITGADSSCLMHMQGIIEREHLPIRMIHVVEILASQL

SEQ ID NO: 48450 - protein, 157 aa, Bacteroides fragilis
MKTTLIVVGRTVEQHYITAINDYIERTKHFISFDMEVIPELKNTKSLTPEQQKEKEGELIAKALQPGDVVVLLDEHGKEMRSVEFARWMEKKLVNVNKRLVFIIGGPYGFSQKVYDAAHEKISMSKMTFSHQMIRLIFVEQIYRAMTILNGGPYHHE

SEQ ID NO: 48451 - protein, 304 aa, Bacteroides fragilis
MKEEETTYHVPVLLKESVDAMNISPDGTYVDVTFGGGGHSREILSRLGDGGRLLGFDQDEDAERNIVNDPHFTFVRSNFRYLHNFLRYHDIGEVDAILADLGVSSHHFDDSERGFSFRFDGKLDMRMNKRAGITAADVVNTYEEERLADIFYLYGELKNSRKLASVIVKARTGQKIETIGEFLEIIKPLFGREREKKELAKVFQALRIEVNQEMEALKEMLMAATEALKPGGRLVVITYHSLEDRMVKNIMKTGNVEGKATQDFFGNLQTPFRLVNNKVIVPDEDEITRNPRSRSAKLRIAEKK

SEQ ID NO: 48452 - protein, 290 aa, Bacteroides fragilis
MNLILIAVISLGAIALVLAAVLYVASKKFAVYEDPRIAQVSEVLPQANCGGCGYPGCSGFADACVKAGSLEGKFCPVGGQPVMSQVASILGLDAGTAEPMVAVVRCNGTCTNRPRTNMYDGAKSCAIAASLYGGETGCSYGCLGCGDCVAACQFDAIHMNPETGLPEVDEEKCTACGACVKACPKAIIELRAKGKKSRRVYVSCVNKDKGAVARKACTVSCIGCGKCVKTCPFEAITLENNLAYIDYNKCKSCRKCVEVCPQHTIIELNFPPRKPKEETPVAEAAKTAEA

SEQ ID NO: 48453 - protein, 1057 aa, Bacteroides fragilis
MSELIVYKASAGSGKTFTLAVEYIKLLIRNPRAYRQILAVTFTNKATAEMKERILSQLYGIQIGDPDSDAYLKRIIAETGHSEDEIRTTAGIALGYMLHDYSRFRVETIDSFFQSVMRNLARELELSPNLNIELNNVEVLSDAVDSMIEKLGPNSPVLVWLLDYIDERIADDKRWNVSDEIKSFGRNIFDEGYIEKGDGLRRRLRDPNVIHNYRKTLKEMETAALEQMKEFAQQFENVLSSQSLKPTDLKNGAKGIGSYFNKLKNGILGDEIVNATVIKCLDDETNWAAKTSKQYTDIILLASSILMPLLQNAEQYRSRNNRIVNSCRLSTQHLNKVRLLTNIDEEVRQLNRENNRFLLSDTNALLHQLVKDGDSSFVFEKIGTNIRNVMIDEFQDTSRMQWDNFKLLLLEGLSQGADSLIVGDVKQSIYRWRNGDWGILNGLNKQLGYFSIRTETLKTNRRSETNIIRFNNSIFSAAVDYLNEMYNKQLGSICEPLINAYADVEQESPRNKQQGYVKVEFLEPDEEHDYTEQTLISLGMEVEHLLQSGVKLNDIAILVRKNKSIPRIADYFDKQLNYKIVSDEAFRLDASLAICMMLDALRYLSDPENRIVKAQLATNYQLQILHSEYDLNSLLLHKAEELFPPAFLERMAELRLMPLYELLEELFSLFELHRIEQQDAYLFAFFDAVTDYLQSHSSDPDSFIRYWNETLSGKTIPSGEVEGIRIFSIHKSKGLEFHTVLLPFCDWKLENETNNQLVWCVPQEAPFNELDIVPVNYSSAMAESVYRTDYLHERLQLWVDNLNLLYVAFTRAGKNLIIWSRKGQRNTMAELLTGALPQAANKLDQEWDEEQVYELGDLCPSENEKKIDSGNKLTRKPEKLPVNMESMHPDIEFRQSNRSADFIKGLSEEESDDRFINHGQLLHTLFSAIETKDDIEPAIHHLIFEGIIGSKEAEERIRSLTVKAFSLPEVQEWYSGEWRLFNECAIIYKDKGVLQTRRPDRVMMKNEQVVVVDFKFGKANKKYNKQVKGYMQLLSRMGYKNITGYLWYVEEEIIEKV

SEQ ID NO: 48454 - protein, 871 aa, Bacteroides fragilis
MSNDIELTPMMKQFLDLKAKHPDAVMLFRCGDFYETYSTDAIIAAEILGITLTKRANGKGKTVEMAGFPHHALDTYLPKLIRAGKRVAICDQLEDPKTTKKLVKRGITELVTPGVSINDNVLNYKENNFLAAVHFGKSACGIAFLDISTGEFLTAEGPFDYVDKLLNNFAPKEILFERGKRGMFEGNFGSKFFTFELDDWVFTESSSREKLLKHFETKNLKGFGVEHLKNGIIASGAILQYLDMTEHTQVGHITSLARIEEDKYVRLDKFTVRSLELIGSMNDGGSSLLHVIDKTISPMGARLLKRWMVFPLKDEKPINDRLNVVEYFFRKPDFRELIEDELHRIGDLERIISKVAVGRVSPREVVQLKVALQAIEPIKEACQQADNPSLNRIGEQLNLCISIRDRIEKEINNDPPLLINKGGVIKDGVDTELDELRQIAYSGKDYLLKIQQRESELTGIPSLKIAYNSVFGYYIEVRNVHKDKVPQEWIRKQTLVNAERYITQELKEYEEKILGAEDKILVLETRLYTELVQALSEFIPAIQINANQIARIDCLLSFANVAKENNYIRPVIEDNDVLDIRQGRHPVIEKQLPIGEKYIANDVLLDNATQQVIIITGPNMAGKSALLRQTALITLLAQIGSFVPAESAHIGLVDKIFTRVGASDNISVGESTFMVEMNEASDILNNISSRSLVLFDELGRGTSTYDGISIAWAIVEYIHEHPKAKARTLFATHYHELNEMEKSFKRIKNYNVSVKEVDNKVIFLRKLERGGSEHSFGIHVAKMAGMPKSIVKRANEILKQLESDNRQQGISGKPLAEVSENRGGMQLSFFQLDDPILCQIRDEILHLDVNNLTPIEALNKLNDIKKIVRGK

SEQ ID NO: 48455 - protein, 117 aa, Bacteroides fragilis
MDLIKIAEEAFATGKQHPSFKAGDTVTVAYRIIEGNKERVQLYRGVVIKIAGHGEKKRFTVRKMSGTVGVERIFPIESPAIDSIEVNKVGKVRRAKLYYLRALTGKKARIKEKRVNG

SEQ ID NO: 48456 - protein, 73 aa, Bacteroides fragilis
MNNYLKKNAEICDIHEKLSTHIARHSYATSISLTNGVSMENLAKILGHTDTSITRTLCTGAGPKYYGRYTESK

SEQ ID NO: 48457 - protein, 185 aa, Bacteroides fragilis
MKKFRCTVCGYVYEGDAAPEKCPLCKAPASKFVEVVEEEGGALTFVDEHVIGVAKGCDEEMIKDLNNHFMGECTEVGMYLAMSRQADREGYPEVAEAFKRYAWEEAEHASKFAELLGDCVWDTKTNLEKRMNAEAGACEDKKRIATRAKALNLDAIHDTVHEMCKDEARHGKGFEGLYNRYFGKK

SEQ ID NO: 48458 - protein, 996 aa, Bacteroides fragilis
MLKQLLTVVFLLSAGTLWAQQAAGLLPVQEDTHCKEWVEQTLSRMKLKDKVGQLFVYTLAPRADKDTEKLVGKLTRKFKVGAFLYSEGTVEDQANLTNYAQRQSKIPLMITFDGEWGLAMRLENTPVFPRNAALGCISDNTLIEAYGQEVARELREIGAHVNFAPDADVNTNPENPVIHVRSFGENPKTVAEKVIAYGRGLETGGILSVSKHFPGHGDTDVDSHQALPAVYYNRARLDSVELYPFKEAIQAGLGGVMVGHLQVPALEPDRITPSSLSHSIVTDLLRGELGFNGLVFTDALAMKGVAAESDVTVKALKAGNDMVLVQQNVEKAQESVVQAIKDGRLTMEEIDAKCRRILAYKYRLGLSRRPMIPVDGLSDRIHTPEAQALVTKLRTSAVTVLGNYFQILPLTATKGEIAVLTVGDEGSDASFIEGLRSELPLKTFRMDKNTGEEERRKIVKELGNYRRVVVCITVQDKEAGEYRSFFAGFRPQAPVVYAFFTSYRALASLEEAAARSAAVVLAHSGEEDLQRYVADVILGKASATGRLSMRIGNTFAAGSGVDVISGSPAGIAPEDYGLKSYRLHRIDSVVAAGLAAKAFPGCQVLVLRHGQPVYDKCFGTHSVTDTTPVRATDLFDLASLTKTSATLLAVMKLYDQGRIELTDAVSKYVPVLRATNKKNITIRELLLHESGLVPYIRFYRDAIDEYSVTGPFTQGFVDEWHHTRMGEYTYACSDFKFKKGLVSATKTSGHTLQIADGLWLDKKFKAAMMKSIAQSELDRKRFVYSDIGFILLQQVVEAVTGKTLDAYLVSEFYRPMGLEHTLFQPLNRYKKADIMPTAANDYLRRQDLCGYVHDEAAAFMGGVSGNAGLFSTAQELGKIYQMILNEGELDGKRYLRPETCRIFTTEKSAVSHRGLGYDKPNLKDPKANACASSAPASVYGHTGFTGTCAWVDPENDLVYIFLSNRLCPDAWNGKLNSMKIRQAVQEVIYQSLYTPE

SEQ ID NO: 48459 - protein, 541 aa, Bacteroides fragilis
MKYEIEGNIVSVQRREIFEGSIMVENGIITDIRKHPINCGGFIIPGFIDSHVHIESSMLTPQEFGQLAVRQGTIAVVTDPHEMANVMGVEGIEFMINNSMDAKIKVYYTIPSCVPATSFDISGGTIASKDVEKLAVSGRFVGLSEVMNVPGVLAGEEEVMLKLAIANRLGLPVDGHAPELSGQKLVDYVGHGICTDHECTTLGEALEKIDVGMKVLIREGSAAYNYEALKSLIATNHGDVMFCSDDLHPDDFISGHINRLVRRSVASGFDLFHVLRVASINPIEHYKLDVGQLRTGDKADFVVVNNLQEFQTEKVYINGVKQYDSVLGENFKNERTSPVCLNHFLHGSVDISLLRKEVHGTIKVISVVQDELLTNIEYYNPKKVHDNLESDLEQDVLKIVYINRYTNGKPQVAFCKGFNLNKGAFASSIAHDSHNIIAIGCSDSELSKAINTIIVHKGGLAVCDSDQVEVLPLPIGGIMSDQSGEIVAADYKRLCNLINKMGCQLRSPFMTLSFMSLVVIPNIKIGESGLFSYADFNWIEE

SEQ ID NO: 48460 - protein, 380 aa, Bacteroides fragilis
QTEEALAEAKEKAENADRSKSAFLANMSHEIRTPLNAIVGFSELLAAANTEEEKQKYLEILHTNSELLLQLVNDILDLSKIEAGTLEFVYSDVDINLLLNDLEQLFRMKIGSNSPVRIITEPGLPSCMVHTDRNRIAQVVSNFVSNAIKFTTEGSIRIGYQSSENGLRFYVSDTGSGISADKLEGVFDRFVRLQSDKNGNGLGLSICKTIVNKLGGEIGAESEVGKGSTFWFTLPEHSDIKPKVIIEKEQEELPSAVRVPVIDAGSDKKLSILVAEDMEDNYRLLRTILASRYELHWAHNGEEAISLFLKFQPDIILMDIRMPEVNGYEATEAIRQMSATVPIIALTAFAYEEDRQKIMHSGFTDFLTKPISSKVLLGKL

SEQ ID NO: 48461 - protein, 226 aa, Bacteroides fragilis
MKEKVSVPFMLLGILFNVCLIAANLLETKVIQVGSITVTAGLLVFPISYIINDCIAEVWGFKKARLIIWSGFAMNFFVVALGLIAVALPAAPFWEGEQHFDFVFGMAPRIVVASLLAFLVGSFLNAYVMSKMKVASGGRNFSARAIWSTVVGETADSLIFFPIAFGGLIAWPELLVMMGTQIVLKSLYEVIILPITIRVVKAVKRIDGSDVYDTDISYNVLKVKDI

SEQ ID NO: 48462 - protein, 294 aa, Bacteroides fragilis
MQPNLTLKGMSYNLLKGKRGIIFGALNEQSIAWKVAERAVEEGAVITLSNTPVAVRMGQVSALSEKLNCEVIAADATNVEDLENVFKRSMEVLGGQIDFVLHSIGMSPNVRKKRTYDDLDYNMLNTTLDVSAVSFHKMIQAAKKQNAIAEYGSIVALSYVAAQRTFYGYNDMADAKALLESIARSFGYIYGREHNVRVNTISQSPTFTTAGSGVKGMDKLYDFANRMSPLGNASADECADYCIVMFSDLTRKVTMQNLFHDGGFSSVGMSLRAMATYEKGLDEYKDENGNIIYG

SEQ ID NO: 48463 - protein, 358 aa, Bacteroides fragilis
MKNVTLILDDGSRFHGKSFGYEKPVAGEVVFNTAMTGYPESLTDPSYAGQLMTLTYPLVGNYGVPPFSIEPNGLATFMESERIHAEAIIVSDYSQEYSHWNAVESLADWLKREQVPGITGIDTRELTKVLREHGVMMGRIVFDDEPESAPEAVYSGVNYVDKVSCKEVIRYNEGADKKKVVLVDCGVKTNIIRCLLRRDVEVIRVPWNYDFNHLKFDGLFISNGPGDPDTCDAAVQNIRKAMQNPKLPIFGICMGNQLLSKAGGAKIYKLKYGHRSHNQPVRMVGTERCFITSQNHGYAVDNNTLGTDWEPLFINMNDGSNEGIRHKTNPWFSAQFHPEAASGPTDTEFLFDEFVKLL

SEQ ID NO: 48464 - protein, 101 aa, Bacteroides fragilis
MSQKIRIKLKSYDHNLVDKSAEKIVRTVKATGAIVSGPIPLPTHKRIFTVNRSTFVNKKSREQFELSSFKRLIDIYSSTAKTVDALMKLELPSGVEVEIKV

SEQ ID NO: 48465 - protein, 230 aa, Bacteroides fragilis
MNKQKLNIKQWSKADRPREKMMTKGSEALSDAELLGILIGSGNTEESAVELMRRILATCDNNLNELGKWEVRNFSSFKGMGPAKSLTIMAALELGKRRKLQESKEREQIRCSEDIYKLFHPLMCDLPQEEFWILLLNQACKVINKLRISTGGIDGTYADVRTILREALIGRATQIALIHNHPSGHAKPSQEDKRLTGAIQKASQTMNITLVDHVIVCDGCFYSFADEGLI

SEQ ID NO: 48466 - protein, 636 aa, Bacteroides fragilis
MKTFEELGVSPEIRKAIEEMGYENPMPVQEEVIPYLLGENNDVVALAQTGTGKTAAFGLPLIQKINVKNRIPQSLVLCPTRELCLQIAGDLNDYSKYIDGLKVLPVYGGSSIDSQIRSLKRGVHIIVATPGRLLDLMERKTVSLATVTNVVMDEADEMLNMGFTDSINAILADVPQERNTLLFSATMSPEIARISKNYLHNAKEITIGRKNESTSNVKHVVYTVHAKDKYAALKRIVDYYPQIYGIIFCRTRKETQEIADKLMQEGYNADSLHGELSQAQRDTVMQKFRIRNIQILVATDVAARGLDVDDLTHVINYGLPDDTESYTHRSGRTGRAGKTGTSIAIINLREKGKMREIERIIGKKFIAGEMPTGKQICEKQLLKVIDDLEKVKVNEEDINDFMPEIYRKLEWLSKEDLIKRMVSHEFNRFVDYYRNREEIEVPTDSRSERAGKSREGKSSRQAEPGYTRLFINLGKMDNFFPHELITLLNNNTRGRVELGRIDLMKNFSFFEVEEKQAQNVVKALNRTNWNGRKVTVEVAGEEASTEHKGRGKRNEGNDQGGRGRSSAPSADRKERGKGSKDSKQADSRKGKKPSREERGYSAARGPKGKDEWKQFFKDAEPDFSEEGWARRKPKKS

SEQ ID NO: 48467 - protein, 461 aa, Bacteroides fragilis
MRTSSYNILVNVDSKLNLFAILNGYTQAFDIVNKDVYLALKTERKLEDLPDVILSKLKKRGYVTPLTKIEEIKLVQGLSDRARENHLFQKYNFHFIVSYACNLRCIYCYEDNILNGCNSLSKKTMTLEQVDKAFEIITEKDKVNQSSKTIALYGGEPLLRENYDVISYIVEKGKRIDHTFRVTSNGYDIDAYAFMLQKNSNLFSFQITVDGVEEIQNQRKPHFKNSDSFMKITNNIDFLLKCGIPVNVRINSDLYTINKIHDLLSFFEDKGWYKYKNFRAYCALLRQEVDVKQQIQHSQMGHLDLLKYYNDKIKNKEITERKIFCQDYGTLALLKHSLLNRTHLYKGSFCGAQTNNIIFDPFGDLYSCWDVVGLPEHRVGRYIPDFCIDDTKSIKWFGHRVSDTKCIQCKFVLFCGGGCLARSLRKSGEISFGNCNEYPQSFKYLMKTVCKEILENNYDVL

SEQ ID NO: 48468 - protein, 920 aa, Bacteroides fragilis
MLFGLIGYNYLGVREYPSVDNPIISVSCSYPGANADVIENQITEPLEQNINGIPGIRSLSSVSQQGQSRITVEFELSVDLETAANDVRDKVSRAQRYLPRDCDPPTVSKADADATPILMVALQSDKRSLLELSEIADLTVKEQLQTISDVSSVSIWGEKRYSMRLWLDPIKMSGYGITPIDVKNAVDKENVELPSGSIEGNTTELTIRTLGLMHTAEEFNNLIVKEENDRIIRFSDIGRAELGPADIKSYMKMNGVPMVGIVVIPQPGANHIKIADAVYERMEKMQKDLPEDVKYSYGFDNTKFIRASISEVKETVYVAFILVIIIIFLFLRDWRVTLVPCIVIPVSLIGAFFVMYLADFSINVLSMLAVVLAVGLVVDDAIVMTENIYVRIEKGMPPKEAGIEGAKEIFFAVISTTITLVAVFFPIVFMEGMTGRLFREFSIVISGSVIISSFAALTFTPMLATKLLVKREKQNWFYLKTEPFFEGMNRLYSRSLAVFLHKRWIALPFVAITIGIIAFLWNYIPAEMAPLEDRSQISINTRGAEGVTYEYIRDYTEDINDLVDSIVPDAESVTARVSSGSGNVRITLKDMKDRDYTQMDVAEKLSAAVQKKTMARSFVQQSSSFGGRRGGMPVQYVLQATNIEKLQEVLPKFMAKVYENPVFQMADVDLKFSKPEARININRDKASIMGVSTRNIAQTLQYGLSGQRMGYFYMNGKQYEILGEINRQQRNTPANLKSIYIRSDKGDMVQLDNLIELTGGIAPPKLYRYNRFVSATVSAGLAEGKTIGQGLDEMDKIAKETLDDTFRTALTGDSKEYRESSSSLMFAFILAIVLIYLILAAQFESFKDPLIIMLTVPLAIAGALVFMYFGGITMNIFSQIGIIMLIGLVAKNGILIVEFANLKQETGEDKMTAIKDALTT

SEQ ID NO: 48469 - protein, 579 aa, Bacteroides fragilis
MAKKVAEQLVDTLIEAGVRRIYAVTGDSLNEVNEAVRQNEAMKWIHVRHEETGAYAAGAEAQLTGLPGCCAGSSGPGHVHLINGLYDAHRSGAPVIAIASTIPTGEFGTEYFQETNTVKLFNDCSFYNEVATTPEQFPRMLQSALQTATTRKGVAVVGLPGDLAKKPAVKVESSEQIYPLASSVCPAEEDLIRLAGMLNHYERITLFCGIGCKGAHEEIIRMSETLNAPVAYTFKGKMEVQYDNPYEVGMTGLLGMPSGYYSMHEAEVLVMLGTDFPYSAFLPDDIKIVQVDIKPERLGRRAKVDLGLCGDVRSTLRALLPMLQQKKNDSFLRKQLKRYEGVKKDLAAYTEDKGKMDQIHPEYVMSEINNISSDDAIYTVDTGMTCVWGARYLQATGKRHMLGSFNHGSMANALPQAIGAALACPDRQVIALCGDGGLSMTLGDLETVVQYKLPIKIIVFNNRSLGMVKLEMEVDGLPDWQTDMLNPNFAQVAEAMGMTGFNVSDPEEVLNTLCNAFELEGPVLINVMTDPNALAMPPKIELGQMVGFAQSMYKLLINGRSQEVIDTINSNFKHIREVF

SEQ ID NO: 48470 - protein, 218 aa, Bacteroides fragilis
MKFFIDTANLDQIREAHDLGVLDGVTTNPSLMAKEGIKGVENQRRHYVEICNIVQGDVSAEVIATDYEGMVREGKELAALNPHIVVKVPCIADGIKAIKHFSGKGIRTNCTLVFSTGQALLAAKAGATYVSPFVGRLDDICEDGVGLVADIVRMYRFYNYPTQVLAASIRSSKHIMECVEAGADVATCPLSAIKGLMNHPLTDAGLKKFLEDYKKVNE

SEQ ID NO: 48471 - protein, 417 aa, Bacteroides fragilis
MSENLIIFNAKVVTPLGFSARKGKEMAELRILEKATVEVVDGIITYVGPNRGEVRDGYYHHFWHYNARGKCLLPGFVDSHTHFVFGGERAEEFSWRLKGESYMSIMQRGGGIASTVQATRELSFIHLRSKAEGLLKKMTAMGITTVEGKSGYGLNRETELLQLKVMRSLNKDEGVRVDIVPTFLGAHALPDEYRERPDDYIDFLIRELLPVIQRDSLAEFCDVFCEGGVFSIEQSRRLLTAAGDYGLLPKLHADEIVPLGGAELAAELGAVSADHLLHASDAGIEAMARKGVVATLLPLTAFALKEPYARGRDMIDAGCAVALATDLNPGSCFSGSIPLTFALACIHMQLTVEEAITALTLNGAAALNRADSIGSIEVGKKGDFVVLDSDNYHILPYYVGMNCVNTTIKGGMLYSSV

SEQ ID NO: 48472 - protein, 661 aa, Bacteroides fragilis
MKMTLSNQLPEYPVFAEGIRRAPDRGYTLSPAQTVTALKNALRYIPVELHRKLAPEFLEELRTRGRIYGYRFRPAGDLKAKPVDEYQGNCIEGKAFQVMIDNNLCFDIALYPYELVTYGETGQVCQNWMQYRLIKQYLELLTREQTLVIESGHPLGLFHSRPDAPRVIITNSMMVGMFDNQHDWHEAAQMGVANYGQMTAGGWMYIGPQGIVHGTFNTLLNAGRLKLGIPQDKNLSGHLFVSSGLGGMSGAQPKAAEIAGAASIIAEVDRSRIETRYKQGWVEHVTTDLHTAFRMALSAAERHESCSVAYHGNVVDLLEYAVQEDIPIELLSDQTSCHAVYEGGYCPAGVTFEERTRLLHESPEAFRQLVDESLHRHFAVIKKLVSRGTYFFDYGNSFMKAVYDAGVKEISRNGTDEKDGFIWPSYVEDIMGPELFDYGYGPFRWVCLSGNPEDLARTDRAAMECIDVKRRGQDLDNYNWIRDAGKNRLVVGTQARILYQDAVGRLKIALRFNQMVRDGEVGPIMLGRDHHDVSGTDSPFRETSNIKDGSNVMADMAVQCFAGNCARGMSLVALHNGGGVGIGKAINGGFGMVCDGSLRVDEILRSSMLWDVMGGVARRSWARNEHAMETSEAFNLSHGDAYHITLPYLADEKLIKRIVAE

SEQ ID NO: 48473 - protein, 483 aa, Bacteroides fragilis
MRTALYNYLFARQHGGDLIFRIEDTDSNRFVPGAEEYILESFKWLGIQFDEGVSFGGEYGPYRQSERREIYKKYVQVLLDNGKAYIAFDTPEELDAKRAEIANFQYDASTRVGMRNSLTLPKEEVEALIADGKQYVVRFKIEPNEDIHVNDLIRGEVVINSSILDDKVLYKSADELPTYHLANIVDDHLMEVSHVIRGEEWLPSAPLHVLLYRAFGWEDTMPAFAHLPLLLKPEGNGKLSKRDGDRLGFPVFPLEWHDPKSGEISSGYRESGYLPEAVINFLALLGWNPGNDQEVMSMDELIRLFDLHRCSKSGAKFDYKKGIWFNHTYIQQKSDKEIAELFVPVLKEHGVEAPFEKVVTVVGMMKDRVSFVKELWEVCSFFFVAPTEYDEKTVKKRWKEDSAKCMTELAEVLAGIEDFSIEGQEKIVMDWIAEKGYHTGNIMNAFRLTLVGEGKGPHMFDISWVLGKEETLARMKRAVEVLK

SEQ ID NO: 48474 - protein, 176 aa, Bacteroides fragilis
MKTSRNRQPRTKTLFFEQMRKAKPKKRVILPDPVFNDQKVSKFVNHLMYDGKKNTSYEIFYAALETVKAKLPNEEKTALEIWKKALDNVTPQVEVKSRRVGGATFQVPTEIRPDRKESISMKNLILFARKRGGKSMADKLAAEIMDAFNEQGGAFKRKEDMHRMAEANRAFAHFRF

SEQ ID NO: 48475 - protein, 408 aa, Bacteroides fragilis
MSKITIKDLYLIFGNDKQHALRMLKEKKSKSEILKATGCTVAVKDANLSIREGEIFVIMGLSGSGKSTLLRCINRLIKPTSGEVIINGRDISNVTDKELLRIRRKELAMVFQHFGLLPHRSVLHNIAFGLELQGVKKQEREQRAMESMQLVGLKGYENQMVGELSGGMQQRVGLARALANDPEVLLMDEAFSALDPLIRIQMQDELLTLQSKMKKTIVFITHDLNEAIKLGDRIAIMKDGEVVQVGTSEEILTEPANAYVERFVQSVDRSKIITAASVMVDKPLVARLKKEGPEVLIRKMLERNLTVLPVVDANNVLVGEVRLKDLLRLRQDQVKSIESVVREEVHSVLGDTILEDILPLMTKTNSPIWVVNETREFQGVVPLSSLIYEVTGKNKQEINEIIQNAIEL

SEQ ID NO: 48476 - protein, 432 aa, Bacteroides fragilis
MKRKTIDIITLGCSKNLVDSEQLMRQLEEAGYDVTHDSEKPTGEIAVINTCGFIGDAKEESINMILEFAQEKEEGNLEKLFVMGCLSERYLKELAIEIPQVDKFYGKFNWKGLLQDLGKAYHEELHIERTLTTPKHYAYLKISEGCDRKCSYCAIPIITGRHVSRPIEEILDEVRYLVSNGVKEFQVIAQELTYYGVDLYKKQMLPELIERISEIPGVEWIRLHYAYPAHFPKELFRVMRERDNVCKYMDIALQHISDNMLQRMRRHVTKKETYRLIEQFRKEVPGIHLRTTLMVGHPGETEEDFEELKEFVRKVRFDRMGAFTYSEEEGTYAAANYEDSIPQELKQARLDELMAIQQGISTELSASKVGQKMKVIIDRIEGEYYIGRTEFDSPEVDPEVLIRCEGDNLMIGNFYQVQVIDSDEFDLFGEII

SEQ ID NO: 48477 - protein, 186 aa, Bacteroides fragilis
MEHIIHLLIGFIVLSFLLKTGFYPRWGIWLSALVYTVFLICIGPWATEQSPTEINSLLASAPHILTLSVYVTLEASIMITFCFNCFADTSKQRTLFQRTVTYILNFYPGLLMAGILTYLLIQLFFAFPGVSFGLITGISSVAVFILISGLSLLLKNIVGERKLRLEILFITNLFIVLLSVVSTGNN

SEQ ID NO: 48478 - protein, 462 aa, Bacteroides fragilis
MKYRYLDLRRSAVRSNLELRHKMTIEVRSYLDKLGFLEVETPVLIGSTPEGARDFVVPSRMNPGQFYALPQSPQTLKQLLMVSGFDRYFQIAKCFRDEDLRADRQPEFTQIDCEMSFVEQEDVITTFEGMAKHLFKVIRNIELAEPFPRMPWSEAMRLYGSDKPDIRFGMQFVELMDILKGHGFSVFDNATYIGGICAEGAAGYTRKQLDALTEFVKKPQIGAKGMVYARIEADGTVKSSVDKFYTQEVLQQLKEAFGAKPGDLILILSGDDAMKTRKQLCELRLEMGNQLGLRDKNTFACLWVVDFPLFEWSEEEGRLMAMHHPFTSPKPEDIHLLDTNPAAVRANAYDMVINGVEVGGGSIRIHDSQLQNKMFELLGFTPERAQEQFGFLMNAFKFGAPPHGGLAYGLDRWVSLFAGLDSIRDCIAFPKNNSGRDVMLDAPAALDPSQLEELNLIVDIKE

SEQ ID NO: 48479 - protein, 161 aa, Bacteroides fragilis
MYTTPGREFLFREIVKGLEEKYDHILIDCPPSLGIITQNALMASDYVIIPTDGNYFAMKGIEKIHYIIGLLKRKLGADVRILGYFMTKYNARRKLDVDIRESLVRSLGDGVFETVIRSNVALGEAQYKAQSIFDYAPSSNGADDYRELVKEFLGRIKKINK

SEQ ID NO: 48480 - protein, 177 aa, Bacteroides fragilis
MRLVLHLLRQDTSVVEAFGSSIITLKHEAKYCKVCHNISDTETCQICANPQRDASMVCVVENIRDVMAVEATQQYRGLYHVLGGVISPMDGVGPGDLQIESLVRRVAEGGINEVILALSTTMEGDTTNFYIYRKLEKMGVKLSVLARGVSIGDELEYTDEITLGRSIVNRTTFTGTV

SEQ ID NO: 48481 - protein, 125 aa, Bacteroides fragilis
MARKSFSVLFFIKKGKLLKASILDKYKDVAECTGKLLPVLSNQRMNSYLKEIADVCGLQKNLCTHSARHSYATSICLANGVSMENVAKMLGHADTSVTKHYARVLDQNILKDMQKVNSCLSELAI

SEQ ID NO: 48482 - protein, 327 aa, Bacteroides fragilis
MAGPQSYLASEADRLWVAVYDGFSRMAVPLFMIVSAFLLAPMKEEQTTWQFYRQRFLRIIPPFFIFMILYSILPMLWGQINGETSLTDLSRIFLNFPTLAGHLWFMYPLISLYLFIPIISPWLRKASAKEERFFIGLFLLSTCIPYLNRWCGEVWGQCFWNEYHMLWYFSGYLGYLVLAHYIHTHLTWSRSKRFIIGTILMVIGAVLTIYSFYSQAIPGETLSTPVIEIGWAFCTINCVLLTAGTFLMFTCINSSKAPRIITEMSKLSYGMYLMHIFWLGLWATVFKYTLALPTVAAIPCIAVSTFICCFITSKLISFIPGSKWIIG

SEQ ID NO: 48483 - protein, 165 aa, Bacteroides fragilis
MSLLLPDSGLIFWMLLSFGIVFAVLAKYGFPVIIKMVEGRKTYIDESLEVAREANAQLSRLKEEGEAIVAAANKEQGRIMKEAMQEREKIIYEARKQAEIAAQKELDEVKRQIQIEKDEAIRDIRRQVALLSVDIAEKVIRKNLDDKQEQMGMIDRMLDEVLTKN

SEQ ID NO: 48484 - protein, 429 aa, Bacteroides fragilis
MEFLVIILLLVLNGIFAMYEIALVSSSKARLETLVSKGNKSARGVLKQLEEPEKFLSTIQIGITLIGIVSGAFGGVAIADDVTPLFAMIPGAEVYAKDLAMITTVIVITYLSLIIGELVPKSIALSNPERYATLLSPVMILLTKISFPFVWLLSISTRLLNKLIGLKSEERLMTQEELKMILHQSSEQGVIDKEETEMLRDVFRFSDKRANELMTHRRDLVVLHTTDSKEKVLQIIDNEHFSKYLLIDDDTDEIAGVVSVKDIILMIGSEQEFNLREIARPALFIPESLYAKKVLELFKKNKNKFGVVVNEYGSTEGIITLHDLTESIFGDILEEDDTEEEEIVRRQDGSLLVEASMNIGDFMEEMGILSYDDIESEDFTTLGGLAMFLIGRIPKAGDIFTYKNLQFEVVDMDRGRVDKLLVIKREEEE

SEQ ID NO: 48485 - protein, 387 aa, Bacteroides fragilis
MGRITVDGSQTQFSCKLSVDPKLWDTKGGRVTGRSAAALETNRMLDKMRVRINRHYQEIMERDNFVTAEKVKNAFLGLEHRYHTLMQVFRRHNENYEKQVEAGMKAKGTLEKYRVVYKHLQEFLDIRYHVKDIALKELTPAFISDFEMFLRTDKHCCTNTVWLYVCPLRTMVFIAINNEWLTRDPFREYEIKKEETTRSFLTKDEIRLLMEGKLKNAKQELYRDLYLFCAFTGLSFADMRNLTEENIRTYFDEHEWININRKKTGVVSNIRLLDIANRIIGKYRGLCENGRIFPVPHYNTCLAGIRAVAKRCGITKHITWHQSRHTAATTVFLSNGVPIETVSSMLGHKSIKTTQIYAKITKEKLNQDMENLAARLNNVEEFAGCTI

SEQ ID NO: 48486 - protein, 533 aa, Bacteroides fragilis
MPVFDALYDHRETLNHILVRHEQGAAHAAQGFARASGEVGVCLVTSGPGATNTITGIADAMIDSTPIVVIAGQVGTAFLGTDAFQEVDLVGITQPITKWSYQIRRAEDVPWAVARAFYIAKSGRPGPVVLDFAKNAQVEKAEYMPAKLDFIRSYVPVPETDPEAVKAAAELINGAERPLVLVGQGVELGNAQQELRAFIEKADMPAGCTLLGLSALPTEHPLNKGMLGMHGNLGPNMNTNKCDVLIAVGMRFDDRVTGNLATYAKQAKVIHFDIDPAEINKNVHADVAVLGNCKETLSAVTALLQPNEHKEWLDSFLPYEQVEEEKVIRPELHPMGDTLSMGEVVRAVSDATNHEAILVTDVGQNQMMSARYFKYSKDRSMITSGGLGTMGFGLPAAIGATFGRPDRTVCVFMGDGGLQMNIQELGTIMEQKAPVKIIVLNNNFLGNVRQWQAMFFNRKYSFTPMLNPDYIKIASAYDIPAKRVFTREELADAIDEMIATDGPFLLEACVIEEGNVLPMTPPGGSVNQMLLEC

SEQ ID NO: 48487 - protein, 148 aa, Bacteroides fragilis
MKVEQVFSDRKRFLDLLLLADEQEDMIDRYLERGDMFALYDEDKLRAVCVVTNEGEGIYELKNIATCPDSQRKGYGKSLIEYLFHHYSDRCSVMFVGTGDTPHTLLFYQSCGFVPSHRIKNFFTDHYDHPIYENGIRLRDMVYLKKEK

SEQ ID NO: 48488 - protein, 283 aa, Bacteroides fragilis
MLRIAVQAKGRLFEETMALLEESDIKLSTTKRTLLVQSSNFPVEVLFLRDDDIPQSVATGVADLGIVGENEFVERQEDAEIIKRLGFSKCRLSLAMPKDIEYPGLSWFNGKKIATSYPGILDAFMKSNGVKAEVHVITGSVEVAPGIGLADAIFDIVSSGSTLVSNRLKEVEVVMRSEALLIGNKNMSKEKKEILDELLFRMDAVKTAEDKKYVLMNAPKDKLEDIIAVLPGMKSPTVMPLAQDGWCSVHTVLDEKRFWEIIGKLKALGAEGILVLPIEKMII

SEQ ID NO: 48489 - protein, 679 aa, Bacteroides fragilis
MEKNFKRTTVTSALPYANGPVHIGHLAGVYVPADIYVRYLRLKKEDVLFIGGSDEHGVPITIRAKKEGITPQDVVDRYHFLIKKSFEEFGISFDVYSRTSSKTHHELASDFFKKLYEKGEFIEKTSEQYYDEEAHQFLADRYITGECPHCHSEGAYGDQCEKCGTSLSPTDLINPKSAISGSKPVMKETKHWYLPLDKHETWLRQWILEEHKEWRPNVYGQCKSWLDMGLQPRAVSRDLDWGIPVPVEGAEGKVLYVWFDAPIGYISNTKELLPDSWETWWKDPETRLVHFIGKDNIVFHCIVFPAMLKAEGSYILPDNVPSNEFLNLEGDKISTSRNWAVWLHEYLEDFPGKQDVLRYVLTANAPETKDNDFTWKDFQARNNNELVAVYGNFVNRAMVLTQKYFEGKVPAAGELTDYDKETLKEFSDVKAEVEKLLNVFKFRDAQKEAMNLARIGNKYLADTEPWKLAKTDMERVGTILNISLQLVANLAIAFEPFLPFSSERLRQMLNMDSFDWAELGRNDLLPAGHQLNKPELLFEKIEDATIEAQVQKLLDTKKANEEANYKAKPIRANIEFDDFMKLDIRVGTVLECQKVPKADKLLQFKIDDGLETRTIVSGIAQHYKPEELVGKQVCFIANLAPRKLKGIVSEGMILSAENNDGSLAVVMPGREVKPGSEVK

SEQ ID NO: 48490 - protein, 96 aa, Bacteroides fragilis
MGIIIKPLVTEKMTAITDKLNRFGFIVRPEANKLEIKSEVEALYNVTVVDVNTVKYAGKNKSRYTKAGIINGRTNAFKKAIVTLKEGDTIDFYSNI

SEQ ID NO: 48491 - protein, 575 aa, Bacteroides fragilis
MNILELSEQEIIRRNSLNELRAMGIEPYPAAEYVTNAFSTDIKAEFKDDETPRQVSVAGRMMSRRIMGKASFIELQDSKGRIQVYITRDDICPGEDKEMYNTVFKRLLDLGDFIGIEGFVFRTQMGEISIHAQKLTVLAKSIKPLPIVKYKDGVTYDSFEDPELRYRQRYVDLAVNEGVKDIFIKRSKVYSSMREYFNSKGYMEVETPILQAIAGGAAARPFMTHHNALDIPLYMRIASELYLKRLIVGGFEGVYEIGKNFRNEGMDRTHNPEFTCMEIYVAYKDYNWMMEFTEKMIEKICLDVNGTTEVKVGDNIINFKAPYKRVTMLGAIKEHTGYDLTGMNEEQIREVCKKLNMEIDDTMGKGKLIDEIFGEFCEGTYIQPTFITDYPIEMSPLTKKHRDNPELTERFELMVNGKELCNAYSELNDPIDQLERFEDQMKLSEKGDDEAMIIDKDFVRALEYGMPPTSGMGIGMDRLTMLMTGQSTIQEVLFFPQMRPEKVVPKDSASKFMELGIAEEWVPVIQKAGYNQVADMKEVNPQKFHQDICGINKKYKLELTNPSVNDVAEWIQKIK

SEQ ID NO: 48492 - protein, 464 aa, Bacteroides fragilis
MIYYHEQHHLFLFSKEYFLKQIHTEGLLSYLTDFIIQFFYMPALGSAILAGILAGIYLLTHYNIKKITGQPDILQLSLIPSVSLFIYTLPVDHSLTLIIGVFLGLLILGCIAFFISGIWKNITLHRINVPGKKKKLIISTALITIYAIGACYIFIHSYNMPERIMIMAEKSVKEKNWENVLTQTEKYINSGRTNQLISYFHNLALYHTEKLPYQLFDYPQKLGVKALYFPWNSDSRESEYGHFIYEDLGYINEAQRWEFEAMVVWGETAPHLLNLARYNIVNKRPEVARRFINLLKQSLFYRKDAEELEKQLHAGSVPGLRMALENNKEHPARFANVINIGPELQYLCEQDTTNRMAFEYLMSDLLLSNNVVRFVDNLKFIRHFKYPEMPPAYQEALYIYKLGVDGETFSKSGFNVSENTEKRFQRYYSLYKNRQMQRLKAEFGNTYWYYLNFISPYGDKIIRN

SEQ ID NO: 48493 - protein, 532 aa, Bacteroides fragilis
MANIKQAVKLGVFTLAIMNVTAVVSLRGLPAEAVYGMSSAFYYLFAAIVFLIPTSLVAAELAAMFQDKQGGVFRWVGEAYGKKLGFLAIWVQWIESTIWYPTVLTFGAVSIAFIGMNDTHDMTLASNKYYTLAVVLIIYWLATFISLKGMGWVGKVAKIGGMVGTIIPAALLIILGIVYLASGGHSNLDFHSSFFPDLTNFDNVVLAASIFLFYAGMEMGGIHVKDMQNPSKNYPKAVFIGALITVIIFVLGTFSLGIIIPAKDISLTQSLLVGFDNYFRYIHASWLSPIIAIALAFGVLAGVLTWVAGPSKGIFAVGKAGYMPPFFQKTNKLGVQKNILFVQGGAVTVLSLLFVVMPSVQSFYQILSQLTVILYLVMYLLMFSGAIYLRYNMKKANRPFRIGKKGNGLMWIVGGLGFLGSLLAFILSFIPPSQISTGSNTVWFSVLIIGALVVVIAPFIIYAAKKPSWADPNSTFEPFHWETQAKPQVAPATTTTAGPATSSATTIGSTTSAPSTGSGSVSSDKDTPQKQS

SEQ ID NO: 48494 - protein, 409 aa, Bacteroides fragilis
MKVEKFKVLLYLKKSEPDKTGKAPIMGRITLNRTMAQFSCKLSCTPGLWNARESRLNGKSREAVETNEKIERLLLAVHSAFNSLMERKRDFDAAAVRDMFQGNAGMQMTLLKLLDRHNGEMKARVGVDRAPTTLSTYLFTYRTLSEFIKAKFKVPDLVFGQLNEQFIRDYQDFILLEKGYAVDTLRGYLAILKKICRIAYKEGHSEKYHFCHFKLPKQKETTPKALSRENFEKLRDLEIPEKRRSHVITRDLFLFACYTGTAYADAVSITRKNLFRDDEGSLWLKYQRKKTDYLGRVKLLPEAVALIEKYRDDTRETLFPPQDYHTLRANMKSLRLMAGLSQDLVYHMGRHSFASLVTLEEGVPIETICKMLGHSNIKTTQIYARVTPKKLFEDMDRFVEATRDLKLIL

SEQ ID NO: 48495 - protein, 51 aa, Bacteroides fragilis
MATTVCLANGVPIESLSKVLGHTNIKTTQLYAKITDEKLSNDLAILMSKID

SEQ ID NO: 48496 - protein, 405 aa, Bacteroides fragilis
  MISC_FEATURE (394)..(394): X=any amino acid
  MISC_FEATURE (395)..(395): X=any amino acid
  MISC_FEATURE (396)..(396): X=any amino acid
  MISC_FEATURE (397)..(397): X=any amino acid
  MISC_FEATURE (398)..(398): X=any amino acid
  MISC_FEATURE (399)..(399): X=any amino acid
  MISC_FEATURE (400)..(400): X=any amino acid
  MISC_FEATURE (401)..(401): X=any amino acid
  MISC_FEATURE (402)..(402): X=any amino acid
  MISC_FEATURE (403)..(403): X=any amino acid
  MISC_FEATURE (404)..(404): X=any amino acid
  MISC_FEATURE (405)..(405): X=any amino acid
MKKVFERIIEGILTCSGFVTSITILLVVLFLFTEAFGLFSSKVIEEGYVLALNKDNKVSELTPMQIKDVFDEEITNWKELGGEDLPIRVFRLEDITHYYSEEELGEAYENAGEKIMELIQKTPGIVAFIPQKFVVRPDAVHFIKDNTISVKEVFAGAEWFPTATPAPLFGFLPLITGTLWVSLFAILIALPFGLSVSIYMSEVADSKVRSWLKPVIELLSGIPSVVYGFFGLIVIVPLIQKVFDLPVGESGLAGSIVLAIMALPTIITVTEDAMRNCPRAMREASLALGASQWQTIYKVVIPYSISGITSGVVLGIGRAIGETMAVLMVTGNAAVIPTTILEPLRTIPATIAAELGEAPAGGPHYQALLLLGVVLFFITLIINFSVEYISSKGXXXXXXXXXXXX

SEQ ID NO: 48497 - protein, 665 aa, Bacteroides fragilis
MTVKEKIEQLRLQLHQHNYNYYVLNAPEISDKEFDDLMRELQDLEQEHPEYKDENSPTMRVGSDINKNFTQVAHKYPMLSLSNTYSENEVTDFYDRVRKALNEDFEICCEMKYDGTSISLTYENGKLIRAVTRGDGEKGDDVTDNVKTIRSIPLVLHGDNYPEVFEIRGEILMPWEVFEALNREKEAREEPLFANPRNAASGTLKLQNSAIVASRKLDAYLYYLLGDNLPTDGHYENLQEAAKWGFKISPLMRKCQTLQEVFDFINYWDVERKNLNVATDGIVLKVNSLKQQRNLGFTAKSPRWAIAYKFQAERALTRLNMVTYQVGRTGAVTPVANLDPVQLSGTVVKRASLHNADIIEGLDLHIGDMVYVEKGGEIIPKITGVDTSVRFMIGEKVKFITHCPECGSKLIRYEGEAAHYCPNETACPPQIKGKIEHFISRKAMNIDGLGPETVDMFYRLGLIHDTADLYRLTTDDIRGLDRMGDKSAENIIKGIMQSKEVPFERVIFALGIRFVGETVAKKIAKSFKDIEELENADLETLINIDEIGEKIARSILNYFANESNRKLVGRLKTAGLQLYRPEEDLSGHTDKLAGQSIVISGVFTHHSRDEYKDLIEKHGGKNVGSISSKTSFILAGDNMGPAKLEKASKLGIKIMNEEEFLKLIS

SEQ ID NO: 48498 - protein, 238 aa, Bacteroides fragilis
MILSSLVHTDFQPYLLPNTDAWALPGDKALELLVYLEQQGVRQIYCVPPVKVENEGNAFSFLKDAFQYLQQQYSGNISLRLSARYRLDEGFPALLEKGDLLTIGGGKELLVDVSPLQQPEGLSEMIHAICRSGYIPVLMQPERSLYWGTEDYLHLRESGCRLMLNLYSLFGYNGDGALNYSRMLLRKEWYTYLCSGREDTKVMRYGESFSIEDDDDLAMKLQEIERNSRLLWAAMENG

SEQ ID NO: 48499 - protein, 118 aa, Bacteroides fragilis
MYFAKLQNVPTSPRKMRLVADMIRGMEVNRALGVLKFSSKEAAARVEKLLRSAIANWEQKNERKAESGELFVTKIFVDGGATLKRMRPAPQGRGYRIRKRSNHVTLFVGSKSNNEDQN

SEQ ID NO: 48500 - protein, 887 aa, Bacteroides fragilis
MRNLLGGKGANLAEMNLIGVPVPPGFTITTDVCTEYYEMGQEKVVSLLKEEVEKAIANIENLMRSKFGDVENPLLVSVRSGARASMPGMMDTILNLGLNDEVVEGLTRKTGNARFAWDSYRRFVQMYGDVVLGMKPVNKEDQDPFEAIIEEVKHAKGVKLDNELEVEDLKELVKKFKAAVKAQTGKDFPTCAYEQLWGAICAVFNSWMNERAILYRKMEGIPDEWGTAVSVQAMVFGNMGDTSATGVCFSRDAATGEDLFNGEYLINAQGEDVVAGIRTPQQITKIGSQRWAQLAGVSEEERASKYPSMEEAMPEIYKQLDELQTKLENHYKDMQDMEFTVQEGKLWFLQTRNGKRTGAAMVKIAMDLFRQGMIDEKTALMRVEPNKLDELLHPVFDKSALKQAKVLTRGLPASPGAATGQIVFFADDAAEWHAAGKRVVMVRIETSPEDLAGMAVAEGILTARGGMTSHAAVVARGMGKCCVSGAGALNIDYKARTVEVDGVLLKEGDFISLNGSTGEVYQGKVETKAAELSGDFADLMKLADKYTRLQVRTNADTPHDAEVARNFGAVGIGLCRTEHMFFEGEKIKAMREMILAENAEGRRKALAKILPYQQADFKGIFKAMAGCPVTVRLLDPPLHEFVPHDLKGQQEMADTMGVSLQYIQQRVESLCEHNPMLGHRGCRLGNTYPEITQMQTRAILGAALELKKEGIETHPEIMVPLTGILYEFQQQESVIRAEADKLFEEVGDRIDFKVGTMIEIPRAALTADRIASSAEFFSFGTNDLTQMTFGYSRDDIASFLPVYLEKKILKVDPFQVLDQNGVGQLVRMATEKGRAIRPDLKCGICGEHGGEPSSVKFCHKVGLNYVSCSPFRVPIARLAAAQAAIEE

SEQ ID NO: 48501 - protein, 231 aa, Bacteroides fragilis
DDEPLALEQLTGYIARVPFLQLIASCQDAFSAMQVLSEEEVDLMFVDIHMPDLNGLDLVRSLVVKPLIVFTTAYPEYAVEGFKVDAVDYLLKPFEFQDLLKAADKARRQFEYHLQDNGGGTETDLLEKDGSLFVKSEYKIIRINVADICYIEGMSEYVRIYTDAADKPVVTLLSMRKLEERLPQEMFMRVHRSYIVNLRKITEVSRYASFSIRIYIYRWEITIRKDLQNIL

SEQ ID NO: 48502 - protein, 737 aa, Bacteroides fragilis
MERDEFFTKEERELLFSLYKKLLRLTGETLQKGDCRKLKKHLIDSTQNNTMQRDSFGLNPVIKDMQTAVIVAEEIGMKRASILGIMLHTPVRCHSYTIEYIQQEYGEDVAGIIRGLIKINDLYDKSPTIESENFRNLLLSFAEDMRVILIMIADRVNVMRQIKDAENDEARRRVANEAAYLYAPLAHKLGLYKLKSELEDLSLKYTEHDIYYHIKEKLNETKKSRDRYIANFIAPIQQKLEEAGLHFHMKGRTKSIHSIYQKMKKQKCQFENVYDLFAIRIILESQFEKEKQECWQAYSIVTDMYQPNPKRLRDWLSVPKSNGYESLHITVMGPEGKWVEVQIRTERMDDIAERGLAAHWRYKGVKGESGLDEWLTSIREALENTENDLEMMDQFKLDLYEDEVFVFTPKGDLFKLGKGATVLDFAFHIHSKLGCKCIGAKVNGKNVQLRQKLNSGDQVEIMTSNTQTPKQDWLNIVTTSKARTKIRQALKEMVARQHDFAKETLERKFKNRKMEYDEAVMMRLIKRLGFKNVTEFYQKIADEVLDVNDILDKYIEQQKRDSERDEVTYRSAEEYNLQNQIDETTVTKEDVLVIDQNLKGLDFKLAKCCNPIYGDDVFGFVTVSGGIKIHRNDCPNAGQMRERFGYRIVKARWAGKSEGTQYPITLRVVGHDDIGIVTNITSIISKENGISLRSIGIDSNDGLFSGTLTIMVSDTGRLEALIKKLRTVKGVKQVSRN

SEQ ID NO: 48503 - protein, 132 aa, Bacteroides fragilis
MWAVRIFKTRTIAAEACKKGRISINGSFVKAARMIKPGDVIQVKKPPITYSFKVLQAIEKRVGAKLVSEMMENVTTPDQYELLEMSKISGFIDRARGTGRPTKKDRRSIEEFTTPEFMDDFDFDFDFEEDNE

SEQ ID NO: 48504 - protein, 442 aa, Bacteroides fragilis
MSAGLTTLVAILLLALGKGAEKQLNRRDGYVIVSVAWVVFSLFGMLPFYLSHYIPSITNAFFETMSGFSSTGATILDDIEALPHGLLFWRSMTQWIGGLGIVFFTIAVLPIFGVSGVQLFAAEASGPTYDKVHPRIGVTAKWIWTIYAGLTAIEVILLLFGGMGLFDSICHSFATTGTGGYSTKQDSIAYYNSPYIEYVIGVFMFLSGINFTLLLLLFTGKLKKVSQNAELKWYVMSVILFTAFIAAVLYRTTPMGAEESFRKAFFQVASLHTSTGFVTADYMQWVPVLWGTLTVIMLIGACAGSTTGGMKCIRMVILAKVSRNEFKHIVHPNAVLPVRVNKQVISPAILSTVLAFSFIYAVIIIVSVLLMLAMGVGFTESIGTVISSIGNMGPGLGSCGPAYSWDGLPDLAKWLLSFLMLLGRLELFTVLLLFSSDFWKRN

SEQ ID NO: 48505 - protein, 499 aa, Bacteroides fragilis
MAFKSISAAEAASLVKHGYNIGLSGFTPAGTAKAVTSEIAKIAEAEHAKGNPFQIGIFTGASTGDSCDGILSRVKAIRYRAPYTTNPDFRKAVNNGEIAYNDIHLSQMAQEVRYGFMGKVNVAIIEACEVTPDGKIYLTAAGGIAPTVCRLADQIIVELNSAHSKNMMGMHDVYEPLDPPYRREIPIYKPSDRIGLPYIQVDPKKIVGIVETNWPDEARSFAAADPITDKIGQNVADFLAADMKRGIIPSTFLPLQSGVGNIANAVLGALGRDQTIPAFEMYTEVIQNSVIGLIREGRVKFGSACSLTVTNDCLQGIYDDMDFFRDKLILRPSEISNSPEVVRRLGIISINTAIEADIYGNVNSTHIGGTKMMNGIGGSGDFTRNAYISIFTCPSVAKEGKISSIVPMVSHLDHSEHSVNIVITEQGVADLRGKSPKERAQAIIENCAHPDYKQILWDYLKLAGNKSQTPHAIQAALGMHAELAKSGDMKNVNWAEYER

SEQ ID NO: 48506 - protein, 736 aa, Bacteroides fragilis
MSNITKKAFPVLNMHCAGCANNVEKTVKKLAGVVDASVNFATNTLSVSYEADKLTPGEIRAAVLAAGYDLIVEEALKEERQEEAQEKHYRLLKRQVIGAWIFVVPMLLFSMVLMHVPFSNEIQLILALPVMIFFGGSFYVNAWRQARLGRSNMDTLVALSTSIAFLFSVFNTFFPEFWYSRGLEPHVYYEAAVVIIAFVLTGKLMEERAKGNTSTAIRKLMGLQPRVARVLREGIEEDILIDQLQTGDLVVVRPGEQIPVDGRLSEGESYVDESMISGEPIPVEKKVGDRVLAGTINQKGAFVIKASGVGSETVLARIIRMVQEAQGSKAPVQRIVDRVTGIFVPVVLCIAVLTFVIWLLVGGTDYFSHALLSAVSVLVIACPCALGLATPTALMVGIGKAASNHILIKDAVALEQMRKVDVVVLDKTGTLTEGHPTVSGWLWAQVQEEHFKNVLLAAELKSEHPLAGAIVSSLQEVEKIVPAQLESFESITGKGIKVVYQGDTYWVGSHKLLKDFSASLSDVLAEMMVQYESDGNSIVYFGRGTEVLAVVAIADQIKPTSAEAVKELKRQGIDICMLTGDGQRTALAVSGKLGIDRFVADALPDDKEEFVRELQMQGKTVAMVGDGINDSQALALADVSIAMGKGTDIAMDVAMVTLMTSDLLLLPRAFELSKQTVKLIHQNLFWAFIYNLIGIPIAAGILFPVNGLLLNPMLASAAMAFSSVSVVLNSLSLARK

SEQ ID NO: 48507 - protein, 494 aa, Bacteroides fragilis
MRKATRTQWIKCSIAILLYLIFLIWVKSWWGLIVVPFIFDIYITKKIPWSFWKKSKNPTVRSVMSWVDAIVFALVAVYFVNIYVFQNYQIPSSSLEKSLLVGDFLYVSKMSYGPRVPNTPLSMPLAQHTLPILNTKSYIEWPQWKYKRVPGFGKVKLNDIVVFNFPAGDTVALNFQDADFYTLAYNIGKQIYPNPIDMDSLTREQQKTVYDLYYNAGRKEILSNPQRYGKVVTRPVDRRENYVKRCVGLPGDTLQIINGQVMIDGKAIENPENLQFNYFVQTTGPYITEEMFRELGISKADQRLTPEGAGYEEGLIELGLDGRNAQGGLNPVYHLPLTKKMYDTLSGNKKLVGKIVIEPEEYSGEVYPLNLNTHWNRSDYGPIWIPAKGATITLTPDNLPIYERCITAYEGNKLEQKEDGIYINGVKTNQYTFQMDYYWMMGDNRHNSADSRYWGFVPEDHVVGKPIVVWLSLDKDRNWFDGKIRWNRIFKWVD

SEQ ID NO: 48508 - protein, 328 aa, Bacteroides fragilis
MKQATTGNKDIIKKLLTDSLSPEEREKLNNYKFVNQAIYSQWEQASDMYTDVDKEERMLTNVMHQIKKGKTGRFRQSLHRYGWVASIALLLICGTLSLMLLSRKAEPEVWYVLNSGRQSMDSVRLADGTLVMLNAGSRLTYPKEFSGNKREVTLSGQAFFSVHPDKVHPFVVKTKNMDVTALGTAFEVFSFDGDESVETVLLNGKVKVEPKDHKEQIKGEYILQPNEKLTCQVNGDIRIDRVDANSYSAWRIGGRLSFKNETLAMILPRLEKWYGQKIDCPQKTADHYRFTFTLRNEPLDLILNIMSHSAPLNYKLISNDYYVLEELK

SEQ ID NO: 48509 - protein, 507 aa, Bacteroides fragilis
MQEKIIILDFGSQTTQLIGRRVRELDTYCEIVPYNKFPKGDETVKGVILSGSPFSVYDESAFKVDLSEIRGKYPILGICYGAQFMAYTNGGKVEPAGTREYGRAHLTSFCKDNVLFKGVREGTQVWMSHGDTITAIPENFKTIASTDKVAIAAYQVEGEQVWGVQFHPEVFHSEDGTQMLRNFVVDVCGCKQDWSPASFIESTVAELKAQLGDDKVVLGLSGGVDSSVAAVLLNRAIGKNLTCIFVDHGMLRKNEFKNVMHDYECLGLNVIGVDASEKFFSELEGVTEPERKRKIIGKGFIDVFDEEAHKLKDVKWLAQGTIYPDCIESLSITGTVIKSHHNVGGLPEKMNLKLCEPLRLLFKDEVRRVGRELGMPEHLITRHPFPGPGLAVRILGDITPEKVRILQDADDIFIQGLRDWGLYDQVWQAGVILLPVQSVGVMGDERTYERAVALRAVTSTDAMTADWAHLPYEFLGKVSNDIINKVKGVNRVTYDISSKPPATIEWE

SEQ ID NO: 48510 - protein, 89 aa, Bacteroides fragilis
  MISC_FEATURE (88)..(88): X=any amino acid
HYYLLPSNQKVNAYLKEITDICDIHKNLTFRVARHMMATTICLANGMLIESLSKVLGWSNIKTTQLYAKITDEKLNDDLAILKNKIDXL

SEQ ID NO: 48511 - protein, 721 aa, Bacteroides fragilis
MKTMIRKKIYLLLLLIPLLHGCKESDFNDLLDRQGDQRKELQELTDLCKKLNEDIYNLQVIVNTDRIGDNITHIEELADGAGYTISFSKSAPITIRNGKKGDTGPDGDAGKDGIDGTDGKDGVDGTDGKDGVDGTDGTDGKDGENGTDGKDGADGTNGTDGKDGVDGTDGKDGVDGTNGNKGEQGDPGQNPVVGIMQDPADSEYYWTIKIGSGEPYYLADNDGNRIKATSTVHDGQTPQLGVKQWETSDGGDDNYYWTQKIGTGPETWIEADGKKIVANAKNAVSVFEKVDLKEPDYVEFTLSGGATRFRLPIGRPVIEVPEGRKLFFFNRGGSQAIAFSCKGISKEQLSVDVPKGWKATVDFEAGALTLEAPSAGTADVALSGDVVLRSTNTAEETARTSFTVSMLYKIMLPDFRGSYVYNIRLWGKKVGELCREYQRELGLSATVVYPYLTGGVYGSGLITNTGASVKHDGTGYHASVSDRPAVMYIYTENGSEFYTDSSLKGREPDFGDGLQAERLTDADGNAYRIVKIGKQYWTAENLRTLTYPDGTPVATGLSGRAWRESGFDDSGSGACAVYDYENAAAAGAFANKVSYGVLYNRVAARKVVPAGWKLPTESDIVSTLRAFLGSNAGTLLKESGTEHWLTGGGTDLTGFSGVGGGYRGADGLSFNDFQQVGIWWSSASLESVGAVFRLSANSSVLEFNSGDNNSTGYSVRLLKED

SEQ ID NO: 48512 - protein, 943 aa, Bacteroides fragilis
MEYNFREIEKKWQKIWVDNHTYQVNEDASKQKFYVLNMFPYPSGAGLHVGHPLGYIASDIYARYKRLQGFNVLNPMGYDAYGLPAEQYAIQTGQHPAITTVNNINRYREQLDKIGFSFDWNREIRTCDPEYYHWTQWAFIKMFNSYYCNDEKQARPIEELIEAFSTNGTQGMNVACGEEMDFTADEWNAKSEKEQQEILMNYRIAYLGNTMVNWCPALGTVLANDEVVDGVSERGGYPVIQKVMRQWCLRVSAYAQRLLDGLETVEWTDSLKETQRNWIGRSEGAEMNFKVKDSDIEFTIFTTRADTVFGVTFMVLAPESELVAKLTTPEQKAEVDAYLDRTKKRTERERIADRSVSGVFSGSYAINPLTNEPIPVWISDYVLAGYGTGAIMAVPAHDSRDYAFAKHFNLEIRPLIEGCDVSEESFDAKEGIMMNSPRPGAPESGLVLNGLTVKEAIAKTKEYIKATGLGRVKVNFRLRDAIFSRQRYWGEPFPVYYKDGMPYMIDESCLPLELPEVAKFLPTETGEPPLGHATKWAWDTVNKCVTDNENIDNITIFPLELNTMPGFAGSSAYYLRYMDPRNHEALVSPAVDQYWKNVDLYVGGTEHATGHLIYSRFWNKFLHDWGISVAEEPFQKLVNQGMIQGRSNFVYRIKDTNTFVSLNLKDQYEVTPIHVDVNIVSNDILDLEAFKAWRPEYETAEFILEDGKYICGWAVEKMSKSMFNVVNPDMIVEKYGADTLRMYEMFLGPVEQSKPWDTNGIDGVHRFIKKFWSLFYDRNGEYLVKDEPATKEELKALHKLIKKVTGDIEQFSYNTSVSAFMICVNELSSLKCNKKEVLEQLIVVLAPFAPHVCEELWDTLGNTTSVCDAQWPAFNEQYLVEDTVNYTISFNGKARFNMEFPADAASDAIQATVLADERSLKWTEGKTPKKVIVVPKKIVNIVI

SEQ ID NO: 48513 - protein, 326 aa, Bacteroides fragilis
MRSRSTILFSILITLTVGLFLLDLAVGAVNIPIRDVWAALTGGNCSRATEKIVLNIRLIKAIVALLAGAALSVSGLQMQTLFRNPLAGPYVLGISSGASLGVALVVLAGIGSSIGIAGAAWVGAAVVLLVITAVGQRIKDIMVILILGMMFSSGVGAVVQILQYLSKEESLKAFVIWTMGALGDVTSGQLLILVPSVFAGLLLAVLTIKPLNLLLFGEEYAVTMGLNIRRSRSLLFLSTTLLAGTITAFCGPIGFIGLAMPHVTRMLFQNSDHHVLLPGTILSGASILLLCDIISKIFTLPINAITALLGIPIVVWVVLRNKSITA

SEQ ID NO: 48514 - protein, 1427 aa, Bacteroides fragilis
MAFRKENKIKSNFSKISIGLASPEEILENSSGEVLKPETINYRTYKPERDGLFCERIFGPIKDYECHCGKYKRIRYKGIVCDRCGVEVTEKKVRRERMGHIQLVVPVAHIWYFRSLPNKIGYLLGLPTKKLDSIIYYERYVVIQPGVKAEDGIAEFDLLSEEEYLDILDTLPKDNQYLEDTDPNKFIAKMGAEAIYDLLARLDLDALSYELRHRAGNDASQQRKNEALKRLQVVESFRASRGRNKPEWMIVRIVPVIPPELRPLVPLDGGRFATSDLNDLYRRVIIRNNRLKRLIEIKAPEVILRNEKRMLQESVDSLFDNSRKSSAVKTDANRPLKSLSDSLKGKQGRFRQNLLGKRVDYSARSVIVVGPELRMHECGIPKLMAAELYKPFIIRKLIERGIVKTVKSAKKIVDRKEPVIWDILEHVMKGHPVLLNRAPTLHRLGIQAFQPKMIEGKAIQLHPLACTAFNADFDGDQMAVHLPLSNEAVLEAQMLMLASHNILNPANGAPITVPSQDMVLGLYYITKLRKGAKGEGLTFYGPEEALIAYNEGKVDIHAPVKVIVKDLDENGNIVDVMRETSVGRVIVNEIVPPEVGYINTIISKKSLRDIISAVIKACGVARTADFLDGIKNLGYKMAFQGGLSFNLGDIIIPKEKETLVQRGYEEVEQVINNYNMGFITNNERYNQVIDIWTHVNSELSNILMKTISSDDQGFNSVYMMLDSGARGSKEQIRQLSGMRGLMAKPQKAGAEGGQIIENPILSNFKEGLSVLEYFISTHGARKGLADTALKTADAGYLTRRLVDVSHDVIINEEDCGTLRGLVCTDLKNNDEVIATLYERILGRVSVHDIIHPQTGELLVAGGEEITEDIAKKIQESPIESVEIRSVLTCESKKGVCAKCYGRNLATNHMVQKGEAVGVIAAQSIGEPGTQLTLRTFHAGGTAANIAANASIVAKNNARLEFEELRTVDIVDETGEAAKVVVGRLAEVRFIDVNTGIVLSTHNVPYGSTLYVADGEVVEKGKLIAKWDPFNAVIITEATGKIEFEGVIENVTYKIESDEATGLREIIIIESKDKTKVPSAHILTEDGDLIRTYNLPVGGHVVIENGQKVKAGEVIVKIPRAVGKAGDITGGLPRVTELFEARNPSNPAVVSEIDGEVTMGKVKRGNREIIVTSKTGEVKKYLVPLSKQILVQENDYVRAGTPLSDGATTPADILAIKGPTAVQEYIVNEVQDVYRLQGVKINDKHFEIIVRQMMRKVTVDEPGDTRFLEQQVVDKLEFMEENDRIWGKKVVVDAGDSENLKAGQIVTARKLRDENSMLKRRDLKPVEVRDAVAATSTQILQGITRAALQTSSFMSAASFQETTKVLNEAAINGKIDKLEGMKENVICGHLIPAGTGLREFDKIIVGSKEEYDRILANKKTVLDYNEVE

SEQ ID NO: 48515 - protein, 421 aa, Bacteroides fragilis
MIYSFATKKKTSMARSTFRVLFYANGSKEKNGIVPIMGRVTINGTVAQFSCKRSISKTLWDAKGNRAKGKSVEARETNLALDNIKAQIIKHYQRISDREAYVTAEMVRNAYQGIGCEYETILGAFDKENAKFLKRVGKDRCMGSYRVMVRSRNYVAAFIKSFYKRNDMSMLELISDFIKEFSVFLTTEQGLKNATVWLACMWVKTIVLRAHYNGLIPRNPFAQFRITPNVKEREYLTEGEIRQLIEHEFTDATLAFTRDLFVFACFTALSFADIRELTTDDIMDVNGEKWIISKRHKTGVPFQVKLLDIPLQIIGKYRPFQKDNSVFGEINYWSICKKLKNVIRECNINKQISFHVARHTFGTLALSKGMPIESVSRVLGHTNIKTTQIYAKITTQKLGNDLTAFGNQLNRTFGNIKVAGV

SEQ ID NO: 48516 - protein, 485 aa, Bacteroides fragilis
MLLKQTKIVASISDRRCDVDFIKELFDAGMNVVRMNTAHASREGFEALIANVRAVSNRIAILMDTKGPEVRTTANADPILYQIGEKVKIVGDPDRETTRECIAVSYPNFVHDLNVGGTILIDDGDLELRVIDKTTEYLLCEVQNEATLGSRKSVNVPGVRINLPSLTEKDRNNILYAIEKDIDFIAHSFVRNRQDVLDIRGILDAHNSDIRIIAKIENQEGVDNIDEILEVADGVMVARGDLGIEVPQERIPGIQRMLIRKCILAKKPVIVATQMLHTMINNPRPTRAEVTDIANAIYYRTDALMLSGETAYGKYPVEAVKTMTKIAAQAEKDKLEENDIRIPLDENSNDVTAFLAKQAVKATTKLKIRAIITDSYQGRTARNLAAFRGKYPVLAICYKEKTMRHLALSYGVEAIYMPELANGQEYYFAALRRLLKEGRLHPTDMVGYLSSGKAGTQTSFLEINVVEDALKHAGDSVLPNSNRYL

SEQ ID NO: 48517 - protein, 138 aa, Bacteroides fragilis
  MISC_FEATURE (137)..(137): X=any amino acid
DCKVKHIILTGGTDTARSIAKAIPATPLSAETGGKNVIILTASGDRDHTIMNIVISVFGNAGQKCSACSLLLVERSVYEDKNFQKKLIDVATSMKAGSVWNPGNVVGPMITNKNEKLLRALTLEPGESWLVPYLFPXD

SEQ ID NO: 48518 - protein, 368 aa, Bacteroides fragilis
MEKTKRDSRHIDPLKDEEKFFQWLKFKSVRMNQEHLSKDDYERLRQRIHVSLRMLRRKRTVRRVAYYGVSVCVIIALGIVAYLNHYERVEPVPSVVEKKAEIVWQPLKSEDIRLVSGDSITSFRQNVQLLLSKDGSAMVYHPNSGQKRIRMEQDEVNELVVPYGKRSKVKLEDGTEIWLNSGSVLKFPTHFSGEKREVSLKGEMYAEVTADSKKPFIVHTAHFDIQVYGTRFNISAYEDEPTPSCVLVDGIVGFRPESGPEIRMKTNEKVLYDGKRFEKRKVSASRYTCWKEGYLELDDANIMDVLNRIGRYYNLSFSFGDKKRLTGRKCSGKIYLSDNIDNVLTTISLLYSTDYRKEERTIFISENP

SEQ ID NO: 48519 - protein, 277 aa, Bacteroides fragilis
MFVARSSLATRKALLDKELGEKRFLQVAVVGLSLFVVLLVWGVIRLIRIRGELVKSQKEMAESYAVVVATDKMKEVFLRNITDEIRVPLDTVVELSDRLCRETNLKQEKQQEYSATIKKCASKLIGLIFNVLDLARLESGMMKFVVEEYDVVQLCTDARLMVEMQTENRTKVDFHTEPDMLLIDVDTNRFMKMLASVLKYPEESEGLFRVKFILSRPSEDCLQIKVVNSPIFMTAESEKEFDVLHTINRLYLESFQGSYQLLEESGERMIIITYPVS

SEQ ID NO: 48520 - protein, 341 aa, Bacteroides fragilis
MDESCYINESVLLNYFAGELPADRRKEVEEWIAASEDNEKMARDIFRLYRAADTLDYMNRVDASAALQQVKGRIHKHRHRISWMVWGQRIAACMALPLLATTLYLILKNPPQEYVEIRTNPGMVAEANLPDGTKVWLNSGSSLKHPVKFTGDTRTVELDGEAYFSVRKDRSKRFVVNTPFNIQTEVLGTEFNMEAYRTDSVVRTTLVSGSVRLSFLGKGDTKETFVMKPDEEFVYNTATHEARAEKSYVEIYTAWKNGQVVLKNTSLAETLKILSKRFNVEFIVKDSTLYANSFTGVFSRQYLPLILEHFRYASGIQYKYLDLEYDATHKAIQEKTKIELY

SEQ ID NO: 48521 - protein, 166 aa, Bacteroides fragilis
MSRISIIAAVDSRMAIGFQNKLLFWLPNDLKRFKALTTGNTIIMGRKTFESLPKGALPNRRNVVLSSNPAAECPGAEVFTSLEAALESCQAEEKVYIIGGASVYRQAISLADELCLTEVNDTAPEADAFFPAVDTTIWHEKSREVHPADEKHLCSYAFVDYVRGID

SEQ ID NO: 48522 - protein, 687 aa, Bacteroides fragilis
MMKVKLALLLTLIGTLPLAAQNVRQEQDTVSYMNDDPFNLEQIVVTATRTEKKIKNTPVITQIITSKQIEERGTGNIQDLLTQEVPGLNFQEVGYGTSIDIQGLGSKHILFLIDGERIAGENGGNIDYSRINLYNIDHIEIVKGASSALYGSQAMGGVINIITRKAKKKFEASAGIRYAGRNQQNYKDTPKDHSQYKYRIHLDKPNLNTNLSLGLNLGKFTMNTDVLYKSFDGYQLFDKKPLVKYFPAYNTTITEELSKPPTSISGYEDVQVAHKMDYRFSKRLKVQLKGSYYMLNKYDFQADNIFEKSEDYTYGGSIDYTISDKSSLVASVHTDHYNRYDKYELKSGRRLEYKNNIIQPRIVYSTTALDKQTITGGLEYYRESLFSDKFETGVKENKSQWYATAFLQDDWSINKQFSVIAGLRCDYHEKYGTNLTPKASVMYKIFPFTVRFNYARGYRSPSIKELYMNWDHLGMFWIYGNSKLKPETNNYISLSGEYVNSWININANVYSNWFRNKIEGMWSNDQTELHYINIGKSRLAGVETMCKIQINRHINVHGAYNYLYTSKDADGVRLSSSSPHSGNIRAEYNTRIPRYATVVNLSGNIMGKKKFDVLDELEIDGKKVEAYYQAKVNPYCLWDLTVSQYIMQNLRITAGITNLFDYTSDRVTFNTSTSPGRNYFIACNYTL

SEQ ID NO: 48523 - protein, 188 aa, Bacteroides fragilis
MEPIINSQMPEFKVQAFQNGSFKTVSSEDVKGKWAIFFFYPADFTFVCPTELVDVAEKYEQFQAMGVEVYSVSTDSHFVHKAWHDASESIRKIKYPMLADPTGVLSRGFGVMIEEDGMAYRGTFLVNPEGKIKIAEIQDNNIGRNADELLRKVEAAQFVATHDGEVCPAKWRKGETTLKPSIDLVGKI

SEQ ID NO: 48524 - protein, 488 aa, Bacteroides fragilis
MNQKLLFSSALLVGIAGTQQALAQKKKVQDQKRPNVVFILADDLGFGDLSCYGQEKFETPNIDKLAQEGMRFTQCYSGTTVSAPSRSCLLTGTHSGHTAIRGNVELDPEGQFPLPADAQTIFHDFQNAGYKTGAFGKWGLGFIGSTGDPKKQGIDEFYGYNCQLLAHSYYPDHLWDNDKRVELKDNTLDVQYGKGTYSQDLIHSKALDFLDRMGKSGESFCMWYPTIIPHAELIVPEDSIIKKFRGKYPEKPFHGTEPGNPAFRKGGYCSQFYPHATFAAMVYRLDVYVGQIVQKLKEMGVYDNTIIIFASDNGPHMEGGADPDFFNSNGIWRGYKRDLYEGGIRVPMIISWPGRVQPSTQTDFMCSFWDVMPTFREILNPKAKNQQMDGVSLLPLLENRKGQKEHEYLYFEFQEMNGRQAVRKGPWKLVHMNVRGKNPYYELYNLNSDPSERHNVLNQYPEKVTELKAIMQSSHIPNPNFPLLPGEK

SEQ ID NO: 48525 - protein, 681 aa, Bacteroides fragilis
MSELQAIAQELGIKKTDSLKKEELVYKILDEQAIAGATKKVAADKLKEERKEDKKKRSRVTVKKENADKVFSSTKNGELTKTDAKTPAAKTQPQPKTTEPTPETAKEANAETNATPAESVKVTPYATPKKKPGRPRKNQVETEAKPAEETTEKPETVPSAQEEKPAAQPETEKRPISKPILKPKPAVVDEESSILSDIDADDDFIPIEDLPSEKVELPTELFGKFESTKAEAATAPEPVAQPQRPRVIRPRDNNNNNNYNNNNNNNNNNQRNNNQRQPVQQRPMPQQNAAEAAPVQERRVIEREKPYEFDDILTGTGVLEIMQDGYGFLRSSDYNYLSSPDDIYVSQSQIKLFGLKTGDVVEGVIRPPKEGEKYFPLVKVSKINGRDAAFVRDRVPFDHLTPLFPDEKFKLCKGGYSDSMSARVVDLFSPIGKGQRALIVAQPKTGKTILMKEIANAIAANHPEVYMIMLLIDERPEEVTDMARSVNAEVIASTFDEPAERHVKIAGIVLEKAKRLVECGHDVVIFLDSITRLARAYNTVSPASGKVLSGGVDANALHKPKRFFGAARNIENGGSLTIIATALIDTGSKMDEVIFEEFKGTGNMELQLDRNLSNKRIFPAVNIVASSTRRDDLLLDKQTLDRMWILRKYLSDMNPIEAMDFVKERLEKTKDNDEFLMSMNS

SEQ ID NO: 48526 - protein, 186 aa, Bacteroides fragilis
MDKTLYTLIVHSENFAGLLNQVTAVFTRRQINIESLNVSASSIKGVHKYTITAWTDKDTIEKVVKQIEKKIDVLQAHYFTEDEIYFHEIALYKVSMPEFQSQPEASKVIRRYNARIVEVNPVFAIVEKNGISEEITSLYEELSALNCVLQFVRSGRVAITTSCFERVNEFLADRETKYNLSKKEEK

SEQ ID NO: 48527 - protein, 875 aa, Bacteroides fragilis
MELASKYNPADVEGKWYQYWLDHKLFSSKPDGREPYTIVIPPPNVTGVLHMGHMLNNTIQDILVRRARMEGKNACWVPGTDHASIATEAKVVNKLAAQGIKKTDLSRDEFLKHAWAWTDEHGGIILKQLRKLGASCDWDRTAFTMDEKRSESVLKVFVDLYNKGLIYRGVRMVNWDPKALTALSDEEVIYKEEHGKLFYLRYKIEGEDGYAVVATTRPETIMGDTAMCINPNDPKNQHLKGKKVIVPLVGRVIPVIEDDYVDIEFGTGCLKVTPAHDVNDYMLGEKYNLPSIDIFNDNGTISEAAGMYIGMDRFDVRKQIEKDLEAAGLLEKTEAYTNKVGYSERTNVVIEPKLSMQWFLKMEHLAQIALEPVMKDDIKFYPAKYKNTYRHWMENIKDWCISRQLWWGHRIPAYFLPEGGYVVAVTDEEALKLAREKTGNPNLKMTDLRQDEDCLDTWFSSWLWPISLFDGINNPGNEEINYYYPTSDLVTGPDIIFFWVARMIMAGYEYEGKMPFKNVYFTGIVRDKLGRKMSKSLGNSPDPLELIEKYGADGVRMGMMLSAPAGNDILFDDALCEQGRNFCNKIWNAFRLVKGWENGMGTIDIPADAHLAVQWFDQRLDAAAVEVADLFSKYRLSEALMLIYKLFWDEFSSWLLEIVKPAYGQPVNGFIYSMTLSAFERLLAMLHPFMPFITEELWQQLREREPGASLMVQPLGEPGEVNEEFLQQFETAKEIISSVRTIRLQKNIALKEPLELQVVGANPVEKMNPVIRKMCNLSAIEVVDAKADGASFMIGTTEFAVPLGNMIDVDAEIARMEAELKHKEGFLQGVLKKLSNEKFVNNAPAAVIEMERKKQADAESIIQSLKESIASLKNV

SEQ ID NO: 48528 - protein, 521 aa, Bacteroides fragilis
IKITFPDGSVREYNEGVNGLQIAESISSRLAQDVLACGVNGEIYDLGRPINEDASVVLYKWEDEQGKHAFWHTSAHLLAEALQELYPGIQFGIGPAIENGFYYDVDPGEAVIKEADLPAIEAKMAELVAKKEAVVRRDIAKGDALKMFGDRGETYKCELISELEDGHITTYTQGDFTDLCRGPHLMTTAPIKAIKLTSVAGAYWRGHEDRKMLTRIYGITFPKEKMLDVYLALMEEAKKRDHRKIGKEMQLFMNSDTVGKGLPMWLPKGTALRLRLQDLLRRIQTRYDYQEVITPPIGNKLLYVTSGHYAKYGKDAFQPIHTPEEGEEYFLKPMNCPHHCEIYKNFPRSYKDLPLRIAEFGTVCRYEQSGELHGLTRVRSFTQDDAHIFCRPDQVKGEFLRVMDIISIVFRSMDFDNFEAQISLRDKVNREKYIGSDENWEKAEQAIIEACEEKGLKAKIEYGEAAFYGPKLDFMVKDAIGRRWQLGTIQVDYNLPERFELEYMGSDNQKHRPVMIHRAPF

SEQ ID NO: 48529 - protein, 260 aa, Bacteroides fragilis
MGCILYDPLAFGTLFVIVSALTIREFGHLVNQSGEVSINRTITMLGGAYLFLAIMGFCIDAAGSKIFIPYLILIIYLMVSELYLKKKNPVLNWAYSMLSQMYIALPFAMLNVLAFQNDPEASSVSYNPILPLSIFVFLWLNDTGAYCFGSLFGKHRLFERISPKKSWEGSIGGGIVAIASSFVFACYFPIMTWAEWAGLALVVVIFGTWGDLTESLLKRQLQIKDSGSILPGHGGMLDRFDSSLMAIPAGVIYLYALTLV

SEQ ID NO: 48530 - protein, 417 aa, Bacteroides fragilis
MKNIFKDLKSKDHKRYLGGLDVFRYIGPGLLVTVGFIDPGNWASNFAAGSEFGYSLLWVVTLSTIMLIILQHNVAHLGIVTGLCLSEAATQYTPKWVSRPILGTAVLASISTSLAEILGGAIALEMLLDIPIVWGAVLTTVFVSIMLFTNSYKKIERSIIAFVSVIGLSFIYELFLVDIDWPMAVEGWVTPAIPKGSMLIIMSVLGAVVMPHNLFLHSEVIQSHEYNKQDTASIKKVLKYELFDTLFSMIIGWAINSAMILLAAATFFKSGIQVEELQQAKSLLEPLLGSNAAIVFALALLMAGISSTITSGMAAGSIFAGIFGESYHIKDSHSQVGVILSLGIALLLIFFIGDPFKGLIISQMVLSIQLPFTVFLQVGLTSSRKVMGDYVNSKWSTFVLYTIAVIVTVLNIMLLFS

SEQ ID NO: 48531 - protein, 391 aa, Bacteroides fragilis
MIVMKIKKSLDSYKVIFQNTFYLSIIEAIRLIMPFIALPYIITTIGATNYGIIIFSQTIVSYFSIVINWGLDVTSVREVSLNRGSLKKMSLIVSTVFTIKFILFGLCFSIFMICLFFIPFFQQYRIIYLYAFLSCFSEVIIPVWFFQGIEKMKYLTYIRTTSIVLYTILVFTFIKKEMDFTLLALLQSLANITAGVFSLILLLIFCRVKFVFPTFRVMKETFCNSTPFFVSRVSFLLNTNIAKTMSGLFLNMHTVAAFDLSQKILSFVSVPIQMLNQAIYPHVAKNPIKSFSVKMLYVIAALSLILSVLLFFLAPYIILYFSAQLYAEALIFIRILCLYVFCFGINTYLGTPLLVAYGFYKPFNFSVIYSTLFVCSLYGILYVFNLLGGEC

SEQ ID NO: 48532 - protein, 122 aa, Bacteroides fragilis
MLSALIQSRLRYPAMHLAAQPVNQRSVQHGPLVLVSEPRKFHTPTIDRDRTVSRRSEPSSRATLMGEQPNPWDLLQPQDVTSRHRGAKPLRRYELLGGISLLSPEYLLSFERCPFHTETPDH

SEQ ID NO: 48533 - protein, 430 aa, Bacteroides fragilis
MGYLFTSESVSEGHPDKVADQISDAVLDKLLAYDPSSKVACETLVTTGQVVLAGEVKTGAYVDLQLIAREVIQKIGYTKGEYMFESNSCGVLSAIHEQSADINRGVEREDPMNQGAGDQGMMFGYATNETENYMPLSLDLAHRILLVLADIRREGKEMTYLRPDAKSQVTIEYDDNGTPVRIDTIVVSTQHDEFILPADNSAAAQLKADEEMLAVIRKDVIEVLMPRVIASINHPKVLALFNDHIIYHVNPTGKFVIGGPHGDTGLTGRKIIVDTYGGKGAHGGGAFSGKDPSKVDRSAAYAARHIAKNLVAAGVADEMLVQVSYAIGVARPINIYVNTYGRSNVKMSDGEIARKIDELFDLRPKAIEDRLKLRYPIYSETAAYGHMGREPQMVTKHFQSRYEGDRTMEVELFTWEKLDYVDKVKAAFGL

SEQ ID NO: 48534 - protein, 85 aa, Bacteroides fragilis
MLLSVLLQAAAAGVGLSKLGAALGAGLAVIGAGIGIGKIGGSAMEGIARQPEASGDIRMNMIIAAALVEGVALLALVVCLLVLFL

SEQ ID NO: 48535 - protein, 319 aa, Bacteroides fragilis
MGFFSFFSKEKKETLDKGLSKTKESVFSKIARAVAGKSKVDDEVLDNLEEVLITSDVGVETTLNIIKRIEKRAAEDKYVNTQELNSILREEIAALLTENNSDDVADFDVPVEKKPYVIMVVGVNGVGKTTTIGKLAYQFKKAGKSVYLGAADTFRAAAVEQLVIWGERVDVPVIKQKMGADPASVAFDTLSSAVANNADVVIIDTAGRLHNKVGLMNELTKIKNVMKKVVPDAPNEVLLVLDGSTGQNAFEQAKQFTLATEVTAMAITKLDGTAKGGVVIGISDQFKIPVKYIGLGEGMEDLQVFRKKEFVDSLFGENA

SEQ ID NO: 48536 - protein, 308 aa, Bacteroides fragilis
MSVEPGKWGVIYNPKAGTRKVQKRWKEIKEYMDSKGVSYDYVQSEGFGSVERLAGILANNGYRTIVVVGGDGALNDAINGIMSSNAEKKEEIAIGIIPNGIGNDFARYWELNLEYKQAVDWIINNRRKKIDVGYCNFYDGEKHQRRYFLNAVNIGLGARIVKITDQTKRFWGVKFLSYLAALFLLIFERKLYRSHLKINDEHIRGRIMTVCVGSATGYGQTPSAVPYNGWLDVSVIYRPEFLQILSGLWMLIQGRILNHKVVKSYRTRKVKVLRAQNAAVDLDGRLLPRHFPIEIGIIPEATTLIIPN

SEQ ID NO: 48537 - protein, 447 aa, Bacteroides fragilis
MIKKNLLKGICLLWLLLAVTPVLQAQDRAQQASELLDRLIAGQGDSVYVHLDDNIRKMLSVEMLNGLFKQLEQQAGKYQSHGEWKTEPINGMTVYYCDVKFERLPLRFLTAFNPDGKVNTIRFVPVPPEKTTPPTTSVQDKIKETDIQVCTGNFKLPGTLTLPKNGKDLPVVILVHGSGASDRDETVGANKPFRDLAYGLAERGIAVIRYDKRTKVYGADSAPAGKEITFDEESVDDALSAIKLARSIPTINPERIYILGHSLGGTLAPRIVQRSDKVPAGIILLAGAARPLEDLFISQVKFLASALPSTKDIEKEIAELQKQVDNVKRLGTDTFDITTPLPMNLSQAYWMLANQYKPLEVVRKLTLPILVLQGERDYQVTMQDFELWQSALAKHPNAIFKSYPRLNHLFQEGEGKSTPLEYSRPSSIPSYVTDDIAAFINRPKPGN

SEQ ID NO: 48538 - protein, 294 aa, Bacteroides fragilis
MISSGTFGLIPLFTIPLMGNMEMNESNILFYRFLFSTLMMGAVCLLHKSTLKINMKHLISIIGLGALYALTALFLIYSYHYITSGVATTIHFLYPICVSFLMVVFFKEQKSKSLFLAASLSLIGVALMCWSGGGSIRLMGIGLAALTILTYGIYIVALNQLDIGKLPAEVLTFYVLLGGCVIFFIYSLFTAGISSIPSTKAGFYILALAFLSTVISDLTLILAVKYAGSTTTAILGSMEPLVAVVVGVLVFSEHFTLQSLIGLLLILMSVIIVILADQQKKSKRITEQKIIKPH

SEQ ID NO: 48539 - protein, 484 aa, Bacteroides fragilis
LMLAGTGSDVGKSIIAAAFCRIFLQDGYHPAPFKAQNMALNSYATPEGLEIGRAQAVQAEAAGVPCHTDMNPLLLKPSSDHTSQVVLNGRPIGNRNAYEYFRREGREELRKEVHAAFDRLAARYNPVVMEGAGSISEINLRDSDLVNLPMAMHAGADVILVADIDRGGVFASVYGSVMLLRPEERKHIKGILINKFRGDIRLFESGVKMLEDLCGVPVVGVVPYYKDIYIEEEDSVMLQTKNIRAGQGKVNVAVVLLRHLSNFTDFNVLERDPRVHLFYTNNTDELMKADIILLPGSKSTLSDLYELRRNGVAQAIVRAHREGATVMGICGGYQLMGREVCDPDHVEGEIERLPGLGLLPVSTRMQGEKVTRQVRFRFLEDSAVCEGYEIHMGTTTAPCGCSCFSTQPSGGRKGGGYFVDRTCMGTYVHGILDNPSVIDYLLEPFADKLKETAFDYKAFKEEQYDKLAAHVRKHVDLPLIYQIL

SEQ ID NO: 48540 - protein, 94 aa, Bacteroides fragilis
MKAREIKRAKLVAKYAEKRAALKQIVRTGDPAEAFEAAQKLQELPKNSNPIRMHNRCKLTGRPKGYIRQFGVSRIQFREMASNGLIPGVKKASW

SEQ ID NO: 48541 - protein, 236 aa, Bacteroides fragilis
MKLSALYQIFLDCAVVTTDSRNCPAGSLFIALKGESFNGNAFAAQALKDGCAYAIVDEAEYAPENNRHIILVDNCLQTLQQLANYHRRQLGTKVIGITGTNGKTTTKELISAVLSKSHNVLYTEGNLNNHIGVPMTLLRLKAEHELAVIEMGANHPGEIKFLVHIAEPDYGIITNVGKAHLEGFGSFEGVIRTKGELYDYLREKEDSTVFIHHDNAYLMDIAHGLNLIPYGSGSAL

SEQ ID NO: 48542 - protein, 306 aa, Bacteroides fragilis
MEIEKFIKSLARKAKLGGRYSTANTYLYTLHSFQKFAGKASLTFEEITPESIKEYEQYLILNGKRYNTISLYMRMLRSICNQASEQNIASLNTRELFENVFIGNEPTAKRAISPAIISRLLEADFSKNSRLDFARDLFLLSFYLRGIPFVDLVHLRKTDVQGNMLVYFRQKTGQQLTVIIENCAKVILRKYASLCKESVYLLPVISAAGEEGHKQYRSALRVYNKRLNQISGILKLKTPLTSYVARHSWATTALQKGVPVSVISAGMGHASEKVTYIYLASFDNKTLSNANKKVIAAVRFKKEEEE

SEQ ID NO: 48543 - protein, 422 aa, Bacteroides fragilis
MLYYLFEWLHKLNFPGAGMFGYTSFRALMAIILALLISSIWGDKFINLLKRKQITETQRDAKIDPFGVNKVGVPSMGGVIIIVAILIPCLLLGKLHNIYMILMLITTVWLGSLGFADDYIKIFKKDKEGLHGKFKIIGQVGLGLIVGLTLYLSPDVVIRENIEVQKSENEIEVIHGTHDLKSTQTTIPFFKSNNLDYADLVGFMGEHAQTAGWILFVIITIFVVTAVSNGANLNDGMDGMAAGNSAIIGLTLGILAYVSSHIEFAGYLNIMYIPGSEELVIFICAFIGALIGFLWYNAYPAQVFMGDTGSLTIGGIIAVFAIIIHKELLIPILCGIFLVENLSVLLQRFYYKAGKRKGVKQRLFKRAPIHDHFRTSMSLVEPGCSVKFTKPDQLFHESKITVRFWIVTIVLAAITIITLKIR

SEQ ID NO: 48544 - protein, 240 aa, Bacteroides fragilis
MDTLKLHGQAITLVDQVEDNLLTYFRTKDLRAGDAIPNEMELAAALGVARSVLREALSRLKMVGMIETRTRRGMILTEPSILGGMKRVVDPRILSEHSLFDLLGFRIALELGICSDLFQNITPEDIVELKEIVRLGIAFENNEYAPISEFTFHAKLYEITGNATIREFQEIIHPVMVFVKDKFKELLEPINIEIKERGELVTHADLLGFLEKHDEAGYRKALEKHFAVYKIFMKRRIVNE

SEQ ID NO: 48545 - protein, 106 aa, Bacteroides fragilis
MSKLHIKKGDTVYVNAGEDKGKTGRVLKVLVKEGRAIVEGINMVSKSTKPNAKNPQGGIVKQEAPIHISNLNPVDPKTGKATRVGRKVSSEGTLVRYSKKSGEEIK

SEQ ID NO: 48546 - protein, 618 aa, Bacteroides fragilis
MKEYRLTDWLPTTKKEVELRGWDELDVILFSGDAYVDHPSFGAAVIGRILEAEGLRVAIVPQPNWRDDLRDFRKLGRPRLFFGISAGCMDSMVNKYTANKRLRSDDAYTPDGRPDMRPEYPSIVYTQILKKLYPDVPVVLGGIEASMRRLSHYDYWQDRLKKSILCESGADMLIYGMGEKPICELVRRLTALCDNQDGVISSSDIHSPALSSIPQTAYLTRKYESDENDITLYSHEECLADKKKQATNFRHIEEESNKYAAARIVQAVDGKTVVVNPPYPPMTEKELDRSFDLPYTRLPHPKYKGKRIPAYDMIKFSVNIHRGCFGGCAFCTISAHQGKFIVSRSKESILKEVKEVVQLPDFKGNLSDLGGPSANMYKMGGKDLSLCKRCKRPSCIHPKVCPNLNTDHRPLLDIYYAVDSLPEIKRSFIGSGVRYDLLLHQSKDATVNKITAEYTRELIARHVSGRLKVAPEHTSDRVLSIMRKPAFSQFGEFKKIFDRINRELGLRQQLIPYFISSHPGCKEEDMAELAVITKQLDFHLEQVQDFTPTPMTVATEAWYTGFHPYTLEPVFSAKTQREKLAQRQFFFWYKPEERRNIINELRRIGRADLIDKLYGKRK

SEQ ID NO: 48547 - protein, 330 aa, Bacteroides fragilis
MAVTMADITKLRKMTGAGMMDCKNALTDAEGDFDKAMKIIREKGQAVAAKRSDREASEGCVLVKVEEGFGAIIALKCETDFVAQNADFVKLTQDILDAAVANKCKTLEEVLALPMGDATVAQAVTDRTGITGEKMELDGYMVLEGATIAAYNHMNRNGLCTMVAFNKKVDEQLAKQVAMQVAAMNPIAVDEDGVSEEVKQKEIEVAVEKTKVEQVQKAVEAALKKANINPAHVDSEDHMESNMAKGWITAEDVAKAKEIIATVSAEKAANMPEQMIQNIAKGRLAKFLKEVCLLNQEDIMDAKKTVREVLKEADPELKVVDFKRFTLRAE

SEQ ID NO: 48548 - protein, 455 aa, Bacteroides fragilis
MKIRSILTIKYAGITATIFLVFMATIYCVNEHLRSDSFYRSLRSEAITKAHLFLNNQVDVETMQSIYLNNRQFIDEVEVAVYTPDFRILYHDALHNDIIKETPGMIDEIVRKKEIDFRTGDYQGIGILYEFGGKNYVVTAAAYDRYGHINQVIMTRLLLLLSIGGLSVLAIVGYMLAKSSLAPIRSIVRKAEGITVTQIDERLPVKNEHDELGELAFAFNALLDRVEKTFNDQRMFVSNVSHELRTPMAALSAELDLALQKERTVTQYQNSIHNALQDSQRVIELIDGLLNLAKADYYPEQIKKEEIRLDELLLDANELVLKAHPDYHIELIFEQEADDDRVLTVIGNPYLLTTAFVNLIENNCKYSDNRTSFIQISFCDQWTIVSLSDNGAGMSETDKENLFKLFYRGENKNQAQGHGIGMTLTKKILTLHKSEISVYSHQGEGTTFVVRFHHL

SEQ ID NO: 48549 - protein, 414 aa, Bacteroides fragilis
MELRRPHILYILICLWLLVSPSNVSSVWAKDFVVVIDAGHGGHDPGAIGKISKEKNINLKVALKLGNLIKQNCNDVKVVYTRSKDVFIPLDRRAEIANNAKADLFISIHTNALANNRTAKGASTWTLGLAKSDANLEVAKRENSVILYEDDYKTRYAGFNPNSAESYIIFEFMQDKYMEQSVHLASLVQKQFRHHCKRVDRGVHQAGFLVLKASAMPSILVELGFISTPEEERYLNTEEGSSTLAKGIYRAFLSYKREHEIRLTGSSRTALPNDDEVTDTEVAQIDSTESENKKPQNTPRTDKLVTEAKTQRPIVVESTTNDSEITFKIQILTSSRPLSKNDKRLKGLKDVDYYKENGLYKYTYEASSDYNKVLRTRRNTVTPLFKDAFIIAFRNGEKMNINEAIANFKKRRNK

SEQ ID NO: 48550 - protein, 318 aa, Bacteroides fragilis
MDDELLIAYFKGEVSDEETQRITEWIEAEIEHQRYYQQLCRLFEMSYWIEDMPEQTEVALPQKAKILPWKHYAISFMKVAAIFVLGFALHFFLNRQTTTTHHELQHQIHVPTGQHVEIMLADGSKVWLNSGSTLTFPSKFNGKKRLVELDGEGFFEVKSDKEHPFIVSTSKYQVKAVGTSFNVYDYQDSPQFEAALLNGKVEVTTNAKKSSAVILTPNQRAALCQGVLKVKPIENTNNYLWRKGILYFNEPLLEVFDKLQEYYDVEFQIRNTSLTRKSPYCTGKFRAKDGLEHIIRVLKETNHFDYQIDYENKKIIIL

SEQ ID NO: 48551 - protein, 720 aa, Bacteroides fragilis
MTDQLKKYFGFDNFKGNQEPIIQNLLDGNDTFVLMPTGGGKSLCYQLPSLLMEGTAIVISPLIALMKNQVDAMRNFSEEDGVAHFINSSLNKGAIDQVRSDILAGKTKLLYVAPESLTKEENVEFLRSVKISFYAVDEAHCISEWGHDFRPEYRRIRPIINEIGKAPLIALTATATPKVQHDIQKNLGMVDAHVFKSSFNRPNLYYEVRPKTQNVDKDIIKFIKNNPEKSGIIYCLSRKKVEELAEILQANGINARAYHAGMDSATRTQNQDDFLMEKIDVIVATIAFGMGIDKPDVRYVIHYDIPKSLEGYYQETGRAGRDGGEGQCITFYTNKDLQKLEKFMQGKPVAEQEIGKQLLLETAAYAESSVCRRKTLLHYFGEEYTEENCGNCDNCLNPKKQVEAQELLCAVIETIIAVKENFKADYIIDVLQGRETSEVQAHLHEDLEVFGSGMGEEDKTWNAVIRQALIAGYLSKDVENYGLLKVTDAGKKFLKHPKSFKITEDNDFEEVEEETPARGGGSCAVDPVLYSMLKDLRKKLSKKLEVPPYVIFQDPSLEAMATIYPVTLEELQNIPGVGAGKAKRYGEEFCKLIKRHCEENEIERPEDLRVRTVANKSKMKVAIIQAIDRKVALDDIALSKGIEFSELLDEVEAIVYSGTKLNIDYFLDEIMDEDHMLDIYDYFKESTTDKIDDALDELGDEFTEEEVRLVRIKFISEMAN

SEQ ID NO: 48552 - protein, 212 aa, Bacteroides fragilis
MSIKTKPLSLHPLLRVSSINSNHSLKKHLFKMATRIRLQRHGRKSYAFYSIVIADSRAPRDGKFTEKIGTYNPNTNPATVDLNFERALHWVLVGAQPSDTVRNILSREGVYMKKHLLGGVAKGAFGEAEAEAKFEAWKNNKQSGLSALKAKEEEAKKAEAKARLEAEKKVNEVKAKALAEKKAAEEAAKAAAEAPAEEAAPAEEAATEAAAE

SEQ ID NO: 48553 - protein, 509 aa, Bacteroides fragilis
MSNRIVSRSLMGALCSACFTTASAQERPNIIVFLVDDMGLMDTSVPFVTDENGNAQRQPLNDWYRTPNMERLANQGIRFSTFYAQSVSSPSRASIMTGQNAARHRTTNWINAESNNRTPYGPFDWNWKGLTHQDMIYPYLLQQAGYKTIHVGKAHFGCLKSEGENPTNLGFDVNIAGSAIGHPGSYHGENGYGWIKGQRARAVPDLEQYHKTHTFLSDALTLEAGKEIEKAVAEKKPFYLNMAHYAVHSPFETDERFISHYTDPNKSQQARAFATLIEGMDKSLGDILDKLEDMGIAENTLIIFLGDNGGDAPLGDAADYGSSAPFKGKKGSEYEGGVRVPFIVSWAHPNPNNKFQKAYPIARNAIQTQMGTVMDIYPTVLSVAGVKPAPNHILDGADLRKLLKGKRDKKHRDDFLMHFPHEHRGSYFTSYRKGDWKFIYYYNPQTPEAPTYKLFNLSEDPYEKNDLSKTNQQKAKELFRLMVQRLEKEQALYPVDADKNVLSPIFVAE

SEQ ID NO: 48554 - protein, 837 aa, Bacteroides fragilis
MKKGFKITAIVIGVILILMFLLPFAFRGKIEGIVKSEGNKMLNGHFDFSSLDISLFRNFPKASVTLNDFWLKGTGEFENDTLVKAGEVTAAINLFSLFGDDGYDVSKVSVENTRLHAIVLPDGKANWDIMKPDSSTASETQESGESSTFRIKLQRFVIKNMNVVYDDRQSAMYADIHNFNALCSGDLGSDQTLLSLEAETEALTYKMNGIPFLSQANVYAKMDVDADLAHNKFTLKKNEFRLNAIKAGIDGWIELKDPAIDMDLKLNTSEIGFKEILSLIPAIYSKEFKNLKTDGTATLEATAKGILQGDTVPQFDVRLAVKNAMFRYPSLPAGVDQINIDAQVRNPGGNIDLTEISIHPFSFRLAENPFSLTADIQTPVSDPDFTAEAKGVLNLGMIKQVYPLDDMELNGTVRADMTMAGHLSYIEKEQYDRFSASGTIALSDMNLKMKEMPDIEIKKSLFTFTPKYLQLSETTVAIGKNDLTADCRFENYMGYALKGGTLKGVLNVRSNHLNLNDFMTATTDSTAQTSQASSTEETASMIEVPQNIDFQMDAGLKEVLFDKMTFTNMNGKLIVKNGKVDMTNLSMNTMGGSVVMNGYYSTADPKKPEMNAGFRMENIGFAQAYKELDMVQQMAPIFENLKGNFSGNMHIRTLLDNQMSPVMDTMQGNGSLSTQDLSLSGVKVIDQIAEAVKKPELKEMKVKDMALDFTIKDGRVSTKPFDIKLGDYVMNLSGSTGLDQTIDYSGKIKLPASAGDIAKLTTLDLKIGGTFSSPKVSLDTKSMTNQAVEAVTDKAISEIGKKLGLDSATTANKDSVKEKVKEKAVEKALDFLKKKIK

SEQ ID NO: 48555 - protein, 531 aa, Bacteroides fragilis
MLKRIPHTYTIISSVILLCAVLSWIIPAGEYMRETIDVNGISRTVIVDHSFHRVEQTPQTWQVFSSLLEGFERQAGIIAFLLIMGGAFQIMNNSRAIDTGIFSFLNFTKGLEKHRLIKILGVNNVVISLVIILFSLFGSVFGMSEETLAFVIIIVPLAISMGYDSITGLCMVYVAAHIGFSGAVLNPFTIGIAQGLSDLPLFSGFEYRMFCWLVLTTALIVCVLRYAAVVKKHPEKSPMYHADAYWRKREKESCGEISHVTTRQAWIVYLLLLVSLGLFSIIYPISTFSVGEASVTCYAVPTLSILFAVFGWLGLRKSNQFFILTLLAFTILFLIIGVMGHGWYLPEISAIFLAMGILSGFANSEHADAIIKQFMDGAKDMLSAAIVVGLAGGIIQILQDGHIIDPILHSLASLMGEAGKIVSLGVMYLIQTLINLIIPSGSAKAALTMPIMAPFSDVIGLSRQATVMAYQFGDGFTNMITPTSAVLMGALGIARIPYEIWVKWFWKILLLFIILGMVLLIPTVLFPLNGF

SEQ ID NO: 48556 - protein, 483 aa, Bacteroides fragilis
MKRTLIQNATIVNEGRSVRGSVVIEGEKIAEVLEKGQKPAIPCEETINANGCYLIPGVIDDHVHFRDPGLTHKADISTESRAAAAGGVTSIMDMPNTNPQTTTLDALNAKFDLLAEKCSVNYSCYFGATNNNYTEFDKLDKNRVCGIKLFMGSSTGNMLVDKMNSLLNIFNGTDLLIAAHCENHETIKKNTEKYVKEYIEKYPHQYYHVHHETLPMGYHAKIRSIAACYESSELAVRLARIADARLHILHISTARELSLFDNDIPLEEKRITAEACVSHLLFDSSDYPELGARIKCNPSIKTKTNRDALRQAVNSNLIDVIATDHAPHLLKEKEGGPLKAMSGMPMIQFSLVSMLELVNEGIFTIEKVVEKMCHAPAQIYNIHNRGFIRPGYQADLVLVRPDALWTVSADQILSKCGWSPLEGRTFEWKVEKTFANGHLLYTDGQVDETYRGQEIYFERLAIYDERGTMNAWDNMQYIGKIKV

SEQ ID NO: 48557 - protein, 558 aa, Bacteroides fragilis
MIALHITKNMQLYERTLGQWLEHWAETTPDKEYIVYSDRNLRFTWKQFNKRVDDMAKGLIAIGVERGTHVGIWAANVPDWLTLLYACAKIGAVYVTVNTNYKQAELEYLCENSDMHTLCIVNGEKDSDFVQMTYTMLPELKTCERGHLKSERFPYMKNVIYVGQEKHRGMYNTQEILLLGDNIEDTELNELKSQVDCHDVVNMQYTSGTTGFPKGVMLTHYNISNNGFLTGEHMKFTGNDKLCCCVPLFHCFGVVLATMNCLTHGCTQVMVERFDPLIVLASIHKERCTALYGVPTMFIAELNHPMFDMFDMSSLRTGIMAGSLCPVELMKQVEEKMYMKVTSVYGLTEAAPGMTATRIDDPFDVRCNTVGRDFEFTEVKVLDPETGEECPVGVQGEMCNRGYNTMKGYYKNPQATAEVIDKNNFLHSGDLGIKDEDGNYRITGRIKDMIIRGGENIYPREIEEFLYKLDGVKDVQVSGIPSKKYGEAVGAFIILHEGVTMQASDVQDFCRNKISRYKIPKYIFFIDEFPMTGSGKIQKFKLKDLGLKLCEEQGIQII

SEQ ID NO: 48558 - protein, 325 aa, Bacteroides fragilis
MKRNESKYKQVVNHVIEGINNGSYKKGDWILSINEFRKNYNLSRDTVFAGLSELKSKGIIDSTPGVGYYIATTRIAQKLNIFLLFNEFNEFKEDLYNSFISSIRKTANVDLYFHNYNRKVFETLINEANYKYTTYILMPGKFTNIAPLLESLSGRVFLLDHFHPELAGKYSSVAQNFEKDTYEALVYGLPHLKKYDHIIMVQKEEKEPIERYNGLCAFCEEYHFTHEYTDSVRNREIRQGETFMVVNDRDLVDLLKQAQLQNFAPGKDFGIISYNDTPLKEILAGGITTLSTDFKQMGQTMASLITQKEIKTIENPWKLDIRNSL

SEQ ID NO: 48559 - protein, 721 aa, Bacteroides fragilis
MNRLKLYLLALTALAVCSAKADEGMWLLQLMQQQHSIDMMKKQGLKLEAQDLYNPNGVSLKDAVGIFGGGCTGEIISPEGLILTNHHCGYASIQQHSSVEHDYLTDGFWATSRDKELPTPGLKFTFIERIEDITDIVNLRIAAKEITESESFSSTFLNKLAKELFEKSDLKGKKGIVPQALPFYAGNKFYMFYKKVYPDVRMVAAPPSSIGKFGGETDNWMWPRHTGDFSMFRIYADANGEPAEYSASNVPLKTKKHLNISIKGLKEGDYAMIMGFPGSTSRYLTVSEVKERMEASNAPRIRIRGTRQDVLKEVMNASDKVRIQYANKYAGSSNYWKNSIGMNKAIIDNNVLGTKAEQEAKFAKFAKEKNNTDYMNVVAKIDEAVAKTSPIKYQQTCLTETFFGGIEFGSPFMVMDKLKEALEQKNDSSIEANIKVLKEVFNDIHNKDYDHEVDRKVAKALLPLYAEMIPAGQRPAIYDVIEKEYKGDYNAYVDAMYDTSILANQANFDKFIKKPTVKAIEKDIATQYSRAKFDKYTNLAEQMGKLPEELALLHKTYIRGLGEMKLPVPSYPDANFTIRLTYGNVKPYSPKDGVYYKYYTTTDGILEKENPEDREFVVPAKLKELIEKKDFGRYALPNGEMPVCFLSTNDITGGNSGSPVLNENGELIGCAFDGNWESLSGDINFDNNLQRCINLDIRYVLFILEKLGGCGHLINEMTIVE

SEQ ID NO: 48560 - protein, 326 aa, Bacteroides fragilis
MKITFGQQTTKVKQLADKISFDISMGVYKSGDSLPSINQLSQAYEVSRDTVFKAFLDLKERGIIDSTPGKGYYVVGRLKNVLLLLDEYSPFKYALYNSFVKRLSIRYKVDLLFHQYNERLFNTIIRESLGRYNKYIVMNFDNEKLSPNLYKINPSKLLLLDFGKFEKEGFSYVCQDFDQGFYNALFQLADRLRKYQKLVFVLVDDSMHPRSSRDFFERFCADQHLGCEVVSDIEGLQVRRGEVYIAIRQIDVVSIIKKSRVEGLQCGVDFGLIGYNDTPAYEVIDQGITALSVDWEKMGDKAAEFVLQGKTIQDYLPTEVRLRASL

SEQ ID NO: 48561 - protein, 530 aa, Bacteroides fragilis
MAKKSINKKDNLPMEEVLWKACDALRGSIEPSEYKHVVLSLIFLKYAGFHFEKRRQEIVNDGLEDFVDNVEFYAAKNVFYLPETARWPYLKENSKQPNIASIVDKALSDIEKENKPLRGALPNNYYSSLGIEAEKLGSLLDKIDGFDTILESADGNDIIGRVYEYFLSKFAIKEGKGKGEFYTPKTIVNLIAEMIEPYEGKIYDPCCGSGGMFVQSMKFVESHHGNRRKVSVYGQEYTKTTFKLAKMNLAIRGIAADLGDYAANTFTDDRHKDLKADFIMANPPFNQKDWRADNQLTDDPRWDGYDVPPTSNANYAWILNMVSKLSSNGVAGFILANGALSADGTEGEIRRKMIERGLVEAIVILPRNLFYSTDISVTLWIINANKKGRLVNRNGEDIHYRDREKEILFIDMRQMGEPFEKKYVRFTDEDIRKVADTYHNWQREGHTETYTDIPEFCKSVSVGEDGGIADKGFSLVPSKYIEFVNRDESVDYDTRMKELQSELADILRQEAKSRESVLNVFKSLGYEIEL

SEQ ID NO: 48562 - protein, 1887 aa, Bacteroides fragilis
  MISC_FEATURE (299)..(299): X=any amino acid
  MISC_FEATURE (307)..(307): X=any amino acid
  MISC_FEATURE (325)..(325): X=any amino acid
  MISC_FEATURE (327)..(327): X=any amino acid
  MISC_FEATURE (330)..(330): X=any amino acid
  MISC_FEATURE (340)..(340): X=any amino acid
  MISC_FEATURE (348)..(348): X=any amino acid
LFAEPVFQSIFPWEESVYSFEAHSSKLGLLTSSFVNALSNEGIDKDLRFPLDRHPYKHQTESWRTMLSPRPQTIVVTSGTGSGKTECFMIPVLQDLAKTNMKDCVQAIFLYPLNALMKSQQKRIHAWCKALPEKVTYAIYNGETDKENRSDRYTAPHYPQLVTRPQIRRTPPQILFTNPTMLNYMLVRAEDHEILEKSKGKLKWILLDEAHTYIGSSAAELSLQIRRVLDAFGVTIDQVNFAVTSATIGDESDPKTMIKLKTFVSQLTGKPFEDIKIIGGKRIIPELNKGLQKNNYPKXTKDLASGXPILILRDCEKSSILRQYXKXRKXVAYLIRKSGXMWMPHWKXLMLSGEKVKNLNEGSGFGALLPTRAHFFVRSISGVYVCTNPDCQRHKGYRLPIGSLTTYQNINCPVCKSKMLELATCSSCGSPIVVGETSTTKGFRMHTNIIDLDNTLFYEQKEDLIDSEDMENIENVEQNEADGFSRFFFAIPEKLCLRKNATCTSHIVNHRNGKIELAPENNESSKGITPLERGESTPVRYQSLRHSGDNHVLCPHCGNNLSELKKLDYLRISATQIGRTLATLLLDNAEAIGSNDAGVVYEGRKYIAFTDSRQGSARSAMGLNQDVERSWIRASIFHKLADMRLNDVKPGGLTPDEEAEYNAYLSIRGCLPALLLEKFKQLEEKKNGVPVIPSPEEVSWSQISQPLENDSNFRKLYEHVDKARGRKNFRNATDYLKALLVDQFGWIPKRANSLETMGFVRLVYPTLKNAKCPTLLIQKRCTDTDWQNFLKICMDYVIRGGRHYMLSGAYKDYLTQNKYCSPIYPSNSELRKNGNPVSKWFKVNVSQKGVDENQNRLVLLLCAVLGYDDISQISQTKIADINSMLDAAWDFLKQNVLEATDAENQGYMLDLTGDKVKLQLIEKGYLCPVDNVIIDTPFCGYSPRMNGYIGRENFDRFKIQTEFVNPFFPFKFAEQIEENVTEWIEKNLFDQKAAGVFGVMNYRVLASKPIFISAEHSAQQSSEDLDRYEKEFNEGKINILSCSTTMEMGVDISGITEVVMNNVPPKSSNYLQRAGRAGRRSETKALALTVCAPNPIGTHTWNNPDYPITHVTETPLLKLESRQLIQRHVNAMVFASFVADQGGIRVTATLRDFFVKAEGMSFYDKFLNYIDSVISGNVERLQRAYSKLIKGTSLAQITLPDAAQVVKKDIAAVHNVFDAHNGALEKALESLRNESETANAIKAIEKQEENLLKTSMLSYLAENSFLPSAGIPIGLVECLLGGKEKVDGSSPTLHISQAISSYAPGNPVVKNEWVYEPSGIRLKTKYDDSTSRYIIQNCTHCGYTTITYGSAKTDCPKCGRHGTMHGIKDISLSIEQRFTEVVEPAAFSVAWDSTPIRKMGTLGGMNFIQPILLEMDAWQPKTNSAKMSIRCSTPRSEILFYNKGASGYGYAFCPYCGRMKSEKSPDSTERMMPHHKHLLASTPCLGGENDGAAVRRHVLLVGRYQTDFVEIKFHDKNNNLIVDSETLYSLGVILSRKLTELLGVNDGEIEFGYDVINHSIFIYDTALGGAGYSLLFREYKDEVLKMALEALERCDCERSCTKCLIDRRSQWYLNYLNRTKALEWLRQEIKARIAPKEILRLIPDSHTVTSDITTEFYQLTRNKDISCIKIFVNDNISQWDAEAFPFKKILTELSLEGVDVAFILPSVPDVKSLSSADSATLIAEVFKNDFKGLENTLPAELLPLMVVIMNDGTVKTYFGKNIDTSYSKNWGSGDVFITTQLNSLSYADINRMQLLNTFSSGDTSFMFDYRITEHSSLGHFFDSLKNPEVENWNRIVSNLQGKTVSVEYSDRYLKTPLGCMLLAKMISGLKNEADLNVVSIKVIVTNI

SEQ ID NO: 48563 - protein, 285 aa, Bacteroides fragilis
MKSSRNTSTSGKPASGRRTPARKTKAKKKTTRTMPVWMRNTLALIVVGVFSLTFYYFVIRPYSYRWKECYGRKEYGVCIPCGYEVHGIDISHYQGNIDWKELKQNRETDFPLHFIFMKATEGGDHGDDTFKDNFEQARRYGFIRGAYHFFTPRTDALKQADFFIRTVKLDSGDLPPVLDVELTGKRPKKELQQNIKKWLDRVEAHYGVKPILYTSYKFKTRYLDDSLFNAYPYWIAHYYVDSVRYEGKWHFWQHTDIGSVPGIHHDVDLNVFNGSLEDCRKMTMR

SEQ ID NO: 48564 - protein, 544 aa, Bacteroides fragilis
MISVDGLAVEFGGTTLFSDISFVINEKDRIALMGKNGAGKSTLLKILAGVRQPTRGRISAPKECVIAYLPQHLMTEDGRTVFEETAQAFAHLHEMEAEIERMNKELETRTDYESDSYMELIENVSTLSEKFYAIDATNYEEDVEKALLGLGFMREDFHRQTSDFSGGWRMRIELAKLLLQKPDVLLLDEPTNHLDIESIQWLEDFLINNGKAVIVISHDRKFVDNITTRTIEVTMGRIYDYKVNYSKYLELRKERREQQQKAYEEQQKFIAETKDFIERFKGTYSKTLQVQSRVKMLEKLEILEVDEEDTSALRLKFPPSPRSGNYPVIMDGVGKSYGDKVVFRNATLTVERGDKVAFVGKNGEGKSTLVKCIMNEIEHDGTLTLGHNVQIGYFAQNQASLLDENLTVFQTIDDVAKGEIRNKIRDLLGAFMFGGPEESMKKVKVLSGGERTRLAMIKLLLEPVNLLILDEPTNHLDLKTKDILKQALKDFDGTLIVVSHDRDFLDGLVTKVYEFGNQKVTEHLCGIYEFLDKKKMDSLRELEK

SEQ ID NO: 48565 - protein, 311 aa, Bacteroides fragilis
MGKGLKWIIAFAGAMVIVLLLRGFAFTSCLIPSAGMENSLFQGERILVNKWSYGLRVPYMSLFSYHRWGESPIHKDDIVVFNNPAGIKEPIIDRREIYISRCIGVPGDTLLIDSLFNVVDRSTQLGPDRKQLYTYPQTKEQQLDSLLSILSIGPNELMGQHEGKNVRSFSRYEYYLLDQAMNGKSWIQPLQQSLQEEAKPLIVPGKGKAVRVYPWNRTLLRNTLVLHEGKQAEIRNDTLYIEGRPSQHCYFTKDYYWMASNNSVNLSDSRLFGFVPQDHVIGKASRIWFSKTDHTGIFSGYRWERFFQPVK

SEQ ID NO: 48566 - protein, 200 aa, Bacteroides fragilis
MKGSLIIVSFFIVGTLCGLLQLIPYDFSQSKLSFYALCGLMFCVGISIGNDPQTLKSFRSLNPRLLFLPVMTILGTLAGCAVVSLFLSHRSPSDCMAVGSGFGYYSLSSIFITEYKGAELGTIALLSNIMREIIALLCAPLLVKFFGKLAPISVGGATTMDTTLPIITRCSGQEFVIVSIFHGFIVDFSVPFLVTLFCSI

SEQ ID NO: 48567 - protein, 296 aa, Bacteroides fragilis
MEEGQRVKAWVEASDENERAFYRERKIFDALMLNNPLPVKKTSFFNFTHYKKIEWLKIAMAVILTFLLSYFYQEYKAGLDSVAMSTISVPEGQRTNVTLPDGSNVWLNACTTIQYPTSFNSRERFVILKGEAYFDVKKNKSRPFIVHTDAYSIEVLGTKFNVDAYPETEKFETTLMHGSVKVTLKADSSQTVILKPDHKLSLEKGRFVMTKVEDYNPYRWKEGLICFSDESFPNIMKDFEKYYGVKIVIENKNVLQINFTGKFRQTDGIDYALRILQKNIDFQYEKDNEKQIIYIK

SEQ ID NO: 48568 - protein, 444 aa, Bacteroides fragilis
ISLNIEKTFGFISKESVSAYEAQVKAAQEALENGTGKGNDFLGWLHLPSSISKEHLADLKATAQVLRDNCEVVIVAGIGGSYLGARAVIEALSNSFTWLQEKKTAPVMIYAGHNIGEDYLYELTEFLKDKKFGVINISKSGTTTETALAFRLLKKQCEDQRGKEMAKKVIVAVTDAKKGAARVTADKEGYKSFIIPDNVGGRFSVLTPVGLLPIAVAGFDIEQLVNGAADMEKACGADVPFAENPAAIYAATRNELYKNGKKIEILVNFCPKLHYVSEWWKQLYGESEGKDNKGIFPAAVDFSTDLHSMGQWIQEGERTIFETVISVDKVNHKLEVPSDEANLDGLNFLAGKRVDEVNKMAELGTQLAHVDGGVPNMRIVIPELSEFSIGQLLYFFEKACGISGYLLGVNPFNQPGVEAYKKNMFALLNKPGYEEESKAIQARL

SEQ ID NO: 48569 - protein, 161 aa, Bacteroides fragilis
MSEVNAGKSIKALSREYNLHENKLLEWSRLYERYGNDGLKKQPKLKPMPDFKEKGVRLILEKGVLLSHVLIDYRISRTALESWVRLTRNKGYTALRQSQRRGRPPKDMGRPKKKEPQTELEKLQAENIRLRAENALLKKAKALVEEKKTRAHLNGQKASTD

SEQ ID NO: 48570 - protein, 425 aa, Bacteroides fragilis
MKRYSISVVLHILLLVVLSIGGYLLFCYELWFSTLIVGILLIATGVHLYSIQMKLAGMMRRLTDCIRFNDMTQNFQPPFKSKMMVELADELSQTLRLFRGRLLEEEIKHQYYENLLNKVDTAVVVTDRSGRVEWMNRAAVALVGQESRLPQEWLTTSWNETQVVRIRQQGASVEMAVSCTLFAAQNKERLLVSLKNIHSVLERNEMEAWQKLIRVLTHEIMNSITPIISLSETLSERGIPERLSEKEYGVMLQAMQTIHRRSKGLLGFVENYRRLTRIPTPARTLVAVDELFSDLRKLFPDSFIHFAATHRGATLYIDRAQIEQVLINLIKNAKESCGQNTAPQIEVELEQVPGKVCSLTVRDNGEGILPEVIDKVFVPFFTTKPSGSGIGLSLCKQIMNLHGGTITVSSEIGKGSCFTLMFPGR

SEQ ID NO: 48571 - protein, 225 aa, Bacteroides fragilis
MRIDIITVLPEMIEGFFNCSIMKRAQDKGLAEIHIHNLRDYTEDKYRRVDDYPFGGFAGMVMKIEPIERCINALKAERDYDEVIFTTPDGEQFDQKMANSLSLSGNLIILCGHFKGIDYRIREHLITKEISIGDYVLTGGELAAAVMADAIVRIIPGVISDEQSALSDSFQDNLLAAPVYTRPAEYKGWKVPEILLSGHEAKIKEWELQQSLERTRRLRPDLLED

SEQ ID NO: 48572 - protein, 255 aa, Bacteroides fragilis
MGKIIALANQKGGVGKTTTTINLAASLATLEKKVLVVDADPQANASSGLGVDIKQSECTIYECIIDRANVQDAIHDTEIDSLKVISSHINLVGAEIEMLNLKNREKILKEVLTPLKEEYDYILIDCSPSLGLITINALTAADSVIIPVQAEYFALEGISKLLNTIKIIKSKLNPALEIEGFLLTMYDSRLRQANQIYDEVKRHFQELVFKTVIQRNVKLSEAPSYGLPTILYDAESTGAKNHLALAKELISRNSK

SEQ ID NO: 48573 - protein, 217 aa, Bacteroides fragilis
MKIINLSETDSILNQYVSEIRNVEVQNDRLRFRRNIERIGEVMAYEMSKTFAYSVKEIQTPLGIAPVRTPDNPLVISTILRAGLPFHQGFLSYFDYAENAFVSAYRKYKDTLKFDIHIEYIASPRIDGKTLIITDPMLATGGSMELSYQAMLTKGHPSEIHVASIIASQRAVDHIASILPEDKTTIWCAAIDPEINEHSYIVPGLGDAGDLAFGEKE

SEQ ID NO: 48574 - protein, 493 aa, Bacteroides fragilis
MKRLILPIACGICTVTSDAQTDKQPHPNVIFIYADDLGYKDLSCTGSRFYETPHIDKLAREGVCFTQSYAACPVSSPSRAALLTGKYPARINLTDYIPGDRAYGPHKNQRLASLPFNLHLSKDEITMAEAFRQNGYSTFMAGKWHLAESAEYYPEQNGFDINIGGNNTGHPSKGYFSPYGNPQLKDGPEGEYLTDRLTDEVIRYISEPKEKPFFVYLSYYTVHLPLQAKAEKIAKYRRKLSRAVPADSSFVKKGETYHKLVQDIPAYAAMVESLDENIGRLLDTLHRSGLDERTIVVFTSDNGGMATSNTTRNIPTSNLPLRAGKGYLYEGGIKVPAIIRWSGHLKGRQVSDTPIIGTDYYPTLLDLCGLPLLPGQHVDGVSMKPVLQGGRLSRPSLFWHYPHYSGGLGGRPSAAIREGDYKLIEFFEDHHVELYNVIQDESEEKDLSQIYPEIADGLRKKLYLWYKEVGARMPVDNPHYVSPVKDSDSFENK

SEQ ID NO: 48575 - protein, 395 aa, Bacteroides fragilis
MEKKEEFIRVGTTLYKIVDQPRIDGGYVRKRIAWNSETLRQDYGKDYMAGIPKYDGFCTVPDHVGYKPVVGKFLNLYEPISHRPQEGDFPCIRSLVEHIFGEQYGLGMDYLQLLYLYPIQKLPILLLVSEERNTGKSTFLNFLKAIFQNNVTFNTNEDFRSQFNSDWAGKLLIMVDEVLLNRREDSERLKNLSTTLSYKVEAKGKDRDEIGFFAKFVLCSNNEHLPVIIDAGETRYWVRKIVPLQNDDTDFLQKLKAEIPAFLHFLQHRQLSTGKESRMWFNPKLLETDALQKIIRSNRNRLEIEMAELLLDIMAKMEVETVSFCLNDIIPLLVCSQVRVEKSQVRKVVQECWKLTPAPNGLTYTAYQYGGNDRYQTRRSVGRYYTVTKELLEKL

SEQ ID NO: 48576 - protein, 769 aa, Bacteroides fragilis
MKMKKYIFFLVSLCCALLPAMADQPEHPELKASDANIIGHVLDKKTGEHLSYITIALKGTTIGTVTDATGHYFLKNLPEGNFVLEASSVGYKTISRNVSLRKGKTLEENFELEEDAVALDGVVVSANRSVTKRRLAPTLVNVVDMKMFENTNSPTLSQGLNFQPGVRVETNCQNCGFQQVRINGLDGPYTQILIDSRPIFSALSGVYGLEQIPANMIERVEVMRGGGSALFGSSAIAGTINIITKEPLRNSGQLAHTLTSIGGSSSFDNNTSLNASLVTDDHRAGLYVFGQNRHRDAYDHDGDGYSEMPKLKNQTVGFRSFLKTSTYSKLTFEYHHLQEFRRGGNLLNRPPHEADIAEQIQHSINGGGLKFDYFAPNEKHRLTVYTSAQHTDRDSYYGSKKDQNAYGKTTDLTFIGGSQYVYSFGKCLFMPADLTAGLEYNRDNLKDDMWGYNRYTKQTVNIGSAFLQNEWKNEKWSILLGGRLDKHNLINHVIFSPRANLRFNPSEDINLRLSYSSGFRAPQAFDEDLHIENVGGTVSMIERAKNLKEEKSQSFSASADMYHRFGAFQVNFLVEGFYTRLSDVFVLENIGERDGILIKERRNGSGAKVLGLSMEGKMAYLSLFQLQAGVTLQQSRYDEPEKWSETAPAEKKIFRTPNTYGYFTATYMPIKPLSLSLSGTYTGSMLVQHMAGYIDKDVAVNTRDFFDMGVKVAYDFKLYKSVDLQLSAGVQNVFNAYQNDFDQGVERDSGYIYGPAAPRSYFAGIKISY

SEQ ID NO: 48577 - protein, 284 aa, Bacteroides fragilis
MVLNNLNLDIPENALYGYLGNNGSGKTTTIQVLLGLARPVKGEVLYDGQPFRDQREKQLRKIGLCPGEPFYYDNLTGYEHLAYLDHIYHCGRTAINKVLAITGIENARNKKLRHYSTGMIHRLGMAMALLHDPDILFLDEPLNGLDPEGIHSIRELLLQLHQEGKTVFLSSHLLDEVEKTCTHVGILQHGCLLYQGDLSELLNSIEKRIHIRLDKVDLLHSVCKEVQIDSRIKSESILEVILSNDTTYDRLIELLGQGGYHISAIQPLENTLESVYLKLTSQTK

SEQ ID NO: 48578 - protein, 216 aa, Bacteroides fragilis
MKNKRYSRGEELSNTLSHGAGTLLGITAGYFLLEKALANPHPYWATGCVLAYLVGMLASYISSTWYHGSRPGKRKELLRKFDHGAIYLHIAGTYTPFTLLVLRHAGGWGWGIFTFVWLSAIVGFILAFKKLKEHSNLETICFVGMGSAILVALKPLMDCLSAIGASPAFWWLLGGGASYIMGAVFYSLRKPYMHAVFHLFCLGGSIGHIIAIWLIL

SEQ ID NO: 48579 - protein, 206 aa, Bacteroides fragilis
MKITRDELLIAAFKLFMSVNYEKASFAELGKMLGMSKAGIFKYYKNKQELFIAVVDKFWFSTQNPRNKFTETNGTFAEFIDEYVRGVQRTMDMLGDLIGAEREKVAQGKFTYHAQYFHFLFQLLQYDPDAKEKLRNLVDGDYAYWRAAIQRAIATGELREDVDVEDAVVMFRQVYMGLSFEMAFMGGLNTQRLAKHLHAVYSLLKR

SEQ ID NO: 48580 - protein, 116 aa, Bacteroides fragilis
MPRSVNHVASKARRKKILKLTRGYFGARKNVWTVAKNTWEKGLTYAFRDRRNKKRNFRALWIQRINAAARLEGMSYSKLMGGLHKAGIEINRKVLADLAVNHPEAFKAVVAKAKVA

SEQ ID NO: 48581 - protein, 312 aa, Bacteroides fragilis
MSEKAPFMVFSGTNSRYLAEKICASLNCPLGNMNITHFADGEFAVSYEESIRGAHVFLVQSTFPNSDNLMELLLMIDAAKRASAKSVVAVVPYFGWARQDRKDKPRVSIGAKLVADLLSVAGIDRLITMDLHADQIQGFFNIPVDHLYASAVFLPYIQSLKLDELVIATPDVGGSKRASTFSKYLGVPLVLCNKSREKANEVASMQIIGDVKGKNVVLIDDIVDTAGTITKAANIMLEAGANSVRAIASHCVMSDPASFRVQESGLTEMVFTDSIPYSKKCAKVKQLSIADMFAETIKRVMNNESISSQYII

SEQ ID NO: 48582 - protein, 188 aa, Bacteroides fragilis
MLKILVTYAVQGEFTEIKWPDVEVYYVRTGIGKVKSAFHLSEAIQQVKPDIVINQGTAGTINHQVGDVFVCRHFVDRDMHKMTGLGMEYRIDSSELLAARGFCQHWTESATCNTGDSFLTELTDIEGDVVDMEAYAQAFVCRAKEIPFISVKYVSDVIGQNSVKHWEDRLEDARAGLSHFFNVLKESI

SEQ ID NO: 48583 - protein, 146 aa, Bacteroides fragilis
MTNNESERELVLQTLRTWMAFRQAVQRVLKRHNVDMTFEMLQVMNCLWNKQGISQQSLAEKTAKDKACLTNLINNLEKKNWVIRKEGPSDRRNRLIFLTPQGEELALTVKPLINDIYAQTGTEMEASRITECIEDLKRLHEVLNEI

SEQ ID NO: 48584 - protein, 496 aa, Bacteroides fragilis
MYHWIFVPLTLGLAVVMAIMETLYYKTGNEFWKRTAKFWMKLFGINFAVGVATGLILEFEFGTNWSNYSWFVGDIFGAPLAIEGILAFFMEATFIAVMFFGWDKVSKRFHLISTWLTGLGATISAWWILVANAWMQHPVGMQFNPDTVRNEMVDFMAVAFSPVAVNKFFHTVLSSWVLGAVFVIGISCWFLLKKRDKEFAVASIKIGAVFGLVASLLTVWTGDGSGYAIAQTQPMKLAAVEGYYEGQNGAGLVAVGLLNPEKKTYDDGQDPFLFRIEIPKMLSLLAERKVDAFVPGIKNIIEGGYELKDGTKALSAAEKIEKGKKAIAALATYRTAKKEGDEAAAKEAYTTLQENVPYFGYGYIKDVNQLVPNVPLNFYAFRVMVILGGYFILFFILVLFFAYKKDLSKIRWMQYVALWTIPLAYIAGQAGWVVAECGRQPWAIRDMLPTSVSISKLDVGSVQTTFFIFLVLFTVMLIAEIGIMVREIKKGPTVNH

SEQ ID NO: 48585 - protein, 929 aa, Bacteroides fragilis
MRRHLIHFLLVAVLTVCSAATAIAQVTVKGQVVDAETGEPLIGAAVTIVGTTQGSVTNLDGMFTQKAASGSTLLIKYLGYKEFSKKITQKGGTEDLGVIKMAADAMVLNDVIITSSVAVSRKTPVAVSTVDPVFIEEKLGTQEFPEVLKSTPGIYATKQGGGFGDSKVNIRGFKTENSAMMINGVPMNDMEWGGIYWSNWAGLSDVTRSMQVQRGLGASKVAAPSVGGSINIVTNTIDANKGGFVSYGMGNDGLNKILFKVSTGLTKSGWAMTLLGGKTWADGYIQGTNYEAYNWFVNITKRFNDNHQLSFTAFAAPQWHNQRGNKDGLTIEGWQEVAKNYMNGEKPYRYNPTYGFGLNGQRKSSAYNVYNKPQLSLNHLWQINEKSSLSTALYASIGRGYGYSGQGLTSADRSNWYGSNNGNLNMTFRKADGTFAYDEIYALNEASENGSVMAMSKSKNFHNWYGLLSTYTTKFGDYFDFYGGIDYRYYKGTHTNELVDLYGGDFYVDSSSRKSVLASNNAAAAAGSSFVNQKLKVGDIVYRDFDGYVMSEGVFAQGEYNRDKLSAFISGSVSNTGYWRYDRFYYDKAHAKSKTVNFIGWNAKGGLNYNLTENHNVFANIGYISRAPFFSGGAFLNSTVSNATNPDAVNEKVFSFEIGYGYRSSFLTVNINAYHTRWMDKTTTRSQDITNYYEGSLSEPYDASKLVSTKSVINMQGVNALHQGVELDFVAKPFQWLDLSGMFSIGNWRWDSNASGSFTVEGQFVNSASIKGSDGKDVTVLVNAAANGLEPGTMKLNLKDVKVGGSAQTTAALGATFKIDKALRLGIDWNLYARNYADWSLNSNDLVMNSEKDFSTPWRIPTASTFDLNASYKFNFGKLNAVLSGNVNNLFDQTYISDATDGSNHDWKTAYNVFYGFGRTYSLRLKVNF

SEQ ID NO: 48586 - protein, 220 aa, Bacteroides fragilis
MGEKQYGIDEKRLAEYAAQIKEIHEQGVQIGIVIGGGNIFRGLSGANKGFDRVKGDQMGMLATVINSLALSSALVAAGVKARVLTAVRMEPIGEFYSKWKAIECMENGEIVIMSAGTGNPFFTTDTGSSLRGIEIEADVMLKGTRVDGIYTADPEKDPTATKFHDITYDEVLKRGLKVMDLTATCMCKENNLPIVVFDMDTVGNLKKVITGEEIGTLVHN

SEQ ID NO: 48587 - protein, 1307 aa, Bacteroides fragilis
MHRNTALLIIVILLCASSALGRGVNYQFTSISIEEGLSQSTVQSILLDKKGKLWIGTRNGLNSYTGQDLKIFKSNPEDRYSLPDNEILHLTQDSLNNIWISTREGMVTYDEKHGNFTLVNRDIIYSSLCITDGILFGSENRIYKYDYKKRSFKSINIKKQEDKGSDVTKYRVQKIIAFSEREALVATRRDGVYVLDYQTMRLKRLFSGSNNILQGAYLSSNGYIYLSFWGQGLFCYEKTGKFIKRYTKENSDLTNNYVLDIVEKEGFLWLATDGGGINRLELSNENFSNLYHIAGDKNSLPVNSVTILYKDENEGLWAGSVRGGVFNIKESYIRTYKDCPLGYINGLSEKSVTSLFEEPNGRLWIGTDGGGINLYEPQTGDFKHFYSTYGDKVVSIAPISEKELIVSVYTKGLFLFDTHTGAYRPFLIINDSINFRQCFYGYIPRAHRVTKNKIYILSKDIWIYDINNRKFSPIKTDKNYQLPTSVMGYSDEKMSLTMSGNKVFQIINKNDSIQPLFQIDEKETITAIDCDGQDRIWVGTTAGIGYYNLKEKRYSKIDSQLFSDISALRYDPSSERVWICAQNQLYSYCIKDDKFIQWNRSDGFHPNEIIFTYQQRTMKKHRYLYFGGIEGLVQINTDIPEPNEPYPEIDLCGVELNGQLQTSDINIRNIKIPWKYNTLILQVHIKNKDIFQRVPFRYIIKGDVDKSIDSYHPMLELSNLSPGKYHIEVSCMTKDGNYTMPIHLTDIHVTPPWYKTDWFIILCCIFLTGGIIVGMSIFNIRKEVKIQKRLKEYRQYFNEKKIDFLIHINHELRTPLTLIYAPLKCLIDKNETQGLPSYLMPQLQLIFNQAQYMREIVDMVLDWNSMEAGYSKLKIQKCKLDEWITNIVKDFTEEARQKGICIKLQMTTDIEEVWFDKQKCHTVLSNLLMNALKFSMPESCITINTRKLENKVRISVVDEGIGIQDSDITNLFTRFYKGNHKEKGSGFGLYYAKTIMEMHGGDIGTYNNTDKGATFYLELPLLDINEKAEATKLLQKEAPIVNTTQDLHFDCTGKTILIVEDEKELREYLIESFTETFKKVYAADNAISALETCRKKQPSIIVSDVMMPQMDGFELCRQIKNDIRISHIPVILLTARYDQTGITTGYKSGADSYIPKPFDLAFLKVVVGNILKNREKIHSQYVTVTGAPSLLDLTNSKADEDFMKKINAVIHENLSDEEFSVQQLADAMIVSRSSLYSKIKIITGMGVNDYINRLRIEQAMSLLVNTNLNINEISCEVGFTYPRYFSSTFKSMTGMTPKQFRNEKCNK

SEQ ID NO: 48588 - protein, 64 aa, Bacteroides fragilis
MNKFIEITEDGKNILVNLGCVAKIEDRKKQCILHFLNGTPQLTINLAYETLKSILKDPNHSMCG

SEQ ID NO: 48589 - protein, 404 aa, Bacteroides fragilis
MTSITPRLNRSREGRDGSYPLVIQIIRHRKKREIYTPYRFWEAEFNTRLEMVENIGGNRRRLLIVREANEYLIYIKKELEAICRSLEADKGSAYTVDDIVNVYNYHNDLTQVLVYADSVIAGLENKGRQGTAANYRSARRAFEMFLDGSPFSFEELTPEVLDRFVTFLRERGNRPNTVSFYLRQWRAIYNRACADHVVFSDQKPFRRLNLKEEVTSKRAISREKIAQIECVDLTACHADMQLARDLFLFSFYTRGMSFVDMCYLNKENLQGNYLRYKRQKTGQELQIRIEKDLRVLIDRYTSPLSDYLLPMLRNGDRYQDYRRRQRRLNKLIRELGDRLQLDMPLTFYVARHSWATLAHENDVPVSVISDCMGHTSEKTTRIYLDRIDTKRLDRANRLVINSLR

SEQ ID NO: 48590 - protein, 400 aa, Bacteroides fragilis
MNTHRRNDCEIYPLIIRVVYHRRKSEYSLGWKIHTSNFSADRERVVYSSTGNLKRKDLGLINDAISQERERLLKIFAFLQQNMPGFSLSQLMDKYRMERNLRYVDAFIVREIERLRQEGRSGTAGLYLSGLYSLRRFLRGQKITFRELTYCFLTDYIHFLRMRGISENTVNMYIRNLRAVYNKAQKQGINMGCESPFRELKLQTQETAKRALCKHDIARIVSVDLSSEPLLDRARDLFMFSFYARGMPFVDIVFLKHDSIINGIIYYERNKTGQRMQVRVIPPLAALIEKYRSSYPYVLPYITSFSDRTSYMQYRYALGNVNRLLKRLGRRLHLPLVLTTYVARHSWATIAKEEGFSIASISEGLGHTSEATTQIYLQSFNSEVIDKINEQVVASIGRHI

SEQ ID NO: 48591 - protein, 147 aa, Bacteroides fragilis
MRSVADAVLQNGGEVTGVIPHFMVDQGWHHTGLTELIEVESMHERKRLMAEKSDAVIALPGGCGTLEELLEIITWKQLGLYLNPIVILNTNGFFDPLLEMLENAIEGNFMRKQHGDIWHVAHTPEEAVELVYSIPVWDGSIRKFAAI

SEQ ID NO: 48592 - protein, 639 aa, Bacteroides fragilis
MGKIIGIDLGTTNSCVSVFEGNEPVVIANSEGKRTTPSIVAFVDGGERKVGDPAKRQAITNPTRTIFSIKRFMGENWDQVQKEIARVPYKVVKGDNNTPRVDIDGRLYTPQEISAMILQKMKKTAEDYLGQEVTEAVITVPAYFSDSQRQATKEAGQIAGLEVKRIVNEPTAAALAYGLDKAHKDMKIAVFDLGGGTFDISILEFGGGVFEVLSTNGDTHLGGDDFDQVIIDWLVQEFKNDEGADLTQDPMAMQRLKEAAEKAKIELSSSTSTEINLPYIMPVGGVPKHLVKTLTRAKFESLAHNLIQACLEPCKKAMQDAGLSNSDIDEVILVGGSSRIPAVQKLVEDFFGKTPSKGVNPDEVVAVGAAVQGAVLTDEIKGVVLLDVTPLSMGIETLGGVMTKLIDANTTIPARKSETFSTAADNQTEVTIHVLQGERPMAAQNKSIGQFNLTGIAPARRGVPQIEVTFDIDANGILKVSAKDKATGKEQAIRIEASSGLSKEEIEKMKAEAEANAEADKKEREKIDKLNQADSLIFQTETQLKELGDKLPADKKAPIEAALQKLKDAHKAQDMTTIDSAMAELNTAFQAASAEMYAQSGAQGGAQAGPDMNAGQSNAGQNNGKQDDNVQDADFEEVK

SEQ ID NO: 48593 - protein, 382 aa, Bacteroides fragilis
MQKNEWVAQTKESDTILRSMNACFILINSDLVVIRTNYYDLSGISEEPESSGRVGDLLNCKNAVRSGGGCGAHKNCENCMIRHTIENAFCHKKGFHKLEASMRLLSSDHQQIIPCDVSVSGTYLNNEGHEQMLLTVYDITELKNMQRLLNIEKENAVSAEKLKSAFIANMSHEIRTPLNAIVGFSGLLASADDDTEKKMYLDIVAENNDRLLQIVTDVLDLSKIESGSLDFHYSEFDVNDLLCALHGILNIRLKDKPEIKLICKAGTDEWIIYSEQHRIVQIITNLVHNAMKFTHSGEICFGCRPQGEDEIYFYVSDTGIGIPAGEQDKIFDRFTKLDHEVPGTGLGLTLSQTIVQNLGGEMGVESEVTKGSTFWFTLPLKS

SEQ ID NO: 48594 - protein, 139 aa, Bacteroides fragilis
MEDFSCLNNAVGDLIIGEYTRIGLGNTIIGPATIGNHVNLAQNVTVTGLNHNYQDADKRIDEQGVSTQPITIEDDVWVGANSVILPGVTLGKHCVVAAGSVVSRSIPPYSVCAGSPAKVVKQFNPESRTWEKTVSKNGK

SEQ ID NO: 48595 - protein, 652 aa, Bacteroides fragilis
MSEEQNPTNNGSYSADSIQVLEGLEAVRKRPAMYIGDISVKGLHHLVYEIVDNSIDEALAGYCDHIEVTINEDNSITVQDNGRGIPVDFHEKEQKSALEVAMTVLHAGGKFDKGSYKVSGGLHGVGMSCVNALSTHMTTQVFRNGKIYQQEYEIGKPLYPVKEVGIADHTGTKQQFWPDDSIFTETIYDYKILASRLRELAYLNAGLRISLTDRRVVNEDGSFKHETFYSEEGLREFVRFIESSREHLINDVIYLNTEKQNIPIEVAIMYNTGFSENIHSYVNNINTIEGGTHLAGFRRALTRTLKKYAEDSKMLEKVKVEISGDDFREGLTAVISVKVAEPQFEGQTKTKLGNNEVMGAVDQAVGEVLNYYLEEHPKEAKAIVDKVILAATARHAARKAREMVQRKSPMSGGGLPGKLADCSDKDPQKCELFLVEGDSAGGTAKQGRNRAFQAILPLRGKILNVEKAMYHKALESEEIRNIYTALGVTIGTEEDSKAANIDKLRYHKIIIMTDADVDGSHIDTLIMTFFFRYMPQIIQNGYLYIATPPLYLCKKGKIEEYCWTDAQRQKFIDTYGGGSENAIHTQRYKGLGEMNAQQLWETTMDPENRMLKQVNIDNAAEADYIFSMLMGEDVGPRREFIEENATYANIDA

SEQ ID NO: 48596 - protein, 126 aa, Bacteroides fragilis
MAIRIVGVDLPQNKRGEIALTYVYGIGRSSSAKILDKAGVDKDLKVKDWTDDQAAKIREIIGAEYKVEGDLRSEVQLNIKRLMDIGCYRGVRHRIGLPVRGQSTKNNARTRKGRKKTVANKKKATK

SEQ ID NO: 48597 - protein, 129 aa, Bacteroides fragilis
MAKKTVAAKKRNVKVDANGQLHVHSSFNNIIVSLANSEGQIISWSSAGKMGFRGSKKNTPYAAQMAAQDCAKIAFDLGLRKVKAYVKGPGNGRESAIRTIHGAGIEVTEIIDVTPLPHNGCRPPKRRRV

SEQ ID NO: 48598 - protein, 201 aa, Bacteroides fragilis
MARYTGPKSRIARKFGEGIFGADKVLSKKNYPPGQHGNSRKRKTSEYGIQLREKQKAKYTYGVLEKQFRNLFEKAATAKGITGEVLLQMLEGRLDNIVFRLGIAPTRAAARQLVGHKHITVDGQVVNIPSYAVKPGQLIGVRERSKSLEVIANSLAGFNHSKYAWLEWDEASKVGKLLHIPERADIPENIKEHLIVELYSK

SEQ ID NO: 48599 - protein, 108 aa, Bacteroides fragilis
MDMVEQYEVYWVELDPTRGGEMAKTRPCVVVTPSDLNMYLTTVVIVPITSTIRNYPYRVLCSVAGREGEIATDQIRTVDKSRLKRKIGDLNFSEIKRLREVFQQMFCE

SEQ ID NO: 48600 - protein, 330 aa, Bacteroides fragilis
MAILAFQKPDKVLMLEADAKFGKFEFRPLEPGFGITVGNALRRILLSSLEGFAITTIRIEGVEHEFSSVPGVKEDVTNIILNLKQVRFKQVVEEFESEKVSITIENSSEFKAGDIGKYLTGFEVLNPELVICHLDSKATMQIDITINKGRGYVPADENREYCTDVNVIPIDSIYTPIRNVKYAVENFRVEQKTDYEKLVLEITTDGSIHPKEALKEAAKILIYHFMLFSDEKITLESNDVDGNEEFDEEVLHMRQLLKTKLVDMDLSVRALNCLKAADVETLGDLVQFNKTDLLKFRNFGKKSLTELDDLLESLNLSFGTDISKYKLDKE

SEQ ID NO: 48601 - protein, 161 aa, Bacteroides fragilis
MNDRKILVAYFSCSGVTKAVAEKLAAITGADLYEIKPEVPYTEADLDWNDKKSRSSVEMRDALSRPAISGTLFHPEEYEVLFVGFPVWWYIAPTIINTFLESYDFAGKIVVPFATSGGSGIGNCEKNLHKAYPDIVWKDGKLLNGQITRDLVTEWFEKIRL

SEQ ID NO: 48602 - protein, 504 aa, Bacteroides fragilis
MKRIEIYIGLSVFALSAKSQVKESRPNVIYIIMDDLGYGDIGCYGSEKIETPNIDRLYKDGISFTQHYTGSPVSAPARCVLMTGMHSGHAQIRANDEMAYRGAIMNYDSMYVHPGLEGQYPLKAHTMTLGRMMQQAGYVTGCFGKWGLGAPGTEGTPNKQGFDSFYGYNCQRQAHSYYPAFLYKNEDRVYLANKVLDPHTTKLDAGADPRDEAAYAKFSQKEYANDLIFDELISFVGQNRKKPFFLMWTTPLPHVSLQAPEKWVKYYVGKFGDEAPYIGKAGYMPCRYPHATYAAMISYFDEQIGKLIEKLKKERLYDNTVIMFTSDNGPTFNGGSDSPWFDSGGPFRSEYGWGKCFVHEGGIRIPAIVTWPGKIKPSTQSDHICGFQDVMPTLADIANIACPETDGISFLPALLGETERQKEHEYLYWEYPDPTIGLKAIRMGKWKGIVNNIRKGNSTMELYDLESDLREEHDVAAEHPDIVRKLTRLMEKSHTEPENPKFRF

SEQ ID NO: 48603 - protein, 233 aa, Bacteroides fragilis
MTYSHEVEHMCVVKKGPNHGPAPIPEEGKWVKSKEIVDISGLTHGVGWCAPQQGACKLTLNVKEGIIQEALVETIGCSGMTHSAAMAAEILPGKTILEALNTDLVCDAINTAMRELFLQIVYGRTQSAFSEGGLIIGAGLEDLGKGLRSQVGTLYGTLAKGPRYLEMAEGYIKTIALDKNDEICGYEFVHMGKFMDEIKKGTDANEALKKVTGTYGRFTAEQGAVKHIDPRHE

SEQ ID NO: 48604 - protein, 89 aa, Bacteroides fragilis
MSRSLKKGPYINVKLEKKVLAMNESGKKVVVKTWSRASMISPDFVGHTVAVHNGNKFIPVYVTENMVGHKLGEFAPTRTFRGHAGNKKK

SEQ ID NO: 48605 - protein, 120 aa, Bacteroides fragilis
MLDEVDSQLCIQGDWERISQVLVNLITNAIKFTSVGEIHFGFQKKADMVQFYMSDTGKGIPAERVATIFQRFGKIDDFVQGTGLGLTICRMLVEKMGGRIWVRSKQGEGTVFYFTLPMAK

SEQ ID NO: 48606 - protein, 221 aa, Bacteroides fragilis
MTNDMIQLLVNTDQNLLLYLNGFHNAFGDYFMSTFTGKWIWVPMYASILYVLLKNFNWKITLCCLTAIALTILFADQVCASLIRPAVERLRPSNPANPISDLVHIVNNYRGGRYGFPSCHASNSFGLAFFLVFLFRKRWLSLFILLWATLNCYTRIYLGVHYPGDLIVGAIIGCCGAAFMCYLLKKTARGASFGKVKHTEITIYVGLLTTIGILVYASIMA

SEQ ID NO: 48607 - protein, 434 aa, Bacteroides fragilis
MMNMVLVRFERALATANTNHHHTDHIECRDNQRTESNHESTFGIRGDIRIVLAVFDGKEREHIAQSQAARITHKNLTGTFRTAEDVIVKERDQHTERGKGEHAVRPKFFLHEQEAEDKQGNAAQTGGKTVDTVNQIDGIGDKDNQKNRKRHTYPGRKGIQAEKTVEVIDPKAGQGKKRSTDDLDHKFLTVAHSDKVIGNTRQVEQSHPADQKQALGQQVHRTEGGNIITHQDAKGEHSTGGKQDGGKERDTAQTGNGTFMNLALTRHIEKLLPQRDKQDAGNDKPGNRSRDDKSQYDEKDIQDKGDLGYIQCCVEKEKSLLLYFPVGIRILFKTAELFGNLTFIAGKGTLSPAVDDAMRLTGEVVVKDFTIAISQKAHLQQGSGQAVEHFPTTVQDLLDADFLVTVIVDRRVITHQKRKAQTGFFLVGGAMMGI

SEQ ID NO: 48608 - protein, 410 aa, Bacteroides fragilis
MQDTLSLYELNALVRRSLEQCLPDEYWVQAELSDVRTNSTGHCYLEFVQKDPRSNNLIAKARGTIWANIYRLLKPYFEESTGQLFTSGIKVLVKVTVAFHELYGYSLTVQDIDPTYTLGDMARRRREILRQLEEEGVLTLNKELEMPLLPQRIAVISSATAAGYGDFCHQLQHNPRGFYFRTELFPALMQGNQVEESVLAALDAVNARVDEFDVVVIIRGGGATSDLSGFDTYLLAAACAQFPLPVITGIGHERDDTVLDSVAHTRVKTPTAAAELLIDRMEEAADRLGALAEELHARVFYRLEQERRRLALLQARIPSQVMRKLSESRIKLQMAKSNLSHAAETLLARQHHRLELLQNRIADASPQKLLKRGYSITLKDGKAVKSAACLQSGDELITRLYEGEVKSRVE

SEQ ID NO: 48609 - protein, 277 aa, Bacteroides fragilis
MKYKLLVLDLDGTLTNAKKEITLHNREALIRVQQQGVKLILASGRPTFGIVPLADELRMKEFGGFILSYNGGEIIDWSTGEIVYANVLPDEVIPRLYECATRNQLPILTYDHQYIITEYPNDDYVRKEAFLNKMQIYPSTDFLKDIRLPLPKCLIVGEPHRLIPVEAELSVGLQGQLNVYRSEPFFLELVPQGIDKAQSLSVLLNKLNMNREEMVAVGDGYNDLSMIQFAGLGVAMGNAQEPVKKVADYITFSNEEDGVAVVVDKFFTKASDKETRV

SEQ ID NO: 48610 - protein, 253 aa, Bacteroides fragilis
MAQDIADTVDTFPDLPILEVGPGMGVLTQFLVKKERLVKVVEVDYESVAYLREAYPSLEDNIIEDDFLKMNLQRLFDGHPFVLTGNYPYNISSQIFFKMLDNKDLIPCCTGMIQKEVAERIAAGPGSKTYGILSVLIQAWYRVEYLFTVNEQVFNPPPKVKSAVIRMTRNETQELGCDPKLFKQIVKTTFNQRRKTLRNSIKPILGKDCPLTEDALFNKRPEQLSVQEFIHLTNQVEQALKVPIEPVSQIENP

SEQ ID NO: 48611 - protein, 373 aa, Bacteroides fragilis
MALVAGIYWILTRPHKVEPEVPTVIVEPAERDNVEIFGEYVGRIRAQQFVEVRARVEGYLESMLFAEGTYVNKNQVLFVINQDQYRAKADKARAQLKKDEAQALKAKRDLERIKPLYAQNAASQLDLDNAGAAYESAVATVAMSEADLAQAELELGYTLVRSPLSGHISERNVDLGTLVGPGGKSLLATVVKSDTVLVDFSMTALDYLKSKERNINIGQQDSSRSWQPNITITLADNTVYPYKGYVDFAEPQVDPQTGTFSVRAEMPNPKQVLLPGQFTKVKLLLDVREGAIVVPHKAVTIEKGGAYIYVMRRDSTAEKRFIELGPEFGNKLVVERGLGAGEEVVVEGYHKLTPGMKVRATLPQPSAEKKETE

SEQ ID NO: 48612 - protein, 385 aa, Bacteroides fragilis
MKKIILVAALLSAAVCLPAQNKGGNKSGGINLSLWKKACTQPLDSTQTTYVNLGLFSAMHKLHGVGFNAFGSMVQNNMNGVQISGLANLAGGSMHGVQIGGISNVNGNNLAGLSVSGLVNITGNKAKGVLITGLSNIAGDNMRGLMMSGIMNITGDKAAGVQLAGLANVTGEEYDGLMMSGLLNVVGEEMNGLQLSGLANVTGGQMNGVQLGLFNFASKAKGLQIGLFNYHKEDMKGLQLGLVNANPQTKVQLMVFGGNSTKINVGARFKNKLFYTILGGGTHYLDFDDKFSAALFYRAGLELPLYKNLFVSGDLGYQHIETFRNKKVEGIPARLYALQARLNLEYRFTDKFGLFVTGGYGGSRYYNKARTYDKGVIAEAGVVLF

SEQ ID NO: 48613 - protein, 545 aa, Bacteroides fragilis
MEKLHIRKIASLGLMLCFFTGGGAQTPVKVEKRKEHKSNTVIPVVKGNVTDTLSLVSFNDFHGAFACDKGVPGAGQLVQTVLTQKEKNKNTIVLSVGDNFSGSYFSRITRGNPLPEMFQEMDVKMSAVGNHEFDWGLPYLTDTAKVYMNFVAANIITDRGDTLEWAKPYRIVTLNLKNGGTVRVAFVGLTTTDTAHKTSPENIKGLAFVHPVYAARVETACRLKKEGKVDMVVLLMHIGTNMKNRDIIEEENAKLLPFLKGVDAIISGHSHEVVLSKVNDVPIIQAGVNGTHIGKLDFRVVKEEGGNRISYIGGDTIRTEGPSNAHIDSLVDKVLAVYGLSEKLILAKDALIHDRTINKWEYTPVGAYVTAAYVRSFLENEKVPAELKVLPVIGVNHFGGLRASIPAGEVTRLRAGNVLPFGGNVVAYEFTGERLKQLLDDGRRNKNGFLQTSYLKLHLNSKGNVETITDCRTNKIIRDDDKCIVVLDAFITSGGDGYDSKLFSGYEIGDFNSQNLETTVAFIDYLKSLKGFVSSEAAPIPIVQK

SEQ ID NO: 48614 - protein, 856 aa, Bacteroides fragilis
MTDLTANQELQGTRKELLAQLVTLVGLTYEQFTRTVLLAQNDFATFLKSRESAKAELLEKLTGTEIYSRISSEIYLRSKTADAELNQLKSNATLIELLSEEEITLLRTEKESLTNLREQGSKALIDLNAQLSVLHTLKLQQEQRDKKVQDMRLDEEKSKKLREEYTRQSDSLIRFRGQCEAVQPDLSRARELDVQIQSLVSQSKQVEEILQGAEKAANAQANKLQSVQGALHTSCHSLKNLTGEIELPVTEETGLFLESVRNRLKEQEDQLAILQEKNEARVNRLNAFGVEAVTDEQARWMQEQTRLQNARQQMLEWRKAGTEAERLKAQQEEMGHKQEQMRKEITLLTTRLSEKEAELKVLQRLFENARIAMGKDVRTLRQNLRENEPCPVCGGTDHPYRNEEQVVHSLYQNIEQEYQTASAEYQQLNNRNIALKQDLFHLSELSGEITVQLQAFLQEAEQKRPSSEEEQNPDYFEKQLHTVQGKLNLLAEKMYQYHQLYKEWQQHEGQIRTVRSACEALREGVARCHLLMQQVLAAKEQFELLKTAETTAREQFRVVSEQLITLRQERAPLLKGKSVEDAEAAIRKKEKQLNDSVEQVRKEGEEVQSRISGMQGEIRQLNSSIDELMLRKEQIADPEHLPETIARQQATNQETERRLSTVEARLLQQEQNRKKLKQLEQELTEKQEIANRWGKLNKLIGSADGTKFKVIAQSYTLNLLLMHANKHLSYLSKRYRLQQVPGTLALQVIDCDMCDEVRTVYSLSGGESFLISLALALGLSSLSSNNLKVESLFIDEGFGSLDADSLRTVMEALEQLQMQGRKIGVISHVQEMSERIAVQVQLHRAANGKSAITLTS

SEQ ID NO: 48615 - protein, 468 aa, Bacteroides fragilis
MILHTQTPVVDETDGLPLPHRIWAVVGISFALCMSVLDINIINVVLPTLSHDFGTSPAVTTWIINGYQLAIVISLLSFSSLGEIYGYRKIFLSGIAMFIVTSLICALSHSFWTLTIARIFQGFSASAITSVNTAQLRTIYPRKQIGRGMGINAMVVAISAAAGPSVASGILSVASWHWLFAINVPLGLVALTLGLKYLPRKEERSNRKFDKLSAIANAITFGLLIYTLDGFAHHENNDYIVIQLAVLAVVGTYYVRRQLNQPSPLLPLDLLGIPIFRLSILTSICSFTAQMLAMVSLPFFLQNSLGYSEVMTGLLLTLWPIATLVTAPAAGYLVERIHPGILGSIGMALFCIGLYSLSTLTADSSVTGIILRLMLCGAGFGLFQTPNNSTIISSAPTRRSGGASGMLGMARLLGQTFGTTLVALLFSFVVHEKSTAVCLIAGSGFAFVAAVVSSMRLSQPSTLKTKPR

SEQ ID NO: 48616 - protein, 229 aa, Bacteroides fragilis
MNDYRILVVDDEEDLCEILKFNLENEGYEVDTANSAEEALKMNISSYHLLLLDVMMGEISGFKMANLLKKDKKTAQVPIIFITAKDTENDTVTGFNLGADDYISKPFSLREVIARVKAVLRRTATSDTEKAPEQLCYQSLVIDITKKKVSIDGEEVPLTKKEFEILFLLLQNKGRVFSREDILSRIWSDEVYVLDRTIDVNITRLRKKIGTYGKRIVTRLGYGYCFETE

SEQ ID NO: 48617 - protein, 322 aa, Bacteroides fragilis
MNDELEKYFAGTLSATEKTEFLNKLRDNPEAKKEFARMKAVWAVSGLMAQEGDPQKTVRGIAEFDKRLKRRSVHRFRIGFFKYAAMIVLLISTTWFIANWYTQKEQKKQYTEINVPKGQRVNMTLPDGTSVWLSPQSKIKIPNEFNRKNRMVELNGEGYFEVTKNAKKPFIVKTQLFNIQVLGTRFNVFAYAGKESKFETCLVEGRVLVYNKNNKNEKVYLNPHEKVSLVNNRMVVSTSNFDNEEYLKSGIFSFRSKPFGEILSYLTLWYNVQFNFTGDVKLDERISGKIRQSEDVDNILIALQGVYPFKFKKTDDEHYEIY

SEQ ID NO: 48618 - protein, 100 aa, Bacteroides fragilis
MPPAARLTDMHSCPMQTPAWPSPIPHVGGPIIGPGAPTVLIGKLPAAVMGDSCVCVGPPDSIIKGSATVMICGKPAARMGDTTAHGGSIIAGCPTVQIGG

SEQ ID NO: 48619 - protein, 446 aa, Bacteroides fragilis
MNEEYIDNVKELIEEKDADKVKELLIDLHPADIAELCNELNPEEARFVYRLLDNETAADVLVEMDEDVRKEFLDILPSETIAKRFVDYMDTDDAVDLMRELDEDKQEEILSHIEDIEQAGDIVDLLKYDENTAGGLMGTEMVTVNENWSMPECLKEMRQQAEELDDIYYVYVIDDDERLRGIFPLKKMITSPSVSKVKHVMQKDPISVHVDTPIDEVAQIIEKYDLVAIPVLDSIGRLVGQITVDDVMDEVREQSERDYQLASGLSQDVETDDNVLRQTTARLPWLLIGMIGGIGNSMILGNFDSTFAAHPEMALYIPLIGGTGGNVGTQSSALIVQGLANSSLDAKNTFKQVSKEAVVALINATIISLLVYTYNFIRFGATATVTYSVSISLFSVVMFASIFGTLVPMTLEKMKIDPAIATGPFIAITNDIIGMMMYMGITVLLS

SEQ ID NO: 48620 - protein, 636 aa, Bacteroides fragilis
MLRIKRLDIFIIKSFLLLFVGTFFICLFIFMMQFLWKYVDELVGKGLEMSVLAQFFFYSALSLVPMSLPLAVLLASLITFGNFGERFELLAMKAAGISLLKIMRPLIVLVFAICCVSFYFQNVIGPQAQAKLGTLLISMKQKSPEVDIPEGVFYDEIDGYNLKVQRKDRKTGMLYDVIIYDFSNNFDNARIIVADSGRLEMTADKQHLYLHLYSGEMFENLKAQSMSSKNVPYRRESFREKHSIIQFDSDFNMADASIMSNQSTTKDMIKIQASIDSMTVLADSIGRQYFVEASKGPYRTAVGLTKEDTLKMQEAQIRDYNVDSLFEAATLMNKQKIIASAVGRTENLSSDWGFKSFTMTQNDFSIRKHKIEWHRKITISLSCLLFFFIGAPLGGIIRKGGLGMPVIVSVLTFIIYYIIDNTGYKMARDGKWIVWMGMWMSSAILAPLGYFLTYKSNKDSVVLNTDVYISWFKRVFGVRSVRHLSKKEVIIHDPDYQRLPFDLNGLSEECRAYMQKNRLAKAPNYFSLWMSGGQDQEIIAINNRMEALVDEMSNTRSLILLQKLEKYPIIPVNAHVRPFHNYWLNMAIGIVIPIGLFFYFRIWAFRIRLNKDMERIIALNRDVELTIKDINNENKI

SEQ ID NO: 48621 - protein, 322 aa, Bacteroides fragilis
MRKVYYIYNPQTQTYDRIYPTVRQRALSILRRLFIGMGLGAGSFIILLLIFGSPSEKELRKENSQLLAQYNVLSRRLDEAMGVLQDIQQRDDNLYRVIFMADPVSPAIRQAGYGGTNRYEQLMDMANSKLVINTTQKMDVLSKQLYIQSKSFDDVVAMCKNHDQMLKCIPAIQPISNKDLRKTASGYGTRIDPIYGTTKFHAGMDFSAHPGTDVYATGDGTVVKMGWETGYGNTVEIDHGFGYRTRYAHLQEFRTKLGKKVVRGEVIAGVGSTGKSTGPHLHYEVHVKGQVVNPVNYYFMDLSAEDYERMIQIAANHGKVFD

SEQ ID NO: 48622 - protein, 380 aa, Bacteroides fragilis
MNLYLKHTLFYLLGISYALISSAQSNPDKLQCKVTGRMLLDGGVYLKNDNNFGNGVEFSDLRIGAKVAYQNWDMKLEIGYTDNKATIKDAFAKYTYKNHSIQVGQFYEPFSLEMMCSTFDIRFNQSPGAVLALTNGRRMGITYSYRNKRHYMSGGAFMDNEVNNLKKASHGYALDGRVVYRPVLDSKKLIHIGFAANYRTPNESLNEEDKNIFIYKSPGVSTIDNRNIAMATIDHAAYQIKFGTELLVYYHRFCLQSEYIRTHVERDNAFKNYVAQGAYLQCSWLLSGETYLYDESVACAGRPEGKSLEVCSRFNYLTLNDEDAAIWGGEQKDISIGLNYYINKYIGIKLNYSYLMPGASIKEISRKNFSVFQGRFQFIF

SEQ ID NO: 48623 - protein, 446 aa, Bacteroides fragilis
MSALVRYFLSKGKVVAGYDRTPSELTQHLIEEGAQIHYEENIDLIPEACKDKATTLVVLTPAVPQEHAELTYFRDNGFEIQKRAQVLGTITRSSKGLCVAGTHGKTTTSTMTAHLFHQSHVGCTAFLGGISKNYGTNLLLSSTSPYTVIEADEFDRSFHWLSPYMSVITATDPDHLDIYGTEQAYLESFEHYTTLIQPGGALIIRKGISLQPKVKEGVKMYTYSRDEGDFHAENIRIGNGEIFIDFVGPDIRIDNIQLGVPVSINIENGVAAMALAHLNGVTPEEIKQGMASFRGVDRRFDFKIKNNRIVFLSDYAHHPSEIKQSVMSMRELYRDKKITAVFQPHLYTRTRDFYKDFADSLSLLDEVILVDIYPAREQPIPGVSSRLIYDNLRPGIEKSMCKKEEILDVLKAKHIEVLITLGAGDIDNYVPGICDLLSRRMVPSDN

SEQ ID NO: 48624 - protein, 63 aa, Bacteroides fragilis
MPKMKTNSGSKKRFALTGTGKIKRKHAFHSHILTKKSKKRKRNLCYSTTVDTTNVSQVKELLA

SEQ ID NO: 48625 - protein, 707 aa, Bacteroides fragilis
MEIFHKMISAALNLPEKQISNTLGLLAEGATIPFISRYRKEITGGLDEVQIESIKTQYDKLSELAKRKETILGTIGEQGKLTPELRQRIDATWDATALEDIYLPYKPKRKTRAEAARQKGLEPLALLLMMQRENNLGSRIPAFVKGDVKDAEDALKGARDIIAEQVSEDERARNAVRNLFARQAVISAKVVKGKDEEAAKYRDYFDFSSPLKRCTSHRLLAIRRAEAEGLLKVSITPDDDECLERLDRQFVRSNNECGRQVAEAVQDAYRRLLKPSIETEFASLSKEQADDEAIRVFAENLRQLLLAPPLGQKRVMGIDPGFRTGCKVVCLDAQGNLVHNENIYPHPPVDKKTEAASKLRKMIEAYKIEAIAIGNGTASRETENFVTHQQFDRPVQVFVVSEQGASIYSASKTARDEFPDYDVTVRGAVSIARRLMDPLAELVKIDPKSIGVGQYQHDVDQTKLKKSLDQTVENCVNQVGVNLNTASSHLLTYISGLGPQLAQNIVAYRAANGAFASRKELMKVPRMGAKAFEQCAGFLRIAGGENPLDNTAVHPESYGIVQQMAKDLSCTVPQLIADKSLRTRIEMEKYITPTVGLPTLKDILQELDKPGRDPRDTIQVFEFDRNVRTINDLREGMTLPGIVSNITNFGAFVDIGIKENGLVHLSQLANRFITDPTEVVSIHQHVTVKVLSIDLERKRIQLTMKEE

SEQ ID NO: 48626 - protein, 410 aa, Bacteroides fragilis
MVLNYIWIAFFVIAFVVAVCKLLFFGDTQIFTEIINSTFDSSKTAFEISLGLTGVLSLWLGVMKIGENSGLINALSRWLSPVFCRLFPDIPKGHPVMGSIFMNMSANMLGLDNAATPMGLKAMKELQELNPKKDTASNPMIMFLVINTSGLIIIPISIMVYRAQMGAAQPTDIFIPILLSTFISTLVGVIAVSISQRINLINKAILTLMGCLSLFFGGIIYLTTTLSREEMGVYSTLIANVILFSVILLFIIAGIRKKINVYDSFVEGAKEGFTTAVRIIPYLVAFLVGIAVFRTSGAMDILVGGIGAIVEFCGLDTGFVGALPTALMKSLSGSGANGLMIDTMKQFGPDSFVGRVSCVVRGASDTTFYILAVYFGSVGITKTRNAVTCGLIADFAGIIAAILISYLFFF

SEQ ID NO: 48627 - protein, 376 aa, Bacteroides fragilis
MKKILLVFGTRPEAIKMAPLVKALQRDTEHFETKVCVTAQHRQMLDQVLEVFDIIPDYDLNIMAPNQDLYDITTKVLLGLRDVLKDFCPDTVLVHGDTTTSMAASLAAFYRQVAVGHVEAGLRTYDMLSPWPEEMNRQVTDRICTYYFAPTGKSKQNLLQENIDAKKIFVTGNTVIDALLMAVDIISKKPGIKEKLHQELRDKGYEVGQREYILVTGHRRENFGEGFLHICKAIRELAALHPEMDIVYPVHLNPNVQKPVYELLSGVDNVYLISPLDYLPFIYAMQHSTLLLTDSGGVQEEAPSLGKPVLVMRNTTERPEAVEAGTVKLVGTDAEAIVSNVTELLRNKELYRRMSETHNPYGDGHACERILSALTR

SEQ ID NO: 48628 - protein, 152 aa, Bacteroides fragilis
MNILYTYPETIVDGEGIRYSIYLAGCRHGCPGCHNPESWNPQAGEELSEGRLASIIREINSNPLLDGVTFSGGDPFYDPEAFLPVIRRVKTETGQNIWCYTGYTYEEIESDPKLAAILPYIDVLVDGRFKQELYSPHLEFRGSSNQRIIKLK

SEQ ID NO: 48629 - protein, 513 aa, Bacteroides fragilis
MAQEDVFKKLVSHCKEYGFVFPSSDIYDGLGAVYDYGQMGVELKNNIKKYWWDSMVLLHENIVGIDSAIFMHPTIWKASGHVDAFNDPLIDNKDSKKRYRADVLIEDQLAKYDDKINKEVAKAAKRFGEAFDEAQFRSTNGRVLEHQAKRDALHERFAKALNDNNLEELRQIIVDEEIACPISGTKNWTEVRQFNLMFSTDMGSTADGSMKIYLRPETAQGIFVNYLNVQKTGRMKVPFGIAQIGKAFRNEIVARQFIFRMREFEQMEMQFFVRPGSELEYFKKWKEIRLKWHKALGFGDDHYRFHDHDKLAHYANAATDIEFLMPFGFKEVEGIHSRTNFDLSQHEKFSGKSIKYFDPELNESYTPYVIETSIGVDRMFLSIMSAAYCEEQLENGESRVVLKLPAALAPVKLAVMPLVKKDGLPEKAREIIDNLKFHFHCQYDEKDSIGKRYRRQDAIGTPYCVTVDHQTLEDNCVTLRNRDTMEQERVAISELNNIIADRVSITSLLKTIQ

SEQ ID NO: 48630 - protein, 164 aa, Bacteroides fragilis
MATAYHNLSDYDFNSVPNAEEMKFGIVVSEWNANITGALLDGAVKTLKKHGAKEENILVKTVPGSFELTFGANQMMENSDIDAIIIIGCVIKGDTPHFDYVCMGVTQGVAQLNATGDIPVIYGLITTNTMEQAEDRAGGKLGNKGDECAITAIKMIDFVWSLNK

SEQ ID NO: 48631 - protein, 773 aa, Bacteroides fragilis
MGFRKNNTELQRRKLLQENILNSIPLPIHIKDVEDDFRYVFCNEESMRMFGTHEGETVCSVLDSEQAERMQKTDLEVFTTGKPYFGVERIILKDGRSYDTIVRKNIIYDGTKRLLLNIRWDQKLQNDLKRRAKVLSMSMEVMNAYTWFYEPSKQRVSFGEGFDKIGRNALEINSFEKFAECVHPDDRQRFVDTMDAVLKQDSGEWDIEYRADLRGNRNYEWWKTRGVLETSILNDHPYQYVSGMSISIESYKQTELTLLKNKEKLNKLIRQNELVLNNTNSGLAYITTDYVVQWENVSVCSSSLSFEAYKRGECCYKSAHNRTSPCDNCVLSKVLVSRQMEKIKFHLENNRIVEVLATPVFNESEEIDGIVIRVDDITDRERMIEELRQAKLLAEQSDKLKSAFLANMSHEIRTPLNAIVGFSDLLMNSEEQGDKEEYMQIINTNNELLLKLINDILDLSKLESGSVELKYEEFDLAEYFDSMASSMKQRVTNPKVQLVAVNPYSVCRVRLDKNRVAQVVTNYVTNAIKYTPQGTIEMGYEVVDAGIRLYVRDTGIGIPEEKKRKVFHRFEKLDEFAQGTGLGLSICKAITESMGGSVGFESEYSRGSLFWAVLPCDPEVQMRRESNIAIGQNAGKDDLIRSGNQHSALDRKTVLVVEDISSNYLLISAMLSKHYNLLHAVNGEQAVAMVKEYKIDLLLMDMKMPVMDGLTATAEIRKFDTNIPIVALTAHAFESDKVAALKSGCNDYLVKPVDKARLMSVLRKYCHPSTLVL

SEQ ID NO: 48632 - protein, 481 aa, Bacteroides fragilis
MIELTQEELKQHFSEPIFGQISETADALGLECYVVGGYVRDIFLQRPSKDIDVVVVGSGIAMAEALGKRLGRGAHVSVFKNFGTAQVKCHGTEVEFVGARKESYQRDSRKPIVEDGTLEDDQNRRDFTINALAVCLNKGRFGELVDPFGGMNDLKEKIIRTPLDPDITFSDDPLRMMRCIRFATQLNFYIDDDTFESLCRNRERIEIISRERIADELNKIMLSPIPSKGFIDLDRSGLLELIFPELVALQGVETRNGRAHKDNFYHTLEVLDNISRVTDNLWLRWSALLHDIAKPVTKRWEPKAGWTFHNHNFIGEKMIPNIFRKMKLPMNEKMKYVQKMVSLHMRPIVIADDVVTDSAVRRLLFEAGDDIDDLMTLCEADITSKNMERKQRFLNNFQLVRQKLKDLEEKDRVRNFQPPVSGEEIMEVFNLGPCRQVGSLKSAIKDAILDGVIPNEYEAAYAFMLQKAAKMGLKPVQNKEV

SEQ ID NO: 48633 - protein, 329 aa, Bacteroides fragilis
MKNYIQRIIRLFATSDPDPKLTGEIHRWLLDQEHAGEKETALHDLWNETEGKVDKTTWDSLASVYTKVGANSGDRHQPRIRFAHYAAAIALLIVSVSVTFQMTKQHFAEAPLIENITPDGRLSSLRLPDGSIVQTNSGSILLYPEKFKGETRTVYLIGEANFKVKKNSGQPFIVRSGTMSVTALGTEFNVAAYPEENEMIATLIHGKIKVECDNGKESYIVTPGQQVTYRKSTGESRLAEANIEDVTAWQKGMYVFRGVTMSEILNELERRYAVTFQYNANLFNDDKFNFRFREKSTLEDILNIMQEVVGGFSHELKGNICYIKPETKK

SEQ ID NO: 48634 - protein, 565 aa, Bacteroides fragilis
PENEAFIIDDKHYTYAQLGEITASITHSLSEIKDEKIGIVAENRIETYAAILAVLAGGKTYVILHPAYPEERNLKIAALAGLRTLLCTSDTDRSAFGTGHFRIIDTDRLPGKTLSEQQSHSSDEERNAYIIFTSGSTGEPKGVPITRANLNAFYRAYSSLDWNLDEHDRMLQMFELTFDVSVVSLLYPLTLGAAVYTVGHQDVKHFKVFELLEKYQLTFATVTPSLLQLLSPYFDEINLPSLKYLGVSAEASQTELLERFRKSAPNATFINLYGPTEATIYCTCYRIPASDKCKHYNGMVAIGKPFPGIRAIIADEEGNELPQGETGELWVSGRQVMKGYLDDPEKSALVLIHRPDGQIYYRTGDLCILDGDGDIIYCGRKDYQVKIQGFRIELSEIEYTAQSFFKTPCSVAAVPLLCDGICNELHLAVETTECTQSALIEYLKEKLPKYMLPKQIHCISQFPVTNSNKTDRKKIAETDKREETLKTIINMNREEVLKQLQSIFRDILKKDNVCIDESSTSKDVDGWDSLTHMQIIAQIEKHFGVRFNFREVIKFKNVGDLCSAL

SEQ ID NO: 48635 - protein, 349 aa, Bacteroides fragilis
MKIINFEALNSKSIIMKRNSMFILSAFILFSAFSCGTNGSKTTSTDITEKKVIVQVPQFDADSAYKYIQAQVDFGPRTPNSKGHVACGDYLAAKLAEHGAKVISQNAELPAYDGTLLKARNIIGSFKPESKKRIALFAHWDTRPWADNDPNEKNHHTPILGANDGASGVGVLLEIARQINQQQPELGIDIIFLDAEDYGAPQFYTGEHREDQWCLGAQYWARTPHVDGYNARFGILLDMVGGKDATFFKEVYSEKYAKGINKKVWKKANDAGYGRYFINEVGGQITDDHLFINRLAGIPTIDIIPNDENCELSSFGPTWHTVNDNMDAIDRSTLKAVGQTVLEVIYNEK

SEQ ID NO: 48636 - protein, 196 aa, Bacteroides fragilis
MRSIEVKGTARTIAERSSEQARALKEIRNNGGVPCVLYGGEEVVHFTVTNEGLRNLVYTPHIYVVDLVIDGKKVNAILKDIQFHPVKDTILHVDFYQIDEAKPIVMEVPVQLEGLAEGVKAGGKLALQMRKLKVKALYNIIPEKLTINVSHLGLGKTVKVGELSYEGLELLNAKEAVVCAVKLTRAARGAAAAAGK

SEQ ID NO: 48637 - protein, 375 aa, Bacteroides fragilis
MDREESVQHFLDLIKKSRRGKFKVYIGMIAGVGKSYRMLQEAHDLIDNGVDVRIGYIETHGRAGTEALLKGLPVIRRRKLFYKGKELEEMDLEAIIRIHPEIVIVDELAHTNVEGSLNEKRWQDVMTLLDEGINVISAVNIQHIESVNEEVQDIAGIEVKERIPDSVLQEADEVVNIDLTAEELITRLKAGKIYKPEKIQTALNNFFKTENILQLRELALKEVALRVEKKVENEVVMGIGLGVRHEKFMACISSQEKTPRRIIRKVARLATRYNTSFVALYVQVPKESMERIDLASQRHLLNHFKLVTELGGEVVQVQSKDILGSIVQVCKEKQISTVCMGSPGLRLPGALCSVLKYRRFLNNLAQANIRLIILA

SEQ ID NO: 48638 - protein, 479 aa, Bacteroides fragilis
MNIKTKLLFGIGILAGMIILLVTLSVVNLQILTATEPDSPVAMPALERALLWISVTGGICILTGLVLLIWLPRSINRPVKELTCGILEIANHNYEKRLDMRGYEEFREVSDSFNRMAEKLTEYRDSTLADILSAKKFLEAVVNSIHEPIIGLNTEREILFINNEALNVLNMKRENVIRKSAEELSLKNDLLRRLIRELVTPGEKNEPLKIYADNKESYFQASYIPIENAAAEEGEARNLGDVILLKNITEFKELDSAKTTFISTISHELKTPISAIMMSLQLLEDKRVGSLNGEQEQLSKNIRDNSQRLLDITGELLNMTQVEAGKLQMMPKITKPIELIEYAIKANQVQADKFNIQIEVDYPQEKIPKLFVDSEKIAWVLTNLLSNAIRYSKENGRVVIGVRHKKEYIELYVQDFGKGIDPRYHQSIFDRYFRVPGTKVQGSGLGLSISKDFVEAHGGTLTVQSEPGKGSCFVIRLKA

SEQ ID NO: 48639 - protein, 763 aa, Bacteroides fragilis
MKHYIVMLVLACVSMSSYAVNPIKEGNMIAGHVIVKGTEEGIPFATVMILGTNRGAVSNEEGQFEFRKLAAGKYTLRVQVMGYKTQEKTITVSAEATSVVHFQMEEVSFTTDEVVVSANRNEVSRKAAPVVVNVMSAKLFETVNSTDLAKSLNFQSGLRVENNCQNCGFPQVRINGLEGPYSQILINSRPIISALSGVYGLEQIPVNMIERVEVVRGGGSALFGANAVGGTINIITKDPINNSFQVASTMSNMNGKSWEQYMGGNVSLVAKDNSYGIALYETYRNRNPYDADGDGFSELGKLNMNTFGMRAYYRPNYFSRINVEYHTTNEFRRGGNKFNLQPHEADITEQTKHIINSGGVSYDRYWGEKHKMSVYGSVQHTDRNSYYGAQKDMNAYGKTNDLTWVVGGMYVGNMDRCLFAPATFTGGVEYQSNSLHDVMTGYHRDMQQDVRIAGGFVQNEWRLNRWTMLVGARLDKHNLIDHPIFSPRVNFLYKPSDNLQARLTYSTGFRAPQAYDEDLHVTAVGGEGVQIRLADGLREECSNSFSGSVDWSFPMGHWQSNILLEGFYTDLHHVFVLEDIGEDQNGDKIKERRNGSGAKVYGVNLDAKVAHGREAQLQLGFTVQRSRYNRAEVWTSEGEEEQTTKRMPRTPDYYGYFTFTSAPLKNFDFSLSGTYTGKMIVPHMAGYIEKSRMEHTPQFMDLNLKLNYTFVLKDHIKMQVNGGVQNIFNSFQKDLDKGEFRDAGYFYGPTQPRTYFVGIKIMN

SEQ ID NO: 48640 - protein, 416 aa, Bacteroides fragilis
MIFSQRIYFIILFHVLLILVTAGTGLWLVVSHTGYIIGGILLLCSLFQIGALTRQLNTFNRKIRLFFDAVQDKDNMLYFPEANVGKEQAQLNRSLNRLNDLLARTKGESHKQEHFYQSLLEEVPSGVLAWDDSGRIIIANSAAFSLLKCNRLYTETQLAQLLNATGIRKSLSISEKKMILDGETITILSIKDIGDELSDKENESWSKLTHVLTHEIMNTIAPILSLSQTLSERPDINEKSARGLRIIQAQSERLMEFTESFRHLSYLPHPEKRRFALTEMLRNLEELLQSDFRERGIRFMLQCVPDPIETDGDPNQLSQVFLNLLKNAMQALEGQADGRIILRVRRADRLQVEIEDNGPGIPEEIREQIFIPFFTTKTEGSGIGLSLCKQIIRQHDGHLSIRESRPGQTIFSLDLP

SEQ ID NO: 48641 - protein, 343 aa, Bacteroides fragilis
MGAELTGNWNSFLERFSPSQQDIYYREEYLKLYQSLDEQAVCFVYTDGNFCFLFPYLLRSFYFDGVCYHDFETAYGYGGPIFNTDNKEFISKAWKSFYCYGQENHYIAGFVRFHPLLNNTLSFDSIGVVVKDRNTIAIDLQKDIDSVWMEEIHTKNRNIIKRGAKTGLRFIADYQYEYLDEFIRLYNSTMDKLSADSFYYFDDSYYYQLKKNIPDSFLGVVLLEDKVISSSIFFCSGDYGHYHLSGSDKESLKLYPNNFMLWEAAKEMKAHGILKFHLGGGTNSDEYNSLYEFKKKFSKSFYSFQIGKIIFNKYVYDKMCRNWELNNPNKSMHYINHLLKYKY

SEQ ID NO: 48642 - protein, 332 aa, Bacteroides fragilis
MSDAYKIIHNFMAFIASPDLKNKVWTWLLDPSGKQRKEEALLQIWDEYRPEADAGTRHSLRKFQKRAGLSSARPAYLHRWAHIAAILLIPLISIITAYIYVEHHTQEVRFVECIVPKGEQKQITLPDGSIITLNSGSVFLYPTQFAGDTRSVYLSGEGHFAVAPNKKLPFVVATNHLDICVLGTQFNLQAYPFDRRTITTLESGSVAVRKKNQPNSFITLEPNQQLDYENRSGRFNKTDIDASVYSGWTKGEMNFISQSLREILRTLERSYAVSIQLSSDLMESNRINSDLYTIKFKRRDDIFHVLDIVTKTVGGITYKVEKDESISICPLK

SEQ ID NO: 48643 - protein, 281 aa, Bacteroides fragilis
  MISC_FEATURE (10)..(10): X=any amino acid
  MISC_FEATURE (41)..(41): X=any amino acid
REILITALHXYTNRMEKVNNEKRNRRCLSKYLCFTCQIYRXEEVKISQVNHRFVTCYRDFLSKNGATENTIGYYLRNFRALYNLAVKDGLVPPCDYPFKEICTKPCKTVKRALDREQMVKLACLSLHSDAELKRSLDLFLFGFYAQGMAFVDIAYLKWKNISGNRIIYRRHKSKQLIQIVITPQIKSIIDEHGNNTNNAEEYVFSVIKNNANEYTQYRTALGRTNRHLKIISAKLKIDPPLTTYTARHTWATLAREYGAPVSAISAGLGHTKEEMTLVYLK

SEQ ID NO: 48644 - protein, 321 aa, Bacteroides fragilis
MSELIDKYFAGEMTCEEKKDLFDRIESDEALKKEFLRMQNVVALTQILSRQDDSETSRKGKQHFMQLLFRKRLKRAITVSLKYAAVFAVLVVGTFYAAKLYLSEEFGKSYTIVTAPKGQRVKIELPDGTIAWLSPCSRLRFAASFNETDRKIELDGATYFDVAKNPEKPFVVSAKGYRIRVLGTKFNISAYKNSKEFETDLVEGCVHIYDPADIRNEVFLQPKEKAVLWGDRLMKRESDFDNEEYLKNGVVSFLSEPFGRVLNSVALWNDVNIKIERSVNATQRISGKFRQSDSLESILKALQGAMPFKYKIVSEEEIIIY

SEQ ID NO: 48645 - protein, 231 aa, Bacteroides fragilis
MKNIHSVLDSQETEAWQKLIRVLTHEIMNSITPVTSLSELLEHQIEDFDGNEEERAEIRRMLQTIRRRGDGLIRFVNSYREVSHLPQPLLKIYTSQELLTGVVRLMYREPNDLHLIFPPKGQRLMADKDLIEQVLINLIKNARENDATDIRISAGLSSGERPYIRIEDNGTGIEQEVLDRIFIPFFTTKPTGSGIGLTISRQIMHLHRGTITVSSEPGKGSIFTLLFPGVF

SEQ ID NO: 48646 - protein, 274 aa, Bacteroides fragilis
MNLLRPKYLKYVVLGLISALVVTCWPRKEKPKGHPRDYAEIKESGILHAATEYNSISFYVDGDTVSGFHYELIEAFARDKGLQVQVSPVMSFNQRLEGLANGTYDVVAYGIPATSELKDSLLLTSPIILSKQVLVQRKVGENDSLAIRSQLDLAGKTLNVVKGSPSILRIRNLSNEIGDTIYVNEIEKYGSEQLIAMVAHGDIDYAVCDEGIARMAVDSLPQLDINTAISFTQFYSWGVSKQSPALLDSLNTWLSDFRKKGEYQSVYRKYYGKQ

SEQ ID NO: 48647 - protein, 439 aa, Bacteroides fragilis
MNKQLITIFSIFSITCLGMVSAQESKSFLPEVKKESLTFSSEDNKFKLTFNGRIQADGAMFFGEDYQPIGNGVGFRRVRLGATAAFGKRLSGKIEMDLTDGGFSLKDCFIKYAFPNGLYFRAGNFKESFGMAAMTSSGDLWFMEKANVVSAFAPEYHIGVQGTWEHDQFLGVAGVHFKKIEGNKEKDYSESNNKAGDDEGISVTARAVWQPVSADKVKGFHLGIAASYRTPKTTVGSLMPNTVRYSTRSLSYINKIKFLDTSPIASVSHDWLAGAELAGFYRGFRFQGEYIMNNTVRMEGLATEKFNGFYVQAAYLLFGGQQRYSKSRGAFSQPSFGRSWGDIELAARFDRIDLNGTEVMGGSSNGWTFGVNYYATRNLKFQLNYSYVDNDKYANAFGQAAVGYKSNGEIAYKPEEVDELLGKGGNAYGILGLRIQLNF

SEQ ID NO: 48648 - protein, 222 aa, Bacteroides fragilis
MNVTDNLKQVLAELPSGVRLVAVSKFHPNEAIEEAYRAGQRIFGESKVQEMTGKYESLPKDIEWHFIGHLQTNKIKYMAPYVSMIHGIDSYKLLAEVNKQAIKAERVIRCLLQIHIAQEETKFGFSFDECKEMLNAAEWKALANIQICGLMGMATNTDSKEQIEREFRSLNCFFHEVKKQYFANEPTFCELSMGMSHDYHLAIKEGSTLVRVGSKIFGERVY

SEQ ID NO: 48649 - protein, 783 aa, Bacteroides fragilis
MHAGEQQQQSKGIVTGRIVDQQKQPYYPVAVAIEGVYIGGYTNENGVYHINDVPAGSQTIVVSGIGVKTKKVPIHVTAGKVNRIPDIEIDTQAEELEEVQVIGKSEARRQQEQAYAISVLDIKKAYNSAAPLNKLLNNVSSVRIREEGGMGSNYNFSLNGFSGNQVKFFLDGIPMDNFGSSFNLANISANMAERVEVYKGVLPVNLGADALGGAVNIVSRRDANYLDATYSFGSFNTHKVSVNGAYTHLKTGFTVRANAFYNYSDNDYKVFVPIIDLATNKKIDERWVKRFNDAYRSGGIRLETGITNKPYADYLLAGIILSKNDKDVQTGATMDAVYGGVKMKSESVIPSIRYKKDDLFLDGLSLSLYGTYNSVNTFNVDTIARRYNWLGESVPSTSAGEGYYTDSKIKNREWLGNGNISYVIDGHQSLILNHVVSAMRRTMNDKVRPDDENNNVPQQLTKNITGLGWQIRYDRWNANVFGKMYKLYSSTYKRLDEYTENARWEKVQDHKTNFGYGAAATYYILPSLQAKFSYEHAYRLPESIEMFGDGLIQQRNPDLKPESSRNLNLGLSFIQTFGAHQLSADGNFIYRYTTDFILKGVSLTSNPTTGYENLGKVLTKGVEAAVRYNYKDLFHTGAGFTYQDITDRQRYEKTKDSFVGEGITENITYKERLPNIPYLFANADAGVRFHDLIWRNSVLTFDYNLNYIHSYYLSFPGLGAKSSKKVIPEQFSHDLALGYSMDNGKYSVVVECTNLTNQKLYDNYRLQKPGRAFNVKLRYFFSK

SEQ ID NO: 48650 - protein, 180 aa, Bacteroides fragilis
MIKREDVYKIGLFNKPHGIHGELSFTFTDDIFDRADCDYLICRLDDIFVPFFIEEYRFRSDSTALVKLEGVDTAERARMFTNVEVYFPVKHAEEAGPGELSWDFFVGFRVEDVRHGALGKVTDVDTSTVNTLFVVDRDGDELLIPAQEELIAGIDQKHKIITVDLPEGLLSLDECDDEES

SEQ ID NO: 48651 - protein, 366 aa, Bacteroides fragilis
MGHYEHKTKEELLEIVCKLEKKVEGLSSELDSLKKGRFRERYSTRILDALPDMLTVFDHNANIVELASSPTTNHVEGTTSDSIINSNVKDIVPEEAYESVRHNMDKVIHTGKSSTAEHSLMLDGVLHHYENRIFPLDDQYLLCMCRDVSQETEMAKINETQRSEIVRLNSLMNDILNNIPVYLFVKDTGNDFRYLYWNKAFAEHSGISVQRAVGSTDADIFPDKKDAEHFREDDLKVMKLGRIEYLENYTTMSGEVRTVTTMKTVVPSGGQHPYIIGVSWDVTEIKKTEKELIAARIKAEEADRMKSSFLANMSHEIRTPLNAIVGFSKLIIEADNECEKRQYADIVEHNTTVLLNLFNDILDLTA

SEQ ID NO: 48652 - protein, 270 aa, Bacteroides fragilis
MRLIIQPDYQSVSQWAAHYVAAKIKAANPTPEKPFVLGCPTGSSPLGMYKALIDLNKKGIVSFQNVVTFNMDEYVGLPKEHPESYYSFMWNNFFSHIDIKPENTNILNGNAADLDAECARYEEKIKSYGGIDLFMGGIGPDGHIAFNEPGSSLSSRTRQKTLTTDTIIANSRFFDNDINKVPKTSLTVGVGTVLSAREVMIIVNGHNKARALYHAVEGAITQMWTISALQMHEKGIIVCDDAATAELKVGTYRYFKDIEADHLDPQSLLK

SEQ ID NO: 48653 - protein, 336 aa, Bacteroides fragilis
MDETKLLNYLKGESDAEECLEVEAWYYASAEHKKQLDQLYYMLFVGERKVAMDGVDTENSLSVLKDRIKHKESEKKSVHRIRVSKWKRYAMPLAAFLCGLLVSVGALYWISSGKSAGYIFATESGQRAQAVLPDGTKVWLNASTQIVYKPSFWKRERQVDLSGEAYFEVSRNKTKPFVVNSNDVRTCVLGTKFNVRARPSEEKVVTTLLKGSVKVQLPGQSEEEGILLKPGQMLSVDTRTMQPMLTEASRPGDVLLWINGKLKFEQATLQEIVQCLEKHFDVHFIISDAQLQKDRFTCTFSTDDDIRQILSILALTKRFDYKCEDNNIILTPKTNR

SEQ ID NO: 48654 - protein, 309 aa, Bacteroides fragilis
MNQEILNRYLTGDASAEEKQMVVRWLDADPQHMREYLALRKLHDITLWQEKPAATVDKKKWLTLPYIREFIKIAAIFLIAVTSVYFLAPERGRDTPDLKAIHVPSGQRAELTLGDGTRVCLNSNTTLTFPDHFDRKERRVTLDGEGYFQVAKNEKKPFIVQAKEYEVRVLGTEFNVMMYKDQDFFETVLLKGSVEVNETTTGRKVKLQPNERLFGKAGQLRKESISEWNRALWMQGILYFDNTRMDEIIRQLGLYYDVKFILEKESLANVRFTGKFRIRDGVEHVLKVLQLKCKFTYQRDEDSNTITIN

SEQ ID NO: 48655 - protein, 375 aa, Bacteroides fragilis
MKIDDAIIDKVLNNGASVEEAGLVAEWFATEEGSEFLSGRLESESARLIEERAREWLDHPVPEERMWERFIGQIKPEKKIVSYRRGLIATAVLIPFLFLSISLWFLADRTGVFSATEYAELKVPCGEQVQVVLQDGTVIQLNSDTRLRYPRKFGLFSRSVELWEEGFFVVAKDKKRPFIVDLKGVEVKVTGTKFNVKAYPSEPNVWVTLEEGGVLLKDIKNKEYPLVPGESAEYNRTSGICQITKPDDMSQISSWRSNSLNFYLTPLRDIIKVMERQYDVHFVVRDSILLNNRFTLSTSKVNVDDVLRDLEAVFSITLPMGRKYLPSVMNLVWGLGWSGLPIVLPYSILVRRKREKTDIPILIGSVSPINNKRRG

SEQ ID NO: 48656 - protein, 366 aa, Bacteroides fragilis
MSIFVSSKYRQVITYSIMKQENIPWELIISKFKQEISEEDDARLMSWAERPECRSVMEDLNVVWKRVQEKTSDYTPDKEYYWKVLSARIGKAGKPQVEVLQEKASGKTFTLRSLYRYIAAACVVLVLSVGMSYYWGVSMGRQPMGEQVYTSMDGKSKIFLPDGTGVWLQANTTLAYGNDFRDRDRSVRLSGEAYFEVAKDKRKPFIVHTEGMQVRVHGTKFNVASPDGAAESRVSLMEGSVSLETRAGLVFLKPGEIAVYDKKNNRLAIDAGDVALEKMWIQDEFFVSNKTLGEVCRILSKRYDVEIKVDDELEDKYRYTFTLRNETLEEIVRIMARINPIAYHFDDNNVLVINQKWENKEGKGKK

SEQ ID NO: 48657 - protein, 667 aa, Bacteroides fragilis
  MISC_FEATURE (606)..(606): X=any amino acid
  MISC_FEATURE (613)..(613): X=any amino acid
EPETQSLGEVVVTAKSEARQLREQAMPMSVISMQQLQGTVSNVQDVLSKTVGVTIRNTGGVGSSSRVSVRGLEGKRIGFFIDGSPMNDNSDFIDINDIPVDMIDRIEIYKGVVPARFGGSSVGGAVNIVIREYPPKYLDASYSIESFNTHKLSLVTKRNIATKGLEFGGGGFYTYSDNNYKMESPFEEGLIIKRNHDKFKKLAVAGSLKARKWWFDLVEFEPVFIHTFKEIQGIEYNIEKAHTYSDAFIFANKLEKENFLTEGLDMESNLAYAYTVFHMVDTAAYRYNWDGTTYPAVSEYGGEIGKWASNARNEKHTITHKLHLNYVINNNHSINLNSLFSFASGHPKDDLKNKVVGYKTNFRSTMASWIAGLGYDFRTDNDIFLNSLNVKYYMYGMNTHMSSIMSSEAEKVDMLKRDFGISNALRYRFTPDFMGKLSVGYDVRLPAESELLGDGYTVAPSGNLLPERNTSVNLGFLLDRTGKDASNLQVEVNTFYGYLENMIRFTGGYLQSQYQNFGKMRTLGVEVEVKADLTHWLYGYCNMTYQDLRDVRKFEPNTHITNPTKGSRMPNIPYLLANAGLEYHKENLFGGKGQNTRYLYRRFFCXRIFLRFXTKPVSGTENSTHLLGQYRNRTQLYERTVHISARMNNLTDARMMSEFNRPLPGRN

SEQ ID NO: 48658 - protein, 335 aa, Bacteroides fragilis
MNYEDIDHLLPRYCEGLATEEECRQVESWMEESEDNRKIVDQINTLYIAVDTVNVMRKVDTEKALKKVSSRMIVRKTTWWEWMQRVAAILFIPLSVAFLVQYMHNGKSAVCQMMEIKTNPGMTTSVVLPDSTVVYLNSESSLRYPSVFEGDIRNVELKGEAYFAVAKDLKKKFVVSAPHSSQIEVLGTHFNVEAYEDEPDVSTTLVEGQVCFHFSDKDYLAKKVVMKPGQRLVYSSTNGDVQLYATSCLSETAWKDGKIIFNNTPLDVALRMLEKRFNVTFKLKNARLKTNAFTGTFTEQRLERILEYFKISSKIQWRYLESPDIRDERSIIEVY

SEQ ID NO: 48659 - protein, 201 aa, Bacteroides fragilis
MLPHPDKVETLLKQIEQYPDVSFSVKMRLGWEKPDECLTLLPLLNAAPLTEIIVHPRLGIQQYKGEVNMEGFTAFYEACRHPVIYNGDILTIEDIRCITEKFPKLTGVMIGRGLLANPALGWEYKEGRKLTPEEWREKLRALHTAVFQHYETQIQGGEAQLVTKMKTFWEYLAPQIDRKSWKAIHKSTTLAKYNIAVRSAL

SEQ ID NO: 48660 - protein, 245 aa, Bacteroides fragilis
MKVMKDYKLMAVGQIVADCFDYAKVFNKYGIDFCCNGDVSLADACGKMGIDADCLLEELKQTKSEQSLTLDFKSWPIDLLVDYILKFHHRNIRYQGPQILQLLDRVCEAHAGKHPELYEVRELFQESWIDLNNHLTKEEMVLFPYIYDLFDAVAQHRPIPAFHCGSVSSPISVMMSEHDAEGERFRRISGLTHGYLVPGDACSSYRLLLEMLRTFEDNLHHHIHLENNIVFPKAIELQENCERMC

SEQ ID NO: 48661 - protein, 424 aa, Bacteroides fragilis
MLTIKQITENTDAVIRGLEKKHFKGAKETIAQVIEVNDKRRNTQNQLDKNLAEVNSLSKTIGQLMKEGKKEEAEVAKARVAEIKESNKTLQADMDQAANDMLNLLYTIPNIPYDSVPEGVGAEDNVVEKMGGMETQLPTDALPHWELAKKYDLIDFDLGVKITGAGFPVYKGKGAQLQRALINFFLDEARKSGYTEIMPPTVVNAASGYGTGQLPDKEGQMYHCEVDDLYLIPTAEVPVTNIYRDVILDEKQLPIKNCAYTQCFRREAGSYGKDVRGLNRLHEFSKVELVRIDKPEHSRQSHQEMLDHVEGLLQKLELPYRILRLCGGDMSFTAALCFDFEVYSEAQKRWLEVSSVSNFDTYQANRLKCRYRSGEKKTELCHTLNGSALALPRIVAALLENHQTPEGIRIPKALVPYCGFDMID

SEQ ID NO: 48662 - protein, 278 aa, Bacteroides fragilis
MKYIGAHVSASGGVEFAPVNAHEIGANAFALFTKNQRQWVSKPLTEDSIRLFKENCEKFGFAPEYILPHDSYLINLGHPEEEGLTKSRAAFLDEMQRCEQLGLKLLNFHPGSHLNKISVEECLDRIAESINLALEKTKGVTAVIENTAGQGSNLGNEFWQLKYIIDRVEDKSRVGVCLDTCHTFTAGYDFLNDYDDVFGEFGEVVGFEYLRGMHLNDSKKELGSRVDRHDSIGKGLIGFAFFEKLMKDPRFDNMPLILETIDETLWPEEIAWLREQAQ

SEQ ID NO: 48663 - protein, 148 aa, Bacteroides fragilis
MIEQFNFDIRLIFAILNGKVSAAINRKLYRNFRQNGLEISPEQWTVLIFLWEKDGVTQQELCNATFKDKPSMTRLIDNMERQHLVVRISDKKDRRTNLIHLTRTGKELEEKARIIANRTLKEALHGITVEELSVSQEVLRKIFFNTKD

SEQ ID NO: 48664 - protein, 221 aa, Bacteroides fragilis
MPEGKLLINTINAHSYNTALKDAEFAEALLKGGALIPDGASMVLAFRWLRKESIERTAGWDLFEYEMERLNRKGGICYFLGSSKNTLKLIKEKAKTVYPNIRIETYSPPYKPEFTEEENQMMIDAINAVKPDLLWIGMTAPKQEKWAYTHLDALEVNGHIGTIGAVFDFFAGTVERAPVRWQEHGLEWLYRLIKEPRRMWRRYIIGNALFLWNITKEKFSI

SEQ ID NO: 48665 - protein, 505 aa, Bacteroides fragilis
MAASGQKGEKNKQKVNDRQLPNVVFIYADDLGYGDLECYGAKNVQTPNVNRLASEGIRFTNAHATAATSTPSRYSMLTGEYAWRRPGTDVAAGNAGMIIRPEDYTMADMFKNSGYVTAALGKWHLGLGDKSGEQDWNAPLPAALGDLGFDYSYIMAATADRVPCVFIENGKVANYDPSAPIEVSYRKPFEGEPLGKDHPELLYNQKHSHGHDMAIVNGIGRIGYMKGGGKALWKDENIADSITTHAINFIREHKDEPFFMYFATNDVHVPRFPHERFRGKNPMGVRGDAIVQFDWSVGQILETLDKLGLSENTLIILSSDNGPVVDDGYQDRAEELLNGHSPAGPLRGNKYSAFEGGTRIPAIVRWPKKITQPQVSDVLVSQIDWLASLASLVDARVPKGAAPDSFDRLGNWLGTDSTDRPWVIEQASNHTLSVRTKGWKYIEPNDGPHMITWGPKIETGNLSIPQLYDMTKDYEQENLAEKNPAKLFELQTILRKVRNKTYRAL

SEQ ID NO: 48666 - protein, 263 aa, Bacteroides fragilis
  MISC_FEATURE (3)..(3): X=any amino acid
GLXISVSILVWLLLPGMVLQVFCLTSFKIPSNSMEPALLSGDKILVDKWTGGARLFNIFASLRGEEVDIYRLPGFGSFQRDDVLVFNFPYQDGSDSIGFDIMKYYVKRCIALPGDTLEIRKGYYHIKGITDSVGNVQAQHRIARVRREDSHGIVMDAFPWDGRLGWTIQEFGPLPVPAKGQVVKIDTLSCLLYGRLIHWEQKKRLRQKGEAVCLGDSAITEYKFTENYYFVSGDNMENSKDSRYWGMLPESYIVGRAFTIWRS

SEQ ID NO: 48667 - protein, 393 aa, Bacteroides fragilis
MDKIIYSLVYNRKKSLNKKGMALVQVEAYLNRKKKYFSTKVYLSPDQWDFKKRMVKNHPNADAINHMLYEFMAEIEKKELGLWQQGKQISLDSLKNSMENQDDSTSFIAFFRNEIAKSSLKESTKRNHLSTLELLRSYKKDVSFSELTFEFISSFDHYLQQKGYHTNTIAKHMKHLKRHINVAINKEYMEIQKYAFRKYKIKSVENNHTHLSPEELGKIESLELGGRFTKLEKTKDAFLFCCYAGLRYSDFTNLSPENIVKMHQETWLIYKSVKTNTEVRLPLYLLFEGKGIEVLNKYQDDLADFFKLRDNSNVNKELLIIAKLSGLNKRISFHTARHTNATLLIYSGVNITTVQKLLGHKSVKTTQVYTNIMDITIVRDLEKSKNNRKVSYM

SEQ ID NO: 48668 - protein, 278 aa, Bacteroides fragilis
MSRTNFDTLLEAGCHFGHLKRKWNPAMAPYIFMERNGIHIIDLHKTVAKVDEAAEALKQIAKSGKKVLFVATKKQAKQVVAEKAASVNMPYVIERWPGGMLTNFPTIRKAVKKMTTIDKLTADGTYSNLSKREILQISRQRAKLDKTLGSIADLTRLPSALFVIDVMKENIAVREANRLGIPVFGIVDTNSDPTNIDFVIPANDDATKSVEVILDACCAAMIEGLEERKAEKIDMEAAGEAPANKGKKKSAKARLDKSDEEAINAAKAAAFLKEDEEA

SEQ ID NO: 48669 - protein, 391 aa, Bacteroides fragilis
MKQILKENGGLPASILWTLAIVAGISVANLYYNQPLLNMIRHELGVSEFETNLIAMVTQIGYALGLLFIVPLGDLYQRKRIILTSFSILIVSLLVIAMAPNIHVILCASLLTGICSVMPQIFIPIASQFSRPENKGRNVGIVVSGLLTGILASRVVSGFIGELFGWREMYYIAAGMMLICGMVVMRVLPDIRPNFQGKYSDLMKSLLSLLKQYPELRIFSVRAALAFGSFLAMWSCLAFKMGSAPFYADSHIIGMLGLCGIAGALSASLVGKYVRKVGVRRFNFIGCGLILSAWLLLFIGENSYWGIVAGIIIIDIGMQCIQLSNQTRIFELCPSASNRINTIFMTTYFIGASTGTFLAGTFWQAFGWHGVIGTGVALTTGSLLITFFSKR

SEQ ID NO: 48670 - protein, 227 aa, Bacteroides fragilis
MLIVVTGTDMYADGNLQTGLWLSELTHIYHCAEEAGYEITVASPKGGNVPVDPESLKPMMLDKLSKDYWDDLEFRRELQHAKSLAEVSGQLFDCVYLAGGHGAMYDFPDDTVLQAIIEKHYESDKAVAAICHGVSGLLNVKLSGGEYLIKDKKITGFSWFEESLAGRKKEVPFDLEAALEKRGADYEKALIPMTSKVVVDCNLITGQNPFSSKEMAEVVMRQLSREK

SEQ ID NO: 48671 - protein, 1085 aa, Bacteroides fragilis
QEICEYSQFDLSKVNKDVLKKWDENQVFAKSMTEREGCPSFVFFEGPPSANGMPGIHHVMARSIKDIFCRYKTMKGYQVKRKAGWDTHGLPVELGVEKSLGITKEDIGKTISVAEYNAHCRQDVMKFTKEWEDLTHKMGYWVDMKHPYITYDNRYIETLWWLLKQLYKKGLLYKGYTIQPYSPAAGTGLSSHELNQPGCYRDVKDTTVVAQFKMKNPKPEMAQWGTPYFLAWTTTPWTLPSNTALCVGPKIDYVAVQSYNAYTGQPITVVLAKALLNAHFNPKAAELKLEDYKAGDKLVPFKVIAEYKGPDLVGMEYEQLIPWVNPGEGAFRVILGDYVTTEDGTGIVHIAPTFGADDAQVAKAAGIPPLQLVNKKGELRPMVDLTGKFYTLDELDEDFIKQRVNVDLYKEYAGRFVKNAYDPNLSDQDESLDVSICMMMKVNNQAFKIEKHVHNYPHCWRTDKPVLYYPLDSWFIRSTACKERMIELNKTINWKPESTGTGRFGKWLENLNDWNLSRSRYWGTPLPIWRTEDNSDEKCIESVEELYNEIEKSVAAGYMQSNPYKDKGFVPGEYNEENYNKIDLHRPYVDDIILVSKDGKPMKREADLIDVWFDSGAMPYAQIHYPFENKELLDSHQVYPADFIAEGVDQTRGWFFTLHAIATMVFDSVSYKAVISNGLVLDKNGNKMSKRLGNAVDPFSTIEQYGSDPLRWYMITNSSPWDNLKFDVDGIEEVRRKFFGTLYNTYSFFALYANVDGFEYKEADLPMNERPEIDRWILSVLNTLVKEVDTCYNEYEPTKAGRLISDFVNDNLSNWYVRLNRKRFWGGGFTQDKLSAYQTLYTCLETVAKLMAPIAPFYADRLYSDLIGVTGRDNVVSVHLAKFPEYNEKMVDKELEAQMQMAQDVTSMVLALRRKVNIKVRQPLQCIMIPVVDEVQKAHIEAVKALIMSEVNVKEIKFVDGAAGVLVKKVKCDFKKLGPKFGKQMKAVAAAVAEMSQEAIAELEKNGKYTFDLGGAEAVIESADVEIFSEDIPGWLVANEGKLTVALEVTVTDELRREGIARELVNRIQNIRKSSGFEITDKIKL

SEQ ID NO: 48672 - protein, 334 aa, Bacteroides fragilis
MALFCFGYGAFISAYGDDSNRLVAGPVVFSLGMICIALFATAATIIRQIIHTYGRGSLYALPIIGYLAAVVTIIGGICMFTRSTSASSFVAGHVVAGVGLITTCVATAATSSTRFSLIPANSKMIGNGIPKGAFTKGQERILKTIAITISLIAWIWAFVLLAKSDVHPAYFVAGHVMVGLACICTSLIALVATIARQIRNVYTDRERKRWPKLVLLMGTVSLLWGLFVIFSDSSTTNGVIGYIMIGLGLVCYSISSKVILLAKIWGREFALANRIPLIPVLTALACLFLASFVFELGTTHDDYFIPARVLAGLGAICFTLFSIVSILESGTSSK

SEQ ID NO: 48673 - protein, 340 aa, Bacteroides fragilis
MVKNIEIRNSTAEFLIFMLEGKEDGIQVIYKNETIWATQKAMAQLFDVGVPAISKHLKNIFESGELDEHSVISKMETTASDGKNYDTTFYNLDAIISVGYRVNSVRATQFRQWCTFVLRQFAIRGYVLDHKRMENGAFFGVDYFEHLLAEIREIRLSERRFYQKLTDIYATAIDYNKDAPTTRLFFKKVQNKMHYAVHGHTAAELIVERADANREHMGLTTWENAPNGKIVKTDVSVAKNYLREKELEEMGRIVNASLDMAESMAMRHIPMTMEDWAKRIDKFINLFESPILQDNGQVSAEYAKEFAESEFEKYRIIQDRLFQSDFDRFEDDSFPPLDME

SEQ ID NO: 48674 - protein, 206 aa, Bacteroides fragilis
MKSSLIVVAFFCIGCLVGIFNDFQFDMHNLSMYILYALMLQVGISIGSNKNLKFLIKSLRPNMLLVPIATIVGTLLFSAFASLLLSQWSVFDCMAVGSGFAYYSLSSILITQFKEASVGLQLATELGTIALLANIFREMMALLGAPLIRKYFGKLAPISAAGVNSMDVLLPSITLYSGKDMIPVAIFHGILIDMSVPFFVSLFCSL

SEQ ID NO: 48675 - protein, 189 aa, Bacteroides fragilis
MKQDWKPGTLIYPLPAVLVSCGSDESEYNILTVAWTGTICTNPPMCYISVRPERHSYPIIKKNMEFVINLTTRDMAFATDWCGVRSGKDYHKFEEMKLTPGKCSVVNAPLIEESPLCIECRVKEIVSLGSHDMFISDVVNIRADDRHLNRETGKLELAEANPLVYVHGGYYNLGEKIGKFGWSVEKKTK

SEQ ID NO: 48676 - protein, 681 aa, Bacteroides fragilis
MQKGNIGVTTENIFPIIKKFLYSDHEIFLRELVSNAVDATQKLNTLASISEFKGELGDLTVHVSLGKDTITISDRGIGLTAEEIDKYINQIAFSGANDFLEKYKNDANAIIGHFGLGFYSAFMVSKKVEIITKSYKEGAQAVKWTCDGSPEFTLEEVEKADRGTDIVLYIDDDCKEFLEESRISALLKKYCSFLPVPIAFGKKKEWKDGKQVETAEDNVINDTIPLWTKKPSELSDEDYKKFYRELYPMSDEPLFWIHLNVDYPFHLTGILYFPKVKSNIDLNKNKIQLYCNQVYVTDSVEGIVPDFLTLLHGVLDSPDIPLNVSRSYLQSDSNVKKISTYISKKVSDRLQSIFKNDRAQFEEKWNDLKIFINYGMLTQEDFYDKAQKFALFTDTDGKHYTFEEYQTLIKDNQTDKDKNLIYLYANNKDEQFAYIEAAKNKGYNVLLMDGQLDVAMVSMLEQKLEKSRFTRVDSDVVDNLIVKEDKKSDVLEASKQEALSAAFKSQLPKMEKVEFNVMTQALGENGSPVMITQSEYMRRMKEMANIQAGMSFYGEMPDMFNLVLNSDHKLVKEVLADEEKECSAAIAPIQTELEDVTKRRDALKKKQEGKKDEDIPTAEKDELNDLDKKWDELKQQKDSIFAGYAGKNKVVRQLIDLALLQNNMLKGEALNNFVKRSIELI

SEQ ID NO: 48677 - protein, 415 aa, Bacteroides fragilis
MKQLSTRAEMQYNIHTLSNGLRIIHEPSSSKVAYCGFAVDAGTRDEAENEQGMAHFVEHLIFKGTRKRKAWHILNRMENVGGDLNAYTNKEETVIYSAFLTEHFGRALELLADIVFHSTFPQNEIEKETEVIIDEIQSYEDTPSELIFDDFEDMIFRNHPLGRNILGRPDLLKKFRSEDAMAFTSRFYQPSNMVFFVLGDFNFQKIVRQVEKLLVDLPLVTVENQRTIPPLYVPEQLVVHKETHQAHVMIGSRGYNAYDDKRTALYLLNNILGGPGMNSRLNVSLRERRGLVYTVESNLTSYTDTGAFCIYFGTDPEDVDTCLKLTYKELKRMRDVKMTSSQLMAAKKQLIGQIGVASDNNENNALGMAKTFLHYNKYESSESVFRRIEALTAEGLLEVANEMFAEEYLSTLIYR

SEQ ID NO: 48678 - protein, 282 aa, Bacteroides fragilis
MLLKFETKLAIIQDSNIILFIFAQAKTKIIMKILYYIYQICIALPILLVLTILTAVVTIVGSLLGGAHIWGYYPGKIWSQLICLFLLIPVKVHGREKLHERTSYIFVPNHQGSFDIFLIYGFLGRNFKWMMKKSLRKIPFVGKACESAGHIFVDRSGPKKVLETIRQAKDSLKDGVSLVVFPEGARSFTGHMGYFKKGAFQLADDLQLAVVPVTIDGSFEILPRTGKWIHRHRMILTIHDPIPPKGQGADNMKATMAEAYTAVESALPDKFKGMVKNEDQDR

SEQ ID NO: 48679 - protein, 255 aa, Bacteroides fragilis
MISPLAYIHPEAKIGENVEIAPFVYIDRNVVIGDNNKIMANANILYGSRIGNGNTIFPGAVIGAIPQDLKFKGEESTAEIGDNNLIRENVTINRGTAAKGRTIVGNNNLLMEGVHVAHDALIGNGCIVGNSTKMAGEIIIDDNAIISANVLMHQFCRVGGYVMIQGGCRFSKDIPPYIIAGREPIAYSGINIIGLRRRGFSNEIIENIHNAYRIIYQSGLNTSDALTKVEAEVPASPEIEYIVDFIRNSERGIIR

SEQ ID NO: 48680 - protein, 443 aa, Bacteroides fragilis
MKNTNRSILHKDGVSYILPFILVTSCFALWGFANDITNPMVKAFSKIFRMSVTDGALVQVAFYGGYFAMAFPAAMFIRKYSYKAGILLGLGLYALGALLFFPAKMTGDYYPFLLAYFILRCGLSFLETSANPYILSMGTEETATRRLNLAQSFNPMGSLLGMYVAMNFIQARLNPMDTVERSQLSPAEFEVLKESDLSVLIAPYLIIGLVILAMLFVIRAVKMPKNGDKNHNIDFIPTLKRIFKIPHYREGVIAQFFYVGAQIMCWTFVIQYGTRLFMSQGMEEKAAEVLSQEYNIIAMIIFCISRFVCTFILRYLNPGMLLKILAIAGGAFTLGVIFLQDIWGLYCLVAVSACMSLMFPTIYGIALRGLGDDAKFGAAGLIMAILGGSVLPPLQACIIDQHTLLGMPAVNLSFILPFICFVVIIIYGHRTCARVKKIKAARK

SEQ ID NO: 48681 - protein, 62 aa, Bacteroides fragilis
MAKKAKGNRVQVILECTEHKDSGMPGTSRYITTKNRKNTTERLELKKYNPILKRVTVHKEIK

SEQ ID NO: 48682 - protein, 180 aa, Bacteroides fragilis
MSEIEKKWYVLRAISGKEAKVKEYLEADIKNSDLGEYVSQVLIPTEKVYQVRNGKKIVKERSYLPGYVLVEAALVGEVSHHLRNTPNVIGFLGGSDKPVPLRQSEVNRILGTVDELQETGEDLNVPYIVGETVKVTFGPFSGFSGIIEEVNSEKKKLKVMVKIFGRKTPLELGFMQVEKE

SEQ ID NO: 48683 - protein, 147 aa, Bacteroides fragilis
MAKEVAGLIKLQIKGGAANPSPPVGPALGSKGINIMEFCKQFNARTQDKAGKILPVIITYYADKSFDFVIKTPPVAIQLLEVAKVKSGSAEPNRKKVAEITWEQVRTIAQDKMVDLNCFTVEAAMRMVAGTARSMGIAVKGEFPVNN

SEQ ID NO: 48684 - protein, 232 aa, Bacteroides fragilis
MGKLTKNQKLAAGKIEAGKAYSLKEAASLVKEITFTKFDASLDIDVRLGVDPRKANQMVRGVVSLPHGTGKQVRVLVLCTPDAEAAAKEAGADYVGLDEYIEKIKGGWTDIDVIITMPSIMGKIGALGRVLGPRGLMPNPKSGTVTMDVAKAVREVKQGKIDFKVDKSGIVHTSIGKVSFTAEQIRDNAKEFISTLNKLKPTAAKGTYIKSIYLSSTMSAGIKIDPKSVEEI

SEQ ID NO: 48685 - protein, 256 aa, Bacteroides fragilis
MISPLASIAPGAKIGKNVIIQPFAYIEDNVEIGDDCIIMPYASVLNGTRLGKGNKVYQHAVLGAEPQDFHYKGEESSLIIGDNNHIRENVVISRATFGGNATKIGNGNFLMDKVHICHDVQIGDNCVAGIGTTIAGECTLDDCVILSGNVTLHQYCHVGQWTLVQSGCRISKDVPPYSIMAGNPVEYHGVNAVVLQQHKNTSERVLRHIANAYRLIYQGNFSLQDAVQKIIDQVPMSEEIENIVAFVKESKRGIVK

SEQ ID NO: 48686 - protein, 581 aa, Bacteroides fragilis
MPDKGSDSIYRYDHIYHIAISEPQRALALADTAEMLNLLRPDHTCLNAVKAMIYQNGLGQRKLAKFYSQKAYEDTEFRKDTNSYLNSLAQLAGLCYKSSDYAAAIRYATEGLQMARTHGLQNLEAKFLMYIGMGQFYTGITKDAQANMNRSIALYEEIVDKEQSWSSVNDLLYTLGETMAALCAIGDYEQAATLIPNILKANSRHEQMVDQAPPGAIDMYKAFVYAQCMEVYQYLGHKEQAGECYQKCLSTDYVKSPDGVVLLTHYRIWTGDYRQALHDIRTAKRIYRQKRNTESEYYANELLADEMEALTRLGQYKEAVDVSREIIALKDTLFERKQQDDAQELAVIYESGEKDRQIQKEQAEKHLLIVFVTAVIVALGVAVHYNRRMHRRNVSLVRSVQKGIACKDELLQKEEECLAYKAQIETMAKRLEELEQTPDDDSSASVVNAEAPGVTESGITVDEKELLKHALHQIAVRQLYLQLGITAKTLQEELHVPASLFGTYFKEQTGHSFSEHINKLRMDYAAKLLTEYPQYTIDAIAKMCGIDSRQHFHRLFSEYFGITPSAFRKNHLSSDNKDIKQ

SEQ ID NO: 48687 - protein, 402 aa, Bacteroides fragilis
MKQHLLKEIELGTKSALLKKKIITHYIYNGSSTITDLSKELDLSVPTVTKFISEMCEEGYINDYGKLETSGGRHPNLYGLNPESGYFIGVDIKRFAINIGLINFKGDMMELKMNIPYKFENSIEGLNELCKLISNFIKKLTIAKDKILNINVNVSGRVNPESGYSFSQFNFEERPLSEVLAEKLGYKVTIDNDTRAMTYGEYLKGCVNGEKDIIFVNISWGLGVGIIIDGKIYTGKSGFSGEFGHTSTFDNEIICHCGKKGCLETEASGSALHRILLERIQNGENSILSNRIGDINNPITLDEIIASVNKEDLLCIEIVEEIGQKLGKQIAGLINLFNPELVIIGGTISLTGDYITQPIKTAVRKYSLNLVNKDSAIVTSKLKDRAGIVGACMLARSRMFEC

SEQ ID NO: 48688 - protein, 252 aa, Bacteroides fragilis
MIELQHFSIGYKENSLLHEVNATIKKGQLTALIGRNGTGKSTLLRAIAGLNRCYSGKIILDGHDIACMKTEDMAKTLAVVTTERTRIANLRCKDVVAIGRAPYTNWIGRMQETDKEIVMQSLISVGMEAYANRTMDKMSDGECQRVMIARALAQDTPIILLDEPTSFLDMPNRYELVALLRRLVHDEKKCIMFSTHELDIALSMCDSIALLDTPNLSCLTASEMQKSGYIDRLFQNENIRFDSLCGTMILKQ

SEQ ID NO: 48689 - protein, 110 aa, Bacteroides fragilis
MRDIYKALSIFETAFEEVYGISLNEAMVLCALREAGKEITSTAIAERTEMAPSHTSKVIRAVEDKGLIRRALGEVDKRQMYFSLTEAGKKRLNELDLDKVEIPEMLKPLI

SEQ ID NO: 48690 - protein, 81 aa, Bacteroides fragilis
MNFIWYILIGILAGYFAGKIMRGGGFGLLVNLLLGIIGGVLGGWVFALLGLAATGIIGSLITSVVGAILFLWIASFFSRSR

SEQ ID NO: 48691 - protein, 324 aa, Bacteroides fragilis
MKRNIAIVAGGDTSEIVVSLRSAQGIYSFIDKEKYNLYIVEMEGRRWEVQLPDGSKTPVDRNDFSFMNGAEKVVFDFAYITIHGTPGEDGRLQGYFDMMRIPYSCCGVLAAAITYDKFVCNQYLKAFGVRISESLLLRQGQAVSDEDVVEKIGLPCFIKPNLGGSSFGVTKVKTREQIQPAIAKAFSEAEEVMIEAFMGGTELTCGCYKTKEKSVVFPLTEVVTHNEFFDYDAKYNGQVDEITPARISEELTRRVQTLTSAIYDILGCSGIIRVDYIITEGEKINLLEVNTTPGMTATSFIPQQVRAAGLDIKDVMTDIIENKF

SEQ ID NO: 48692 - protein, 792 aa, Bacteroides fragilis
MEFINPKFKYIFASILLLGGFLCGYNFKQWYVTNHRNEKHISLIYSCSKKEADRGQFEELLKKEFRSKGVEPIFDKYYLDCNRFGQKVEIEHISNYLEALKSKPIDLVMAMGDQATHSLLSTRHPLLYSVPVVACNVHFPDEDLLKKYESRKVYALRDTPDFKHNMEFIRSLQPHVGLEIVYNIDLTPLGHKSFDLLNQVVDRKDVQILGHKSAFSMEYEYKEMREMIEFYNLMPAVANNRIKKNELTISLCPFRYIKGASLLVMMENSKSEQGKKAFLLDKFDMVSFPIVNALSIPSFSCVHAGFGEGNKIVGGYMATKEISVQAAADLSTRLMNKEKIGMPKIRDLRKEYVLDWSVFSTYNGYDIKNVGKNVRIINYPIYDHYREEFYLLGVLFVFAFIFISVSLLHTRRRSLIERKNLKILEEAHKRLTLSADGGQISLWNMQGSDIEFDDNYARLTGVEKRKFKRTDFLEYVHPDDSQLLSSFYEALCKSPGVEIQRVRFRFDEKKGYQWYELRCRSLKDIKGEMMLAGIMQNIQESVEREHQLIVAKQMAEKAELKQSFLNNMSHEIRTPLNAIVGFTNVLLGEGSEEIDPDEKASMLEIINHNNELLLKLINDVLEISRLDSGSLDFDMKEWNMTDIVKEIYKTYQPLIRLSLQFRLELDDTVSVPVHTDRLRFVQVISNFLNNANKFTQNGYIALGCKVDKKHREVRIYVEDSGKGIDEKELMMIFERFYKTDEFEQGSGLGLAISKVIIERLSGRIKVHSEKGKGSCFTVILSLADAPENHMLI

SEQ ID NO: 48693 - protein, 288 aa, Bacteroides fragilis
MAILERKIIHEIDTSCSHIIYPQFVLPRHKHAEYEIMLFTQGSGKQFVGEGVADFQEGDIALIGSNVPHLHLCNSKLNPVANTVCSAGEALQFLPDIFPVHIENLPDYQEIYRLLRKSQYGVRFYDKGLYDEVKELFQEMDLLKHTNRLITILRILGRLTECRNIKLLSDVAYNGSNRLLEVNEPVNKVYTYLFNHFKEKVLLQEVADYVKQNPSALCRYFKQRTDKSIFQCLAEIRIEHACKLLSYSNLSVSQIAFESGFNSVPYFIKQFQSITEKTPGEYRELIGR

SEQ ID NO: 48694 - protein, 149 aa, Bacteroides fragilis
MDLFERVSEDIKNAMKAKDKVALETLRNVKKFFLEAKTAPGANDTLTDADALKIVQKLVKQGKDAAEIYIGQGRQDLADAELAQVQVMETYLPKQMSAEELEAALKEIIAEVGATSGKDMGKVMGVASKKLAGLAEGRAISAKVKELLG

SEQ ID NO: 48695 - protein, 403 aa, Bacteroides fragilis
MALLRLLLSMGYTCEAAHCNFHLRDKESDRDEAFVRRLCHESGVLLHIEHFDTTQYAAKKHISIEMAARELRYEWFETLRRQREASVIATAHHKDDSVETVLLNLIRGTGINGLLGIRPRNGNIVRPLLCLSREEIIAYLQYIDQDYVTDSTNLLDEYTRNKIRLNLLPLMKEINPSVKESIIRTTNYLNDAATLYNQSIGEARKRILTPEGIRIEALLQEPVPEAILFEVLHPLGFNTTQIDNIRQTLDGQPGKIFLGKGWRVIKDRDLLLIEEDTTAEESQPPFRLVMEEYDYTSEFIIPKDKNTACFDADKINKTWEIRKWKPGDVFIPFGMTGKKHVSDYLTDKKFSLSEKEKQWILCFGEQIAWLIGERTDNRFKVNENTKRVIIVRIVSEHSDFIEE

SEQ ID NO: 48696 - protein, 523 aa, Bacteroides fragilis
MNKIDMTNERMKLLNCTLGLVAGVSLPVSALAVPQPAQEQTEKQPNIILIVADDLGYGDLSCYGAHRIQTPGMDRIANEGIRFTQGFCTAATSTPSRYSVMTGKYPWSNVDAKILPGNAALIIDTQKITLPKLMKQAGYTTGSVGKWHIGLGDGHVDWNKEVHPGAAEIGYDYSFIQAATNDRVPCVFLENGRVVGLDPNDPLYVDYRKNFPGEPTGKENPELLRMHPSVGHAGSIVNGVPRIGFQKGGKAAQWKDEEMAGLFLDKARQFVDDNKDKPFFLYYGLHQPHVPRVPNERFVGKSGMGPRGDVILEADWCVDQFLKELDKLGLAENTIVILTSDNGPVLDDGYQDDAVELVGDHKIAGPLRGGKTSMFDGGTRIPFMLRWPAKVKPQVSDVFVCQMDLLASFASLLGQTYPDKVDSENTLDAFLGKSKKGRKELVIEGMFNYAYRQGDWALIPPYYNPYSKEDGDFIGLGYGYKLYNLKSDIGQQKNLAEKYPKKLGELINRFEYLKAHSDKVTRF

SEQ ID NO: 48697 - protein, 932 aa, Bacteroides fragilis
MIWTGCLNDDRFVPLAMKKTIQQLVLERILILDGAMGTMIQQYNLREEDFRNERFAHIPGQLKGNNDLLCLTRPDVIRDIHRKYLEAGADIIETNTFSSTTISMADYHVQEYVREMNQAAVKLAREVADEYTVLNPDKPRFVAGSVGPTNKTCSMSPDVNNPAYRAVTYDEMADAYQQQMEAMLESGVDALLIETIFDTLNAKAAILAAERAMKATGVKVPVMLSVTVSDTGGRTLSGQTLEAFLASVQHADIFSVGLNCSFGARQLKPFLEQLAARAPYYISAYPNAGLPNSLGKYDQTPADMAHEVKEYVHEGLINIIGGCCGTTDAYIAEYPALIAGAKPHIPVCKPDCMWLSGLELLEVKPEINFVNVGERCNVAGSRKFLRLINEKKYDEALSIARKQVEDGALIIDVNMDDGLLDAKEEMTTFLNLVASEPEIARVPVMIDSSKWEVIEAGLKCLQGKSIVNSISLKEGEEKFLEHARTVRQYGAAVVVMAFDEKGQADTATRKIEVCERAYHLLVDKIGFNPHDIIFDPNVLAVATGIEEHNNYAVDFIEATAWIKKNLPGAHISGGVSNLSFSFRGNNYIREAMHAVFLYHAIQKGMDMGIVNPGTSVLYTDIPADVLERIEDVVLNRRSDAAERLIELADRLKEASAGNTSAGQPVKHDAWRDGTVEERLQYALVKGIGDFLEEDLAEALPKYDKAVDVIEGPLMNGMNHVGELFGAGKMFLPQVVKTARTMKKAVAILQPIIESEKVEGTASAGKVLLATVKGDVHDIGKNIVSVVMACNGYDIIDLGVMVPAESIVQKAIEEKVDMIGLSGLITPSLEEMVHVAMELEKAGLDIPLLIGGATTSKLHTALKIAPVYHAPVVHLKDASQNAGVAARLMSPKSKEELAKELSGEYEALRDKSGMMKRETVSLKEAQENRLKLF

SEQ ID NO: 48698 - protein, 535 aa, Bacteroides fragilis
MANLDLSKYGITGVTEILHNPSYDVLFAEETKPGLEGFEKGQVTELGAVNVMTGVYTGRSPKDKFFVKNEASENSVWWTSEEYKNDNKPCSEEAWADLKAKAVKELSNKRLFVVDTFCGANEGTRMKVRFIMEVAWQAHFVTNMFIRPTAEELANYGEPDFVCFNASKAKVDNYKELGLNSETATVFNLKTKEQVILNTWYGGEMKKGMFSIMNYMNPLRGIASMHCSANTDMEGTSSAIFFGLSGTGKTTLSTDPKRKLIGDDEHGWDNEGVFNYEGGCYAKVINLDKESEPDIFNAIKRDALLENVTVAADGKINFADKSVTENTRVSYPIYHIENIVKPVSKGPHAKQVIFLSADAFGVLPPVSILNPEQAQYYFLSGFTAKLAGTERGITEPTPTFSACFGAAFLSLHPTKYAEELVKKMEMTGAKAYLVNTGWNGSGKRISIKDTRGIIDAILDGSIDKAPTKVIPFFDFVVPTELPGVDPKILDPRDTYADPAQWNEKAKDLAGRFIKNFAKFTGNEAGKKLVAAGPKL

SEQ ID NO: 48699 - protein, 84 aa, Bacteroides fragilis
MANHKSSIKRIRQEETRRLRNRYYGKTMRNAVRKLRSTTDKAEATAMYPGIVKMVDKLAKTNVIHKNKANNLKSKLAIYINKLA

SEQ ID NO: 48700 - protein, 150 aa, Bacteroides fragilis
MKLAPINIKNKRATFDYELIDTYTAGIVLTGTEIKSIRLGKASLVDTFCYFAKGELWVKNMHIAEYFYGSYNNHAARRDRKLLLSKKELNKLERGTKDAGFTIVPVRLFINERGLAKVVVALAKGKKQYDKREALKEKDDRRDMDRMFKR

SEQ ID NO: 48701 - protein, 380 aa, Bacteroides fragilis
MGEVTYRQKSIYLCFQIVSIMKKEFTRIAIKVGSNVLTRQDGTLDVTRMSALTDQIAALHKAGVEVILISSGAVASGRSEIRTLRKLDSVDQRQLFSAVGQAKLINRYYELFRDHGIAVGQVLTTKENFGTRRHYLNQKNCMTVMLENGVIPIVNENDTISVTELMFTDNDELSGLIASMMNAQALIILSNIDGIYNGSPSDPDSLVIREIGQGKDLSNYIQTSKSSFGRGGMLTKTNIARKVADEGITVIIANGKRDNILINLIEHPEETVCTRFIPASQPVSSIKKWIAHSEGFAKGEIHINEQATEVLNSDKAVSILPVGITRIEGEFEKDDIVRIIDYRGTPVGVGKVNCDSMQARDSIGKHGKKAVVHYDYLYIE

SEQ ID NO: 48702 - protein, 122 aa, Bacteroides fragilis; identical to SEQ ID NO: 48532

SEQ ID NO: 48703 - protein, 149 aa, Bacteroides fragilis
MCGIVGYIGKREAYPILIKGLKRLKYRGYDSAGVAIINDNQLLNVYRPQGETFVFASDGIIETPTVILQEFPSQSYIFRNSTYTEVPVYSFSSFRPMHQFCKITASRAVRPETLKCSDSLIIREVFSDTLLQDGKDEATGMREESVTME

SEQ ID NO: 48704 - protein, 350 aa, Bacteroides fragilis
FMCMHPLVPEDQAAGYRELIHNLSEELKVITGFAGVSLQPNSGAAGEYAGLRTIRAYLESIGQGHRNKVLIPASAHGTNPASAIQAGFTTVTCACDEHGNVDMDDLRAKAEENKDNLAALMITYPSTHGIFETEIVEICQIIHACGAQVYMDGANMNAQVGLTNPGFIGADVCHLNLHKTFASPHGGGGPGVGPICVAEHLVPFLPGHGLFGNSQNEVSAAPFGSAGILPITYGYIRMMGAEGLTMATKTAILNANYLAACLKDTYGIVYRGANGFVGHEMILECRKVYEETGISENDIAKRLMDYGYHAPTLSFPVHGTLMIEPTESESLSELDNFVLTMLTIWNEIQE

SEQ ID NO: 48705 - protein, 398 aa, Bacteroides fragilis
MEKNHYIHYTAADLLNDGTFLDSMQHPTEQSEKFWSQLEKENETFAGELRMARSFLMAVAESPQKRMTDDEVGTLWERISRQVAMEKRVKRKKQLLFLRVAGIAACISVLALSSYFVFSLISFYEESSCYSLAGISEPDSSNDIQLILSEGRKLVMDGKESRLHYKEGGKIAISSGKTQLDEENETGYNQLIVPSGKRSFITFSDGTRVAVNANTRIVYPSEFSGHKREIYVNGEVYLQVSPDKKHPFVVKTNRMEVEVLGTEFNVSAYDFTKNQSVVLVSGKVEVDTYKYPKKVLKPNDMLTYDGQDDGLRVNTVDVSEYISWVDGYYCFNHEKIEIITEKLSRYYGKRVIPDSGLIGLTCSGKLDLRDDLRDVLEVLSKTIPAQIETRDNYFLLTK

SEQ ID NO: 48706 - protein, 1926 aa, Bacteroides fragilis
MRIKLICIIVLLSMGMMSWTHAQSYDRLWKQVEQAQQKSLPQTVVRLTGEIYQKAKAEKNSPQMLKAYIWQMKFREEITPDSFYVSLNGLEQWAVTTDKPLDRAILHSLIGSMYADYASQNRWKLNQRTDLEEEAPSVDIREWSKNQFVTKVMTEIAVTFQDSLLLLDTSSRSYIPFVELGVTSDYYHHDMYHLLASRAITSLENLSGFGRDSLINVRIEEIYQHMMNSYRRTDNHDALLLTTLDYLQWKRRTDIDFRPYRAPEGKLGLTQDPYLAALDKLIAENKSHDVCAEVYLLKAQAAMDAGVPVSALQLCEEAISRYPDYRRINALKELKQEILRPDLTVQSPSTVYPGEEFDLKVSFKNLKDFTVELYAINLPARPNTVEAPNDAFLKKHGRLLSSEHYVLFPSDDYKVKDSIYHIKAPETGLYALRVIPGVKVRSNVSKFLYSTCFKVLTRSLPSNLSEVAILDAMSGKPLQGVVLSFFDRQNKQLLTATTNTEGKVQFASSEKYRYLTAAKGNDTAMPQMYLWGGDYNFADHSKPVSVVTLLTDRSVYRPGQTVYVKGIAYELYPDSAHVIAGQEYTLTLSDANGQEISAKKLRTNDFGSFTAEFVLPSVCLNGTFSLNTQNGSRSIRVEDYKRPTFDITFEPVTESYRLGDRVELKGSVKTFSGVPLQDIPVAYTITRSLYTWRMWGMNPVILASDTVRLGVDGNFEIPVDLKPDTSNPDLGDGDNTSLYYDYKVQLSVTNVAGETQTSETSLRAGKTSLLLFADISGLICKDDSVKATFRVNNLDRKPVSVEGSYRLFLISDYQKSKPLKEQDVSDQPALSGSFRSNEEILLSDWKKLPSGAYKLVASVKDDQGRKVDAEKVVILFASDDKRPPVSMPLWCYEVNTRFDVAHPALFYFGTSEKDTYVLMDVFCGNKHLESKLLHLSDSLVRFEYPYREAYGNGLGITFVFVRKGVVYEQEVSLIKRLPDHNLNMRWDVFRDKLRPGQEEEWKLTIRNPQKSPVLAEMLATMYDASLDKIWKTNQSLQLHYQLSVPIARWRRDYVGSNYFYFGFRRTDLKVPPFSYDHFDLPPVLYAVAEMLSVTNDAAPTTRYARLRGMGAAKPQMKSAAVADVVFESEMVPVTEESGMAMSMDNADMGRTTDIELRTDFAETAFFYPQLHTNVQGEVSFSFRMPQSLTTWNFRGYAHTQDMMTGQMDATAVTSKEFMLTPNLPRFVRVGDHTSMAASVSNLTGKNLSGTVKLVLFDPMTDQVISPQQKKFNAGAGQSVGVSFLFTVTDKYEILGCRMIAEGGNFSDGEQHLLPVLSDKENLTETLPMPVRGEQTRTFSLADLFNHHSKTATNRRLTVEFTSNPAWYAVQALPALSQPQNDDAISWATSWYANTMASYIMNAQPRIQAIFDSWKLQGGTKESFLSNLQKNQEVKNIFLSESPWVMEATSESEQKERIATLFDLNNIRNSNTAALLKLKELQLPDGSWSWYKGMDGSLFVTDFIVEQNARIALLTGKPLEGGALDMQQAAFGYLHKEALQEYRSIREAEKVGNKSEGISRSALKYLYLIAVSGEKVPASVKEGYDYFLSKVAPSLSQQSVTEKAWSAIVLQKAGKVKEAQEFMASLKEYLTQTDEQGMFFDRTDSPYAWNNLKVPAHVDVMEAFEMVGSNATIVEEMKMWLLKQKQTQQWDSPVATADAVYALLYRGTNLLDNQGDVRIVLGNEVLETISPAKTTVPGLGYIKKTFTDKKTVNTDEIIVEKRDPGIAWGAVYAQFEENLDKVVRQGSGLNVDKKLYVETIVNNNRRLQPVIGKTQLKVGDKVVVRLTVRLDRTMDFVQLKDQRAACLEPVEVLSGYRNVGDVGCYVAVKDASTDFFFDTLNKGTYVLEYSYRVDRAGSYEAGIATIQSAYAPEYAAHSASARYEVSQ

SEQ ID NO: 48707 - protein, 339 aa, Bacteroides fragilis
MIAKINQLLEEVGALKAANAEELEVLRIKYLSKKGAINDLMADFRNVAAEQKKEVGMKLNELKTKAQEKINALKEQFDNQDNGQDDLDLTRSAYPVELGTRHPLSIVRNEIIDIFARLGFNIAEGPEIEDDWHVFSALNFAEDHPARDMQDTFFIESHPDVLLRTHTSSVQSRVMEVSQPPIRIICPGRVYRNEAISYRAHCFFHQVEALYVDRNVSFTDLKQVLLLFAKEMFGADTKIRLRPSYFPFTEPSAEMDISCNICGGKGCPFCKHTGWVEILGCGMVDPNVLDANGIDSKVYSGYALGMGIERITNLKYQVKDLRMFSENDTRFLKEFEAAY

SEQ ID NO: 48708 - protein, 487 aa, Bacteroides fragilis
MKQAQSSLEQKEYTKARYLFIQAYGAFATQENYPKAVECGIQGAALYHRENYYKEAFDLCRGMDQLVWAGEQKQQKQFYPLRFQITKERLQMYIGLKNAAQAKIQLDKLAETVGLAKNDSLSENLLYTQASYYYTFGQNTQGDACFQKLINQYKAQKNYDKVNECYKKLIAIGRKSNNASLVARTYENFIVWTDSVKAMTAQDELNVLKRKYDESQQIIQEKEDTLSGKQYMIVGLCTLVVILIAGLIFVAIVLLRFIAGNRKLKKSVQIANEHNELKTQFIQNISAQMEPTLDTLASSAAELSDKAPQQAQQMQGQVAALKKFSNDIQELSTLENSLTEPYEMKEINVNTFCEATMDKVKEFVQPEVSTVVNAAKLQIKTNPEQLERILIHLLKNAAEYTESGKIFLDFKKRGAHTHQFIISDTGTGIPVEKQENLFKPFTEIKDLTEGDGLGLPICALIATKMNGSLTLDTSYTKGSRFVLELHT

SEQ ID NO: 48709 - protein, 748 aa, Bacteroides fragilis
MTIEEIKNQVLQGTAISREQAEWLALYPRKEELYDAAHDITTACASQEFDMCSIINARSGRCPENCKWCAQSSHYKTKADVYDLVSAEECLRQAKYNEAQGVNRFSLVTSGRKPSPKNMKELCVAARRMRRHSSIRLCASLGLLDEEELQALYDAGVTRYHCNLETAPSHFDSLCTTHTQEQKLKTLHAARRVGMDLCCGGIIGMGETVEQRIEFAFTLRDLNIQSIPINLLQPIPGTPLEHQSPLSEEEILTTVALFRFINPAAYLRFAGGRSQLTPEAVRKSLYIGINSAIVGDLLTTLGSKVSDDKEMILSEGYHFADSQFDREHLWHPYTSTSNPLPVYKVKRADGATITLESGQTLIEGMSSWWCAVHGYNHPILNQAVQDQLSRMSHVMFGGLTHDPAIELGKLLLPLVPPSMQKIFYADSGSVAVEVALKMAVQYWYAAGKPEKNNFVTIRNGYHGDTWNAMSVCDPVTGMHSIFGSALPIRHFLPAPSSRFGDEWNPEDIRPLEHLLEKHTDELAAFILEPIVQGAGGMRFYHPEYLREAARLCHRYGVLLIFDEIATGFGRTGKLFAWEHAGVEPDIMCIGKALTGGYMTLSAVLTTNEVADCISNHAPGAFMHGPTFMGNPLACAVACASVRLLLTSGWQENVKRIEAQLNRELAPARELPQVADVRVLGAIGVIEMKEPVNMAYLQRRFVEEGIWLRPFGKLIYVMPPFIITPEQLTKLTEGMIRSISNGLPGSQTK

SEQ ID NO: 48710 - protein, 363 aa, Bacteroides fragilis
MRREKYTPNGGPDGGDGGRGGHVILRGNRNYWTLLHLRYDRHAMAGHGESGSKNRSFGKDGADKIIEVPCGTVVYNAETGEYVCDVTEHGQEVILLKGGRGGLGNWHFKTATRQAPRFAQPGEPMQEMTVILELKLLADVGLVGFPNAGKSTLLSAISAAKPKIADYPFTTLEPNLGIVSYRDGQSFVMADIPGIIEGASEGKGLGLRFLRHIERNSLLLFMIPADSDDIRKDYEVLLNELKTFNPEMLDKQRVLAITKSDMLDQELMDEIEPTLPEGIPHVFISSVSGLGISVLKDILWTELNKESNKIEAIVHRPKDVSRLQQELKDMGEDEELDYEYEDDGDGDEDDLDYEYEEEDWEDK

SEQ ID NO: 48711 - protein, 189 aa, Bacteroides fragilis
MLNIVIFGAPGSGKGTQSERIVEKYGINHISTGDVLRAEIKNGTELGKTAKGYIDQGQLIPDELMVDILASVFDSFKDSKGVIFDGFPRTIPQAEALKVMLKERGQDISVMLDLDVPEEELMTRLIKRGKESGRADDNEETIKKRLVVYNTQTSPLKEYYKGEGKYQHINGLGTMEGIFEDICKAVDTL

SEQ ID NO: 48712 - protein, 361 aa, Bacteroides fragilis
MNAEGKDVISLGIGSPDMPPSEQTIETLCNNAHDPNGHGYQPYVGIPELRKGFADWYKRWYGVELNPATEIQPLIGSKEGILHVTLAFVNPGEQVLVPNPGYPTYTSLSKILGAEVVNYNLKEEDGWMPDFDELEKMDLSRVKLMWTNYPNMPTGANATPELYKRLVEFARRKNIVIVNDNPYSFILNDKPISILSVPGAKECCIEFNSMSKSHNMPGWRIGMLASNAEFVQWILKVKSNIDSGMFRAMQLAAAKALEADSTWYEGNNVNYRNRRHLAGEIMKTLGCTYDEKQVGMFLWGKIPASCADVEELTEKVLQEARVFITPGFIFGSNGARYIRISLCCKDAKLAEALERIKSIMK

SEQ ID NO: 48713 - protein, 182 aa, Bacteroides fragilis
MSQLNDISLVAQVVVFRNTRAFDQLVQKYQSPVRRFFLNLTCGDSELSDDLAQDTFIKAYTNIANFKNLSSFSTWLYRIAYNVFYDYIRSRKETTDLDAREVDAANSTEQVNVGEQMDVYQSLRTLKEIERTCITLFYMEDVSIDKIAGITGCPVGTVKSHLSRAKDKLAIYLKQNGYDGNR

SEQ ID NO: 48714 - protein, 103 aa, Bacteroides fragilis
MEISAAHKLILPYRSKCASLHGHNWIITVYCRSERLNADGMVVDFTQIKQAVKEKLDHRNLNEVLPFNPTAENIARWVCKQIPQCYKVEVQESEANTVIYEKD

SEQ ID NO: 48715 - protein, 154 aa, Bacteroides fragilis
MNTITEEEALNRMAAYCSAAEHCKAEVNEKLQKWGLPYEVINRIIDRLVVEKFIDEERYCRAFVNDKFRFAKWGKMKITQALYMKKIPREVTYRYLNDIDREEYLAILGDLIAAKRKSIHAKDEFELNGKLIRFAMNRGFEMDDIRRCVQVEEE

SEQ ID NO: 48716 - protein, 416 aa, Bacteroides fragilis
MIKHLLKQIWAQRSVNAWLWFELMIVSVCLFYVMDYLYVTGRLYATPLGFDTEHVYRVKLASIPPGGKEYKPGDTDSLKIEQWFSILSRLRAYPGVEAVSLSIGSHPYNQNSSSGSRGIDTTWVHGYVYNVSPDYFRVFRITDKQGKTESLVQAATQENTWIISAETEREFSAKGTDALGKGVKNWGETEPTHTIRGICNTIRFDDFYPLYPTYIECHSEAALLGWRGNNAEFCVRVRPDADGVDFPSRFRKDMKVQLRVGNFYLLDITSFDDLRENYYRSNGKINDVKTRIAALGFFLLNILMGVIGTFWIRTQQRRSEMGLRLALGSTRANLRSLLIGEGVLLLILATVPAAVISLNLAFMDLLTDTMPVVTVTRFLIVQAMTFVSIVVMIVIGICIPARQVMRIQPAEALHEE

SEQ ID NO: 48717 - protein, 341 aa, Bacteroides fragilis
MKWNVLLYGLLFSGLGIFSYLLLVNYTELTPKVADVLYSKGAFVFFITAFNVLGYSTLRISSWINTQYALNIRHRWKIIVIYVAVILLFLLLNYSLLIAAKLLAGIDNLFTFSNGGWRILIVVWLVELVIVGLLLANRSIQNNLKLQQEAAKLQTENDTARYAALQSQLNPHFLFNSLNTLIAEIEYNPGNAVHFTKHLSSVYRYVLQCQDKTLVTLTEELEFLQSYLFLHKVRLGDCISCNCCIATGYTSCMLPPLTLQLLAENVINHNSITLSKPMKIDIRLEEGYLAVSNPIQPKKSHESPGVGLKNLSNRCQLMLGKEIIVHNDEKVFIVKVPLLYE

SEQ ID NO: 48718 - protein, 333 aa, Bacteroides fragilis
MIKVGINGFGRIGRMVFRAAVKNFGNDIQIVGINDLLDAEYLAYMLKYDSVHGRFEGEVAVEDGALIVNGNKIRLTAEMDPANLKWNEVDADVVVESTGFFLTDETARKHIQAGAKKVIMSAPSKDSTPMFVYGVNHTSYAGQDIISNASCTTNCLAPIAKVLNDKFGIVKGLMTTVHAATATQKTVDGPSKKDWRGGRGILENIIPSSTGAAKAVGKVLPVLNGKLTGMAFRVPTSDVSVVDLTVVLEKAATMAEINAAMKEASEGELKGILGYTEDAVVSTDFRGCANTSIYDSKAGISLDSNFAKVVSWYDNEWGYSNKVCEMARVIAAK

SEQ ID NO: 48719 - protein, 346 aa, Bacteroides fragilis
MEFSAKQIAAFIQGEIIGDENATVHTFAKIEEGIPGAISFLSNPKYTPYIYETKASIVLVNKDFTPEQEVKATLIKVDNAYESLAKLLNLYEMSKPKRTGIDERAYVAETAKIGKDVYIAPFACIGDHAEVGDNTVIHPHATVGGGAKIGSNCILYANSTVYHDCRVGNNCILHAGCVIGADGFGFAPTPQGYEKIPQIGIVILEDNVEVGANTCIDRATMGATVIHSGVKLDNLVQIAHNDEIGSHTVMAAQVGIAGSTKVGEWCMFGGQVGIAGHLKIGNQVNLGAQSGVPGNIKSGSQLIGTPPMELKQFFKASIVQKSLPEMQIELRNLRKEIEELKQQLNK

SEQ ID NO: 48720 - protein, 818 aa, Bacteroides fragilis
MLKLFISMAALFLGVGSSVFAQIEGKVYIDANGNGICDAGERGLKGVCVQDGLNVVKTTDDGHFILPGHKDTRFVTLTVPDGYQASTSHYLSFDGTGKKYELGICKTSVNTGNGYSFVQITDTETSLYGDWIDNLKEYVKTNPTAFIIHTGDICYEAHQDFHGRYLRSVDLGIPTYYCVGNHDLRAGKYGEELWQSHFGPSWYSFDVGNVHYVVTPMLGGDHAPSYRRSDIIRWLKNDLAQTDKGKRIVLFNHDLWFWGDDLLFKDKNGEQIDFADYNLDAMIYGHWHNHYYKQLKSGLHTYCSSTPDKGGIDHGASCFRIYNADTKGKLSSATRYTYIDAILTSAYPAEGETVSVPDGKMTVRINAYRTISDAKKVTASVERNGRLVSTVTLMPETDWGWSGAVRVSGGKQRLLVTAEFEDGTRLTKRVDYTVTKQPLSVIATSDVWAGLRGNAAHNQLVNDSVSLPLQTNWIQNVGSNIYMCSPIVAQNKVFIGTIDDDKAKKCYVKAYDATTGHLCWTFVTSNSIKNTIAYEDGRIFASDASGMLYAIDAEKGTACWQTQLPVSLLPLLDEGLAVADGVVYAGHAKGTCAVQAVDGKILWQNKAWDGGEGTTSTFTVGAGVLVASAHWNGLFGHDISNGALLWKKRDSKIRFRDGSATFYDGNFYLASCENLYVINPRSGDILKMAETSYEFNSACAPLVTDKYLIVSTSNKGVVAFDRLTFKEVWNYRTGTSLFYTVPYSHNQECTVEVSPVLVGSTVLFGASDGYLHAVDLNTGAYRGKRALGAPVFSSVAVSGNCLFVADFGGNIYNFKLHN

SEQ ID NO: 48721 - protein, 742 aa, Bacteroides fragilis
MILLLLTSCYSKEERRVLVIHSYEKDYQGYAEFNKLIKKEFAKAHIPVELTFFYLNCEINNEQQEIDKINNFLDSISKWKPEVLLVNDDQATYSLLETHHPLLKGIPIVFSGVNYPNWELIGQYNNVTGFHDKIDFRKNLEMVHKLTGKNHIYTILDFTFLDRKVRNDIDNQLKSTDIISNLDWHLDKNDTRKEAEKGHIIINALSARNLSKNQNKDQTKGGDFIWSISKYSTLPYLQTKFDYTTVTMASLSTRQRFTTINELFDCGHDFLGGYITPMHIQVEESVHAAARILNGENVADIPIQESAKGYFIDWNAMQKEHLTIADIPHEYTIINIPFKTRHPIVWWFALLGSITAIVSLLSGITYLYWRETKRKRSILYELEDEKESLALAVEGSDTYAWRLKDDTMVFEYAFWKNLGMAPHPLTIDGFLSFVDADYLDTTQALLTKNATNGKHFIKLKCDFNGTGYQWWELRCSTMKSALGGQKTTGLLLNIEDYKKREQELIEARKMAEKAELKESFLANISHEIRTPLNAIVGFSTLLASPDDTDITPEEKEQYIDTINRNSELLLKLINDILELSRIESGYMSFDCDDYPLDALIRDTYQTHKILIPGQLHFLLEEGEKGLIVHVDKNRLVQVITNFLNNASKFTREGSIKLGWSYMPQTEEVEIYVEDTGIGIPQSEQKMIFGRFYKQNEFAQGTGLGLSICKLIIEKLQGRLSLRSEAGTGSHFSIFFSCKKQPI

SEQ ID NO: 48722 - protein, 65 aa, Bacteroides fragilis
MKIAEIKEMSTNDLVERVEAEVVNYNQMVINHSISPLENPAQIKQLRRTIARMRTELRQRELNNK

SEQ ID NO: 48723 - protein, 369 aa, Bacteroides fragilis
MYSSQLIRMQKYMLFIIYVLILFALYAYFYTGLNLIRIGYSFWLYISAFHMVLLPVISYMSGERFIYKIFSFFAMLGLFISIGLIIDSQTMLFKFITIYANEDLANIDETILSQGRCSFLSESVSTFGVSFSFCVLSSIIMYLKNKKRLCRLFYFICSFMPLLGAWFTGSRQILFAVVLIFIVGIIGLFIKSKHKIILIISLFVFSYFTFSYLFLPIISTNENLLYRYLGDNSTNADSERSLAWDEGMQYLTDNKHVILLGNGLGSVAVKGGLKGEFQGKAYESTFLAKMIDMGLCGILILLFPAFYIIWQIYKLKHKIFFDILSFTVIINYLFISLISPNGASVSTQYIMYLLVGIYIVRPYYCFENE

SEQ ID NO: 48724 - protein, 348 aa, Bacteroides fragilis
MKVIVDNKIPYIREAIEQIADEVIYAPGKDFTPELVQDADALIIRTRTRCDRSLLAGSKVKFIATATIGFDHIDTAYCREAGITWTNAPGCNSASVAQYIQSALFILQQTRGMKLNQMTIGIVGVGNVGSKVADVARKLGIQVMLNDLPREEREESTMFASLKSIAEKCDIITFHVPLYKEGKYKTYHLADKHFFHSLKKGAVIMNTSRGEVIETEALLEALRSGILSDAVIDVWEHEPDIDLELLEKVIIGTPHIAGYSADGKANATRMSLEALCRFFRIETDYRITPPEPKNKLISTATYEEASLMIYDPRRDSDALKSHPGLFEQLRGDYPLRREEGAYRIVITK

SEQ ID NO: 48725 - protein, 439 aa, Bacteroides fragilis
MAEIFNGISVNTPSLSAIIAIILAGLLLLASGFASASEIAFFSLSPSDLNDIEEGNHPSDGKISNLLADSERLLATILITNNFVNVTIIMLCNFFFMNVFVFHSPLAEFLILTVILTFLLLLFGEIMPKIYSAQKTLAFCRFSAPVIYVLRKVFAPISAVLVHSTAFLNKHFAKKNHNISVDELSHALELTDKAELTEENNILEGIIRFGGETAKEVMTSRLDVVDLDIRTPFKDVIQCIIDNAYSRIPIYSGTRDNIKGVLYIKDLLPHLNKGDNFRWQSLIRPAYFVPETKMIDDLLRDFQANKIHIAIVVDEFGGTSGIVTMEDIIEEIVGEIHDEYDDEERTYTVINDHTWVFEAKTQLTDFYKITKVDEDDFDKVDGDADTLAGLLLEIKGEFPALHEKVLYHRYEFEVLAMDSRRILKVKFTVNEPSTEEEAS

SEQ ID NO: 48726 - protein, 152 aa, Bacteroides fragilis
MSVNKVILIGNVGKDPEVRYLDTGIAVASFPLATTDRAYTLSNGTQVPERTEWHNLVLWRGLAETAEKYVHKGDKLYVEGKIRTRSYDDQNGAKRYVTEIFVDNMEMLTPKGTGSGSYAPAQQQAATPVRPQSQQPQQPMSSQDNSADDLPF

SEQ ID NO: 48727 - protein, 308 aa, Bacteroides fragilis
MINRVLIRLKIIQIVYAYYQNGSKNLDSAEKELFFSLSKAYDLYNYLLMLMIALTEYAQKRIDTAKAKLAPTKEELYPNMKFVENKFVAQLEVNKQLSEFIANQKRTWANDQDFIKELYEKIIASDVYKEYMASSDKSYEADRELWRKLYKTFVFNNDSLDQVLEDQSLYWNDDKEIVDTFVLKTIKRFEEKQGANQPLLPEFKDDEDQEFARRLFRRAILNADYYRHLISENTKNWDLDRVAFMDVIIMQCALAEILSFPNIPVSVSLNEYVEIAKLYSTVKSGSFINGTLDGIVNQLKKEGKLTKN

SEQ ID NO: 48728 - protein, 641 aa, Bacteroides fragilis
MNYGFVKVAAAVPRVKVADCKFNSERLEGLITIAEGKGVQILTFPEMCITGYTCGDLFAQQLLLEQAEMALIQILNSTRQLDIISILGMPVVVSSTVINAAVVIQKGKILGVVPKTYLPNYKEFYEQRWFTSALQVSENSVRLCGQIVPMGNNLLFETAETTFGIEICEDLWATVPPSSSLALQGAEIIFNLSADDEGIGKHNYLCSLISQQSARCISGYVFSSSGFGESTTDVVFAGNGLIYENGYLLARSERFCLEEQLIINEIDVECIRAERRVNTTFAANKANCPGKEAVRISTEFVNSKDLNLTRTFNPHPFVPQGSELNSRCEEIFSIQIAGLAQRLLHTGARTAVIGISGGLDSTLALLVCVKTFDKLGLSRKDILGITMPGFGTTDRTYHNAIDLMNSLGVSIREISIREACIQHFKDIGHDLNIHDVTYENSQARERTQILMDIANQTWGMVIGTGDLSELALGWATYNGDHMSMYGVNAGIPKTLVKHLVQWVAENGMDETSKATLLDIVDTPISPELIPADENGEIKQKTEDLVGPYELHDFFLYYFLRFGFRPSKIYFLAQTAFSGVYDDETIKKWLQTFFRRFFNQQFKRSCLPDGPKVGSISISPRGDWRMPSDASSAAWLKEIAEL

SEQ ID NO: 48729 - protein, 536 aa, Bacteroides fragilis
MNRLRLIKTAYTALAALMLAACASDELTDGTVQDLPEGMYPLQIAGVSITAESNAEPWGADTPQTRMVENTTDGKYSSAWENGDKIKVQIGDVTPGTYTYQSSGLTVADGDAYAYWASKDNNQTIRAWYTSSGNETVDLSDQTKGLAYVVTARTTANFNTEVSLTFSHALAKVRVELTGEIASFVDNVSIKGYTTCTLSQGTWNGANEGEIKMYKVADKVFEANVYPGYQIKEVKVNNGTWSKLTTAVFLEAAKIHKMGIGVTGKTITLSDQTGEVCTVESGKCLIIDGGGNELNKRIAIQDNAKVMLKNVKLAAPTTEVNTIEINGSATLLLSGTNEINGATQGCPLTVIRGTLTINGTDNDKLTLTGENSYNAGCLGLREGASLIINGGDIVADGSKTQHGSGIGAYWTGWNDPRYGSITINGGKINASGGGNSAGIGSGSQCGGGDIIITGGNITATGGGNLGGAGIGTGDYGNCGDITISGTNTVVTATVVKEGCDKIGLGYNGRYCGTVTIKAGVTVNNTKYTSDHVGRIE

SEQ ID NO: 48730 - protein, 498 aa, Bacteroides fragilis
MSKFVMTIFGASGDLTKRKLMPALYSLYVAKRLPEEFEILGVGRTVYEDADYRTYIYNEMEKFVKSEEQNKEKMDAFVGHLHYLAIDPALESGYGQLRLRIEELSGDSRPDDLLFYLATPPSLYGVIPLHLKSVHLNKGRARIIVEKPFGYDLESAEKLNKIYASVFDEHQIYRIDHFLGKETAQNLLAFRFANGIFEPLWNRNYIDYVEVTAVENLGIEQRGGFYDTTGALRDMVQNHLIQLVALTAMEPPAVFNADNFRNEVVKVYESLTPLTETDLSEHIVRGQYTAGGNKRGYREEKNISPDSRTETYIAMKLGISNWRWSGVPFYIRTGKQMPTKVTEIVVHFRETPHQMFHCAGGNCPRANKLILRLQPNEGIVLKFGMKVPGPGFEVKQVTMDFSYDQLGGVPGGDAYARLIEDCILGDQTLFTRSDAVEASWHFFDPILRYWNEHPEAPLYGYPAGTWGPLESEAMMHEHGAEWTNPCKNLTNTDQYCEL

SEQ ID NO: 48731 - protein, 132 aa, Bacteroides fragilis
MDIEEIKDFRPLILVAEDDDSNFKLIKAIIGKKCDILWAKNGEEMLNLYREHTQDAHAILMDIKMPIMNGLEATRIIREEGASLPIIMQTAYAFSSDRENAMQAGASEVLVKPITVSALRGCLSSYFPEIKW

SEQ ID NO: 48732 - protein, 413 aa, Bacteroides fragilis
MAPVGSRESLAAAIQAGADSIYFGIENLNMRARSANTFTIEDLREIARTCDEHGMKSYLTVNTIIYDKDIELMRTIVDAAKEAGISAVIAADVAVMSYANKIGQEVHLSTQLNISNAEALKFYAQFADVVVLARELNLEQVAEIYRQIQEEHICGPSGELIRIEMFCHGALCMAVSGKCYLSLHEMNHSANRGACMQICRRAYTVRDKDTDVELEVDNQYIMSPKDLKTIHFMNKMIDAGVRVFKIEGRARGPEYVRTVVECYKQAIRAYLDDSFTDEKIAAWDERLKTVFNRGFWDGYYLGQRLGEWTKNYGSAATERKIYVGKGIKYFSNIGVAEFLVEAAEVSVGDKLLITGPTTGAVFATLDEARVDLKPVETVKKGEHFSMKLDKIRPSDKLYKLVSTEELKKFKGLE

SEQ ID NO: 48733 - protein, 397 aa, Bacteroides fragilis
MTDRQNSRRFLLLFLGVLSAFGPFIMDMYLPTLPAMADFFHTSSSMVQLGLTTSMIGLAAGQLIFGPLSDKCGRRPPLLLAMILFLLATVGCIFSHSISQFVTSRFLQGIAGAGGVVISRSIATDEYSGQQLAGMLAVIGGINGIATVIAPIGGGILAQITSWQGIFICLFFMGVVLLSGSLHLNESLPAKHRQTVSWQDLYHSFGEVLRNRRYVGYVLQYGFTMGILFVNISSAPFIMQQHYGLSPLSFSLCFGINAIAMVISSAISIKLPTMERALYIGSRGMLSVSALLMVFLSLKSDFWIYELLIFALLSMIGMTFTASNTLAMECERWNAGIASALLGATGFAFGGIVSPLVSLGDMMTSTGILFLAGSACAYACTRYVLSQSVQPSGVLYH

SEQ ID NO: 48734 - protein, 280 aa, Bacteroides fragilis
MNIPAWANRIVSFLLFAGIGYFLIELNNTFAIIRMRASVQTSLYFLLITACPGMHLLYAGDVAAVTFLISLYFLFKSYQQPRPAGYLFHSFALLSAGSVAFPQLTYFIPIWLMGASGFQSLTFRSFCGAIIGWSIPYWFLLGHAFFHNEIELFYQPFIHLADFRDIDFGRDFQLWEVVTLGYLFILYIVSSIHCIVAGYEDKIRTRAYLHFLIFLNFCIFLFIVLQPALSMNLLSLLLIGISILVGHLFVLTNSKSSNLFFIGSMITLIALFCFNIWTLL

SEQ ID NO: 48735 - protein, 1125 aa, Bacteroides fragilis
MTITELQHQYAGHPNVEALNKLLGEPAVRHIYCGGLYASAASLFASALVEKSPCPFVFILGDLEEAGYFYHDLTQVLGTERILFFPSSFRRSVKYGQKDAANEILRTEVLSRLQKGEEGLCIVTYPDALAEKVVSRQELSENTLKLHVGERVDTGFITDVLHSYGFEYVDYVYEPGQYAVRGSIIDVFSFSSEYPYRIDFFGNDVESIRTFEVDSQLSKEKKESIVIVPDLAVTGKVTTSFLDFIPKDTTLAMRDFLWLRERIQDVHDESLTPQALASQEAEENGGITLEGKLIDGSEFTVRALDFRRMEFGNKPTGTPDATLTFHTTAQPIFHKNFDLVAESFKEYLNRGYALYICSDSTKQTDRIKAIFEDRGDRIQFTAVERTLHEGFADDTLKLCLFTDHQLFDRFHKYNLKSDKARSGKVALSLKELNQFTPGDYVVHTDHGVGRFSGLVRIPNGDTTQEVMKLVYQNEDVVFVSIHSLHKVSKYKGKEGEAPRLNKLGTGAWEKLKERTKTKIKDIARDLIKLYSQRREEKGFAYSPDSFLQRELEASFIYEDTPDQSKATADVKQDMERDMPMDRLVCGDVGFGKTEVAIRAAFKAVADNKQVAVLVPTTVLAYQHFQTFRDRLKGLPCRVEYLSRARTAAQAKAVIKGLEAGDVNILIGTHRILGKDVKFKDLGLLIIDEEQKFGVSVKEKLRQMKVNVDTLTMTATPIPRTLQFSLMGARDLSVISTPPPNRYPIQTEVHTFSEEVIADAINFEMSRNGQVFLVNNRIANLPELKAMILRHIPDCRIAIGHGQMEPAELEQIIFGFVNYDYDVLIATTIIESGIDIPNANTIIINQAQNFGLSDLHQMRGRVGRSNKKAFCYLLAPPLSSLTPEAKRRLQAIENFSDLGSGIHIAMQDLDIRGAGNMLGAEQSGFIADLGYETYQKILSEAVHELKTDEFAELYADELKGEGVISGEEFVEECQVESDLELLLPANYVTGSSERMLLYRELDGLTLDRDVDAFRSRLEDRFGPIPPETEELLRIVPLRRLAARLGVEKVFLKGGRMTLFFVNNAESPYYQSAAFGKMIDYMMKYTRRCDLREQNGRRSMLVKDIPNVETAVSVLLEIVALPVKEKE

SEQ ID NO: 48736 - protein, 124 aa, Bacteroides fragilis
MADLKAFAEQLVNLTVKEVNELATILKEEYGIEPAAAAVAVAAGPAAGAAAAEEKSSFDVVLKSAGAAKLQVVKAVKEACGLGLKEAKDMVDGAPSVVKEGLAKDEAESLKKTLEEAGAEVELK

SEQ ID NO: 48737 - protein, 47 aa, Bacteroides fragilis
MKRTFQPSNRKRKNKHGFRERMATANGRRVLAARRAKGRKKLTVSDE

SEQ ID NO: 48738 - protein, 211 aa, Bacteroides fragilis
MECDICISKDSVFYLLHDSTLDRTTNGTGLIREWLSADIDTLDAGSWFGEKFSGQCVPRLDVLLRKAKQNGLKLTLDYRTGDFGQLLDLVRREGMLENCTFTFWSDKEAKAFRQVAPEIRTLQAYVGGGAELDKVIAEINPNIAVIRIDSLDKLLVERCHKKGLKVLALALGTDDVEESDRKAIELGVDVLATDRPELFVKKYRPEHTWTK

SEQ ID NO: 48739 - protein, 288 aa, Bacteroides fragilis
MGNDKRVRKPEWLKISIGANERYTETKRIVESHCLHTICSSGRCPNMGECWGKGTATFMIAGDICTRSCKFCNTQTGRPLPLDPDEPTHVAESIALMKLSHAVITSVDRDDLPDLGAAHWAQTIREIKRLNPETTTEVLIPDFQGRKELIDQVIKACPEIISHNMETVKRISPQVRSAANYHTSLEVIRQIAESGITAKSGIMVGLGETPAEVEELMDDLISVGCKILTIGQYLQPTHKHFPVAAYITPEQFAVYKETGLKKGFEQMESAPLVRSSYHAEKHIRFNNK

SEQ ID NO: 48740 - protein, 369 aa, Bacteroides fragilis
MIIGVPKEIKNNENRVGMTPSGVAELVKRGHTVYIQHTAGENSGFQDEAYTAVGAQILPTMEETYAMAQMIVKVKEPIAPEYRLIRKEQLLFTYFHFASDRELTLAMIENGSVCLAYETVEKADHSLPLLIPMSEVAGRMAIQEGARFLEKPQGGKGILPGGVPGVKPAKVLILGGGIVGSNAAQMAAGLGADVTIADINLSRLRYLSETLPKNVKTLYASEVRLKKELPDVDLVVGSVLIPGDKAPHLITRDMLKMMQPGTVLVDVAIDQGGCFETSHPTTHSEPTYVVDGIVHYAVANIPGAVPYTSTLALTNATLPYVIALANKGWRKACKEDPALALGLNVVEGKVVYRAIADVFGLKYEQLNLE

SEQ ID NO: 48741 - protein, 650 aa, Bacteroides fragilis
MQTIRLARNKPRTFKEKLIEMVWATRLEFRKSKKEILSLYISHAPFGGNVVGLDAAAWRYFGHSAEELSWAESAMLAVLPNSPAMIHLSKSRQALLDKRNRLLTHLHKKGILDTSTYELAISEPLPQEPLPLPHIAPHLTDYFYQTRNGKYSVSTIDRGIQTQIESLVERWNSEFKRSDIRNLAILVIDIRTNQAIAYCGNVHFDKEQSGNQVDVIRSPRSTGSILKPFLYYAMLQEGEILPNTLLPDIPVNINGFTPQNFNLQFEGAVPASEAIARSLNIPSVTMLQRYGVPKFHSFLKQIGLTTLNRPSSHYGLSLILGGAEATLWDITSAYANMGRSLNRLPQFPCTLLLSDSTSVHRPSFQSGAVWQTFDAIKEVNRPEEIDWRTIPSMQTIAWKTGTSYGFRDAWAVGVTPKYAVGVWVGNATGEGKPGLVGARTAGPVLFDVFNLLPSSPWFERPQGELVEAEICRQSGHLKGRFCEETDTLLILPAGLKTEACPYHHPVTLSANERFRIYENCANSEPVVRRNWFTLPPVWEWYYKQHHPEYRPLPPFKSGCGEDRFQPMQFIYPPMGARIHLPKQMDGSKGQLTVELVHSHPNTTIYWHLDETYLTQTQDFHKLSLRPSPGKHSLTAVDDEGNTISTTFFVE

SEQ ID NO: 48742 - protein, 493 aa, Bacteroides fragilis
MFGGQIQVAGAVKSNKIKKTATSDWMEIEKQRGISVTTSVMEFDYRDYKINILDTPGHQDFAEDTYRTLTAVDSVIIVVDGAKGVETQTRKLMEVCRMRNAPVIIFVNKMDREGKDPFDLLDELEEELMIQVRPLSWPIEQGPRFKGVYNIYEQKLDLYQPSKQVVTEKVEIDIHSDELDRQIGDTLADKLRGDLELIEGVYPEFDVETYLQGECAPVFFGSALNNFGVQELLNCFVEIAPAPRPVHAEEREVIPEEPKFTGFIFKITANIDPNHRSCVAFCKICSGKFVRNAPYLHVRHGKTMRFSSPTQFMAQRKTTIDEAWAGDIIGLPDNGTFKIGDTLTEGEQLHFRGLPSFSPEMFKYIENADPMKQKQLAKGIDQLMDEGVAQLFVNQFNGRKIIGTVGQLQFEVIQYRLLNEYNASCRWEPLSLYKACWIESDDLEELEAFKKRKYQYMAKDREGRDVFLADSNYVLQMAQMDFKNIRFHFTSEF

SEQ ID NO: 48743 - protein, 395 aa, Bacteroides fragilis
MYGKMKEHLSNTIAEIKEAGLYKEERLIESAQQAAITVKGKEVLNFCANNYLGLSNHPRLIEGAKKMMDRRGYGMSSVRFICGTQDIHKELEAAISDYFKTEDTILYAACFDANGGVFEPLFTDEDAIISDSLNHASIIDGVRLCKAKRYRYANADMADLERCLQEAQAQRFRIIVTDGVFSMDGNVAPMDKICDLAEKYDALVMVDESHSAGVVGATGHGVSEQYNTYGRVDIYTGTLGKAFGGALGGFTTGRKEIIDLLRQRSRPYLFSNSLAPGIIGASLEVFKMLKESNEIHDKLVDNVNYFRDKMTAAGFDIKPTQSAICAVMLYDAKLSQIYAARMQEEGIYVTGFYYPVVPKDQARIRVQISAGHEKEHLDKCIAAFIKVGKELGVLK

SEQ ID NO: 48744 - protein, 661 aa, Bacteroides fragilis
MKKDSVYQLQEIVVSSQQILGSKFKARNRTGSAYYISPEEIRRLGYTDINRMLKAVPGVNMYEEDGFGLRPNISLRGTKAERSERISIMEDGVLAAPAPYSAPAAYYFPNVARMEAIEVLKGSSQVQYGPFTTGGAINLVSTPIPNSFSGKANISYGSKNTFKSHTSVGSSWKHFGYMVEYLRYQSDGFKKYEDHAAKGFKRNDIIAKIRVKTDHVKGVNHALELKFGYADENSDETYVGLSADDFKKTPFLRYAGSQMDKLKTDHRQWVATYLLTFSNKLKITTNAYYNYFHRNWYKLNDVRAGITSKEKRSIADVLVDPETNIRYFDILTGKTDREEEALLVRANNRTYRSRGIQTRAEYRFNLNEFFFDLEFGLRYHADEEDRFQWDDSYSMKNKKMVLFMEGIHGTNANRVTSANALAGYLLAKLRYDAWTVTAGLRYEDVDLLKKDYTKEDLARSGKVRIETPNHARVLIPGVGLHYQLMPAASVFFGIHKGFAPPSAELYQKPESSVNMELGTRVAIGNFRAELIGFYNNYSNMLGSDLAASGGAGTLEQFNVGEARVKGAEFLVRYQPLPKNCNVRLPLQVSYTYTDTEIRNSFESHSWGNVVRGDEIPYIFKHALNMQLGIECKWFYANIGTRYNSDMRTSPGQGTIAEREKV

SEQ ID NO: 48745 - protein, 403 aa, Bacteroides fragilis
MRSTFKLLFYINRNKVKSDGTTAVLCRISIDGKKSAVTTGVYCKPGDWDSKKCEIKTARENNRLAAFRSRLEEAYGNLLRNQGVVTAELLKTTVSGANSVPEYLLQAGEVERERLRVRSKEINSTSTYRQSKTTQLNLRQFIESRGMKDIAFSDITEEFAESFKVFLKKELGHRNGHVNHCLCWLNRLIYIAVDREILRANPIEDVAYERKETPKLRHISRSELKRMMETPLPDPMMELARRTFIFSSLTGLAYADTRALHPRHIGTTSEGRRYIRIRRAKTDVEAFIPLHPIAGQILELYNTTDDDRPVFPLPVRDVLWYEVHGMGVALGMKENLSYHMARHSFGTLTLTAGIPIESIARMMGHTNIDSTQVYAQVTDRKISSDMNRLMERRKPAAGKEAAG

SEQ ID NO: 48746 - protein, 244 aa, Bacteroides fragilis
MGQKVNPISNRLGIIRGWDSNWYGGNDYGDSLLEDSKIRKYLNARLAKASVSRIVIERTLKLVTITVCTARPGIIIGKGGQEVDKLKEELKKVTDKDIQINIFEVKRPELDAVIVANNIARQVEGKIAYRRAIKMAIANTMRMGAEGIKIQISGRLNGAEMARSEMYKEGRTPLHTFRADIDYCHAEALTKVGLLGIKVWICRGEVFGKRELAPNFTQSKESGRGNNGGNNGGGKNFKRKKNNR

SEQ ID NO: 48747 - protein, 274 aa, Bacteroides fragilis
MAVRKFKPTTPGQRHKIIGTFEEITASVPEKSLVYGKKSSGGRNNEGKMTMRYLGGGHRKVIRIVDFKRNKDGVPAVVKTIEYDPNRSARIALLFYADGEKRYIIAPNGLQVGATLMSGENAAPEIGNALPLQNIPVGTVIHNIELRPGQGAALVRSAGNFAQLTSREGKYCVIKLPSGEVRQILSTCKATIGSVGNSDHGLESSGKAGRSRWQGRRPRNRGVVMNPVDHPMGGGEGRASGGHPRSRKGLYAKGLKTRAPKKQSSKYIIERRKK

SEQ ID NO: 48748 - protein, 208 aa, Bacteroides fragilis
MEVNVYNIKGEDTGRKVTLNESIFGIEPNDHAIYLDVKQFMANQRQGTHKSKERSEISGSTRKIGRQKGGGGARRGDMNSPVLVGGGRVFGPKPRDYYFKLNKKVKTLARKSALSYKAQDNAIVVVEDFNFEAPKTKVFVEMTKNLKVSDKKLLVVLPEANKNVYLSARNIEGANVQTISGLNTYRVLNAGVVVLTESSLKAIDNILI

SEQ ID NO: 48749 - protein, 205 aa, Bacteroides fragilis
MPGLLGKKIGMTSVFSADGKNVPCTVIEAGPCVVTQVKTVEKDGYAAVQLGFQDKKEKHTTKPLMGHFKKAGVTPKRHLAEFKEFENELNLGDTVTVELFDGADYVDVVGTSKGKGFQGVVKRHGFGGVGQSTHGQHNRARKPGSIGACSYPAKVFKGMRMGGQMGGDRVTVQNLQVLKVIAEHNLLLIKGSVPGCKGSIVLIEK

SEQ ID NO: 48750 - protein, 200 aa, Bacteroides fragilis
MFSGIVEEYATVVALVKDQENIHFTLKCSFVNELKIDQSISHNGVCLTVVSMTEDTYTVTAMKETLDRSNLRLLKVGDKVNVERSMMMNGRLDGHIVQGHVDQTAECIDIKDADGSWYFTFKYAFDKEMAKRGYITVDKGSVTVNGVSLTVCNPTDDTFQVAIIPYTYEHTNFHTFGKGSVVNLEFDIIGKYISRMIQYK

SEQ ID NO: 48751 - protein, 513 aa, Bacteroides fragilis
MNQKIIYSSALLVGLGSPQAFAHKEKAHTPQKPNIIFIMCDDMGYGDLGCYGQPYISTPNIDNMAREGMRFTQAYAGSPVSAPSRASLMTGQHTGHCEVRGNKEYWTQASTVMYGDNKEFSVVGQHPYDPEHVILPEIMKDNGYTTGMFGKWAGGYEGSASTPDKRGIDEYYGYICQFQAHLYYPNFLNRYSPSLGDTGVVRVVMEENIKYPMYGPDYHKRTQYSADLIHQKAMEWIEKQDGEQPFFGIFTYTLPHAELVQPEDSILNHYKTQFADDKAFGGQKGSRYNAITHVHAQFAGMITRLDYYVGEVLKKLEEKGFDENTIVIFTSDNGPHEEGGADPTFFGRDGKLRGLKRQCYEGGIRVPFIVRWPGQVAAGTVNDHQCAFYDVMPTLCDLTGVKNFTKKYVNKKKEADYFDGISFAPTILGKKNQKKHDFLYWEFNETNQIGVRMGDWKMVVKKGTPFLYNLATDIHEDHNVAAENPDIVKKMVGIIHQQHTENPNFKVTLPPTM

SEQ ID NO: 48752 - protein, 416 aa, Bacteroides fragilis
MAFRYYDAEKMINGRSMKDWLKFAMAWWHTLCAEGGDQFGGGTKQFPWNGDPDPVQAAKNKMDAGFEFMQKMGIGYYCFHDVDLVTEADSIEAYEANLKELVAYAKQKQAETGIKLLWGTANVFSHARYMNGAATNPDFDVVARAAVQIKNAIDATIELGGTNYVFWGGREGYMSLLNTDQKREKEHLAQMLTIARDYGRARGFKGTFLIEPKPMEPTKHQYDVDTETVIGFLKAHGLDQDFKVNIEVNHATLAGHTFEHELAVAVDNGMLGSIDANRGDYQNGWDTDQFPIDNFELTQAMMQIIRNDGLGNGGTNFDAKTRRNSTDPEDIFIAHIAGMDAMARALESAANLLNESPYQKMLSDRYASFDAGKGKEFEEGKLSLEELVAYAKANGEPKQTSGQQELYEALVNIYSL

SEQ ID NO: 48753 - protein, 248 aa, Bacteroides fragilis
MGLLDGKTAIVTGAARGIGKAIALKFASEGANIAFTDLVIDENAQNTAKEIEAMGVKAKGYASNAANFEDTAKVVEEIHKDFGRIDILVNNAGITRDGLMMRMSEQQWDMVINVNLKSAFNFVHACTPIMMRQKAGSIINMASVVGVHGNAGQANYSASKAGMIGLAKSIAQELGSRGIRANAIAPGFIITDMTAGLSEEVKTEWAKKIPLRRGGTPEDVANIATFLASDMSSYVSGQVIQVDGGMNM

SEQ ID NO: 48754 - protein, 317 aa, Bacteroides fragilis
MKLEEKTKKKDEQGLIIKKYQQYLKLEKSLSKNTLEAYLTDLEKLLSFLSAEGVEILEVSLTDLQRFAAGLHDIGIHARSQARIISGIKSFFHFLIIADYIEADPSELLEGPKIGFKLPEVLTVEEIDRIISTIDLSKNEGQRNRAILETLYSCGLRVSELTGLKLSDLYFDEGFIKVEGKGSKQRLVPISPKAIQEIKLYFLDRNRINIKKDHEDYLFLSRRGTHLSRIMIFHLIKELADMAGITKNISPHTFRHSFATHLLEGGANLRAIQCMLGHESISTTEIYTHIDRNMLRSEIIEHHPRNIKYRQEKKPFR

SEQ ID NO: 48755 - protein, 324 aa, Bacteroides fragilis
MKIGHIDLGERPVFLAPMEDVTDPAFRLMCKKFGADMVYTEFVSSDALIRSVNKTTQKLTICDEERPVAIQIYGKDTEAMVGAARIVEEAQPDILDINFGCPVKKVAGKGAGAGMLQNIPKMLEITRAVVDAVKIPVTVKTRLGWDADHKIIVDLAEQLQDCGIAALAIHGRTRAQMYTGEADWTLIGEVKNNPRMHIPIIGNGDVTTAAGAKECFERYGVDAIMIGRGSIGRPWIFREVKHYLETGEELPRESFEWYLDVLREEVLNSVARLDERRGIIHIRRHLAATPLFKGIPNFRETRIAMLRTESVEELFRIFDGLTTE

SEQ ID NO: 48756 - protein, 1051 aa, Bacteroides fragilis
KVLLLGSGALKIGEAGEFDYSGSQALKALKEEGIETILINPNIATVQTSEGVADQIYFLPVTPYFVEKVIRKERPEGIMLAFGGQTALNCGVALYREGILEKYNVKVLGTPVQAIIDTEDRELFVDKLNEIDVKTIKSEAVENAEDARRAARELGYPVIVRAAYALGGLGSGFCDNEEELDLLVEKAFSFSPQVLVEKSLRGWKEVEYEVVRDRFDNCITVCNMENFDPLGIHTGESIVIAPSQTLTNKEYHKLRELAIRIIRHIGIVGECNVQYAFDPESEDYRVIEVNARLSRSSALASKATGYPLAFVAAKLGLGYGLFDLKNSVTKTTSAFFEPALDYVVCKIPRWDLGKFHGVDKELGSSMKSVGEVMAIGRTFEEAIQKGLRMIGQGMHGFVENKELVIPDIDKALHEPTDKRIFVISKAFRAGYTIDQVHELTKIDKWFLQKLMNIMNTSEELHQWGNNHKQIADLPADLLKQAKRQGFSDFQIARAIGYEGDMEDGSLYVRNYRKSLGIVPVVKQIDTLAAEYPAQTNYLYLTYSGTANDVTYLGDHRSIVVLGSGAYRIGSSVEFDWCGVQALNTIRKEGWRSVMINYNPETVSTDYDMCDRLYFDELTFERVMDVLELENPHGVIVSTGGQIPNNLALRLDAQNIHILGTSAQSIDNAEDRDKFSAMLDRIGVDQPEWRALTSLEDINSFVDKVGFPVLVRPSYVLSGAAMNVCSNQEELERFLQLAANVSKKHPVVVSQFIEHAKEVEMDAVAQNGEIIAYAISEHIEFAGVHSGDATIQFPPQKLYVETVRRIKRISREIAKALNISGPFNIQYLAKDNDIKVIECNLRASRSFPFVSKVLKINFIELATKVMLGLPVEKPEKNLFELDYVGIKASQFSFNRLQKADPVLGVDMASTGEVGCIGSDTSCAVLKAMLSVGYRIPKKKILLSTGTPKQKVDMLEAARMLQKKGYDIFATGGSSKFLTENGVENTRVYWPSEEGHPQALEMLHKKEIDMVVNIPKNLTAGELDNGYKIRRAAIDLNIPLITNARLASAFINA

SEQ ID NO: 48757 - protein, 443 aa, Bacteroides fragilis
MKIGRKIALFYTLVTVLTTMAVIGVFYLFSSRYIDGLYRSYLREKAFLTAQNTGSEMKWMSKAIRPFNGSMMAAAGGKEILLDMDSDAVVRDTLNKYLSASQQKQLLESKEMSSVSFVYQDMLGAALYYPDNEGNFIVIIMSHNSYGVKIQEHLLLLSAFLVLCSSVLIFFIGQLYSTRILIPLQHVLLQLKQIRGNSLNRRLKTTGNKDELDHLIETLNSMLDRIDTAFRAEKSFVSHASHELNNPITAIQGECEISLLKERSTDEYIEALRRIAGESKRLSNLIRHLLFLSRQEEDIRKNNVEEIRLADLLEEAGAANPRIRLQYPEDAARYAVVSASPYLFKIALQNVIDNACKYSQGEVLIRLYKEDERWGIAVKDSGIGIPADEMELIFQSFYRGSNTREYAGQGIGLSLSMKIFSVYRGKVSIRSEEGKGTEVRVVF

SEQ ID NO: 48758 - protein, 258 aa, Bacteroides fragilis
MKTKQEIVANWLPRYTKRNLEDFGEYILLTNFNKYVEIFAEKFNVPILGKDANMISASAEGITIINFGMGSPNAAIIMDLLSAISPKACLFLGKCGGIDKKNKIGDLILPIAAIRGEGTSNDYFPPEVPSLPAFMLQRAVSSAIRDYARDYWTGTVYTTNRRIWEHDDTFKEYLKRTRAMAVDMETATLFSCGFANHIPTGALLLVSDQPMIPEGVKTDKSDNIVTKNYVEEHVEIGIASLRMIIDEKKTVKHLKFDW

SEQ ID NO: 48759 - protein, 1040 aa, Bacteroides fragilis
MFSKFFINRPIFATVLALIIVVAGLVTLNILPVAQFPEITPPTVQVSAFYPGANAETVAQTVGIPIEQQVNGVDGMLYMSSTASSSGAYSLTITFAVGTDIDMATVQVQNRVSVAQSSLPEPVIVQGVTVQKQSSNIVMFLTMQAQDSVYDGLYLTNYAQLNLVDQLTRVPGVGAVNVMGAGNYSMRVWLDPEAMRIRNLSPAQIYQAIQSQNIEVSAGYIGQPIGKNNNNAYQYTLNVQGRLTSPEEFGNIIIRTEEGGKMLRLKDVARIDLGSSSYNVVSKLKGHPTAAIAIYQQPGSNSLDVSKGVKAKMQELAQNFPAGVSYNVTLDTTDVINASIDEVLVTFLETTLLVVLVIFLFLQNWRAVIIPCITIPVSLIGTLAVMAALGFSINTLTLFGLILAVAIVVDDAIVVVENASRLLETGQYSPKEAVTKAMGEITGPIVGVVLVLLAVFIPTTLISGISGQLYKQFALTIAASTVLSGINSLTLTPALCALFLEHNKPSNFFIYKGFNKVYDKTQNLYDRIVKGLLVRPGLALISYGIITAVAVILFMKWPSTFVPDEDDGYFIAVIQLPPASSLERTQAVGRKVNQILDSYPEVKDYIGISGFSIMGGGEQSNTGTYFVVLKNWDQRKGKEHTAAAVVERFNEMAYGIQEAQIFAMVPPAIPGLGASGGLQLQLEDRNNLGPTEMQRAVETLMATYHTQPALASISSMYQANVPQYFLNIDRDKVQFMGIQLDNVFSTLSYYMGAAYVNDFVQFGRIYQVKIEAGEQAQKVIDDVLKLSVPNAKGDMVPFSSFTKVEERLGMDQISRYNMYSTASITCNVASGSSSGEGIQQMEDLIKEQLGNEFGYEWTSVAYQETQAGNTTTIVFIMALLVAFLVLAAQYESWTSPLSAIMGLPMALLGAMIGCSVMGTPVSIYTQIGIILLIALSAKNGILIVEFARDFRAEGNSIRDAAYEAGHVRLRPILMTSFAFVLGVMPLLFATGAGAQSRIALGAAVVFGMALNTLLATIYIPNFYELMQKFQENVLDRKKKK

SEQ ID NO: 48760 - protein, 677 aa, Bacteroides fragilis
MDNNSKKPNNKVNMPKFNLNWMYMIIALMLLGLYFANGSSSVSKNISYDEFQQYVRDGYVSKVIGYDDNSVEIYIKPQYVGTVFKQDSTRVGRNPMITTEAPSRENLDNFLQKEKEETHFDGSVSYDKKKDYFSAILWNVLPIVFLIALWIFFMRRMGSGASGGAGGVFNVGKSKAQLFEKGGSIKVTFKDVAGLAEAKQEVEEIVEFLKEPQKYTDLGGKIPKGALLVGPPGTGKTLLAKAVAGEANVPFFSLAGSDFVEMFVGVGASRVRDLFKQAKEKAPCIVFIDEIDAVGRARGKNPAMGGNDERENTLNQLLTEMDGFGSNSGVIILAATNRVDVLDKALLRAGRFDRQIHVDLPDLNERKEVFGVHLRPIKIDDTVDVDLLARQTPGFSGADIANVCNEAALIAARHGKKFVGKQDFLDAVDRIIGGLEKKTKITTEAERRSIALHEAGHASISWLLEYANPLIKVTIVPRGRALGAAWYLPEERQITTKEQMLDEMCATLGGRAAEDLFIGRVSSGAANDLERVTKQAYGMIAYLGMSEKLPNLCYYNNDEYSFQRPYSEKTAELIDEEVKRMVNEQYERAKQILSEHKEQHNELAQLLIDKEVIFAEDVERIFGKRPWASRSEEIMAANNKQENAVHPADGEDVDTTTPQATESQEGNTQQESAASQN

SEQ ID NO: 48761 - protein, 199 aa, Bacteroides fragilis
MVLFSEDHIQETRRRGRIEVICGSMFSGKTEELIRRMKRAKFARQRVEIFKPAIDTRYSEGDVVSHDSNSISSTPIDSSASILLFTSEIDVVGIDEAQFFDSGLIDVCNQLANNGVRVIIAGLDMDFKGVPFGPMPALCAIADEVSKVHAICVKCGQLASFSHRTVKNDKQVLLGETAQYEPLCRECYQRALQEDREKS

SEQ ID NO: 48762 - protein, 486 aa, Bacteroides fragilis
MNQKLLLGSALLVGMASTQQALARQKKAKEQTRPNVVFILADDLGYGDLSCYGQEKFETPNIDRLAQNGMRFTQCYSGTTVSAPSRSCLITGTHSGHTAIRGNKELAPEGQFPLPENSQTIFNDFRNAGYRTGAFGKWGLGYIGSAGDPYKQGIDQFYGYNCQLLAHSYYPDHLWDNDKRVDLPDNNLNVQYGKGTYSQDLIHSKALAFLDEAAKEKDQPFFMWYPTIIPHAELIVPEDSIIKKFRGKYPEKPYRGVEPGSPAFRKGGYCTQFYPHATFAAMVYRLDVYVGQIVQKLKDMGVYDNTIIIFSSDNGPHMEGGADPDFFNSNGIWRGYKRDVYEGGIRVPMIISWPGHVQPSTETDFMCSFWDLMPTFREVLNPKADTRNMDGVSILPLLQNRKGQKEHEYLYFEFLEMNGRQAVRKGDWKLVHMNIRGNKPYYELYNLASDPSEKYNVLNQYPEKADELKAIMKEAHIEDSNWPLFR

SEQ ID NO: 48763 - protein, 185 aa, Bacteroides fragilis
MSNTASLKKEYAERIAPALKSQFQYSSTMQIPVLKKIVINQGLGMAVADKKIIEVAINEMTAITGQKAVATISRKDIANFKLRKKMPIGVMVTLRRERMYEFLEKLVRVALPRIRDFKGIETKFDGKGNYTLGIQEQIIFPEINIDSITRILGMNITFVTSAQTDEEGYALLKEFGLPFKNAKKD

SEQ ID NO: 48764 - protein, 131 aa, Bacteroides fragilis
MTDPIADYLTRLRNAINAKHRVVEVPASNLKKEITKILFEKGYILNYKFVEDGPQGTIKVALKYDSVNKVNAIKKLERISSPGMRQYTGYKDMPRVINGLGIAIISTSKGVMTNKEAAELKIGGEVLCYVY

SEQ ID NO: 48765 - protein, 189 aa, Bacteroides fragilis
MSRIGKLPISIPAGVTVTLKDDVVTVKGPKGELSQYVNPAINVAIEDGHITLTENENAMLDNPKQKHAFHGLYRSLVHNMVVGVSEGYKKELELVGVGYRASNQGNIIELALGYTHNIFIQLPPEVKVETKSERNKNPLILLESCDKQLLGQVCSKIRSFRKPEPYKGKGIKFVGEEIRRKSGKSAGAK

SEQ ID NO: 48766 - protein, 172 aa, Bacteroides fragilis
MAGVNNRVKITNDIELKDRLVAINRVTKVTKGGRTFSFSAIVVVGNEEGIIGWGLGKAGEVTAAIAKGVESAKKNLTRVPVLKGTVPHEQSAKFGGAEVFIKPASHGTGVVAGGAMRAVLESVGVTDVLAKSKGSSNPHNLVKATIMALGEMRDARMIAQNRGISVEKVFRG

SEQ ID NO: 48767 - protein, 285 aa, Bacteroides fragilis
  MISC_FEATURE (44)..(44): X=any amino acid
RKQKGRDEKRNEFIETRTQQTSQNISAHHSFFDNGNHGEKQPAXEQTAPMQMDTEVSEDERARNAVRNLFARQAVISADAYRRLLKPSIETEFASSVKAQADDEAIRVFAENLRQLLLAPPLGQKRVMGIDPGFRTGCKVVCLDAQGNLVHNENIYPHPPVDKKTEAASKLRKMIEAYKIEAIAIGNGTASRETENFVTHQQFDRPVQVFVVSEQGASIYSASKTARDEFPDYDVTVRGAVSIARRLMDPLAELVKIDPKPIGVGQYQHDVDQTKLKKSLDQTVE

SEQ ID NO: 48768 - protein, 682 aa, Bacteroides fragilis
MKNKMSASMFQKEQVIESIRQSFVKLNPRMMIKKTIMFTVEVVTVIMLVVTLLSLFTPEYGTFGYNLCVFLILFVTLLFANFAEAIAEARGKAQADSLRKTREETPAKLVIGDKVQTVSSSKLKKGDVFVCEAGDTIPADGEIIEGLASIDESAITGESAPVIREAGGDKSSVTGGTKVLSDHIKVLVTQQPGESFLDKMIALVEGASRQKTPNEIALTILLAGFTLVFVIVCVTLIPFADYTSLEHPGTAISIAAILSLFVCLIPTTIGGLLSAIGIAGMDRALRANVITKSGKAVETAGDIDTLLLDKTGTITIGNRRATKFHSAPGVGPREFVTTCLLASLSDETPEGKSIVELGRESGVRMRSLQTAGARMIQFTAETKCSGVDLADGTQIRKGAFDAIRKITEAAGNKFPKEIEEVIGEISGNGGTPLVVCVDRKVTGVIELQDIIKPGIQERFERLRKMGVKTVMVTGDNPLTAKYIAEKAGVDDFIAEAKPEDKMEYIRKEQQSGKLVAMMGDGTNDAPALAQANVGVAMNSGTQAAKEAGNMVDLDNDPTKLIEIVEIGKQLLMTRGTLTTFSIANDVAKYFAIVPALFMVAIPELGALNIMNLHSPESAILSAVIFNAIIIPILIPLALKGVQYKPIGASALLRRNLLIYGLGGVIVPFVGIKLIDLVVSLFF

SEQ ID NO: 48769 - protein, 242 aa, Bacteroides fragilis
MKIALIGYGKMGKEIEKVALSRGHEIVSIIDINNQDDFESEAFKSADVAIEFTNPMVAYSNYMKAFKAGVKLVSGSTGWMAEHGDEVKELCNKGGKTLFWSSNFSLGVTIFSAVNKYLAKIMNQFPAYDVTMSETHHVHKLDAPSGTAITLAEGILENMERKSVWVKEEAHATNELPIHSIREGEVFGIHTIRYDSEADSISITHDAKNRGGFALGAVLAAEYTAAHEGYLGMSDLFPFLKD

SEQ ID NO: 48770 - protein, 349 aa, Bacteroides fragilis
METKKLKKNALFNPEGDTETRLRKMIGGNTTNLNDFNNMRYKWVSDWYRQAMNNFWIPEEINLTQDTKDYPHLTPAERTAYDKILSFLVFLDSLQSNNLPTLSEYITANEVNLCLHIQAFQECVHSQSYSYMLDSICSPEERNDILYQWKTDEHLLRRNTFIGNCYNEFQENRDGFALMKTLIANYILEGIYFYSGFMFFYNLSRNGKMSGSAQEIRYINRDENTHLWLFRNIILELKKEEPELFTPDKVKVYEEMMREGVKQEIAWGQYVIGDQIQGLNRQMISDYIHFLGNLRWSSLGYTPLYEDNRKEPESMHWVSQYSNANMVKTDFFEAKSTAYAKSTALEDDL

SEQ ID NO: 48771 - protein, 381 aa, Bacteroides fragilis
  MISC_FEATURE (373)..(373): X=any amino acid
IIMAKKEETISLIDTFSEFKELKNIDRTTMVSVLEESFRSVIAKMFGTDENYDVIVNPDKGDFEIWRNREVVADEDLTNPNMQISLTEAQKIDASYEVGEEVTDEVIFAKFGRRAILNLRQTLASKILELEKDSIYNKYIDKVGTIINAEVYQIWKKEMLLLDDEGNELLLPKTEQIPSDFYRKGETARAVVARVDNKNNNPKIILSRTSPVFLQRLFEMEVPEINDGLITIKKIARIPGERAKIAVESYDDRIDPVGACVGVKGSRIHGIVRELRNENIDVINYTSNISLFIQRALSPAKISSIRLNEEERKAEVFLKPEEVSLAIGKGGLNIKLASMLTEYTIDVFRELDETRRMKIFIWTSSEMKSTDGXSMLSRLLA

SEQ ID NO: 48772 - protein, 110 aa, Bacteroides fragilis
MKRPTIPLMLLIAASIFVFFLLNLLLGSVSIPIGSVWNILWGGTDESVIWQNIIWKSRVPQALTALVAGAGLSISGLQMQTVFRNPLAGPSVLGISSGASLGVAFVVLLS

SEQ ID NO: 48773 - protein, 1075 aa, Bacteroides fragilis
MPYFSESQLEQAFVELFKKEGYDYVYGESISRDTRDVILYDDLRLYLRKKYEADHITEDEISRAIARLETSDGGGVYAENVEALRLLQEGFSLKRTNPKLPHLHIYPIDYTEFGKNNLFKFVNQFAIDGEHHRIPDGIVFVNGLPLVVLEFKNAIKQNTTIENAFKQLTVRYRRDIPKLFRYNAFVVISDGVNNKIGSLFAPYEFFYGWHKVEATDSILDGAFDTMFTMMRGLFRKERLLDVLHNFIYLPDTPKDEDKIVCRYPQYFATTQLFNNILKHSRLNLDGDGKGGTYFGATGCGKSYTMLFLARQLMRSKKLSSPTIVLITDRTDLDDQLSKSFLNATKFIGDKTIVQVESREKLKEHLEKRTAGGVYLTTIQKFEESTGLLSNRANIICISDEAHRSQAGLGQKTTITEKGVKHHYGFAKYLRDSLPNATYVGFTGTPLDNTLDVFGPIVDRYTMTEAVADEITRKIVYEGRAAKIMIDSAKVKEIELFYDQCKQEGSGDYQIEESKKMMTRIDVILNDPDLLAKIARDMVEHYEKRIEEGSTVLGKAMIVCSSRSIAWNLYQAIIHLRPEWAEIKECIEGETLSEKERKEIKPMPRIAMVITRDTDNDSDELYNLLGNDEYRKTLDKQFKEEKSNFKIAIVVDMWITGFDVPSLDTMYCFKPLQMHTLIQTISRVNRVYPGKEKGLVVDYLGIKRQMNEALHQYGGNGEVDGPDLETVEEAVKVVKDELDVIKRMFHAFDWSGYFIGTPLEQLGILQTGAEYIQHTKKLETRFMRHCKKMKGAYDICCNSEHLTEAEDNDIHFMLAIRSIISKLTRGNAPDAVKMNKRVSEMLKDALMSEAVEEVTKIGVAADEEIDLLSSEYMQRLDQIPYKNTKVKLMEQLLKQVIESLRKINRQKGIDFTKRLEDIVKKYNDRSDDAALANDVIDDVVGEMVRLMEDVASERTAGNSIGLSFEEKAFFDILKSVATKYEFIENFPDETLTELAKQIKTMVEEQSDVSDWLNRPDLRATLKMNVIVLLARAGYPPKIRDEVFKEILEQAESFKRHSRPRPYAIDNDSYSSMVAEP

SEQ ID NO: 48774 - protein, 1030 aa, Bacteroides fragilis
MILFFRTPSKSVIAVESNHELNANDNNKLCWLFGEAMPESEENLQGCFVGPRREMITPWSTNAVEITQNMGLDGISRIEEYFPVKDENADHDPMLQRMYKGLNQNVFTTNRQPEAIIYIDDLEAYNEKEGLALSKEEMDYLKKVESDLGRRLTDSEVFGFAQINSEHCRHKIFGGTFIIDGVEQESSLFQMIKKTTQENPNKIISAYKDNVAFAEGPVVEQFAPADHSKPDFFRIKDIKSVISLKAETHNFPTTVEPFNGASTGTGGEIRDRMGGGKGSWPIAGTAVYMTSYPRTEEGREWEDILPVRKWLYQTPEQILIKASNGASDFGNKFGQPLICGSVLTFEHTENNETYAYDKVIMLAGGVGYGTQRDCLKGQPEAGNKVVVIGGDNYRIGLGGGSVSSVDTGRYSSGIELNAVQRANAEMQKRANNVVRALCEEDENPVVSIHDHGSAGHVNCLSELVEECGGLIDMSKLPIGDKTLSAKEIIANESQERMGLLIKEEAIEHVRQIAERERAPMYVVGETTGDHRFAFQQADGVRPFDLAVDQMFGSSPKTYMIDKTVERHYTMPEYETSKLHEYLTQVLQLEAVACKDWLTNKVDRSVTGKVARQQCQGEIQLPLSDCGVVALDYRGEKGIATSIGHAPQAALADPAAGSILSVSEALTNLVWAPLAEGLDSVSLSANWMWPCRSQEGEDARLYTAVKALSDFCCALQINVPTGKDSLSMTQKYPNGEKVISPGTVIVSAGGEVSDVKKVVSPVLVNDAKTTLYHIDFSFDNLKLGGSAFAQSLGKVGSEVPCVQDAEYFRDAFLAVQELVNKGLILAGHDISAGGLITTLLEMCFANVEGGLEISLDKMKETDIVKILFAENPGIVIQISDKHKDEVKKILEDAGVGFIKLGKPTDERHILVNKEGATYQFGIDYMRDVWYSSSYLLDRKQSMNGCAKKRFENYKMQPLEFAFMPGFKGKLSQYGITPERRTPSGIRAAIIREKGTNGEREMAYSLYLVGFDVKDVTMTDLISGRETLGGSI

SEQ ID NO: 48775 - protein, 85 aa, Bacteroides fragilis
MRKVARVRLTNQKEVNSYIPGEGHNLQEHSIVLVRGGRVKDLPGVRYHIVRGTLDTAGVAGRTQRRSKYGAKRPKPGQAAPAKKK

SEQ ID NO: 48776 - protein, 432 aa, Bacteroides fragilis
MIWNESIECMERDNLHKIQSIRLKKIVEYVYHNTPFYRKKMQELGITPDDINGIEDISKLPFTTKLDLRDNYPFGLCAVPMSQIVRIHASSGTTGKPTVVGYTRKDLSTWAECLSRAFTAYGAGRSDIFQVSYGYGLFTGGLGAHAGAENIGASVIPMSSGNTEKQITLMHDFGSTVLCCTPSYALYLADAINDSGFPREEFKLKAGAFGAEPWTESMRKDIETKLGIKAYDIYGLSEIAGPGVGYECECQNGTHLNEDHFFPEIIDPHTLQPVEPGQTGELVFTHLTKEGMPLLRYRTKDLTALHYEKCSCGRTLVRMDRILGRSDDMLIIRGVNVFPTQIESVILEMAEFEPHYLLTIDRKNNTDTMELKVEVRPDYYSDEINKMLALKKKLTGRLQSVLGLGVDVKLVEPRSIERSVGKAKRVIDNRKL

SEQ ID NO: 48777 - protein, 599 aa, Bacteroides fragilis
MDMKIEDKLVTSVISGLKALYGQDVPAAQVQLQKTKKEFEGHLTLVVFPFLKMSKKGPEQTAQEIGEYLKANEPAVAAFNVIKGFLNLTVASATWIELLNEIHADAQYGIVSADENAPLVMIEYSSPNTNKPLHLGHVRNNLLGNALANIVMANGNKVVKTNIVNDRGIHICKSMLAWQKYGKGETPESSGKKGDHLVGDYYVAFDKHYKAEVAELMEKGMSKEEAEAASPLMNEAREMLVKWEAGDPEVRALWQMMNNWVYAGFDETYRKMGVGFDKIYYESNTYLEGKEKVMEGLEKGFFFKKEDGSVWADLTAEGLDHKLLLRGDGTSVYMTQDIGTAKLRFADYPIDKMIYVVGNEQNYHFQVLSILLDKLGFEWGKSLVHFSYGMVELPEGKMKSREGTVVDADDLMAEMIATAKETSQELGKLDGLTQEEADDIARIVGLGALKYFILKVDARKNMTFNPKESIDFNGNTGPFIQYTYARIRSVLRKAAEAGIVIPEVLPANIELSEKEEGLIQMVADFAAVVRQAGEDYSPSGIANYVYDLVKEYNQFYHDFSILREENEDVKLFRIALSANIAKVVRLGMGLLGIEVPDRM

SEQ ID NO: 48778 - protein, 314 aa, Bacteroides fragilis
MNRISSLFGIQYPIIQGGMVWCSGWKLASAVSNAGGLGLIGSGSMYPDVLREHIRKCRAATDKPFGVNIPLMYPQIEEIMNIVVEEGVKIVFTSAGNPKTWTGWLKERGITVAHVVSSSKFAMKCEEAGVDAIVAEGFEAGGHNGREETTTLCLIPAVREATTLPLIAAGGIGTGEAIFALMALGAEGVQMGTRFALTDESSASDIFKEYCLRLNEGDTKLLLKKLAPTRLVTNSFRDRVEAAEGRGASAEELRELLGRGRAKKGIFEGDLEEGELEIGQVAALFRRRQSVDEVMKELLEGYRRASDKIRSAGL

SEQ ID NO: 48779 - protein, 221 aa, Bacteroides fragilis
MKPTIKKVQPVKVVAPFLNSQSESPVPLDALTDQEKVSDLYFLKGTVHQIAKPYLSINNCTFKQQIFSECQFKSAQLTDVRFENCDLSNVSFAGTTFYRVEFISCKLLGTGFPEATLNHVLMDHCYGQYINLSMVKMRTVRFSHCNFRNGSLNDSKLMPAAFDTCELLEADFSHTSLKGIDLRNSRIAGIQLNIADLKGAIVSSLQAIDLLPLLEVKIEDD

SEQ ID NO: 48780 - protein, 89 aa, Bacteroides fragilis
MAHKKGVGSSKNGRESQSKRLGVKIFGGEACKAGNIIVRQRGTEFHPGENIGMGKDHTLFALVDGTVNFKVGREDRRYVSIIPAEATEA

SEQ ID NO: 48781 - protein, 121 aa, Bacteroides fragilis
MIKDHPTELTYIYLYKMYAIVEINGQQFKAEAGQKLFVHHIQNAENGATVEFDKVLLVDKDGNVTVGAPTVDGAKVVCQIVSSLVKGDKVLVFHKKRRKGHRKLNGHRQQFTELTITEVVA

SEQ ID NO: 48782 - protein, 1110 aa, Bacteroides fragilis
MAIVSQTCPAQVAVEIKGTVRSVTGESLPGATVIVEGTARGVITDVEGRFTLKARKGQMLKVSFVGMKPRLIKASSGIMNIILQDNVQEIEGVVVTGYQQIKNRVFTGAAASVKLDEIKLNGVSDVSRMLEGRIAGLSIQNVTGSFGAAPRINIRGGASIMGNVQPLWVIDGAVYEDLVSLTLDQLASGDAVTLISSAVAGLNASDIEDIQVLKDASATSIYGARALNGVIVITTRSGKRNAPNRFSYSYELSMRSIPSYTNFDLLNSQESMSVYQEMGRKGYFSLQNTLYGRRSGVYYQMYKALNTIDPATGQYYLENTDDVKRAFMREREYANTNWFKELFTHRPIHTHTVTFSGGGENSAMYASIGFYDDRGWTLADHVKRITANIKNSFYWNEDKIKATISAQGNLRNQNSPGTIPQRRNTVIGTFERDFDINPFSYALSTSRTLRPHNADGEREFYRNNWAPFNILNEYENNYLKTEVLDLKLQGELSYRLNDHIEVKGLAMVRHAVTKSSHFIAEASNVVQAFRANETPYVARENIYLLKNKDDPMQLPGVALTHGGIFNKTETSLRSYLGRLALDYNRQLSEHNIRAFGFTEIRYADRSMNPFQGYGIQYDRGNQVFSNPLIFEKLANEGDTYFSLTERYERGVTLSGSATYGYAGKYIFNGVFNYEGANTAGKYSCSRWLPTWNIGAKWNLDQEKFMRKHTTISRLALRTSYGLTAKMNEQAVNSTTVFKHVMVNRTLLKDRENALRILHLENRDLTWEKMYELNFGLELGLFGNRISATFDVYQRNSFDLIDLIRTSGVGGQYYKYANFGDMRTRGVELAIQTQNILTDKFSWSTTVTISGMKQKITRLLNTPNTFDMVAGTGRGNIVGFPRGSLFSFNFQGLNSNGLPTFDFGLYPSNKGANSEISGADFLDAQYSKSYLIYHGPIEPQYIGGISNTFKYKNWEFSCFVTMQAGNKIRMNPSFDPAFADLNVFSKEYYNRWLNPGDERKTNIPVIPSQDLIRNIGKENIEKAYNTYNYSQNRVADGSFVRMKNISLGYRLPQRFLSHLKIKQMNVKVNVTNPFLIYSDRKLNGQDPEFYRSGGVSLPTPKQYTMTLNVEF

SEQ ID NO: 48783 - protein, 827 aa, Bacteroides fragilis
MDFLNINETVQSVIRISKGVAREYGNASYAPAHLLFALMHKEVGLRSFVESLGKDADYLREWAEVRIEEYPKAAGAGEIMPDPKVNELFEQADNVRIKWGLLEINPLCLLAAIATPEAGFSTDELRSFPIREREIHDLFTSGMGNMKKSVSTQTDLPGSEAPLWTAGAGNLDKYCTDKTALAADKKVYPIVCRDRETRMMMEILGRMGKPNVLIIGDAGVGKTALVDGLACSIIEGTVPQYLKDMTIYELDTGTLIAGATYKGEIEERLKGIIKELSAHGNAILFIDEIHTLIDPKSGNSGAASILKPELAKGNITVIGVTTVDEYRKLIEPDHALNRRFEVLQVSEPDLASTVNMIQAALERYESYHGVGVDVDSLPECVALAKRYVKERRLPDAAIDLIDRTLSAVKMINQSGEKDIKGLAEQLAAIEAAEDQPEAERTEKLRLVNFTMKNRLSPILLGMLSDGQNEPESSDYGEWMDYILGVLDRLRELTKEKIGKITSHEVAAVVSSSTGIPIGKIESGEKEKLLNMEDILRRRVVGQDNALKVLTDAIVESRSGMNKPGQPIGSFFLLGPTGTGKTELAKALAEALFNDEKAMIRFDMSEFKEEHSAALLLGAPPGYVGYEEGGVLVNRIRRQPYAVVLFDEIEKAHSSVYDIFLQIMDEGKLHDRLGKEGDFSNSIVLFTSNVGSEWLSKQINEGKNPSTTDLMEVMGSYFRPEFLARLSEIVPFSPINETMLVRIFEIQLKGVIALLEKQHIDIEITEKAKNLLATRGFTPKYGARQVAGTIRNYIRRPISKMIVAGTLAAGNTVVVDVADNGDIGWNVK

SEQ ID NO: 48784 - protein, 339 aa, Bacteroides fragilis
MKEIDWANLSFGYMKTDYNVRINFRNGAWGELEISSSEVLNLHMAATCLHYGQEAFEGLKAFRGKDGKVRIFRLEENAARLQSTCQGIMMAELPTERFKEAILKVVKLNERFIPPYESGASLYIRPLLIGTSAQVGVHPADEYMFVVFVTPVGPYFKGGFSTNPYVIIREYDRAAPHGTGIYKVGGNYAASLRANKKAHDLGYSCEFYLDAKEKKYIDECGAANFFGIKDNTYITPKSTSILPSITNKSLMQLAEDMGMKVERRPVPEEELSTFEEAGACGTAAVISPIERIDDLENGKSYVISKDGKPGPVCEKLYNKLRGIQYGDEPDTHGWVTIVE

SEQ ID NO: 48785 - protein, 722 aa, Bacteroides fragilis
MLGYVVAGFLASPHMPYTPSVMDVANIKTWADIGVIFLLFALGLEFSFKKIVKVGGTAVIAACTIIFCMILLGIAVGMGFGWQRMDSLFLGGMIAMSSTTIIYKAFDDLGLRKKQFTGLVLSILILEDILAIVLMVMLSTMAVSNNFEGTEMLGSIGKLLFFLILWFVVGIYAIPEFLKRCRKLMSEETLLIVSLALCFGMVAIAANTGFSAAFGAFIMGSILAETIEAESIDRLVKPVKDLFGAIFFVSVGMMVDPAMIIEYAVPIIVITLAVILGQAFFGTMGVMLAGQPLKTAMQCGFSLTQIGEFAFIIASLGLSLHVTSDFLYPIVVAVSVITTFLTPYMIRVAEPASNFVDRKLPESWRRFLMRYTTGTRTVNHESLWRKLLFALARILVVYSIVSISVITLSFRFVVPLLREHLPGIWGPLAGAVFTILCISPFLRAIMVKKNHSIEFITLWNDNRVNRGPLVSTVVFRVAVSVLFVMFVITRLFKASVGLMFGVALLLVILMILSRQLKKQSILIERKFFQNLRSRDIRAEYLGEKKPAYAGRLLSRDLHLTDFEIPGESAWAGKTLLELNLGKKYGVHVVSILRGKRRINIPGGSIRLFPMDKIQVIGTDDQLNIFAEEMSHVAVIDSGVFEKSEMTLKQLLIDTDSAFLGKTLRESGIRDKYHCLIAGVERGGEALMTPDVNVPFEEGDVVWVVGENEDVYRLIGQNCDRKR

SEQ ID NO: 48786 - protein, 367 aa, Bacteroides fragilis
MALQCGIVGLPNVGKSTLFNCLSNAKAQAANFPFCTIEPNVGVITVPDERLNKLAELVHPNRIVPTTVEIVDIAGLVKGASKGEGLGNKFLANIRETDAIIHVLRCFDDDNVTHVDGSVNPVRDKEIIDYELQLKDLETIESRIQKVQKQAQTGGDKAAKQAYDVLVQFKDALEQGKSARTVTFETKDEQKIAKELFLLTSKPVMYVCNVDEASAVNGNKYVDMVREAVKDEDAEILVVAGKTEADIAELETYEDRQMFLAEIGLEESGVARLIKSAYKLLNLETYFTAGVQEVRAWTYEKGWKAPQCAGVIHTDFEKGFIRAEVIKYEDFLQYGSEAAVKEAGKLGVEGKEYVVQDGDIMHFRFNV

SEQ ID NO: 48787 - protein, 128 aa, Bacteroides fragilis
MEKFSTRKRIRSFGYAWKGIRSFVSKEHNAWIHCTAIIIVTVAGFCFGITRNEWIAIILCFGVVLAAEGFNTAIERLVNLVSPERNPIAGDVKDIAAGSVLICAIVAAIVGIIIFMPYVLAVLLCNMG

SEQ ID NO: 48788 - protein, 365 aa, Bacteroides fragilis
MELCVICGGLKTITIMNKIIELLGNQAEYYLNHTCKTIDKSLIHVPSPDTIDKIWIDSDRNIQTLRSLQTLLGHGRLANTGYVSILPVDQDIEHTAGASFAPNPIYFDPENIVKLAIEGGCNAVASTFGNLGAVARKYAHKIPFVVKLNHNELLSYPNTYDQVLFGTVKEAWEMGAVAVGATIYFGSEQSRRQLVEIAEAFDYAHELGMATILWCYLRNNEFKKDGIDYHAAADLTGQANRLGVTIKADIVKQKLPTNNGGFKAIHFGKTDERMYTELTTDHPIDLCRYQVANGYMGRVGLINSGGESHGASDLKDAVVTAVVNKRAGGMGLISGRKAFQKPMNEGVELLHAIQDVYLDASVTIA

SEQ ID NO: 48789 - protein, 249 aa, Bacteroides fragilis
MRLGLLTAFILLLSFTTSCQYKEAQPHPAFKDSIVLVTPVKPQPIASKSQTAFYLDSIGLMNIAELDSTFIIRLMYATPDNFTGQLLYTDLKEAYLHPDAAKALLEAHLLLKAQYPSYRLIIYDAARPMSVQKKMWDVVKGTSKYMYVSNPSRGGGLHNYGLAVDISIADSLGHPLPMGTEVDYMDAASHITNEAKLVREGKITQQERENRILLRQVMKSAGFRALPSEWWHFNLCSRDEAKQKYKLIN

SEQ ID NO: 48790 - protein, 276 aa, Bacteroides fragilis
  MISC_FEATURE (265)..(265): X=any amino acid
IDGLRLQCPLNLLLRLRNMARSVFYYHLKRLKSSDKYAEEKDMIESIFHEHKSRYGYQRITAEMQNRGFTINHKIVRRLMGTMGLKSKIRKIRYRSYKGEIGKIALNIINRNFIAQAPNRKWATDVTQINIGSEKLYLSPILDMFNGEIISYNLSRSPNIEQIYDMLDKAFAKFDNLDGLIIHFDQGWQYQHYGYRQRLTQNHVLQSMSRKGNCLDNAMVENFFGIMKPELLYAEKFKSAEDFIKALDEYIDYYNNKRIKSRLYXKSPVQYRTLSI

SEQ ID NO: 48791 - protein, 394 aa, Bacteroides fragilis
MEIKLDYSDIKFRYDGKLRLLIIVGTRPEIIRLAAVINKCRRYFDCILAHTGQNYDYNLNGVFFHDLGLQAPDVYMDAVGDDLGSTMGNILNASYKLMSHLRPDAVLVLGDTNSCLSVISAKRLHIPIFHMEAGNRCFDECLPEETNRRIVDIISDMNLCYSEHARRYLNASGVAKERTYVTGSPMAEVLSENLSAIESSDIHARLGLRKGQYILLSAHREENIDTDKNFASLFEGINAMAEKYDMPVLYSCHPRSRNRLESSGFKLDSRVIRHAPLGFHDYNCLQMHAYAVVSDSGTLPEESSFFTSVGHSFPAVCIRTSTERPEALDKGCFILAGIDKASLLQAVDTAVEMNRNGDNGVPVPDYMDRNVSTKVVKLIQSYTGIVNKIVWRKS

SEQ ID NO: 48792 - protein, 402 aa, Bacteroides fragilis
MNILFLTLNRVSDLSERGIYTDLMREFICHGHRIYMVVPAERRFHESTSIKESCGAQILRVKTLNIQKSNVVEKGIGTLLLEMQYQCAIKRYWKDIRFDLILYSTPPITFNRVISSQKRRCKAKSYLLLKDIFPQNAVDLGMFSKRSLIYRLFRKKEKDLYQISDFIGCMSPANVDYVLTHNPEIKADRVEICPNSIKLLEKSLMASTVRKNILQKLHIPINKTLFIYGGNLGRPQGLIFLLDVIAANEERNDSYFIIVGSGTEYGKIKSWFEANHPDNSMLLSSLPKKEYDDLVKACDVGLIFLDKRFTIPNYPSRLLSYLENRMPVLLATDLNTDIGRIAERNGYGFWTENGNLDTFMEMVDSLSADREKIKVMGEKGYEYLKSNYTVERGYRMIMKHFE

SEQ ID NO: 48793 - protein, 202 aa, Bacteroides fragilis
MYQYVIKRLIDFVVVFFVLIIIWPVLLLVTLWLHFANKGAGAFFLQERPGRHGKIFKVIKFKTMTDERDAEGNLLPDDKRLTKVGKFVRSTSIDELPQLINVLKGDMSFIGPRPLLPQYLPLYNKEQARRHEVRPGITGWAQVNGRNAISWVRKFELDVWYVDHCSFFLDLKIFFLTIKKVFVREGISSDTAVTMEPFTGNN

SEQ ID NO: 48794 - protein, 612 aa, Bacteroides fragilis
MSHRTAGTIGTLVLAAVTVLSYVTAVHYFSAPRLADGTFATLIPYNFEWLPFTETLTFNLGILLDPISVMMLIVISTVSLMVHIYSFGYMKGERGFQRYYAFLSLFTMSMLGLVVATNIFQMYLFWELVGVSSYLLIGFYYTRPAAIAASKKAFIVTRFADLGFLIGILIYGYYGGTFGFTPDTVSMLSGGAGMLPLALGLMFVGGAGKSAMFPLHIWLPDAMEGPTPVSALIHAATMVVAGVYLVARMFPLFIEYAPDVLHLIGWVGAFTAFYAASVACVQSDIKRVLAFSTISQIGFMIVALGVCTSSDPHHGGLGYMAGMFHLFTHAMFKALLFLGAGSIIHAVHSNEMSAMGGLRKYMPITHITFLIACLAIAGIPPFSGFFSKDEILAACFQYSPTMGWVMTVIAAMTAFYMFRLYYGIFWGGTAPGQKSTSDDTSHVHTPHESPLTMTVPLIFLAAVTCVAGFIPFGHFISSNGESYTIHLETSVAVTSVVIAVASIVLATCMYLRQQQPLADKLAKRFAGLHRAAYHRFYIDEVYQFITHRIIFRCISTPIAWFDRHVVDGFFNFIAWGTHATSDEIRGLQSGRVQQYAYVFLLGALILILILIL

SEQ ID NO: 48795 - protein, 811 aa, Bacteroides fragilis
MKVMKFGGTSVGSVNSILSVKKIVESAGEPVIVVVSALGGITDQLISTSRMAAMGDAAYEGAYREIVRRHEEMVQGVIPAGETQTLLHYQVNELLDELKDIFQGIYLIKDLSPKTSDTIVSYGERLSSLIASRLIQGAVWFDSRTFIKTEKKHNKHTLDTELTNRLVREAFKEIPRVSLVPGFISSDKVSGDVTNLGRGGSDYTAAVIAAALDADSLEIWTDVDGFMTADPRVISTAYTISELTYVEATELCNFGAKVVYPPTIYPVCHKNIPILIKNTFNPDARGTVIKQHVDHTKSKAIKGISSINDTSLITVQGLGMVGVIGVNYRIFKALAKNGISVFLVSQASSENSTSIGVRNADADLACEVLNEEFAKEIEMGEISPIQAEKNLATVAIVGENMKHTPGIAGKLFGTLGRNGINVIACAQGASETNISFVVDSKSLRKSLNVIHDSFFLSEYQVLNLFICGVGTVGGSLVEQIRQQQKKLMVENGLKLHVVGIIDATKAMFSRAGFDLANYREELKEKGVDSSLDTIRDEIIGMNIFNSVFVDCTASPDIASLYKDFLQHNISVVAANKIAASSAYENYRELKLIARQRGVKYLFETNVGAGLPIINTINDLIHSGDKILKIEAVLSGTLNYIFNKISADVPFSRTIKMAQEERYSEPDPRIDLSGKDVIRKLVILAREAGYKLEQEDVEKNLFVPNDFFEGSLEDFWKKVPSLDADFEARRKVLESENKHWRFVAKLENGKASVGLQEVDRNHPFYGLEGSNNIILLTTERYKEYPMMIQGYGAGAGVTAAGVFADIMSIANV

SEQ ID NO: 48796 - protein, 403 aa, Bacteroides fragilis
MPMTIKPLPQEFYDEIENLSFREIAYRVADAFFGEDVPAETLKEIVYDTLNFDVPLVPVKENIYSLELFHGPTLAFKDVGGRFMARLLGYFIRKEGRKQVNVLVATSGDTGSAVANGFLGVEGIHVYVLYPKGKVSEIQEKQFTTLGRNITALEVDGTFDDCQALVKAAFMDHELNERLLLTSANSINVARFLPQAFYYFYAYAQLKKAGRAENAVICVPSGNFGNITAGLFGKKMGLPVRRFIAANNKNDIFYQYLQTGQYNPRPSVATIANAMDVGDPSNFARVLDLYGGSHAAIAAEISGTTYTDEQIRESVKACWQQTGYLLDPHGACGYRALEEGLQPGETGVFLETAHPAKFLQTVESIIGTEVEIPAKLRAFMKGEKKSLPMTKEFADFKSYLLGK

SEQ ID NO: 48797 - protein, 407 aa, Bacteroides fragilis
MERATFSLLFYIRRTKLNRHGEAPILVWITVNGVRADASIKKTILPQLWDADKGRALDKKREGKELNLYLDAIHMRILKIQRDLEIEGANVTASKVLDRYLRKGGFVDRSLFDVFREHNDKCKKLVGISMAAATAQRYETTLQHTQDFVWDTYRKKFFFLSEMSQQFVEDYMFWLLTKKGCSHNTSTKYLKNFKKIILLSLAKGWLKKDPFAEYKFTLEAVDRDFLEDSEIQRILSKEIAISRLAQVRDTFIFCCFTGLAFSDVKQLKQEDIVEDSNGVKWIRKERQKTKIICNIPLRDIPLQILKKYENNPQCVIKGVLLPILCNQKMNAYLKELGDICGVNKTITMHTARHTFATYALANGVSMESVAKMLGHTNLQMTRHYARTLDRIVVKELFQIKDNFEMAN

SEQ ID NO: 48798 - protein, 362 aa, Bacteroides fragilis
MKPYLLLTPGPLTTSETVKETMMTDWCTWDEDYNLHIVEALRKELVGIATRNTEEYTSVLLQGSGTYCVEAVIGAAIGKNDKLLICSNGAYGDRMGNIAEYYHIDYELLAFDETEQVSVDYVDDYLSNNSDVTHVAFVHCETTTGILNPLKELAHVVKMHGKKLIVDAMSSFGGIPMDVSELGIDFLISSANKCIQGVPGFGFIIARRSELVRCKGVARSLSLDIYDQWETMEKGHGKWRFTSPTHVVRAFKQALTELIEEGGVEARHRRYCENHRVLVEGMRSLGFVTLLDDAIQSPIITSFLYPKTGFDFKAFYTALKSKGFVIYPGKISKADTFRIGNIGDVHPEDFARLVEVIRETEY

SEQ ID NO: 48799 - protein, 407 aa, Bacteroides fragilis
MNLVERFLKYVSFDTQSDELTRLTPSTPGQMVFAEYLKSELESLGLEDITLDENGYLFATLPANTEKELPVIGFIAHMDTSPDMSGKNVTPRIVEKYDGSDIVLCAEENIVLSPSQFPELLDHKGEDLIVTNGKTLLGADDKAGIAEIVSAVVYLQEHPEIKHGKIRIGFNPDEEIGEGAHKFDVQKFGCEWAYTMDGGEVGELEFENFNAAAAKITFKGRNVHPGYAKHKMINSIRIANQFITMLPRHETPEHTSGYEGFYHLIGIQGDVEQSTVSYIIRDHDRNKFEDRKKEIEHLVNKINAEFGEGTATLELRDQYYNMREKIEPVMHIIDTAFAAMEAVGVKPNVKPIRGGTDGAQLSFKGLPCPNIFAGGLNFHGRYEFVPIQNMEKAMKVIVKIAELVASK

SEQ ID NO: 48800 - protein, 286 aa, Bacteroides fragilis
MAAVTVMIWGTTFVATKVLIKYGLSPVDILFYRFLLAYICIWFFSPRVLLAKSWQDELRFVGLGLCGGSLYFVAENTALGMTLASNVSLIICTTPILTALLAPFFYKGDKLKARLIGGSLMALIGVGLVVFNGSFILQLSPAGDILTLIAALMWAFYCLLLRRMNTHYPTLFITRKVFFYGLVTLLPLFLVYPLQTDIHILFRPVVALNLLFLGVIASMLCYIMWNTAVKQLGVVCATSYIYVVPLITLLTSAIVIDETITIVALLGSALILSGVYIAERGVNLKK

SEQ ID NO: 48801 - protein, 186 aa, Bacteroides fragilis
MVDVKTIIEESQEKMDMAVMYLEEALAHIRAGKASTRLLDGIRVDSYGSMVPISNVAAVTTPDARSITIKPWDKSMFRVIEKAIIDSDLGIMPENNGEIIRIGIPPLTEERRKQLAKQCKAEGETAKVSIRNARRDGIDALKKAVKDGLAEDEQKNAEAKLQKVHDKYIAKIEEMLAEKDKEIMTV

SEQ ID NO: 48802 - protein, 360 aa, Bacteroides fragilis
MKVSIIVPCYSVASKLPRCVHNLLAQTFTDWELILIDDGSTDNTWDICNSFTKNNAHIHAVHKENGGVSSARNTGIEIAKGEFITFIDSDDYVKPDYLQKLVEGQEADLVLCGFRSSTGIDFTPEPQYLIGDDLSKNIQAIVENDYLLYSPWCKLFRRDIIQKHQHRFDPEIRLGEDTIFCYKYLLYCSSIKVVASNSYFYDGVWGGYKKYVLTRQEVEYLDKAEITTLHDINQHFNCRIDLTYRGYHVAMLKGLYEKFRDYDTFEMYTRTHDVLPPEHFFANHKLSYIFWGIVELETLYVDKEYCAGKLFMQRLHHFFTIPTNQLLSYSYKMRLIHYLVKSKHYTMAHVLLIFLSILKH

SEQ ID NO: 48803 - protein, 820 aa, Bacteroides fragilis
MNISYNWLKEYVNFDLTPDEVAAALTSIGLETGGVEEVQTIKGGLEGLVIGEVLTCVEHPNSDHLHITTVNLGNGEPTQIVCGAPNVAAGQKVVVATLGTKLYDGDECFTIKKSKIRGVESIGMICAEDEIGIGTSHDGIIVLPEDAVPGTLAKDYYNVKSDYVLEVDITPNRADACSHYGVARDLYAYLVQNGKQAALTRPSVDAFAVENHDLDIKVTVENSEACPRYAGVTVKGVTVKESPEWLQNKLRIIGLRPINNVVDITNYIVHAFGQPLHCFDANKIKGGEVIVKTMPEGTTFVTLDGVERKLNERDLMICNKEDAMCIAGVFGGLDSGSTEATTDVFLESAYFHPTWVRKTARRHGLNTDASFRFERGIDPNITIYCLKLAAMMVKELAGGTISSEIKDVCAAPAQDFIVELTYEKVHSLIGKVIPAETIKSIVTSLEMKIMDETAEGLTLAVPPYRVDVQRDCDVIEDILRIYGYNNVEIPSTLKSSLTTKGDCDKSNKLQNLVAEQLVGCGFNEILNNSLTRAAYYDGLESYPSKNLVMLLNPLSADLNCMRQTLLFGGLESIAHNANRKNADLKFFEFGNCYHFDAEKKNPEKVLAPYSEDYHLGLWVTGKMVSNSWAHADENTSVYELKAYVENIFKRLGLDLHSLVVGNLSGDIYSTALTVNTKGGKRLATFGVVTKKMLKAFDVDNEVYYADLNWKELMKAIRSVKVSYKEISKFPAVKRDLALLLDKKVQFAEIEKIAYETEKKLLKEVSLFDVYEGKNLEAGKKSYAVSFLLQDESQTLNDKMIDKIMSKLVKNLEDKLGAKLR

SEQ ID NO: 48804 - protein, 370 aa, Bacteroides fragilis
MADNNSILEKLDGLVARFEEVSTLITDPAVIADQKRYVKLTKEYKELDDLMKARKEYMQLLANIEEAKDILSNESDADMREMAKEEMDNSQERLPVLEEEIKLLLVPADPQDGKNAILEIRGGTGGDEAAIFAGDLFRMYAKFCETKGWKMEVSSANEGAAGGYKEIICSVTGDNVYGTLKYESGVHRVQRVPATETQGRVHTSAASVAVLPEAEEFDVVINEGEIKWDTFRSGGAGGQNVNKVESGVRLRYIWKNPNTGVAEEILIECTETRDQPKNKERALARLRTFIYDKEHQKYIDDIASKRKTMVSTGDRSAKIRTYNYPQGRITDHRINYTIYNLAAFMDGDIQECIDKLTVAENAERLKESEL

SEQ ID NO: 48805 - protein, 540 aa, Bacteroides fragilis
MPPRLIVFIGDPGWIVCRELFDDVWKDVPVIITNARDRLPATLDILLSHEELTESNTVPAYEWRKGYNVTTLGQVYYVKETIGLMRQLMPDMKRLAFISDDRYISEAVRGDVEQAMTGSFPELAFEQLSTRNISTEMLLDTLKSYDKTTGLIYYSWFETHNQDDNNYLFDHIQEIITRFVHSPLFLLAPEDLSNNTFAGGYYVSVESFGDSLLQLIHRVLEGEFPRDIPPALGGKPAAYLCYPALQSYDIPVSLYPKEAVYINLPVSFFEQYKKEILMTVVLLLVVVSAVGYYIHILKRAHQRMKEAQLKAEEANQLKSAFLANMSHEIRTPLNAIVGFSNLLSMVEDKEEMLEYAGIIETNTELLLQLINDILDMSKIESGMYDFHVTQVDANQLMSEVEQVAHLRIRTDEVSLSFAERLPQCVFHTDKNRLIQVLTNLVVNAIKFTSQGEIQIGYRLQDAHTLYFYVSDTGCGMSAEQCEHVFERFVKYNTFIQGTGLGLSICKMIIEKLGGEIGVQSESGKGSVFWFTLPYRASASL

SEQ ID NO: 48806 - protein, 344 aa, Bacteroides fragilis
MRTEIATLGEFGLIKHLTEGIKLENESSKYGVGDDAAVLSYPADKQVLVTTDLLMEGVHFDLTYTPLKHLGYKSAVVNFSDIYAMNGTPKQITVSLALSKRFSVEDMDDFYSGLRLACQQYKVDIVGGDTTSSLTGFAISITCIGEADKDKVVYRNGAKDTDLICVSGDLGAAYMGLQLLEREKAVFKGEQDAQPDFSGKEYLLERQLKPEARKDIIEKLSAANIVPTSMMDISDGLSSELLHICTQSKAGCRVYEEHIPIDYQTAVMAEEFNMNLTTCAMNGGEDYELLFTVPIADHEKVSEMEGVRLIGHITKPELGCALITRDGQEFELKAQGWNPLQENK

SEQ ID NO: 48807 - protein, 426 aa, Bacteroides fragilis
MKRDDFIFDIIEKEHQRQLKGIELIASENFVSDQVMEAMGSCLTNKYAEGYPGKRYYGGCEVVDQSEQIAIDRLKEIFGAEWANVQPHSGAQANAAVFLAVLNPGDKFMGLNLAHGGHLSHGSLVNTSGIIYTPCEYNLKQETGRVDYDQMEEVALREKPKMIIGGGSAYSREWDYKRMREIADKVGAILMIDMAHPAGLIAAGLLDNPVKYAHIVTSTTHKTLRGPRGGVIMMGKDFPNPWGKKTPKGEIKMMSQLLDSAVFPGIQGGPLEHVIAAKAVAFGECLQPEYKEYQKQVQKNAAVLAQALIDRGFTIVSGGTDNHSMLVDLRSKYPTLTGKVAEKALVSADITVNKNMVPFDSRSAFQTSGIRLGTPAITTRGAKEDLMLEIAEMIETVLSNVENEEVIAQVRARVNKTMEKYPIFAY

SEQ ID NO: 48808 - protein, 501 aa, Bacteroides fragilis
MMNQELLMSPNRLVTFLQKPAAEFTKADIINYIQQNEIRMVNFMYPAADGRLKTLNFVINNASYLDAILTCGERVDGSSLFPFIEAGSSDLYVIPRFRTAFVDPFAEIPTLVMLCSFFNKDGEPLESSPEYTLHKACKAFTDVTGMEFQAMGELEYYVISEDDGLFPATDQRGYHESGPYAKFNDFRTQCMSYIAQTGGQIKYGHSEVGNFMLDGKVYEQNEIEFLPVNAENAADQLMIAKWVIRNLAYQYGYDITFAPKITVGKAGSGLHIHMRMMKDGQNQMLKDGALSDTARKAIAGMMQLAPSITAFGNTNPTSYFRLVPHQEAPTNVCWGDRNRSVLVRVPLGWSAQTDMCALANPLESDSNYDTTQKQTVEMRSPDGSADLYQLLAGLAVACRHGFEIENALAIAEQTYVNVNIHQKENADKLKALAQLPDSCAASADCLQKQRTVFEQYNVFSPAMIDGIISRLRSYNDATLRKDIQDKPEEMLALVSKFFHCG

SEQ ID NO: 48809 - protein, 159 aa, Bacteroides fragilis
MKIKVGFGFDVHQLVEGRELWLGGILLEHEKGLLGHSDADVLVHAICDALLGAANMRDIGYHFPDNAGEYKNIDSKILLKKTVELIATKGYQIGNIDATICAERPKLKAHIPSMQQVLAEVTGIDADDISIKATTTEKLGFTGREEGISAYATVLINRV

SEQ ID NO: 48810 - protein, 204 aa, Bacteroides fragilis
MKIIAVGMNYARHNEELGHTLENKEPVIFMKPDSAILKDGKPFFIPDFSNEVHYETELVVRINRLGKNIASRFAHRYYDAVTVGIDFTARDLQRRFREVGNPWELCKGFDSSAAIGTFVPVEQLADVQNLHFHLDIDGKTVQQGHTADMLFRIDDIIAYVSRFVTLKIGDLLFTGTPVGVGPVSIGQHLEGYLETEKLLDFYIR

SEQ ID NO: 48811 - protein, 549 aa, Bacteroides fragilis
MSLEKERIEKEHIEEMNQAKLRFFTNVSHEFRTPLTLIISQVELMLQKNTIPPSLHNSIFRIRKHAQQMKLLISELLDFRKFDQNYIQLKLSEQSLNTFLEEVYLSFSAYASQKSISYHLKLLEQDISIWIDDWQMRKVLFNLLSNAFKHVPDKGEISILTSTTPDQVVIAVKDSGNGISKEEQERIFDRFYQADNRNKALHVGTGIGLALTKSIIQLHHGTIEVESELNEGSCFIVKLPKNRDCFEKDTEVVFLESPEKEPMVQENTIPDENFMKKDDSTFETPLIDEREGKRKVLLVEDNVELLQVLKEIFSSLYQVVTAANGEEGLKQAFAEVPDLIVSDVMMPVMTGTEMCLKIKNNINLCHIPVVLLTALDTVDQNIEGLRRGADDYITKPFNAKILITRCNNLIRNRLLMQSRFAKDQILEINLLAANPIDKGFLDRVIKVVDKHIDNEDFDIGMLCQELGMGRTLLHTKFKALTGMTPNEFILNHRLKIASLMLKNEPYLQVAEISDRLGFGSPRYFSRCFKNQYNVTPMEYRKGAKQENLK

SEQ ID NO: 48812 - protein, 305 aa, Bacteroides fragilis
MDELRGLIGSGRVTSPYLHIGGGSNLLFTKDYEGTILHSRIGGVEVVAETDDDIVVRVGAGVVWDDFVDYCVQRHWYGVENLSLIPGEVGASAVQNIGAYGVEVKDLIVRVETLNIEGKEHVYDVTECGYSYRDSIFKRPENKSVFVTYVSFRLSKREHYTLDYGTIRRELEKYPGVTLDVVRRVIIAIREEKLPDPRVMGNAGSFFMNPIVGREQFEALQAEYPQMPFYEIDTDRVKIPAGWMIDQCGWKGKALGPAAVHDKQALVLVNRGGAKGADVIALSDAVRASVRAKFGIDIHPEVNFI

SEQ ID NO: 48813 - protein, 374 aa, Bacteroides fragilis
MKFIVSSTALFSHLQAVSRVINSKNALPILDCFLFQLEDGTLSVTVSDSETTMVTSVEVNESDSNGKFAVAAKTLLDALKEIPEQPLTFDIKPDTYEITVQYQNGKYSLMGQNADEFPQSATLGDNAVRVEMEAQILLGGINRSVFATADDELRPVMNGIYFDITTEDITMVASDGHKLVRCKTLAARGNERAAFILPKKPATLLKNLLPKESGMVVIEFDERNAVFTLESYRMVCRLIEGRYPNYNSVIPQNNPHKVTVDRMQLMGALRRVSIFSSQASSLIKLRMQENQIVVSAQDIDFSTSAEETQVCQYAGAAMSIGFKSTFLIDILNNISADEVVIELADPSRAGVIIPVEQEENEDLLMLLMPMMLND

SEQ ID NO: 48814 - protein, 517 aa, Bacteroides fragilis
MSNQLEKVKELIELRAQARLGGGEKAIEKQHAKGKYTARERIAQLLDEGSFEELDMFVQHRCTNFGQEKKHFLGDGVVTGYGTIEGRLVYVFAQDFTVFGGSLSETMAQKICKVMDMAMKMGAPVIGINDSGGARIQEGINALSGYAEIFQRNIMASGVIPQISGIFGPCAGGAVYSPALTDFTLMTEGTSYMFLTGPAVVKTVTGEDVSQEDLGGASVHASKSGVTHFTAETGEEGLAIIRKLLSFIPQNNLEEAPLVNCTDPIDRMDDLLNEIIPDSPNKPYDMYEVIGAIIDNGEFLEVQKDYAKNLIIGFARMNGQSVGVVANQPKYLAGVLDSNASRKGARFVRFCDAFNIPLVTLVDVPGFLPGTGQEYNGVILHGAKLLYAYGEATVPKVTVTLRKSYGGSHIVMSCKQLRGDMNYAWPTAEIAVMGGAGAVAVLYAKEAKDQENPAQFLADKEAEYTKLFANPYNAAKYGYIDDVIEPRNTRFRVIRALQQLQTKKLTNPAKKHGNIPL

SEQ ID NO: 48815 - protein, 374 aa, Bacteroides fragilis
MNLFDVYPLFDINIIKGKGCHVWDENGTEYLDLYGGHAVISIGHAHPHYVDMISKQVATLGFYSNSVINKLQQQVAERLGKISGYEDYSLFLINSGAEANENALKLASFHNGRTKVISFGKAFHGRTSLAVEATDNPKIIAPINANGHITYLPLNDIEAAKAELAKEDICAVIIEGIQGVGGIKIPTPEFLQELRKACTEHGTILILDEIQSGYGRSGKFFAHQYAGIKPDIITVAKGIGNGFPMAGVLISPMFTPVYGMLGTTFGGNHLACSAALAVMDVIEQENLVENAANIGSYLLEELKKFNEIKEVRGCGLMIGMEFDQPVKEIRSRLIHEQKVFTGASGTNVIRLLPPLCLSKEEADEFLARLRKVLG

SEQ ID NO: 48816 - protein, 463 aa, Bacteroides fragilis
MKRHLIIYSLLFLLFCVLSCRNKQAVATEESSAHDLEQIKDSGELVVLTLYSSTSYFIYRGQDMGFQYELSEQFAKSLGVKLRIEVAKNVPELIRKLLNGEGDIIAYNIPITKELKDSLIYCGEEVITHQVIVQRTNGKTKPLKDVTELVGKNIYVKPGKYYERLVNLNKELGGGILIHQVTNDSITAEDLITQVAQGKIPYTVADNDVAKLNATYYPNLNTSLSISFDQRASWAVRKDCPQLAAAADEWHKQNMTSPAYTASMKRYFEISKAMPHSPILSLKEGKISHYDNLFKKYAQEIGWDWRLLASLAYTESNFDTTAVSWAGAKGLMQLMPATARAMGVPPGKEQNPEESIKAAVKYIAATDRSLSMVPDKQERIKFILASYNAGLGHIFDAIALADKYGKNKTVWTDNVENYILLKSNEEYFTDPVCKNGYFRGIETYNFVRDINSRYESYKKKIKS

SEQ ID NO: 48817 - protein, 762 aa, Bacteroides fragilis
MNKIISKEHFSEKVFKLVIEAPLIAKSRKAGHFVIVRVGEKGERMPLTIAAADPKAGTITLVVQEVGLSSTRLCELNEGDYITDVVGPLGQATHIENFGTVVCAGGGVGVAPMLPIVQALKAAGNRVITVLAGRSKELIILEKEMRESSDEVIIMTDDGSYGRKGLVTEGVEEVIKREKVNKCFAIGPAIMMKFVCLLTKKYEIPTEVSLNTIMVDGTGMCGACRITIGGKTKFVCVDGPEFDGHQVDFDEMLKRMGAFKTIEREELHKLDECEATKVIDENGRTAPWREALRKAIKAKDRANIERCQMNELDPEYRSHSRKEEVNQGLTKEQAVTEAQRCLDCANPGCMTGCPVGIDIPRFIKNIERGEFLEAAKTLKETSALPAVCGRVCPQEKQCESKCIHLKMGKEAVAIGHLERFAADYERESGQISVPEVGEKNGIKVAVIGSGPAGLSFAGDMAKYGYDVTVFEALHEIGGVLKYGIPEFRLPNKIVDVEIENLAKMGVTFIKDCIVGKTISVEQLEEEGFKGIFVASGAGLPNFMNIPGENSINIMSSNEYLTRVNLMDAASPDSDTPVAFGKNVAVIGGGNTAMDSVRTAKRLGAERAMIIYRRSEEEMPARLEEVKHAKEEGIEFLTLHNPIEYLADEQGRVKQVILQKMELGEPDASGRRSPVPIPGATETVDIDLAIVSVGVSPNPIVPSSIKGLELGRKGTITVNDQMQSSIPTIYAGGDIVRGGATVILAMGDGRRAAAAMNEQLSSK

SEQ ID NO: 48818 - protein, 341 aa, Bacteroides fragilis
MSLFKEKILLITGGTGSFGNAVLRRFLDSDIREIRIFSRDEKKQDDMRHHLQNPKVKFYIGDVRDKRSVDGIMNGVDYIFHAAALKQVPSCEFFPTQAVRTNVLGTENVLDSAIAHGVKNVVVLSTDKAAYPINAMGISKAMMEKVAIAKGRQLGNCGGTTICCTRYGNVMASRGSVIPLWVEQIKKCNPITITDPNMTRFMMTLDDAVDLVLYAFQHGKNGDLFVQKAPAATLDVLADALKSLYHSNADVKVIGTRHGEKLYETLVTREEMSKAEDMGDYYRIPCDTRDLNYDKFFVEGSEEVSKIEDYHSHNTRRLDVEGMKELLLKLNFIREDLGLEK

SEQ ID NO: 48819 - protein, 829 aa, Bacteroides fragilis
MAKKKSDKEAEQKPASTKKYVAFFRNETIHFVIGLVLVIFSVYLLLAFTSFFFTGAADQSIIDSGNAQDLAAVNNHVKNYAGSRGAQLASYLINDCFGISSFFILIYLAVAGLKLMRVRVVRLWKWFIGCSLLLIWFSVFLGFVFMDHYQDSFIYLGGLHGYNISNWLISQVGIPGVWLILLATGICFLIYMSARTIIWLRKLFSLSFLKRKQKEELAEVTQAPQSHEYDNPKPQEVEFDVNRTFRQEVPVKKVETTVVSETPVESSTEMPVTPEDRDVTSDGDVTMTFEQTAPDPVPPFRAASADKEPEFEIEPAADDENYQGAETEPYNPKLDLENYHFPTIDLMKHYENSEPTINMEEQNANKDRIINTLRSFGIEISTIKATVGPTVTLYEITPEQGVRISKIRGLEDDIALSLSALGIRIIAPIPGKGTIGIEVPNSNPKIVSGQSIIGSKKFQESTYDLPIALGKTITNEVFMVDLCKMPHVLVAGATGQGKSVGLNAIITSLLYKKHPAELKFVLVDPKKVEFSIYSVIEHHFLAKLPDGEDAIITDVTKVVQTLNSVCVEMDSRYDLLKMAHVRNIKEYNEKFINRRLNPEKGHKFMPYIVVVIDEFGDLIMTAGKEIELPIARIAQLARAVGIHMIIATQRPTTNIITGTIKANFPARIAFRVSAMMDSRTILDRPGANQLIGRGDMLFLQGADPVRVQCAFIDTPEVEEITKYISRQQGYPTAFFLPEYVSEDSGSDLGEVDMGRLDPLFEEAARLIVIHQQGSTSLIQRKFSIGYNRAGRLMDQLEKAGIVGPSQGSKARDVLCVDENDLEMRLNNIQ

SEQ ID NO: 48820 - protein, 370 aa, Bacteroides fragilis
MELLLGIVIVVTCWMVVRIIRSSKNQEGYKRWRAGNYASENPYAKEKASGPLSQGLFSKRVRTTGVRRFDDGAIRWCANLLATEESRLREVLDYIPRQYTCFHVRKRSGGFRYISAPAGDFRSMQQTIYHRILLLANIHPAVTGFCPGKSVSDNARVHLGRKNVLKVDLHDFFPSIRSPRVRAVFREMGYSRSIAKVLAELCCLRCCLPQGAPTSPALSNIIAYPMDKKMMALAGEYGLVYTRYADDLTFSGDYLPKDEVLVRIHRIIREEGFTMNVKKTRFLSEHKRKIITGVSVSSGKKMTLPKVKKREIRKNVHYVLTKGLVGHQEHIGSTDPVYLKRLLGSLCYWRSIEPDNRYVSDSITALKRLM

SEQ ID NO: 48821 - protein, 330 aa, Bacteroides fragilis
MPSERKVHKRAIPRLGGVSFFPTILLSSCGVFALRILMGYDVPALRAVYLLPECLFLVCGMTLLYLTGIADDLVGVRYRQKFVIQIICASFFPLAGLWINNFYGLFGLYALPAWIGMPFTVLLVVFVTNAINLIDGIDGLASGLSSVALLVFGFLFMQKELWTYSMLAFATFGVLVPFFYYNVFGSAERARKIFMGDTGSLTLGYVLSFLAIKYSQYNPDVTPYTEGAFVIAFSTLIVPAFDVIRVVMVRVRSGKSPFEPDKNHIHHKFLAMGFTPRKAMITILLISCAFSAVNILLVPVIDNTVMLLADIAVWVGLNLWFDRVRDKKQK

SEQ ID NO: 48822 - protein, 253 aa, Bacteroides fragilis
MSILSKNRIKYIRSLELKKIRKEEKVFLAEGPKLVGDVLGYFPCKLLIATSDWLEEHPAVQAAEVIEVTSEELSRTSLLKTPQQVLALFEQPEYEIDMEAIRNSLCLALDDIQDPGNLGTIIRLADWFGIEHIFCSPNTVDVFNPKTIQATMGGIARVKVYYTALPDLMHSLGNVPVYGTLLDGENMYEQPLSKNGIIIMGNEGNGISPEIEKLVNRKLYIPNYPAERETSESLNVAIATAIVCAEFRRQAAL

SEQ ID NO: 48823 - protein, 845 aa, Bacteroides fragilis
MLEQDRIIKINIEEEMKSSYIDYSMSVIVSRALPDVRDGFKPVHRRILYGMMELGNTSDKPYKKSARIVGEVLGKYHPHGDSSVYFAMVRMAQEWAMRYPLVDGQGNFGSVDGDSPAAMRYTEARLNKLGEEMMQDLYKETVDFEPNFDNTLMEPKVMPTRIPNLLVNGASGIAVGMATNMPPHNLSEVIDACEAYLDNKDVTVEELMEYVKAPDFPTGGYIYGISGVREAYLTGRGRVVMRAKAEIESGQTHDKIVVTEIPYNVNKAELIKAIADLVNEKRIEGISNANDESDREGMRIVIDIKRDANASVVLNKLYKMTALQTSFGVNNVALVNGRPKMLNLRDLIVYFVEHRHDVVIRRTQFDLRKAKERAHILEGLIIASDNIDEVIRIIRAAKTPNDAISGLMERFNLSEIQARAIVEMRLRQLTGLMQDQLHAEYEEVMKQIAYLESILADDEVCRKVIKDELLEVRAKYGDERRSEIVYSSEEFNPEDFYADDQMIITISHMGYIKRTPLTEFRAQNRGGVGSKGTETRDEDFVEHIYPATMHNTMMFFTQKGKCYWLKVYEIPEGTKNSKGRAIQNLLNIDSDDAVNAYLRVKSLNDQEYINSHYVLFCTKNGVIKKTSLEQYSRPRQNGVNAITIREDDRVIEVRMTNGNNEIIIANRNGRAIRFHEAAVRVMGRTATGVRGITLDDDGQDEVIGMICIKDLETESVMVVSEQGYGKRSDIEDYRKTNRGGKGVKTMNITEKTGKLVTIKSVTDENDLMIINKSGITIRLKVADVRIMGRATQGVRLINLEKRNDQIGSVCKVTSESLEDEVPEEEREGNIPSDPETNTPVNETEE

SEQ ID NO: 48824 - protein, 380 aa, Bacteroides fragilis
MNKEIIKEGQGDALRVIITGVGTGGHIFPAVSIANAIKELRPDAQILFVGAEGRMEMQRVPDAGYQIIGLPVAGFDRKHLWKNVAVLLKLVCSQWKARNIIRQFRPQVAVGVGGYASGPTLKMAGMIGVPTLIQEQNSYAGVTNKLLAQKARRICVAYDGMEKFFPANKIIMTGNPVRQNLLAEKPEREQAIRSFGLNPEKKTILILGGSLGARTINNTLIAGLQLIRRTTDVQFIWQTGKIYHQQVTEAVKAAGEIPNLFVTDFIKDMAAAYAAADLVISRAGAGSISEFCLLNKPVILVPSPNVAEDHQTKNALALVNKQAAIYVKDVEAENKLLPVALETIANAEKLSELSENIAHLALPDSAVVIAKEVIKLAQQS

SEQ ID NO: 48825 - protein, 541 aa, Bacteroides fragilis
MTQEMMIMAAILVAVILITFIGILSRYRKCKSDEVLVVYGKTGGDKKSAKLYHGGAAFVWPIVQGYEFLSMKPMQIDCKLTGALSAQNIRVDVPTTITVAISTDPEVMQNAAERMLGLTMDDKQNLITDVVYGQMRLVIADMTIEELNSDRDKFLSKVKDNIDTELRKFGLYLMNINISDIRDAANYIVNLGKEAESKAQNEAQANIEEQEKLGAIKIANQIKERETKVAETRKDQDIAIAETKKLQEISVANADKDRISQVAIANAEKESQVAKAEAEKNIRIEQANTEKESRIAELNSDMEIKQAEAQKKAAIGRNEAQKEIALSNSELAVTQANADKQAGEASAKSEAAVQTAKEIAQKEVEEAKARKVESSLKAEKIVPAEVARQEAILQAEAVAEKITREAEARAKATLAQAEAEAKAIQLKLEAEAEGKKRSLLAEAEGFEAMVKAAESNPAIAIQYKMVDQWKEIAGEQVKAFEHINLGNITVFDGGNGGTSNFLNTLVKTVAPSLGVLDKLPIGETVKNMIHPEEKKEETEKK

SEQ ID NO: 48826 - protein, 258 aa, Bacteroides fragilis
MEKLIIAGREFNSRLFLGTGKFSSNEWMEQSILASGTEMVTVAMKRVDMESTEDDMLKHIVHPHIQLLPNTSGVRNAEEAVFAAQMAREAFGTNWLKLEIHPDPRYLLPDSVETLKATEELVKLGFVVLPYCQADPVLCKQLEEAGAATVMPLGAPIGTNKGLQTKEFLQIIIEQAGIPVVVDAGIGAPSHAAEAMEMGASACLVNTAIAVAGNPIEMAKAFKQAVEAGRTAYEAGLGMQAIGFVAEASSPLTAFLNE

SEQ ID NO: 48827 - protein, 204 aa, Bacteroides fragilis
MLSLQFITHQTENYSYLESARMALEGGCKWIQLRMKEASPEEVEAVALQLKPLCKAKEAILILDDHVELAKKLEVDGVHLGKKDMPIGEARQMLGEAFIIGGTANTFEDVKLHHAAGADYLGIGPFRFTTTKKNLSPVLGLEGYTSILAQMNEAGIRIPVVAIGGIVAEDIPAIMETGVSGIALSGAILQAPDPVEETKRILNI

SEQ ID NO: 48828 - protein, 270 aa, Bacteroides fragilis
MKDILSEIIANKRFEIDLQKQAIPSEQLQEKLSDEVQPGYSMKQALASSATGIIAEFKRRSPSKGWIYENACPEQVVPDYIAAGASALSILTDEKFFGGSLKDIRTARPLVNIPILRKDFIIDEYQLFQAKIVGADAILLIAAALEADQCHALAAKAHELGLEVLLEIHTAEELPFINKEIDMVGINNRNLGTFFTDVENSFRLAGQLPQDALLVSESGISDPETVKRLRKAGFRGFLIGETFMKTQQPGQKLKEFINDLNSPQSDTESH

SEQ ID NO: 48829 - protein, 555 aa, Bacteroides fragilis
MGLFIKKPFEALLAEANASGSKSLKRVLGPWSLVALGVGVIIGAGLFSITGTVAAGYTGPAITLSFAIAALGCCFAGLCYAEFASMIPVAGSAYTYSYATMGELIAWIIGWDLVLEYTVAATTVSISWSRYLVVFLEGLNIHLPQALTACPWDGGIVNIPAFMIVVLMSIFLIRGTEGSSIFNGIVVFLKVSVIAIFVVLGWKYINADNYTPYIPANTGTLGEYGLSGVLRGAAIVFFAFLGFDAVSTAAQETKNPKRNMPIGILVSLLVCTVLYMLFAHVMTGVAHYTEFSGQQGIAPVAIAIEHMGHADATGIIHPDYPWLNRAIVLAILFGYCSVIMVTLLGQSRVFLSMSHDGLLPPFFSHINEKFRTPARSNLLFMLIVGLLAAFVPARLAGEMTSIGTLMAFTLVCAAVLVVRKTMPNVPRSFKTPFVPLVPILGILTCLCMMLFLPADTWIRLVLWMLIGLDIYVGYGMKHSKLEHGVKNRQGQSALNMIGIALSLLCVITGLWHQQTVGWNESKVLLIISFVFAFTHCAYYMMRIWKGTTKQTNDNG

SEQ ID NO: 48830 - protein, 716 aa, Bacteroides fragilis
MIVCIAEKPSVARDIADILGARERKEGYIEGNGYQVTWTFGHLCTLKEPHEYTPGWKSWSLGSLPMIPPRFGIKLIENPTYEKQFHIIEGLMQKADEIINCGDAGQEGELIQRWVMQKAGARCPVKRLWISSLTEEAIKEGFAKLKDQKDFQPLYEAGMSRAIGDWLLGMNATRLYTVKYGQNRQVLSIGRVQTPTLALIVNRQLDIENFQPKQYWELKTMYRDTTFSALIRKSDEELAAEEEKSGGKAKKTENRGIDPIANREEGMALVERIKDLPFVVTSVAKKDGKEYAPRLFDLTSLQVECNKKFAYSADETLKLIQSLYEKKVTTYPRVDTTFLSDDIYPKCPNILKGLKDYEVLTTPLAGASLPKSKKVFDSSKVTDHHAIIPTGVHPQNLTDMERRVFDLIARRFIAVFYPDCKVSTTTVMGEVDSIEFKVTGKQILEPGWRVVFAKDVKDPNEEKEGEDENVLPAFVKGESGPHIPDLNEKWTQPPKPYTEATLLRAMETAGKLVDNDELRDALKENGIGRPSTRAAIIETLFKRNYIRKEKKNLIATPTGVELIQLIHEELLKSAELTGIWEKKLREIEKKTYDARQFLEELKQMVSEIVNSVLSDNTNRRITIQEATAIEEEKKKKEPKRRERKSATPKEKKGKSEPATVDVSSTGQSVRADALKETDSLVGKLCPVCGKGVIIKGKTAYGCSEWKNGCTYRKAFE

SEQ ID NO: 48831 - protein, 358 aa, Bacteroides fragilis
MFNSFGNIFRLTSFGESHGKGIGGVIDGFPAGIVIDEEFVQQELSRRRPGQSVITTSRKEADKVEFLSGIFEGKSTGCPIGFIVWNENQHSNDYNNLEKVYRPSHADYTYTVKYGIRDHRGGGRSSARETISRVVGGALAKLALRQLGIHITAYTSQVGPIKLEGNYTDYDLDLIETNPVRCPDPEKAKEMQDLIYKIKGEGDTIGGVLTCVIKGCPIGLGQPVYGKLHAALGNAMLSINAAKAFEYGDGFKGLKQKGSEQNDVFYNNNGRIETRTNHSGGIQGGISNGQDIFFRVAFKPVATVLMEQETVNIDGIDTTLKARGRHDPCVLPRAVPIVEAMAAMTILDYYLLDRMTQL

SEQ ID NO: 48832 - protein, 618 aa, Bacteroides fragilis
MDKNTITGLVLIGILLVGFSFLSRPSEEQIAAQKRYYDSIAVVQQQEEALRAKTEAALANEKEETAADSASLFFNATKGKEAFTTIQNNLVEITLDNKGGRVYSALLKNYMGQDKKPVVLFNGSDASMNFNFYNKKGALQTKDFYFEAVNKTDSSVTMRLAADSASYIDFIYTLKPDNYLMSFVIKATGMDGKLAASTNYVDISWSQRARQIEKGYTYENRLADLTYKYTGDDVDNLSASKDDEKSVSERLDWIAFKNQFFSSVFIAEQDFEKTTVKSKMEKQGSGYIKDYSAEMSTFFDPTGKQPTDMYFYFGPNHYKTLTALDKGREEKWELNNLVYLGWPLIRWINKWITINVFDWLSGWGLSMGIVLLLLTIMVKIVVFPATWKTYMSSAKMRVLKPKIDEINKKYPKQEDAMKKQQEVMGLYSQYGVSPMGGCLPMLLQFPILMALFMFVPSAIELRQQSFLWADDLSTYDAFITFPFHIPFLGNHLSLFCLLMTVTNILNTKYTMQQQDTGAQPQMAAMKWMMYLMPIMFLFVLNDYPSGLNYYYFISTLISVVTMIILRRTTDENKLLTELEAKKKDPKQMKKTGFAARLEAMQKQQEQLAKERANKQNKK

SEQ ID NO: 48833 - protein, 533 aa, Bacteroides fragilis
MGETKYIFVTGGVASSLGKGIISSSIGKLLQARGYKVTIQKFDPYINIDPGTLNPYEHGECYVTVDGHEADLDLGHYERFLGIQTTKANNITTGRIYKSVIDKERRGDYLGKTIQVIPHITDEIKRNVKLLGNKYKFDFVITEIGGTVGDIESLPYLESIRQLKWELGQNALCVHLTYVPFLSAAQELKTKPTQHSVKELQSLGVQPDILVLRTEHDLNTNLRKKVALFCNVAENAVVQSIDASTIYEVPLLMQEQGLDETILQKMGLPVGERPPLGPWKDFLNRRANATETVTIAMVGKYVELQDAYKSILESLSQAATYNDRKVKIEYVSSEHLTPDNVDEQLGHVNGVVICPGFGSRGIEGKFVAAKYTREHNIPTFGICLGMQCMAIEFARNVLGYADANSIEMDEKTKHNVIDIMEEQKAITNMGGTMRLGAYECVLKKDSKVYEAYKEEHIQERHRHRYEFNNDYRKQFEEAGMKCVGINPESDLVEIVEIPTLKWYIGTQFHPEYSSTVLHPHPLFVSFIKAAIDK

SEQ ID NO: 48834 - protein, 330 aa, Bacteroides fragilis
MKDGKSGAVGTGIGLAFSKSLAEAHHGTLSLEDSVYGGSSFVLTLPWGEEAVSEEPEVVIPDGREAADEEQGTELSGSKFTILLVEDNVDLLNLTRESLSTWFKVLKAQNGRQALEVLANETVDVIVSDVMMPEMNGLELTAKVKSDIEYSHIPVILLTAKTTLEAKVEGFECGADVYIEKPFSIRQLRKQIENLLKLRQAFHKMMSELSGGNGAAPISPVEYSVSQKDCELMAKVRAAVEAQLSDENFSVDTLAESLNMSRSNFYRKIKALAGMPPNDYLKTIRLNKAAELLKSGVRITEVCEKIGFSSSSYFAKCFKIQFGVLPKDYH

SEQ ID NO: 48835 - protein, 444 aa, Bacteroides fragilis
MKRIVVLGAGESGAGAAVLAKVKGFDTFVSDMSAIKDKYKTLLDGHGIAWEEGRHTEELILNADEVVKSPGIPNDAPLILKLREQGTPIISEIEFAGRYTDAKMICITGSNGKTTTTSLIYHIFKSAGLNVGLAGNIGKSLALQVAEEKHDYYVIELSSFQLDNMYNFRADIAVLMNITPDHLDRYDHCMQNYINAKFRITQNQTSEDAFIFWNDDPIIKRELDKHGIRAHLYPFSAIKEEGSIAYVEDHEVVITEPIAFNMEQEQLALTGQHNLYNSLAAGISANLAGITKEDIRKALSDFQGVEHRLEKVARVRGIDFINDSKATNVNSCWYALQSMTTKTVLILGGKDKGNDYTEIEELVREKCSALVYLGLHNEKLHEFFDRLGLPVAEVQTGMKDAVEAAYKLAKKGETVLLSPCCASFDLFKSYEDRGEQFKKYVREL

SEQ ID NO: 48836 - protein, 485 aa, Bacteroides fragilis
MKLKEILTSIQPVKITGNQDIEITGVDIDSRQVESGHLFMAMRGTQTDGHAYIPAAVEKGATAILCEELPAELAEGVTYIQVADSEDAVGKAATTFYGNPSSKLELVGVTGTNGKTTIATLLYNTFRYFGYKVGLISTVCNYIDDEAIPTEHTTPDPITLNRLLGRMADEGCKYVFMEVSSHSIAQKRISGLKFAGGIFTNLTRDHLDYHKTVENYLKAKKKFFDDMPKNSFSLTNLDDKNGLVMTQNTKSKVYTYSLRSLSDFKGRVLESHFEGMLLDFNNHELAVQFIGKFNASNLLAVFGAAVLLGKKEEDVLVALSTLHPVAGRFDAIRSPQGYTAIVDYAHTPDALVNVLNAIHGVLEGKGKVITVVGAGGNRDKGKRPIMAKEAARASDRVIITSDNPRFEEPQDIINDMLAGLDTEDKKKTLSIADRKEAIRTACMLAEKGDVILVAGKGHENYQDIKGVKHHFDDKEVLKEIFSLTV

SEQ ID NO: 48837 - protein, 771 aa, Bacteroides fragilis
MLFFKLQIYFFSRLVKAFCRVLRSKIEKNQIPANFLSHFHDISAINVYLCGNFERKILDKTIFMINPIVKTIELGDGRTITLETGKLAKQADGSVMLRMGNTMLLATVCAAKDAVPGTDFMPLQVEYKEKFAAFGRFPGGFTKREGRASDYEILTCRLVDRALRPLFPDNYHAEVYVNIILFSADGVDMPDALAGLAASAALAVSDIPFNGPISEVRVARIDGKFVINPTFDQLEQADMDIMVAATYENIMMVEGEMSEVSEAELLEAMKVAHEAIKVHCKAQMELTEMVGKTVKREYCHEENDEELRKAVHDACYDKSYAIAASGNRNKHERQDAFDAIRDEFKAQFSEEELEEKGALIDRYYHDVEKEAMRRCILDEGKRLDGRKTTEIRPIWCEVGYLPGPHGSAIFTRGETQSLTSVTLGTKLDEKIIDDVLAHGKERFLLHYNFPPFSTGEAKAQRGVGRREIGHGNLAHRALKRMIPEDYPYVVRVVSDILESNGSSSMATVCAGTLALMDAGVKIKKPVSGIAMGLIKNAGEEKYAVLSDILGDEDHLGDMDFKVTGTKDGITATQMDIKVDGLSYEILERALNQAKEGRMHILGKIEETISEPRTELKDHAPRIETMTIPKEFIGAVIGPGGKIIQGMQEETGATITIEEIDNVGRIEISGTNKKSIDDAIRLIKGIVAVPEVGEVYKGKVRSIMPYGAFVEFLPGKDGLLHISEIDWKRLETVEEAGIKEGDEIEVKLIDIDPKTGKFKLSRKVLLPRPEKK

SEQ ID NO: 48838 - protein, 442 aa, Bacteroides fragilis
MIYKLSEAMKDCTRIDNELFPKFDVKRGLRNEDGTGVLVGLTKIGNVVGYERIPGGGLKPIPGKLFYRGYDLEDLAHAILKEKRFGFEEVAYLLLSGSLPDKEELASFRELINDNMPLEQKTKMNIIELEGNNIMNILARSVLEMYRFDPNPDDTSRDNLMRQSIDLISKFPTIIAYAFNMLRHATFGRSLHIRHPQENLSIAENFLYMLKRDYTELDARTLDLLLVLQAEHGGGNNSTFTVRVTSSTGTDTYSAIAAGIGSLKGPLHGGANIQVADMFHHLQENIQDWTNVDEIDTYFTRMLNKEVYNKTGLIYGIGHAVYTISDPRAVLLKELARDLAHEKGREREFAFLELLEERAIATFGKIKNNGKTVSSNVDFYSGFVYEMIGLPQEIYTPLFAMARIVGWCAHRNEELNFEGKRIIRPAYKNVLEEEQYVPLKKR

SEQ ID NO: 48839 - protein, 425 aa, Bacteroides fragilis
MTADIMHPGLIHIIHEATKYGDVIVGLLTDKAIAEHKRLPYLTYDQRKEVVENIKGVCEVVPQEDWSYVPNLEKLKPDYIIHGDDWKTGPLREVREQVFEVMNAQGGKVIEIPYTRGINSSSLDKDIKAIGTTPDVRLKSLRRLIQAKPVVRILEAHDGLCGLIIENLEVQKGDKREVFDGMWSSSLTDSTSKGKPDIEAVDLTTRLQDLNNILECTTKPIIFDGDTGGKIEHFVFTVRTLERHGISAVIIEDKVGLKKNSLFGTDAIQTQDSIEGFCDKIRAGKNAQVTGDFMIIARIESLIAGKPMSDALERAYAYVQAGADGIMIHSKDKSGEDIREFCRTFRKEYAHVPIVVVPTTYDHVHESELHEWGANVVIYANHLLRAAYPAMMNVARTILENERAEEVRPLCMPIKEILELIPVTK

SEQ ID NO: 48840 - protein, 462 aa, Bacteroides fragilis
MTAMITLKEKIGYGLGDMASSMFWKLFGSYLMIFYTDVFGLPAAVVGTMFLITRVWDSAFDPIVGVIADRTQTRWGKFRPYLLYLAVPFALIGIFTFTTPELNDTGKLVYAYITYSLMMMVYSAINVPYASLLGVMSPDPKERNTLSTYRMTFAYIGSFIALLLFMPMVNLFGGAEDEQRGWMLSVVVIAVMCAALFYLCFALTRERVKPIREVQNSLKDDLKDLLHNRPWWILLGAGVAALVFNSIRDGATVYYFKYFVVEEDYSTVSFFGVSFVLSGLYLAVGQAANIVGVILAAPVSNRIGKKNTYMGAMSLATLLSVIFYWFGKGDITLIFVFQVLISICAGSIFPLLWSMYADCADYSELKTGNRATGLIFSSSSMSQKFGWAIGSALTGWLLAYFGFRANEVQSAEAIHGIKMFLSWLPAVGTVLSVVFISMYPLSEKKMREVTSELEKRRKAIQS

SEQ ID NO: 48841 - protein, 895 aa, Bacteroides fragilis
MHDVDNAHKILQLTSDTLILVDKNGTCLDIDPHSDLWFLQEDRLLGKNLFNLLPDHTFQKLLPDFRRVTQQGITVNRNYRLPLEGGETYYFKCIMQPYDGDKVLCQYRDITARSNVKLQLERTNYELKEIQKAAQIGQWKYSSRERTFYYRGYNGIVCTEEERSINFQDYYETILSEDLPAVNTWMEANRRELLKEYIEYRILLEGQVYYMRQQCYLRNEEEDGNIVLEGYIQNITDIQRKRNDINTLTHAINNAKESVYAARRDGTLIFANRQFRLNHRIAEQADLSLIRVFDVVGDMTCIEDWEERYRSIREGQTLNFLAYQPLKHDKNTLAFEGTMYSVTTDDGEETFWSFTHDISERIRYESQIKRFNRIMDTTMENIPAGIVVKDIENDFRYIYRNRESYNRDISSENAIGMNDFDYYPPEMAQQKRKEDMEIAATGKGMHWIMEGKDKNGNLLILDKQKIMVESEDFSPIIVSIEWDITQLELMRRELIESKEKAETSDKLKSAFLANMSHEIRTPLNAIVGFSRIISESDNAEERREYYEIVDANNERLLQLINEILDLSKIESGIVEFTYGPVRLHTLCKEIHDAHVFRCPQGVELRFDSPDEALSIHSDKNRIFQVFSNLIGNAFKFTTEGSVSYGYKQEGERVVFYVKDTGLGIEPEKLGRVFQRFAKLNNFAQGTGLGLSICKTIIERLGGEIAVSSEVGTGTTFTFWLPLENVIQDTETGTNSHLPGEAVGTQPSEVLPAKEDTPRPKEETTEKEEDLRATAAGTEQATILIAEDTDSNFDLLNAILGRKYRLVRARDGMEAVTMYDEVNPDLILMDIKMPNLDGLEATRIIRQLSAEVPIIAQSAYAYEHDRNAAEEAGCNDFISKPIAQEKIKEKIKKWLK

SEQ ID NO: 48842 - protein, 202 aa, Bacteroides fragilis
MYCFFLKRVIDFCLVFCALVICCPVLFIIALWLHFANKGAGAFFLQERPGRHGKIFKVIKFKTMTDERDAEGNLLPDDKRLTKVGKFVRSTSIDELPQLINVLKGDMSFIGPRPLLPQYLPLYNKEQARRHEVRPGITGWAQVNGRNAISWTRKFELDVWYVDHCSFLLDLKIIVLTIKKVFVREGISSDTSVTMEPFTGNN

SEQ ID NO: 48843 - protein, 872 aa, Bacteroides fragilis
MLTAKETRDSFKNFFESKGHQIVPSAPMVIKDDPTLMFTNAGMNQFKDIILGNHPAKYHRVADSQKCLRVSGKHNDLEEVGHDTYHHTMFEMLGNWSFGDYFKKEAISWAWEYLVDVLKLNPEHLYATVFEGSPEEGLERDNEAASYWEQYLPKDHIINGNKHDNFWEMGDTGPCGPCSEIHIDLRPAEERAKISGRDLVNHDHPQVIEIWNLVFMQYNRKADSTLEPLPAKVIDTGMGFERLCMALQGKTSNYDTDVFQPLIKAIAQMAGTEYGKNEQNDIAMRVIADHIRTIAFSITDGQLPSNAKAGYVIRRILRRAVRYGYTFLGQKQAFMYKLLPVLIDSMGDAYPELIAQKELIEKVIKEEEESFLRTLETGIRLLDKTMADTKANGKTEISGKDAFTLYDTFGFPLDLTELILRENGMTVNVEEFDAEMQQQKQRARNAAAIETGDWIILKEGTTEFVGYDYTEYETSILRYRQVKQKNQTLYQIVLDYTPFYAESGGQVGDTGVLVNEFETIEVIDTKKENNLPIHITKKLPEHPEAPMMACVDTDKRAACAANHSATHLLDEALREVLGEHVEQKGSLVTPDSLRFDFSHFQKVTDEELRKVEHLVNAKIRANVPLQEHRNIPIEEAKELGAIALFGEKYGDHVRVIQFGSSIEFCGGTHVAATGNIGMVKIISESSVAAGVRRIEAYTGARVEEMLDTIQDTLSDLKALFNNAPDLGVAIRKYIDENAGLKKQVEDFMKEKEAAVKERLLKNVQEINGIKVIKFCLPMPAEVVKNIAFQLRGEITENLFFVAGTVDANKPMLTVMISDNLVAGGLKAGNLVKEAAKLIQGGGGGQPHFATAGGKNPDGLNAAVEKVLELAGI

SEQ ID NO: 48844 - protein, 747 aa, Bacteroides fragilis
MDTENQKEIAEEQMIEQAFQELLNDYLATKHRKRIEIITKAFNFANQAHKGIKRRSGEPYIMHPIAVAKIVCNEIGLGSTSICAALLHDVVEDTDYTVEDIENIFGAKIAQIVDGLTKISGGIFGDRASAQAENFKKLLLTMSDDIRVILIKIADRLHNMRTLGSMLPNKQYKIAGETLYIYAPLANRLGLYKIKTELENLSFKYEHPEEYQEIEEKLNATAAERDKVFNEFTAPIREQLDKMGLKYRILARVKSIYSIWNKMQTKHVPFEEIYDLLAVRIIFEPRNIDEELNDCFDIYVSISKIYKPHPDRLRDWVSHPKANGYQALHVTLMGNNGQWIEVQIRSERMNDVAEQGFAAHWKYKEGGGSEDEGELEKWLRTIKEILDDPQPDAIDFLDTIKLNLFASEIFVFTPKGELKTMPQNSTALDFAFSLHTDIGSHCIGAKVNHKLVPLSHKLQSGDQVEILTSKSQRVQPQWEVFATTARARAKIAAILRKERKTFQKEGEELLNEFFKKEEIRPEAAVIEKLCKLHNMKNEEEFLVAIGNKTIVLGDADKNELKEKQSSNWMKYLTFSFGNNKDKQQEEKEPQEKEKINTKQILKLTEDALQKKYIMAECCHPIPGDDVLGYMDENDRIIIHKRQCPVAAKLKSSYGNRIIATEWDTHKKLSFLVYIYIKGIDNVGLLNEITQVISRQLNVNIRKLDMETDDGIFEGKVQLYVHDVEDVKAICNNLRKIPNIKSVTRVEN

SEQ ID NO: 48845 - protein, 458 aa, Bacteroides fragilis
MQPDNYLNDNMKLDLLTAISPIDGRYRGKAEALAAYFSEYALIKYRVQVEVEYFITLCELPLPQLKGIDKSVFESLRNIYRNFTEADAQRIKDIESVTNHDVKAVEYFLKEEFDKLGGLEEYKEFIHFGLTSQDINNTSIPLSIKEALEQVYYPLIEELIAQLKTYATEWESIPMLAKTHGQPASPTRLGKEIMVFVYRLERQLATLKACPVTAKFGGATGNYNAHHVAYPEYDWKAFGNQFVAEKLGLEREEYTTQISNYDNLSAIFDAMKRINTVMIDMNRDFWQYISMEYFKQKIKAGEVGSSAMPHKVNPIDFENAEGNLGIANAILEHLAVKLPVSRLQRDLTDSTVLRNVGTPFGHIVIAIQSSLKGLRKLLLNETAIYRDLDNCWSVVAEAIQTILRREAYPHPYEALKALTRTNQAITETSIKEFIEGLDVNEEIKKELRVITPHSYTGI

SEQ ID NO: 48846 - protein, 467 aa, Bacteroides fragilis
MEKISRTKIVDLMKREDFGAMVNVKGWVRTRRGSKQVNFIALNDGSTINNVQVVVDLANFDEEMLKQITTGACLSVNGVLTESVGAGQKAEVQAREIEVLGTCDNTYPLQKKGHSMEFLREIAHLRPRTNTFGAVFRIRHNMAIAIHKFFHEKGFFYFHTPIITASDCEGAGQMFQVTTMNLYDLKKDENGSIVYDDDFFGKQASLTVSGQLEGELAATALGAIYTFGPTFRAENSNTPRHLAEFWMIEPEVAFNEIQENMDLAEEFIKYCVRWALDNCADDVKFLNDMFDKGLIERLEGVLKEDFVRLPYTEGIKILEEAVAKGHKFEFPVYWGVDLASEHERYLVEDHFKRPVILTDYPKEIKAFYMKQNEDGKTVRAMDVLFPKIGEIIGGSERESDYNKLMTRIEEMHIPMKDMWWYLDTRKFGTCPHSGFGLGFERLLLFVTGMSNIRDVIPFPRTPRNADF

SEQ ID NO: 48847 - protein, 153 aa, Bacteroides fragilis
MDTLSYKTISANKATVTKEWVIVDATDQTLGRLGAKVAKLLRGKYKPNFTPHVDCGDNVIIINADKVKLSGNKWNDRVYLSYTGYPGGQREMTPARLIAKPNGEDRLLRKVVKGMLPKNRLGAKLLSNMYVYAGSEHKHDAQNPKAIDINSLK

SEQ ID NO: 48848 - protein, 128 aa, Bacteroides fragilis
MEVVNALGRRKRAIARVFVSEGTGKITINKRDLAEYFPSTILQYVVKQPLNKLGVAEKYDIKVNLCGGGFTGQSQALRLAIARALVKINAEDKPALRSEGFMTRDPRSVERKKPGQPKARRRFQFSKR

SEQ ID NO: 48849 - protein, 316 aa, Bacteroides fragilis
MNSHQGLFGGNIPQDVTGKQGENAIFIVYGLKQSNNTIKQVKDLCANFSALIRSMRNRFPEMQFSCTIGFGADAWKQLFPEQDNPKELKTFETIKGAKYTAVSTPGDILLHIRAKQMGLCFEFASIINEKLKGVVDSIDETHGFRYMDGKAIIGFVDGTENPAVDENPYHFAVIGDEDPDFIGGSYVFVQKYIHDMTTWNSLPVEAQEKVIGRHKYNDVELSDEEKPQNAHNAVTNIGDDLKIVRANMPFANTSKGEYGTYFIGYASTFSTTHKMLENMFIGDPVGNTDRLLDFSTPITGTLFFAPSYDLLAKLGE

SEQ ID NO: 48850 - protein, 469 aa, Bacteroides fragilis
MKKLNLFILFSFCFSIITWGQANFAAIDSLIKKELPQGSEVGISVYDLTARKTLYTYRDTKLSRPASTMKLLTTITALARPDADEPFRTEVWYKGTIEHDTLRGDIYVVGGFDPEFDDEGMNALVEEVITFPFSVLKGNIYGDISMKDSLYWGSGWAWDDTPSSFQPYLSPLMYHKGMVKVTAVPGATRGDSARLSFEPSSSYYTMTNETKTRTSSAGKFSVSRGWLENKNNLIVSGNVENRRIGDVNVYSSQDFFMHTFVERLRNKGIEISNHYAFDSFRSDSLSICMARWECPVQDVIDQIMKESDNLSAEALLCRLGARATGKKQVSAKDGIEEIYRLIQDLGHDPDNYKIADGCGLSNYDYLSPALLVDFLKFAYSRTDIFRKLYKALPVAGIDGTLKNRMKQGAAFKNVHAKTGSYTAINTLAGYLKMANGHQVAFAIMNQNILSAAKARNFQNKVCEILANHQ

SEQ ID NO: 48851 - protein, 269 aa, Bacteroides fragilis
MNRKTIMIPFREREGVRRKFLFLLFSCLLSVSLSAQTYQELSEKAVECVGKDSLVQAEDLLKQALKLEPKNAHNALLFSNLGLVQRKLGRYNDAVESYTYALNIAPLAVPILLNRAAIYLEQGMQDKAYVDYCQVMDVDKKNTEALLMRAYIYMLRRDYKGARLDYQRLLEIDPKNYNGRLGLATLEQKENKFREALDILNQLLVEFPEDAVLYVARADVERDMKHDDLALVDLDEAIRLAPDSIDAYLLRGDIYLDQKKKSLAKADFE

SEQ ID NO: 48852 - protein, 694 aa, Bacteroides fragilis
MIICVICGENPKPTLNMKKYDIKTTDEQTLRKWYHLMTLGRALDEKAPAYLLQSLGWSYHAPYAGHDGIQLAIGQVFTLGEDYLFPYYRDMLTVLSAGMTPEELILNGISKATDPGSAGRHMSNHFAKPEWHIENISSATGTHDLHAAGVGRAMVYYGHKGVAITSHGESATSEGFVYEAINGASNERLPVIFVFQDNGYGISVPKKDQTANRKVADNFSGFKNLRIIHCNGKDVFDSMNAMTEAREFAIANRTPVIVHANCVRIGSHSNSDKHTLYRDENELAYVKEADPLMKFRRMLLRYKRLTEEDLQQIEAAAKKELAAANRKALAAPDPIPESIYDFVLPEPYIPQKYKDGLPGPVEGEKSFMVNAINETLKEEFRRNPDTFIWGQDVANKDKGGVFNVTKGMQQEFGDARVFSAPIAEDYIVGTANGMCRFDPKIHVVIEGAEFADYFWPAVEQYVECTHEYWRSNGKFTPNITLRLASGGYIGGGLYHSQNLEGALTTLPGARIVCPSFADDAAGLLRTSMRSKGFTLYLEPKALYNSVEAAAVVPEEFEVPFGKARIRREGTDLTIITYGNTTHFCLDVAERLAREGVGSVEVIDLRSLIPLDKEAIFASVRKTGKVMVVHEDKVFSGFGAEIAAQIAGEMFRYLDAPVQRVGSTFTPVGFNPILERAILPNDEKIYKAAKELLEF

SEQ ID NO: 48853 - protein, 457 aa, Bacteroides fragilis
MYMARFEIKMPKLGESITEGTILSWSVQVGDVVNEDDVLFEVNTAKVSAEIPSPVAGKVVEILFKEGDTVPVGTVVAIVDMDGEGSGEASETAGSVETASAPKAAEVSGTASVPKVQAEVTAPKVERWYSPAVLQLAREAKISQEELDSIPGTGYEGRLSKKDIRTYIEMKKGAPAADVSTTVVSTVSANNSGSSPVPSAEVQKKAAAAAPQAQHGQSASAVSSDASVEVKEMDRVRRIIADHMVMSKKVSPHVTNVVEVDVTRLVRWREKTKDDFFRREGVKLTYMPAIAEATAQALAAYPQVNVSVDGYNILYKKHINVGIAVSQDDGNLIVPVVHDADRLNLNGLAVAIDSLAKKARVNKLMPDDIDGGTFTITNFGTFKMLFGTPIINQPQVAILGVGVIEKKPAVVETPEGDVIAIRHKMYLSLSYDHRVVDGSLGGNFLHFIADYLENWKE

SEQ ID NO: 48854 - protein, 501 aa, Bacteroides fragilis
MFLLGYDIGSSSVKASLVDAETGKCVASAFFPKTEAGIIAIRPGWAEQEPESWWENLKLSTRSILSESRVDAKDIKAIGISYQMHGLVCVDKQQRTLRPAIIWCDSRAVSYGQRAFEAIGEKFCLAHLLNSPGNFTASKLAWVKENEPDIYEQIDKIMLPGDYIAMKLSGEVCTTIEGLSEGMFWDFRNNRPADFLMQYYGIDPSLIADIRPTFAEQGRLTGTAARELGLQEGTPITYRAGDQPNNALSLNVFNPGEIASTAGTSGVVYGVNGEINYDPQSRVNTFAHVNHTAADPRLGVLLCINGTGILNSWIRRNVAPEGISYAEMNRFASSVPIGSAGISILPFGNGAERMLDNRATGCGIHGVDFNRHDKSHLIRAAQEGIVFSFKYGIDIMEEMGIPVKKIHAGHANMFLSSVFRETLAGTTEATIELYDTDGSVGAAKGAGMGAGIYKNHEEAFATLDKLTVVEPDAGKQQEYTDAYARWKQCLTQSMQTETENK

SEQ ID NO: 48855 - protein, 243 aa, Bacteroides fragilis
MHDIPKQIPLANNHISVDCVVIGFDGEQLKVLLINRIGEENGKVYRDMKLPGSLIYMDEDLDEAAQRVLFELTGIRNVNLMQFKAFGSKNRTSNPKDVHWLERAMQSKVERIVTIAYLSMVKIDRALDKNLDEFQACWVALKDIKTLAFDHNLIIREALTYIRQFVEFNPSMLFDLLPRKFTASQLRILFELVYDKTVDVRNFHKKIALMDYVVPLEEKQTGVAHRAARYYKFDRKIYNKTRR

SEQ ID NO: 48856 - protein, 295 aa, Bacteroides fragilis
MKAFVFPGQGAQFVGMGKDLYETSALAKELFEKANDILGYRITDIMFNGTDEDLRQTKVTQPAVFLHSVISALCMGDDFKPEMTAGHSLGEFSALVAAGALSFEDGLKLVYARAMAMQKACEATPSTMAAIIALPDEKVEEICASVTAEGEVCVPANYNCPGQIVISGSVPGIEKACELMKAAGAKRALPLKVGGAFHSPLMDPAKVELEAAINATEFHTPKCPVYQNVDALPHTDPQEIKKNLVAQLTASVRWTQTVKNMVADGATDFTECGPGAVLQGLIKKIDSTVSAHGIA

SEQ ID NO: 48857 - protein, 614 aa, Bacteroides fragilis
MENYIVSARKYRPSTFESVVGQRALTTTLKNAIATQKLAHAYLFCGPRGVGKTTCARIFAKTINCMNLTADGEACNECESCVAFNEQRSYNIHELDAASNNSVDDIRQLVEQVRIPPQIGKYKVYIIDEVHMLSASAFNAFLKTLEEPPRHAIFILATTEKHKILPTILSRCQIYDFNRISVDDTVHHLTYVASKEGITAEPEALNVIALKADGGMRDALSIFDQVVSFTGGNITYKSVIENLNVLDYEYYFRLTDCFLENKVSDALLLFNDVLNKGFDGSHFITGLSSHFRDLLVSKDAATLQLLEVGAGIRQRYQEQAQKCALPFLYRAMKLCNDCDMNYRASKNKRLLVELTLIQVAQLTVEGDDGSGGRGPKQAIKPVFTQPAAAQQPQVAPIASPSQSMNAATPVAPQAVSQQVGSFPAVNVRPGGAVSPSGAMPDAVRMAQFKEEKKIPVMKKSSLGLSIKHPQKEEEQRGAGVVHTAQVSTQQIEEDFIFNERDLNYYWQEYAGRMPIEQKAIAMRMQNMRLSLLNDTTFEVVVDNEIVAKDFTALIPGIQAYLRGSLKNRKVTMTVRVSEATENVRAVSRVEKFQMMAQKNNALLQLKEEFGLELY

SEQ ID NO: 48858 - protein, 346 aa, Bacteroides fragilis
MLAYTYVEHGKFELLEKLRPQIKDARDAIVRVTLGSICTSDLHIKHGSVPRAVPGITVGHEMVGIVEEVGSGVISVRPGDRVTVNVETFCGECFFCRHGYVNNCTDPDGGWALGCRIDGGQAEYVRVPYAEQGLNRIPDNVSDEQALFVGDVLATGFWATRISEISEDDTVLIIGAGPTGICTLLCVMLKKPRRIIVCERSAERIRFVREHYPDVLVTEPENCRDFVLCNSDHGGADVVLEVAGSEETFRLAWECARPNAIVTIVALYDKPQFLPLPDMYGKNLIFKTGGVDGCDCAEILSLIEQGRIDTTPLITHRFPLNEIEEAYRIFENKLEGVIKIAITGGR

SEQ ID NO: 48859 - protein, 323 aa, Bacteroides fragilis
MPDYILTNDEISRIVDTTDEWIMGRIGIKERRILNEEGLGTSYMARKAVKQLMQRTQSNPDDIDLVIVATTTPDYRLPSTASILCERVGLKNAFAFDMQAVCSGFLYALETGANFIRSGKYKKVIIVGADKMSSVIDYTDRATCPIFADGAAAFLLEPTTDHLGVIDSVLRTDGKGLPFLHMKAGGSVCSPSYFTVDNHMHYLHQEGRTVFKYAVANMSDACESIIERNQLTKDEIDWVVPHQANQRIISAVAQRLDVPLEKVMINIEHYGNTSAGTLPLCIWDFENKLKKGDNLIFTAFGAGFAWGAVYVKWGYDGKTNNAC

SEQ ID NO: 48860 - protein, 323 aa, Bacteroides fragilis
MYPLKFEPILKQTLWGGDKIIPFKHLNDDLKGVGESWEISGVENNESVVANGPDKGLTLTDMVKKYREELVGEANYARFGNEFPLLIKFIDAKQDLSIQVHPTDELAKKRHNSKGKTEMWYVVGADEGAKLRSGFSEQITPKEYKDRVHNNTITDVLQEYEIHPGDVFFLPAGRIHSIGAGAFIAEIQQTSDITYRIYDFNRKDANGKTRELHTSQALDAINYEVLDDYRTKYEPLKDEPVELVACPYFTTSVYDMSEQISCDYSELDSFVIFICIEGSCLMTDNEGNEVRLGAGETVLLPATTQELTIVPQEGNVKLLETYV

SEQ ID NO: 48861 - protein, 1011 aa, Bacteroides fragilis
MAGLVVSALLGVGAKVPASMDAPVREVFHTPPGMSAPIEPLLLYQASQDEKCCHWVDSVYNRMNLREKVGQLFIYTIAPVQTKRNMQLLRDAVHTYKVGGLLFSGGKIQNQATLTNEAQRMARCPLLITFDGEWGLSMRLRGTPVFPRNMVLGCIQDNRLIYEYGREMARQCREMGVQVNFAPVADVNINPDNPVINTRSFGEDPVKVADKVIAYASGLESGKVLSVCKHFPGHGDTDVDSHKALPVLPFTRERLDSVELYPFKEAIRAGVSGMMVGHLQVPVIEPIGDLPSSLSRNVVYGLLTEELAFKGLIFTDALAMKGVAGNKSVCLQALQAGNDMVLAPRRLKEEMDAVLEAVEKGELPEEEINAKCRKVLTYKYILGLERKPFVKLSGLGTRINTPQTRDLISRLNLAAITVLNNKNDVLPLHPDLKEAAILNVGKPEEIEPFDRKMKKYTSFARFQLRKDLPEAEQQKLRDSLAAYRRVIVTVTEQRLAPYQSFFAKFAPESPVIYVFYTPAKSMLQIQRAVSAAEAVVLAHASRDDVQERVADLLFGKATADGRLSASIGGLFPTGSGVTITPHTPFHFVPEEYGMKSEVLRRIDTIALEGIKEGAYPGCQVLVMKDGKALYDRCFGYHTDANSEKVKPTDIYDLASLSKTTGTLLAIMKLYDKGRFNLTDKVSDYLPFLRKTNKENLTIRELLLHQSGLPSGLLFYQEAIDGKSYKGSLFKQSKDALHTVRLGVRTWGNPRFRFNKGMTSKEKNGDYTLQVCDSLWLNRSFREEIRKKIAEAPLKDKSYRYSDVGFILLQMLAEELSGKPMDEYLWQEFYQPMGLEHTAYLPLRYFDKKEVVPSAVDRFLRKTTLQGFVHDESAAFQGGISGNAGLFSNAREVGRIYQMLLNGGELDGRRYLSKETCALFTTEKSKISRRGLGFDKPDVVNESKSPCAASVPVTVYGHTGFTGTCAWVDPDNGLIYVFLSNRTYPDAWVNKLSKLEIREKIQETIYEAMKEK

SEQ ID NO: 48862 - protein, 247 aa, Bacteroides fragilis
MNEKVAMVTGAAAGIGLASAEAFAKVGATVVLVDINEPKEQAGKLVSEGYKAVAYRCDVSDMRAVKEMIDWTVATYGRLDAALNNAGIQTPQRPMAEITDEEFDRTVAVDLKGVWNCMRYEIIQMLQQGGGAIVNTSSQGGVTGFPGQAAYIACKHAVIGLTRTAAIDYSAKGIRINAVCPGVIRTPMAEELIRRNPDLEKELVRDIPAGRLGKPEEIANAVLWLCSPQASFVDGHALLVDGAFSIH

SEQ ID NO: 48863 - protein, 356 aa, Bacteroides fragilis
MKLQAIAILTFLTFANVMAQETTTTKYINSTDMEALKLTQEWDKTFPQSDKVEHTKIMFHNRYGITLAADLYKPKNTQGRLAAIAVSGPYGAVKEQVSGRYAQTLAERGFLTIAFDPSYYGESGGTPRYLTSPEISTEDFSAAVDYLTSRADVDPERIGILGICGWGGFALNAAANDPRIKATVTSTMYDMSRVNANGYFDAMSSDDRYKLREQLNAQRTEDYRDDSYVRDGGVLDPVTDDTPQFVKEYHDYYKTERGYHRRSPNSNEGITKTSVLAFINMPLLTYISEIRSAVLMIHGEKAHSRYFSEDAYKRLTGSNKELLIIPGANHVDLYDNLNVIPFDKIDAFFKNALKEK

SEQ ID NO: 48864 - protein, 278 aa, Bacteroides fragilis
MLMAYNLYKEDVSSIYDPATAIEVYHNYTLLHDDLMDRADMRRGKTTVHKVWNDNTAILSGDAMLVLAYQYMAASSSEHLKEVMDLFSLTALEICEGQQMDMNFESREDVKEEEYLEMIRLKTAVLLAASLKIGAILGGASPEDAENLYDFGMQIGVAFQLQDDLLDVYGDPAVFGKNIGGDILCNKKTYMLIKALERADRDQLEGLNHWLSATSFCPEEKISAVTELYTQIGIKAVCENKMREYYTRAMTSLGAVSVIEDKKSELKKLMKHLMYREM

SEQ ID NO: 48865 - protein, 211 aa, Bacteroides fragilis
MAKDLAKEIGYIYIDSGAMYRAVTLYSIENGIFHGDTIDTDELKRRIGDIHISFRIDPETGRPNTYLNGVNVENKIRTMEVSSKVSPISALGFVREAMVAQQQEMGKAKGIVMDGRDIGTTVFPDAELKIFVTASAEIRAQRRYDELKAKGQETGFEEILENVKQRDHIDQTREVSPLKKADDALLLDNSHLTIAEQKEWLMAEYQKAIKA

SEQ ID NO: 48866 - protein, 339 aa, Bacteroides fragilis
MLSLQRQLKNMIVMGTVKCVGILTSGGDAPGMNAAIRAVTRAAIYNGLQVKGIYRGYRGLVTGEIKEFKSQNVSNIIQLGGTILKTARCKEFTTPEGRKMAYDNMVKEGIDALVVIGGDGSLTGARIFAQEYDIPCIGLPGTIDNDLYGTDTTIGYDTALNTILDAVDKIRDTATSHERLFFVEVMGRDAGFLALNGAIASGAEAAIIPEFSTEVDQLEEFIKSGFRKSKNSSIVLVAESELTGGAMHYAERVKNEYPQYDVRVTILGHLQRGGSPTAHDRILASRLGAAAIDAIMEDQRNVMIGIEHDEIVYVPFSKAIKNDKPVKRDLVNVLRELSI

SEQ ID NO: 48867 - protein, 465 aa, Bacteroides fragilis
MNQDTICAIATAQGGAIGSIRVSGPEAITITGRIFTPAKSGKLLSEQKPYTLTFGRIYNGEEMIDEVLVSLFRAPHSYTGEDSTEITCHGSSYILQQVMQLLIKNGCRMAQPGEYTQRAFLNGKMDLSQAEAVADLIASSSAATHRLALSQMRGGFSKELTTLREKLLNFTSMIELELDFSEEDVEFADRSALRRLADEIEEVIARLANSFSVGNVIKNGVPVAIIGETNAGKSTLLNVLLNEDKAIVSDIHGTTRDVIEDTVNIGGITFRFIDTAGIRETSDTIESLGIERTFQKLDQAEIVLWMIDSADAISQLTLLSDKILPRCEHKQLILVFNKVELINETQKNELASQFSEHIGSEIESIFISAKQRLYTDELQQRLVAAAHLPAVTQNDVIVTNVRHYEALTRALDAIHRVQEGLDANISGDFLSQDIRECIFHLSDIAGEVTNDMVLQNIFAHFCIGK

SEQ ID NO: 48868 - protein, 370 aa, Bacteroides fragilis
MLECKTVTLRTRPLKNGMLSYYLDYYPGYRDQETMKTIRHEGLNIYIYANPKNEHERNFNATMSEKAEAIRCRRFESIVNDRYDFFDRHKLKADFLEYYRRQLRKHDQKWEFVYHHFYNFVHGKCTFEEIDIDLCNKFREYLLNAKQLRRDGHISKNSASGYWSTFRGLLKILYRNRLIKTNINDFLDKIETEDTPKDYLSVEELYKLAETPCKKPILKTAALFSCLTSLRISDILSLQWHEIIDFAAGGKCVHTITQKTKTEDIIPISDEALQLIGYSPEKTGLVFKGLKRSWTQQPMKEWIREAGITKNITFHSYRRTYATLQGAAGTDIRTIQSNMAHKSITTTQRYMKVVDSNKREASNRISLIRK

SEQ ID NO: 48869 - protein, 446 aa, Bacteroides fragilis
MLMNKLLITLCLAASFMLSGCYNSGEPREKVLKIYNWADYIGDGVLEDFQAYYKEQTGEDIRIVYQTFDINEIMLTKIEKGQEDFDVVCPSEYIIERMLKKDLLLPIDTVFPHSPDYMNDVSPYIREQIDKLSQPGRVASHYAVCYMWGTAGILYNKAFVPDADAESWSCLWDRKYAGKILMKDSYRDAYGTAIIYAHARDLAGGKVTVEDLMNDYSPRAMEIAEKYLKAMKPNIAGWEADFGKEMMTKNKAWPNMTWSGDAKWAIEEADAVGVDLDYVVPREGSNIWYDGWVIPKYAGNPEAASYFINFMCRPDIALRNMEASGYVSAVASPEIMEAKTDTTLTYYSDLSYFFGPGADSLQIDKIQYPDRKVVERCAMIRDFGDKTKDVLEIWSRIKGDNLGVGITILIFVVVGVMSGWMIYKRIQRYKHKKMQRRRSRRRKKQR

SEQ ID NO: 48870 - protein, 267 aa, Bacteroides fragilis
MIEQLKNNKTGNFFLLAGPCVIEGEEMAMRIAEKIVNITDKLGIPYVFKGSYRKANRSRLDSFMGIGDEKALKVLEKVHNTFGVPTVTDIHAADEAAMAADYVDILQIPAFLCRQTDLLVAAAQTGKTINIKKGQFLSPLAMQFAADKVIEAGNKNVMLTERGTTFGYQDLVIDYRGIPEMQSFGYPVILDVTHSLQQPNQTNGVTGGMPQLIETVAKAGIAVGADGLFIETHENPAVAKSDGANMLKLDRLEGLLTKLVKIREAIM

SEQ ID NO: 48871 - protein, 383 aa, Bacteroides fragilis
MLTQIINGRIFTPQGWLNEGSVLMRDGKILEVTNCDLALIGANLVDARGMYIVPGFVCMHAHGGGGHDFTECTEEAFRTAIAAHMKHGATSFFPTLSSSPFSEIRKAVDICEKLMAEPDSPILGLHVEGPYLNRKMAGEQFANQVKEVDVAEYTSLLESTDCIKRWDASPELPGALDFARYLKSKGIVGAVSHTEAEYDGIKEAYEAGFTHAAHFYNAMPGFHKRREYKYEGTVESVYLTDGMTIELIADGIHLPSTILKLAYKLKGVEHTCLVTDALSYAAAEGKAIDDPRIIIEDGVCKLADRSALAGSIATMDQLVRTMVKADIPLADAIRMASETPARIMGVYDRKGSLQKDKDADILILDRDLNVKAVWAMGQLVKES

SEQ ID NO: 48872 - protein, 621 aa, Bacteroides fragilis
MNRRLSIFVIILFFLLPVAARAQVTGSFRFAQLTDIHLNPNNPKPTEDLKRSVEQINATPGVDFVLVTGDLTEEGDRTTMLVVKSILDRLKVKYYVIPGNHETKWSDSGCTAFSEIFGGERFKFEHKGFLFLGFNSGPLMRMAYGHVVPQDITWMKQEMDKVGKDKPVILVTHYPMQDGDVDNWYDVTDAVRPYNIRTFIGGHYHRNRFLSYDGIPGILTRSNLRDKNGSSGYSIFDITPDSIITYEQRIDEPMKRWTALSLTKSYYNRTGKAVKYPSFSVNKEYPQVKIGWQVQTGVGIYCSPALWKGRVYVGDDLGFLTCYTLKEGRKLWSFQSGKRIVGTPAATDGIVVFGSADHNIYGLDAVTGKERWRVTVAQPVLGAVTIEKGIAYIGGSDSTFRAIRIKNGKVVWTYTGIKGYIETKPLVEGDKVIFGAWDNTLYALNKSNGKELWKWTGGLTRMHFSPAAVWPVAAHGKVFITDPQRAMTAISLKTGKTVWRTFQSMVRETIGLSANKNQIYSKTMNDSVVCYSTISDTPKEIWASNVGFGYEHAPSMQMEKDDIVFSSTKEGLIFALDASTGQVLWKHKIGNSLINTVLPISRHQVLFTATSGETGLLEWKE

SEQ ID NO: 48873 - protein, 352 aa, Bacteroides fragilis
MEIIKTGLAAFGMSGQVFHAPFISTNPHFELYKIVERSKELSKERYPQASIVRSFKELTEDPEIDLIVVNTPDNTHYEYAGMALEAGKNVVVEKPFTSTTKQGEELIALAKKKGLMLSVYQNRRWDADFLTVRDILAKSLLGRLVEYESTFARYRNFIKPNTWKETGESGGGLTYNLGSHLIDQAIQLFGMPEAVFADLGILREGGKVDDYFIIHLLHPSLAPNVKITLKASYLMREAEPRFALHGTLGSYVKYGVDKQEAALLAGEIPERPNWGEESEQEWGLLHTEINGKEICRKYPGIAGNYGGFYQNIYEHLCLGQPLETHAQDILNVIRIIEAAYQSHRENKIVNLK

SEQ ID NO: 48874 - protein, 404 aa, Bacteroides fragilis
MVQSQTQPVRRIAFPILIALSVSHCLNDLLQSVISAVYPLFKEDLSLSFAQIGLITLVYQMSASVFQPLTGLIFDKRPIAWSLPIGMSFTLIGMLNLAFASNLNWLLASVFIIGIGSSVLHPEASRITFLASGGKRGLAQSLFQVGGNLGGSLGPLLVALLVAPYGRHHITLFAILALAAICVMFPICRWYRSYLNHLKKRPIHAKAYIERPLPPQKTVFAITILMILIFSKYIYMASLNSYYTFYLIHKFNVSIQQSQLFLFVFLVATAIGTLMGGPIGDKIGRKYVIWGSILGTAPFSLLMPHAGLVWTIILSFCVGLMLSSAFPAILLYAQELLPNKLGLISGLFFGFAFGVAGIASAVLGNMADKFGIDAVYNVCAFMPLLGLVTWFLPDLKKVRSEKQE

SEQ ID NO: 48875 - protein, 579 aa, Bacteroides fragilis
MTDIKNEEAGEKKSLNFIEQAVENDLKAGKNGGKVQTRFPPEPNGYLHIGHAKAICLDFGIAAAHGGVCNLRFDDTNPTKEDMEYVEAIQEDIRWLGFQWGNVYYASDYFQQLWDFAVTLIKEGKAYVDEQTSEQIAQQKGTPTQPGVESPYRNRPIEESLALFEKMNSDEVKEGSMVLRAKIDMASPNMHFRDPIMYRILHVAHHRTGTQWKAYPMYDFAHGQSDYFEGVTHSLCTLEFVPHRPLYDLFIDWLKEGKDLDDNRPRQTEFNKLNLNYTLMSKRNLLILVKEGLVNDWDDPRMPTLCGFRRRGYSPESIRKFIDKIGYTTYDALNDFALLESAVREDLNARATRVSAVLNPVKLIITNYPEGQVEELEAINNPEDTTAGSHTIEFSRELWMERDDFMEDAPKKYFRMTPGQEVRLKNAYIVKCTGCKKDENGTVTEVYCEYDPNTRSGMPDANRKVKGTLHWLSCNHCLPAEVRLYDRLWKVENPRDEMAAIREAKGCDALEAMKEMINPDSLTVLPHCYIEKYVADMPALSYLQFQRIGYFNIDKDSTPGHLVFNRTVGLKDTWGKINK

SEQ ID NO: 48876 - protein, 511 aa, Bacteroides fragilis
MEDINKAYATFAERDRIASLGGGAAKIDIQHESGKMTARERIDMLLDKGTFVELDKLMVHRCTNYGMDRNKIPGDGVVSGYGKIDGRQVFVYAYDFTVYGGSLSASNAKKIVKVQQLALKNGAPIIALNDSGGARIQEGIESLSGYADIFYQNTMASGVIPQISAILGPCAGGACYSPALTDFIFMVKEKSHMFVTGPDVVKTVIHEEVSKEELGGAMTHSSKSGVTHFMANTEEELLMSIRELLSFLPQNNMDEARKQNCTDDVNREDASLNSIVPADPNVPYDMKEIIERVVDGGYFFEVMQNFAKNIIIGFARMGGRSVGIVANQPAYLAGVLDIDASDKASRFIRFCDCFNIPLITFEDVPGFLPGYTQENNGIIRHGAKIVYAFAEATVPKLTVITRKAYGGAYIVMNSKQTGADVNFAYPSAEIAVMGAEGAVNILFRKADAETKAQELNAYKEKFATPYQAAELGFIDEIILPKQTRKRLIQALEMTENKMQTNPPKKHGNMPL

SEQ ID NO: 48877 - protein, 504 aa, Bacteroides fragilis
MIKRILVANRGEIAVRVMRSCREMEITSIAVFSEADRTAKHVLYADEAYCIGPAASKESYLNIEKIIEVAKSCHADAIHPGYGFLSENATFARRCREEGITFIGPDPETMEAMGDKISARIKMIEAGVPVVPGTQDNLKSVEEAVELCNQIGYPVMLKASMGGGGKGMRLIHHADEVAEAYTTAKSESLSSFGDDTVYLEKFVEEPHHIEFQILGDKHGNVIHLCERECSVQRRNQKIVEESPSVFITPELRRDMGEKAVAAAKAVNYIGAGTIEFLVDKHRNYYFLEMNTRLQVEHPITEEVVGVDLVKEQIKVADGQVLQLRQEDIQQRGHAIECRICAEDTEMNFMPSPGVIKQITEPNGIGVRIDSYVYEGYEIPIYYDPMIGKLIVWATTREYAIERMRRVLHEYKLTGVKNNISYLRAIMDTPDFVEGHYDTGFIAKNGEVLQQCITRTSERAENIALIAAYMDYLMNLEENNSGLAADNRPISKWKEFGLHKGVLRI

SEQ ID NO: 48878 - protein, 754 aa, Bacteroides fragilis
MSHLPTLIADLALILMSASIITLLFKWLKQPLVLGYIVAGLLAGPYVRIFPTVGDMENINTWAEIGVVFLLFALGLEFSFKKLMNVGSAAFITATIEVISMLLIGFMVGHLLGWSTMNSVFLGGMLSMSSTTIIIKAFDDLGLRSQRFTGIVFGTLVVEDLIAILMMVILSTMAVSKEFVGEELLMSVLKVAFFLILWFLVGIFILPFFLKKAKRLMNNETLLIVSLGLCLAMVVLATRTGFSAALGAFIMGSILAETVEAEHIEHIIQPVKDLFGAIFFVSVGMLVNPSVLLQYAWPVVIITLVTLVGKSIFSSLGVLLSGEPLKVSVKSGFSLAQIGEFAFIIAGLGASLKVLDPFVPPIIVAVSVITTFTTPYFIRLANPFSEWLYKVLSPRTREFLDRYASGKKTVNHDSDWKRLLKTIVGRVIIYSVLLTAIWLLSVQTVYPTINGMFDSPGRWLSVVMCLLTLLLMTPFLWALVSDKYNSPDVFLKLWNDDNYNHGRLVALILFRVSVAVFFIAGVVISYFSLNYGIGIVIAVAVLGLILLLRENLTQYSHLENHFLTNLNGREEAARNRYPLKSRFNSEFSDKDIELTSVWVSPYSSYIGKSLEELPFRREFGVNVVGIVRGERRIYIPQSDECIYPQDKLIVVGTDGQLQKFRSELDIRQDFPDEKNVRQEVTLHSFTVDEESPLLNKSIAQSRLGKQYDSLIVAIEREDELISMNQSTVFRLGDLVWIVGDREKIRQLLMRKKHV

SEQ ID NO: 48879 - protein, 548 aa, Bacteroides fragilis
MATPPFKYQPMFEHGEDKTEYYLLTKDYVSVSEFEGTPVLKVQKEGLTAMANTAFRDVSFMLRRAHNEQVAKILSDPEASENDKYVALTFLRNAEVAAKGILPFCQDTGTAIIHGEKGQQVWTGYCDEEALSLGVYKTYTEENLRYSQNAPLNMYDEVNTKCNLPAQIDIEATEGMEYKFLCVTKGGGSANKTYLYQETKAILNPGTLVPFLVEKMKTLGTAACPPYHIAFVIGGTSAEKNLLTVKLASTHYYDELPTTGNEYGRAFRDVELEKEVLAEAQKIGLGAQFGGKYLAHDVRIIRLPRHGASCPVGLGVSCSADRNIKCKINKDGIWIEKLDSNPGSLIPAELRGAGEGDVVKIDLNQPMADILKELTKYPVATRLSLNGTIIVGRDIAHAKLKERLDRGEDLPQYIKDHPIYYAGPAKTPAGMACGSMGPTTAGRMDPYVDLFQSHGGSMIMLAKGNRSQQVTDACKKYGGFYLGSIGGPAAILAQNNIKSIECVEYPELGMEAIWKIEVEDFPAFILVDDKGNDFFKQIKPRCGSCSNK

SEQ ID NO: 48880 - protein, 848 aa, Bacteroides fragilis
MREGTSYIIFTMKIHILFGMIGFILLSGCNRAAEKNPRFYDAGVSRELAGHRKVQIKNLKYELSFNIPRQKEVAIEGDITLRFDLASRQEVLIDFREELEKIKEVIANGVPMDKVRFENEHIILPASSTVEGANEIRIRFTAGNQSLNRNDEYLYTLLVPDRARTVFPCFEQPNLKAEFTLQLELPADWKAVSNTYIRSETVTDDRKTVCFAPTEPLSTYLFSFVAGKLERREYTRDGRTIAAYYRETDPKKVAQLDIVFGQVMASLHWLEEYTGIAYPFAKYDFIVLPGFQFGGMEHTGATLYNDNGIFLSEHPTPDEELNRAELIAHETSHMWFGDLVTMDWFDDVWTKEVFANYFAARIVEPLFPEINHTQNKLKTFTAASLSEDRTMGTNAIRQPLDNLRNAGLIYGQIIYNKAPVMMEKLVDKMGEANFRSGIQEYLKTYSYGNATWDDLIRILDSKTAEDLAAFSDVWVNRKGMPTLIFRTDGQELEIRQHDPYNRGLLWPQRFAVTLCGERDSVIRVNMTDTLFRMQLPFVPSRVLPNTDGRGYGVFVPDEPALHWLAAHWWEIEDDTARQSLLMVLYENYLAKHISADDWVNSLITGLPAEKNALVASTASGYLANVMWEIAPANRAEVEARIYTMTQNHPLPSCRIQLMRLFMQNAISEPMVKKLYILWQQQSDKHLNRQDYTTLAYELAIRMPLESEQILRTQRARIDDPDRLRQFDFISRAAVSDTARLDTLFNSLLAAENRRIEPWTTAVIRYLNHPLREDQSVKYIRPGLEVLEEVQRTGDIFFPKNWAAALLGNHLSSSAYEEVVRFLNERPDYSPLLKNKILQAAYPLYRANN

SEQ ID NO: 48881 - protein, 434 aa, Bacteroides fragilis
MASFVIEGGHRLSGEIHPQGAKNEVLQIICATLLTAEEVTVNNIPDILDVNNLIQLMRDMGVTVAKTGVDSYSFKAANVDLAYLESDNFLKKCSSLRGSVMLIGPMVARFGKAMISKPGGDKIGRRRLDTHFIGIQNLGADFTYNEEREIYEISAEELKGTSMLLDEASVTGTANIVMAAVLAKGKTTIYNAACEPYLQQLCKMLNRMGAKISGIASNLLTIEGVEELHGTDHTVLPDMIEVGSFIGMAAMTRSEITIKNVSYENLGIIPESFRRLGIKLEQRGDDIFVPAQDCYQIESFIDGSIMTIADAPWPGLTPDLLSVMLVVATQAKGSVLIHQKMFESRLFFVDKLIDMGAQIILCDPHRAVVIGHNHGFTLRGGNMTSPDIRAGIALLIAAMSAEGISRIHNIEQIDRGYQNIEGRLNAIGARITRI

SEQ ID NO: 48882 - protein, 431 aa, Bacteroides fragilis
MEQLYNYLPEKLVTFILVTLFSLLIGLSQRKISLKREGETTLFGTDRTFTFIGMLGYLLYILDPEEMHLFMGGGLILGILLGLNYYVKQSQFHVFGVTTIIIALITYCIAPIVSTQPSWFYVMVIVTVLLLTELKHTFTEIAQRMKNDEMITLAKFLAISGIILPMLPNENIIPDINLTPYTIWLATVVVSGISYLSYLLKRYVFRESGVLVSGIIGGLYSSTATISVLARKSRNAHSQEASEYVAAMLLAVSMMFLRFMILILIFSSTIFTSIYPYLLIMAAVAAVVAWFIHTRRKRTPDADLVEEEDDSSNPLEFKVALIFAGLFVIFTVLTHYTLIYAGTGGLNLLSFVSGFSDITPFILNLLQGTGSVAATVVMACTMQAIISNIVVNMCYALFFSGKQSKLRSWILGGFGCVIAANVVVLFFFYLI

SEQ ID NO: 48883 - protein, 359 aa, Bacteroides fragilis
EQLKDVKERTDALRRYLDIDGKKIQVEEEQLRTQAPGFWDDQKKAEAQMKLVKGLQKWIEGYNDVKTLTDELELAFDFYKDELVTEQEVDEAYAKALEHVENLELQNMLRDEADQMSCVLKINSGAGGTESQDWASMLMRMYLRYAETNGYKATMANLQEGDEAGIKTCTIQIEGDYAYGYLKGENGVHRLVRVSPYNAQGKRMTSFASVFVTPLVDDSIEVNILPACISWDTFRSGGAGGQNVNKVESGVRLRYQYKDPYTGEEEEILIENTETRDQPKNRENAMRQLRSILYDKELQHRMAEQAKVEAGKKKIEWGSQIRSYVFDDRRVKDHRTNFQTSDVNGVMDGKIEGFIKAYL

SEQ ID NO: 48884 - protein, 392 aa, Bacteroides fragilis
MHKVYLKPGKEDSLKRFHPWIFSGAIAHFDGEPEEGEVVEVYTSKKEFIAKGHFQIGSIAVRVLSFKQEEINHDFWKHKLEVAYDMRRSIGIATNPTNNTYRLVHGEGDNLPGLVIDVYARTAVMQAHSAGMHVDRMAIAEALSEVMGDQIENIYYKSETTLPFKADLFPENGFLKGGSSDNIAQEYGLKFHVDWLKGQKTGFFVDQRENRALLERYAKGRSVLNMFCYTGGFSFYAMRGGAKQVHSVDSSAKAIDLTNKNVELNFPGDTRHAAFAEDAFKYLDRMGDQYDLIILDPPAFAKHKDALRNALQGYRKLNAKAFEKIKPGGILFTFSCSQVVTKDNFRTAVFTAAAMSGRSVRILHQLTQPADHPVNIYHPEGEYLKGLVLYVE

SEQ ID NO: 48885 - protein, 229 aa, Bacteroides fragilis
MHVFYTPDIQTSTELPEEEAQHCVRVLRLTAGDEISLTDGKGNFYRAEISVATHKRCLVNIKETIYQEPLWDGHLHIAMAPTKNMDRNEWFAEKATEIGFDELTFLNCRFSERKVIKTERIEKILVSAIKQSLKARLPRLNEMTDFCTFIEKDFKGQKFIAHCYEGEKPLLKDVLTKGEDALVLIGPEGDFSEEEVKKAIEKGFVPISLGKSRLRTETAALVACHTMNM

SEQ ID NO: 48886 - protein, 410 aa, Bacteroides fragilis
MKYKLLVLDVDGTLLNDEKEITPRTLATLLKVQQMGVHIVLASGRPTYGILPLAKKLELGNYGGYILSYNGAQVINAKNGEVLLERRINPEMLPYLEKKARKNGFAIFTYTEDRMIADQADNEHILQEAFLNRMELIEEPEFSVAVDFAPSKCMLVSDDEEALIGLEEHWKKRLNGALDVFRSEPYFLEVLPCGIDKSTSLGALLSHLDITPEEIIVIGDGVCDVSMIQFAGLGIAMGNAQDSVKVCADVVTASNEEDGVALAVEKAILSEIRPAEIPLDQLNERARHALMGNLGIQYTYASEDRVEATMPVDERTRQPFGILHGGATLALAETVAGLGSMILCQPDEIVVGMQVSGNHMSSAHEGDTVRAVGTIIHKGRSSHVWNVDVFTSTDKLVSSIRVVNSILKKR

SEQ ID NO: 48887 - protein, 942 aa, Bacteroides fragilis
MQETEYINVYGARVHNLKDIDAEIPRNSLTVITGLSGSGKSSLAFDTIFAEGQRRYIETFSAYARNFLGNLERPDVDKITGLSPVISIEQKTTNKNPRSTVGTTTEIYDYLRLLYARAGIAYSYLSGEKMVKYTEEQILELILKDYKGKKIYMLAPLVRSRKGHYKELFEQIRKKGYLYVRIDGEVREITHGLKLDRYKNHDIEVVVDKLIVEDKDDKRLKQSVATAMRQGDGLLMILDAQTESIRHYSKRLMCPVTGLSYREPAPHNFSFNSPQGACPRCKGLGVVSQIDVDKVIPNKEMSIYEGAIAPLGKYKNAMIFWQIGALLEKYDASLKTPVKDLPNDAIDEILYGSDERIKIKSSLIGTSSDYFVTYEGVVKYIQMLQEKDASATAQKWAEQFAKTTVCPECKGAKLNKEALHFRIHDKNINELSNMDINELYDWLMKVDKFLTDKQKTIAAEILKEIRTRLKFLLDVGLDYLSLNRSSVSLSGGESQRIRLATQIGSQLVNVLYILDEPSIGLHQRDNLRLINSLKELRDMGNSVIVVEHDKDMMLAADYVIDMGPKAGRLGGEVVFAGTPEEMLKTSTLTSQYLNGQTAIEVPSKRRPGNGKSLWLRGAKGNNLKNVDVEFPLGKLICVTGVSGSGKSTLINETLQPILSQKFYRSLQDPLEYDSIEGLENIDKVVNVDQSPLGRTPRSNPATYTGVFSDIRSLFVGLPEAKIRGYKPGRFSFNVSGGRCEACSGNGYKTIEMNFLPDVYVPCEVCHGKRYNRETLEVRFKGKSIADVLDMTINRAVEFFENVPQILNKIKTIQDVGLGYIKLGQSSTTLSGGESQRVKLATELSKRDTGKTLYILDEPTTGLHFEDIRVLMGVLNKLVDKGNTVIVIEHNLDVIKMADYIIDMGPEGGKGGGELLSFGTPEEVAKSNKGYTPKFLREELKIN

SEQ ID NO: 48888 - protein, 286 aa, Bacteroides fragilis
MRQLKITKSITNRESASLDKYLQEIGREDLITVEEEVELAQRIRKGDRVALEKLTRANLRFVVSVAKQYQNQGLSLPDLINEGNLGLIKAAEKFDETRGFKFISYAVWWIRQSILQALAEQSRIVRLPLNQVGSLNKISKAFSKFEQENERRPSPEELAGELDIPVDKISDTLKVSGRHISVDAPFVEGEDNSLLDVLVNDDSPMADRSLVNESLAREIDRALSTLTDREKEIIQMFFGIGQQEMTLEEIGDKFGLTRERVRQIKEKAIRRLRQSNRSKLLKSYLG

SEQ ID NO: 48889 - protein, 521 aa, Bacteroides fragilis
MNKKNSMKQTTKNILGIGAVVLLSAGVAGVTTYTMLKPENRDSLSFNEQFRQNPGARLAAYDAINAQPVDLTQAAENSLHAVVHIKSTQQAKEQTVTVRDPFAEIFGDIFGNGGRQQRRVQTQPRVGFGSGVIISKDGYIVTNNHVIDGADEIIVKLNDNREFKGRMIGTDPNSDLALVKIEGDDFPTIPVGDSDALKVGEWVLAVGNPFNLTSTVTAGIVSAKARTLGVYGIGGVESFIQTDAAINQGNSGGALVNAKGELVGINAVLSSPTGAYAGYGFAIPTSVMTKVVSDLKQYGTVQRALLGIKGTSLAGDGDMMSDQPIDKSGATLSDKRKEFGVVDGVWVREIVDGGSAAGSDIKVDDVIIGIDGKKVQNFADLQEAIAQHRPGDKVTVKVMRDKKEKNINITLKNEQGTTKIVKDAGMEILGAAFKELPDDLKKQLNLGYGLQVTGVTSGKMADAGVRKGFIILKANDQPMRKVSDLEEVMKAAVKSPNQVLFLTGVFPSGKRGYYAVDLTQE

SEQ ID NO: 48890 - protein, 445 aa, Bacteroides fragilis
MNIEKIMSSLEAKHPGESEYLQAVKEVLLSIEDIYNQHPEFEKAKIIERLVEPDRIFTFRVTWVDDKGEVQTNLGYRVQFNNAIGPYKGGIRFHASVNLSILKFLGFEQTFKNALTTLPMGGGKGGSDFSPRGKSDAEIMRFCQAFMLELWRHLGPDMDVPAGDIGVGGREVGYMFGMYKKLTREFTGTFTGKGLEFGGSLIRPEATGFGGLYFVNQMLQTKGIDIKGKTVAISGFGNVAWGAATKATELGAKVVTISGPDGYIYDPNGISGEKIDYMLELRASGNDIVAPYADEFPGSTFVAGKRPWEVKADIALPCATQNELNGEDAKNLIDNNVLCVGEISNMGCTPEAIDLFIEHKTMYAPGKAVNAGGVATSGLEMSQNAMHLSWSAAEVDEKLHSIMHGIHAQCVKYGTEPDGYINYVKGANIAGFMKVAHAMMGQGII

SEQ ID NO: 48891 - protein, 646 aa, Bacteroides fragilis
  MISC_FEATURE (9)..(9): X=any amino acid
  MISC_FEATURE (15)..(15): X=any amino acid
  MISC_FEATURE (20)..(20): X=any amino acid
  MISC_FEATURE (26)..(26): X=any amino acid
IKNSKQNSXPIKKDXKRKSXRLTKNXKKLSTSLKQTKKMDLFNYSRRETSEVNIGAVPLGGPNPIRIQSMTNTPTQDTEACVAQAKRIVDAGGEYVRLTTQGVKEAENLMNINIGLRSTGYMVPLVADVHFSPKVADVAAQYAEKVRINPGNYVDPGRTFKQLEYTDEEYAAELQKIRDRFVPFLNICKENHTAVRIGVNHGSLSDRIMSRYGDTPEGMVESCMEFLRICVDEKFTDVVISIKASNTVVMVKTVRLLVSVMEQEGMSFPLHLGVTEAGDGEDGRIKSALGIGALLADGLGDTIRVSLSEEPEAEIPVARKLVDYITSRRNHPYIPGMEAPDFNYLSPVRRKTRPVRNIGGDHLPVVLADRMDGRMETHPQFTPDYIYAGRALPEQTEPGVQYILDATYGKENLTRGLPSIMHQLELMETCAAELKFLFTPYMALTREVVACLKQHPETVVVSQSNHPNRVGEHRALAHQLTVEGLQNPVIFFQHYAEDTAEDLQVKAGADMGALIFDGLCDGIYLFNQGKLSHAVIDATAFGILQAGRIRTSKTEYISCPGCGRTLFNLQSTIARVKEATSHLKGLKIGIMGCIVNGPGEMADADYGYVGAGRGKISLYKQKECIEKNIPEEEAVEKLIELIKANG

SEQ ID NO: 48892 - protein, 363 aa, Bacteroides fragilis
MGKEKIILTGDRPTGKLHIGHYVGSLKRRVELQNSGSFDKTFIFIADAQALTDNIDNPEKVRQNVIEVALDYLACGLDPEKSTIFIQSQIPELCELTFYYMDLVTVSRLQRNPTVKTEIQMRNFETSIPVGFFTYPISQAADITAFRATTVPVGEDQEPMIEQAREIVRRFNYIYGETLVEPEILLPDNAACLRLPGTDGKAKMSKSLGNCIYLAEEADEIQKKVMSMFTDPDHLRVQDPGKIEGNTVFTYLDAFCRPEHFERYLPDYPNLNELKAHYQRGGLGDVKVKRFLNSIIQEELEPIRNRRKEFEKDIPAIYEMLRKGCEVARAAAADTLSDVRKAMKINYFDDAELINEQVKRFNK

SEQ ID NO: 48893 - protein, 1078 aa, Bacteroides fragilis
MTIKEMEKEMKKVLVLGSGALKIGQAGEFDYSGSQALKALKEEGINSVLVNPNIATIQTSEGIADKVYFLPVTTYFVEEIIKKERPDGILLAFGGQTALNCGAELYTKGILDKYGVKVLGTSVEAIMYTEDRDLFVKKLDEIEMKTPISQAVESMEDAIAAARRIGYPVMVRSAYALGGLGSGICANEEEFLKLAESSFAFSKQILVEESLKGWKEIEFEVIRDANDHCFTVASMENFDPLGIHTGESIVVAPTCSLDDKELKMLQELSTKCIRHLGIVGECNIQYAFNSDTDDYRVIEVNARLSRSSALASKATGYPLAFVAAKVALGYTLDQIGEMGTPNSAYVAPQLDYYICKIPRWDLTKFAGVSREIGSSMKSVGEIMSIGRSFEEIIQKGLRMIGQGMHGFVGNDDVHFEDLDKELSHPTDLRIFALAQAMEEGYTIERIHELTKIDPWFLGKLKNIVDYKAKLSAYDKVEDIPADVLREAKVLGFSDFQIARFVLNPVGNMEKENLMVRARRKELGILPAVKRINTIASEHPELTNYLYMTYAVQGYDVNYYKNEKSVVVLGSGAYRIGSSVEFDWCSVNAVQTARKLGYKSIMINYNPETVSTDYDMCDRLYFDELSFERVLDVIDLEQPRGVIVSVGGQIPNNLAMKLYRQSVPVLGTSPISIDRAENRNKFSAMLDQLGIDQPAWQELTSLEDVKGFVEKVGYPVLVRPSYVLSGAAMNVCYDDEELENFLKMAAEVSKEYPVVVSQFLENTKEIEFDAVAQNGEVVEYAISEHIEFAGVHSGDATLVFPAQKIYFATARRIKKISRQIAKELNISGPFNIQFLARNNEVKVIECNLRASRSFPFVSKVLKRNFIETATRIMLDAPYSRPDKSAFDIDWIGVKASQFSFSRLHKADPVLGVDMSSTGEVGCIGDDFSEALLNAMIATGFKIPGKGVMFSSGAMKSKVDLLEASRMLFNQGYKIYATAGTAAFLNAHGVDTTPVYWPDEKPGAENNVMKMIADHKFDLIVNIPKNHSKRELTNGYRIRRGAIDHNIPLITNARLASAFIEAFCDLKLEDIQIKSWQEYK

SEQ ID NO: 48894 - protein, 447 aa, Bacteroides fragilis
MAQKLWEKSVEVNKDIERFTVGRDREMDLYLAKHDVLGSMAHITMLESIGLLTKEELAQLLTELKDIYASAERGEFVIEEGVEDVHSQVELMLTRRLGDVGKKIHSGRSRNDQVLLDLKLFTRTQIREVAEAVEQLFHVLIRQSERYKNVLMPGYTHLQIAMPSSFGLWFGAYAESLVDDMLFLQAAFKMCNKNPLGSAAGYGSSFPLNRTMTTELLGFDSLNYNVVYAQMGRGKMERNVAFALATLAGTISKLAFDACMFNSQNFGFVKLPDECTTGSSIMPHKKNPDVFELTRAKCNKLQSLPQQIMMIANNLPSGYFRDLQIIKEVFLPAFQELKDCLQMTTYIMNEIKVNEHILDDDKYLFIFSVEEVNRLAREGMPFRDAYKKVGLDIEAGHFSHDKQVHHTHEGSIGNLCNDEISALMQRTIEGFNFQGMEQAEKTLLGRK

SEQ ID NO: 48895 - protein, 250 aa, Bacteroides fragilis
MLEIKDLHASINGKEILKGINLTVKPGEVHAIMGPNGSGKSTLSSVLVGNPAFEVTKGSITFYGKNLLELSPEDRSHEGIFLSFQYPVEIPGVSMVNFMRAAVNEQRKYKGLPALTASEFLKLMREKRAVVELDNKLANRSVNEGFSGGEKKRNEIFQMAMLEPRLSILDETDSGLDIDALRIVAEGVNKLKTPDTSCIVITHYQRLLDYIKPDIVHVLYKGRIVKTAGPELALELEEKGYDWIKKELGE

SEQ ID NO: 48896 - protein, 1015 aa, Bacteroides fragilis
MTIRLNKVTRDLNVGIATVVEFLQKKGYTVEANPNTKITEEQYAMLVKEFSTDKNLRLESERFIQERQNKDRNKASVSIDGYDKKEPEKTVADDVIKTVIPEDVRPKFKPVGKIDLDKLNRKVEKEPVKEEPKPQPVAAEEKKVAEEVKPVVNEVKKEEVTVTPATSEPKPVKEEPKPVVVEKPVETEKKVVEEVKKEEPKVVVSPEKTEKKEEKPVAEAPVTPVEKEEEGVFKIRPTEFVSKINVIGQIDLAALNQSTRPKKKSKEEKRKEREEKEKLRQDQKKQMKEAIIKEIRKEDSKQAKVVGKENLDPNGKKKRNRINNNKEKVDVNNVASNFAHPTPNSERTNNNRGGNQQGGGGQNRNRNNNNKDRFKKPVVKQEVSEEDVAKQVKETLARLTSKGKNKGAKYRKEKRDMASNRMQELEDQEMAESKVLKLTEFVTANELASMMNVSVNQVIGTCMSIGMMVSINQRLDAETINLVAEEFGFKTEYVSAEVAQAIVEEEDAPEDLEHRAPIVTVMGHVDHGKTSLLDYIRKANVIAGEAGGITQHIGAYHVTLEDGRKITFLDTPGHEAFTAMRARGAKVTDIAIIIVAADDDVMPQTKEAINHAAAAGVPIVFAINKIDKPHANPEKIKETLAQMNYLVEEWGGKYQSQDISAKKGLGVPELMEKVLLEAEMLDLKANPNRNATGSIIESTLDKGRGYVATVLVSNGTLKVGDIVLAGTSYGRVKAMFNERNQRVAQAGPSEPVLILGLNGAPAAGDTFHVIETDQEAREIANKREQLQREQGLRTQKLLTLDEVGRRIALGNFQELNVIVKGDVDGSIEALSDSLIKLSTEQIQVNVIHKAVGQISESDVTLAAASDAIIIGFQVRPSASARKFAEQEGVDIRLYSVIYAAIEEVKAAMEGMLAPEVKEVVTATIEVREVFHITKVGTVAGAVVKEGKVKRSDKARLIRDGIVIFSGSINALKRFKDDVKEVGTNFECGISLVNYNDLKVGDMIETYEEVEVKQTL

SEQ ID NO: 48897 - protein, 1040 aa, Bacteroides fragilis
MTSLCFLAVVIFGLFSLSKLPIDLYPDIDTNTIMVMTAYPGASASDIENNVTRPLENTLNAVSNLKHITSRSSENMSLITLEFEYGNDIDVLTNDVRDKLDMVSSQLPDDVENPIIFKFSTDMIPIVLLSVQANESQSALYKILDDRVVNPLARIPGVGTVSISGAPQREIQVYCDPGKLEAYNLTIETISSIIGAENKNIPGGNFDIGNETYSLRVEGEFDDSRQLEDVVVGSYNGANVYLRDVARVVDTVEERAQETYNNGVKGAMIVVQKQSGANSVDISKKVAEALPKLQKNLPSDVKLGVIVDTSDNILNTIDSLAETVLYALLFVVIVVFLFLGRWRATLIICITIPLSLIASFIYLAVTGNTINIISLSSLSIAIGMVVDDAIVVLENVTTHIERGSDPKQAAVHGTNEVAISVIASTLTMIAVFFPLTMVSGMSGVMFKQLGWMMCAIMFISTVAALSLTPMLCSQLLRLQKKQSKTFKLLFGPIEKGLDALDTGYARMLNWAVRHRPIVIFGCIVFFVVSLFCAKSIGTEFFPAQDNARIAVQLELPIGTRKELAQEVSEKLTNQWLNKYKGVMTVCNYTVGQADSDNTWASMQDNGSHIISFNISLVDPGDRDISLEQVCDEMREDLKKYPEFSKAQVILGGSNTGMSAQASADFEVYGYSMEETDSVAARLKRELLNVKGVSEVNISRSDYQPEYQVDFDREKLALHGLNLATAGNYLRNRINGAIASKYREDGDEYDIKVRYAPEYRTSIESIENILIYNSRGEAVRVKELGKVVERFAPPTIERKDRERIVTVSAVISGEALGNVVNAGNAIIDKMDIPSDVTIQVAGSYEDQQDSFRDLGTLAILIVVLVFIVMAAQFESLTYPFIIMFSLPFAFSGVLMALFFTKSTLSVMSLLGAIMLIGIVVKNGIVLIDYITLCRERGLAVLNSVVTAGKSRLRPVLMTTATTVLGMIPMAIGGGQGSEMWSPMAIAVIGGLTVSTILTLVLIPTLYCVFAGTGIKHQRKVLRRKRELEAYFEEHKDEMIKK

SEQ ID NO: 48898 - protein, 498 aa, Bacteroides fragilis
MNNVYYVGSGELTFSIIERIINENLKLELAPEAEQRIRKCRDYLDRKIAASTEPLYGITTGFGSLCSKNISSDELNTLQENLVKSHACSVGEELRPVIIKLMLLLKAHALSLGHSGVQVITVQRILDFFNNDVMPIVYDRGSLGASGDLAPLANLFLPLIGVGDVYYKGKKREAISVLDEFGWEPVRLMSKEGLALLNGTQFMSANGVFALLKARRLSKKADMIAALSLEAFDGRIDPFMECIQQIRPHPGQIETGEIFRRLLHGSELIARTKEHVQDPYSFRCIPQVHGATKDAIRYVSSVLLTEINSVTDNPTIFPDEDQIISGGNFHGQPLALSFDFLAIAMAELGNISERRVAQLIMGLRGLPEFLVANPGLNSGFMIPQYAAASMVSQNKMYCYAASSDSIVSSNGQEDHVSMGANAATKLFRIMDNLEHILAIELMNAAQGIEFRRPAKTSPILERYLAAYRKEVPFVKDDIVMYKEIHKTVAFLNRTRSEY

SEQ ID NO: 48899 - protein, 1109 aa, Bacteroides fragilis
MGFNEFLSSIFGNKSTRDMKEIQPWVDKIKAAYPEVAKLDNDGLRAKTEELKEYIRNSASKERAKADELRAGIENVELEDREEVFAQIDKIEKEILEIYEKALDEVLPVAFSIVKESAKRFSENEEIVVTATDFDRTLAATKDFVRIEGDKAIWQNHWNAGGNDTVWNMVHYDVQLFGGVVLHKGKIAEMATGEGKTLVATLPVFLNALTGNGVHVVTVNDYLAKRDSEWMGPLYMFHGLSVDCIDRHQPNSDARRQAYLADITFGTNNEFGFDYLRDNMAISPKDLVQRQHNYAIVDEVDSVLIDDARTPLIISGPVPKGEDQLFDQLRPLVERLVEAQKVLATKYLSEAKKLINSDDKKEVEEGFLALFRSHKALPKNKALIKFLSEQGIKAGMLKTEEVYMEQNNKRMHEATDPLYFVIDEKLNSVDLTDKGVDLITGNSEDPTLFVLPDIAAQLSELENEHGLSDEQKLEKKDALLTNYAIKSERVHTINQLLKAYTMFEKDDEYVVIDGQVKIVDEQTGRIMEGRRYSDGLHQAIEAKEGVKVEAATQTFATITLQNYFRMYHKLSGMTGTAETEAGELWDIYKLDVVVIPTNRPIARKDMNDRVYKTKREKYKAVIEEIEQLVQAGRPVLVGTTSVEISEMLSKMLTMRKIEHNVLNAKLHQKEADIVAKAGLSGTVTIATNMAGRGTDIKLSPEVKAAGGLAIIGTERHESRRVDRQLRGRAGRQGDPGSSVFFVSLEDDLMRLFSSDRIASVMDKLGFQEGEMIEHKMISNSIERAQKKVEENNFGIRKRLLEYDDVMNKQRTVVYTKRRHALMGERIGMDIVNMIWDRCAAAIENNADYEECKLDLLQTLAMEAPFTEEEFRNEKKGKLADKTFDVAMANFKRKTERLAQIANPVIKQVYENQGHMYENILIPITDGKRMYNISCNLKAAYESESKEVVKSFEKSILLHVIDESWKENLRELDELKHSVQNASYEQKDPLLIYKLESVTLFDNMVNKINNQTVSILMRGQIPVAEPTEEQQEAARRVEVRQAAPEQRQDMSKYREQKQDLNDPNQQAAAQQDTREAVKREPIRAEKTVGRNDPCPCGSGKKYKNCHGRNS

SEQ ID NO: 48900 - protein, 347 aa, Bacteroides fragilis
MAQLNFGGVTENVVTREEFPLEKAREVLKNETIAVIGYGVQGPGQSLNLRDNGFNVIVGQRPGKTYEKAVADGWVPGETLFGIEEACEKGTIIMCLLSDAAVMSVWPTIKPYLTAGKALYFSHGFAITWSDRTGVVPQKDIDVIMVAPKGSGTSLRTMFLEGRGLNSSYAIYQDATGRAMERTIALGIGVGSGYLFETTFVREATSDLTGERGSLMGAIQGLLLAQYEVLRENGHTPSEAFNETVEELTQSLMPLFAKNGMDWMYANCSTTAQRGALDWMGPFHDAIKPVVQKLYNSVKTGNEAQISIDSNSKPDYREKLEAELKALRESEMWQTAVTVRKLRPENN

SEQ ID NO: 48901 - protein, 454 aa, Bacteroides fragilis
MAAKPGIPKGTRDFSPVEMAKRNYIFNTIRDVYHLYGFQQIETPSMEMLSTLMGKYGEEGDKLLFKIQNSGDYFSGITDEDLLSRNAAKLASKFCEKGLRYDLTVPFARYVVMHRDEITFPFKRYQIQPVWRADRPQKGRYREFYQCDADVVGSDSLLNEVELMQIVDTVFTRFGIRVCIKINNRKILTGIAEIIGEADKIVDITVAIDKLDKIGLDNVNKELAEKGISEEAIAKLQPIILLSGTNAEKLATLKTVLSDSETGLKGVEESEFILDTLQTMGLKNEIELDLTLARGLNYYTGAIFEVKALDVQIGSITGGGRYDNLTGVFGMAGVSGVGISFGADRIFDVLNQLELYPKEAVNGTQLLFINFGEKEAAFSMGILSKARAAGIRAEIFPDAAKMKKQMSYANVKNIPFVAIVGENEMNEGKAMLKNMESGEQQLVTAEELIGALTK

SEQ ID NO: 48902 - protein, 634 aa, Bacteroides fragilis
MKQNFFHRYLSAKVLPIWTILLIDIFIIVASCLLAYSLRYDFRSIFLDSSTIDKTILWTVVANLIFFRVFRTYSNVLRFSSFVDIMRIFVSLTVSYGVLMILSLLLDAYLGIRIGAISVLFMAYVINFAMMACSRIVVKMFFEVLNFDGSHTTNVFIYGAKEAGVNIAKSLRVNLRNHYRLRGFIADEPELIGKVMMGAKVFPNDEALIENMNDRDVHTIIVSPAKMEKLKKSDMIDTLLSNNVKLLTAPPLSEWGGQALNKTQLKEIQIEDLLQREPIEVDIHKIASHLEGKRVMITGAAGSIGSEIMRQVASFNPYKLILIDQAETPLHDIRLELQDRWRDIDAETIVADISNATRMEAIFREYKPQYIFHAAAYKHVPMMEDNVSESIQINVSGTRTLADLAVKFGSEKFVMISTDKAVNPTNVMGCSKRICEIYVQSLAKKLQKEGTRSVQFITTRFGNVLGSNGSVIPRFRDQIQRGGPVTVTHPEIIRYFMTIPEACRLVLEAGSMGNGGEIYIFDMGKPVKIVDLAKRMISLSGRTDVKIEFTGLRHGEKLYEELLNVKELTKPTYHEKIMIATVREYDYDEVKERIQKLIDVSYTYDQMKIVAAMKDIVPEFVSKNSCFEALDKKD

SEQ ID NO: 48903 - protein, 383 aa, Bacteroides fragilis
MGPRKAAEMFLTRHPEAASFKVTLYGSLAATGKGHMTDVAIIDTLKPTAPVDIIWQPKIFLPFHPNGMNFVALDAGGNELENWTVYSVGGGALAEDNKQPSIESPEVYSMNSMTEILDWCEHTGKSYWEYVKECEDPDIWDYLKEVWDTMKESVQRGLEQEGVLPGPLNLRRKASTYYIRATGYKASLQSRGLVFAYALAVSEENASGGKIVTAPTCGSCGVMPAVLYHLAKSREFSEMRILRALATAGLIGNIVKQNASISGAEVGCQGEVGVACAMASAAANQLFGGSPAQIEYAAEMGLEHHLGMTCDPVCGLVQIPCIERNAYAAARALDANLYSSFTDGMHRVSFDKVIQVMKQTGHDLPSLYKETSEGGLAKDYKPM

SEQ ID NO: 48904 - protein, 832 aa, Bacteroides fragilis
MIYPQNFEQKIGFDQIRQLLKDKCLSTLGEERVNEMNFSDHFEEVDELLNQVAEFVRIIQEEDNFPDQFFFDVRPSLKRIRIEGMYMDEQELFDLRRSLETIRDIVRFLQRNDEEESDCPYPSLKKLAGDITVFPQLITKIDGILNKYGKIKDNASTELSRIRRELANTMGSISRSLNSILRNAQSEGYVDKDVAPTMRDGRLVIPVAPGLKRKIKGIVHDESASGKTVFIEPAEVVEANNRIRELEGDERREIIRILTEFSNTLRPSIPEILQSYEFLAEIDFIRAKSHFAIQTNSIKPSLENEQLLDWTMAVHPLLQLSLAKHGKKVVPLDIELNLKRRILIISGPNAGGKSVCLKTVGLLQYMLQCGMLVPMHERSHVGLFGSIFIDIGDEQSIEDDLSTYSSHLTNMKIMMKNCNERSLILIDEFGGGTEPQIGGAIAEAVLKRFNIKGTFGVITTHYQNLKHFAEDHEGVVNGAMLYDRHLMQALFQLQIGNPGSSFAVEIARKIGLPEDVIADASEIVGSEYINADKYLQDIVRDKRYWEGKRQTIRQREKHMEETIARYQAEMEELQKSRKEIIRQAKEEAERLLQESNARIENTIRTIKEAQAEKEKTRLVRQELADFRESIDNLTSKEQEDKIARKMEKLKEKQNRKKEKKQNGTKEQPAVQQTPKATPITEGCPVRIKGQSSVGEVLEINGKNAVVAFGSIKTTVKTERLERSNAIPQKQESAKSSFVSNQTQDSMYEKKLNFKQDIDVRGMRGDEALQAVTYFVDDAILVGMSRVRILHGTGTGILRTLIRQYLQTIPGVRHFADEHIQLGGAGITVVDLA

SEQ ID NO: 48905 - protein, 447 aa, Bacteroides fragilis
MKYQVIIIGGGPAGYTAAEAAGKAGLSVLLFEKQNLGGVCLNEGCIPTKTLLYSAKTYDGAKHASKYAVTVPEVFFDLPKIIARKSKVVRKLVLGVKSKLTSNNVTIISGEATILDKNTVRCGEETYECDNLILCTGSETFIPPISGIDSVNYWTHREALDNKELPASLAIVGGGVIGMEFASFFNSLGVKVTVIEMMDEILGGMDKELSALLRADYAKRGIQFLLSTKVVSLAQTEEGAVVSYENAEGAGSVIAEKLLMSVGRRPVTKGFGLENLNLQRTERGSIVVNGQMESSLPGVYVCGDLTGFSLLAHTAVREAEVAVHAILGKEDRMSYAAIPGVVYTNPEIAGVGQTEESLTAKGIAYRAVKLPMAYSGRFVAENEGVNGVCKVLLGEDDTILGAHVLGNPASEIITLAGMAVEMKLKAAEWKKIVFPHPTVAEIFREAL

SEQ ID NO: 48906 - protein, 537 aa, Bacteroides fragilis
MSDLMAGIIVGIVALPLAIAFGIASGVSPEKGIITAIIAGFIISLLGGSKVQIGGPTGAFIVIIYGIIQQYGEAGLIVATLMAGILLILLGVFKLGAIIKFIPYPIIVGFTSGIAVTIFTTQIADIFGLNFGGEKVPGDFIGKWMIYFRHFDTVNWWNAVVSILSIIIIAITPRFSKKIPGSLIAIIVVTIGVYVLKTYAGIDSIDTIGDRFTIKSELPEAAIPTLNWEAIKDLFPVAITIAVLGAIESLLSATVANGVTGDKHDSNTELIAQGTANLITPLFGGIPATGAIARTMTNINNGGKTPVAGIIHAIVLLLILLFLMPLAQYIPMACLAGVLVIVSYNMSEWRTFKALLKNPKSDVTVLLITFFLTIIFDLTIAIEVGLVIACILFMRRVMETTEISVIKDEIDPNDELDIAVCEEHLIIPAGVEVYEINGPYFFGIATKFEETMAQLGDRPKVRIIRMRKVPFIDSTGIHNLTSLCKMSQKEKITIVLSGVNEKVHKTLEKSGFYELLGKQNICPNINVALDRAKEIIN

SEQ ID NO: 48907 - protein, 195 aa, Bacteroides fragilis
MESEKEKMGTGRLYDANYDTELIAERQACKELCYTLNHLPPSQIAEREAIIRRLFCKTKERFLLEQPFYCDYGYNIEIGENFYANMNCVILDEAKVTFGDNVFIAPSCGFYTAGHPLDVEQRNRGLEYARPIRVGNNVWIGAQVCVLPGVTIGDNTVIGAGSVVNRDIPANVIAAGNPCRVIREITEEDKTKYLL

SEQ ID NO: 48908 - protein, 281 aa, Bacteroides fragilis
MNSNIEKSDKPSFIKISEQPSLYDDLEKKSVREILEDINKEDQKVAIAVQKAIPQIEKLVTQIVPRMKQGGRIFYMGAGTSGRLGVLDASEIPPTFGMPPTLIIGLIAGGDTALRNPVENAEDNTIRGWEELTEHNINDKDTVIGIAASGTTPYVIGAMHAAREHGILTGCITSNPNSPMAAEADIPIEMIVGPEYVTGSSRMKSGTGQKMILNMITTSVMIQLGRVKGNKMVNMQLSNRKLVDRGTRMIIEELGLEYDKAKALLLMHGSVKKAIDAYKAG

SEQ ID NO: 48909 - protein, 669 aa, Bacteroides fragilis
MNDSKLMNRAADNIRILAASMVEKANSGHPGGAMGGADFVNVLFSEFLVYDPQNPRWEGRDRFFLDPGHMSPMLYSVLAFTGKYTLDELKQFRQWGSPTPGHPEVNVDRGVENTSGPLGQGHTYAVGAAIAAKFLKARFGEVMNQTIYAYISDGGIQEEISQGAGRIAGTLGLDNLIMFYDSNDVQLSTNTEDVTTENVAMKYEAWDWKVITINGNDPDEIRKALTEAKAEKNRPTLIIGKTTMGKGARRADGSSYEADCATHGAPLGGDAYVNTIKNLGGNPENPFTIFPEVAELYAKRAEELKKIVADKYAAKAEWAKANPEKAAKLAEFFSGKAPKVNWDAIEQKAGGATRAGSATVLGALATQVENMIVSSADLSNSDKTDGFLKKTHAFKKGDFSGAFLQAGVSELSMACICIGMSLHGGIIAACGTFFVFSDYMKPALRMAALMEQPVKFIWTHDAFRVGEDGPTHEPVEQEAQVRLLEKLKNHKGHNSMLVLRPADVEETTIAWKLAMENMSTPTALILSRQNIVNLPAGTDYSQAAKGAYIIADADENPDVILVASGSEVSTLVAGAELLRKEGVKVRIVSAPSEGLFRNQSKEYQESILPAGAKIFGLTAGLPVNLEGLVGSNGKVFGLESFGFSAPYKVLDEKLGFTAENVYNQVKAML

SEQ ID NO: 48910 - protein, 144 aa, Bacteroides fragilis
MKKIGICCDHAGFELKEYVRGWLEAKGWEYKDFGTYSTDSCDYPDFAHPLALAVEAGECYPGIAICGSGNGISMTLNKHQGIRAALCWTAEIAHMARLHNDANVLVMPGRYISTEEADMIMTEFFSTEFEGGRHQKRIDKIPVK

SEQ ID NO: 48911 - protein, 399 aa, Bacteroides fragilis
MGQTFFGYDRTQEHEHFLDWLAGVLTKNKIDVLIVAGDVFDVSNPSAASQRMFYRFIHRVTTENPRLQLVVVAGNHDSAARLESPLPLLQEMRTEIKGIVRKQNGKIDYEHLLVELKNAAGEVEALCLAVPFLRQGDYPVVETEGNPYAEGVKELYARLLKYALKKRTDGQALVAVGHLLATGSEIAEKDHSERIIIGGLESVSPESFPEQIVYTALGHIHKAQRVSGRENIRYAGSPLPMSFAEKHYHHGVVKVTLDEGWAVEIEKLEYTPLVRLLSIPATEAAAPDEVLDELRGLELPEDEPMPYLEVKVKLSEPEPMLRQQVEEILEGKPVRLARIVSFYRQAAEGSVEEETLTAGLQEMNPLQIVKATFENSYQTEMPEELVNLFQEACRTINLE

SEQ ID NO: 48912 - protein, 287 aa, Bacteroides fragilis
MNKLNGFLYGLLSSASFGLIPLFTIPAMREGMNFESILFYRFLFACLALGCILLLDKQSFHIKRKEIPSLMLLAFLYLMSAVFLFWGYKFMASGVATTIHFMYPVLTTLIMMIFFRERKSTWRFFAIALAVVGVSCLSYGDSSGGITALGLFIVLLSALGYALYLVTVSQLKIGQMKGLRLTFYVFLFGTLLLLAGIGTTTGIQTIPDWHTGGNLVLLALIPTVVSNLALVRAVKSIGSTLTSVLGAMEPVTAVCVGIFIFGEPFTQSIGIGILLIISAVIVIILKR

SEQ ID NO: 48913 - protein, 608 aa, Bacteroides fragilis
MIKQRKIELLAPAKNLECGIAAIDHGADAVYIGAPKFGARAAAVNSLEDIAALVEYAHLYNARIYVTVNTILKDEELQETEKMIWALFRAGVDALIVQDMGITGLNLPPIPLHASTQMDNRTVEKVRFLADAGFRQVVLARELSLREISKIHEACPDVPLEIFVHGALCVSYSGQCYVSQACFGRSANRGECAQFCRLPFSLVDAEGRVIVKDKHLLSLKDLNQSDELEALLDAGASSFKIEGRLKDVSYVKNVTAAYRRKLDAIFARRKEYARASSGSCRYAFNPQLDKSFSRGFTHYYLHGRTKDVFSFDTPKSLGEEMGTMKEARGNYLTVAGLKSFNNGDGVCYIDEQGRLQGFRINRVEGNKLYPQEMPRIKPRTVLYRNFDQEFEKILARKSSERRIAVSVRLTDTPFGFALTLTDEDDNSVTLSLAREKEPARTPQEENLKTQLAKFGNTPFEAVRIDIDFAGNWFLPASVLADFRRQAVEKLISARRINYRRELFVLKPTAHAFPQSTLTYLGNVMNAQAVSFYTGHGVASIAPAFERAPAEKAVLMFCKHCLRYSMGWCPVHQRERSPYREPYYLVSTDGKRFRLEFDCKNCQMKVNAV

SEQ ID NO: 48914 - protein, 264 aa, Bacteroides fragilis
MKQYLDLLDRVLTEGIEKGDRTGTGTISVFGHQMRFNLDEGFPCLTTKKLHLKSIIYELLWFLKGDTNVKYLQDHGVRIWNEWADETGDLGHVYGYQWRSWPTYDGGFIDQISEAVDAIKHNPDSRRIIVSAWNVGDLDHMNLPPCHAFFQFYVANGRLSLQLYQRSADIFLGVPFNIASYALLLQMMAQVTGLQAGDFIHTLGDAHIYLNHLEQVKLQLSREPRPLPQMKINPDVKNIFDFQFEDFELVNYDPHPHIAGKVAV

SEQ ID NO: 48915 - protein, 684 aa, Bacteroides fragilis
MIDTTQEPLVGATITLKEKPSVGTTTDTEGRYTLTLPDQKEYTVQVSFVGYVTATKKTTAARQSRLDFILKEDQMNLSTVVITGTRTPKLLKDAPIITRVITAGDLKKVDATHIGQLLQVELPGIEFSYSMDQQVKLNMQGFGGNAVLFLVDGERLAGETLDNIDYNRLNLDNVERVEIVKGAASTLYGSSAIGGVINIITKASDDPWNLNLNTRFGVHNDQRHGGTVGFNAGKFYSQTNVQYTNIDSIHVKQGDYTTINGNKTWNVKERLMFTPNEQLRLTARAGYYFRERDASSETKNRYRGFSGGLKGNYDFNTKSNLELAYTFDQYDKSDYLVSYKNDIRDYSNVQHSVRALYNYTFNDKNTLTVGGDYLRDYLMSYQFKENADYTMHSADAFGQFDWNPTEHFNVIAGLRFDYFSESNVRHFSPHLGLMYKIGNCSLRGSYAQGFRSPTLKEMHMNFYMANTMMIYGNPDLEPETSHNFSLSGEYTKNRYNFTLTGYYNLVHDRIEYTSFRDTDGMIAQKYINTPRVDIAGIDANASAKYPCGIGARISYTYIHEFMRDGQTKLSSTRPHSATVRLEYGKTWDHYDFNLSLDGRALSQVKTNQYTSNDPNAGTEKVTYPGYTMWNLTLTQRVWKGINVNMAVNNLFNYRPDYYYANSPYTTGTNFSVGLSLDIDQMFRK

SEQ ID NO: 48916 - protein, 388 aa, Bacteroides fragilis
MLTQLINARILTPQGWMKDGSVLIRDNKILEVTNCDLAVIGAELIDVKGMYVVPGGVEIHVHGGGGRDFMECTEDAFRAAVHTHMKHGTTSIFPTLSSSTVPMIQQAAETCTKLMEEKNSPILGLHLEGHYLNMKMAGGQIPENIKNPDPNEYIPIVEQYHCIKRWDAAPELPGAMQFGKYIAAKGILPSVAHTQAEFEDIRTAYEAGYTHATHFYNAMPGFHKRREYKYEGTVESIYLLDDMTVEVVADGIHVPPTILRLVYKIKGVERTCLITDALACADSDSKEAFDPRVIIEDGVCKLADHSALAGSVATMDRLIRTVVQKAEIPLEDAVRMASETPARIMGVYDRKGSLQKGKDADILVLDEDLNVRAVWAMGKLVPETNTLF

SEQ ID NO: 48917 - protein, 291 aa, Bacteroides fragilis
MFFLTDETFWDKLILTLPTGMAIKSLDDNEPKLKNALPQQIFTKTALEPGVLKSVVDEINKIDPQKFNDHDLIGRVYESFLQAFSINADKEEGEFYTPHSIVELIASLIEPFDGTVYDPCCGSGGMFVQAAIFIEAHGGNTKAVNVYGQESEPATYRLAKMNLAIRGISYHLGDRAVSTFSDDQHKELKFDNTMANPLKKYAEYGGFETDPRWQGYGVPPTSNANYAWILHILNKLNVSCGIAGFLLANGALGDSDTQGIRKQLIESDKVEAIIVSPRNMFYSTDISSVTL

SEQ ID NO: 48918 - protein, 503 aa, Bacteroides fragilis
MIKKILVANRGEIAMRIFRTCRVMNIATVAIYTRVDRGALHVRYAEEAYCISDSPEDTSYLKPEKILQIAKKTGAAIHPGYGFLSENADFARRCEEEGVIFIGPSADIIARMGIKTEARRIMREAGLPIVPGTEDPVKGIAEAKKVAAEVGYPIMLKALAGGGGKGMRLVRSEEEMETALRLSQSEAGTSFGNDAVYIEKYIENPHHIEVQILGDKYGNVIHLYERECSIQRRNQKVIEESPSPFVNPETRAKMLKVAVEACKRINYYSAGTLEFMMDKDQNFYFLEMNTRLQVEHPVTEECTGVDLVRDMILVAAGNRLPYRQEDVEFRGAAIECRIYAEDPENNFMPSPGVITVREAPEGRNVRLDSAAYAGFEVSLHYDPMIAKLCCWGRNRDSAISNMARALREYKILGIKTTIPFHQRVLKNAAFLKGEYDTTFIDTRFDKEDLKRRQNTDPTVAVIAAALKHYEEEKEAASRATTLPVVGDSLWKYYGKLQMTANNY

SEQ ID NO: 48919 - protein, 514 aa, Bacteroides fragilis
MKELINRLEELNRQAEKGGGDARIEKQHSVGKLTARERIDLLLEKGSFIELDKLVTHRCTDFGMEKQKISGDGVVTGYGMIGKRLVYVFAQDFTVFGGALSETYARKICKVMDMAMQMGAPIIGLNDSGGARIQEGVRSLAGYAEIFLRNSLASGVIPQISAIMGPCAGGAVYSPALTDFILMVKNSGYMFITGPDVVKSVTQEEVSKEDLGGADVHTMKSGVAHLSAENDIECINYIRELISYLPGNNMEEPPFVATTDSPTRLTPELSDLVPTNPNQPYDMKEMIRAVADDNSFFELQEEFARNIVIGYIRLNGKTIGVVANQPLALAGTLDINASVKAARFVRFCDAFNIPLLTLVDVPGFLPGVDQEYGGIIRNGAKLLYAYCEATVPKVTVIARKAYGGAYDVMSSKHIRGDVNLAYPTAEVAVMGPDGAVNILFRKEIDKAADTEARRKELQDDYRSKFANPYRAAELGYVDEVIDPAITRMRLIRSFEMLANKRQSNPPKKHSNLPL

SEQ ID NO: 48920 - protein, 423 aa, Bacteroides fragilis
MQPLAERLRPKTLDDYIGQKHLVGPGAILRKMIDAGRISSFILWGPPGVGKTTLAQIIANKLETPFYTLSAVTSGVKDVREVIDRAKSNKFFTQSSPILFIDEIHRFSKSQQDSLLGAVEHGTVTLIGATTENPSFEVIRPLLSRCQLYTLKSLEKEDLLELLQRAITTDVVLKERKIELKETGAMLRFSGGDARKLLNILELVVESETEETVIITDDLVTERLQQNPLAYDKDGEMHYDIISAFIKSIRGSDPDGAIYWLARMVEGGEDPAFIARRLVISAAEDIGLANPNALLLANACFDTLMKIGWPEGRIPLAEITIYLATSPKSNSAYNAINDALALVRETGNLPVPLHLRNAPTKLMKQLGYGQEYKYAHNYEGNFVKQQFLPDEIKAKQLWQPQHNPAEQKHAERMKQLWGNEKNY

SEQ ID NO: 48921 - protein, 515 aa, Bacteroides fragilis
MAEQRRNTRSTAKSKVQPVNDYGRIQPQAPELEEAVLGALMIEKDAYSLVSEILRPESFYEHRHQLIYAAITDLAVNQKPVDILTVKEQLSKRGELEEVGGPFYITQLSSKVASSAHIEYHARIIAQKYLARELITFTSNIQSKAFDETLDVDDLMQEAEGKLFEISQRNMKKDYTQINPIIAEAYEQIQKAAARTDGLSGLESGYTKLDKMTSGWQKSDLIIIAARPAMGKTAFVLSMAKNIAVNFRNPVALFSLEMSNVQLVNRLISNVCEIPSEKIKSGQLAAYEWQQLDYKLKDLLDAPLYVDDTPSLSVFELRTKARRLVREHGVRIIIIDYLQLMNASGMAFGSRQEEVSTISRSLKGLAKELNIPIIALSQLNRGVESREGLEGKRPQLSDLRESGAIEQDADMVCFIHRPEYYKIFQDDKGNDLRGMAEIIIAKHRNGAVGDVLLRFKGEYTRFQNPDDDMVIPLPDAGAMLGSRMNNTGTVPPPPAEFAPQNSNPFGGGNDGPLPF

SEQ ID NO: 48922 - protein, 425 aa, Bacteroides fragilis
MSADIIHPGHLNIIHEAQKLGNVTVGVLTDAAIASYKRLPYLTYEQRSLIVQNLKGVDEVIPQTTLDYIPNLELLKPDFVVHGDDWKEGVQKETRQRVIETLSKWGGQVIDIPYTQGISSTKLNSKLKEIGTTPEVRLKRLKRLIEAKSIVRICESHSGLTGLIIENTSVEVNGMKREFDGMWSSSLTDSTSKGKPDIEAVDLTTRLHDLNDALECTTKPVIFDGDTGGKIEHFVFTVRTLERLGISAIIIEDKVGLKKNSLFGTDVIQTQDTIEGFCDKISAGKRAQITDDFMIIARIESFIAGKGLDDAMKRALAYIEAGADGIMIHSKDKSGEDIRLFCKALREVNQSIPIVVVPTTYNHITDEELSTWGINVVIYANHMLRSAYPAMLNTAKSILLHARSYEANDLCMPVKDILELIPGTK

SEQ ID NO: 48923 - protein, 813 aa, Bacteroides fragilis
MDDQNDNAFSLIADFDGNEDQVFDIKVGETLPVLPLRNMVLFPGVFMPVSVGRKSSLRLVREADKKKSYIAVVCQKMAETDEPAFEDLHPIGTIGKIVRVLEMPDQTTTVIIQGMKRLELKNITETHPYLKGEVNIVEEEIPSKDDKEFQALVETCKDLTIRYIKSSDTLHQESAFAIKNLTNHMFLVDFICTNLPLKKDEKIELLRIDSLRERTYRLLEILNREVQLAEIKASIQMRAREDIDQQQREYFLQQQIKTIQDELGGSGQEQEIEEMRQKAEHMKWSTEVRETFLKELAKLERTHPQSPDYSVQLNYLQTMLNLPWGVYTTDNLNLKNAEKTLNKDHYGLEKVKERILEHLAVLKLKGDMKSPIICLYGPPGVGKTSLGKSIAAALKRKYIRMSLGGVHDEAEIRGHRKTYIGAMPGRIIKNLIKAGSSNPVFILDEIDKVSADRQGDPSSALLEVLDPEQNTAFHDNFLDVDYDLSKVMFIATANNLNTIPGPLLDRMELIEVSGYITEEKVEIARKHLVPKELEANGMKKTDIKIPKDTLEAIIESYTRESGVRELEKKIGKILRKSARQYATDGFFLKTEIKPTDLYDFLGAPEYTRDKYQGNDYAGVVTGLAWTAVGGEILFVETSLSRGKGGRLTLTGNLGEVMKESAMLALEYIKAHASLLNLDEEIFDNWNIHVHVPEGAIPKDGPSAGITMATSLASALTQRKVKANLAMTGEITLRGKVLPVGGIKEKILAAKRAGIKEIIMSAENKKNIDEIQDIYLKGLTFHYVNDVKEVFAIALTQEKVADAIDLSVKKANQE

SEQ ID NO: 48924 - protein, 376 aa, Bacteroides fragilis
MTFELQYTDAKSNARAGLITTDHGQIQTPIFMPVGTIGSVKGVHQTELKEDIQAQIILGNTYHLYLRPGLDVLEKAGGLHKFNGFDRPMLTDSGGFQVFSLSGIRKLREEGAEFRSHIDGSKHIFTPEKVMDIERIIGADIMMAFDECPPGDSDYAYAKKSLGLTHRWLDRCIQRFNETEPKYGYSQSLFPIVQGCVYPDLRKQSAEYIASKDADGNAIGGLAVGEPVDKMYEMIELVNEILPKDKPRYLMGVGTPVNILEGIERGVDMFDCVMPTRNGRNGMLFTKDGIMNMRNKKWEADFSPIEADGASYVDTLYSKAYLRHLFHAQELLAMQIASIHNLAFYLWLVGEARKHIIAGDFSTWKPMMVKRVSTRL

SEQ ID NO: 48925 - protein, 83 aa, Bacteroides fragilis
MKKGLHPESYRPVVFKDMSNGDMFLSKSTVATKETIEFEGETYPLLKIEISNTSHPFYTGKSTLVDTAGRVDKFMSRYGNRKK

SEQ ID NO: 48926 - protein, 334 aa, Bacteroides fragilis
MVNYKDLGLVNTRDMFAKAIKGGYAIPAFNFNNMEQMQAIIKAAVETKSPVILQVSKGARQYANATLLRYMAQGAVEYAKELGCKNPEIVLHLDHGDTFETCKSCIDSGFSSVMIDGSHLPYDENVALTKKVVEYAHQFDVTVEGELGVLAGVEDEVSSDHHTYTEPDEVVDFVTKTGCDSLAISIGTSHGAYKFTPEQCHIDPKTGRMVPPPLAFDVLDGVMKELPGFPIVLHGSSSVPEEEVATINQFGGALKAAIGIPEEELRKAAKSAVCKINIDSDSRLAMTAAIRKVFAEKPAEFDPRKYLGPARDNMEKLYKHKIINVLGSDNKLAE

SEQ ID NO: 48927 - protein, 347 aa, Bacteroides fragilis
MAKKEDELNFETDNNKMASSEKLKALQAAMDKIEKSFGKGSIMKMGEEVVEQVEVIPTGSIALNAALGVGGYPRGRIIEIYGPESSGKTTLAIHAIAEAQKAGGIAAFIDAEHAFDRFYAAKLGVDVDNLFISQPDNGEQALEIAEQLIRSSAIDIIVVDSVAALTPKAEIEGDMGDNKVGLQARLMSQALRKLTSAVSKTRTTCIFINQLREKIGVMFGNPETTTGGNALKFYASVRLDIRGSQQIKDGEEVIGKQTKVKVVKNKVAPPFRKAEFDIMFGEGISHSGEIIDLGADLGIIKKSGSWYSYNDTKLGQGRDAAKQCIADNPELAEELEGLIFEKLREHK

SEQ ID NO: 48928 - protein, 511 aa, Bacteroides fragilis
MLVTIVASIACFIVGGILSYVLFKYGLKAKYDNVLKEAETEAEVIKKNKLLEVKEKFLNKKADLEKEVALRNQKIQQAENKLKQREMVLSQRQEEIQRKRAEADAVRENLEAQLGIVDKKKEELDKLQHQEIEKLEALSGLSADEAKERLVESLKEEAKTQAQSYINDIMDDAKLTASKEAKRIVIQSIQRVATETAIENSVTVFHIESDEIKGRIIGREGRNIRALEAATGVEIVVDDTPEAIVLSAFDPVRREIARLALHQLVTDGRIHPARIEEVVAKVRKQVEEEIIETGKRTTIDLGIHGLHPELIRIIGKMKYRSSYGQNLLQHARETANLCAVMASELGLNPKKAKRAGLLHDIGKVPDEEPELPHALLGMKLAEKFKEKPDICNAIGAHHDEIEMTSLLAPIVQVCDAISGARPGARREIVEAYIKRLNDLEQLAMSYPGVTKTYAIQAGRELRVIVGADKIDDKQTENLSGEIAKKIQDEMTYPGQVKITVIRETRAVSFAK

SEQ ID NO: 48929 - protein, 462 aa, Bacteroides fragilis
MTLIKSISGIRGTIGGGAGEGLNPLDIVKFTSAYATLIRKTCKSKSNKIVVGRDARISGEMVKNVVVGTMMGMGWDVVDIDLASTPTTELAVTMEGACGGIILTASHNPKQWNALKLLNEHGEFLNAAEGQEVLRIAAAEEFDYADVDHLGSYRKDLTYNKKHIDSVLALDLVDVEAIKKADFTVAIDCVNSVGGIILPELLERLGVKHVEKLYCEPTGNFAHNPEPLEKNLGDIMNLMKGGKADVAFVVDPDVDRLAMICENGVMYGEEYTLVTVADYVLKHTPGNTVSNLSSTRALRDVTRKYGMEYNASAVGEVNVVTKMKATNAVIGGEGNGGVIYPASHYGRDALVGIALFLSHLAHEGKKVSELRATYPPYFIAKNRVDLTPEIDVDAILAKVKDIYKNEEINDIDGVKIDFADKWVHLRKSNTEPIIRIYSEASTMEAAEEIGQKIMNVINELAK

SEQ ID NO: 48930 - protein, 253 aa, Bacteroides fragilis
MDTTVKIDARDVNFWYGDFHALKGISMEIEEKSVVAFIGPSGCGKSTFLRLFNRMNDLIPATRLTGEIRIDGENIYDKGVQVDELRKNVGMVFQRPNPFPKSIFENVAYGFRVNGVQDNAFIRQRVEETLKGAALWDEVKDKLKESAFALSGGQQQRLCIARAMAVSPSVLLMDEPASALDPISTAKVEELIHELKERYTIVIVTHNMQQAARVSDKTAFFYMGQMVEFGDTKKIFTNPEKEATQNYITGRFG

SEQ ID NO: 48931 - protein, 420 aa, Bacteroides fragilis
MELKRVVVTGLGAITPVGNNVPEFWENLVNGVSGAGPITHFDASQFKTQFACEVKGFDATQYIDRKEARKMDLYTQYAVAVAKEAVADSGLDIENEDLNRIGVIFGAGIGGIRTFEEETSNYALHKENGPKYNPFFIPKMISDIAAGQISIMYGFHGPNYATCSACATSTNAIADAFNLIRLGKANVIVSGGSEAAIAAAGVGGFNAMHALSTRNDEPQSASRPFSASRDGFVMGEGGGCLILEELEHAKARGAKIYAEVAGVGMSADAHHLTASHPEGLGAKLVMKNALEDAEMSPEEVDYINVHGTSTPVGDISEAKAIKEVFGEHAFELNISSTKSMTGHLLGAAGAVESIASILAIKNGIVPPTINHAEGDNDENIDYNLNFTFNKAQKREINVALSNTFGFGGHNACVIFKKYAE

SEQ ID NO: 48932 - protein, 121 aa, Bacteroides fragilis
MSDTMQIIANGLTTVPTHELLDFITNYVKQESVERIIIGLPKQMNNEVSENMKNIEPFVRSLKKRLPDMPVEYVDERFTSVLAHRTMLEAGLKKKDRQNKALVDEISATIILQSYLETKRL

SEQ ID NO: 48933 - protein, 138 aa, Bacteroides fragilis
MKTLNYTHLEEKGANTIVLSLQQLLADFQIHYANLRGFHWNIKGHGFFVLHSKFEDLYNGAAEKVDEIAERILMLGGTPANKYSDYLKMAQIKEVDGVNKADDALNHIHDTYGHLITEERKNQTHATTHNDEVTVTMM

SEQ ID NO: 48934 - protein, 257 aa, Bacteroides fragilis
MKLNLKNPIVFFDLETTGTNINSDRIVEICYLKVYPNGNEESKTLRINPEMPIPAESSAVHGIYDADVADCPTFKEVAKSIANDIEGCDLAGFNSNRFDIPVLAEEFLRAGVDIDMSKRKFVDVQVIFHKMEQRTLTAAYKFYCGRNLEDAHTAEADTRATYEVLMAQLDRYPEELQNDMSFLADYSSYNKNVDFAGRMVYDDNGVEVFNFGKYKGQSVSEVLKKDPGYYSWILNSDFTLNTKAMLTKIRLRELTGK

SEQ ID NO: 48935 - protein, 202 aa, Bacteroides fragilis
MEENNNIYPIFDRMLTRQDKEELLKQRGVMIWFTGLSGSGKSTIAIALERELHKRGLLCRILDGDNIRTGINNNLGFSETDRVENIRRIAEVSKLFIDTGIITIAAFISPNNDIREMAARIVGPDDFLEIFVSTPLAECEKRDVKGLYAKARRGEIKNFTGISAPFEAPEHPALSLDTSVLSLEESVNRLLEIVLPRVSRHE

SEQ ID NO: 48936 - protein, 224 aa, Bacteroides fragilis
GYMGEVALSLAAVIGALSVMALIVYVSQKVKGNVTLLIIGVMIGYVASAVIGVLKYFSVEEDIRAYVIWGLGSFARVSGDQMTLFVCIMVVLIPLSFLLIKTMNLMLLGDGYARNLGLNIKRARLLVISCSGVLVAIVTAYCGPIMFIGLAVPHLCRAIFHTSDHRILMPATLLAGASLALVCNLVARMPGFEGALPVNSVTALVGAPVVASVLFRKRKSELSE

SEQ ID NO: 48937 - protein, 390 aa, Bacteroides fragilis
MKSFLVDQDGYYGEFGGAYVPEILHKCVEELQNTYLDVIESEDFKKEFDQLLRDYVGRPSPLYPARRLSEKYGCKMYLKREDLNHTGAHKINNTIGQILLARRMGKKRIIAETGAGQHGVATATVCALMNMECIVYMGKTDVERQHINVEKMKMLGATVVPVTSGNMTLKDATNEAIRDWCCHPSDTYYIIGSTVGPHPYPDMVARLQSVISEEIKKQLQEKEGRDYPDYLIACVGGGSNAAGTIYHYIDDERVRIVLAEAGGKGIETGMTAATIQLGKMGIIHGARTFVIQNEDGQIEEPYSISAGLDYPGIGPMHANLADKKRAMVLAVNDDEAIRAAYELTRLEGIIPALESAHALGALEKITFKPEDVVVLTVSGRGDKDIETYLG

SEQ ID NO: 48938 - protein, 333 aa, Bacteroides fragilis
MINPIYSADKARYSGGMKYRCCGKSGILLPEVSLGLWHNFGDVDTLANSLRMAHFAFDKGITHFDLANNYGPSYGSAEETFGLIMKKSFMPYRDELFISTKAGHDMWEGPYGNWGSRKYLMSSLNQSLKRMNLEYVDIFYTHRYDPETPLEETLQALVDIVRQGKALYIGISKYPKEKAEFAYRYLEERDVHCLLYQGRYNLFNREPEEQGILQQAKENGTGFIAFSPLAQGLLTNRYLNGIPEDSRIARGGFLKKEQLTEQVFNKIKALNEVAGSRGQTLAEMALAWVLKDDLVTSVIVGASSVKQLEDNLKVTENCKFSTDEIQRIGNILQ

SEQ ID NO: 48939 - protein, 394 aa, Bacteroides fragilis
MAKEKFERTKPHVNIGTIGHVDHGKTTLTAAITTVLAKKGLSELRSFDSIDNAPEEKERGITINTSHVEYETANRHYAHVDCPGHADYVKNMVTGAAQMDGAIIVVAATDGPMPQTREHILLARQVNVPKLVVFMNKCDMVEDAEMLELVEMEMRELLSFYDFDGDNTPIIQGSALGALNGVEKWEDKVMELMEAVDTWIPLPPRDVDKPFLMPVEDVFSITGRGTVATGRIETGVIHVGDEIEILGLGEDKKSVVTGVEMFRKLLDQGEAGDNVGLLLRGVDKNEIKRGMVLCKPGQIKPHSKFKAEVYILKKEEGGRHTPFHNKYRPQFYLRTMDCTGEITLPEGTEMVMPGDNVTITVELIYPVALNIGLRFAIREGGRTVGAGQITEIID

SEQ ID NO: 48940 - protein, 484 aa, Bacteroides fragilis
MKSKWRMPHPATMFFLFTLAVIFLSWIFDIYGLRVQLPQTGAEIRVQSLLSPEGIRWMLRNAITNFTGFAPLGMVLIAMFGIGVAQHSGFIDACVRQGVKNRKNTKRIILWVIILGLLSNIVGDAGYIILLPIAATLFYSVRLNPVAGIITAYVSVSCGYSANVVLSTMDPLIARTTQEAAIDSGVYQGNTGPLCNYYFMSVSTFVIGAIIYRITCKRLIPSLGQYEGKQIFEGYKQLSRKERRAMTMAIVMGMLYAAIILWATFSSWGILRGVNGGLIRSPFIMGILFLLSLGAAIMGMVYGFSSGRYCSDNDVIEGLAQPMKLLGGYLVIAFFAAQMFACLEYSHLDKCVAIIGANLLSSVQAGPLWTLILFILFTATINLIMVSATAKWAFMAFIFVPVFARIGIEPDMTQCAFRIGDSATNAITPFMFYMPLVLTYMQQYDKQATYGSLLKYTWRYSVYILIGWTMLLFIWYLTGLPLGL

SEQ ID NO: 48941 - protein, 383 aa, Bacteroides fragilis
MINRFILDEVSYFGPGAREVLPKEISRLGLHKAFVATDKDLIKFGVADKVLKVLEAAKIPYEIFSEIKPNPTVSNVKAGVEAFASSGADFILAIGGGSSMDTAKAIGIITNNPEFSDVVSLEGVADTKKKSVPIIALPTTAGTAAEVTINYVITDEKNQKKMVCVDPNDIPSIAIVDAELMYTLPKSLTAATGLDALTHAIEGLITKGAWEMSDMFEIKAIEMINRYLVTAVEEPSNAEARNGMAVAQYIAGMAFSNVGLGVVHGMAHPLGAIFDIPHGVANALLLPIIMEFNAPAALDKYVEIAKAMNVYSTDMTKEKAAEAAVEAVKTLSLRVNIPQHLSDLGIQESDLDRLATAAFADVCTPGNPREVTKEIILDLYKKA

SEQ ID NO: 48942 - protein, 289 aa, Bacteroides fragilis
MSILIDKSTRLLVQGITGRDGLFHAKKMAEYGTNVVGGTSPGKGGTMIDDTFPVFNTMHEAVRRTQANTSVIFVPARFAADAIMEAADAGIRLIICITEGIPTLDVIKAYRFVELKGAKLIGPNCPGLISPGESLVGILPGQVFTPGNIGVISRSGTLTYEIVSHLTAKGMGQSTAIGMGGDPVVGLYFRDLLGMLQNDPQTDAIVMIGEIGGNAEELAATYIREHVTKPVVAFIAGRSAPPGKQMGHAGAIISGSSGSATEKISALEAAGIRVAGEPSEIPDLLKGSF

SEQ ID NO: 48943 - protein, 464 aa, Bacteroides fragilis
MNTLFDKIWDAHVVTTVEDGPTQLYIDRLYCHEVTSPQAFAGLRARGIKVFRPEKVYCMPDHNTPTHDQDKPIEDPVSKTQVDTLTKNAADFGLTHYGMMDKRNGIIHVVGPERGLTLPGMTIVCGDSHTSTHGAMGAVAFGIGTSEVEMVLASQCILQSRPKTMRITVDGKLGKGVTAKDIALYMMSKMTTSGATGYFVEYAGEAIRSLTMEGRLTLCNLSIEMGARGGMIAPDEVTFEYIKGRENAPQGEEWDQAVQYWKTLKSEDDAVFDKEVHFDAGDIEPMITYGTNPGMGMGITQHIPTTDGMNETTKASFLKSLDYMGFQPGEALLGKKIDYVFLGACTNGRIEDFRAFASIVKGHQKAEHVIAWLVPGSWMVDAQIREEGLDKILEDAGFAIRQPGCSACLAMNDDKIPAGKYSVSTSNRNFEGRQGPGARTLLASPLVAAAAAITGVIADPRELM

SEQ ID NO: 48944 - protein, 545 aa, Bacteroides fragilis
MAKEILFNIEARDQLKKGVDALANAVKVTLGPKGRNVIIEKKFGAPHITKDGVTVAKEIELTDAYQNTGAQLVKEVASKTGDDAGDGTTTATVLAQAIIAEGLKNVTAGASPMDIKRGIDKAVAKVVDSIKHQAEKVGDNYDKIEQVATVSANNDPVIGKLIADAMRKVSKDGVITIEEAKGTDTTIGVVEGMQFDRGYLSAYFVTNTEKMECEMEKPYILIYDKKISNLKDFLPILEPAVQSGRPLLVIAEDVDSEALTTLVVNRLRSQLKICAVKAPGFGDRRKEMLEDIAVLTGGVVISEEKGLKLEQATIEMLGTADKVTVSKDNTTIVNGAGAKENIKERCDQIKAQIAATKSDYDREKLQERLAKLSGGVAVLYVGAASEVEMKEKKDRVDDALRATRAAIEEGIVAGGGVAYIRAIESLDGLKGENDDETTGIAIIKRAIEEPLRQIVANAGKEGAVVVQKVSEGKGDFGYNARTDVYENMHAAGVVDPAKVTRVALENAASIAGMFLTTECVIVEKKEDKPEMPMGAPGMGGMGGMM

SEQ ID NO: 48945 - protein, 429 aa, Bacteroides fragilis [sequence omitted]

SEQ ID NO: 48946 - protein, 627 aa, Bacteroides fragilis
MKKNYVLNTAIINRGNAKTILAQSEQLNHYQKRINRQKQEEDNLLSRFKFLRNSTILILALMLLIIPLLGYVMYMNLRVKNKNKELHDKNQLVEAQKEELAVKNSQIENISNQKLQFFTNISHEIRTPLTLILGPVNKLIKNSKLDPSIQEDVALMKRNVDRLYRIVNQILDFRRIDNDKMKLILRQVDLIGMVREVFDYFTGIAEEKQIHYRFSTNIDELNIYIDVNKIEQVLVNIISNAFKYSDSGGDISVRITGEAETVLLEVEDHGRGISKESMEHLFERFYTGNKTFGTVGFGIGLNLSKEYVDLHDGEIRAESQPGEYTLFSVRLYKDIAHYTHEYILEETDRFNLSYHDMEVDTTVVNEMLSKTYDYHVLVVEDDPDVRYSLRKELSANFQVEVAGNGNEALDLLGQGDAFHLILSDVLMPGMNGFQLVNRVKNDLAFSHIPIILLTALSEDSQRIYGIAEGADEYIPKPFNIDFLKIRIINMISERQKMKEAYMKNLRAGTMDNVEVCKLMKVDELFRDKLLSIVDTQYENSDFSIEDLSEHLGLSRVHLYRKMKTLFGVSPTDYLRNYRLNKAMLLLKARQYNISEIAYMTGFTSPAYFTKCFRTLYGVTPTEAMVAN

SEQ ID NO: 48947 - protein, 212 aa, Bacteroides fragilis
MKNLERLFAEKLLKIKAIKLQPANPFTWASGWKSPFYCDNRKTLSYPSLRSFVKFEITRLVLERFGQVDAIAGVATGAIPQGALVADALNLPFVYVRSTPKDHGLENLIEGELRPGTKVVVVEDLISTGGSSLKAVEAIRRDGCEVIGMVAAYTYGFPVAEQAFKDAKVPLVTLTNYEAVLDVALRTGYIEEEDIATLNEWRKDPAHWETGK

SEQ ID NO: 48948 - protein, 734 aa, Bacteroides fragilis
MDRFIDQLMKKMTLEEKIGQLNLPVTGEITTGQAKSSDVAKRIRNGEVGGLFNLKGVKRIREVQRQAVEESRLGIPLLFGMDVIHGYETIFPIPLGLSCTWDMKAIEESARIAAVEASADGISWTFSPMVDVSRDPRWGRVSEGNGEDPFLGAAIARAMIRGYQGKDMSRNDEIMACVKHFALYGASEAGRDYNTVDMSRQRMFNEYMLPYQAAVEAGVGSVMASFNEVDGVPATGSKWLMTDVLRKQWGFDGFVVTDYTGINEMIDHGMGDQQTVAALALNAGVDMDMVSDAFSGTLKKSVEEGKVSAAAIDAACRRILEAKYKLGLFDNPYKYCDVNRPKKQIFTKEHRAIARKTASESFVLLKNEGVLPLSKKGTIAVVGPLANTRSNMPGTWSVAAVLDNAPSLVEGLREVVGDRAKVVTAKGSNLIGDADYEKRATMFGRELHRDNRTDRELLDEALKVAAGADVIVAALGESSEMSGESSSRTNLEMPDVQRALLQELLKTGKPVVLVLFTGRPLVLTWEEEHVPAILNVWFGGSEAAYAISDVLFGDVNPSGKLTATFPQNVGQIPLFYNHKNTGRPLQEGRWFEKFRSNYLDVSNEPLYPFGYGLSYTTFAYSDIHLSSTEMSADGELTATVTVTNTGSRDGAEVVQLYIRDLVGSVTRPVKELKGFEKIFLKAGESRKVSFSITPELLKFYNYDLQFVCEPGDFDVMIGGNSRDVKKARFLLKGE

SEQ ID NO: 48949 - protein, 298 aa, Bacteroides fragilis
MNDTPQDKYLTALAKYDTQLNDADVQVQVAALIEKKVPENNTEEVKKFLFNCIDLTTLNTTDSDESVMRFTEKVNRFDDEFPDLKNVAAICVYPNFAQVVKDTLEVEGINIACVSGGFPSSQTFTEVKIAETAMALADGADEIDIVIPVGAFLSGDYETMCEEIMELKETCKEHHLKVILETGALKTASNIKKASILSMYSGADFIKTSTGKQQPAATPEAAYVMCQAIKEYYEQTGNKVGFKPAGGINTVNDALIYYTIVKEVLGKEWLSNELFRLGTSRLANLLLSEIKGEELKFF

SEQ ID NO: 48950 - protein, 597 aa, Bacteroides fragilis
MENLKNVAPIEDFNWDAYENGESFAGASHEELEKAYDGTLNKVNDREVVDGTVIAMNKREVVVNIGYKSDGIIPLNEFRYNPDLKVGDTVEVYIENQEDKKGQLVLSHRKARATRSWDRVNAALENEEIIKGYIKCRTKGGMIVDVFGIEAFLPGSQIDVKPIRDYDVFVGKTMEFKVVKINQEFKNVVVSHKALIEAELEQQKKEIIGKLEKGQVLEGTVKNITSYGVFIDLGGVDGLIHITDLSWGRVSDPKEVVELDQKLNVVILDFDDEKKRIALGLKQLTPHPWDALDPNLQVGDKVKGKVVVMADYGAFIEIAPGVEGLIHVSEMSWSQHLRSAQDFMKVGDEVEAVVLTLDREERKMSLGIKQLKQDPWETIEEKYPVGSKHTAKVRNFTNFGVFVEIEEGVDGLIHISDLSWTKKVKHPSEFTQIGADIEVQVLEIDKENRRLSLGHKQLEENPWDVFETVFTVGSVHEGTIIEMLDKGAVVALPYGVEGFATPKHLVKEDGSQAQMDEKLEFKVIEFNKDAKRIILSHSRIFEDVAKAEERAEKKAASNAKKSSKREETPAIQNQAASTTLGDIDALAALKEQLEGKK

SEQ ID NO: 48951 - protein, 448 aa, Bacteroides fragilis
MAKNDLHLTRNIGIMAHIDAGKTTTSERILFYTGLTHKIGEVHDGAATMDWMEQEQERGITITSAATTTRWKYAGDTYKINLIDTPGHVDFTAEVERSLRILDGAVAAYCAVGGVEPQSETVWRQADKYNVPRIAYVNKMDRSGADFFEVVRQMKAVLGANPCPVVIPIGAEENFKGLVDLIKMKAIYWHDETMGADYTIEEIPANLVDEANEWRDKMLEKVAEFDDALMEKYFDDPSTITEEEVLRALRNATVQMAVVPMLCGSSFKNKGVQTLLDYVCAFLPSPLDAENVVGTNPDTGAEEDRKPSEDDKTSALAFKIATDPYVGRLTFFRVYSGKIEAGSYIYNSRSGKKERVSRLFQMHSNKQNPVEVIGAGDIGAGVGFKDIHTGDTLCDETAPIVLESMDFPEPVIGIAVEPKTQKDMDKLSNGLAKLAEEDPTFTVKTDEQ

SEQ ID NO: 48952 - protein, 295 aa, Bacteroides fragilis
MSAIIECKNLTHYYGQRKIYENLSFEVPQGRILGLLGKNGTGKTTTINILSGYLQPHSGECRIFGENIQTMDPALRRNIGLLLEGHVQYQFMNITQIEKFYASFYPGQWKKEAYYDLMNKLKVAPGQRISRMSNGQRSQVALGLILAQNPELLILDDFSLGLDPGYRRLFVDYLRDYARSENKTVFLTSHIIQDMERLIDDCIIMDYGSILIQQPIETLMKGLRKYTCTVPEGYQPQLPVTCYHPAVIRQTLETYSFLPPSECGGAIEGKSSSLYWFAARKCRSGRCLYRSTGKY

SEQ ID NO: 48953 - protein, 206 aa, Bacteroides fragilis
LQKEAQAVLNIPVTDAYEKAVELIVEQIHRKKGKLVTSGMGKAGQIAMNIATTFCSTGIPSVFLHPSEAQHGDLGILQENDLLLLISNSGKTREIVELTQLAHNLNPGLKFIVITGNPDSPLASESDVCLSTGHPAEVCTLGMTPTTSTTVMTVIGDILVVQTMKRTEFTIEEYSKRHHGGLLGRKIKKTMRKVIGIGETILDIIF

SEQ ID NO: 48954 - protein, 322 aa, Bacteroides fragilis
MGGGSWATAIAKMCLAQEESINWYMRRDDRIADFKRLGHNPAYLTGVKFDMKRINFSSNINDVVKESDTLIFVTPSPYLKAHLKKLKTRIRDKFIITAIKGIVPDDNLIVSEYFNKEYGVPPENIAVLAGPCHAEEVALERLSYLTIACPDKDKARVFARRLGSSFIKTSVSDDVIGIEYSSVLKNVYAIAAGICSGLKYGDNFQAVLISNAIQEMNRFLNTVHPINRNVDESVYLGDLLVTGYSNFSRNRTFGTMIGKGYSVKSAQIEMEMIAEGYYGTKCIKEINKHHHVNMPILDAVYNILYERISPMIEIKLLTDSFR

SEQ ID NO: 48955 - protein, 384 aa, Bacteroides fragilis
MKKIMLVFGTRPEAIKMAPLVKEFQKYPKEFQTIVCVTGQHREMLDQVLHLFHIRPNYDLNIMKQGQDLYDVTARVLIGMRDVLAEVRPDLLLVHGDTTTSTAAALSAFYQQIPVGHIEAGLRTHNVYSPWPEEMNRQVTGRIATYHFSPTLLSRQNLLNEGVKGDFIIVTGNTVIDSIYMVVDRIRHDKLLEVQLRNVLSTSGYDVKRLSNDKKLVLITGHRRENFGDGFISMCQAIKALSEKYPNVDFVYPMHLNPNVRKPIHEVFGDELSDLNNLFFIEPLEYLSFVYLMEKSIIVLTDSGGIQEEAPGLGKPVLVMRDTTERPEALEAGTVKLVGTNYDKIVNEVSALLDDSDYYNTMSKAVNPYGDGKACSKIVNFLLA

SEQ ID NO: 48956 - protein, 121 aa, Bacteroides fragilis
MRKDVFQDCLVLYPEEVWNEELDELRQRLNKWNANHQLIFRQFVSDVEIITMDGNGRILIPKRYLQITGIQSDVRFIGVDNKIEIWAKERAEKLFMEPEAFGAALEEIMKEERRTTNNELK

SEQ ID NO: 48957 - protein, 435 aa, Bacteroides fragilis
MGKCPSCGEWNTYVEEIVRKEVPNKRPVSGIESPKAKPVTLSEIEADEEPRIDMHDEELNRVLGGGLVPGSLVLIGGEPGIGKSTLVLQTVLHMPERRILYISGEESARQLKLRADRLTRTSSDCLIVCETSLEQIYVHIKNTRPDLVIIDSIQTISTESIESSPGSIAQVRECSASILRFAKETHTPVLLIGHINKEGSIAGPKVLEHIVDTVLQFEGDQHYMYRILRSIKNRFGSTAELGIYEMRQDGLRQVSNPSELLLSQDHEGMSGVAIASAIEGVRPFLIETQALVSSAVYGNPQRSATGFDIRRMNMLLAVLEKRVGFKLAQKDVFLNIAGGLKVNDPAIDLAVISAILSSNMDAAIEPEVCMAGEIGLSGEIRPVNRIEQRIGEAEKLGFKRFILPKYNMQGIDTKKLRIELVPVRKVEEAFRTLFG

SEQ ID NO: 48958 - protein, 486 aa, Bacteroides fragilis
MENKKLTAANGRPIADNQNSQTAGPRGPIMLQDPWLIEKLAHFDREVIPERRMHAKGSGAYGTFTVTHDITKYTRAAIFSQVGKQTECFVRFSTVAGERGAADAERDIRGFAMKFYTEEGNWDLVGNNTPVFFLRDPLKFPDLNHAVKRDPRNNMRSANNNWDFWTLLPEALHQVTITMSPRGIPASYRHMHGFGSHTYSFLNAENKRIWVKFHLKTMQGIKNLTDQEAEAIIAKDRESHQRDLYESIERGDFPKWKFQIQLMTEEEADNYRINPFDLTKVWPHKDFPLQDVGILELNRNPENYFAEVEQSAFNPMNIVEGIGFSPDKMLQGRLFSYGDAQRYRLGVNSEQIPVNKPRCPFHAFHRDGAMRVDGNYGSAKGYEPNSYGEWQDSPEKKEPPLKVHGDVFNYNEREYDDDYYSQPGDLFRLMPADEQQLLFENTARAMGDAELFIKQRHVRNCYKADPAYGTGVAQALGIDLEEALKE

SEQ ID NO: 48959 - protein, 143 aa, Bacteroides fragilis
MKQYKYKINGNLYNVTVNDVEDNIANVEVNGTSYKVELDKPVKAAPKPVTRPAAAPKTETGAPVVTKQPTASKKDGVKSPLPGVILDIKVKEGDTVKRGQTIIILEAMKMENNINANKDGKVAEIKVNKGDSVLEGTDLVIIE

SEQ ID NO: 48960 - protein, 406 aa, Bacteroides fragilis
MDFCYLFVTYNRIMSIFITKNIQTNNMKKEVRIKEPVRIRTKRLSNGCESIYLDIYMDGRRRYEFLKLYIIPEHTRTDKDLNQSTMKLASAVKAQRIIELQNGVYGFNHQQEKKDIMLIDYIKYLADKDIEKTSRKVSMYTLIYHLQHYDKMGIRLRQVDKKYILGFVEYLKTATQKHCKSVKNISANTQVHYYKVFHHCLNSAVIDEIITSNPMDKIKNEEKPKRRRTERAFLTIDELKILSQTDFHNATLKKAFLFSCFCGLRHSDIVALTWGNLKKGKVGKMELHMTQQKTQEILSLPLSKEALKQLPVRGKVPDTEKVFKGLISLGRTNEILPKWAAKAGIQKHITFHSARHTHATMMITLGADLYTVSKLLGHTNIQTTQIYAKIVDESKEKAIDLIPDIT

SEQ ID NO: 48961 - protein, 517 aa, Bacteroides fragilis
MNTFTLGLIVIAYLLSLAYLGFLGYKKTSSASDYLVGGRQMNPFVMALSYGATFISASAIVGFGGVAAAFGMGIQWLCFLNMFIGVVIAFIFFGLRTRRMGAKLNVSTFPQLLGRHYRSRGIQVFVAAVIFLGMPLYAAVVMKGGAVFIEQIFQIDFNISLLIFTLVIAAYVIAGGMKGVMYTDALQAVIMFGCMLFLLFSLYRVLDMGFTEANQALTDIAPLVPEKFKALGHQGWTAMPVTGSPQWYTLVTSLILGVGIGCLAQPQLVVRFMTVESSKQLNRGVFIGCFFLIITVGAIYHAGALSNLFFLKTEGVVATEAVKDMDKIIPYFINKAMPDWFAALFMLCILSASMSTLSSQFHTMGASVGSDIYGTYKPRSRGKLTNVIRLGVLFSILVSYIICYMLPNDIIARGTSIFMGICAAAFLPAYFCALYWRRATRQGVMASLWIGTIGSLFALAFLHQKEAAAMGVCRWLFGKDVLIEAYPFPMIDPILFALPLSVAAVIIVSLLTEKGKK

SEQ ID NO: 48962 - protein, 527 aa, Bacteroides fragilis
MSENIRVSEVSDILRQQLEGIETKVQLDEIGTVLQVSDGVVRIYGLRNAEANELLEFDNGIKAIVMNLEEDNVGAVLLGPTDKIKEGFTVKRTKRIASIRVGESMLGRVIDPLGEPLDGKGLIGGELYEMPLERKAPGVIYRQPVNQPLQTGLKAVDAMIPIGRGQRELIIGDRQTGKTSIAIDTIINQRSNYEAGDPVYCIYVAIGQKGSTVASIVNTLRQYGAMDYTIVVAATAGDPAALQYFAPFAGAAIGEYFRDTGRHALVVYDDLSKQAVSYREVSLILRRPSGREAYPGDIFYLHSRLLERAAKIINQEEVAREMNDLPESLKGKVKGGGSLTALPIIETQAGDVSAYIPTNVISITDGQIFLDTDLFNQGNRPAINVGISVSRVGGNAQIKAMKKVAGTLKIDQAQYRELEAFSKFSGDMDPVTALTIDKGQKNARLLVQPQYSPMPVEKQIAILYCGIHGLLRNVPLDKVEDFEAAFLNTLALDHQADVLDVLKTGVINDEVTKAIEETAAMVAKQYS

SEQ ID NO: 48963 - protein, 448 aa, Bacteroides fragilis
MRKAIETLKNIWKIEDLRQRILITILFVAIYRFGSYVVLPGINPGMLTQLHQQTSEGLLALLNMFSGGAFSNASIFALGIMPYISASIVIQLLGIAVPYFQKLQREGESGRRKMNQYTRYLTIAILLVQAPSYLLNLKMQAGPSLNASLDWTLFMVTSTIILAAGSMFILWLGERITDKGIGNGISFIILIGIIARLPQSLFQELISRMTDKTGGLIMFLFEIVFLLIVIAGAILLVQGTRKIPVQYAKRIVGNKQYGGARQYIPLKVNAAGVMPIIFAQAIMFIPITFIGFSNTNNVSGFVHAFTDHTSFWYNFVFAVMIILFTYFYTAITINPTQMAEDMKRNNGFIPGIKPGKKTAEYIDDIMSRITLPGSFFLAFIAIMPAFAGIFGVKAEFAQFFGGTSLLILVGVVLDTLQQVESHLLMRHYDGLLKSGRIKGRTGSSVAAY

SEQ ID NO: 48964 - protein, 436 aa, Bacteroides fragilis
MDEIVQFDFPTDSPKIIKVIGVGGGGGNAVNHMYREGIHDVTFVLCNTDNQALAESPVPVKLQLGRSITQGLGAGNRPERARDAAEESIEDIKTLLNDGTKMVFITAGMGGGTGTGAAPVIARIAKEMDILTVGIVTIPFIFEGEKKIIQALDGVERIAQHVDALLVINNERLREIYSDLTFMNAFGKADDTLSIAAKSIAEIITMRGTVNLDFADVKTILKDGGVAIMSTGFGEGENRVTKAIDDALHSPLLNNNDIFNAKKVMLNVSFCPASELMMEEMNEVHEFMSKFREGVEVIWGVAMDNSLDTKVKITVLATGFGVEDVPGMDDLHEKRSQEEEERQLQLEEEKEKNKERIRKAYGESASGIGTRNLRKRRHIYLFNAEDLDNDDIIAMVEDSPTYLRDKTTLGKIKAKAALEEEIATEEAIDDSGVITF

SEQ ID NO: 48965 - protein, 777 aa, Bacteroides fragilis
MIKKIVKGLWVFFALMVLAGIAVFASIAYGWIGYMPPVEELENPNYKFATEILSEDGKVLGTWSLSKENRVYTSYNELSPNIVNALIATEDVRFTEHSGIDAKALIRAVVKRGLLMQKNAGGGSTLSQQLAKQLFTDEVARNTLQRLFQKPIEWVIAVKLERYYTKEEILSMYLNKFDFLNNAVGIKTASYTYFGCEPKDLKIEQAATLIGMCKNPSLYNPVRFNERSRGRRNTVLDQMRKAGYITAEECDSLQNLPLELVYHRVDHKEGLATYFREYLRGVMTAPKPVRSNYRGWQMQKFYEDSIDWEMNPLYGWCEKNKKKDGSNYNIYTDGLKIYTTINSHMQRYAEEAVEEHVGEYLQPLFFKEKKGRKKAPYSNQLTQEEIDRILDRAVKQTSRYQTMKEAGISEAEIKKAFNKPESMSVFTWHGVKDTIMSPMDSIRYYKHFLRAGFMSMDPINGQVKAYVGGPNYTYFQYDMAMVGRRQVGSTIKPYLYALAMENGFSPCDETRNVEITLIDENGKPWSPKNTSKGHYGEMVTLKWGLANSNNWISAYLMSKLNPYALARLIHSFGVRNKEIQPTVSLCLGPCEISVGEMVSAYTAFANKGIRVAPLFVTKIEDSEGNVLATFSPQMEEVISASSAYKMLVMLRAVINEGTGARVRRYGITADMGGKTGTTNRNSDGWFMGFTPSLVSGCWVGGEERDIHFDTMTYGQGASLALPIWTKYMHKVYADQTLGYDPKETFNLPDGFDPCKDFSISGDSIIDEPESGLDDLFN

SEQ ID NO: 48966 - protein, 599 aa, Bacteroides fragilis
MQNIRNIAIIAHVDHGKTTLVDKMLLAGNLFRGNQTSGELILDNNDLERERGITILSKNVSINYNGTKINIIDTPGHSDFGGEVERVLNMADGCILLVDAFEGPMPQTRFVLQKALEIGLKPIVVINKVDKPNCRPDEVHEMVFDLMFSLDATEEQLDFPTIYGSAKNNWMSTDWKEQTDSIVPLLDCIVENIPAPEQLEGTPQMLITSLDYSSYTGRIAVGRVHRGTLKEGMNVSLAKRDGSIVKSKIKEVHVFEGLGRVKTTEVSSGDICALVGIDGFEIGDTICDYENPEALPPIAIDEPTMSMLFAINDSPFYGKDGKFVTSRHIHDRLTKELDKNLALRVRKSEEDGKWVVSGRGVLHLSVLIETMRREGYELQVGQPQVIYKEIDGVKCEPIEELTINVPEEYSSKIIDMVTRRKGEMTMMENTGERINLEFDMPSRGIIGLRTNVLTASAGEAIMAHRFKEYQPFKGDIERRTNGSIIAMESGTAFAYAIDKLQDRGKFFIFPQEEVYAGQVVGEHAHEKDLVVNVTKSKKLTNMRASGSDEKARLIPPVQFSLEEALEYIKEDEYVEVTPKAMRMRKVILDETERKRANKS

SEQ ID NO: 48967 - protein, 552 aa, Bacteroides fragilis
MVGVSKAFQPNKNVLKDIYLSFFYGAKIGIIGLNGSGKSTLLKIIAGLEKSYQGEVVFSPGYSVGYLAQEPYLDNTKTVKEIVMEGVQPIVDALNEYEEINQKFGLPEYYEDQDKMDQLFARQGELQDIIDATDAWNLDSKLERAMDALRCPPEDQSVANLSGGERRRVALCRLLLQKPDILLLDEPTNHLDAESIDWLEQHLQQYEGTVIAVTHDRYFLDHVAGWILELDRGEGIPWKGNYSSWLEQKTKRMEMEEKTASKRRKTLERELEWVRMAPKARQAKGKARLNSYDKLLNEDVKEKEEKLEIFIPNGPRLGNKVIEAKHVAKAYGDKLLFDDLNFMLPPNGIVGVIGPNGAGKTTLFRLIMGLETVDKGEFEVGETVKVAYVDQQHKDIDPNKSVYQVISGGNDLIRMGGRDINARAYLSRFNFSGADQEKLCGVLSGGERNRLHLAMALKEEGNVLLLDEPTNDIDVNTLRALEEGLEDFAGCAVVISHDRWFLDRICTHILAFEGDSNVFYFEGSYSEYEENKLKRLGNEEPKRVRYRKLIAD

SEQ ID NO: 48968 - protein, 600 aa, Bacteroides fragilis
MKKQLRSSFSTQGRRMAGARALWAANGMKKEQLGKPIIAIVNSFTQFVPGHVHLHEIGQLVKKEIEKLGCFAAEFNTIAIDDGIAMGHDGMLYSLPSRDIIADSVEYMVNAHKADAMVCISNCDKITPGMLMAAMRLNIPTVFVSGGPMEAGELDGQHLDLIDAMIKSADESVSDEEVSKIENRACPTCGCCSGMFTANSMNCLNEAIGLALPGNGTIVATHANRTQLFKDAAKLIVENTYKYYRDGDESVLPRSIATREAFLNAMTLDIAMGGSTNTVLHLLAIAHEAEADFKMDDIDMLSRKSPCLCKVAPNTQKYHIQDVNRAGGIMGIMGQLAKSGLIDTSVVRIDGMTLGEAIDKYDITSPNVCEEAIKKYKSAAAGKFNLVLGSQDVYYKELDTDRAEGCIRDIEHAYSKDGGLAVLKGNIAQDGCVVKTAGVDESIWKFTGPAKVFDSQEAACNGILGGKVVSGDVVVITHEGPKGGPGMQEMLYPTSYIKSRHLGKECALITDGRFSGGTSGLSIGHISPEAAAGGNIGKIKDGDIIEINIPERTINVRLTDEELAARPMTPVTRERYVPKSLKAYASMVSSADKGAVRLID

SEQ ID NO: 48969 - protein, 201 aa, Bacteroides fragilis
MLLPWLNEELIEAGCDEAGRGCLAGAVYAAAVILPKDFENELLNDSKQLSEKQRYALREVIERDAVAWAVGIVSPEEIDKINILNASFLAMHRAVDRLKTRPQHLLIDGNRFKKYPDIPHTTVIKGDGKYLSIAAASILAKTYRDDYMNKLHQEFPCYDWEHNKGYPTKKHRAAIAGHGTTPYHRMTFNLLGDGQLELFSK

SEQ ID NO: 48970 - protein, 1242 aa, Bacteroides fragilis
MKSFQDFLQLDTPPEKRKKEGLYKVFAENFPIADTRNNFVLEFLDYYIDPPRYTIDDCIERGLTYSVPLKAKLKLYCTDPDHEDFDTVIQDVFLGPIPYMTDKATFVINGAERVVVSQLHRSPGVFFGQSVHANGTKLYSARIIPFKGSWIEFATDINNVMYAYIDRKKKLPVTTLLRAIGFENDKDILEIFNLAEDVKVNKTNLKKVVGRKLAARVLKTWIEDFVDEDTGEVVSIERNEVIIDRETVIEPEHIDEIIDSGVQNILIHKEEPNQSDYSIIYNTLQKDPSNSEKEAVLYIYRQLRNADPADDASAREVINNLFFSEKRYDLGDVGRYRINKKLNLTTDMDVRVLTKEDIIEIIKYLIELINSKADVDDIDHLSNRRVRTVGEQLSNQFAVGLARMSRTIRERMNVRDNEVFTPIDLINAKTISSVINSFFGTNALSQFMDQTNPLAEITHKRRMSALGPGGLSRERAGFEVRDVHYTHYGRLCPIETPEGPNIGLISSLCVFAKINDLGFIETPYRKVDNGKVDLSENGLVYLTAEEEEAKIIAQGNAPLNDDGTFIRNKVKSRQDADYPVVEPSEVELMDVAPQQIASIAASLIPFLEHDDANRALMGSNMMRQAVPLLRSEAPIVGTGIERQLVRDSRTQIAAEGDGVIDFVDATTIRILYDRTEDEEFVSFEPALKEYRIPKFRKTNQNMTIDLRPTCNKGDRVTKGQILTEGYSTENGELALGKNLLVAYMPWKGYNYEDAIVLNERVVREDLLTSVHVEEYSLEVRETKRGMEELTSDIPNVSEEATKDLDENGIVRVGARIQPGDILIGKITPKGESDPSPEEKLLRAIFGDKAGDVKDASLKASPSLKGVIIDKKLFSRVIKNRSSKLADKALLPKIDDEFESKVADLKCILVKKLMVLTEGKVSQGVKDYLGAEVIAKGSKFSASDFDSLDFTAIQLSDWTNDDHANGMIRDLILNFIKKYKELDAELKRKKFAITIGDELPAGIIQMAKVYIAKKRKIGVGDKMAGRHGNKGIVSRVVRQEDMPFLEDGTPVDIVLNPLGVPSRMNIGQIFEAVLGRAGKNLGVKFATPIFDGATLDDLNEWTDKAGLPRYCKTYLCDGGTGERFDQPATVGVTYMLKLGHMVEDKMHARSIGPYSLITQQPLGGKAQFGGQRFGEMEVWALEGFGASHILQEILTIKSDDVVGRSKAYEAIVKGEPMPQPGIPESLNVLLHELRGLGLSINLE

SEQ ID NO: 48971 - protein, 547 aa, Bacteroides fragilis
  MISC_FEATURE (530)..(530): X=any amino acid
  MISC_FEATURE (538)..(538): X=any amino acid
  MISC_FEATURE (544)..(544): X=any amino acid
RANIMKKLLLLLGSFLLSLTTYAAMNISKIDPPFWFTGMNNPELQLMVYGEGIGQASVSVNYPGVSLSSVVKLESNNYLLVYLHLDKEVKPGKMPITFTVGKKKLVKEYELKARSKAGVDHKGFDASDALYLLMPDRFANGNPDNDRIEGMAEYKVDRNDPNARHGGDLAGIEQNLDYFTDLGVTALWFTPVLENNMKGGSYHGYATTDYYKVDPRFGTNEEYRSLIAKAHNRGIKVVMDMIFNHCGVEHPWIKDMPSKDWFNHADFKNNFVQTSYKLTPHVDPYASEYDFDQMNNGWFVEAMPDLNQKNPHVYKYLLQNSLWWIEYADIDGIRMDTYPYADYDAMSNWMKELNEEYPNYNTVGETWVTEPAYTAWWQKDSKLSAPRNSHLKTVMDFSFFDKVNTAKNEQTDTWFKGLDRVYNNFVYDYLYPNPASVLAFIENHDTDRFLGEGENLDMLKQASTLLLTTRRIPQLYYGTEVMMNGVKSKSDGYVRKDFPGGWTDDKENALTPEGRTRLQNESYNFYRNCXTGVRATMXSPKAAXNSS

SEQ ID NO: 48972 - protein, 599 aa, Bacteroides fragilis
MKTAIIVISEAGIALAKTLEQELPESEIFSTGTDTDCHSISNLQEAVPEIFHKFDAIIFIGAMGICIRAIAPHIEDKHKDPAVVCVDSTGRYAVSVLSGHIGGANGLTRYVASILGAEPVITTRSDRTGLWALDTLGKKYGWQTVPAESSDMNHLITLFVDCKPTALLLDIRDEGTTQLEHTLPPHVDVFYKFEDMDLRKYDLLLLVTPFIYNTSDTPALYYVPPVLHMGIGLARDAHPVDTVITHLMDVVVQANMIPLAIRTVSSIEEKKDEPVLKLLAEAYQTRLYTASQLSKIEVPTPSEVVNKHMGTPSVSEASALLSSGGGPLLLPKQKGTNFTVAIAMDAASVRQGHIEIVGAGPGDPELISVRGRRFLEEADLILYAGSLVPRELTECAKAGATIRSSASMTLEEQFALMKEFYDRGQLVVRLHTGDPCIYGAIQEQMNFFDQYGMHYHITPGISSFQAAAAALQSQFTIPERVQTIILTRGEGRTPMPEKEKLSLLARSQSTMCIFLSAGVVDQVQRELLEHYPPTTPVAACYHLTWKDERIFRGQLQDLAKIVNENHLTLTTMIVVGDAIDNREGLSRLYSHQFKHLFRK

SEQ ID NO: 48973 - protein, 144 aa, Bacteroides fragilis
MLQPKKTKFRRQQKGRAKGNAQRGNQLAFGSFGIKALETKWITGRQIEAARIAVTRYMQRQGQIWIRIFPDKPITRKPADVRMGKGKGSPEGFVAPVTPGRIIIEAEGVSYEIAKEALRLAAQKLPITTKFVVRRDYDIQNQNA

SEQ ID NO: 48974 - protein, 388 aa, Bacteroides fragilis
MIIRTILDTDLYKFTTSYAYIKLFPYAIGTFSFKDRDGTEYSDEFVERLRTEISQLSHVALTEKELEYMIKNCRFLPRVYWEWLSSFRFQPEKIEIRLDENRQLHIEVNDYLYKATLYEVPLLAIVSEIKNQSSGNVANLEDILYKLSEKTELSNKHQLLFSEFGTRRRFSFDVQNQVIGHLKQTAHYCIGTSNCHFAMKYGMKPMGTHPHEWFMFHGAQFGYKHANYMALENWVNVYDGDLGIALSDTYTSAIFLSNLSRKQAKLFDGVRCDSGDEFRFIDQLTARYKELGIDPTTKTIVFSNALDFGKALDIQKYCRGKIRCSFGIGTNLTNDTGFKPSNIVMKLSQCKMNMNQEWRECVKLSDDIGKHIGSPEEVRACLYDLRLE

SEQ ID NO: 48975 - protein, 343 aa, Bacteroides fragilis
MGAACQLKILSYLCGKGIFILTKTIMKKFTCVQDIGDLKSALAESFEIKKDRFKYVELGRNKTLLMIFFNSSLRTRLSTQKAALNLGMNVIVLDINQGAWKLETERGVIMDGDKPEHLLEAIPVMGCYCDIIGVRSFARFENREYDYNEVIINQFIQHSGRPVFSMEAATRHPLQSFADLITIEEYKKTARPKVVMTWAPHPRPLPQAVPNSFAEWMNATDYEFVITHPEGYELDPKFVGNARVEYDQMKAFEGADFIYAKNWAAYTGDNYGQILSTDRNWTVGDRQMAVTNNAYFMHCLPVRRNMIVTDDVIESPQSIVIPEAANREISATVVLKRLLENLP

SEQ ID NO: 48976 - protein, 335 aa, Bacteroides fragilis
MESILITGASGFIGSFIVQEALKRRFGVWAGIRASSSKKYLKERKIHFLELDFAHPNELRAQLSGHKGTYNKFDYIVHCAGVTKCADKSDFDRVNYLQTKYFVDTLRELNMIPKQFIYISTLSVFGPIREKDYSPISEEDTPAPNTAYGLSKLKAELYIQSIPGFPYVIYRPTGVYGPREADYFLMAKSIRQHTDFSVGYKRQDLTFVYVKDIVQAIFLGIEKEVSRRAYFLSDGKVYKSRAFSDLIQKELGDPFVIHIKCPLIVLKVVSLLAEFIATRSGKSSTLNSDKYKIMKQRNWQCDITPAVKELGYAPEYDLEKGVKETIAWYKNEGWL

SEQ ID NO: 48977 - protein, 263 aa, Bacteroides fragilis
MVSMAMLISCVASCDSGSDAVSYGVGTLSLGLSANPSFSTKTRSVNEAEYKKADNYQVTVKDADGASLYNGLYKDMPLSIDLTAGKGYTVKAFYGENVNAGFDKLYVEGSQEFTVSEGEQKNVILYCKPANVKVSVIYTEDFLKYYSDCTVSLSTSHLTAPFEVNMKKDSGKDAYLKANADGEKVSITVGGFRDKEGNEVVMEALVAEKKVAPKTHLTITVDPEVITISTGTASLDVTVDTGTEDKDVNIEIPEEYWPGNASK

SEQ ID NO: 48978 - protein, 348 aa, Burkholderia fungorum
SLDANEAAAARRTWRPGQSAGSNGNGETDSMYERSKLNPVLTFDNFVTGKANQLARAAAIQVADNPGISYNPLFLYGGVGLGKTHLIHAIGNQLLMDKAGARIRYIHAEQYVSDVVKAYQRKAFDDFKRYYHSLDLLLIDDIQFFSGKSRTQEEFFYAFEALVANKAQVIITSDTYPKEISGIDDRLISRFDSGLTVAIEPPELEMRVAILMRKAQSEFVSLNEDVAFFVAKHLRSNVRELEGALRKILAYSKFHGREITIEVTKEALKDLLTVQNRQISVENIQKTTADFYSIKVADMYSKKRPANIARPRQIAMYLAKELTQKSLPEIGELFGGRDHTTCAQPCAK

SEQ ID NO: 48979 - protein, 202 aa, Burkholderia fungorum
MHYYVPAEGHGLPHDPFNAIVGPRPIGWVSSRSADGVLNLAPYSFFNAFNYTPPIVGFASVGYKDSVNNIAQTGEFGWNLATLPLAEAMNRSSAMVSPEVDEFQLAGLTPVASNTIAVPRVAESPVSFECRLTQLVQLETANHDKVQTWLVLGEVVGVHISRHLLVDGVYDTAAAQPILRGGGPADYFSIAREGLFKMRRPG

SEQ ID NO: 48980 - protein, 460 aa, Burkholderia fungorum
MTTSVRTRFAPSPTGFIHLGNIRSALYPWAFARKMKGTFVLRIEDTDVERSTSESVDAILEGMAWLGLDFDEGPFYQMQRMDRYREVLKQMQDEGLVYLCYMSTEELDALRERQREAGEKPRYDGTWRPEPGKVLPEPPAGVQPVLRFRNPLNGVVAWDDAVKGRIEISNEELDDLVIARPDGTPTYNFCVVVDDLDMRITHVIRGDDHVNNTPRQINILRALGGEPPVYAHLPTVLNEQGEKMSKRHGAMSVMGYRDAGYLPEAVVNYLARLGWSHGDAEIFSREQFVEWFDLEHLGKSPAQYDHDKLNWLNAHYIKEAGNVRLAELARPFFAGLGIDEAMLAQGADLTAVVGLLKDRASTVKEIAENAAMFYRAPAPDAESLTQHVTDAVRPALADLAAALKAVEWTREAIAAALKATLGAHKLKMPQLAMPVRLLVAGTTHTPSIDSVLMLFGRDVV

SEQ ID NO: 48981 - protein, 467 aa, Burkholderia fungorum
  MISC_FEATURE (452)..(452): X=any amino acid
  MISC_FEATURE (453)..(453): X=any amino acid
  MISC_FEATURE (454)..(454): X=any amino acid
  MISC_FEATURE (455)..(455): X=any amino acid
  MISC_FEATURE (456)..(456): X=any amino acid
  MISC_FEATURE (457)..(457): X=any amino acid
  MISC_FEATURE (458)..(458): X=any amino acid
  MISC_FEATURE (459)..(459): X=any amino acid
  MISC_FEATURE (460)..(460): X=any amino acid
  MISC_FEATURE (461)..(461): X=any amino acid
  MISC_FEATURE (462)..(462): X=any amino acid
  MISC_FEATURE (463)..(463): X=any amino acid
  MISC_FEATURE (464)..(464): X=any amino acid
  MISC_FEATURE (465)..(465): X=any amino acid
  MISC_FEATURE (466)..(466): X=any amino acid
  MISC_FEATURE (467)..(467): X=any amino acid
MSAPATDLSAGAPSGRRQILVTSALPYANGQIHIGHLVEYIQTDIWVRTLRMHGHEVYYVGADDTHGTPVMLRAEKEGLTPKQLIDRVWQEHKRDFDSFGISFDNYYSTDSEENRVLSENVYLALKEAGLIDARDIEQAYDPVKEMFLPDRFIKGECPKCGAKDQYGDSCEVCGSTYLPTELINPYSVVSGATPVRKTSTHYFFRLSDPRCENFLRAWVGGLAQPEATNKMREWLGDAGEAKLADWDISRDAPYFGFEIPGAPGKYFYVWLDAPVGYYASFKNLAEKRGLDFDAWVRKGSKAEQYHFIGKDILYFHTLFWPAMLEFSGHRTPTNVFAHGFLTVDGAKMSKSRGTFITAQSVIETGLNPEWLRYYFAAKLNSTMEDLDLNLDDFQARVNSDLVGKYVNIASRAAGFLIKRFDGRVQDSAMQHPLLASLRAAVPQIAANYESPXXXXXXXXXXXXXXXX

SEQ ID NO: 48982 - protein, 235 aa, Burkholderia fungorum
MGRKEKPVSPETSGIGIKPVSREGTERLVRKAIQYAIDHDRRSVTLVHKGNIMKFTEGAFRDYGYALAQKEFAAELIDGGPWMKIKNPKTGGDVVLKDVIADAFLQQILLRPAEYDVIATLNLNGDYVSDALAAQVGGIGIAPGANMSDSVAMFEATHGTAPKYAGKDYVNPGSEILSAEMMLRHLGWTEAADLIIKSMEKSILQKRVTYDFARLMEGATQVSCSGFGQVLIENL

SEQ ID NO: 48983 - protein, 318 aa, Burkholderia fungorum
MSSHDGLMVFTGNANPALAQEVVKILGIPLGKAMVSRFSDGEIQVEIQENVRGKDVFVLQSTCAPANDNLMELMIMVDALKRASAGRITAAIPYFGYARQDRRPRSARVAISAKIVANMLEIAGVERIITMDLHADQIQGFFDIPVDNIYATPVLLGDLRKQNYENLLVVSPDVGGVVRARALAKQLNCDLAIIDKRRPKANVAEVMNIIGEVEGRTCVIMDDMVDTAGTLCKAAQVLKERGAKQVFAYATHPVLSGGAGERIAASALDELVVTDTIPLGEEARSCAKIRSLTSAGLLAETFSRIRRGDSVMSLFAES

SEQ ID NO: 48984 - protein, 507 aa, Burkholderia fungorum
  MISC_FEATURE (495)..(495): X=any amino acid
EKAPAQAEAKPQAAEAPAAAPAKAAAPAPQAGSYSGSADIECDMLVLGSGPGGYSAAFRSADLGMKTVLVERYSTLGGVCLNVGCIPSKALLHTALVIDEAEALGAHGITFAKPQIDLDKLRDFKSGVVRKLTGGLAGMAKMRKVEVVTGNGAFVDPYHMEVQTEGGKKVVKFKQAIIAAGSEAVKLPFIPEDPRVVDSTGALELRQIPQRMLVIGGGIIGLEMATVYATLGAKIDVVEMLDGLMAGADRDLVKVWEKYNSKRFANVMLKTKTTAAEAKDDGIHVSFEGEKAPAEAQRYDLVLVAVGRTPNGKKIGADKAGVAVTDRGFIDVDKQMRTNVPHIFAIGDIVGQPMLAHKAVHEGHVAAEAAHGEKAYFDALQIPSVAYTDPEVAWAGKTEDQLKAAGIKYGKAVFPWAASGRAIANGRDEGFTKLLFDEETHRVIGGGIVGLNAGDLISEVCLAVEMGADATDIGKTIHPHPTLGESIGMAARVVXSVCTDLPPQKKK

SEQ ID NO: 48985 - protein, 91 aa, Burkholderia fungorum
TSADGRIVWQAKYQLWDNTVCESEPESYAVRQELRYQGQYLDRETGLHYNTLRYYDPDIGRFTTPDPIGLAGGVNLYQYAPNPLGWLDPWG

SEQ ID NO: 48986 - protein, 281 aa, Burkholderia fungorum
MPRAARKNPASASVPPDEAVAGAKPDTTIIQSLDKGLSIFEYILKAGRPKRLNEVASHFDIDKSSAFRFLNTLERTGLVVKDAALKTYTPGPTLSAWSRMVRTDASLVEVARPFLKKLSVMTKQTSHLAVLQDDRVVLIEVMPADNVVSVRQTAGDWEPLYCTGVGKAILAHLPENERNRLIDRITFREHTPTTLTTPEMLRLELARTVEEGLAYDNGEANPQLCCIAAPVLDANGYPVGSVGISMIYPLFPDGPRAQTAFIRAVEQTAQGISASLGNARE

SEQ ID NO: 48987 - protein, 416 aa, Burkholderia fungorum
MNYCAIDFGTSNSAVAVPDGGALRLAPVEGAYTTLPTSVFFNTDEDTREFGRAALAAYIDGFDGRLMRSMKSILGSPLAENSTDLGDGSAIRYTDVIAIFIDHLKRSAEQSVGGPIHRAVLGRPVFFVDDDPRADQMAQRQLEAAARSVGLQEIHFQYEPIAAAFDYESHLAEEGLVLVADIGGGTSDFSLVRVGPERMKRVERKDDVLAHHGVHVAGTDFDRRVELATILRELGYQTLDPEGREIPNRVYFDLATWHLINTVYSPKRVSELALMRHLFTEVKHHDRLMRVVDRRLGHALAAHAEEAKIGVAAGGETVIDLDEVEDDLRLAFDEAQLIKAGHDETLRIVQAARDTVQAAGVATRDVDAIYFTGGSTGLAFLSGALAAAFPDARAVFGDRLASVATGLGIHARRVFG

SEQ ID NO: 48988 - protein, 731 aa, Burkholderia fungorum
MVTNAAGETTRYWRNRRGRLLRTRHADGTGEEFTYDIHGRLIAHTDAHGASTQWERAADGLPVTRIDALGHCLRYEYDAARRLQTLTNENGAPYRFTYDTAGRLVEQQGFDGRLIRYRYDAAGWLTEQIELGAYEDHAAADGNHPDTLRTTYERDKAGRITATTISRAGDERTERITWRYDAAGRLIEASNDCCRLERGYDAVGRLSSETSHVAGRSLTVSYEHDALGNHIRTTLPDGRHIDYLYYGSGHLHQISIDGEVISDIERDALHREVSRTQGELVSHYQYDLQGRHIGQQTMGRAVSGHSAITLISRTYRYDEVGNVREMTDRQSGVHRYRYDPLGQLIESEHETFALDPAHNILDSRDLSPVVGNRVMQFGQHRYVYDMHGNVVEKISGAHTRIRLDYSPAHRIERARVARNGTEERVEYGYDALGRRVFRKNASGITLFVWEGNRLLSEVRDDRTFVYVYAHNSFVPVAQIESRNAQNGRARDDLPIRYYHTDQIGLPYESTDDAGRTQWRARYAAWGRLLGANGGHEQMHESGRQAHQPLRFQGQYFDEETGLHYNRHRYYDPDAGRFMTQDPIGLRGGINLYRYAPNPGRWIDPLGLAVDLSLVGPHYACNLNNFPNTFQVLGHGSPGGNIADLSGETLTPSELGDYMREASNYRQGQPVTLYACHLGAGGKNSYAQQLSNYLGADVNAPTDVLKTIDLGDGDVMALVANGGGWQKFSPIC

SEQ ID NO: 48989 - protein, 501 aa, Burkholderia fungorum
VVKEVKVKVGDQLCQEGSLIVVLEGAEGGAAAPAPAPAAAPAAAPAPAPAAAPAAAPAPAPAASGGGLQEVKVPDIGDYKDIPVIEVAVKVGDRVEKEQSLVTLESDKATMDVPSSAAGVVKEVKVKVGDTVSEGSVIVVVEAEGGAAAPAPAPKQQAVEQPSDAPATPSPAPAAPSALAQAPVIPAGEGGARHASHASPSVRKFARELGVDVTQVQGTGPKGRITQADVTAFIKGVMTGQRAAPAGAAAPAAAGGGELNLLPWPKIDFTKFGPVDPKPLSRIKKISGANLHRNWVMIPHVTNNDEADITELEALRVQLNKENEKAGVKITMLAFVIKAVVSALKQFPTFNASLDGDNLVFKQYFHIGFAADTPNGLVVPVIRDADKKGLIDIAREMAELSKAARDGKLKPDQMQGGCFSISSLGGIGGTNFTPIINAPEVAILGLSRGATKPVWDGKQFVPRLILPLSLSYDHRVIDGAAAARFNAYLGAILADFRRVIL

SEQ ID NO: 48990 - protein, 277 aa, Burkholderia fungorum
MLSKLTQWLGTRRRERALRDYAIDDSLWQATLDGLPFLAHLDAPDLVRLRELTSLFLAQKEFSTAHELELTDAMTVAIAAQACLPVLNLSLDLYRGWVGVIVYPGEFVIRKTVEDEDGVVHEVEQDASGEAWEGGPVVLSWEDAQMTDGTDAYNVVIHEFAHKIDMLNGEADGHPPLMRRWHAPLDSQGWADVFDNAYDRFCAKVDAVPERRWARFERESLIDPYAADHPSEFFAVCSEALFVRPQAFEAEYPELYRLLARYYRQDPARVGLTFTAG

SEQ ID NO: 48991 - protein, 88 aa, Burkholderia fungorum
MKEGIHPDYREVLFIDVSNDFKFVTRSTIQTRETAEFEGKTYPLAKIEVSSESHPFYTGQQKIMDTAGRVEKFRNKFGSRATGKVAAK

SEQ ID NO: 48992 - protein, 447 aa, Burkholderia fungorum
PKVGFVSLGCPKALVDSEQIITQLRAEGYEISGTYDGADLVVVNTCGFIDEAVQESLDAIGEALNENGKVIVTGCLGAKKSASGSGLIEEVHPKVLAVTGPHALGEVMQHVHMHLPKPHDPFVDLVPAAGVKLTPRHYAYLKISEGCNHRCTFCIIPSMRGDLVSRPVADVMLEAVKLFKSGVKELLVISQDTSAYGVDVKYRTGFWNGKPIKTRMTDLVGALGELAAQYGAWVRLHYVYPYPSVDEVIPMMAEGPFKGHVLPYLDVPFQHAHPEVLKRMKRPANAEKVMERVKKWREMCPDLTIRSTFIAGFPGETEEQFQTLLDFIREAELDRVGCFAYSPVEGATANELDGALPDEVREERRARFMEVAEEVSAKRIAKKVGKTLKVLVDEINADGGIGRTAADAPEIDGVVYIAPAVKASKRYKVGDFVSVKITGADGHDLWG

SEQ ID NO: 48993 - protein, 340 aa, Burkholderia fungorum
MSRIYLAPMEGLADYVLRDVLTGIGGFDGCVSEFVRVTGSLLPSRVYEREAPEVLDGGHTPNGTPMVIQLLGSDPEWMARNAAHAASLSPHGIDLNFGCPAKVVNQHGGGAMLLADPEQLNRIVSSVRAAVPAGVPVTAKMRLGVSDTSLAIECAVALAEGGAASLVVHARTRDHGYRPPAHWEWIARIDAAVDVPVVANGEVWTVADWERCRAVSGCANVMLGRGAVSDPFLALRIRGLMERTPSHGEWRHVLGHIAGYLRKLQTRVASRHEHGRVKKWLSYLQRTWPQAAELHAAIRRVQDSHEILAMIERALGFDELMATHRFASASQLDVADLAAG

SEQ ID NO: 48994 - protein, 609 aa, Burkholderia fungorum
  MISC_FEATURE (519)..(519): X=any amino acid
  MISC_FEATURE (544)..(544): X=any amino acid
MRLSRIVIKNFRNFKHFDVRLGEHAVVLGENKVGKTNLLFALRLILDPALPDSSRRLRIDDFWDGLARPLKAEDVIEVSVEFRDFENNENLLAVLADHLVRPDPMVARVTYRYQPVQGLEGAPRSEADYEFILFGGGRIENAIGYELRRWMPMDLFPALRDAESDLARWSRSPLRPLLDRAAKTVDAKALSAIAGEVHATTSKIAALPELSDVVSQVNDQLTVMVGDKHAVKTALGFAPTEPERLLRALQMMIDSGKRGVAEASLGSANVLYLALKHLEHQYLVDEGERQHTFLAIEEPEAHLHPHLQRLIYRNYLQTRDEVQADTEPRSILLTTHSPNVASVAPLANVVVLRHVVDAGHTVGRSLKGVKLNTSDREDLERYIDVTRGELFFSKGVILVEGDAEKFLLPTLAKLNDKALDFDAMGISVCSIAGTNFAPYVQLLGQKGLDIPFVVLTDFDPKNQAVSQEDADPDDNGVGNSYAKIVSLIRSCVIFWTRKSGTRAAMERFSSSRRSMASSXTSSRSRLISLRRGLRIIFIQRSVRXPPTRKCMRALRACPQTPTRSIPRSSLKDIDSIGKGRVAQRLAAVLVEESVDVCPTYIKKALKYLK

SEQ ID NO: 48995 - protein, 485 aa, Burkholderia fungorum
MVIGGERVPSASGVWLESIDPYTGEPWAKVPRGDATDAEAAVSAARKALTTGAWHQLSATQRGALLRRLADLISRDWERLAEIEIRDNGKVISEVGPQIRYLAQYFHYYAGLADKIEGAVIPVDRPGMLNYTRHEPVGVVVAITPWNSPLMLASWKIAPALAAGCTVILKPSEHTSVSSLVFSDLFDEAGFPPGVVNVVTGFGAEIGNALVSHPDVAKVAFTGGDVAGQAVYERAAAGLKRVTLELGGKSPHIVFDDADLDGALAAAMDGVFSSSGQMCVAGSRLMLHDRIHDEFVARLLDRVRTLKLGAPMNPATSIGPVTTQAQFERILSYIDVAKQEGARCLVGGVASPEAEGGSGWFVAPTVFGDVKNDMRIAREEVFGPVLSIIRFSTDDEAVHLANDSRYGLASGIWTRDVGRAISVADRIQAGTVWVNTYRAVSAASPFGGMKRSGIGRENGQEAIMGFLQTKSIWISTTSRPVAAWS

SEQ ID NO: 48996 - protein, 238 aa, Burkholderia fungorum
VIAADIGGGTSDFSLVRIGPQRMGKMDRKRDAFAHHGVHVAGTDIDRRVELAAILQEAGYRSLDTEGREIPTTAYFELATWHLINSLYTPKRPAELRLMRHLYRNPVHHDRLMRVVKRRPGHALAASAEQAKIAIAAGGDTLIGIDPIEPGLSVAFGQQQLVDATCEESMRIVHAARKTARLAGVAAGKVDAVYFTGGSTGLASPTRALAGVFSFSEAEQVFGDPLASVATGLGIHAK

SEQ ID NO: 48997 - protein, 258 aa, Burkholderia fungorum
MLTFFRVHPRLVFMETDHISPTVSLADFRAHTLTGVVQHEIERMILSGELKPGQRLNEKAVADRLSVSRGPVREACRALAELGLVYLIPQRGVFIQRVTRDDAIEVYDLRAGLTALSASLLAPLMTEEMATQLDAYVDEMQEAAQKGDFSRFDPLNLEFHDYIVRSTGNSRLIKLYRGFVKEFHLFRVHGMVQRGALLQSNDEHREIVNALKSRNASLSYETSFSHVSKGKERMLVALDGLVKSGEENAVPPAADQLA

SEQ ID NO: 48998 - protein, 475 aa, Burkholderia fungorum
MDAISIAYENKKSAGFQGLLARVLDTSLIVGGAVAAAQIRFENLTGDHVDTGFIAFAAAFALALFPVFGVYQSWRGRSMLRMIGQICLAWLVVQGCGLVLMFALHRTDFISRLWFAYWTGTTGAALIVARSSTYALLRHVRNAGLNLRSVAVVGRGSHCRQVMRGILAARASGFRVAAAFDLHPGAERAAECPVPNIQLFDDFTDFSRFVRVENIQEIWLALPLSEESMISRCLHEFRDDLVNIRFLPDVSSLALFDGSVIDLIGVPAINLVASPLSSHALLKKEVFDRAFSLAALLCLAPLMICVAVAVKLSSPGPVFFVQKRKGADGRVFKIYKFRTMRVHASEPGVIKQASRNDPRITRIGAFLRRTSLDELPQFLNVLRGDMSVVGPRPHAIEHDDLYRTIVHGYIHRYRIKPGITGWAQVNGFRGETDRVEKMQKRVEHDLYYLTNWSFGLDMRIVLATVVRGLIHRNAY

SEQ ID NO: 48999 - protein, 53 aa, Burkholderia fungorum
MVRFEYFHLTDFEDVDALRTGLEGYIDYYNRHRIRSKLGGLSPVEYRMRAGKN

SEQ ID NO: 49000 - protein, 519 aa, Burkholderia fungorum
ALPYSMIAHNGEINTVKGNVNWLNARTGAIASHVLGDDLPKLWPLIYPGQSDTASFDNCLELLVMAGYPLVHAMMMMIPEAWEQHTLMDDNRRAFYEYHAAMMEPWDGPAAIAFTDGRQIGATLDRNGLRPARYIVTDDDLVIMASEAGTLPIPESKIVKKWRLQPGKMFLIDMEHGRIIDDKELKDNLANAKPYKSWIDAVRIKLDEIEAKAEDVATERREAAALLDRQQAFGYTQEDLKFLMAPMAQAGEEAVGSMGNDSPLAVMSNKNKTLYHYFKQLFAQVTNPPIDPIRENMVMSLVSFVGPKPNLLDTNNINPPMRLEVSQPVLDFKDIAKIRAIDQYTGGKFSSYELNICYPVAWGKEGIEARLASLCAEAVDAVKSGYNMLIVSDRKTDRDNVAIPALLATAAIHTHLVQQGLRTSTGLVVETGSARETHHFALLAGYGAEAVHPYLAMETLGQLAAGLKGDLSPEKAVYNFTKAVGKGLQKVMSKMGISTYMSYTGAQIFEAVGLAEDLV

SEQ ID NO: 49001 - protein, 357 aa, Burkholderia fungorum
LDAGGEYAYRVRGEEHMWTPDAIAKLQHSARSNSYQTYKEYAHLINDQTRRHMTFRGLFEFKFDPTRAIPLDEVEPAKEIVKRFATGAMSLGSISTEAHATLAIAMNRIGGKSNTGEGGEDVNRYRNELRGIPIRNGDTMKSVIGDEVIVDIPLKDGDSLRSKIKQVASGRFGVTAEYLASADQIQIKMAQGAKPGEGGQLPGHKVSEYIGKLRYSVPGVGLISPPPHHDIYSIEDLAQLIHDLKNANSAASVSVKLVSESGVGTVAAGVAKAKADHVVIAGHDGGTGASPLSSVKHAGTPWELGLAETQQTLVLNQLRGRIRVQADGQMKTGRDVVIGALLGADEFGFATAPLVVE

SEQ ID NO: 49002 - protein, 182 aa, Burkholderia fungorum
MKTVGDKVEAFTVTAAKPGFNHHEENGVSAFEEITEQSFPGKWKIIYFYPKDFTFVCPTEIVEFAKLAKDFEERDAVLMGGSVDNEFVKLAWRREHKDLDKLNHYAFGDVKGELIDQLGVRDKEAGVALRATFIVDPDNTIQHVSVNNLNVGRNPEEVLRILDGLQTDELCPCNRAVGGATL

SEQ ID NO: 49003 - protein, 237 aa, Burkholderia fungorum
MTSRLFALIPCAGTGSRSGAAMPKQYRTVAGRDMLHFSLAAFDACSEFAQTLVVIAPDDAHFDARRFGGLRFAVRRSGGASRQASVLNGLHALAEFGAHDDDWVLVHDAARPGITPALIRTLVGALKDDTVGGIMALPVADTLKRIDANSADGRIARTEARDGLWQAQTPQMFRIGMLRAAILRAQADGHDLTDEASAIEWLGHAPKLVQGSLRNFKVTYPEDFDLAEAILSRPAVS

SEQ ID NO: 49004 - protein, 576 aa, Burkholderia fungorum
MTTHVSGEGALIEPKDGLSYVRGPTDIPLSEATIGQFLRDTAERFPDRPAVVFREQRIRWTWQEFVEEVDVLAAGLLALGIEKGDRVGIWSPNRVEWLLTQFATARIGAVLVNINPAYRLAELEYALNKVGCKAIIAAERFKTSMYLEMLQELAPELATQAPGELHASRLPELRYVIRMCDTETPGMLSFSDVIEEGRASLDVPTLDAIGATLSCRDPINIQFTSGTTGNPKGATLTHRNVVNNARYIAMAMRLTEQDGLCIPVPLYHCFGMVLSVLACVSVGANMVFPGEGFDPAASLAAVAEEQCTALHGVPTMFIAELDHPDFATYDLSRLRTGIMAGSPCPIETMKKVVSRMHLGEITIAYGMTETSPVSFQSSTTDPLDKRTTTVGRIQPHLEVKIVDPLGNIVPVGETGELCTRGYSVMQGYWDDEAKTRESIVDGWMHTGDLATLDAEGYCNIVGRLKDMLIRGGENIYPREIEEFLFRHPKIQSVQVFGVPDSKYGEEVCAWVVLRAGEQATAEEIQQFCQGQIAHYKVPKYIRFVDELPMTVTGKVQKFIMRERMISELKLRQDKTA

SEQ ID NO: 49005 - protein, 245 aa, Burkholderia fungorum
MDRKVKLLSGLDLSSAIGAEIGALCRPVVTRPEGTVYYIDHASTEVLREKYKHDPNVDINALVDVDAVWGQQSLSEALGGKLVDYVIASHVVEHVPDLVGWLAEIGAILKPGGQLRLAVPDKRFTFDLMREDSRISDVLGAHVVRARIPQPQAIIDHIVNVRYDVSAGEIWAGICSNGRPAHTFADAIASAQDAFANGNYHDVHVWVFTPLTFARICRQLVENGLLSMSCANFFDTARNDSSFRV

SEQ ID NO: 49006 - protein, 279 aa, Burkholderia fungorum
IVLELRQEFPLADLLRAAGLPRSTYYYRAKTLAAPDRHRGLKAKIQAVYAAHRGLYGYRRITLTIRSDGELVNHKKVQRLMNELGIRSRVRRKKFRSYQGEVGEAAPNLLNREFTASSPNEKWVTDVTEFRVAGKKLYLSPVMDLYNGEIVAYESSHRPDFPMVMGMLRKAVKKMRECGNAATPMLHSDQGWHYRMQPYRAALARYGMKQSMSRKGNCFDNAAMESFFGTLKAEYFHLTDFEDVDALRVGLKGYIDYYNRHRIKSKLGGLSPVEYRMRA

SEQ ID NO: 49007 - protein, 175 aa, Burkholderia fungorum
MRKFDVKFKGKVVREYLAGKGGYKLLAAKFGIAESMVRRWVAAYRHHGNAGLIRQRGAYTLEFKLEVVHRGVAENLSCRELAAIYNIGNPHSITMWQQQKARGELRSLKGMHPSGQDVSVPAKKKTSNQSLEAPRSEESDQLLRENQQLRAEVAYLKKFNALVLAKKLARQKEPK

SEQ ID NO: 49008 - protein, 225 aa, Burkholderia fungorum
RIFTRIGAADDLAGGRSTFMVEMTEAAAILNDATPQSLVLMDEIGRGTSTFDGLALAWAIARHLLAHNGCHTLFATHYFELTQLPAEFPQAANVHLSAVEHGHGIVFLHAVSEGPANQSYGLQVAQLAGVPNAVIRAARKHLAYLEQQSAAQPAPQLDLFAAPMPMLLEDADDERDSKAEALVPPAMQALVERLRGIDPNDLRPREALDLLYELHELAAAPDADH

SEQ ID NO: 49009 - protein, 292 aa, Burkholderia fungorum
SRRLPLYRYFGGSGAMQLPVPMMNIVNGGAHANNSLDIQEFMIVPVSQPSFREALRCGAEVFHALKKILSDRGMSTAVGDEGGFAPNFGSNDECLSTILQAIEKAGYRAGEDVLLALDCAASEFYHDGKYQLAGEGLQLSSTEFADYLANLADKFPIVSIEDGMHESDWAGWKTLTDKLGKKIQLVGDDLFVTNTRILKEGIEKGIANSILIMINQIGTLTETFAAIEMAKRAGYTAVISHRSGETEDSTIADIAVGLNAGQIKTGSLSRSDRISKYNQLLRIEEDLGAISP

SEQ ID NO: 49010 - protein, 148 aa, Burkholderia fungorum
GIQPTCRTTCTGVIIFLKLLDQGQAGDNVGILLRGTKREDLERGQVLAKPGSINPHTHFTAEVYVLSKDEGVRHTPFFNNYRPQFYFRTTDVTGSIELPKDKEMVMPGDNVSITVKLINPIAMEEGLRFAIREGGRTVGAGVVAKILE

SEQ ID NO: 49011 - protein, 143 aa, Burkholderia fungorum
MTYLLQVVPGAGRRPSAAARLYVLYCLAVQYRLALFQGIVMQNQKIRIRLKAFDYRLIDQSAAEIVDTAKRTGAIVRGPVPLPTRIQRFDILRSPHVNKTSRDQLEIRTHQRLMDIVDPTDKTVDALMKLDLPAGVDVEIKLQ

SEQ ID NO: 49012 - protein, 219 aa, Burkholderia fungorum
MSLGLVGRKVGMTRIFTAEGDSIPVTVLDVSDNRVTQIKTVETDGYTAVQVAFGTRRASRVTKPLAGHLAKAGVQAGEILKEFQIDAAKAAELSNGTVVGPDLFEVGQKVDVQGVSIGKGYAGTIKRYNFASGRASHGNSRSHNVPGSIGMAQDPGRVFPGKRMTGHMGDDTVTVQNLEIARIDADRKLLLVKGAVPGAKGGKVFVTPAVKTRAVKGAK

SEQ ID NO: 49013 - protein, 206 aa, Burkholderia fungorum
MELKLLNANGQEGAGVSASDVVFGRDYNEALIHQVVVAYQANARSGNRAQKDREQVKHTTKKPWRQKGTGRARAGMSSSPLWRGGGRIFPNSPEENFSHKVNKKMHRAGLCSIFSQLAREGRISVVDELTLEAPKTKLLAEKFKAMGLDSVLVITDTVDENLYLASRNLAHVAVVEPRYADPLSLIYFKKILITKAAVAQIEELLS

SEQ ID NO: 49014 - protein, 275 aa, Burkholderia fungorum
MAIVKVKPTSPGRRAMVKVVNKDLHKGKPFAPLLDSQSTTAGRNNNGHITTRHKGGGHKHHYRVVDFRRNKDGIAAKVERLEYDPNRSANIALVLYADGERRYIIAPKGVTVGQQLMSGSEAPIRAGNTLPIRNIPVGTTIHCIEMLPGKGAQMARSAGTSAMLLAREGIYAQVRLRSGEIRRVHVECRATIGEVGNEEHSLRQIGKAGANRWRGIRPTVRGVAMNPVDHPHGGGEGKTAAGRDPVSPWGTPTKGYRTRSNKRTTSMIVQRRHKR

SEQ ID NO: 49015 - protein, 109 aa, Burkholderia fungorum
MEVKAIHRGARISAQKTRLVADQIRGLPVDKALNVLTFSPKKAAGIVKKVVLSAIANAEHNEGADIDELKITSIYIDKAASLKRFTARAKGRGNRIEKQSCHITVTVGN

SEQ ID NO: 49016 - protein, 229 aa, Burkholderia fungorum
MGQKIHPTGFRLAVSRNWASRWYANNNNFAAMLQEDIGVREYLKKKLKNASVGRVVIERPAKNARITIYSSRPGVVIGKKGEDIELLKSELQRRMGVPVHVNIEEIRKPETDAQLIADSITQQLERRIMFRRAMKRAMQNAMRLGAQGIKIMSAGRLNGIEIARTEWYREGRVPLHTLRADIDYATSEAKTTYGIIGVKVWVYKGDTLGRNDAPVVEEVAEEKRPRRNA

SEQ ID NO: 49017 - protein, 138 aa, Burkholderia fungorum
MLQPKRRKYRKEQKGRNTGIATRGNAVSFGEFGLKAIGRGRLTARQIEAARRAMTRHIKRGGRIWIRIFPDKPISHKPAEVRMGNGKGNPEYYVAEIQPGKMLYEMDGVTEELAREAFRLAAAKLPLKTTFIVRQLGA

SEQ ID NO: 49018 - protein, 273 aa, Burkholderia fungorum
MLKTRVITAIILLAVFLPVTLFAPVGAFGALIAFVVVFAAWEWARLLKLGGAGPVIYALVAAVALVASTRLGAGIEQARPLFQAAAIFWVVAGPFVLLRKPTLSQGAWRPFLFLAGIVIFVACWHALVAARMQGVPFVLSLLLLVWLADIGAYFSGKAFGKHKLAPAISPGKTWEGAIGGWLAVMIVAAAAVFLHAFEPTLYSALLAHWGAVRTLLALTLLVVFSVVGDLFESMMKRQAGVKDSSGLLPGHGGVLDRIDALLPVLPLAMLLLG

SEQ ID NO: 49019 - protein, 260 aa, Burkholderia fungorum
MTYTSSTVRVPDVAAVPRHIAIIMDGNGRWATQRRLPRVAGHTRGVDAVRAAVEACARQGVEYLTLFAFSSENWRRPNDEVSFLMRLFVTALEREIGKLHANGIRLRVVGDLSRFDTRIRDLIRRAETKTARNTRLTLTIAANYGGRWDIMQATRKLAEQSALAGKAVEVTEESFAEHLSMAYAPEPDLFIRTGGERRVSNFLLWQLAYTEFYFTDTFWPDFDADALGHAIASYAERERRFGRTSAQLEPQSQNVDSLPC

SEQ ID NO: 49020 - protein, 173 aa, Burkholderia fungorum
MQRSIDAFKNDLSKIRTGRAHTGLLDHIQCDYYGSPVPISQVANLTLIDARTIGVQPWEKKMVPVVEKAIRESDLGLNPATQGDVIRVPMPALTEERRRELTKVVKSEAETAKVAVRNLRRDANEQLKKLVKDKEISEDDERRAGDDVQKLTDRFVAEIDKLVVTKEAEIMTV

SEQ ID NO: 49021 - protein, 237 aa, Burkholderia fungorum
MPTAYKRVLLKLSGEALMGDDAFGINRATIERMVADVAEVVRLGTQLAVVIGGGNIFRGVAGGAAGMDRATADYMGMLATMMNALALQDAMRHAGIEARVQSALRMDQVVEPYIRPRAIRQLEEGKVVIFAAGTGNPFFTTDTAAALRGSEIGAEVVLKATKVDGVYSADPKKDPSATRYTTISFDEAIGRNLQVMDATAFALCRDQKLPIRVFSIVKPGALKRIVQGEDEGTLVHV

SEQ ID NO: 49022 - protein, 294 aa, Burkholderia fungorum
MMAAITASMVAELRAKTDAPMMECKKALTEADGDMARAEELLRVKLGNKASKAASRVTAEGVVASFIGGNAGSLVELNCETDFVSKNDDFLAFSKKVAELVATQNPADVAALSALPLDGSTVDAVRLALVGKIGENLSIRRFVRFDTANKLAAYLHGTRIGVLVEYTGADEQVGKDVAMHIAAMKPVSLSSEDVPAELIAKERSIAEQKAAESGKPAEIVAKMVDGSVQKYLKEVSLLNQTFVKNDKQTIEQMLKAGNASVQKFALFVVGEGIEKKQDDFAAEVAAQVAAAKQQ

SEQ ID NO: 49023 - protein, 299 aa, Burkholderia fungorum
MRWLVLLLFAVSAAWTHSRGKVRHGFFRQLSDHSTFTAPLNGFVYLFSALPAQPYLPPSRFPELKLLKEEWRTIRDEAFALRDASHIRAATAYNDIGFNSFFRNGWRRFYLKWYGRPHPSAVALCPRTVELLGRIPSVKAAMFAQLPPGGRLGLHRDPYAGALRYHLGLATPNHDGCAIVVDGETYSWRDGEDIVFDETYLHYAFNDTQEDRIILFCDIERPMKYRWARAINRAIGSFLMRAAASPNETGDYTGGLNRIFRYLYMVRRAGKRLKAWNRTVYYVVKWCLFIAIALAIFWR

SEQ ID NO: 49024 - protein, 480 aa, Burkholderia fungorum
IKLNDQALLRQHAYINGEWQTADNGSTFTITDPSSGDLLAQVPMMGAAEARRAIHAACIAWSVWRKKTAKDRAIVMRRWFNLVLENADDLATILTAEQGKPLAEAKGEIAYAASFIEWFAEEGKRVSGDTPATPDADKRIMVTKEPIGVCAAITPWNFPAAMITRKVAPALAAGCTIVVKPAEATPLTALALAVLAERAGIPSGVLNVITGDPRAIGAELTANPGVRKLSFTGSTAIGRMLMAQSAPTIKKVTLELGGNAPFIVFDDADIDNAVEGAVVSKYRNSGQTCVCPNRFYVHDAVYDAFVEKLSKAVFELKVGSGRDPGVSIGPLISEAAVKKVEAHIADALQKGAKLEVGGARHELGHSFFQPTVLSDVTPDMMLSREETFGPLAAVSRFSSEDEVVRLANDTEYGLAAYFYSRNIARVWRLAEALEYGMVGINTGLISNEVAPFGGVKESGIGREGSRYGIEDYLVIKYLCL

SEQ ID NO: 49025 - protein, 92 aa, Burkholderia fungorum
MANSAQARKRARQAAKANSHNSALRSKFRTAIKAVRKAIDAGDKAKAAEIFLASSKTIDIIADKKIVHKNKAARHKSRLAAAIKGLQAPAAQ

SEQ ID NO: 49026 - protein, 516 aa, Burkholderia fungorum
MNLFRALLTVSGFTLLSRVTGLARETLIARAFGASQYTDAFYVAFRIPNLLRRISAEGAFSQAFVPILAEFKNQQGHDATKALVDATSTVLAWALAVLSLIGVVGATGVVFVVASGLAHEGHAYALAVTMTRIMFPYIIFISLTSLASGVLNTYKNFSLPAFAPVLLNVAFIVAAVFVAPRLQTPVYALAWAVIAGGVLQFLVQLPGLKKIDMIPRIGLNPVKALAHRGVKRVLSKMVPAMFAVSVAQISLIINTNIASRIGPGAVSWINYADRLMEFPTALLGVALGTILLPSLSKAHVDADPHEYSSLLDWGLRVTFLLAAPSAVALFFFAQPLTATLFNYGKFDGNSVVMVARALAAYGVGLIGLILIKILAPGFYAKQDIKTPVKIGVFVLILTQLSNYVFVPIFAHAGLTLSVGLGACGNALLLFLGLRKRGIYTPSSGWLRFFVQLFGACLVLAGAMHWLAISFDWIGMHSRPVDRMVLLAACLVLFAALYFGMLWLMGFKYAYFKRRAK

SEQ ID NO: 49027 - protein, 188 aa, Burkholderia fungorum
MALVEVIVGSATSDETLARSLDYIQQIHKTPIVVRDGYGFYTTRCVEAYIREGVRLLADGVNPVLIENAGTALGMPVGPLTLADEVGIDVLHHIVSLFRDREHGRWADDKHGAGNAILCRLELAGRFGRKAGRGFFAYPPGEPRHLELGDLDLVWPHGVRPPWRSRVPTLSGQDASRSRFQVRRHRRV

SEQ ID NO: 49028 - protein, 448 aa, Burkholderia fungorum
MANSPSLAKPGRSAAKFGDLRRRAVFLLLALIVYRIGAHIPVPGIDPDQLAKLFQSQSGGILGMFNMFSGGALSRFTIFALGIMPYISASIIMQLLAIVSPQLEALKKEGQAGQRKITQYTRIFTVLLATFQAFGIAVALENQPGLVIDPGMVFRLTTVVTLVTGTMFLMWLGEQITERGLGNGISIIIFGGIAAGFPNAIGGLVSLVQTGSMSPISAIIVVALIAAVTYLVVFIERGQRKILVNYAKRQVGNKIYGGQSSHLPLKLNMSGVIPPIFASSIILFPATILNWFSSGSRTGWFADTLHNVAEALKPGQPVYVLLYALAIVFFCFFYTALVFNSRETADNLKKSGAFVPGIRPGDQTARYIDRILTRLTLAGAIYIVFVCLLPEFLVLRWNVPFYFGGTSLLIIVVVTMDFMAQVQSYVMSQQYESLLKKANFKGGGVPMR

SEQ ID NO: 49029 - protein, 122 aa, Burkholderia fungorum
MIQTETRLEVADNTGAREVMCIKVLGGSKRRYASIGDIIKVTVKEATPRGRVKKGEIYNAVVVRTAKGVRRQDGSLIKFDGNAAVLLNAKLEPIGTRIFGPVTRELRSERFMKIVSLAPEVL

SEQ ID NO: 49030 - protein, 76 aa, Burkholderia fungorum
MKGLMAKDDVIQMQGEVIENLPNATFRVKLENGHVVLGHISGKMRMHYIRILPGDKVTVELTPYDLSRARIVFRAK

SEQ ID NO: 49031 - protein, 102 aa, Burkholderia fungorum
MNKIRKGDEVIVITGKDKGKRGVVLSVGEGKVIVEGINLVKKHVKPNPMKGTTGGVEAKTMPLQISNVALVDANGKASRVGIKVEGDKKIRFLKTTGAELSA

SEQ ID NO: 49032 - protein, 121 aa, Burkholderia fungorum
MARIAGVNIPNHQHTEIGLTAIYGIGRTRSRDICVAAGVAFSKKVKDLNDADLEKLREEVGKFIVEGDLRRETTMNIKRLMDLGCYRGVRHRKGLPLRGQRTRTNARTRKGPRRAAQSLKK

SEQ ID NO: 49033 - protein, 179 aa, Burkholderia fungorum
MARLQEFYKEKVVPGLIEKFGYKSVMEVPRITKITLNMGLGEAVADKKIIENAVGDLTKIAGQKPVITKARKAIAGFKIRQGYPIGAMVTLRGQAMYEFLDRFVTVALPRVRDFRGVSGRAFDGRGNYNIGVKEQIIFPEIDYDKIDALRGLNISITTTAKTDDEAKALLASFKFPFRN

SEQ ID NO: 49034 - protein, 101 aa, Burkholderia fungorum
MAKLALIEREKKRARLAAKYAPKRAELKAIIGDMSKSDEEHYAARLELQQLPRNSNPTRKRNRCAITGRPRGTFRKFGLARNKIREIAFRGEIPGLTKASW

SEQ ID NO: 49035 - protein, 131 aa, Burkholderia fungorum
MSMSDPIADMLTRIRNAQMVEKVSVTMPSSKVKVAIAQVLKDEGYIDDFAVKSEGAKSELNIVLKYYAGRPVIERIERVSKPGLRVYRGRNDIPVVMNGLGVAIVSTPKGVMTDRKARATGVGGEVICYVA

SEQ ID NO: 49036 - protein, 176 aa, Burkholderia fungorum
MSRVGKSPVALQGAEVALSDERITVKGPLGTISQAANSLVKVVNDNGTLKFEPVDESREANAMSGTMRALVANMVNGVTKGFERKLTLVGVGYRAQAQGDKLNLSLGFSHPVVHQMPEGIKAETPTQTEIVIKGINKQQVGQVAAEVRGYRPPEPYKGKGVRYANEVVILKETKKK

SEQ ID NO: 49037 - protein, 121 aa, Burkholderia fungorum
MDKTQSRLRRARQTRIKIAELQVARLAVHRTNTHIYAQVFSPCGTKVLASASTLEAEVRAQLADQTGKGGNVAAATLIGKRIAEKAKAAGIESVAFDRSGFRYHGRVKALADAAREAGLKF

SEQ ID NO: 49038 - protein, 172 aa, Burkholderia fungorum
MAKMQAKVQADERDDGLREKMISVNRVTKVVKGGRILGFAALTVVGDGDGRIGMGKGKAKEVPVAVQKAMEQARRNMFKVPLKNGTLQHEVHGKHGASAVLLAPAKDGTGVIAGGPMRAVFDVMGVQNVVAKSHGSTNPYNLVRATLDGLRKQSTPGDIAAKRGKSVEDILG

SEQ ID NO: 49039 - protein, 144 aa, Burkholderia fungorum
MELNNLKPAEGAKHAKRRVGRGIGSGLGKTAGRGHKGQKSRSGGFHKVGFEGGQMPLQRRLPKRGFTSLTKEFVGEVRLSDLEKLPVDEIDLLALKQAGLVGELIKSAKIIATGELKRKVVVKGLGATKGARAAIEAAGGSFAE

SEQ ID NO: 49040 - protein, 287 aa, Burkholderia fungorum
MNLTIIGSGYVGLVTGACLADIGHDVFCLDVDQRKIDVLNNGGVPIHEPGLQEIIARNRKAGRLKFSTDVEAAVAHGDIQFIAVGTPSDEDGSADLQYVLAAARNIGRHMTGFKVIVDKSTVPVGTASRVRDVIAAELAGRNAAHMFSVVSNPEFLKEGAAVEDFTRPDRIVLGCDEDVPGEKARELMKRLYAPFNRNRERTLYMDVRSAEFTKYAANAMLATRISYMNELANLADRVGADIEAVRRGIGSDPRIGYDFLYAGCGYGGSCFPKDVQALIRTAADHKA

SEQ ID NO: 49041 - protein, 466 aa, Burkholderia fungorum
EGQRMLSVLSRIIDIAMVALGAAIAAAVHSGKAVWLDDMQSVSLAFDCLLVVVFFPALGIYQSWRGKPLYDLLCRVAGGWLLVEVTGVLISFSLHRSDSLSRLWLVYWAAATIVLLIVTKVIVYSILRGLRREGFNQRAVAIVGGAPYGRFLIQQMRSRPDAGFSPVVVFDEDGTINPYEDPDAGEAIEGVPVERDYQRMLHLVRQRAIRELWLALPISKEKAIHRFVMDLRNDFVNIRFIPDVRSLTLFNQPMVDLLGVPAINLAASPITDLRVLPKRVFDRLFALAALTALAPVMVVIAVMVKLSSPGPVFFRQKRKGIDGNQFEIYKFRSMKIHHEEAGKITQATRRDPRITAVGAFLRRTSLDELPQFINVLRGEMSVVGPRPHALEHDDIYKDLVKGYMHRYRIKPGITGWAQINGYRGETDRIEKMMGRVKLDLYYMQHWTFWLDHQDRRANAVEGLCGQ

SEQ ID NO: 49042 - protein, 447 aa, Burkholderia fungorum
IAEVLVNLGYQVSGSDLTSNAITDRLAALGARIAIGHAAENIEGANAVVVSTAVRSDNPEVLAARHRRIPIVPRAVMLAELMRLKQGIAIAGTHGKTTTTSLVASVLAAGGLDPTFVIGGRLISAGANARLGTGDFIVAEADESDASFLNLFPVIEVITNIDADHMDTYGHDFARLKQAFIEFTHRLPFYGIAVLCVDDPNVKEILPFVSKPIIRYGFAPDAQVRAVNVQARDGKMHFTAMREDAAPLDIVLNLPGEHNVQNALAAIAIATELEVKDADIQRALADFNGVGRRFQRYGEVPVFSEGSTNGAYTLVDDYGHHPVEMAATVAAARGAFPGRRLVLAFQPHRFTRTRDCFEDFVKVLSTVDALVLTEVYSAGESPIVAADGRALARALRVAGKVEPVFVDTVDEVPDALSAIVRDGDVVITMGAGSIGGVPARLAQETKV

SEQ ID NO: 49043 - protein, 316 aa, Burkholderia fungorum
MSEMSSIDPKQFGKVAVLLGGNSAEREVSLNSGRLVLQGLRDAGIDAHPFDPAERPLAALKEEGFVRAFNALHGGYGENGQIQGALDFYGIRYTGSGVLGSALGLDKFRTKLVWQQLGIPTPPFEAVLRGDDYEARAKEIVAKLGLPLFVKPASEGSSVAVIKVKSADALPAALIEAVKFDRIVVVEKSIEGGGEYTACIAGNLDLPVIRIVPAGEFYDYHAKYIANDTQYLIPCGLTADEEARLKVLARRAFDVLGCTDWGRADFMLDADGNPYFLEVNTAPGMTDHSLPPKAARAVGISYQELVVAVLALTLKD

SEQ ID NO: 49044 - protein, 250 aa, Burkholderia fungorum
MWNNVRQLNFASNALHVLLVLVLLAAGGYWLIQRPNFALRQIQIDGDTEHINSPTVRAGVVGRLKGNFFTVDLDVARQAFEQMPWVRHASVRRVWPNALAVTLEEYKPLGTWGSDQLVSVDGELFTANQGELEEDLPAFDGPDGTAKEVVARYHDFQKWFAPLGATPEEVTLSPRYAWTVKLSNGTQVELGRERNQDTLLDRSRRLTAAWNAVTQRWGKDIEYADLRYPNGFAIRAAGMRFITEPDKGKK

SEQ ID NO: 49045 - protein, 410 aa, Burkholderia fungorum
MSKDYKDLLVALDIGTSKVVAIVAELKGEGHYEVIGLGQSESKGLKKGVVVNIEATVQSIQRALEEAELMADCKITNVFTGIAGSHIRSFNSSGMVAIKEKEVTQTDVARVIETAKAINIPTDQQVLHILTQEFIIDGQEDVREPIGMSGIRLEVKVHIVTGAVSAAQNIVKCVRRCGLEVNDLILQPLASSLAVLTEDEKELGVVLVDIGGGTTDIAIFSEGAIRHTAVIPIAGDQITSDIAMALRTPTPDAEDIKVDYGIAKQALADPDEMIEVPGLGERGPRTLSRQALAAVVEPRVEELFSLVQQVVRESGYEELLSSGVVLTGGASMMLGMVELGEDIFLKPVRIGVPEYAGGLADVVRNPRYSTAMGLLVEGRSQRMRGRKVAVQSGSMGQVFTRMKDWFLGNF

SEQ ID NO: 49046 - protein, 398 aa, Burkholderia fungorum
MDFQMLETETNGTIIKVIGVGGAGGNAVQHMINKGVQGVDFIVMNTDAQALSRSRASAVIQLGNTGLGAGAKPEMGRAAAEEARERIADALRGAHMVFITAGMGGGTGTGAAPVVAQIAKEMGILTVGVVSKPFEFEGGKRMRVAEAGSQQLEDHVDSLIVVLNDKLFEVMGDDAEMDKCFQCADDVLNNAVAGIAEIINVDGLVNVDFEDVKTVMGEQGKAMMGTATVAGVDRARLAAEQAVASPLLEGVDLSGARGVLVNITSSRSLRLSETREVMNTIKSYAAEDATVIFGAVYDDAMGDALRVTVVATGLGRAAKKQQSAPMTLLRTGTDNQPVNAHAAYAPQSAHASTADYGALDTPAVWRTSRDTAASHVQALQEKGVDTYDIPAFLRKQAD

SEQ ID NO: 49047 - protein, 381 aa, Burkholderia fungorum
MNRDASGLRNDAAVGIIGAGTMGAGIAQIAAAAGHRVLLFDARSGAAAQALDKLNADLKKRVDAGKLDSTDARALVARIEPVDAIAAVSEAGIVIEAIVERLDAKRELLAQLESLVADRTILASNTSSISVTALGRDLRLPQRLVGMHFFNPVPVMKLVEVVSGAATDSAVAHAVADLAVRWGKVPIHARSTPGFVVNRIARPFYAEALLLLQDQYATPSQIDAALRAAGFRMGPCELMDLIGHDVNFSVTESMFAASFFDRRYTPSIVQRELVDGGLLGRKSGRGFHDYPAEPLAEAAAMPAQVDTDPPCVSVSGDSFTIATLGAELSGEGWDVEYADPAGASLGRTDNILMKDTLLAGDTLICVTDGRPAAQIAAQSGH

SEQ ID NO: 49048 - protein, 133 aa, Burkholderia fungorum
  MISC_FEATURE (131)..(131): X=any amino acid
ILDHPLIQHKLSHMRDRDTSTRTFRELLREITLLMGYEITRNLPMTTRRLTTPLVEIDAPVIAGKKLAIVPVLRAGIGMSDGLLELVPSARVGHIGVYRAEDHRPVEYLVRLPELEDRVFILGDPIVANGXSA

SEQ ID NO: 49049 - protein, 408 aa, Burkholderia fungorum
  MISC_FEATURE (392)..(392): X=any amino acid
  MISC_FEATURE (393)..(393): X=any amino acid
  MISC_FEATURE (394)..(394): X=any amino acid
  MISC_FEATURE (395)..(395): X=any amino acid
  MISC_FEATURE (396)..(396): X=any amino acid
  MISC_FEATURE (397)..(397): X=any amino acid
  MISC_FEATURE (398)..(398): X=any amino acid
  MISC_FEATURE (399)..(399): X=any amino acid
  MISC_FEATURE (400)..(400): X=any amino acid
  MISC_FEATURE (401)..(401): X=any amino acid
  MISC_FEATURE (402)..(402): X=any amino acid
  MISC_FEATURE (403)..(403): X=any amino acid
  MISC_FEATURE (404)..(404): X=any amino acid
  MISC_FEATURE (405)..(405): X=any amino acid
  MISC_FEATURE (406)..(406): X=any amino acid
  MISC_FEATURE (407)..(407): X=any amino acid
  MISC_FEATURE (408)..(408): X=any amino acid
MTEHNATRSMFDPALVRPAIVDSFKKLTPRTQFRNPVMFCVYVGSILTTILWIAALGGQAEAPAGFILAVTLWLWFTVLFANFAEALAEGRSKAQAASLRSAKKDVMAKKLNEPHPKSPIRILTASDLRKGDVVLVETGDVIPADGEVVEGVASVDESAITGESAPVIRESGGDFSSVTGGTRVLSDWIVVRVTANPGEAFLDRMIAMVEGAKRQKTPNEIALTILLVALTIVMLLATATLLPFSMFSVEAAKAGHVVTITALVALLVCLIPTTIGGLLSAIGVAGMSRMMQANVIATSGRAVEAAGDVDVLLLDKTGTITLGNRQASQFVPAPGLTEEALADAAQLSSLADETPEGRSIVVLAKQRFNIRQRDMASLHAVFLAFTAQTRMXXXXXXXXXXXXXXXXX

SEQ ID NO: 49050 - protein, 246 aa, Burkholderia fungorum
  MISC_FEATURE (76)..(76): X=any amino acid
LKFLTKDMRGLEIGPWFNPLAPKAEGYNCLVLDVFDSDALRERARSVANVPMILWDRIEDVDVVGSSTHIDELDSXGGELGTFDYIVSSHNFEHLPNPIRFLRGCAKVLRPGGVISMAIPDRRACFDYFRPVTTLSAWIAAFLEDVSRPSRAQYFDMVTCTGLFDTGDSKTISFHRGVEPEKVSAGLRLDESFAEWTDQSRDGEYFDSHCSVFTPSSFELLIRDVAYLGLAPFEVVEIFDSPGVEF

SEQ ID NO: 49051 - protein, 283 aa, Burkholderia fungorum
  MISC_FEATURE (202)..(202): X=any amino acid
  MISC_FEATURE (209)..(209): X=any amino acid
PLFAPHRKDFTCVYQEQHLPPVDPQAELWFQQALASELDPNIYWEDKDWRKIYQLYQQAAERNHWKAMLNLAALILSGYPVPVRDPEMAIRWVEKAMQLEVPDAWDTMGVYHMKGIVKGGDATSAYAFFQKAADMGSPSAQSFLGAALDAGWDNPGSGFWANLPVGVKMLECAVGQGYGDAAHELGLYTHVLIRRKPGFARXGFYMTGXSSESGQCANYLGSQFRGMDLTEGENLAGYIDKARADRYTKLSDILKWYEGTLKLPNLDKVLPLPPAPLPKWDGD

SEQ ID NO: 49052 - protein, 91 aa, Burkholderia fungorum
MSHTVQEKQKLLNRVRRIKGQVEAIERALEEEHGCSDVLQRITSCRGAMNGLLAVVLEDHIRNHLVDADNGEDHGGSAMEQFIEVVHSYFK

SEQ ID NO: 49053 - protein, 288 aa, Burkholderia fungorum
MRNVRAKTPSAEPADSAEALLSEPRVREKADTTIIMSLEKGLNIFEHILMADRPLKLHEIATHFDIDKSSAFRFLNTLERSALVNKNAALKTYTPGPKLAAWSRLIRTDASLVETARPLLKRLSTMTKQTSHLAVLQNDRVVLIEVMPADNVVSVKQTPGDWEPLYCTGVGKAILAFLPEHERNRLIDQITFREQTPQTLTTPEMLRIELDRVRDEKLAFDVGEANPQLCCIAAPVFDPGGYPVGSIGISMIYPVFPDGPRAQIAFISAVRQTAHEVSTALARGAISR

SEQ ID NO: 49054 - protein, 276 aa, Burkholderia fungorum
MNEIKRLETTVRGQTISYLELGDGPRTLLLLHGITSDASNWLSTMPALAQRGWRVIAPDQLGFGQSSKPSVPVRPRTLSDMVAPLLDALGLEMVSIVGQSMGGHVAGLFAAQYPERVEALVLVNAGYGLALPEVKDPRDLGHAVTPGGLWALNPATRDDSRRLLEMVFHDQGLVTEELIDGFYADRLGKGDGAVIRSISESWARREDTLESAFTGLERRPVLVIQARQDKVAPYHLGRAIHEGIAGSRFVVLEDCGHAPPLEAPEVFNKTLTEFLV

SEQ ID NO: 49055 - protein, 315 aa, Burkholderia fungorum
MATIARNTMIYSMTGYASATRELVGASGTGGVSVSVELRTVNSRFLDLNFRMPEDVRVSEPTLREMLMNKLSRGKVDIRINLQRSEQSANAGSINREALAQLALLERTVLSTFPEAGRLRTGEILRWPGILAESGVAPEVLRDAVLACGKQAITDLIDVRAREGAQLATMLLANVTEMEAIVTKITPLVPELIAKHQQKIVERLQEALGIAAPDTAATSVSREEINERIRQEVTMYGIRIDIAEELSRLTAHLNETRHVIQKGGKVGKRLDFMMQELNREANTLGSKAAAKELADSSMTLKLLIEQMREQVQNLE

SEQ ID NO: 49056 - protein, 785 aa, Burkholderia fungorum
MSTTPPTATEVEHDADSPSSARKYIDAVLEQSFRHLFGPTATPEQPRRHDVVSIAKLTSALSGYLQPEEIKEVKAAFHFSDEAHLGQYRQSGEPYITHPVAVAEICAGWNLDAQSIMAALLHDVMEDQGVTKAELAERFGAKVAELVDGLSKLDKMEFRNREEAQAENFRKMLLAMARDVRVILVKLADRLHNMRTLGAVPAEKRRRVARETLDIYAPIAHRLGLNNTYRELQDLSFANFNPHRYATLEKAVKAARGNRREVVGKILESVQRAIADAKLDAEVTGREKTIFSIYKKMRDKQLSFSQVLDVYGFRVVVESALECYTCIGALHALYKPVPGKFKDYIAIPKVNGYQSLHTTLVGPFGAPIEFQVRTRKMHEIAEAGVAAHWLYKNGGADLNDVQKRAHQWLKSLLDIQSEAGDSSEFLEHVKIDLFPDAVYVFTPKSKIMALPRGATALDFAYSIHSDLGNQCVAVKINNELLPLRTELKSGDIVEVITAPYSKPNPAWLGFVRTGKARSAIRHYLKTMRLNESVQLGERLVDQALKGYGLALSDVTPEAWEKLVQWTGNKNRQEIFADIGLGRRVAAVMAKRIEVLMSGRDADDDGSRSDSNAPHAPPVVITGTEGMSVQLSACCRPIPGDDIMGYIGIGLGMAIHTTDCRVAQRIHRRDPGRWIDVAWAPQPGRLFDVAVKVLVKNTKGVFARVAADITSADANIVHIAMDEDLSQESTVLRFVIQVSDRVHLANVMRRVRTNPDVMRIARERPSEEGHHRHEGGMRIDRERADY

SEQ ID NO: 49057 - protein, 888 aa, Burkholderia fungorum
MSKALIIAEKPSVANDIARALGGFTKHDEYYESDEYVLSSAVGHLLEIAAPEDYEVKRGKWSFANLPVIPPHFDLNPIAKSESRLKVLTKLLKRKDVDRLINACDAGREGELIFRLIAQHAKARQPVQRLWLQSMTAGAIRDGFARLRSDEEMQPLADAARCRSEADWLVGINGTRAMTAFNSKGGGFFLTTVGRVQTPTLSIVVEREEKIRRFVPRDYWEVKAEFVCSAGFYEGRWFDPKFKRDEFDPEKRDSRLWSLPAAETIVAACRGQIGTVTEESKPSTQLSPALFDLTSLQREANGRFGFSAKNTLGLAQALYEKHKVLTYPRTDARALPEDYMDTVKETLGMLKESNNYLPFAKQVLDKGWVKPNKRIFDNSKISDHFAIIPTLQAPKNLSEPEQKLYDLVVKRFLSVFFPAAEFKVTTRITEVVGHHFKTEGKVLVEPGWLQVYGREISGEDANLVPVQKDEKVKTDRIAAQQLVTKPPARYNEATLLSAMEGAGKLVEDDELREAMAAKGLGTPATRAAIIEGLLGEKYLIREGRDLIPTAKAFQLMTLLRGLGVKELTAPELTGEWEYKLSQMERGNLPRDAFMQEIARMTQTIVKRAKEYDSDTIPGDYATLETPCPNCGGQVKENYRRFACSKCEFSISKIPGGRQFEIPEVEELLQNKTIGPLSGFRSKMGRPFSAILKLSFDDEIKNYKLEFDFGQDAGGEDGEPPDFSDQQPVGACPKCKGRVFEHGMSYVCENSVANPKTCDFRSGKVILQQEIAREQMAKLLEEGRTDLLTNFKSSRTGRNFKAFLVKQNDGKIGFEFEKKEPSAKTVAKTAAAKAAAEAADSESEDGGAPVAVKAAPAAKKAAAKKAPATKTAAARKAPARKTAARKTGS

SEQ ID NO: 49058 - protein, 349 aa, Burkholderia fungorum
MIIDCHGHYTTAPPAHEAWRDQQIAALRDGGTPPPRPVISDDEIRESIETGQLRIQRERGTDLTIFSPRAAGMGHHLATAEANARWSSECNDLVHRVCGLFPSNFVGVCQLPQAPGVPPANCIAELRRCVEELGFIGCNLNPDPSGGHWSGLPLTDRCWYPLYEAMVELDVPAMIHVSSSCNPNFHATGAHYINGDTSAFMQLLQGDLFADFPTLRFVIPHGGGAVPYHWGRYRGLAQDMKRPLLSEYLLNNVFFDTCVYHQPGTELLAKVIPVGNILFASETIGAVQGIDPETGHYYDDTRRYIDAIGWLSDADRQRIYEDNARAVYARLSRQLDRQLATPATQGATV

SEQ ID NO: 49059 - protein, 270 aa, Burkholderia fungorum
MVAHPNGGVKEQTAGLHAQRLAEQGYITIAMDAAYQGGSGGEPRSTDKPQFRTEDIHGAADFITRYPGVDPERLGLLGICGGGGYSLNAAKSDKRFKAVATLSMFNSGRVRRNGFADSQLNTIQQRLKQASDARAQEKAGGKILYAGDADMTDAQIAALPFEMYRQGYQYYWRTNAHPGSTFKYTMSSLVDLMRWDATDQIDLIEQPLLMIAGSKADSLYMTEDAFAKATGTKDKELFKIDGATHIETYWVPKYVDATIGKLTPFYARTL

SEQ ID NO: 49060 - protein, 329 aa, Burkholderia fungorum
MKTRKLGNSQLEVSAIGLGCMGLSHGYGPAMDRPAAIALIRAAVDRGVTFFDTAEVYGPWLNEEVVGEALAPTRDKVVIATKFGFTFGDDNRQQILNSRPDHIRWAVEGSLKRLRTDVIDLLYQHRVDPEVPIEDVAGTVRDLIAEGKVKHFGLSEAGAQTICRAHAVQPVTAVQSEYSLWWREPETEILPTLEELGIGFVPFSPLGKGFLTGAIKEGTTFGSDDFRSIVPRFSQEALQANQTLVDLLGQIAMDKGVTSAQIALAWLLAQKPWIVPIPGTTKLHRLEENLGAASVELSGDDLRTITRALEQVEVQGDRYPAALQARVGR

SEQ ID NO: 49061 - protein, 330 aa, Burkholderia fungorum
MKTRKLGNSLEVSALGLGCMGMTAVYGPPADRQEMIRLIHAAHDRGVTLFDTAEAYGPFANEELVGEALQPIRDQVVIATKFGFDIDPETGKRGAGTNSRPEHIKLAVEKMLRRLRTDRIDLLYQHRVDPAVPIEDVAGAVKELIAEGKVKHFGLSEAGVKTIRRAHAVQTVTAVQSEYSLFWRGPELELLPVLEELGIGFVPFSPLGAGFLTGKIDENTTFDPTDFRNNVPRFSPEARRANMALVEVVKSVADRKGTTPAQIALAWLLAQKPWIVPIPGTTKLHRLEENLGAIDVELTADDLGVIDEEVSKIQVRGERLPEAALKMTGH

SEQ ID NO: 49062 - protein, 435 aa, Burkholderia fungorum
MADSYFPRWRAQPAAAEGRIVGTDERLAWPQMFAMGVQHVVAMFGSTVLAPLLMGFDPNLCIFMSGIGTLLFFVLVGGRVPSYLGSSFAFIGLVIAVTGYGGHGPNLNIPVALGGIIACGVVYAVIGLIVSAVGTRWIETLMPPVVTGAIVCVIGLNLAPIAVHGVSGSNFDSWMALVTVLCVGAVAVFARGMLQRLLILVGLLMAYVIYAIVTNGLGMGKPIDFTIVANAAWFGMPHFTAPVFNMQAMTLLAPIAVILVAENLGHIKAVSAMTGQNLDRYVGRAFLGDGLATIVSGFAGGTGVTTYAENIGVMAVTKIYSTLVFVIAAVIALVLGFSPKFGAVIQTIPGPVLGGVSIVVFGLIAVTGARIWVVNKVDFSDNRNLIVAAVTLVLGAGDFSLKLGGFGLGGIGTATFGAIILYALLRRKPVQGPVA

SEQ ID NO: 49063 - protein, 551 aa, Burkholderia fungorum
MDIVFTVLILLLAVAASGVVIRILPIALPLPLVQIAIGALLAWPKLGLHVTFDPEIFMMLFIPPLLFADGWRIPKREFFMARRSILMLALGLVFVTVLVVGYFVHALVPSISLPVAFALAAVLSPTDAVALSGIVGKGKIPGRLMHILEGEALMNDASGLVALKFAIAAALTGVFSLRDASISFVIISVGGIATGAAVSWLFSFVSARFLNLTEDGDPAPGVVMTLLIPFAAYLIAERFELSGILAAVAAGMTMNYATLANAGPVSSRVRANSTWTMIEFVFNGMVFILLGLQFPHILGRALLDAHETSNAQVGLLIGYIAAVAAALYAMRFVWVWLLRWVASRGATKRGMANAVPGLRTVAVTTVAGVRGAVTLAGVLSLPEVLPDGVPLPGRDLAIFIASGVILLSLLVAVVALPLLLSGWRRGKDPHAAEELLARTLAAQAAIRAVDEVHDTECADLDESASAYAADVTARVMDLYRRRLATLDEEQEPRELARRADALEFRMKLAAMRAERKTLLALRSSQAINDETLNKLMREVDLSETALTARRK

SEQ ID NO: 49064 - protein, 654 aa, Burkholderia fungorum
MTTGSRRVPTPCAPQRSAIHRPSRAGFALVPRSWRSRCAAMLCGVLAVAGFLVAPGAHAVYAIAQYGDPKYPANFKHFDYVNPDAPKGGTLVLANPSRLTSFDKFNPFTLRGNTAPGVDLMFESLTTGSSDEVASAYGLLADDISIAPDGLSVTFHINPRARFSNGDPVTADDVKFSLDTLKSPQAAPQFASIFGEITRAVVVDPQTIRFEFRQRNRELPLLAGGMPVFSRKWGMKPDGSRIPFDQLAFEKPISSGPYLIEQYDNGRTITYRRDPNYWGAALPVRVGTNNFDHIVYKLYSDSTARLEAFKAGEYDALVEYVARNWVRRDVGKKFDNGELIKQVFPQHNGTGMQGFMLNTRRPLFQDVRVRKALDLALDFQWLNRQLFFNQYTRIDSFFANTDLQAKGLPSPGELALLEPWRAKLDPAVFGPPPRQPDTDPPGSLRANLLQARALLQEAGWTYRDGALRNAKGEPFRFEILDDSGSSAQMEPIVATFIRNLQKLGIEATFRVSDFAVYQKRLDSFDFDTTTIRMPDVQVPGSEQIERFGSKAADTQGSDNMIGLKSPAVDAILSALVHAQTREQLIDATHALDRVLMHGYYVVPHWYSATHRVAFKRGLAWPKTLPLYYSAEGWITSTWWFAQPQAQPQAQAQPR

SEQ ID NO: 49065 - protein, 263 aa, Burkholderia fungorum
MGFLAGKRILLTGLLSNRSIAYGIAQACRREGAELAFTYVGERFKDRIKEFAGEFGSDLVFPCDVADDAQIDALFASLKQHWDGLDGLVHSIGFAPREAIAGDFLDGMTRENFRIAHDISAYSFPALAKAAQSMFTPDASLLTLSYLGAERAIPNYNTMGLAKASLEASVRYLAVSLGAKGVRVNGISAGPIRTLAASGIKGFGKILEFVEQNAPLRRNVTIEQVGNTAAFLLSDLAAGVTAEIVHVDSGFNAVVGGMAAVAE

SEQ ID NO: 49066 - protein, 124 aa, Burkholderia fungorum
MPADPVQRARARLFLLNFEKELFVHVGTLENEKGKAAEKNHEKARLAIRDRLTQLAPIFLKNKYMLGEEFSMLDVAIAPLLWRLDHYGIELSKNAAPLMKYAERIFSRPAYIEALTPSEKVMRR

SEQ ID NO: 49067 - protein, 423 aa, Burkholderia fungorum
MLHQIIDRRLAGKNKSIANRERFLRRVKNYIRRAVSEAVRDRSIKDIQNTQSITIPRKDIAEPSFRHGPGGKREMVHPGNSDYIRGDKIQRPQGGGGGGGGNQASNEGEGQDDFVFELSREEFMQYFFDDLELPRLVKTHLMAVPTWKSIRAGWAAEGTPNNIDVVRSLRSALGRRIALGAPLVNQLHEMERQLETMKADPDDRREEIKLLEEEIHHLRGRIWRIPFIDPFDLRYVNRVKQPTPSSQAVMFCLMDVSGSMDEQRKDLAKRFFILLYLFLKRNYERIEVVFIRHHTRAEEVDEDTFFHSTESGGTVVSSALELMKKVMDERYSPTEWNIYGAQASDGDNWTDDSPKCRKILSDDILEKVRYFAYIQVTPEEQNLWLEYAQLALSQPHMAMKKVETAADIYPVFRELFEKQAANS

SEQ ID NO: 49068 - protein, 572 aa, Burkholderia fungorum
MTSKHLHNEARGYQPERGKGVPQQQQSGHAEAKADDTGAAAAGAVDTAAARGHTGTPTAGQREVRMNVADRRPLPCPSDWTFELIEEYDSHIARVAEQYELDVYPIQLELISAEQMMDAYASVGMPVNYRHWSFGKHFLSTEKSYRRGQMGLAYEIVINSNPCIAYLMEENTMTMQALVIAHAAYGHNSFFKGNYLFRLWTDAHAIIDYLVYAKNYIAECEERFGLDRVEELLDSCHALMNYGVDRYKRPQKLSLEKEFAARREREAYLQSQVNELWRTLPTRHTPLPEEIEERYPPEPQENLLYFAEKNAPLLEPWEREVIRIVRKVGQYFYPQRQTQVMNEGWATFWHYTLLNTMYNQGKLEDGFMMEFLHSHSNVVYQPPVTKPYYSGINPYALGFSMMSDIRRICEAPTEEDRKWFPELAGSPWLPAMHYAMRNFKDESFVAQYLSPHLIREMRLFSVLDDDMRDALEVSAIHDDSGYQYVRQALSRQYDMHHREPNIQVWSVNTRGDRSLTLRHFMSDNRHLSGDSDEVLKHMARLWQFDVYLESVDENGTVRKRYECRYVPPAVRV

SEQ ID NO: 49069 - protein, 419 aa, Burkholderia fungorum
MCGFQRLASRIATLPAAPAGLVPAARIGARSHHARSCSAFSNDSKGSKESDNAPEESQSAPEGSTPEAAVQAPAPVAPVAPRPAAAPARVETAAAPAIGPEPEESAPGTVEIVPPPLPDAGAKRSWLTRLKTGLSKTSSSLTGIFVGTKIDEDLYEELETALLMSDAGVDATEYLLEALREKVRTERLTDPQQVKAALRTLLVDLLKPLEKSLMLGRAQPLVMMIAGVNGAGKTTSIGKLAKHLQSFDQSVLLAAGDTFRAAAREQLAIWGQRNNVTVVSQESGDPAAVIFDAVGAARARKIDVMMADTAGRLPTQLHLMEELRKVKRVIGKAQEGAPHEVLLVIDANTGQNALAQVKAFDDALGLTGLIVTKLDGTAKGGILAAIARQRPIPVYFIGVGEKVEDLQPFSAEEFSDALL

SEQ ID NO: 49070 - protein, 85 aa, Burkholderia fungorum
MALMITDECINCDVCEPECPNDAISMGPEIYVIDPKKCTECVGHFDEPQCIQVCPVECIPRDPEHLETPGELMAKYHALQAAKGE

SEQ ID NO: 49071 - protein, 433 aa, Burkholderia fungorum
MTPSDVKATLSFSDNSPSVEMPIYKGTLGPDVIDIRKLYGQTGKFTYDPGFMSTAACNSAITYIDGDKGELLYRGYPIDNLAENADFLETCYLLLKGELPNAQQNAEFVKTVTNHTMVHEQMHFFFRGFRRDAHPMAILVAAVGALSAFYHDSLDINNPRHREVSAIRMIAKLPTLVAMAYKYSIGQPFAYPKNDLSYSANFMHMMFSNPCEEYKVNDVLVRALDRILILHADHEQNASTSTVRLAGSSGANPFACIAAGIACLWGPAHGGANEAALNMLEEIGSVDNIPEFIKQVKDKNSGVKLMGFGHRVYKNYDPRAKLMRETCHEVLEELGLHDDPLFKLAMALEKIALEDEYFVSRKLYPNVDFYSGIVQRALGIPTSMFTCIFAMARTVGWIAQWNEMIADPEQKIGRPRQLFIGDTQREAKPIAQR

SEQ ID NO: 49072 - protein, 591 aa, Burkholderia fungorum
MAAIKNSLPRRKFDVVIVGAGGSGMRASLQLARAGLSVCVLSKVFPTRSHTVAAQGGIGASLGNMSEDNWHYHFYDTIKGSDWLGDQDAIEYMCREAPNAVYELEHFGMPFDRNADGTIYQRPFGGHTANYGEKPVQRACAAADRTGHALLHTLYQQNVAAKTQFFVEWMALDLIRDAEGDVLGVTALEMETGDVYILEGKTTLFATGGAGRIFAASTNAFINTGDGLGMAARSGIALQDMEFWQFHPTGVAGAGVLITEGVRGEGGILRNSNGERFMERYAPTLKDLAPRDFVSRSMDQEIKEGRGVGPNKDHVLLDLSHIGAETIMKRLPSIREIALKFANVDCIKEPIPVVPTIHYQMGGIPTNIHGQVVGTSKGAEDPVNGFYAVGECSCVSVHGANRLGTNSLLDLVVFGRAAGNHIVKHVKEIKEHKPLPADAADFALSRLAKLDSSSSGEYAQSVANDIRGTMQKHAGVFRTSALLAEGVERIREVADRVDNIHLKDKSKVFNTARIEALEVANLIEVARATMVSAEARKESRGAHAQDDFEHRDDENWLRHTLWFSKGDRLDYKPVHMQPLTVESVPPKARTF

SEQ ID NO: 49073 - protein, 395 aa, Burkholderia fungorum
MSETTQTAGTPGGNEPKSGFKPKKSVALSGVTAGNTALCTVGKTGNDLHYRGYDILDIASACEFEEIAYLLVHEKLPTQAELTAYKTKLKALRGLPANVKAALEWIPAAAHPMDVMRTGVSVLGTVLPEKDDHNLPGARDIADRLMASLGSMLLYWYHYSHNGKRIEVETDDDSIGGHFLHLLHGVEPSNAWVDAMHVSLNLYAEHEFNASTFTGRVIAGTGSDIYSALTGAIGALRGPKHGGANEVAFEIQSRYQTPDEAEADIRRRVENKEVVIGFGHPVYTISDPRNKVIKEVAKKLSKEAGNTRLFSIAERLESVMWDAKKMFPNLDWFSAVSYHMMGVPTAMFTPLFVIARTAGWSAHIIEQRIDNKIIRPSANYTGPENLKYLPLNRRK

SEQ ID NO: 49074 - protein, 443 aa, Burkholderia fungorum
MENQEFDIAFTHATLLTGDPAQRELRDATLAVAKGQIAWLGPDLPEHARCKRIIDARGKVITPGFVNVHTHSILTMVRGVAADLGFAPSYTPGIPKGTQVSPEQARVLARLGALEALMFGSTLIGDNFVYADLTTEAMADLGMRLTPSWRIHDVDFTKVADGRWEYSTRIGAQLLQAGLDLADRWKDHPLVNVQLAAHAVDTCSDAFLREIAHASRERGLRVNTHLGQSRLEVERVRERTGKTSTEVLNDVGLLNERLLGGHCIYVTDSDIALMAGAGAHAVHIPKCNATSGRLAPTPKIKRAGINLALATDTQHGDMVELMRWALMTARVQEGAVNSDWQPQHAFHMATLGGANAVGMADRIGSLETGKDADLVMFDFGRPHLTPRTNALGTLVHTGQGRDVEMVMVNGSILVEGGRPTRVDMDEICAEAEQVCEALWRDAH

SEQ ID NO: 49075 - protein, 516 aa, Burkholderia fungorum
MRLRALPKQYAGEKIQLSGTLSRVHLDSQFHAQSSMSFLGIDLGTGSLKVAIVDENGREQAVASVAYAIETPHAGWAETSVQTWWRALCEAAARLPDGLRREVRAIGFSGQMHGVVLIDEAGEAVRPAMLWPDTRALALLDAWPEPQPNPVAPGMAGPLLRWIVLHEPQSASRTRWALQPKDWLRVALGGAVVTDPSDACATALADPAGMWDAALLDRLGIPRAWFAPLAPSYAAGGVLSEKAAQALGLRPGIVLATGAADTPCAALGSGLAHDGDALLTTGTGGQIVVLAECAPAAARGLHRYRAASDHWYRMAAMQNVGIALERVRGWLSYEWADAYRDAFGDAAGASTTAASGLTFLPYLTGERTPWLNPMARGGWLGLALDHTRGTMMRAAFEGVAFSLRAGLDAIRASGATVTALKLAGGGSIDAHWRQLLADALNVELHAVDCPNAAPRGAAILGGLASGHWHARDLAALAPGATRVAGPRGDAALAERYARFLDLYGRVETWFDGTHSR

SEQ ID NO: 49076 - protein, 285 aa, Burkholderia fungorum
MAMLELLSSHACHGGEQRIYRHDSQTIGLPMRFSIYLPPQALQANANVPALFYLAGLTCTEETFPVKAGAQRFAAQHGIALIAPDTSPRGAGVPGESAAWDFGVGAGFYVDATQQPWAQHYRMYSYVRDELRETVLANLPVDGARLGIFGHSMGGHGALMLALRNPEIYRSVSAFAPIAAPTRCPWGEKAFSGYLGADREAWKQYDASELVAQASRKFAEGILVDQGLADQFLAEQLNPDVFEAACQAAGQPLTLRRHAGYDHGYYFISTFIEDHLAHHAKVLLG

SEQ ID NO: 49077 - protein, 507 aa, Burkholderia fungorum
MDNRCPYIAASRAAVIAKPACSHPEYGGSPMEPATSPRTLLDKLWQSHVVAETPNGPTLLYVDRHLVYEVTSPQAFEAIRLSGRKPWRPETVLAVADHNVPTIAAERTSMDAIADPLSRIQVAQLDKNCKEFGIKSYGIRNPQQGIIHVVGPELGATLPGMTVVAGDSHTSTHGAFAALAFGVGTSEVEHVLATQCLSVGKMKSMLVNVEGVLPVGVTAKDVILAIIRRTGTAGGTGYAMEFAGSTIRTLSMEGRMTLCNMAIEAGARVGLIGVDDVTIDYVKGRPFAPAEAHWDAAVAYWRTLVSDADARFDKIVNIDATQLRPMVTWGTSPEMVVTVDDAVPNPLDDPDPVRRATMAGALTYMGLEPGTSLKSISLDKIFIGSCTNARIEDLRAAAAIVKGRHVAPTVQLALVVPGSGLVKAQAEAEGLDAIFKEAGFEWREPGCSMCLGMNDDRLRPGERCASTSNRNFEGRQGPGGRSHLVSPAMAAAAAIAGHFVDVSHGGF

SEQ ID NO: 49078 - protein, 428 aa, Burkholderia fungorum
MAAVAFAFVIYEKGVTVSRRRVVVTGLGLISPVGNNVADGWANLVAGKSGIANITKFDASNFSTRFAGEVKGFNIEDYIPGKEARHMDTFIHYGVAAGIQAMQDSGLEVTDENSERIGVVVGSGIGGLPMIEVTQTELLNRGPRRISPFFVPASIINMISGHLSIKFGIKGPNLAIVTACTTGLHCIGEASRLIEYGDADVMIAGGAESTVSPLGVGGFAAARALSQRNDDPATASRPWDKDRDGFVLGEGAGVMVLEEYEHAKARGAKIYAEVSGYGMSGDAYHMTAPLEDGDGARRCMLAALKNAGINLDQVNYLNAHGTSTPLGDLAETTGIKRAFGDHAKDMVVNSTKSMTGHLLGGAGGLESVFTVLAVHHQVSPPTINIFNQDPACDLDYCANTAREMKIDVALKNSFGFGGTNGTLVFKRA

SEQ ID NO: 49079 - protein, 239 aa, Burkholderia fungorum
MSGTLYLIPNTLGEGDAEALDAVLPAPVRARAASLHYYIGENAKTTRAFLKKVGTERPIQEIEIRELNVNTPAGEIDKLLAPLLAGTDAGLVSEAGCPAVADPGALLVRRAHERGVKVVPFVGPSSILLALMASGLNGQSFAFHGYLPVDATERAKRLRDLEQQSRKGKQTQIFIETPYRNRALLDTLLATCAPSTLVCVAVDLTLETETIVSRTVTDWKKKPAIDLHKRPAIFLILAV

SEQ ID NO: 49080 - protein, 205 aa, Burkholderia fungorum
MSDSLNRPPRLILASSSPYRRELLQRLRVPFDVAVPAIDETPLAGETPEVTALRLAQAKARAVAGGLGAGVAALVIGSDQVATYDGLQIGKPGTHANALAQLQAMRGREVQFHSALCLFDSRSGTVQAVDVVTRVQFRDLPDAALEAYLLAETPYDVAGSAKSEGLGIALLEAIHSDDPTALVGLPLIALSRMLLAVGYPLLGAQ

SEQ ID NO: 49081 - protein, 329 aa, Burkholderia fungorum
MAQSTIYSRVLGTGSYLPPNRVTNQDLAKRLAEQGIETSDEWIVARTGIHARYFAEPDVTTSDLAFIASQRAIEAADIDPQSIDLIIVATSTPDFVFPSTACLLQNKLGIRNHGAAFDVQAVCSGFAYAVATADSFIRSGQHRTALVIGAETFSRILDFKDRTTCVLFGDGAGAVILQASDEPGVLASALHADGSHSNILCTPGNVNGGVVSGSAFLHMDGQAVFKLAVNVLEKVAVEALEKANLSAEQIDWLIPHQANIRIMQSTCRKLGLPQERMIVTVGEHGNTSAASIPLALDVAVRDGRIKRGQNVLIEGVGGGFTWGASVIRY

SEQ ID NO: 49082 - protein, 311 aa, Burkholderia fungorum
MKFAFVFPGQGSQSVGMLNAFADQAVVRETVQEASDALNQDLGKLIAEGPAEDLNLTTNTQPVMLTASYAMYRAWLQAGGPKPAIVAGHSLGEYTALVAAGAIAFRDAVPLVRFRAQAMQTAVPVGEGAMAAILGLDDDTVRAVCAEASVAGVVEAVNFNAPAQVVIAGNKAAVEKACEVAKAKGAKRALPLPVSAPFHSSLLKPASDQLREYLASVDVQVPAIPVINNVDVAVVNEPAAIKDALVRQAAGAVRWVESVQAMSAQGVTHVIECGPGKVLAGLTKRIDGNLVGASIFDPASLEETLKLVKAG

SEQ ID NO: 49083 - protein, 249 aa, Burkholderia fungorum
MEKTLDKQIAIVTGASRGIGRAIALELARQGATVIGTATSESGAAAISEAFNAAGASGRGAVLNVNDAAAAEALIDGTVKEFGALHVLVNNAGITQDQLAMRMKDDDWDAVIDTNLKSVFRLSRAVLRPMMKAKGGRIINITSVVGSAGNPGQVNYAAAKAGVAGMTRALAREIGSRGITVNCVAPGFIDTDMTRTLPEEQQTALKTQIPLGRLGSPEDIAHAVAFLASPQAGYITGTTLHVNGGMYMS

SEQ ID NO: 49084 - protein, 321 aa, Burkholderia fungorum
SLRGASMTQLGLGLDLSTKRTRKREFLDEMRCVVPWSRLIALIESHYPKKTGRPPFPIATMLQIHFMQQWFGLSDPAMAGDEEALYDASLYREFAGLDGGMTRLPDEGTILRFRHLLETLGLAAQMLTLVNEILSEQGLMLKTRSAVDATSISAPSSAKNGSGTRDPEIHQTKKGNQWYFGMKAHVGVDADSGLVHAVVGTAANVHDINAAEALLHGREMDVYADAGYQGIETHCKAKAVRWHVAMRPGRRRQLDLNDRPDAIRSIERLKVGVRAKVEHPFRVLKQQFGYTKTRYRGLMKNTAQITILIALGNLWMARKVL

SEQ ID NO: 49085 - protein, 520 aa, Burkholderia fungorum
MSIKRRKAVVVCLSLLIMAQGATTVNAKDAQTLTVALAQEAGKLDLLQNESALSSYGLVFDGLVHYGQGGKLEPDLAESWNVSPDGKIITFQLRKDVRFSDGTPFDANVAQWNMARWIGKPDFSWISVSENFERMEVTGPYTLRLFLKAPAPVALAELSIVRPVRFLSPKAVDAKGQQTSPVGTGPWKILQNDRSETVLVPNDYYWGKKSSIKRINLSVVPDELSRANALRSGDLDIIGGEWVAPLLPARAKALSTDTEVGVFAAPGVSTVLLGFNDTRGPLTDVNVRRAINLGIDRTSIAKILYQGYADPASNLFPPTIPDAGKREPVIVRDVATANKILDAAGWVKAGAVRRKDGKDLALNLLASDQVLPGSRRLSELLLGQLADLGITVTVSSLDDATYHDRRQKFDYDLAFFTTYAAPYDPQGSLSAMFVSTADSGPDGKIFVSKDLDAVVQTALSAAGDDRKEKVQKIYDWMDKNAAICPLVYPQRLWAYNKRVDGFALPPTEYDMPISNLVLKP

SEQ ID NO: 49086 - protein, 511 aa, Burkholderia fungorum
MPLTTMIIESGHLTLAQLRRIAHFSETVQLCPSTFAAIDASAQAVENIVRKGKPVYGVNTGFGRLASTHIPLEQLDLLQRNLVLSHAVGVGEPMSRSVVRLMIVLKVSSLARGHSGIRREVIAALVTLLNADVLPVIPVKGSVGASGDLAPLAHMSAVLLGVGEVTIGERRASANEGLHAAGLEPFTLRAKEGLALLNGTQASTALALFNMFAIEDLFCTALVAGALSVDAAAASVVPFDARIHALRGHQGQIDSAAAYRALLEGSEINLSHSDCDKVQDPYSLRCQPQVMGACLHQMRHSAEVLLCEANSVSDNPLIFPDTCDVLSGGNFHAEPVAFAADNLALAVAEIGALAERRIALLIDTTLSGLPPFLVRDSGLNSGFMIAHVTAAALASENKTLAHPASVDSLPTSANQEDHVSMATFAARKLGDMASNTAHILAIELLAATQGIDLREPHRTSMRLQSVTEAVRRDVGHYHSDRHFSPDIAAIAAQVLNGEIARHSPFRFPSNP

SEQ ID NO: 49087 - protein, 830 aa, Burkholderia fungorum
MAKRPSYRHLQPHAGHCVYNRPDRSSRKPGSGLKPRWVRLGHGPGDNPGRESGTHATGSMAKAPYSASAQALPHRMSRLFTEIRWILQVALGVFLLMALVSYSRRDPSWTHAAQVDHIANWAGRVGAWTSDILLLLFGLSAYWWIVLLGRHISANYRRITRQEELPEDAPRDVSWLADAFAFMLVLLACDGIEALRMWSLKVQLPRAPGGVIGEAVARGVSHALGFTGGTLALLIVLGIGLSLYFRFSWLSVSEKVGESIISAVTFAKLRREAGRDRKLGEAAAVKREGKVEKGRVRIEEHEPVMIVPPVITPAKSERVEKERQVPLFTDLPGDSTLPPISLLDAAPVAQETISADTLEFTSRLIEKKLKDFGVDVSVVAAYPGPVVTRYEIEPATGVKGSQIVGLAKDLARSLSLVSIRVVETIPGKNFMALELPNQRRQTVSLSEILGSAVYADAASPLTMGLGKDIGGKPVCADLAKMPHLLVAGTTGSGKSVGINAMILSLLYKASADQVRMILIDPKMLEMSVYEGIPHLLCPVVTDMRQAGHALNWAVAEMERRYKLMSKLGVRNLAGYNNKIDEAAKREEKLPNPFSLRPDDPEPLTRLPNIVVVIDELADLMMVVGKKVEELIARIAQKARAAGIHLILATQRPSVDVITGLIKANVPTRMAFQVSSKIDSRTILDQQGAESLLGMGDMLYLPPGSGLPVRVHGAFVSDEEVHRVVDKLKEQGEPNYIEGILEGGVTGEGDEGSAGAGGTGSGDGESDPLYDQAVDVVLKNRRASISLVQRHLRIGYNRAARLLEQMENSGVVSAMSSNGNREILAPAREAE

SEQ ID NO: 49088 - protein, 359 aa, Burkholderia fungorum
MCVVTLVFDGGAAHNAGMNDDILDPQDGANSAVPFARLKPEIVLDALDGVLSTVGVRTDGRMLPLNSYENRVYQVGVEDGPPVVAKFYRPERWSDAAILEEHAFVADLASREIPAVPARVFEGRTLHSFDGFRFSIFERRGGRAPDLDRPDTLEWLGRFIGRIHAVGQTQNYVERPTLDIHTFGYEPRDFLLAHRFVPDNLRTAWETVVNLALEGVERAFERAGDIRMLRMHGDCHPSNVLWTDAGPHFVDFDDSRMGPAVQDLWLLLPGERAEASRALADLLAGYEDFCDFEPRELYLVEALRTLRLIHYQAWLARRWDDPAFPAAFPWFNTQRYWEDRILELREQIGAMQEGPLWPV

SEQ ID NO: 49089 - protein, 372 aa, Burkholderia fungorum
RSIPAPPRPAATPARRPACRSIRPPPEGGNAGGLPAATDGSGAVGQTQKAAEPVRTQAEEAVVQREHAPLFDHKLTMDWGISDTYYDRRQLQLSGFLALDAIFLGNINLGETKSHQVMADLDTRYGLTDRMSIDVDVPYIYRHSNFIVGGAGGAASTLSDASVNGSNIGDVNFGIYYQFLKETNSLPDVVGSLRIKAPTGTSPFGQKLVQVDENNTNLVAPSKLPTGTGFWNITAGVSLLKTYDPVVLFGSVSYTYNIARSFADISSVQGQTQPATVKLGDIVQFGGGVALAFSDKDSASISYTMALEPESKTRAPGGSYEKVPGSETTAAALNFGLNHVVNKHLTINGSVSVGLTPDAPNFVVGVRFPYTF

SEQ ID NO: 49090 - protein, 218 aa, Burkholderia fungorum
MTTATPENSGKQTRNHPDEIVIGLVSISDRASTGVYEDKGIPALQEWLGAALSSPWQVVTRLIQDDAPTISATLTELVDEVGCDLVLTTGGTGPSRRDVTPEATLAVATKEMPGFGEQMRQISLNFVPTAILSRQVAVIRETAEHAALIINLPGQPKSIRETLEGLRDAEAGGAVKVPGIFAAVPYCIDLIGGPYVETNANVVKAFRPKNAQRAPRPA

SEQ ID NO: 49091 - protein, 166 aa, Burkholderia fungorum
MTTLTLIVARANNGVIGRDNQLPWRLPEDLAFFKRTTMGAPIIMGRKTHESIGRPLPGRRNIVVTRDATRRFQGCDTAATLQEALKLAAQDQAPEAFLIGGAQLYVEGLRQADKLIITEISADFEGDATFPELDETEWEEVAHETHRADAPNDFDYAFVTYKRKGA

SEQ ID NO: 49092 - protein, 1024 aa, Burkholderia fungorum
MNPSRAFILRPVGTALLMAAIMLVGLVALRFLPLSALPEVDYPTIQVQTFYPGASPDVMTSSVTAPLERQFGQMPSLNQMSSQSSAGSSIITLQFSLDLPLDIAEQEVQAAINAAGNLLPSDLPAPPIYAKVNPADAPIITLAITSKTLPLTQVQDLADTRLAQKISQVAGVGLVSLSGGQRPAVRIQANPRALAAYGLNLDDLRTTISNLNVNTPKGNFDGPTRNYTINANDQLTDADAYKSAVVAYKNGRAVMLTDVATIVQGAENTKLGAWVDGTPAIILNVQRQPGANVIQVVDSIKKLLPQLQQALPAALDVEIVTDRTTTIRASVRDVQFELAMSVVLVVMVMYLFLANIYATIIPSLSVPLSLIGTLAVMYLCGFSLDNLSLMALTIATGFVVDDAIVMIENIARYVEDGESPLEAALKGSKQIGFTIISLTVSLIAVLIPLLFMGDVVGRLFHEFAITLAVTIVISAVVSLTLVPMMCAKLLRHTPPHENHRFEAKAHRAIDWVIARYAVALTWVLNRQRSTLVVALLTLVLTGLLYVYIPKGFFPVQDTGVIQAITQAPQSVSYASMAERQQELAAQILKNPDVESLTSFIGVDGSNITLNSGRMLINLKPRDDRSNTASEVIRQLQRDVAHIPGASLYMQPVQDLTIDSTVSPTQYQFMLTDPNIGEFTTWVPKLVERLRQSPELADVATDLQDNGQSVYIEIDRATASRYGITPATVDSALYDAFGQRIISTIFTQSNQYRVILEAQPEMQHYTESLKSIYLPSSTSTGGQVPLSSIARFIEKPAPLLVTHLSQFPATTVSFNLAPGSSLGAAVKAIDQAQKDIGLPASFQTRYQGAALAFQASLSNELFLILAAIVTMYIVLGVLYESFIHPITILSTLPSAGVGALLALLVTGHDLDIIGIIGIVLLIGIVKKNAIMMIDFALYAEREEGKPPREAIYQACLLRFRPILMTTLAALLGALPLMLGTGAGSELRRPLGIAIAGGLIVSQLLTLFTTPVGDPLESLTACSCLP

SEQ ID NO: 49093 - protein, 468 aa, Burkholderia fungorum
MDEQQKHSETSRPTPAAPQPSSGGGPAGTPNHPPGMVKRHRGRNIALIIAALVILGFALWRWHPWGGPGGGASGAADAGGASSGRAGRAGRGGAGGMANMAQPVHVAAAVQGEMPVVLTALGTVTPLANVTVLPQLSGTLQEVYFKEGQMVKKGDVLAQIDPRPYQISLDNAQGTLARDEALLQTARLDLKRYQTLLSQDSIASQQVDTQASLVRQYEGTVKSDKANIDTYKLDLVYARITAPVSGRVGLRQVDPGNYVTPSLTNGIVVITQLQPISVIFTTSEDNLQQIIQQTQAGEKLSVTAYDRSNTTSLEGGTLETLDNQIDTTTGTIKLRAIFQNSKNLLFPNQFVNTRLLVDTIKDAVIVPTPAVLNGSMGQFVYVVKPDNTVTVRPVKVGPVDGERTSIKSGLAVGERVVIDGSDRLKEGAKITIPADKPRGASGARGAAAASGASGTRGHHRKHAAQASQ

SEQ ID NO: 49094 - protein, 725 aa, Burkholderia fungorum
MLNFVTRRTLTVSGATLPTLPDGEPALQLRTIAGEETLSTIYEYELSLVTPVDPLLPDSTAANFDLKEMIGGELTVTIQLDGMGTFVPGMAGASGAANFGAGMREISGIVTAASLVSQLNRQYLYRLKMQPWIVLAERRTDYRIFQNKTVVEIIDEVLKSNYLYSYVKRLGGRYSNLVYQVQYGESDFAFIQRLMAEHGIYWFFEHSRSFHRMVLVDNLGAHKPVESLAYQTLWYYPPGHKIDREYIEEFQTTDCIQSGVWTTDDFDFTQPGADLAVKNALPQKTAHNRLSVYEWPGDYTDAKDGAQFARVRMEEIRALGERATGRGHLRNVVCGTTFTLAGYPQEAANREYLVIGAKLLAEETGEQTGAGQYRIDTTFEVQPATTMFRAPRTVAKPRTTGPQTAIVTGPPGQEIWTDRYGRVKLKFHWDHSPVNDQNSSCWVRVSYPWAGSNFGGVNIPRVGQEVIVDFENGDPDRPIVTGRVFNAASMPPWELPGNATQSGMLSRSMKGHYGTANAIRFEDKEGAEELWLQAERDMRTEVEHDESHTVRHDRTRTVGHDESTTIDHDRTEKVGRGEQVDIGEDRRHSIGNDAHLSVGRDHKLRIGKDRIEDIGNNRKDTIGADFRINTGGHVAHTVKGHHQIEAGQAIKRHTPIYQLQAGEAAEIIGPAGKITLDSHGITLEAVRILLKGPVHASTGWVENSLDMRSEVRQCTFTPDFFPFSG

SEQ ID NO: 49095 - protein, 377 aa, Burkholderia fungorum
METHSIRDASSLRYVAGLDGLRAISMMLVVLFHYTSYFSSSLAELGGAWTGVVRIASTGWIGVDVFFVISGFLITTTLLKRPVDSLASYSTFIRRRAVRLLPAYVASLLIFTLVALLSDPHDKVLGNEYLLWTFTASLQSLLGDRVALADQYFSMAHFWTLAVEWHFYLVFPLLVARCRSYFRPAVALLLIAVAFRVICHFAGISDNGIYTFTLCRIDSIAVGCLLALVPARLGSRRSAVAGMLGAVLFISIWIALALSDVPFKTLAWLQTLGYTLLAVSIALMIYRVIHSSAHSAIVRALEFRPLASMGRASYSLYIWHLPFYPAIALAAQDRFTDVRLAYLVAMLTGVVMTAALGGLSYRLVESRFTRARPAVLA

SEQ ID NO: 49096 - protein, 504 aa, Burkholderia fungorum
MFGEKFRDRQKPMVLVLGLGESGLAMARWCARHGCRLRAADTREVPPNLSALEAHGVDAQFVGGPFSPVLLEGVELVAISPGLSPLAADLLPLIAAAREQGIPVWGELEFFSQALKTLGESGYAPKVIAITGTNGKTTTTSLTGLLCERAGRKVAVAGNISPALLDKLSEAIDNTALPDVWVLELSSFQLETAHTFSPDAAVVLNITQDHLDWHGGLDAYAAAKGRIFGTQTVRVLNRDDSRVMKLAPSEDSEAGMVTFGVTEPKNEGDYGLLRDNGMIWLVEAHDRDASDEPAPKRRRKNEVATPPNIALKRLMPADALRIRGLHNAANALAAYALARAIGLPGASLLHGLREYRGEPHRVELIASIDGIDYVDDSKGTNVGATVAALDGLAQRVVLIAGGDGKGQDFEPLAAPVMRWCRAVMLIGRDAPQIRAALEDTGIAMTDHATLEEATRAAAALAQPGDAVLLSPACASFDMFKGYAHRAAVFRGTVEEIAAERGTMI

SEQ ID NO: 49097 - protein, 426 aa, Burkholderia fungorum
MSWSERFGSRQAAASDAGGLGGAGRVGGRTGGGSGLASAVNGVRPLRSRMLDYDHSLLWVVVALLGLGVVMVYSASIAMPDSPKYASYRDYAFLVRQIIFVVMGSVIGVVSFRIPIATWDKYAPKLFLISLAALVIVLIPHVGKGVNGARRWIPLGITNMQPSEIMKLAVTIYAANYTVRKQEYMHSFAKGFLPMAVAVGLVGALLLLEPDMGAFMVIAAIAMGVLFLGGVNGKLFGGLVATAVGTFSLLVWASPWRRERIFAYLDPWDDRYAQGKAYQLTHSLIAFGRGEWFGVGLGGSVEKLNYLPEAHTDFILAVIGEELGFVGVLVVILMFYWIVRRSFEIGRQALALDRTFAGLVAKGVGIWFGAQTFINMGVNLGLLPTKGLTLPLVSYGGSGILLNCVAVAVLMRVDYENRVLMRGGKV

SEQ ID NO: 49098 - protein, 372 aa, Burkholderia fungorum
MTALPQRTLMVMAGGTGGHVFPGLAVAHLMQAWGWKVVWLGNPAGMEATLVPKHGIPMEYVRFGGLRGKGLKTKLMLPLNLLRACTQSLSVLRRVKPDVVLGMGGYITFPAGLMTALSGRPLVLHEQNSIAGLANKVLAKVAKRVLVAFPNALPHGEWTGNPIRAELAGAIAPKARYAQRSGPLNVLVVGGSLGAAALNEVVPRAVALLAPNERPRIVHQAGAKHIEALRENYAAAGLQAGADVELVPFIDDMTSAYANADLVICRSGAMTVSEISAVGVAALFVPFPYAVDDHQTTNAAFLADNGAALVVQQRDLSAETLADWLRSQTRETLAEMAERSRSLAKPDATEQVAQICATVAGSISGASPEGKQ

SEQ ID NO: 49099 - protein, 212 aa, Burkholderia fungorum
MFLDELISEFDRGLRSMTGVSRMSRPLPVPQESAVTEAAPELSPAERAHSAGLMRVNHVGEVCAQALYQAQKLATRSPSLRAVFNHAAIEEEDHLAWTAKRLEALDSRPSLLNPLWYTGALAIGLAAGRMGDRVSLGFMAETERQVEQHLDSHLEQLPEADRESRAIVEQMRVDEVEHGKAAMEAGGIELPFPVRGLMRAVSKVMTRTAYYI

SEQ ID NO: 49100 - protein, 142 aa, Burkholderia fungorum
MFQGASALTLDAKGRMSIPSRYRDALQTQAEGRVTITRHPDGCLLLFPRPEWEIFRDKVDKLPMNATWWKRIFLGNAMDVDMDGAGRVLVSPELRTAGGLAKEVTLLGMGRHFELWDAQTYTAKEQAAMAEGMPDALKDFTF

SEQ ID NO: 49101 - protein, 317 aa, Burkholderia fungorum
MAPAMGNELQHRTVLLEEAVQALVTRADGVYVDGTFGRGGHSRLVLEKLGESGRLIAFDKDPLAIATAQQITDPRFGIVHESFASLRTAMAERGVGRVSGVLLDLGVSSPQVDDPERGFSFRADGPLDMRMDPTRGESAADWLARATVQELTEVIRDYGEERFAFQIAKALVARRAESDRLGPLVSTGELAQIVANVVKTREKGKDPATRTFQAIRIHINQELAELQVVLEAALSLLEQGGRLVVISFHSLEDRIVKRFMQAHASTPAVDRRLPIRAVDLPSPPLKIIGRVFASDAEVAANPRARSAVMRVAERIAP

SEQ ID NO: 49102 - protein, 621 aa, Burkholderia fungorum
MKKSSARKSVAFSANPILSVRLPMWRSKLVVFMLFMAFVALTARAFWIQGPGNAFYQKQGEIRYQRRLELPATRGKILDRNGLVLATSLPVRAIWAIPESVPDDLGADKLTSLGKLLGMTNKELRTKLSEDKNFVYVKRQVPVDIAEKVTALEIPGIYSRDEYKRFYPEGEITAHLIGFTNVEDEGQEGVELGDQKLLAGVSGSRRVIKDRMGHIIEDVDEQVVPHNGQDVDLSIDSKIQYIAYTNLKAAVEKFKAKAGAAMVIDVRTGEVLALVNYPTYNPNDRTHLTGDQLRNRILTDTFEPGSIMKPFTVSLALDLHRVTPTTLVDTGGGRFVLDGAPITDDSAFGVLTVGGVIQKSSNIGATKIAMQLKPEEMWNMYTSIGLGQAPKVGFPGAAAGRLRPWKSWRRIEQATMSYGYGLSVSLFQLGRAYTAIAHDGEIMPVSIFRTPGDQPATGPQIFAPTTAREVRAMLETVTAPGGTSPDAAVPGYRVGGKSGTAYKHGAHGYDHSKYRASFVGMAPMPNPRIVVAVSVDEPTAGSHFGGQVSGPVFSSIVGDTLRSLNVPPDMPVKQMVVSDDSAPPAPTAPATPATVKKLSTSAGAKKMTIAANARSHPGVVR

SEQ ID NO: 49103 - protein, 518 aa, Burkholderia fungorum
MSALRQKHPAQRQIADALTWLHAHVQPGAHLHADTRSLAAGDAFFAYAVDGADNRPFIEGAIERGAAAVLVQPEGFSGAINPSNMLAVPALNELAGSIASGWYNDPSDSMLTVGITGTNGKTSCSQWISAALTALGTRCAIIGTLGTGLPGHLVHTGFTTPDAPQLQRSLAQLRDAGAQAVAMEVSSHALHQGRVNGTAFDIAVFTNLTQDHLDYHQTFEAYEAAKARLFAWPELRAAVINRDDAAGRRLLASTQGHARTIAYGLDSGQGALQDAPQADALLLASNVRATATGTAFHLSTSDWGDAEVEVQTLGAFNVSNLLGVLGALLAADVPFEAALAELAQLEPVNGRMQRLGGRLQNDEPLVVIDYAHTPDALEKTLEALRPMVTARGGELICMFGCGGDRDATKRPLMGAIAEKIADGVVVTSDNPRSEDPQSIIEQIAAGMKDASKARRIEDRASAILQAIRSAAREDVIVLAGKGHEATQEIMGKKRAFSDQDHARLALAARATHARGGGE

SEQ ID NO: 49104 - protein, 470 aa, Burkholderia fungorum
MSMFSLREAAALIPGATVLGDDSVTIERISTDSRSAGPGDLFVAIKGDRFDAHDFLPDVAVRNVSAVLVTRTPQDWNVPALKVADTRVGLGALARGWRRRFSMPLVAVTGSNGKTTVKEMIASIFAAAVGADARLATAGNFNNDIGLPLTLFRLHAAHQLAVVELGMNHPGETSELAKIAEPTVAVVNNAQREHQEFMATVEAVALEHASVIHALSPEGVAVFPADDAYASIWRVAATGNRIMDFALNSAERTTEAAVKGTFAGNVLSIDTPAGRLEVTLQVLGDHNAHNALAATSAALAAGVSLDAIRRGLESFGAVKGRLQVKQGVLGSLAGATVIDDTYNANPDSMRAAIDVLASRPAPRVLVMGDMGEVGDNGPAFHREIGAYARDRGIDALYAMGDASRDACTAYGANAHHVADIGTLVAQLQQAGFGPAATLLVKGSRFMQMERVVDAVTSPQPNAAGSTPAAH

SEQ ID NO: 49105 - protein, 389 aa, Burkholderia fungorum
MLLALAQWLQNDASFLRVFSYLTFRAVMATITALLIGLVCGPAVIRKLTAMKVGQAVRKDGPQTHLVKSGTPTMGGVLILLGIAVATLLWADLTNRFIWIVMLVTFGFGVIGWVDDYRKVVYKDPRGMSSREKYFWQSVIGLFAAVYLAFSVSEASNVRVYDLFMAWVRSGLSMGLPPHADLMLPFVKSISYPLGVWGFIVLTYLVIVGASNAVNLTDGLDGLVIMPVVLVGASLGVFAYVMGSSVYSKYLLFPHIAGAGELLIFCSAMGGAGLAFLWFNTHPAQMFMGDVGALALGGALGTVAVIVRQEIVLFIMGGIFVAETLSVMLQVTWFKFTKRRFGEGRRLFKMAPLHHHFELSGWKETQVVVRFWIITLMLCLFGLSTLKLR

SEQ ID NO: 49106 - protein, 1103 aa, Burkholderia fungorum
MNLSRPFISRPVATTLLAVGIALAGIFAFTKLPVAPLPQVDFPTISVQATLPGASPDTVATSVASPLERHLGSIADVTEMTSMSSVGSTRITMQFGLNRDIDGAARDVQAAINAARADLPASLRSNPTYHKVNPADAPILILALTSKTLTAGQLYDSAATVLQQSLSQVDGVGEVDVSGSANPAVRVELEPNALSHYGIGLEDVRAALAAANANSPKGSIEFGPNRVQIYTNDQASKASQYKDLVIAYRNGAAVKLSDVAEVVDSVEDLRNLGLFNGKRSVLVILYRQPGANIIDTIDRVTAMLPQLHASLPADVEIAPAADRSTTIRASLKDTERTLVIAVALVVMVVFLFLRNWRATLIPSVAVPISIIGTFGAMYMLGFSIDNLSLMALTIATGFVVDDAIVVLENISRHIENGVPRMKAAFLGAREVGFTVLSISISLVAVFLPILLMGGIVGRLFREFALTLSLAIGVSLIVSLTLTPMMCSRLLREPHEQKEEGRFGRWLERGFASMQRGYERTLGWALLHPRLIVTILLLTIGLNVWLYIIVPKGFFPQQDTGRLIGGIQADQSTSFQAMKGKFAQMMEIVGKNPAVDSVAGFTGGRQTNSGFMFVTLKPKSERKLSADQVIQQLRAPLGDVAGARTFLQAVQDIRVGGRQSNAQYQFTLLADSTPDLYLWGPKLTEALQARPELADVNSDQQQGGLEAMVTIDRATAARLGIKPAQIDNTLYDAFGQRQVSTIYNPLNQYHVVMEVAPKYWQSPDMLKQIYISTSGGSASGAQTTNAPAGTVTAAANTTSTSATTGGTAGTTASSAASIAADSARNQAINSIAASGKSSASSGAAVSTAKETMVPLSAIASFGPGSTPLSVNHQSQFVASTISFNLPPGVSLSTATQAIYDTMAQIGMPGTIHGSFQGTAQAFQQSMSDQPILILAALAAVYIVLGMLYESYIHPLTILSTLPSAGVGALLALLLFKTEFSIIALIGVILLIGIVKKNAIMMVDFAIEASRHGLSSRDAIFQACLLRFRPIMMTTCAALLGALPLAFGRGEGAELRAPLGIAIVGGLIVSQMLTLYTTPVVYLYMDRIRVRWESRRTRRTGIAPS

SEQ ID NO: 49107 - protein, 1582 aa, Burkholderia fungorum
  MISC_FEATURE (189)..(189): X=any amino acid
  MISC_FEATURE (1322)..(1322): X=any amino acid
  MISC_FEATURE (1330)..(1330): X=any amino acid
  MISC_FEATURE (1336)..(1336): X=any amino acid
  MISC_FEATURE (1370)..(1370): X=any amino acid
  MISC_FEATURE (1456)..(1456): X=any amino acid
TDDEIVELAKNLREGVPFATPVFDGATEEEMSRALDLAFPDDIAKNLGMTPSKNQVRLYDGRTGEMFERTVTVGYMHYLKLHHLVDDKMHARSTGPYSLVTQQPLGGKAQFGGQRFGEMEVWALEAYGASYVLQEMLTVKSDDVTGRTKVYENLVKGDHVIDAGMPESFNVLVKEIRSLGIDIDLDRNXSDYGEKAMKALLDLFKQVQQPEVFDAIKIGLASPDKIRSWSFGEVKKPETINYRTFKPERDGLFCAKIFGPIKDYECLCGKYKRLKHRGVICEKCGVEVTLAKVRRERMGHIELASPVAHIWFLKSLPSRLGMVLDMTLRDIERVLYFEAYVVIDPGMTPLKARQIMTEEDYYNKVEEYGDEFRAEMGAEGVRELLRAINIDEQVEMLRTELKNTGSEAKIKKYAKRLKVLEAFQRSGIKPDWMVLEVLPVLPPELRPLVPLDGGRFATSDLNDLYRRVINRNNRLKRLLELKAPEIIVRNEKRMLQEAVDSLLDNGRRGKAMTGANKRPLKSLADMIKGKGGRFRQNLLGKRVDYSGRSVIVVGPTLKLHQCGLPKLMALELFKPFIFNKLEVMGVATTIKAAKKEVENQTPVVWDILEEVIREHPVMLNRAPTLHRLGIQAFEPVLIEGKAIQLHPLVCAAFNADFDGDQMAVHVPLSLEAQMEARTLMLASNNILFPANGDPSIVPSQDIVLGLYYATREAVNAKGEGLTFTGVSEALRAYENKEVELASRVNVRITEMVHNEDKSDGAPAFVPKISLYATTVGRAILSEILPPGLPFSVLNKPLKKKEISRLINTAFRKCGLRETVIFADQLMQSGFRLATRAGISICVDDMLVPPQKETIVGDAAKKVKEYDRQYMSGLVTSQERYNNVVDIWSATSEAVGKAMMEQLSTEPVTDRDGNETRQESFNSIYMMADSGARGSAVQIRQLAGMRGLMAKPDGSIIETPITANFREGLNVLQYFISTHGARKGLADTALKTANSGYLTRRLVDVTQDLVVVEDDCGTSNGVAMKALVEGGEVVEALRDRILGRVTVADVVNPESQETLYETGTLLDEDAVEEIERLGIDEVRVRTPLTCETRYGLCAACYGRDLGRGSSVNVGEAVGVIAAQSIGEPGTQLTMRTFHIGGAASRAAVASSVEAKSNGTVRFTATMRYVTNAKGEQIVISRSGRSDDHRRPRSRARTSQGAVRRDAVATGRRADQGRHATGHVGPDDASDHHRVRWYGEVRKRRRRRDGCQADRRRDGSVHAGRDRREASWFASVEDGASAGQAARCERRRSQDPEHRALGADRLPGRRSDHREGWSASAGRXSARTDPDXIAEDAXHYRRSAACGGTVRSTFAEGRRYPGGSHGYDVVRXGHEGQAASRYHGPRGQPARVPDREGKAGSGARWSGRQQGRNDRRRAGGSARHSAFAGRRSAVALHRGRSAGRVPSARREDQRQAHXSDCSSDAAPRADYGQRRYAFHPGRTGRAVGYARRERPYDRGRQASGNVRKRAARYHEGLVVDRFVHLGGVVPGNDARADRSGDHGQARRPAWSEGKRDRRPSDSGRYGSRVPQGTQEQGTVRPRAF

SEQ ID NO: 49108 - protein, 615 aa, Burkholderia fungorum
MSRPLEILNEVFGYPAFRGQQGEIVEHVAGGGDCLVLMPTGGGKSLCYQIPSLVRRERGFGTGIVVSPLIALMQDQVAALTEVGVRAAYLNSTLSSAEAMATERALREGDIDLLYVAPERLMTPRFQELLERTRIGLFAIDEAHCVSQWGHDFRPEYIQLSVLHERFPNVPRIALTATADAITRDEIIHRLALDDARIFVSSFDRPNIRYRIVEKDNARTQLLDFIRAEHSKPDGTTDAGVVYCLSRRKVEETAEWLKEKGMRALPYHAGMDFEIRQKHQEMFQREEGIVMCATIAFGMGIDKPDVRFVAHLDLPKSVEGYYQETGRAGRDGMPANAWMAYGLGDVVQQRKMIDESDADDAHKRVQTGKLDALLGLCEAATCRRVRLLAYFGESSKPCGNCDNCLEPPDTWDATREAQMALSCVFRAQRASGFHFGAGHLIDILRGNSNEKILQRGHEKLTTFGIGSALGEPEWRAIFRQLVAFGYLTVDHEGFGSLVLTETSKPVLKGEQNVTMRRYVKPTRTRQSSGRTSERADPTIGMGPRERARWERLRAWRTETAKSDGVPAYVIFHDATLAEIARNGPDSIEDLRGIPGMGARKLDRFGDELLEVVAAD

SEQ ID NO: 49109 - protein, 126 aa, Burkholderia fungorum
MPTINQLVRKGRASETTKSKSPALQDCPQRRGVCTRVYTTTPKKPNSALRKVAKVRLTNGFEVISYIGGEGHNLQEHSVVLIRGGRVKDLPGVRYHMVRGSLDTQGVKDRKQARSKYGAKRAKAGK

SEQ ID NO: 49110 - protein, 156 aa, Burkholderia fungorum
MPRRREVPKREVLPDPKFGNVDVAKFMNVLMLSGKKSVAERIVYGAFEQIQTKGGKDPLEVFTVALNNVKPVVEVKSRRVGGANYQVPVEVRPSRRMALAMRWLREAAKKRSEKSMALRLAGELSEAAEGRGGAMKKRDEVHRMAEANKAFSHFRF

SEQ ID NO: 49111 - protein, 700 aa, Burkholderia fungorum
MARKTPIERYRNIGISAHIDAGKTTTTERILFYTGVNHKIGEVHDGAATMDWMEQEQERGITITSAATTAFWKGMAGDRAEHRINIIDTPGHVDFTIEVERSMRVLDGACMVYCAVGGVQPQSETVWRQANKYKVPRLAFINKMDRTGANFFKVYDQLKLRLKANPVPVVVPIGAEENFTGVVDLLKMKAIIWDEASQGTKFSYEEIPAELVDSCNEWREKMVEAAAESSEDLMNKYLEEGELTEAEIVKGLRDRTIACEIQPMLCGTAFKNKGVQRMLDAVLDFLPSPIDIPPVTGELENGEKGERRAADDEKFSALAFKIMTDPFVGQLIFFRVYSGVVNSGDTVLNATKDKKERLGRILQMHANQREEIKEVRAGDIAAAVGLKDATTGDTLCDPQSPIVLERMIFPEPVISQAVEPKTKPDQEKMGLALNRLAQEDPSFRVQTDEESGQTIISGMGELHLEILVDRMKREFGVEATVGKPQVAYRETIRGKAEDVDGKFVKQSGGRGQYGHAVITLEPNEQGKGYEFLDEIKGGVIPREYIPAVDKGIQETLKAGVLAGFPVVDVKVHLTFGSYHDVDSNENAFRMAGSMAFKEAMRKAQPVILEPMMAVEVETPEDYMGNVMGDLSGRRGIVQGMDDMVGGGKIVRAEVPLSEMFGYSTSLRSLTQGRATYTMEFKHYSEAPRNVSEAIINAKSK

SEQ ID NO: 49112 - protein, 396 aa, Burkholderia fungorum
MAKGKFERTKPHVNVGTIGHVDHGKTTLTAAITTVLTQKFGGEAKAYDQIDAAPEEKARGITINTAHVEYETANRHYAHVDCPGHADYVKNMITGAAQMDGAILVCSAADGPMPQTREHILLARQVGVPYIIVFLNKCDMVDDAELLELVEMEVRELLSKYDFPGDETPIIKGSAKLALEGDKGELGEVAIMNLADALDTYIPTPERAVDGAFLMPVEDVFSISGRGTVVTGRVERGVVKVGEEIEIVGIKPTVKTTCTGVEMFRKLLDQGQAGDNVGILLRGTKREDVERGQVLAKPGSINPHTHFTAEVYVLSKDEGGRHTPFFNNYRPQFYFRTTDVTGSIELPKDKEMVMPGDNVSITVKLINPIAMEEGLRFAIREGGRTVGAGVVAKILE

SEQ ID NO: 49113 - protein, 232 aa, Burkholderia fungorum
MAKLSKRLQAFAAKVDRQKLYAIDEALSLVKECASAKFDESIDVAVQLGIDAKKSDQVVRGSVVLPAGTGKSVRVAVFAQGEKAEQARAAGAEVVGMEDLAEQVKAGKLDFDIVIASPDTMRVVGTLGQILGPRGLMPNPKVGTVTPDVATAVKNAKAGQVQFRVDKAGIIHATIGRASFEPTALRSNLNALVDALQKAKPATSKGVYLRKVALSSTMGVGVRVDQASLAAQ

SEQ ID NO: 49114 - protein, 1173 aa, Burkholderia fungorum
  MISC_FEATURE (1158)..(1158): X=any amino acid
  MISC_FEATURE (1159)..(1159): X=any amino acid
  MISC_FEATURE (1160)..(1160): X=any amino acid
  MISC_FEATURE (1161)..(1161): X=any amino acid
  MISC_FEATURE (1162)..(1162): X=any amino acid
  MISC_FEATURE (1163)..(1163): X=any amino acid
  MISC_FEATURE (1164)..(1164): X=any amino acid
  MISC_FEATURE (1165)..(1165): X=any amino acid
  MISC_FEATURE (1166)..(1166): X=any amino acid
  MISC_FEATURE (1167)..(1167): X=any amino acid
  MISC_FEATURE (1168)..(1168): X=any amino acid
  MISC_FEATURE (1169)..(1169): X=any amino acid
  MISC_FEATURE (1170)..(1170): X=any amino acid
  MISC_FEATURE (1171)..(1171): X=any amino acid
  MISC_FEATURE (1172)..(1172): X=any amino acid
  MISC_FEATURE (1173)..(1173): X=any amino acid
MQYSFTEKKRIRKSFAKRPIVHQVPFLLATQLESFSTFLQADTSSTQRKPEGLQAAFTSVFPIVSHNGFARLEFVSYMLSPPAFNIKECQQRGLTYCSALRAKVRLVLLDKESPSKPVVKEVKEQEVYMGEIPLMTPTGSFVINGTERVIVSQLHRSPGVFFEHDKGKTHSSGKLLFSARIIPYRGSWLDFEFDPKDVLYFRVDRRRKMPVTILLKAIGLTPEQILANFFVFDNFTLMPEGAQMEFVPERLRGEVARFDITDRDGNVIVQKDKRINAKHIRDLDNAKTKFISVPEDYLLGRVLAKNVVDGDTGEVIANANDEITETVLEKLRESKIKDIQTLYTNDLDQGPYISSTLRIDETADKMAARIAIYRMMRPGEPPTEEAVEALFNRLFYSEDAYDLSKVGRMKFNRRVGRDEIVGPMTLQDDDILATIKILVELRNGKGEVDDIDHLGNRRVRCVGELAENQFRAGLVRVERAVKERLGQAESENLMPHDLINSKPISSAIREFFGSSQLSQFMDQTNPLSEITHKRRVSALGPGGLTRERAGFEVRDVHPTHYGRVCPIETPEGPNIGLINSLALYAHLNEYGFLETPYRKVVDSKVTDQIDYLSAIEEGRYVIAQANAAVAEDGSLTDELVSSREAGETLMVTPDRIQYMDVAPSQIVSVAASLIPFLEHDDANRALMGSNMQRQAVPCLRPEKAVVGTGIERTVAVDSGTTVQAFRGGVVDYVDAGRMVIRVNDDEAVAGDVGVDIYNLIKYTRSNQNTNINQRPIVKVGDIVSRGDVLADGASTDLGELALGQNMLVAFMPWNGYNFEDSILISEKVVADDRYTSIHIEELNVVARDTKLGPEEITRDISNLAEVQLGRLDESGIVYIGAEVEAGDVLVGKVTPKGETQLTPEEKLLRAIFGEKASDVKDTSLRVPSGMSGTVIDVQVFTREGIQRDKRAQQIIDDELKRYRLDLNDQLRIVEGDAFQRLARMLTGKVANGGPKKLAKGTKIEQAYLEDLDHYHWFDIRLADEEAAAQLEAIKDSIEQKRHQFDLAFEEKRKKLTQGDELPPGVLKMVKVYLAVKRRLQPGDKMAGRHGNKGVVSKIVPIEDMPYMADGRPADVVLNPLGVPSRMNVGQVLEVHLGWAAKGLGWRIGEMLQRQAKIXXXXXXXXXXXXXXXX

SEQ ID NO: 49115 - protein, 740 aa, Burkholderia fungorum
MKNQFSRDEDEIDIRALIDVIFKNKKLIATVTIVCMVFGVMYAFLATPIYRGDITVQVEDNSDLAGAAAGNLMSGLTSLFDIKSTDDGEMQILDSRLVTANMVDELHLYIDAKPKYFPLFGAFIAKHRNSLSHPGIFGLGGYAWGSETIGVDQFDVPREFEEDKFSVTALGNNRYRLSGSDLDADVTGEVGVPLAVNTPSGQVKLLVSQLNASENAKFELKRYSRIQVLEQLRKDLVISEMGKDQSGVIGVTYDDEDPVRAATVLNRIAENYVAQNADRKAAAAEKSLVFLKSQLPEIEHTLRLAEDRLNVYQNHHKVVDLSEQAKAVLGQAVEAQSSLFQLEQKRKELATIYSAQYPAVLALDQQIAAARAHIDNFNESIQRLPDDQQNIVRLNRDVTVQTSLYVGLLNSVQQLQLATASKIGNVRVIDRALVADKPTKPKKALVIVLATVIGLFGGVGFALARSTLFGGLTDPVDIERDLSLDVIATIPLSDTQRQLTRVRERGGRRGPSILALARPQEPAVEAIRSLCTALQFALLENPKNNVILMTGPSVGIGKSFTSANLATLLGMSKKRVLLMDVDLRRGHLAAEFGVSGKVGLSNVLRDDMPLDAAIIKDVSRNVDLLATGPLMAQPVELLSSGGIANILAEVSSRYDIVLLDAPPVLPVTDATVFAPFAGIVLLAARSGMTSGGELLESAKRIERVGAKITGIVFNGFRPSLRSAQYGDYGGYAYLSNATDT

SEQ ID NO: 49116 - protein, 242 aa, Burkholderia fungorum
MDIATMQETVRVIGDRIEAQQFTQHVVVNVAKLVNMQTDSVLYSSVRACDIVNIDGMGVVWGARLLGHSVPERVAGVDLFERLLQLAAMRGLPVFLLGATEEVVGHTATVATMRHPGLLIAGYHHGYFWDDEETVVEKIRKSGARLLFVAITSPKKESFINRWQDRLGVDFVMGVGGTFDVVAGKVRRAPQWMQRNGLEWAYRVAQEPRRMWKRYFVTNNRFALMLLRARFESTFKRLEDEH

SEQ ID NO: 49117 - protein, 360 aa, Burkholderia fungorum
  MISC_FEATURE (270)..(270): X=any amino acid
  MISC_FEATURE (272)..(272): X=any amino acid
  MISC_FEATURE (342)..(342): X=any amino acid
KLHKVLAEAGMGSRRDMEELIVAGRVSVNGEPAHIGQRIMPTDQVRINGKPVKRKLASKPPRVLLYHKPTGEIVSHADPEGRPSVFDKLPPMKTAKWLAVGRLDFNTEGLLMLTTSGDLANRFMHPRYSVEREYAVRVVGELAEGMRQKLLHGVELDDGPANFLRIRDGGGEGTNHWYHVALAEGRNREVRRMFEAAGLMVSRLIRTRHGPISLPKGLKRGRWEELEDNQVRALMASVGLKAPTEERGSRNAAPERKQPDPMQTSDGFHXPXAGVDVAWPFRSAAATRPGAARWCGRRRFCWRRGRGFWRRLWQSRCRPQRRWLRRPDGRGWGCGRPAWRPXSRRQPRAVGQWQSCGRRR

SEQ ID NO: 49118 - protein, 491 aa, Burkholderia fungorum
MSREVLMLVDALAREKNVDKDVVFAALEAALASASKKLFEEDADIRVHIDRESGEHETFRRWKVVPDEAGLQEPDQEILLFEAREQKPEIQLDEYIEEPVPSIEFGRIGAQAAKQVILQKVRDAEREQILNDFLERGEHIMTGSVKRLDKGNFIVETGRVEALLRRDQLIPKENLRVGDRVRAYIAKVDRTARGPQIELSRTAPEFLMKLFEMEVPEIEQGLLEIKAAARDPGVRAKIGVVAYDKRIDPIGTCVGIRGSRVQAVRNELGGENVDIVLWSEDPAQFVIGALAPAAVQSIVVDEEKHSMDVVVDENELAVAIGRSGQNVRLASELTGWQINIMTPDESAQKQNQERGVLRDLFMARLDVDEEVADILIDEGFTSLEEIAYVPLNEMLEIEAFDEDTVHELRNRSRDALLTLAIANEEKVENVALDLKSLDGMDADLLAKLAEHQIQTRDELAELAVDELVEMTGMEEDAAKALIMKAREHWFQ

SEQ ID NO: 49119 - protein, 989 aa, Burkholderia fungorum
MASNNVAQFAAELKMPAGVLLEQLQAAGVTKASEDDSLSETDKARLLDHLRKSHGSTDADKRKITLTKRHTSEIKQSDATGKARTIQVEVRKKRTFVRRDETSAENGDASNHVAEAEVDDLELQRREEEARHEAELLEKQAQELKARQEQLEREEAERQAREAAAEVERRRAEEEAAKKRAAAAAEAAAREQQTQASKPAQAAQPAAAKAEPVAAKAAEPVVARQSEQDDERAAAERAAQREAAKKAEDAARQAAEKARAEQEEIAKRRAAAEAEARAIREMMNTPRKAQVKAPEPAPKPAEPAKAAEAKGTLHKPARPAGEAPARPAAKKPAAAAPAATTTPSAGDKKKPGGGKGGWQDDAAKRRGIKTRGDTSGGVDRGWRGGPKGRGKHQDQNTTFQAPTEPIVREVHVPETITVADLAHKMAVKASEVIKSMMKLGQMVTINQMLDQETAMIIVEELGHHAVAAKLDDPEAMLVEGEVSDAESLPRPPVVTVMGHVDHGKTSLLDYIRRAKVAAGEAGGITQHIGAYHVETPRGVITFLDTPGHEAFTAMRARGAKATDIVILVVAADDGVMPQTKEAIAHAKAGGVPLVVAINKIDKPDANPERVKQELVAEGVVPEEYGGDSPFVSVSAKTGAGIDDLLENVLLQAEVLELKAPVEAPAKGLVIEAKLDKGKGPVATILVQSGTLNRGDVVLAGSAYGRVRAMLDETGKPTKSAGPSIPVEIQGLSEVPQAGEEVIVMPDERKAREVALFRQGKFRDVKLAKQQAAKLENMLEQMGEGEVQYMPLIVKADVQGSQEALVQSLLKLSTDEVRVQIVHGAVGGISESDVNLATASKAVIIGFNTRADAQARKLAEANGVDIRYYNIIYDAVDDVKAAMSGMLAPEKREVVTGTVEVRQVFKVPKIGAVAGCMVTDGFVKRSSSVRVLRNNVVIFTGELDSLKRFKDDVKEVRQGFECGMSIKNFNDIVEGDQFEVFEVTEVARSL

SEQ ID NO: 49120 - protein, 597 aa, Burkholderia fungorum
MSAKPTLSKPIGSGEASSPAVVFRRLWPYIKPLIWVLIGAIVAMAVSAATDAAIPALLKPLLDKGFGAHANDRAKWFVPAAVIGLALIRSLSQYASGYLLAYVTNKILLDLRLKMFDRMIHTSVAFFQRETASTVINAIVFEVNQILNVLLSVLVTLVRDSLTVVFLLGYLFYLNWRLTLIVAVLLPAIGWLVGKINRRLRRLNREHQLLTNELSYIVEESVGGYKVVKVHNGEQYEMDRFESMSKRLRGYAMRMTVSGGLAQPLTQFLASIALAVVITIAVVQSSSDQTTVGGFVAFVTSMLLIISPLKHLMDVNQPLQRGMTACEMIFGLIDEPSEPEGGGKPLERAHGAVEFRDVSFVYSGNATHNRHTLDQISFRVAPGEMIALAGPSGSGKTTLVNLLPRFFDPTGGQILVDGVAIPEYDLHALRSQIAMVSQDVVLFNDTVANNVAYGQTADAGKVKAALRAANLWDTVEAMPKGIETLVGDNGMMLSGGQRQRLAIARAIYKDAPILILDEATSALDSESERHVQAALETLMKGRTTLVIAHRLSTIERADRILVMEAGRIVESGSHRELLAQDGLYAHLHRIQFQQSAA

SEQ ID NO: 49121 - protein, 428 aa, Burkholderia fungorum
MSVLAGSPFLLAVVAPAAYAQAPAKISNQQLDSLTAPIALYPDALLAQVLMASTFPQDVPSAAAWSKANPNLKGDDAVKAVAAEPWDPSVQSLVAFPQVLATMASKPDWVAQLGNAFLAQPNDVMDSVQRLRKQAQQAGNLQTNQQQKVVVEQSTIQIVPVNPQVVYVPTYNPTVVYGTWPYPAYPPVYVPPPPGYAVASGLAAGLAFGAGVAITSSLWSNVNWNNHSVNINVNQYNNINVNHRLDVNSSTTNWNRNSTFNRNTSANVGSAQRDAYRGRDTSASRAQAQQTLQNRTGQNMGGTASQRLQGIQQGGNNAANLRNNAQNVNRDNALRGAGDGGAAKQDMQRGQASRQSLANNRGGGPGANGGGQQRGGNLGAGGSGERASFGAGGGGQPGGGFGAGGGGQQRGGGLGAGGGGQRHFGRQH

SEQ ID NO: 49122 - protein, 535 aa, Burkholderia fungorum
MPIIESKLNPRSDDFRANAAALEALVADLRAKIEKLALGGGQAARDKHTGRGKLLPRDRIAQLLDPGTPFLEFSQLAAYGMYHNDAPGAGVITGIGRIAGQECVIVCNDATVKGGTYYPVTVKKHVRAQEIAAENHLPCVYLVDSGGANLPNQDDVFPDRDHFGRIFYNQANLSAAGIPQIAVVMGSCTAGGAYVPAMSDESIIVRNQGTIFLGGPPLVKAATGEVVSAEDLGGGDVHTRLSGVVDHLAQNDAHALGIARSIVGNLNRRKQVPVALQEPKPPRYDVKSMYGVIPVDTRKPFDIREVIARIVDDSAFDEFKARYGTTLVTGFAHIWGHPVGIIANNGILFSESALKGAHFIELCCQRKIPLVFLQNITGFMVGRKYENEGIARNGAKMVTAVATARVPKFTVIIGGSFGAGNYGMCGRAYSPRFLWMWPNARISVMGGEQAASVLATVKRDGIEGKGGTWSAEEEEAFKQPIREQYEHQGHPYYASARLWDDGVIDPAQTRDVLGLGLSAAMNAPIEDTRFGVFRM

SEQ ID NO: 49123 - protein, 476 aa, Burkholderia fungorum
MTSTAETSADRLVLEAVGFSLSRLPANARIAIAFSGGVDSSVLLDAAVRVAGASRCVALHVHHGLSAHADAWLAHCEAFARERGVEFAAERVAVSRDTGVGVEAAARDARYRALDDMCASRGVATLWLAQHADDQAETVLLQLLRGAGLAGLAAMAPKYLPAKASATRVRPLLHLLRAQLEQYASARALRWIDDESNADTRYARNALRHDVMPALAVHFPGFRDALARTAAHAASAQRLLDEFARIDMEAASRDEGRALSHDALLALDDERALNLMRYWMRTLGLAAASSARLGDALRQLREIGAAGEGHALRVDHAGHALRSYRGLVYWEAGDSSGPADETALAARAVSELAWQGESVWRLPQWRGTFIFADASAGEPDAIPVSVLRRAVSSARSRSGGERMRMGDAHNAPGRTLKNLFQERGIPAWKRDVPLLYIGEELLFVPLLGVNRAALPDQPGEAGSHVRIVWREDLLIA

SEQ ID NO: 49124 - protein, 323 aa, Burkholderia fungorum
MKTTFLDFEQPIAELEAKIEELRFVQDDSAVDISEEIERLSKKSQQLTKDLYANLTPWQVSQIARHPQRPYTFDYVNELFTDFHELHGDRNYADDLSIVGGLARFNGQACMVIGHQKGRDTKERALRNFGMPRPEGYRKAERLMRLAEKFGLPIFTFIDTPGAYPGIGAEERGQSEAIGRNLYVMAELKTPLIATIIGEGGSGGALAIAVGDSVLMLQFSTYSVISPEGCASILWKSAAKAPEAAEALGLTAHRLKALGLIDKIVNEPLGGAHRDPKGMAAMLRRALADSLRQFQGMSINDLRQRRFERLMSYGKFKETTPGA

SEQ ID NO: 49125 - protein, 465 aa, Burkholderia fungorum
MESLRIYNTLARDKQTFVPLQDGVVRMYVCGMTVYDYCHVGHARVMVVFDIVQRWLRTLGYNVTYVRNITDIDDKIIRRAVENGETIKSLTDRFIKALHEDADALGIQRPDIEPRATDFIPQMLGMIERLEANGYAYQASDGDVNYAVRKFANYGKLSGKSLEDLRAGERVAANDAKQDPLDFVLWKQAKPQEPADTGWDSKYGRGRPGWHIECSAMGCTLLGEHFDIHGGGQDLQFPHHENEIAQSEAATGQTFVNFWMHNGYVQIDNEKMSKSLNNFFTIREVLAQYDAEVVRFFIARAHYRSPLNYSDVHIDDARNALTRLYTALKDVTPDGAELDWNEAYAQRFQAAMNDDFNTPVAVSVLFELASEVNRTRDPALARQLRLLGAVIGLLGREPRAYLQQAAGAAAVGALEAAAIEAKIAARAAAKQAKDFAAADRIRSELLEAGVALEDKPGGLTEWRRV

SEQ ID NO: 49126 - protein, 281 aa, Burkholderia fungorum
MFTRLREDIATIRERDPAARSAWEVLTCYPGLHALVLHRFAHACWQARRRWLARFVSQLARFMTGIEIHPGATLGRRVFIDHGMGVVIGETAQVGDDCTIYQGVTLGGTSLTRGAKRHPTLERGVIVGAGAKVLGGFTIGAEAKIGSNAVVTKPVPARGTAVGNPARIIVPAAAAVASEGASVVANSDSGGAARGAKRSAGSSRFCAYGITPNADDPVSLAIHGLIDHAATQAKRIDEIVDALERLGTSLEALQGADAALLDLRRLSAAIAGKVDGVVAER

SEQ ID NO: 49127 - protein, 345 aa, Burkholderia fungorum
MTRSNAFRGHILDYQISVADSDIAFHCEAGETVLDAAERSGYSVPYSCRKGVCSTCEGGVVAGAGRSSVQGDVQGPAGHVLLCCLRPSSDMTIAPRKIDRREPVVRKTLDMSVYRITQPAADVSIVQLRLPTGVRAKFRAGQYLQIELEDGSRRNYSMANPPHESDSIQLHVRHVPGGRFSEGMLRRLDKGHKLRVELPFGEFSLQDDSTKPVILLATGTGFAPVKSIVEDAIKRRLDRPLTLYWGARRAEDLYLAELAQKWHDSGKLKFVPVLSEPNADWNGRRGFVHETVLEDFGSLDGYQVYACGNPAMTTAAHESFLKAGLPDDDFFSDAFVHTDTAPAMT

SEQ ID NO: 49128 - protein, 90 aa, Burkholderia fungorum
MNKTELIDHIAQQADISKAAAGRALDAVIGGVKGTLKKGGSVTLVGFGTFAVGKRTARTGRNPRTGAAIKIKAAKVPKFRPGKALKDALN

SEQ ID NO: 49129 - protein, 807 aa, Burkholderia fungorum
MSGTQLLPPERITLPLLPLRDVVVFPHMVIPLFVGRPKSIKALEAAMEGGKHIMLVAQKTAAKDEPTEKDMYEVGCVANILQMLKLPDGTVKVLVEGLQRAKTLSIEEQETQFSCEVMPLEPDHADSAETEALRRAIVSQFDQYVKLNKKIPPEILTSLSGIDEAGRLADTIAAHLPLKLDQKQHILEMFPVIERLEHLLAQLEAEIDILQVEKRIRGRVKRQMEKSQREYYLNEQVKAIQKELGEGEEGADLEELEKRITAARMPKEAKKKADAELKKLKLMSPMSAEATVVRNYIDTLIGLPWRKKSKVNNDLSNAERVLDEDHFGLEKVKERILEYLAVQQRVDKVKAPILCLVGPPGVGKTSLGQSIARATNRKFVRMALGGVRDEAEIRGHRRTYIGSMPGKILQSLTKVGVRNPLFLLDEVDKMGQDFRGDPSSALLEVLDPEQNHTFADHYVEVDFDLSDVMFVATSNSLNIPPPLLDRMEVIRLSGYTEDEKVSIAQRYLLPKQKKNNGLKDGEVDVTETAIRDIIRYYTREAGVRSLEREISKICRKVVKMLLLKKAEGAVKVDGSNLDTFLGVRKYDFGLAAKENQVGQVTGLAWTEVGGDLLTIEAAVMPGKGNVIRTGSLGDVMKESVEAARSVVRSRSRRLGIKDEAFEKQDIHIHVPEGATPKDGPSAGIAMTTALVSVLTGIPVRADVAMTGEITLRGEVLPIGGLKEKLLAAHRGGIKLVLIPEENVKDLTEIPDNVKNAIEIVPVRWVDKVLELALERVPSALPDEEPKPAAPVAAEPGKDAAATEVVKH

SEQ ID NO: 49130 - protein, 423 aa, Burkholderia fungorum
MADKKGSNSEKLLYCSFCGKSQHEVKKLIAGPSVFICDECIDLCNEIIRDEAAGAGIEAGLSKSDLPSPQEIREILDQYVIGQERAKKILAVAVYNHYKRLKHLDKKDEIELSKSNILLIGPTGSGKTLLAQTLARLLNVPFVIADATTLTEAGYVGEDVENIIQKLLQNCNYEVDKAQRGIVYIDEIDKISRKSDNPSITRDVSGEGVQQALLKLVEGTMASVPPQGGRKHPNQDFIQVDTTNILFICGGAFDGLEKVIVDRTEKTGIGFGASVKSKQDRDAGEVLREVEPEDLIKFGLIPELIGRLPVVATLGKLDEVALMKILVEPKNALVKQYHKLFNMERVELEIRPAALQAVARKAIRRKTGARGLRSILEQALLDVMYDLPQMKGISKVIIDDNVIDGDGKPLLIYEDAPKVAGSN

SEQ ID NO: 49131 - protein, 332 aa, Burkholderia fungorum
KLYISDVTLRDGSHAIRHQYSVPQVRQIAPALDEARVDSIEVAHGDGLQGSSFNYGFGAHTDVEWIEAVADVVKHAKIATLLLPGIGTVHDLQAAYNAGARIVRVATHCTEADVSRQHIELARKLDMDTVGFLMMSHMSSPQALAEQAKLMESYGATCCYVVDSGGAMNMNDVRDRVLALREVLQPETAIGIHAHHNLSLGVANSIVAVEAGAIRVDASLAGMGAGAGNAPLEVFIAAAERMGWQHGTDLYRLMDAADDIVRPLQDRPVRVDRETLALGYAGVYSSFLRHAEAAGHKYGLKTVDILVELGKRRMVGGQEDMIVDVALDLAQQ

SEQ ID NO: 49132 - protein, 148 aa, Burkholderia fungorum
MLTITRKLEFDAGHRIPDHRSQCRNLHGHRYVLEITLQGDLVDTEGAPDRGMVMDFADVKSLAVEHLVDKWDHAFLVYEGDTQVRGFLETMAGHKTVVLDRIPTVENLAAVAFGILANVYDAHYGVNLRLHKLRLYETPNCWADVIRD

SEQ ID NO: 49133 - protein, 496 aa, Burkholderia fungorum
MCADCVARSARPALAFFMTIKPSSRTASAPARPRESRLSMLHLAPESLGFALDCAGQAVGAVRLGAALPAALQSVFVSAPEGSVAAARGAVQDIAYRTMRRLATAEWLIAKLVKKAPPPHVGHVLACSLALLVDDEANAAYAPFTVVDQAVSAIAARREFAFAKGLVNAVLRTFLRERETLLSAAQADEVARWNYPAWWIDAVKRAWPDAWQSVLAAGNTQGPLTLRVNARRSTVDAYLQLLQNQHIAASKAGDYAVKLATPMPVDRIPGFTDGVVSVQDAGAQLAAQLLGVHDGMRVLDACAAPGGKTGHLLELANLQLVALESDASRARRIGENLQRLKLEAEVRIGDAGTPAKWHDDIDQPFDRILADVPCSASGIVRRHPDIRWLRRASDIPALVAEQRRILDALWPLVKPGGELLYVTCSIFPEEGELQAQWFGNKYQDAVRLDAPGQLLPSVARAPADASAGSHAGQSAEDSAGANSDHDGFFYARFQKR

SEQ ID NO: 49134 - protein, 552 aa, Burkholderia fungorum
MDIKRTVLWVIFFMSAVMLFDNWQRDHGRPSMFFPSATPTRTVGSAAPGTTTPGTQPADLPATNAAAPGNAPAATQSQLIKFNTDVYSGEIDTRGGTLSKLSLVKQGDGKQPDLVITLFDRTANHTYLARTGLLGGDFPNHNDIYTPLPNQPHDLTGDEKSFQISFESPVKGGVKVIKTYTFTRGSYVIGVDTKIQNVGTTPVSPSVYMELVRDDQPVETPRFSHTFIGPAVYTDQHHFQKMTFGDIDKNKQDYATSADNGWIAMVQHYFASAWIPQQGAKRDIYVEKIDPALYRVGVKEPVPTIAPGQTVDVSARLFAGPEEERMLEGIAPGLELVKDYGWVTIIAKPLFWLLEKIHSYVGNWGWSIVLLTLLIKAVFFPLSAASYKSMARMKAITPRMQALRERFKGDPQKMNSALMELYKTEKVNPFGGCLPVVIQIPVFISLYWVLLSSVEMRGAPWILWIHDLSQQDPFFILPVLMAVSMFLQTKLNPTPPDPVQAKMMMFMPIAFSVMFFFFPAGLVLYYVVNNVLSIAQQYYITRMMGQAKTKAA

SEQ ID NO: 49135 - protein, 464 aa, Burkholderia fungorum
MLTTDSDPIVAIATAPGRGGIGVVRISFGRAGEAAAQPLMQALTGQTLAARRASYVPFLDASGDALDRGIALYFPAPHSYTGEHVLELQGHGGPVVLQLVLQRCIDAGRAFGLRLAEPGEFTRRAFLNDKLDLAQAEAVADLIEASTEAAARSAGRSLDGAFSRDIHALVEDVITLRMLVEATLDFPEEEIDFLEAADARGKLARIRERLGHVLSEARQGALLREGLSVVLAGQPNVGKSSLLNALAGAELAIVTPIAGTTRDKVAQTIQIEGIPLHVIDTAGLRDTEDEVEKIGIARTWNEIERADVVLHLLDARTGMTVEDEAIAGRFPAGVPVVRVLNKTDLTGLAPATRALDADLDLSEVRLSAKQGDGVALLREELLRIAGWQAGAESVYLARERHLIALRAAEEHLATAAAHADQNSQALDLFAEELRLAQDQLNSITGEFSSDDLLGVIFSRFCIGK

SEQ ID NO: 49136 - protein, 161 aa, Burkholderia fungorum
MISAEGLKEIDRAIAKYPADQKQSAVMSALATAQEEHGWLSPELMQFVADYLGMPAVAVQEVATFYTMYETSPVGKYKITLCTNLPCQLGPDGGSDSAAEYLKQKLGIDFGETTPDGKFTLKEGECMGSCGDAPVMLVNNHRMCSFMSRAKIDQLLEELSK

SEQ ID NO: 49137 - protein, 442 aa, Burkholderia fungorum
MTCLHDRHIKPLILAGLNGDNWHLEDYVARGGYAQLRRILEEKIPPEQVIADVKASGLRGRGGAGFPTGLKWSFMPRQFPGQKYLVCNSDEGEPGTFKDRDILRFNPHSLIEGMAIGAYAMGITVGYNYIHGEIWEVYKRFEQALDEARRAGFLGENIMGSGFSFELHAHHGYGAYICGEETALLESLEGKKGQPRFKPPFPASFGVYGKPTTINNTETFAAVPFLLAIGPQNYLEIGKPNNGGTKIFSIAGDVERPGNYEIPLGTPFATLMELAGGMRGGKKIKAVIPGGSSAPVIPGDIMMQTDMDYDSIAKQGSMLGSGAVIVMDETRCMVRSLLRLSYFYYEESCGQCTPCREGTGWLYRVVHRIEHGLGRPEDLDLLNSVAENIMGRTICALGDAAAMPVRGMLKHYWDEFEYHVAHKHCLVGGHAGAAAASETVAA

SEQ ID NO: 49138 - protein, 244 aa, Burkholderia fungorum
MSEVLESGLSAEGRAMQDPVRVVVADDHPVILFGAEQALLKFPGLQVVARARQSTELIKVLQTIACDVLVTDLAMPGGQYGDGLPLIGYLRRNFPNLPIVVLTMLENAALLKRLSELGVTSVVNKSDDLSHIGLAVQHVSRNLEYMSPSVKASLDALRMNAGGKNDEVMLSKRELEVVRLFVSGMTIKEISEQLNRSIKTISTQKNTAMRKLGIERDSELFQYAQSNGLLNLSSHSTDATGGVS

SEQ ID NO: 49139 - protein, 228 aa, Burkholderia fungorum
MTGFDRQTISDTTAKMLLEVQAVHFNAEKPYIFTSGWASPVYIDCRKLISYPRVRRGLMEMAETTILRDVGYEQIDAVAGGETAGIPFAAWLSDRLMVPMQYVRKKPKGFGRNAQIEGLLTEGQRVLLVEDLTTDSRSKINFINALRTAGATVNHCFVLFHYNIFKESVSVLKDIDVDLHALATWWDVLRVAKENKYFDTRTLDEVEKFLHAPAEWSAAHGGATSTPQ

SEQ ID NO: 49140 - protein, 510 aa, Burkholderia fungorum
MLEERIRLSQLRDRIVTAEQAASLIHDGMTVGMSGFGAAGDCKAVPLALAARAREQSLRITLMTGASVGYEVDGVLAEAGAISRRMPFQSDKSLRNQINAGEAMFMDLHLSEMAEQLRDGFLGPVDVAVIEAVAVGEAGIVPTMSVGNSAVFAALAKQVIVEINLDMPLELEGLHDVYLPLSRPDREPIPLTNAAQRIGLPYIPLDPTKIAAIVVTRKGDSPNKVLPPDADTTQIAGHLSGFFSHEVRAGRLGSSLQPLQAGVGSIANAVLHGLVDSGFSGLRMYSEVLQDGAIELLDAGCVDFACASAIMLSSEYQTRFFEGLDRYRSRVLLRPQEISNHPEVIRRLGVIAVNTALECDIYGNVNSTHVGGTHMMNGIGGSGDFARNAYLSVFVTKSLAKDGDISSIVPMVSHVDHIGQDIDVIVTEHGLADLRGLAPRERAQQIITHCADPLYRDALRDYVAKAGARGGQTPHLIEEALAWHAHYRERHSMRLIQTSPPASQPIPEPA

SEQ ID NO: 49141 - protein, 425 aa, Burkholderia fungorum
MAETLKTEYAIIAIPSATVDVQRRVATLCVRAGVRALVLPALTDVTQGQAFLSRVRQIDLEDLLGRDPINIDTPHVEALLHDRVVMVTGAGGSIGSELCRQILRFQPAQLIAYDLSEFAIYRLTEELSERFPGVSVIPVIGDAKDSLLLDEVMSRHTPHIVFHAAAYKHVPLMEEQNAWQAVRNNVLGTYRVGRAAIRHDVKHFVLISTDKAVNPTNVMGASKRLAEMACQALQQTSPRTQFETVRFGNVLGSAGSVIPKFQQQIAKGGPVTVTHPEITRFFMTIPEASQLVLQASSMGHGGEIFILDMGEPVKIVDLARDLIRLYGFNEEQIRIVFTGLRPGEKLYEELLACDETTTRTPHPKLRTARAREVSDDLLDKLLPWLMQHRVLGDDEVRRDLRRWVPEYQPASSPTLHSVAAFPRAS

SEQ ID NO: 49142 - protein, 340 aa, Burkholderia fungorum
MLMHLSTFPTWVAVTLIALGAACACAAILWTLLRTGIAWRLATDIPNDRSLHVLPTPRVGGWGIVPVAVVATLLLAPSLWYAALGTAFLAAVSQIDDRRGLSARVRFAAHLIAVVGIVVLFPADARWWVLVILVFLMIWLVNLYNFMDGADGLAGGMALFGFAGYAAGALLSKHPLPELAWSATAISGAALGFLLFNFHPARIFLGDAGSIALGFLAGALGYWGWRGGVWPVWFPILVFAPFIADASITLARRLLHGERFWQAHREHYYQRMVRSGTGHARTAFTWYVVMVAGIMFAIYALGRSVIFQSCVLAVWIAVLCVAGALVDLRWRRFQSTLSDN

SEQ ID NO: 49143 - protein, 337 aa, Burkholderia fungorum
MQRSLADSRVKFRHLQCFLAVAQFGSVQRAAGSLSITQPAVSKTVAELEAILGVKLFERGRHGAVPTREGQLFMPHASACVSALRQGVDLLAHAEGAAAATLEIGILPTVAAVLIPPVLKRFAALWPRVIVRLATGANPELLESLKAGTIEFAIGRLADPERMVGLSFEQLFSEPLIAVVRAGHPLALGAGLPATSLEDFPVVLPPFGTLIRQSAESLLSAWGVPPLSAFVEVLSVSTGRALTLENSAVWFVPLSAVEYELAHGMLVRLPLPFAGTGEPVGLIRRSDTQPSPAGRAFIDAVREVAQQRMAASAASAAGADKTAGAATGKGVRKRSRK

SEQ ID NO: 49144 - protein, 533 aa, Burkholderia fungorum
MSTDADTITDEQIAAIADRMVEEGRRVSPVTIWKEVRGGSLVAIVAALQRWREARQGETPALQVQPGLPEGLAETVMSAADRIWSASQHDAERAFSQRLAAVNQDLEAAVAERDEALAEYQKMIDEVETGRQRVIALTDTLSASESIALRLEAELATVTGRAEAAETHVEELAQRASAQDADLEAMKASLDKERLAREESATALASKNDEVAQLTQERDQARHEIVTLSDVCHARTEEVTQWSQEARAASSRAELAEARIEELVQRAAVDHANLEAMNASLEAERKAREELAAVVSSKTDELTRVVQEREQALQQVTTLDAACRANAQEVTRWSQEANAATSRAQAAEARIEELVQRVSSQDAGLEAAKASLEEERKGHEELAAVVSGKTDELTRVTQERDQALQQVTTLDAACQANAQEVTRWSQEANAATSRAQAAEVRIEELLQHATSQAAEQQATVALLDEERKARAELATAISGKSDELAQAAQERDQAQQQIVTLSDAHQAKSEEAIRLSTELGAALFARESRRGPG

SEQ ID NO: 49145 - protein, 559 aa, Burkholderia fungorum
MTTIQAPTQAPTGRPLLEIDRFSVRFGDKVAVHELSLSIARGERVALVGESGSGKSVTALSILRLVEHAELSGRMLLDGEDLLQKTEQQMRGLRGADVAMVFQEPMTALNPLFTIGKQIAESLRLHEGLRPNAARERGIELLRRTGIPEPERRIDSFPHQLSGGQRQRAMIAMALACRPRLLLADEPTTALDVTVRQQIVDLLISLQEQEAAERGMAVLLITHDLNLVKRFAQRVAVMEKGVLVETNTTGALFANPQHPYTRRLLDSEPQRAVAPIEQGARRLLEVQGLAVDYRTSAKGWRSLFGRSTFRAVHDVDLSVRRGETLGIVGESGSGKSTLAATVLGLQQPAAGHIHIDGLPLSTLKTASSRRALYSRMQVVFQDPFGSLSPRMTVEQIVGEGLAVHRPEVDAKARRARVGSLLEEVGMPADAMLRYPHEFSGGQRQRIAIARALAVQPELLVLDEPTSALDVSIQKQVLNLLTNLQKKYKLSYLFITHDLAVMRAMAHRVIVMKSGRIVEAGDTLDVLHAPSHPYTQSLLASSLNVPEPGAAATQTGKAND

SEQ ID NO: 49146 - protein, 296 aa, Burkholderia fungorum
MQDTTIQPALTPAQNNAKPARTAAGAALLCVLSMSSVQFGAALSAPTMAAYGSLSTTWLRLCWAAVVLAVLVRPRWRTYSRSHWLAAGVLGAAMAGMTLCFFAALQRIPLGLAVAIDFLGPLAVATFAVRRARALLWPALAIAGVTLLSRDRAGWIGEPLGVLLACGAALGWGSYIVLMKKTGTLFAGLEGLSVSLIAAALAATPFGLAQSGLHVAGAQIAATAGLALLVPLLPYALEMVALRHMPAASFGILMSVEPAIGALAGFVVLHQPMGVLQVAGTLLVVTASVGAVVATR

SEQ ID NO: 49147 - protein, 3073 aa, Burkholderia fungorum
MSCAPMGGGDTSGDGMSFSLNNAASTDGAWGFNSGQITARVTGYQDGHLELAAEKGIYMVNDVNMSGNKISSLAPGDVSSKSTDAVNGSQVYQYTRYFKANSPSSDPSTDARAIGTSSVASGPSSLAIGKNSSAYGANTSAIGTNSVALGAGSVASRNDAVSVGYLSADGTSQYTRQIVNVTAGAAGTDAVNVNQLNAAIASVSGGGSGDLAPNAVTYDTSASTLITLKGASGTKITNLTAGDISSIWSTDAVNGSQLYQTNQNVTNVANNVANVSGNLANVTNIVNNIVNNGIAGSPLVVTYDTSARDTVTLGGTDHTAAVKLTNVAPGDISSASSTDAVNGAQLYATNQNVSALASNVGDIVVNLYNRGAKYFHTNSSLADSSAIGTNAVAIGGAAIASADNSVALGANSVANRANAVSVGAAGTERQIINVANGTGATDAVNLQQLQAVAASISSGAVTGSFVAYDDSTKGSVTLKGASGSTITNLKAGALTASSVDAVNGSQLYQTNANVANVAGNLANVAGNVTYVTNTVNNIENGGGIKYFHANSSLADSSAAGADAVAIGGAANASAVNSVALGANSVANRANAVSVGALNAERQIINVAAGTQNTDAVNVAQMNTAIANASMSGGGSPDAVVYDSSSHNILTLGGVAASAPVALTNVAAGQIVSGSSDAVNGGQLYNVANSVAAALGAGSTVNKDGTVSAPGYTISGSTYGNVGDALNALNTAAGDLVSAAKYVKVVSSAAAASASGSESVAIGGNAMATGSNSLAIGAGATAKYNNSTAIGVNAITDAANTVSVGARGAEMRITHVANGINDTDAATVAQLSALQSKLLQTTQQSSGVKSLLLGAAVPVTSYIAVSSNVTGGGSTSASSDLNAMAIGPVAAATGIGALAVGSGSAAGSNASTAVGTGAGVASVNSTAIGYSATIGANSANSLAIGYNSRAQATNSMALGSFASATSAGSVVIGYNAFVNQAATNGMALGLNASVSAANGVAIGYNSIADRANAVSVGSSSQQNQIIYVAAGTNGTDAVNVNQLSGVTSIIGGGAAVNPDGTIKKPSFAIGGQTYTDVGSAINAAVSGGTANGVQYDTSARTKVTLGGTGATTAVTLSNVANGVANNDAVNVTQLQAMGATIGTSGVVTNSFVAYDDTTQGKISLKGTGGTTITNVKAGALSSASLDAVNGSQLYQTNANVANVAGNVANVTNVVNNITNGGGIKYFHANSTLADSSATGTNSVAIGGAASATAANSVALGANSVAGRANAVSVGAVGSERQIINVANATNGTDAVNLQQLQAMGANVNSSGVVTNSFVAYDDTSKGKVTLGGSGFTKAVTLTNVANGVANADAVNMAQLKAMGGTIDSSGNVTNAFVAYDDTSKGKVTLGGAGSTKAVALTNVANGVANADAVNMAQLKAMGGTIDSSGNVTNAFVAYDDTSKGKVTLGGAGSTKAVALTNVANGVANADAVNMAQLKAMGGTIDSSGNVTNAFVAYDDTSKGKVTLGGAGSTKAVALTNVANGVANADAVNMAQLKAMGGTIDSSGNVTNAFVAYDDTTLGKISLKGTGGTTITNVKAGALSSTSLDAVNGSQLYQTNANVANVAGNVANVAGNVANVTNVVNNITNGGGIKYFHANSTLADSSATGANSVAIGGAASATAANSVALGANSVAGRANAVSVGAAGSERQIINVANATNSTDAVNLQQLQAMGANVNSSGVVTNAFVSYDDTSKGKVTLGGSGSTKAVSLTNVAAGVASADAVNMGQLKQMGATVDTSGNVTNSFVAYDDTTLGKISLKGTGGTTITNVKAGALTSASLDAVNGGQLYQTNANVANVAGNLTNLTNVVNNITSGGGIKYFNAKSTLADSSATGTNSVAIGGAANASATNSVALGANSVAGRANAVSVGAAGSERQIINVANATNSTDAVNLSQLQAMGANVNSSGVVTNSFVAYDDTSKGKVTFGGAGSTAPVLLTNLAAGAVTSTSSDAINGSQLYQTAASMAGALGGGAALAKDGTISAPAYEITGSTYNNVGDALAAVDTQLGDINTNFSTNLKYVKIISQSNAAQASGSEAIAIGGNAMATGSSSLAIGAGATSKYDNSTAIGVNASTDAPNTVSVGARGAEMRITHVANGINDTDAATVAQLSALQSKLLQTTQQSGVKSLLLGAVPVTNYIAVSQNVTGGGSTSASNDLNAMAIGPLAAASGVGALAVGAGSIAGSDASTAVGTGAAVGSVNSTAIGYSASVGVNSANSLAIGYNSRAQALNSLAIGTEASATSAGSIAIGYGAFLNPSATNSMALGLNSSVSAANAVAIGYNAVADRANAVSVGSSKQQSQIINVAAGTANTDAVNLGQMNAAINAVAGGGSPNAVVYDTSAHMSVTLGSAGTPVKVSNVANGVANNDAVNVAQLTAMGGTINSSGVVTNSFVAYDDTTKGSITLKGASGTTITNVKAGSLTANSTDAINGGQLYQTNANVANLAANVANITGNVTNTVNNIVNGGGIKYFHANSTLADSSATGTDSVAIGGAANATAANSVALGANSVAGRANAVSVGAVGAERQIINVANATNSTDAVNLSQLQAMGANVNSSGVVTNAFVAYDDSTKGKVTLGGVGSSMPVTLANVAEGQVTSTSKQAINGSQLYGTANSVASALGGTSSVGSNGNVTAAFSLDGKTYNSVATTMDALNAKIATGSTDGVVYDTSAHNKLTLGGVNATTPVTVANVAAATSDDQAVNLAQLKAAGLNVDTSGNVTNSFVAYDNTTRGTVTFNAGGAPTQLKNVAAGTDLTDAVNFGQMQSYVAQNGGGGTTNGVSYDDSLRGKVTLGGVGSTTPVTLTNVAAGSAATDAVNYSQFSSLESQVNNLANGGAGSTTYVNINTPASGGTAAVASGSDSIAIGNGASASGSESIAIGKNTVTTGDNSVAMGAGASAPNANAVALGTNSTTDRDNSVSVGSAGAERQITNVAAGTQGTDAVNLNQLNSAMGNMSNSINNVDRNAAKGIASASALNIVTPYLPGRTTLNAGVANYRGYQSVGLGVSRWNEKGTINYNLGVSTSGGNSTIVRAGIGIVLGN

SEQ ID NO: 49148 - protein, 662 aa, Burkholderia fungorum
MRIDKLTTKFQEALADAQSLAVGHDNQYIEPVHVLSALVAQQDGSARSLLSRAGVHVQALQTALGDAITRLPQVQGTDGNVQIGRDLTGLLNQADKEAQKLNDTFIASEMFLLAVADDKGEAGRLARQHGLSRKSLESAIAAVRGGSQVHSQDAESQREALKKYTVDLTERARAGKLDPVIGRDDEIRRSIQILQRRTKNNPVLIGEPGVGKTAIVEGLAQRIVNGEVPETLKGKRVLSLDMAALLAGAKYRGEFEERLKAVLNDIAKDEGQTIVFIDEIHTMVGAGKAEGAMDAGNMLKPALSRGELHCVGATTLDEYRKYIEKDAALERRFQKVLVDEPTVEATIAILRGLQEKYELHHGVDITDPAIVAAAELSHRYITDRFLPDKAIDLIDEAASKIKMEIDSKPEEMDRLDRRLIQLKIEREAVKKEKDEASQKRLQLIEEEIERLNREYSDLDEIWTAEKAAVQGSAQLKEEIEKTRAEITRLQREGKLEKVAELQYGKLPGLEAQLKEVTKAEASEQNNPTRPRLLRTQVGAEEIAEVVSRATGIPVSRMMQGEREKLLQIEEKLHARVVGQDEAISAVADAIRRSRAGLSDPNRPYGSFLFLGPTGVGKTELCKALASFLFDSEDHLIRIDMSEFMEKHSVARLIGAAGIRARR

SEQ ID NO: 49149 - protein, 358 aa, Burkholderia fungorum
MKKVLILGVNGFIGHHLSKRILETTDWEVFGMDMQTERLGDLINHERMHFFEGDITINKEWVEYHVKKCDVILPLVAIATPATYVKQPLRVFELDFEANLPIVRSAVKYGKHLVFPSTSEVYGMCTDEQFDPEESQLSYGPINKPRWIYACSKQLMDRVIWGYGMEGLNFTLFRPFNWIGPGLDSIYTPKEGSSRVVTQFLGHIVRGENISLVDGGAQKRAFTDIDDGIGALMKIIENKDGVATGKIYNIGNPTNNFSVRELAHKMLTLAAEFPEYADTAKQVQLVETSCGRLLRRRLSGRAEPRAEDRQHHAGTRLGAQVDFRRSAAQDFRSVSRPRRRSARSRRTAVRADPWPVSS

SEQ ID NO: 49150 - protein, 418 aa, Burkholderia fungorum
MSTPTPRAPMLATAEALATLLSAASPIAGTESIPTLDALNRVLAANVTSPLDVPPMNTSSMDGYAIRTADLTVRDYSRLPVSQRIPAGHAPEPLKPGTAARIFTGATVPPGADAIVMQEQTEAADADVVILHSPEPGEWITAQGADIRSGSVILPAGTRLTPQALGLAASVGCAELVVRRRVKVAVFFTGDELTMPGEPLKPGAIYNSNRFTLRGLLEKLGCEVTDYGIVADRLDATRATLREAAGAHDLILTCGGVSVGEEDHVKPAVEAEGRLAMWQIAMKPGKPLAFGAVRRAARHGETSSAETFFIGLPGNPVSSFATFLLFVRPFILSLAGVQAVAPRALSLRADFTQSKADRRNEFLRARINPAGGLDLFPNQSSAVLTSTVWGDGLIDNPPNHAISAGETVRFIPFSELLN

SEQ ID NO: 49151 - protein, 483 aa, Burkholderia fungorum
MNYLSTRGAGAGEHHTFSDILLGGLAKDGGLYLPAEYPRITGDELTRWRTLPYADLAFEILSRFSDDIPAEDLRALTRKTYTAATYCNVRDDESAAQITPLKTLGVENGAPLSLLELSNGPTLAFKDMAMQLIGNLFEYTLAKHGQTLNILGATSGDTGSAAEYAMRGKKGISVFMLSPHRKMSAFQTAQMYSLQDPNIFNIAVEGVFDDAQDIVKAVSNDHAFKAKYRIGTVNSINWARVVAQVVYYFKGYFAATKSNDERVSFTVPSGNFGNVCAGHIARMMGLPIEKLVVATNENDVLDEFFRTGIYRVRKAAETYHTSSPSMDISKASNFERFVFDLLGRDPARVLQLFRDVEEKGGFDLAASGDFARVQQFGFVSGRSSHESRVETIRDVFERYDTMIDTHTADGLKVAREYLQPGIPMIVLETAQPIKFGETIREALLREPERPAAFSGLESLPQRFEVLPADVQRVKDFIAANVDA

SEQ ID NO: 49152 - protein, 488 aa, Burkholderia fungorum
MAARRSAIKRIVMSKEFDVVVIGAGPGGYIAAIRAAQLGKTVACIEKWKNPAGALKLGGTCLNVGCIPSKALLASSEEFENASHHLADHGISVENVKVDIAKMMARKEGIVEKMTKGIEFLFRKNKITWLKGHGKFTGKTDAGVQIEVSGEGETETVTAKNVIIATGSKARHLPNIPVDNRIVADNEGALSFESTPKKLAVIGAGVIGLELGSVWRRLGAEVTVLEALPEFLGAADQALAKEAAKQFKKQGLDIHVGVKVGEVKTTDSGVTIAYTDKDGNAQTLEADRLIVSIGRVPNTDNLGLEAIGLKANERGFIDVDEHCATAVPNVYAIGDVVRGPMLAHKAEDEGVLVAEIIDGQKPHIDYNCIPWVIYTEPEIAWVGKTEQQLKAEGREIKTGQFPFMANGRALGINKADGFVKMIADAKTDELLGVHIISANASDLIAEAVVAMEFKAASEDIGRICHPHPSLSEVMREAALAVDKRALNM

SEQ ID NO: 49153 - protein, 311 aa, Burkholderia fungorum
MTASQRPRVPRRALDGVLLLDKPLGLSSNDALIRAKRLYLAKKAGHTGTLDPLATGLLPLCFGEATKFSQDLLEADKTYEATMRLGIRTTTGDAEGEAIDTREVTCDEAAIHAVLPAFIGEITQVPPMYSALKRDGKPLYEYARAGQTVEREGRQVTILKLEILACALPDVTFRVTCSKGTYVRTLAEDIGEALGCGAHLVALRRTGVGALTLENSVTLDALSDAAESERDAWLQPVDALLSTFPLVQLNEDATRRFLHGQRLKLSELTITGDAVNAPRVRVYAAQGRLLGVAKQGEGVLAPERLVVTTAG

SEQ ID NO: 49154 - protein, 701 aa, Burkholderia fungorum
MAGSLTRQVLLQLRQGSFPAQATIRAVSRRVSPACLRSISDAPLSGNRSAYQGIPESFICACYNVGFPKVRFGLCWLRTQCCFAGALNCLQVPMTRALRNIAIIAHVDHGKTTLVDQLLRQTATFRDNQQIAERVMDSNDIEKERGITILSKNCAVEYEGTHINIVDTPGHADFGGEVERVLSMVDSVLLLVDAVEGPMPQTRFVTKKALALGLKPIVVINKVDRPGARIDWVINQTFDLFDKLGATDEQLDFPIVYASGLNGYAGLTPDVREGDMRPLFEAVLQHVPVRPADPDAPLQLQITSLDYSSYVGRIGVGRITRGRIKPGMAVAVRSGPDGAILNRKINQVLSFKGLERVQVDSAEAGDIVLINGIEEIGIGVTICAPEQPEALPMITVDEPTLTMNFLVNSSPLAGREGKFVTSRQIRDRLMKELNHNVALRVKETGDETTFEVAGRGELHLTILVENMRREGYELAVSRPRVVMTEVDGVKHEPYENLTVDMEDAHQGGVMEELGRRKGEMLDMASDGRGRTRLEYRISARGLIGFQSEFLTLTRGTGLMSHTFDSYQPVKEGAVGERRNGVLISQDDGAAVAYALWKLQDRGRMFVSPGEPLYEGMIIGIHSRDNDLVVNPIKGKQLTNVRSSGTDEAVRLVPPIQMSLEYAVEFIDDDELVEVTPQSIRLRKRYLKEHERRSASRKGAVD

SEQ ID NO: 49155 - protein, 957 aa, Burkholderia fungorum
MSVKMMKQFQSNSYLFGGNAPYVEEMYEAYLDNPASVPENWRSYFDALQNVPASDGSNANDVAHGPIVESFAQRAKANAFIPRGAGGGEDLATARKQVYVQSLIGAYRFLGSQWANLDPLKRRERPAIPELEPAFYDFTEADMDQEFSATNLYFGFERASLREIVKALRDTYCGTIGAEYMYISDPEQKRWWKEKLESIRSTPNFSNEKKKHILNRLTAAEGLERFLHTKYVGQKRFSLEGGESFIASMDEVVRHGGANGVQEIVIGMAHRGRLNVLVNTLGKMPADLFAEFEGKHVDDLPAGDVKYHKGFSSDVSTEGGPVHLSLAFNPSHLEIVNPVVEGSAKARMDRRGDDSGLQVLPVQIHGDAAFAGQGVVMETLNLAQTRGYGTHGTLHIVINNQIGFTTSDPRDSRSTLYCSDVVKMIEAPVLHVNGDDPEAVVLATQLAIDFRMQFHKDVVVDIVCFRKLGHNEQDTPAVTQPLMYKTIAKHPGTRALYAEKLVQQGVITAADADEYVKAYRKAMDEGHHTVDPVLSNYKSKYAVDWVPFLNRKWTDAADTAVPLAELKRLAERITTIPENFKVHPLVERVINDRRAMGRGEAKLDWGMGEHLAFASLVASGYAVRLTGQDSGRGTFTHRHAVLHDQNRERWNDGTYVPLQNIAEGQAKFTVIDSVLSEEAVLGFEYGYSTAEPNTFVAWEAQFGDFVNGAQVVIDQFISSGEVKWGRVSGLTMLLPHGYEGQGPEHSSARIERFLQLCADHNMQVVQPTTPAQIFHLLRRQMIRLFRKPLIVATPKSLLRHKEAVSDLSELAKGAFQPILGEIDEAIDAKKVKRVVVCSGRVYYDLLAHRRESKSNDVAIIRIEQLYPFAHKQFEAEMKKYDNATEVVWVQDEPQNQGPWFYIEHHLKDGMKEGQKLAYSGRPASASPAVGYYAKHYEQQKALVEGAFGRLKSASIAK

SEQ ID NO: 49156 - protein, 384 aa, Burkholderia fungorum
MTLSITSHFDAGAIEVLSCEEAGKIRLRVRPDSHAEFAQWFYFRLSGAAGERCVMTFENAAACAFAEGWRDYQAVASYDRVNWFRVPTSYDGRVLTIDHTPDFDRIYYAYFEPYSEERHSEFLGAVQQMPQATLTELGTTVEGRPMSLLTLGTPQTGDTPKKKIWLIARQHPGETMAEWFIEGLVKRLAGWGDWAGDPVARKLYDHAVFYIVPNMNPDGSVHGNLRTNAAGANLNREWMEPDAARSPEVLVVRDAIHATGCDLFFDIHGDEALPYVFVAGSEMLPGFTERQREEQQAFIEAFKHASPDFQDKHGYAASKYREDALKLASKYIGNEFGCLSLTLEMPFKDNANLPDERVGWNGERSASLGAAMLQAILRHVETFA

SEQ ID NO: 49157 - protein, 458 aa, Burkholderia fungorum
MHLTTTLAPWSSHDTQLILSCALGLVLIIVFISALKLAPFLSILVGTFAAGFSAGLPLEAVASAFSKGAGALLGDVGIIIALGAMLGALMAESGAADRLVSTILKHSTPRTLPWMMALVALIIGLPLFFEVGLVMMVPIIFVMARRSQQPILRIAIPALAGMTTLHALLPPHPGPLIAVSALHADLGLTLGLGLIVAIPAVILAGPLYGIWLSRRMHVVEPEEMGKLFSAKQDTGEPPGFAISLITILLPVVLMLGRTVAKLLLQPETFLFNTLDFLGEPLVALGLTVLFAVVALGWSRGMARERVGGILRKSLPPIAALLLTIGAGGGLKQALVVAGISTTIGKIAVGAHMPLILLAWLIAVALRQATGSATVATTTTAGIVAPVVAGLSTTHNSLMALAIGAGSVFFCHVNDAGFWMVREYFGLQLKQTVMVWSVLQTIVSVVGLALTLVLWTVLT

SEQ ID NO: 49158 - protein, 399 aa, Burkholderia fungorum
MRDLYLAHLRDTLEQIRADGFYKNERVIASPQSADIRLADGAAVLNFCANNYLGLADDARLIDAAKQGLDSDGFGMASVRFICGTQTVHKELEQALAAFLQTDDCILYSSCFDANGGLFETLLDENDAIISDELNHASIIDGVRLSKAKRSRYKNNDLADLEARLIEAQAAGARFKLIATDGVFSMDGIIADLAGICDLADRYGALVMVDDSHAVGFVGEHGRGTPEHCGVLSRVDIITGTLGKALGGASGGYVAARKEIVELLRQRSRPYLFSNTLTPSIAAASLKVLELLASEEGAQLRARVRENGAHFRSKMSALGFTLVPGEHPIIPVMLGDAQLASKMADALLKEGVYVIGFSFPVVPKGRARIRTQMSAAHTPGQIDRAVDAFARVGRELGVI

SEQ ID NO: 49159 - protein, 361 aa, Burkholderia fungorum
MPSRASAVNSALSDTEAHMKALAKLERAPGLTLTDVKKPEVGHNDVMIRITRTAICGTDIHIWKWDDWAQKTIPVPMHVGHEYVGEIVEMGQEVRGFAIGDRVSGEGHITCGFCRNCRAGRRHLCRNTVGVGVNREGAFAEYLVIPAFNAFKIPPEISDDLAAIFDPFGNATHTALSFNLVGEDVLITGAGPIGIMAVAIAKHVGARNVVITDVNDYRLELARKMGATRAVNVSRESLRDVMADLHMAEGFDVGLEMSGVPSAFTGMLEAMNHGGKIALLGIPPAQTAIDWTQVIFKGLEIKGIYGREMFETWYKMVAMLQSGLDLSPILTHHFKVDDYREAFATMLSGESGKVILDWTAA

SEQ ID NO: 49160 - protein, 451 aa, Burkholderia fungorum
MQNRLFPHMFSDLARDFGQPVMLWQVGVLLGTLAIAWLLARLLRRALDLRRQTRYQTLRFGAESLNRAFFPLIGATLVWLARSVTGQFMHTALLDLALVPLFGIGLIYIVFFFARRVFSHDGATHPWLFLVEKIVSLVVWVGMVLTVMGIQDDVITWMASVQFRVANAHMTLLSLISGLLWVCVTMIVAMWLGSTFEDRLMRSKTLDANLKVVVARVGRAAFVLAAVLISLSLVGIDITVLDVFGGALGVGLGFGLQKIASNYVSGFIILIDRSLRIGDTINVSGLQGMVTQIRTRYTVVRGLDGIETLIPNEKLITDVVQNQSSYLTRGHAKVAVQVAYTSNVEQAMALLVQAAADVPRVLQEPAPTSYLASFGADGINLELGFWIEDAAAGTAGVRSAVNRNIWRLFSEHDISIPFAQREVRIVGNVGVGVPQPVIMTGSSADQADSAH

SEQ ID NO: 49161 - protein, 339 aa, Burkholderia fungorum
MTRLSVLDQTPVIAGHSVADAIAATVELAQLADDLGYTRYWCAEHHGLRGVSNPCPEVMLARLGSVTDHIRLGSGGVMLPYYSPFKVAEQFMMLEALFPNRIDLGVGRAPGGDMRTAQAVAAGDYNRGDIFPQQVADLLGLMHGTLPADHIAGGVLLQPQIDTRPQVWMLGSSEFGGLLAAQLGIPFAFAHFINAHFGHQVAHAYRERFKAGQDIQQAYLAAAVFVICADTEQDAADLEKAVDLRRVQMAYGLNEPIPSIEQGIAQEYGEREQLVISREKPRSIIGTPATVTERLHVLQEQFEADELIVLTVAGSYRARLRSYELLAEAFQLERPASTP

SEQ ID NO: 49162 - protein, 55 aa, Burkholderia fungorum
MAKGARDKIKLESTAGTGHFYTTTKNKRNMPEKMLIKKFDPVVRKHVEYKETKIK

SEQ ID NO: 49163 - protein, 945 aa, Burkholderia fungorum
MSNKKADSKPQSRYPVNLLDTPFPMRGDLPKREPQWVKEWQERKVYETIRAASKGRKKFILHDGPPYANGDIHLGHAVNKILKDMIVKARNLAGFDAVYVPGWDCHGMPIEIQIEKQFGKSLPAAEVMQKARAYATEQIEKQKVGFRRLGVLGDWDNPYKTMNFTNEAGEIRALAKIMEKGYVFRGLKPVNWCFDCGSALAEAEVEYKDKTDPTIDVLFSFAEPEKTAQAFGLNALPRNEGGIVIWTTTPWTIPANQALNLHPEIVYALVDTSRGLLILAQERVEACLKQYGLEGTIVATTPGAKLVNLRFNHPLASAHPSYKRTSPVYLGDYVTTESGTGVVHSSPAYGVEDFVSCKAHGMSDSDIINPVMGDGRYIESLALFGGLSIWAANPQIVEALQGAGTLMRTENYTHSYMHCWRHKTPIIYRATSQWFAGMDVKPNDTDRTLRETALEGIENTAFYPAWGKQRLFSMIANRPDWTLSRQRQWGVPMAFFVHKETGELHPRTLELLEEVAQRVEKAGIEAWQSLDPRELLGDEANMYEKNRDTLDVWFDSGTTHWHVLRGSHKDELQFPADLYLEGSDQHRGWFHSSLLTASMLDGRPPYNALLTHGFTVDGEGRKMSKSLGNGIDPHEVANRLGAEIIRLWIASTDYSGELAISEEILKRVTEGYRRIRNTLRFLLANLSDFDFAQHARPVEDWLEIDRYAVALSANLQNDILSHYEKYEFHPVVAKLQTFCSEDLGGFYLDVLKDRLYTTAADSVARRAAQTALYHIAHGLLRLMAPFLSFTAEEAWKIFEPNSETIFTETYHAFPAVPEAGALLDKWTLLRAARSDVTKALEEARVANLIGSSLQAEVEIRASGARYDALTSLGDDLKFVLITSAASVVKVDSEAEEGVEVIASKYLKCERCWHYRADVGANAEHPTLCGRCFSNLFGNGETRSAA

SEQ ID NO: 49164 - protein, 77 aa, Burkholderia fungorum
MARVCQVTGKAPMSGNNVSHANNKTKRRFLPNLQNRRIWVESENRWVRLRVSNAGLRLIDKNGIDAVLADLRARGEA

SEQ ID NO: 49165 - protein, 331 aa, Burkholderia fungorum
MRVFRGLPNAESRAPCALTIGNFDGVHRGHQALLAHVRAAADARGLPVCVMTFEPHPREFFNPAGAPPRIAMLRDKLEALRTNGVDRVVVEHFNQTFASQSPDAFVERIIVNGLHARWVMIGDDFRYGAKRAGDFASLKAAGQQHGFEVEQMATVADPSGARISSSGVRAALVAGDLDSARAALGRDYVISGHVVHGMKLGRDLGFPTLNLPIAHKRPALAGIFVVRVHGVADEPLPGVASLGLRPTVDDSGRVLLEVHLLDWHGDAYGKLVRVEFLKKLRDEEKYVDLETLTAAIARDVANARAWFAAVGAGTPGSRSTGFATSATDRIR

SEQ ID NO: 49166 - protein, 253 aa, Burkholderia fungorum
MADHATLIDEANLETAAPGPAALETASAPLVRGKWLKNDMPRERLIEQGASVLSDTELIVLILGSGLPGHDVFDVARTLLDRFGSLRAMLDATYTDFADLRGIGPAKKTQLLAIMEMARRSLVDKMRMRSLINSPEAVENYLRLRIGGRPQEIFVSLFLDARHRLIRCEESAQGTLTRMAVYPREIVRRALSLNAASLIVAHNHPSGAVQPSASDCRLTHTLRDALTLIDVQLVDHLVIGTDSVYSFARAGWP

SEQ ID NO: 49167 - protein, 137 aa, Burkholderia fungorum
MKTQRRELEKSDFEQLSEFRYQMRRFERFSEQAAQTEGITPLQYLLLLHIKGYPQRDWATIGELAERLQAQHHGIVALVSRCEALGLVKRKVSETDRRQVEVHLQKLGEKTLAKLAALHRAELKSLEGAFNVPQIDL

SEQ ID NO: 49168 - protein, 429 aa, Burkholderia fungorum
MLVQVSTDDNGGQSALAAMRCQTGASGAQAFQPQVGGSTFSVRANRALGSEKTMTGKADAGPRGNTMREAPIHTEESFRLLVEAIDDYAIFMLDASGNVVNWNTGARKMKGYEVDEIIGRHFSVFYTPEDVAAGQPGLLLAAAVAQGRVVSEGWRVRKDGSKFWANVVITTVRTPTGELRGFAKVTQDLTERKRLEEFEQLRALAAHIQAAREEEQIRIARELHDDIGQQLTALKMALAGLDSIVRDQEAGAARTAPHIADMHQLIDATVASLRRIAAGLRPVMLETLGLIPTLEWLIDDFMQRYDIAVEARIEADDMKLSEAADEGLFHIVQEALTNVARHAHADRVTIDLARDGRTCVLRVTDDGQGMTPAAPSRPTSFGLLGMRERVHHLNGTMSIDSAPGRGFRLTLIFPLDAVERKPSSPEGAA

SEQ ID NO: 49169 - protein, 392 aa, Burkholderia fungorum
MRPLDGIKVVTFEHAIAAPFCTRQLADLGARVIKIERPGTGDFARQYDERVHGLSSHFVWVNRSKESLTLDLKQAEAMQIVHALLAGADVFVQNLAPGASRRLGLDYASLSQRYERLVVCDISGYGLDGPYRNKKAYDLLIQSESGFLNATGTAHEPAKAGCSIADISAGMHAYSSILAALLQRARTGKGTHIDISMFESMVEWMSHPLYYTYGGQAAPQRHGASHATIYPYGPFAAGDGKSLMLGLQNEREWEVFCRMVIQRPELFQDPRFSSNSRRHENRRLLEQIILESFSVLKVEQIVERLDAAGIANAHMRDVSELWNHPQLGARERWTQVSTPVGPIPALLPAGMTAASQPRMDPVPGLGEHTQAILRELGYGDAQIEALQRRRTI

SEQ ID NO: 49170 - protein, 519 aa, Burkholderia fungorum
MTAPPTGQTTRRAAGLIAAQLNHQEFDMNEATARKPHPLDKLKDPSLLRTQAYVDGRSQGGAQEFAVFDPATGAEIARVPNLAAAEARQAIDAANAALPAWRALTGKQRAAMLRRWYELIVAHAADLAAIMTAEQGKPLAEARAEALYGASFVEWFAEEAKRVSGDVLASPADDRKIVVIRQPIGVCVSITPWNFPLAMITRKVAPALAAGCTIVVKPAEQTPLSALALAELAHRAGLPAGVLNVLTGDAANAIEIGKVFCESEIVRHLSFTGSTPVGRLLMQQCAPTVKKVALELGGHAPFIVFDDADVDAAVQGAMVSKYRNAGQTCVCANRFYVHDAVYERFVRQFAEASRGVKVGNGFLEGVDQGPLIDDDAVAKVRQHVDDALAKGARQVMGGRIEGRFVEPVLLAEVTHDMLIAREETFGPVAAVFRFRDEAEVTRLANDTQFGLASYFYSRDIGRVWRVAEALEYGMVGINTGLISNEVAPFGGVKQSGLGREGSKYGIEEYLQIKYLCMGV

SEQ ID NO: 49171 - protein, 342 aa, Burkholderia fungorum
MKTIPGPVMLDVVGKTLNDDDKRRLAHPMTGGVILFARHYESRAQLIALTDSIRAIREDLLIAVDHEGGRVQRFRTDGFTVLPAMGKLGTLWDSDVLHATKVTTAVGYILAAELRACGIDMSFTPVLDLNYGQSQVIGDRSFHRDPRVVTLLAKSLNHGLALAGMSNCGKHFPGHGFAQADSHVAMPIDDRSLDEILRDDAAPYDWLGLSLGSVIPAHVVYPKVDSKPAGFSRIWLQDILRNKLRFEGAIFSDDLSMEAARQGGTLTEGATAALQAGCDMVLICNQPDEAEKVLDALRFTPSKESQRRLKRMRPRGKALKWSKLVAEPQYLQAQALLRSAFA

SEQ ID NO: 49172 - protein, 297 aa, Burkholderia fungorum
MNFALILFVLVILTGVAWVADKLVFMPQRRRAAQAAVDEFDRQQARIGERFADENAAQTRARLRDDKLRQPWWLEYSASFFPVILVVFVVRSFVVEPFKIPSGSMVPTLLVGDFILVNKFDYGIRLPISNTKITEGRPLQRGDVVVFRYPKDESVDYIKRVIGLPGDTVAYQDKQLTINGKPVPETPLPDYLDDERMGYAKQFEEDLDGRKNAILNNPAVPPFIVGAEDYPYRDNCTYNARGVICKVPPGNYFMMGDNRDNSADSRYWGFAPDANVVGRAFFIWMNFSNLKRIGSFN

SEQ ID NO: 49173 - protein, 299 aa, Burkholderia fungorum
MNAPTPTGFRCGMVAIVGRPNVGKSTLMNALVGQKVSITSRKAQTTRHRITGIHTLEDAQYIFVDTPGFQTKHSGALNRSLNRAVTSTLTSVDAILFVIEAGRFGPDDQKVLDLIPPSVPTLLIANKLDRVSDKDSLFPFMQQVSALHKFAEIVPLSAKHPDDIKRLMATVKPFLPEGAPIYGEDDLTDRSERFLAAEILREKVFRWTGDELPYTSTVLIDKFETEGRLRRIFATIMVDRDTHKAMIIGQKGAKLKQISTEARLDMEKLFDGPVYLETFIKVKSGWADNEAGLRAYGYE

SEQ ID NO: 49174 - protein, 338 aa, Burkholderia fungorum
MDRKLYISDVTLRDGSHAIRHQYSIDNVQQIARALDSAKVDSIEVAHGDGLQGSSFNYGFGAHSDLEWIEAVADVVGHAQIATLLLPGIGTIHDLKAAYQAGARIVRVATHCTEADISKQHIEYARELGMDTVGFLMMSHMTTPENLAVEAKKMESYGATCIYVVDSGGAMNMNDVRARFRALKAVLKPETKTGMHAHHNLSLGVANSLVAVEEGCDRIDASLAGMGAGAGNAPLEVFIAAAERAGWHHGTDLYTLMDAADDIVRPLQDRPVRVDRETLALGYAGVYSSFLRHSEVAAKKYGLKAVDILVELGKRRMVGGQEDMIVDVALDLKRAAGV

SEQ ID NO: 49175 - protein, 540 aa, Burkholderia fungorum
MTQNSLPSWSSLQTHYEKIRDAHMRDWFAPENDPAPTRAERFAFAGGGLAADFSKNRITDETLKLLVQLAREAGVEKRRDAMFAGAVVNPTEGRAALHTALRATDPKAPFYDQVQAERARMAAFADQVRSGEWKGYTGKRIRYVVNIGIGGSDLGPKMVVHALHHLATPEITTHFVSNVDGADLYNVMQQIDPEETLAIIVSKTFTTLETMTNARSLRDWFVEKGCPESALAKHFVGVSANPAEVVKFGIAKENVFEMWDWVGGRYSLWSAVGLSIMIAVGPQQFGELLAGANEMDQHFRDAPLEKNLPVLLGMIGIWYRNFFGSQSYLVAPYSEALHFLPSYLQQLEMESNGKSARLDGVMVDYPTAAVTWGEPGTNGQHAFFQMLHQGPTIVPIDFIAVLTPEHPLVSHHPKLLANCFAQSEALMLGRTLEEAKKVAGADKPELAPHLVFPGNRPTSTLLVDALTARSLGALIALYEHKVLVQASVWDINPFDQWGVELGKILGKVVEADLTAPSVDEKKHDSSTSALIARARAALKK

SEQ ID NO: 49176 - protein, 176 aa, Burkholderia fungorum
MKFLFDLFPIILFFVAFKIWGIFTATAVAIVATLVQIAWVAFRHRKVDPMLWVSLGVVTVFGGATLVLHNDTFIKWKPTVLYWAFSVALIVSQLAFNKNLIEAMMGKQITLPHAIWGKLNVVWGVFFVLLGLVNLFVAYNYTTDQWVNFKLFGATGCLVVFIVGQSLWLSKYMKEE

SEQ ID NO: 49177 - protein, 224 aa, Burkholderia fungorum
MTSHATALTTACGCAVMAATLFSASFAARAANAPEPARPVIVVLGDSISAEYGLPRDTGWVALMRQRLTDERIDYSVANASISGDTTSGGRARLPALMQRLKPSIVIVELGANDALRGVPLSTTEDNLRTIIEQAQQGHAKVVLVGMYVPPNYGPDYTQKFHGLYGELSKQLRVPLVPFLLAGIADKPDMFQADQIHPTQQAQPVLLNNVWPAVKPLLRTSSPH

SEQ ID NO: 49178 - protein, 752 aa, Burkholderia fungorum
MIGTATAERQLKLIDSELNDDNAHQPVDMPMEVLLGKAPRMHRDVKRVERKLEPVDVTGLVLADVATSVLRHPTVASKSFLITIGDRSVGGTTARDQMVGPWQVPVADVAITTMDYAGFRGEAMTMAERTPLAVIDAPASGRMAVGEAVTNIAAAPIASLDKLKLSANWMAACGAAGEDAALYDTVKAIGMELCPALGISIPVGKDSLSMRTKWEDRGVAKEVVAPVSLIISAFAPVEDVRRHLTPQLRRASDVGESVLIAIDLGRGKHRLGGSILAQVTQQVGDTVPDVDDPEDLKRFFAAIQALNQDGKLLAYHDRSDGGLWATVCEMAFAGHVGVSLNVDMLVLDPNHESDYGDAKDWAKQTSGRREDRTIRALFTEELGAVVQVRASERDAVLVALREHGLSACSHVIGKINERDTIEIYRDAKKIYEAPRTELHRTWSEVSWRISRLRDNPACADAEYDALSDAADPGIAPVLNFDPTEDVAAPFVGRSARPRVAILREQGVNSHLETAYAFDRAGFDAHDVHMSDLLAGRANLADFAGAVACGGFSYGDTLGAGEGWAKAIRFNAQLADMFAAFFGRADTFALGICNGCQMMSSLASMIPGAEAWPKFTRNKSEKFEARFSLVEVQASPSIFFNGMEGSRIPVAIAHGEGYADFSQQGDASKVAVAMRYVDHRGQATEQYPFNPNGSPNGITSVTTPDGRFTVLMPHTERVHRAVQMSWHPEGWGEGGTDASPWMRVFQNARRWLG

SEQ ID NO: 49179 - protein, 353 aa, Burkholderia fungorum
MSSAANLPSPSPSPPIRTDVLIVGAGPVGLFAAFEAGVIGLSCQIVDGLDKVGGQCIELYPDKPIYDIPAIPSCTARELVERLLAQCRPFDPPIHLEQRVESVEQGGDGRWTVRTDRGLVFDVAAILLAAGNGAFVPQKLALAEAVPLESRHVHYSVPRLADFAGKTVVVAGGGDSALDWALALRKVARRVTLVHRRSGFSAADSSVESMRRAVEAGEMDFVVGAIAGLDVEDDALKSITLRHIEGETQLAAEHLVALYGLVADLGPIAQWGLSIHGGRVDVDTSNYESSRPGIFAVGDIAHYPNKQKLILSGFHEASLALRKAYSYAYPEKKRVHVHSSYDAKLAEKVSAAG

SEQ ID NO: 49180 - protein, 312 aa, Burkholderia fungorum
MDTLQNMRVFVRVVEAGSFTGAAQHLNTTTAYASRAVSDLEAHLRTRLLNRTTRRIALTEAGERYLQRCEQILAYVDQAEAEAGDAHARPSGKLKVHAMTSFGQHYVVPAAGRYQQRYPDVHIELTLAQRMPDLLDEGFDVSLTLATGLPDSGLVSQRLGSAFSIACASPAYLELHGVPQTPADLARHTCLQMVTPVFPTDKWTFDGPNGEETIALGPTTFQVNVAEAMAVAVSSGMGVGLIPIYSAISGLRSGELVWLLPEYTSQEMNLYALYPSRQYLDAKIRTWIEFLRDVLPATLAADQAELREFARA

SEQ ID NO: 49181 - protein, 251 aa, Burkholderia fungorum
MILYEYPFNERIRTLLRLEDLFERFTFFLTQEDAREHHVALTTLFEISEVAGRADLKSDLMKELERQRQTLAPFRGNPGIEQNALEAVLGEIEQTLSGLSQMQGKTGQHLADNEWLASIRSRAIIPGGTCKFDLPSYYAWQQLHPDQRRQDIAKWVTPLLPLRDAATIVLRLARESGQASKVMAMQGSYQQMLSGRSYQLMQVRVAPELRVIPEASANKYMLWVRFTVQDGDLRPRAVDVDVPFQLTLCSL

SEQ ID NO: 49182 - protein, 380 aa, Burkholderia fungorum
MVLKNLIKARKTHEPTLSDDAQLVSSGLLPGFEALPTVVLVLEKRTLRVAFANPSAESMLELSRRQLTQMAWPHIFSNADELVATISAIAAHRFHATHLDAVLERPGHEPLHVHAIVGFLESAQDYVLLELFENERHLRTDREERINDLTAVNKQLIRNLAHEIKNPLGGIRGAAQLLEFELGERQRDELREYTQVIIKESDRLQTLVDRLLEPHRHPHIVGDVNIHEVCERVRQVILAEFPRGLTIERDYDVSVPDLRGDKEQLIQALLNIVRNAAEALRERISQGDARIELRTRVARKITVSKRLCKLALDLHITDNGPGIPEEIRDRIFYPLVSGREDGSGLGLTLAQTFVQQHDGLIEVDSRPGHTEFQILLPLDC

SEQ ID NO: 49183 - protein, 556 aa, Burkholderia fungorum
MLRKSARGIAWWCETIGSARTFLSRSIVSAGAFDCQPDTCSSLPCHFLAINRGGPTQPVLRTHVASYKHYREEIIVKRSGAHRARVWFVCAALAGTPIFTGLATPGVVHAQGVSKMSNQQLDSLAAPIALYPDALLAQVLMAATFPQDVRAAAAWSRSNSRLQGDDAVRAVASEPWDPSVQSLVAFPQVLATMASKSDWVAQLGSAFLAQPGDVMDSVQRLRRQAQAAGNLKTSAQQTVVVEQSTIQIVPANPQVVYVPTYNPTVVYGVWPYPAYPPVYVPPPPGYTIATSFMAGLAFGTGIAVANALWGGFNWNSHDVNINVNRYNTINVNNRLNVNGSTTNWNRNTDVNRNFNHANFDRNLNNVGGVQRDAYRGRDNARAQAQQTLQNRTGQNLGGTASQRVQGIHQGGTANPDLQHRAQNVNRDNALRGAGDGNTARRDTQRGQASRDAFANRRTQQHTGRDYGTNAGGQPRTHGGLGADGGGQQRAMGGIGANGGGQQRVPGGIGADGGAQQRAPGGIGANGGGQHGGGAGNWGGGALGGGGAGERHFGRNR

SEQ ID NO: 49184 - protein, 448 aa, Burkholderia fungorum
MTDTRAKEQHVSVPVSAFDEDKFESGHAFDGSSIAGWKGIEASDMLLVPDANTAFIDPFYEESTLVLTCDVVEPADGKGYERDPRSLAKRAEAYLKSTGLGDTAFFGPEPEFFIFDSVKWGTDQSGTFVKIGSEEAPWSSALDFEGGNTGHRPGTKGGYFPVAPVDTFQDIRSEMCLLLEQIGIPVEVHHHEVAGQGQNEIGTKFSTLVQRADWLQQMKYIIHNVAHTYGKTATFMPKPVVGDNGSGMHVHQSIWKDGTNLFAGNGYAGLSEFALFYIGGIIKHARALNAITNPSTNSYKRLVPHFEAPVKLAYSARNRSASIRIPHVSNPKGRRIETRFPDPMANPYLCFSALMMAGLDGVQNKIHPGEAADKNLYDLPPEEDAKIPTVCAGLDQALDSLDADREFLTRGGVFTDSMLDAYIELKTGELQRYRQSVHPIEFEMYYSL

SEQ ID NO: 49185 - protein, 341 aa, Burkholderia fungorum
MTLPSDTSALGREGRYAGLRARVFSPTALQKLLAFASLLLMLIFFSFASPSFMQMDNMLGILQATAVNGVLAIACTFVIITGGIDLSVGTLMTFTAVICGVFLSSWHLPMWTGVVAAIGTGAICGTVSGTLTAKMKIPPFIATLGMMMLLKGLSLVVSADKPIYFTDTENFYRISQDSLIGYIVPSLPIPNAVLILFFLAVVSSITLNRTALGRYTFALGSNEEAVRLSGVNVDRWKIAIYGLSGAICGIAGLLIASRLNSAQPALGQGYELEAIAAVVIGGTSLSGGSGTMLGTIIGAFIMSVLTNGLRIMSVAQEWQIVVTGLIIILAVYADILRRRKS

SEQ ID NO: 49186 - protein, 612 aa, Burkholderia fungorum
MGALRRAAGDSSAHRAMHCRSLDYRVPHALTFCFFRPSMTHAFLTSLARRVFHAARRPGFPSASDTPNVSTPRLPHLPHLPHLPHLPRLPRRFAPRASGWLLACVALGCGASLPLAAQARVKATHPSVNVTTVLPPSVMAGLQRAHVPLTSISVVVEKVGDRTPIVALNAGKPMMPASTMKLVTTYSGLSILGPEYRWRTSAYADGTLDANGVLHGNLYIQGTGDPKLVPEELIDLVQKIHKTGINGIDGALVLDKRYFDPSTRDLPPFDDDATAPYNVGPDPLLYAFKSLSFTLTPSPDGSVAIDVLPALAQLQIDNQMHAVNGPCRGDAASVSPTVTPQPNGTVVASFDGDYSVRCGPRTINVAVLDHSAFFAGGFLALWQQTGGTFSGATREGAVPVGAKLVATHQGPMLSDIVRDINKFSNNTMARNLFLTIGATEEKGPATPAKSARAIEAFLRRDSINMEYLTLDNGSGLSRDEHITALALADLLQRANASPVAQVFVESLPIAGVDGTMRNRLTNQGAGGNAHIKTGTLRDVRAIAGYVASADGNSYVVVSLINDPHSEAARAAHDALLEWVYQGPSQGFTKVSDPVVEPRSSKPRKNPHQRGAH

SEQ ID NO: 49187 - protein, 333 aa, Burkholderia fungorum
MFNVHNRSYLTLIEYTPRQIRYLLDLSRDLKRAKYAGTETPRLNGKNIALIFEKTSTRTRCAFEVAAHDQGAHVTYIDPNGSQIGHKESMKDTARVLGRMYDAIEYRGFGQEIVEELAKYAGVPVYNGLTDEFHPTQMLADVLTMHEFSDRPIHDIAYCYIGDAHNNTGNSLMIVGAKLGMDVRLCAPRCLWPHDELIEQCRAIAATTGARLTLTEKPEEAVKGVDFIYTDVWVSMGEPFEKWGARIEELLPYRVNAALLAASGNPRVKFMHCLPAFHDSNTHVGKQIADQYGLPNGVEVTDDVFESDASIVFEQAENRLHTIKAILVATLTG

SEQ ID NO: 49188 - protein, 384 aa, Burkholderia fungorum
MKDEVDPARSGIVSSRPHFPSDESFRLLVEAVDDYAIYMLDMSGKVVNWNAGAQRMKGYYADEIIGQHFRVFHTPEDIAAGQPDSLLAAAAADGRVASQGWRVRKDGSKFRANVVVSAIRTASGELCGFAKVTQDLTEQNRLAEFEQLRRLATHIQATREEEQIRIARELHDDLGQQLAALKMALADLETILRDNGAIAALTLTHTKDMHHLIDVTVASLRRIAAGLRPIVLETLGLVPALEWLIGDFTQRYHIDVNARIQTDDMNVSEAASEALFHIIQEALTNVARHAHADEVTVELARGGRTCVLRVEDNGQGMASATLPRETSFGLLGMRERVHRLNGSLSIDSTPGCGFRIAITFPLETLERVPPGRPGTSAPSVSPSY

SEQ ID NO: 49189 - protein, 158 aa, Burkholderia fungorum
MNENDAIIVTLGSMTEASSTGDMDRAPVRNGKTNGGAWTLWERIASSRPEFGRPSTFADHIADSKWASFTNTLSDTAFFRLVRDFTGNVPREGSLVTFAESGWLASIVLPHQPQSIDQPDDVASLLGLRPVRRAAWGLCEKADGRFNGSLQHLPINIE

SEQ ID NO: 49190 - protein, 198 aa, Burkholderia fungorum
MKQPSALSALVEALRALPGVGPKSAQRMAYHLMQHDRDGAEKLGRSLLFATEHLQHCEKCNTFTEAQICEVCLDEERDPTLLCVVETPADQIMLEQTMTYRGLYFVLMGRLSPLDGIGPKEIHFDRLVRRASDGVVKEVVLATNFTNEGEATAHYLGQTLKARGLAVTRLARGVPVGGELEYVDAGTIARAMLDRRSM

SEQ ID NO: 49191 - protein, 395 aa, Burkholderia fungorum
MEMTDVVIVSAARTAVGKFGGSLAKIAAPDLGAAVIRAVLERAGLKPEQVSEVILGQVLTAGSGQNPARQSLIKAGLPSAVPGMTINKVCGSGLKAVMLAANAIIAGDADIVIAGGQENMSAAPHVLPGSRDGFRMGDAKLVDSMIVDGLWDVYNQYHMGVTAENVAKEYGITREQQDAFAALSQNKAEAAQKSGRFDDEIVPIEIPQRKGEPLRFATDEFVRHGVTAESLAGLKPAFSKEGTVTAANASGLNDGAAAVLVMSAKKAEALGLTPLARIKAYANAGVDPKVMGMGPVPASRRCLERAGWTPADLDLMEINEAFAAQALAVHQQMGWDTSKVNVNGGAIAIGHPIGASGCRILVTLLHEMQKRDAKKGLASLCIGGGMGVALAVERA

SEQ ID NO: 49192 - protein, 206 aa, Burkholderia fungorum
MARGKFITFEGIDGAGKTTHLSWFRERLEQKVASTGRSVVMTREPGGTPLGEQIREIVLHQKMDLETEALLMFALRRQHLAEVIEPALARGDWVLSDRFTDATFAYQGGGRGLPRDKLETLERWVQGGFQPDLTVLFDLDPEVASERRSAARDPDRFESESEAFFSRTRAEYLRRAEEAPYRFAIIDSAQSIAQIQRRLEELIAIL

SEQ ID NO: 49193 - protein, 361 aa, Burkholderia fungorum
MNTPLATASGTPTGSPSGTAPAAIAAAPAGLPTLPRPGADEFDAVVAHGAYMPLTQFGVIDATGDDAASFLHGQLTNDTQHLDAASARLAGYCSAKGRLLASFLTWRSGDTIRLLVSKDVQAAVQKRLSMFVLRAKAKLTDASGELAVIGLAGDVRKALSGVFDALPDGVHVKVDGAAGSLIRVPDALGRLRYLWVGPKAQIESQLALLDETLKRVSPAVWDWLDIRAGEPRITQPVVEQFVPQMVNFDVLGAVNFRKGCYPGQEVVARSQYRGTIKRRTSLATVAGEPDTVRAGAELFHSDDPGQPCGMVVNAASAPEGGVDVLVEIKLAALENGSVHLGAATGPALRFLALPYGLPTEV

SEQ ID NO: 49194 - protein, 337 aa, Burkholderia fungorum
METIAMSQINRQLVLASRPQGAVTPDNFRLVEAPLAPLADGELRVRNHYLSLDPYMRGRMNDSKSYAPPQPLNEVMIGGTVGEVVESKNPKFAVGDKVVAMFGWQEYGTSNGTGLQKVDDTHVPLSAYLGPVGMPGVTAWYGLNRIIAPKAGETVVVSAASGAVGSVVGQLAKLAGARAVGIAGGADKCRYVTGTLGFDACVDYKAGNLYQDLKAATPNGVDGYFENVGGEVLDATLARMNPFGRIALCGFIAGYDGQPVPLRHPSLMLTQRLLVQGFIVSEHMDVWPEALKRLGTLVAQKKLHYRETIAQGLDAAPEAFMGLLKGKNFGKQLVKLI

SEQ ID NO: 49195 - protein, 263 aa, Burkholderia fungorum
MFVDSHCHINFEGLAERLPQVLENMRSHSVTHALCVSVDLETLPAVLDIASRYENVYASVGVHPDHEHMREPSVAELVELAAHPKVVAIGETGLDYYRLEGRTIADMEWQRERFRNHIRAAHATHKPLIIHTRSSSADTLRIMAEERASEPGGVMHCFTEPWPVAEQALAQNFYISLSGIVTFKSATDVQDVARRVPLERLLIETDSPYLAPVPYRGKPNEPAYVSYVGRFIAQQREMPEAALAAATTQNFFRLFKIPAPTGA

SEQ ID NO: 49196 - protein, 182 aa, Burkholderia fungorum
MSYEIIDATLLDPVARPLLDALQVEYATRYREFRPDSAASASEELVRYPAELFAPPEGAFIVIVLDGETVGGGAFKRYDATTAELKRIWTRADQRRQGVARRIVTELETRARRQGYRRIYLTTGFRQPEASGLYLNTGYEPLFDRSIAPEIHFRLPFGKDLLEPGRTDSLDDLRQSEPLGQP

SEQ ID NO: 49197 - protein, 128 aa, Burkholderia fungorum
MFGKIVAHWLTGGLAQVLLAPVVALQYELGWRATLPLMGSLLLGTPLLSLIGSMGAALTLGVRGGGVTLALVILPLYVPVLIFGVSASDPGTSAAWSKANFSLLGAALCAAGLLCPWASAVALRIALE

SEQ ID NO: 49198 - protein, 380 aa, Burkholderia fungorum
MHIGVPAETRAHETRVAATPETVKKYVTQGHRVTIQSGAGTGASFPDDAFTAAGAEIVDAAAAFGADLVLKVQSPTDAELPLLKRGAVLVGMLDPFNTENSSKLAAAGVTAFALEAAPRTTRAQSLDVLSSQANIAGYKAVLLAATLYPRFMPMLMTAAGTVKAARVLILGAGVAGLQAIATAKRLGAVIEASDVRPAVKEQIESLGAKFLDVPYETDEEREAAQGVGGYARPMPPSWLTRQSALVHERARQADVVISTALIPGRAAPTLISVETVQAMKPGSVLVDLAAGRGAEYEGRRGGNCPLTEADQVVIRHGVSIVGYTNLASMVPADASSLYARNLLDFLKLIITKEGALNIDLADDIVAATLLARDGEVARKA

SEQ ID NO: 49199 - protein, 252 aa, Burkholderia fungorum
MRFIRSLLLLIYFVLFTVPYATACFIAFPFMRADKRYWMAAGWCRATLHTVRWLNGIRYRIEGMENLPDGPAVLLSKHQSAWETLAFPALMPRPLCYVFKRELLYVPFFGWALGLLKMVHIDRKEGKYAFESVIKQGKARMAEGAWVIMFPEGTRTRTGTQGKYKTGGARFAIATGAPVVPIAHNAGRVWPRNSFLKYAGIVTVSIGKPIETTGLTPDEVNTRVERWIEAEMRRIDPTAYRAAESSSAAAPI

SEQ ID NO: 49200 - protein, 699 aa, Burkholderia fungorum
MTQPHQATLLVELLTEELPPKALARLGDAFAEGIAQRLAARDLVEGELSFERYATPRRLAVTIKNVRAVAPEKHVREKVLPVSVALDKDGQPTAPLAKKLAALGFPDFSVNDLERAQDGKAEAFFLRYAAPGATLAEGLQSALDETLARLPIPKVMTYQRPDGTNVQFVRPAHRLIALHGEQIVPVSALGIDADDTTLGHRFLSEGFVQIQHADSYAETLLHKGRVVANFSDRKETIRTHLLAQANGDQVVMPESLLDEVTSLVEWPVVYACRFEDEFLQVPQECLILTMQTNQKYFALTDANGKLRSRFLIVSNIETSTPGDIVEGNERVVRPRLADAKFFFEQDKKKTLADRVPLLANVVYHNKLGSALQRVERVEALAGAIAGLIGADVALAKRAARLAKADLITDMVGEFPELQGTMGTYYARHDGEPEEVALACSEHYQPRFSGDALPATATGTVVALADKLETLVGIWGIGLQPTGEKDPFALRRHALGVLRILVEKQLPVDFVELLRNAYAQFAAVPNVVDSTQAIYEFSMDRLRGLLRERGYAPGEIDAVLALNPTRLDDIVARLDAVREFASLAEAASLAAANKRISNILKKSEGAATGGVQVTLLVEAAEKALHAQLEQVAPRVQSQLAARDYTGALTALAALREPVDTFFNDVMVNAEDPALRANRLALLGALHQQMNCVADISRLAA

SEQ ID NO: 49201 - protein, 528 aa, Burkholderia fungorum
MWCAAALFAVCAAFAATHHISWFWIIVPLALVALGLFDLTQQRHAILRNYPLWGHFRFLFEFIRPEIRQYFVEGDTDEKPFSRAQRSIVYQRAKNDVDSRPYGTELDVKAVAHEWISHSLAPTRLDSHDFRIVVGPDRAQPYSMSIFNVSAMSFGSLSANAIMALNLGAKKGNFAHDTGEGSMSKYHREHGGDIIWEIASGYFGCRNEDGTFSAEKFAKQAAEPQVKMIEVKLSQGAKPGHGGVLPAAKITPEIAETRGVPMGRDCISPATHSEFSTPRGLLEFVDRLRTLSGDKPTGFKLCIGHPWEFFGIAKAMLETGILPDFIVVDGAEGGTGAAPLEFTDHVGVPLQEGLLLVHNTLVGIGLRQRIRIGASGKMITAFDITKTLAIGADWVNAARGFMFAVGCIQAQTCHTGRCPTGVATQDPVRQRALVVPDKADRVFNFHHNTLHALKEIIQAAGLKHPAELRAHHIVRRVSSHEVQLMSELLKYLDPNDLLNGNYRYSLFEKYWPVAQSDSFSPKVELAAT

SEQ ID NO: 49202 - protein, 381 aa, Burkholderia fungorum
MSKQKVVVGMSGGVDSSVTAWLLKEQGYDVVGLFMKNWEDDDDSEYCSTRQDWIDVVSVADLIGIDVEAVNFAAEYKDRVFAEFLREYSAGRTPNPDVLCNAEIKFKAFLDHAMSLGAQTIATGHYARVRENNGRFELLKALDHTKDQSYFLHRLNQAQLSKTLFPLGEIPKTRVREIAEQIALPNAKKKDSTGICFIGERPFRDFLNRYLPTKPGPMKTTEGKVVGEHIGLAFYTFGQRKGIGLGGSKDGSGEPWFVAGKDIPSNTLYVAQGHDHPWLLSHTLSAGNTSWVAGEPPADGFACGAKTRYRQADAPCTFSSAGAGEGLFELNFDVAQWAVTPGQSAVLYDGDVCLGGGIIEHAVTGQPATRQPQKAALLTAR

SEQ ID NO: 49203 - protein, 339 aa, Burkholderia fungorum
MASIDSTTPASTTALPPRSLAARLGITSVTRDELRQRYTQSGSRFVKIMGADVHYVDEGSGDIIVMIHGFASSLHTWNRVADELKREHRVIRLDLPPFGVTGPLRSSSGAIETMDLPTYRRFIDTFMQALGISRATLIGNSLGGLISWDYAARHRDAVERLVLIDSAGFPMKLPIYIGLFNSALVRVSSPWWLPEAIVKSAVRNVYGDPRKIDAVTLRRYVEFFHGEGTRAAIGKMVPTLDFRQVDTNVLKTFDVPALVLWGAKDRWIPTAHAAEFASRIPGAKSVMYAGLGHIPMEEAPERVMVDLRAFLGIRPAHSAAAEQAQQPPQKFAEHHDQLP

SEQ ID NO: 49204 - protein, 530 aa, Burkholderia fungorum
MLSTANITMQFGPKPLFENISVKFGGGNRYGLIGANGCGKSTFMKILGGDLEPSSGNVMLEPNIRLGKLRQDQFAYEDVRVLDVVMMGHAEMWAAMTERDAIYANPDATDDDYMHAAELEAKFAEYDGYTAEARAGELLLGIGIAIENHNGPMSNVAPGWKLRVLLAQALFSKPDVLLLDEPTNNLDINSIRWLEDVLNQYNSTMIIISHDRHFLNQVCTHMADMDFGTLKVYPGNYDDYMLASTQARERQQNANAKAKERVADLQDFVRRFSANKSKARQATSRLKMIDKIKIEEFKPSSRQNPFIRFEYEKKLHNIAVVAEKISKKYERTIFNDFSISVQPGERIAIIGENGAGKTTLLRSLLGKLELDHGTVKWAENANIGYMPQDTYEEFPDDVTLMEWIDVYRKEGDDEQMVRGTLGRLLFNADDIRKSVKVLSGGEKGRMIWGKLMLGRHNVLLMDEPTNHMDMESIESLQIALDKFEGTLIFVSHDREFVSGLANRIIEVKTDGTLNDFGGNYEDFLLSQGVQ

SEQ ID NO: 49205 - protein, 244 aa, Burkholderia fungorum
MASDTQPAAQPVQPAVQPPAQAARPASRAQPPASSAAARRPAAGARWIVPVKIAVFIAAWYPLARIVLFGLTDRLGANPIEFITRSTGLWTLVFLCITLAVTPLRRLTGVAAFVRFRRMLGLYAFFYATLHFTTYLWFDKWFDVAEIVKDIGKRPFITVGFAAFVLLIALAATSPRAMVRKLGRRWQMLHRSIYAIGALAILHFWWMKAGKHDLILPKIYGAIMVALLGWRLVVWLRDRMSKAH

SEQ ID NO: 49206 - protein, 134 aa, Burkholderia fungorum
MAKASNNSAAQRVRKKVKKNVAEGVVHVHASFNNTIITITDRQGNALAWATSGGQGFKGSRKSTPFAAQVAAESAGRVAMEYGVKNLEVRIKGPGPGRESAVRALHGLGIKITAISDVTPVPHNGCRPPKRRRI

SEQ ID NO: 49207 - protein, 207 aa, Burkholderia fungorum
MARYIGPKAKLSRREGTDLFLKSARRSLADKCKLDSKPGQHGRTSGARTSDYGTQLREKQKVKRIYGVLERQFRRYFAEADRLKGNTGENLLQLLESRLDNVVYRMGFGSTRAEARQLVSHKAIMVNGVVSNIPSMQVKAGDVVAVREQKKKQARILEALSLAEQGGLPSWVAVDSKKFEGTFKQKPERSDIAGDINESLIVELYSR

SEQ ID NO: 49208 - protein, 325 aa, Burkholderia fungorum
MQTSLLKPKIIAVESLGESHAKVVMEPFERGYGHTLGNALRRVLLSSMIGYAPTEVTIAGVVHEYSTLDGVQEDVVNLLLNLKGVVFKLHNRDEVTVTLRKEGEGVVTAGDIELAHDCEVINPDHVIAHLSKGGKLDVQIKVEKGRGYVPGNVRRYGEESAKIIGRIVLDASFSPVRRVSYAVESARVEQRTDLDKLVMNIETNGVISPEEAIRQSARILVDQLSVFAALEGTEATAEAPSRAPQIDPILLRPVDDLELTVRSANCLKAENIYYIGDLIQRTENELLKTPNLGRKSLNEIKEVLASRGLTLGMKLENWPPAGLDK

SEQ ID NO: 49209 - protein, 130 aa, Burkholderia fungorum
MRHRHGLRKLNRTSSHRLAMLRNMSNSLIEHEVIKTTLPKAKELRKVVEPLITLGKKPSLANRRLAFNRLRDRDSVTKLFEVLGPRYATRPGGYLRVLKFGFRVGDNAPMALVELLDRPEVEEVEVQEAE

SEQ ID NO: 49210 - protein, 332 aa, Burkholderia fungorum
MSFYPHYRPRRMRRDDFSRRLMRENILTTNDLIYPVFIVEGTNVRQAVPSMPGVERVSVDLLMGVAEQCVELGVPVLSLFPAIEPSLKTPDGREATNPAGLIPRAVRELKKNFPELGVLTDVALDPYTSHGQDGVLDEAGYVINDETVEILVEQARAQAEAGVDIVAPSDMMDGRIGAIREMLESEDHVHTRIMAYAAKFASAFYGPFRDAVGSATNLGKSNKMTYQMDPANSNEALREVQADINEGADMVMVKPGMPYLDIVRRVKDEFQFPTYVYQVSGEYAMLKAAAQNGWLDHDKAMMESLLAFKRAGADGVLTYFALDAARILRSQK

SEQ ID NO: 49211 - protein, 517 aa, Burkholderia fungorum
MRRLSVHRQAQDSVTTTSTSHDAVPVPRGTLMIQGTTSDAGKSTLVAGLCRLARRAGVRVAPFKPQNMALNSAVTVDGGEIGRAQALQAVAAGIAAHTDLNPVLLKPTSDRGAQVIIHGKARMNLDARAYHDYKPVALEAVLQSYARLQAAYDTIFVEGAGSPAEINLRDRDIANMGFAEAVDCPVVLVADIDRGGVFAHLTGTLACLSPSEQARVRGFIINRFRGDLSLLQPGLDWLEAKTGKPVLGVVPYLHGLTLDAEDMLPPELRAAHSGGAARMLRVVVPVLPHISNHTDFDALRAHPQVDFHYVRSGTPPPPADLIILPGSKNVPGDLAFLRAQGWDAVLQKHLRYGGRVIGICGGMQMLGREVADPHGVEGAPGASAGLGWLDYSTVLTRDKTLKNVTGHLALPGAPEVAGYEIHMGETRGPALDTPALQLGDAQDARPDGAISADGQILATYVHGLFDTPAACAALLAWAGLSDAEAIDYPALREASLERLADTLAEHLDLAKLFAAIG

SEQ ID NO: 49212 - protein, 1435 aa, Burkholderia fungorum
MTTDVSAQPPAQPPGAHPPGQQPPPEGPPPRRRLGRLLLKTLAWTVAVVVLLLALAAGLLYGALTTERGTAYAWQAAVKLLGGKLSGTLESGALANGLQLRQVRWRSLDGSGTDIQIDRVAGRWALARQPWRFTVDYLHVGTVDARIGASSSGSGPMKLPQDLRLPIQLDIRDVQVDKLLLHQGASTTEFSRFVFHGRSDGRHHEAAIERLDTPFGAVTAAARLDGVRPFPLSGDIGYSGKVNNEAVQVGGHLSGSLENLIAELDASGMKLAGHARVEAEPFGDVPLRRATLTFDHINPQAFSPGAPQADLAVRAELQPVGQGVAGADAAGASAADTASAAQHAIAASGGHSAQPHASGKSTAGFAVAGHVSIVNARPGAIDQNLLPLIDAKADVRLDAETQRISNLNVRLVKSATLTGGGALSGKHGQFDLQVAGLDLNALQATVRPTQLSGPIGVRLNDDVQSVTLDLVDPKAALRAQGKITFDPARMSFNDVRITSGKGRIDLSGALKHDANSTYNLKAQLTDFDPLTLASQMPSRTPVAGPAPAASTARKSGTAQAAAQAGSTAGAKSAAPADKAAAAVKNTAKAAVRAEVVQRKTPAPKRGAPPARKIEARVNGTLTAAGMLGPVFTTRADFKLGPSVYDGLPLTGSGTVQLAGSRILPSRANLSVAGNQVDLQGSFGARGDRLKFRVDAPELERLGFGLAGLVAADGDITGSFAHPNVVLNYKADSVVFSSNRIGHAEGHAELRDGANGALVFTTDARNVSTGGVDLSTLTARLSGTRANHTLEAAATGKLQDRPLDLTLAANGKLTEAREGTRWDGTVTRLQNRGTPSFNLESPLAVSAGPQRLTLGATKLTLEGAVLSLKTFAFDHGKIQSAGSLTDISAVRLQDLRRQITGEPPIVKTDLVFDGDWDFTLGSTASGHIQLKRRSGDVTVEIGRGLASLGISDITARAEFSGGNRLNATVHAQASRIGVIDADAHTTLVMRDGFLTVSEEGALTGNVNANVPSLKTTGGLFGPSYLLDGHLALKLALGGTVAKPNLTGSLLGDGISATMVDQGVQLKDGVVRIALSQNLVDFQQVEFHGASGTLRATGRVRLDGAQPDLTASIVADKLELFAAPDRNLSLSGSATVANGGTLGGMEINGKFVVDHALFDMPEQSAPKLGDDVVVVRPDGSVAGERPRPVAGTNRPIGPFAPRANIDINLGNSFRFRGQGADLGLSGTITAMSAPNLPLRAVGNVLVTPGSTYTAFGRKLNIENGFFTFNGPVANPGINILAMRRNQQVEAGVQVTGTVQFPTAKLVSEPNVPDNEKLSWLLFGHGTDQGNNLGQQSTMTTALALLGSASGKRIAQTFGLDEFSIGRSEVGLTDPQVVMVSKAINEWLVIGYEQGLQSASNAIKATVNLTRYWSVAAYGGTFDGLDLLYTRRFDRIRW

SEQ ID NO: 49213 - protein, 459 aa, Burkholderia fungorum
MLGIQGLLARLVDVILIVAGALLASHIRFEDLTQTRVDGAFITFSVALALVSFPVFGLYESWRGRSLLRLSGQVSLAWLLVQAGGLVLMFSVHRTDMISRLWFIYWTATSAAGLIGSRLVLHSVLRSVRHAGMNLRNVAVVGGGVHCREVVSKVQASPASGFRMSALFEVGAGEVFAPKGIPVFENFGKFSEYVRNSAIREIWLALPLSEAPTMLRFVNEFREDLVNIRFIPDVRSMALFDAGVVDLIGAPAISLVASPLPARAMVQKEIFDRLFAALALLALTPLLLIIAIAVKCSSRGPVFFTQFRKGADGQVFRIYKFRSMRAHAEKAGVVTQATKGDPRITRVGALLRRTSLDELPQFFNVLRGEMSVVGPRPHAIEHDEMYQKVVDGYIHRYRIKPGITGWAQVNGFRGETDRLEKMQKRVEHDLYYLQNWSFGLDMRIVIATMVKGLASSNAY

SEQ ID NO: 49214 - protein, 293 aa, Burkholderia fungorum
MLKVTKAVFPVAGLGTRFLPATKASPKEMLPIVDKPLIQYAVEEAMAAGITEMIFVTGRSKRAIEDHFDKSYEVEAELEARGKDKLLQLVRSIKPSHVDCFYVRQPEALGLGHAVLCAEKLVGDSPFAVILADDLLYGSPPVMTQMIEVFDHYHSSVIGVEEIPAQDTKSYGIVDGKEWEQSIIKMSGIVEKPEPSAAPSNLGVVGRYVLKPRIFKHLRTIKPGAGGELQLTDAIESLLADEQVLAYKYRGTRFDCGSKIGYLKATVEFAVRHPEVGVEFREYLEEYLSLLPM

SEQ ID NO: 49215 - protein, 258 aa, Burkholderia fungorum
MSASERNGDARKSRIVLADHQPQIERLQRRLFLRSSLSIGALAMLSGCNMQDGDSVDKVLWAMSRWNDRVQGWLFDRNKLAPTYSAREITDPFPFNAFYPEFDAPDIDGSTYQLEVSGLVSDKRSWNLDQLRALPQVSQITRHICIEGWSAIGQWRGVPFRTFLERVGADLSARYVGFKCADRYYSSLDMATALHPQTQLTLDFRNEPLPAKYGYPLKLRVPTKLGFKNPKHIAAIFVTNTNPGGYWEDQGYNWFSGL

SEQ ID NO: 49216 - protein, 278 aa, Burkholderia fungorum
MSAALPRSYLFVPGNRPERFEKAHASGADAVILDLEDAVPPDEKPAARAVVLAAVSGDATGPAARPEARPAWVRINGADTSWFNEDIAALAGQAGVAGIVLPKAETREQIEAVLALAHSASSVLPIVETARGFANLAVLCAAPRVQRIVFGTLDFQIDLGIDGDGEELHLFRSQIVLASRLAGIGAPVDGVSTTITDTDGIEAEARRGRRFGFGAKLCIHPRQIDAVHRAYAWSEADKAWAQRVLAAVETSQGAAVAVDGKMVDMPVILKARRIAAGA

SEQ ID NO: 49217 - protein, 345 aa, Burkholderia fungorum
MYQEQHLPPVDPQAELWFQQALASELDPNIYWEDKDWRKIYQLYQQAAERNHWKAMLNLAALILSGYPVPVRDPEMAIRWVEKAMQLEVPDAWDTMGVYHMKGIVKGGDATSAYAFFQKAADMGSPSAQTFLGAALNAGWDNPGSGFWANISVATKMLECSLAQGYGDAADELEFIYAAPRTPEARLRAVTVLQEGAKLGSAKCASLLGSQFRGMGLSDGKSLVGYVDKARAERYSKISDILEWYEGTLKLPNLDKVLPLPPAALPKWDGDVQTLIDAAKARYSATNISSAPFTVRTSRGSDESRVAETTRGPTRTIALQWWAQMSAVRHMGGSRGRSASACRTL

SEQ ID NO: 49218 - protein, 354 aa, Burkholderia fungorum
MYQEQHLPPVDPQAELWFQQALASELDPNIYWKDKDWRKIYQLYQQAAERNHWKAMLNLASLILSDYPIPVRDPDMAISWVEKAMQLGVPDAWDTMGVYHMNGIVKGGDATSAYAFFQKAADMGSPLAQAFLGAALDAGWDNPGNGFWANLPVGVKMLECAVAQGYGDAADELGLVYARPHTPEANLRALKVLHEGVKLGSAKCAKSLGVEFSGFSLSSGDNIAGYVDMERSKRYRKIGDVLKWYEGTLKLPNLDKVLPLPPAALPKWDGDAQTLIDAAKAVTPPPTSPAHPSQSEPHAALTKTGLPPQPAARPQPMRCDSGRKCPESGIREARVATRHPHAPLHNRLDRHAFA

SEQ ID NO: 49219 - protein, 392 aa, Burkholderia fungorum
MRPLDGIKVVTLEHAIAAPFCTRQLADLGARVIKIERPGVGDFARGYDERVHGLSSHFVWTNRSKESLSLDLKQPAAAEILDALVVDADVLVQNLAPGAADRLGLGYDALSKKYPKLIVCDISGYGADGPYRDKKAYDLLIQSESGFLSITGSPGQPAKAGCSIADIAAGMYAYSNILSALLLRGRTGHGCRIDVSMLESMVEWMGYPLYYAIDGQAPPALSGAAHATIYPYGPFPAGDGKTVMLGLQNEREWKLFCERVLEQPELATDERFASNSKRTLAREALREVIVAAFAKLSAAQVIERLDDAGIANAQMNTLADVWAHPQLKARERWHEVGTAAGVVQALLPPGMPADFEPRMDPVPALGEHTDAILRELGYDSARIDALRAAGAI

SEQ ID NO: 49220 - protein, 187 aa, Burkholderia fungorum
MAATQLDLKTALIVIDLQKIVASIPTAHPFTNVLENASNLAATFRQHGLPVVLVNVVGMAPGRTEQHHAGGALPPDWSELLPELDRQPQDHLVSKRTWGAFTSTGLETHLKSAGVTQVVVCGVATSVGVESTARQAHELGFNVTLAVDAVTDISAEAHANSLEWIFPQLGETGTCREIANLLSKRST

SEQ ID NO: 49221 - protein, 527 aa, Burkholderia fungorum
MHDKILILDFGSQVTQLIARRVREANVYSEIHPYDVDASFIRDFAPKGVILSGGPSSVTETDTPRVPQAVFELGVPVLGICYGMQAMAEQLGGKVDIGHLREFGYAEVRARNHTSLLEGISDFTTPEGHGMLKVWMSHGDKVLEMPPGFALMASTESCPIAAMADETRHFYGLQWHPEVTHTVQGRAMLERFVLKICGAQPDWEMGHYIDEAVAKIREQVGQEHVILGLSGGVDSSVAAALLHRAIGDQLTCVFVDHGLLRLNEAEQVMATFADHLGVKVIHVDASEVFLRKLAGVTDPEAKRKIIGAEFVEVFQTEAGKLTDAKWLAQGTIYPDVIESAGKGKKATQTIKSHHNVGGLPETLNLKLLEPLRELFKDEVRELGVKLGLPPAMVYRHPFPGPGLGVRILGEVKRDFADLLRRADAIFIETLRTFIDKETGKSWYDLTSQAFAVFLPVKSVGVMGDGRTYEYVVALRAVQTLDFMTAHWAHLPHELLGHVSNRIINEVRGINRVVYDISGKPPATIEWE

SEQ ID NO: 49222 - protein, 217 aa, Burkholderia fungorum
MANTTLTISSKNYSSWSLRGWLLTKFSGLPFEEIVMPIDDPAARAELLLLSPSILVPCLFHDGIKIWDTLAIAEYLNELKPDAKLLPRDIRARAHCRSICGEMHSGFGSLRSALPMNLKAHFPGFKVWARAQSDIDRIVAIWSDCLKQYGGPFLFGERTTADAMYAPVVTRFVTYDVKLDPEIVEYGQRIMALPEMREWIADAQQEAEEIDELDVEF

SEQ ID NO: 49223 - protein, 787 aa, Burkholderia fungorum
MTELATAPRPANTADAADISAHTAELDIGGMTCASCAMRVEKALAKVPGVVSASVNLATETATVDLNGAAAGPDALIAAVRKAGYEAALVAPPDTPASANESAPADRKRDQTRRELAAVLASAVLTLPLIGPMVGEWFGFHAMLSPWLQFALASVVQFVFGARFYRAAFRAVRAGAGNMDLLVALGTSAAYGISVYELATHPGDMMHLYFEASAVVITLVRFGKWLEARAKRQTTDAIRALNALRPDRARIRVGAGERDVPLAQVRVGTIVIVRPGERVPVDGTVLEGRTHIDESLITGESLPVPKQVADAVTAGSINGEGAIAVTTTAIGAETTLARIIRLVESAQAEKAPIQRLVDRVSEIFVPAILAIAALTLAGWLIAGAAGETAILNAVAVLVIACPCALGLATPAAIMAGTGVAARRGVLIKDAEALETAHRVTIVAFDKTGTLTLGQPSVTAFEPIGGISRDEALALAAAVQRNSDHPLARAVVKAYEAEAAATAAAAEAADMPAAIGEAVASPTRTRALHASAARAVAGRGVEADVDGRTLALGSGRWLGELGIELPPEFAARARELEAAGNTVSWLMQRAPLAPVALALIAFGDTVKPTARAAVERLAQMGITSVLVTGDNRGSAASVARALGIDEFHADVLPEDKARVIRDLKIRSAGIVAMAGDGINDAPALAAADIGIAMATGTDVAMHAAGITLMRGDPALVADAIDISRRTWRKIRQNLFWAFVYNLIGIPLAAFGLLNPMLAGAAMAFSSVSVVTNALLLRTWRGAQNGSGR

SEQ ID NO: 49224 - protein, 696 aa, Burkholderia fungorum
MSAGLNPAQNEAVRYLDGPCLVLAGAGSGKTRVITQKIAHLIEAKGFEPRHIAAVTFTNKAALEMRERVGKLLEGKTLTTPGKEGRKVPVNQLTVCTFHSLGVQILRQEAEHVGLKPQFSIMDSDDCFGMIQEQVGSTDKGFIRKIQSIISLWKNGMIMPEQAIAIAANEDEHQAAIVYRNYVATLHAYQAVDFDDLIRLPAELFAKNEQVRDRWQNKLRYLLIDEYQDTNACQYELVKLLAGKRAAFTAVGDDDQAIYGWRGATLENLGQLSKDFPKLHLIKLEQNYRSTVRILTAANNVIANNPKLFEKKLWSEHGMGDTITVTPCNDEEHEAESVVFRLSAHKFERRANFRDYAILYRGNFQARIFEQVLRRERIPYVLSGGQSFFDKAEIKDICAYLRLIANANDDPAFIRAITTPRRGVGNTTLEALGSFAGQAKVSLFEAVYMGGIEARLSPRQIEPMRVFCDFMQRLTDRAEKDAAGTLLDELMDAIHYEAYLYDAFDERQAQSKWQNVLEFMEWLKRKGTKAEPTGAAANEATGYDTADGLGDTGKSLLGLIQTVALMSMLEGREEDPDAVRLSTVHASKGLEYPHVFLVGVEEGIMPHRGGPDDEPIDDARIEEERRLMYVAITRAQRSLHLNWCKKRKRARETVVCEPSRFIPEMLLDDAPPPTPEEAPMSPKDRLASLKALLQKP

SEQ ID NO: 49225 - protein, 372 aa, Burkholderia fungorum
MTELKHTPLNATHRALNARMVDFGGWDMPVNYGSQIDEHRAVRTDAGMFDVSHMCVVDFTGERVRAFFEYALANNVAKLQTPGRALYSCLLNPNGGVIDDLIVYYFGEDHFRVVVNAGTADKDIAWFGQLNAEGGFGLTITPRRDYAIVAVQGPNAREKVWQTVPATRAATEALKPFNAARIADTPFGELTVARTGYTGEDGFEIIVPADHVEALWNALRAQGVRPAGLGARDTLRLEAGMNLYGQDMDDNVSPLDAGLAWTVDLTSPRDFVGKSKLEAGGSQAAFVGLILLKENGKAAGVLRAHQKVVTPQGEGEITSGTFSPTMQESIAFARVPKGVQPGDTVHVQIRDKNVPASVVKLPFVRNGKVLAV

SEQ ID NO: 49226 - protein, 462 aa, Burkholderia fungorum
MAVSVFDLFKIGIGPSSSHTVGPMRAALMFAQGLERDGLLTATASVKVELYGSLGATGKGHGTDRGVMLGLMGDAPDTVNPDTIAERLEGVRVSRKLALLGAHDVPFVQKDQIAFYRQALPEHPNGLKLRAYDAQGETLRESTYLSVGGGFVVTAGAPNTKVLSAVDQLPHSFRSGNELLALCESTDKSIAQLMWENERVWHTEEETRSGLLKIWDVMQSCVARGCGINNPDADGNLPGPFQVKRRAPQLYRALSGNPELALRDPLSMVDWINLYAIAVNEENAAGGRVVTAPTNGAAGIIPAVLHYYTRFMPGSNQQGVIDFLMTAAAIGILYKLNASISGAEVGCQGEVGVACSMAAGALAAVMGGTPRQVENAAEIGMEHNLGLTCDPVGGMVQIPCIERNAMASVKAVNAARMALRGDGSHYVSLDSVIKTMRETGADMKTKYKETSRGGLAVNIVEC

SEQ ID NO: 49227 - protein, 323 aa, Burkholderia fungorum
MKQYLDLVRTILDTGTWQENRTGIRTISMPGAMLRFDLQQGFPAVTTKKLAFRSAVGELIGFLRASRSAADFRDLGCKVWDANANQNPQWLANPYREGPDDLGDVYGVQWRQWPAYKVLNADASAQLGDATARGFRVVTGFEEDGSRKVLLYKAIDQLRQCLDTIMQNPADRRILFHAWNPAVLDQIALPACHLLYQFVPNAVRKEISLCLYIRSNDVGLGTPFNLTEGAALLHLVGRLTGYTPRWFTYFIGDAHIYENQLDMLQQQLKREPYESPAFAISDRVPEYAKTGVYEPEWLEKIEPADFSLVGYRHHEPLTAPMAV

SEQ ID NO: 49228 - protein, 237 aa, Burkholderia fungorum
MTATLADEQNHFPGLSRIGALLADPGRTAMLWALMDGSARPAGELTMIAGLSPSAASAHLARLTDGGLLALEVRGRHRYFRIASPDIAASIEALANVAQVSAPQRSVPRPVRTVPLDMRYARTCYDHMAGELSVRVFERLIGGGLLTLHGTSLEATAEGAARFAGWGIDMSAQKSRRRRFACTCPDWSERRPHLGGALGAALLDSWSAHGWVERTERPRILRVTPAGHRHFDAFLAA

SEQ ID NO: 49229 - protein, 236 aa, Burkholderia fungorum
MNLPTNAQGAEAVHESGDFASDRILARIGQLTRTLRDSMRELGLDKHVERAAEAVPDARDRLKYIADMTEQAAERVLSAIDVAKPLQEQLKDDAGKLDARWEQWYAAPIEREEVRALMNDTRTFLRGVPEAAGATNAQLMEIMLAQDFQDLTGQVIKKITDVVYLIEQQLLGVLVENIALERREQFAANAAALAAEVSPTGSPEHLLNGPQINPEGKTDVVQDQSQVDDLLASLGF

SEQ ID NO: 49230 - protein, 741 aa, Burkholderia fungorum
MHRRRHGRGNHHRAHLTRATQHRNPLTMVTTHTEGPIGHLVIDVPGRSMNVLDPELAHALDEALTRLVDDEAVRGIVISSGKSSFVAGADLARMSDFVKPGVSQADALGLIGLYNRLLRRIETCGKPVVAAASGTALGGGLELMLCAHYRIATDDPKARFGLPEVGLGLLPGAGGTQRLPRLIGIAASLPLLTQGTSLDARAALKLGILNEVVPAGELIQAASRALLEGRVKAIAPWDEKGFRLPGGDAYSRVNSDALMAANASLHAATKGNYPAPQAILRAVYEGTRLPIDKGLKLEQQLFVKLVQGAVAQNMIRTLFFARQAADKLSRRPAGIAKQSVRRLGIVGAGFMGAGIAQVSAAAGIDVVLLDRDLATAGRGRDSIAKALQAEVDKGRLREAVRDQILSRIEVAADHSAFGNCDLVIEAVLEDFEVKASVTRATEAALPAHAIFASNTSALPINELASASARPQNFIGLHFFSPVSRMALVEVIVGSATSDETLARSLDYIQQIHKTPIVVRDGYGFYTTRCVEAYIREGVRLLADGVNPVLIENAGTALGMPVGPLTLADEVGIDVLHHIVSLFRDREHGRWADDKHGAGNAILGRLELAGRFGRKAGRGFFAYPPGEPRHLELGDLDLSVAADQPEVGQVKERLLYAQVLEAARCWTDGVIDDAREADLGAHLGWAFPSWLGGPLAFIDTVGITNFVQRSDELVARYGPRFEVPGRLREAAAGGQRFHAVAA

SEQ ID NO: 49231 - protein, 316 aa, Burkholderia fungorum
MDIFIQQVLNGLVLGSVYAIIALGYTMVYGILGIINFAHGDVLMVGAMVALSAIGVLQNHFPGLGNVPTLVIALIIAAVVCAVVGYTIERVAYRPLRKAPRLAPLITAIGVSILLQTLAMMIWSRNPLPFPQLLPTDPLNVIKATDTTPGAVISMTEIVIIVVAFLVMGGLLLLVHKTKLGRAMRAIAENPGNASLMGVNPNFVISATFMIGSALAALAGVMIASEYGNAHFYMGFIPGLKAFTAAVLGGIGNLGGAMVGGVLLGLIEQLGAGYIGNLTGGVFGSNYQDVFAFIVLIIVLVFRPSGLLGERVADRA

SEQ ID NO: 49232 - protein, 389 aa, Burkholderia fungorum
MTSIQPIEPSTTLIPEKNLTRTLMVGIITAIFVIAAPMIIGAAGGNYWVRVLDFAMLYVMLALGLNVVVGFAGLLDLGYIAFYAVGAYVAALLSSPHLSTQFEWIAHLAPNGLHVPFLIIVPCAMALAALFGVLLGAPTLRLRGDYLAIVTLGFGEIVRIFMNNLDRPVNITNGPKGITAIDPVHFGDFSLAQTHSLFGLQFPSVYSYYYLFVIAALVVIWVCTRLQHSRIGRAWAAIREDEIAAKAMGINTRNVKLLAFAMGASFGGLSGAMFGSFQGFVSPESFTLPESIVVLACVVLGGMGHIPGVILGAVLLAVLPEFLRSTMGPLQNMIFGHEIVDTEVIRQLVYALAMVLIMLYRSEGLWPSPKHEDKIAKLSKRNGKKPVRV

SEQ ID NO: 49233 - protein, 343 aa, Burkholderia fungorum
MAFNVTLRQSGRQFQVEQDEPVLSAALRQGIGLPYGCKNGACGSCKGTVISGEIEQRAHSSSALSNEEKTRGMALFCCATACTDLEVDIREVAGVGDVQVKKLPCRVNAIERKADDVIVLKLQLPANERLQYLAGQYLEFILKDGKRRSYSMANAPHTEGPIELHIRHMPGGAFTDHVFNTMKERDILRFEAPLGTFFLREDSDKPIVLLASGTGFAPLKAIIEHAVFKNLNRPMTLYWGARRKKDLYLLELAEQWAREIPNFKFVPVLSEPDAGDAWTGRVGFVHRAVIEDLPDLSAYQVYACGAPVMVESAQRDFTQHHGLPEDEFYADSFTSAADLANAV

SEQ ID NO: 49234 - protein, 127 aa, Burkholderia fungorum
MKILVVDDFPTMRRIVRNLLKELGYSNVDEAEDGQAGLARLRGGTYDFVISDWNMPNLDGLAMLKEIRADANLTHLPVLMVTAESKKENIIAAAQAGASGYVVKPFTAATLDEKLNKILEKMAKAGS

SEQ ID NO: 49235 - protein, 415 aa, Burkholderia fungorum
MIAQKHLLGPNKPLRVAFESGEAHSMILWGPPGVGKTTLARLMADAFHAEFIALSAVLSGVKDIREAVETAQIHRANGHQTLVFVDEVHRFNKSQQDAFLPHVESGLFVFVGATTENPSFEVNSALLSRAAVYVLKSLTDEEQRELLERAQKELGGLTFTDEARDALIGSADGDGRKLLNNLEIVARAASQQKTTEIDGALLGSALAENLRRFDKGGDAFYDQISALHKSVRGSSPDGALYWFCRMLDGGADPRYLARRIVRMAWEDIGLADPRAARIALDAAETYERLGTPEGELALAQAIIYLAVAPKSNAGYNAYNEARRFVSKDQSRGVPVHLRNAPTRLMKELGYGHEYRYAHDEPDAYAAGETYLPENMRDPHWYEPTPRGLEGKIGDKMARLAELDAQWRSENKPKKG

SEQ ID NO: 49236 - protein, 431 aa, Burkholderia fungorum
MLDIQLLRKDLDGVAKRLADRGYTLDVAAFTALEAERRDTQTRTEEMQARRNSLSKQIGALKGKGEDTSAVMAEVSGIGDEMKASAARLDEIQKRLSDLLLGVPNLPHESVPLGKDETENVEVRRWGTPRQFEFEVKDHVDVGAPLGLDFETGAKLSGARFTMLRGQIARLHRALAQFMIDTHTQHHGYTEIYTPYIVNPEILYGTGQLPKFADDMFRVEKGGDENTVTQYLISTSEISLTNTVRDSILEADALPIKLTAHSPCFRSEAGSYGRDTRGLIRQHQFDKVEMVQIVAPETSYDALEQMVGHAETILQKLELPYRVITLCTGDMGFSAAKTYDLEVWVPAQNTYREISSCSNTESFQARRMQARYRNAQGKPELVHTLNGSGLAVGRTLVAVLENFQNADGSVTVPVALRPYLGGLERLELPAA

SEQ ID NO: 49237 - protein, 468 aa, Burkholderia fungorum
MTSQLHKKGEAWSARFSEPMSELVKRYTSSVFFDKRLALVDIEGSLAHASMLAAQKIIAADDLTAIQRGMAQIKGEIERGEFEWQLDLEDVHLNIEARLTALIGDAGKRLHTGRSRNDQVATDIRLWLRGEIDRIGGLLTELRTALLDMAEKNAATIMPGFTHLQVAQPVTFGHHLLAYVEMFSRDAERMIDCRKRVNRLPLGAAALAGTSYPIDRYAVAKTLGFDGICANSLDAVSDRDFAIEFTAASALVMTHISRFSEELVLWMSPRVGFIDLADRFCTGSSIMPQKKNPDVPELARGKTGRVNGHLIALLTLMKGQPLAYNKDNQEDKEPLFDTVDTVADTLRIFAEMVAGISVKPQAMRDAALQGFSTATDLADYLVKRGLPFRDAHEAVALAVRVCADRGCDLADLTLEEMRKELSNVAHLIGEDVFSYLTLEGSVASRNHPGGTAPEQVLAAVKAAREALK

SEQ ID NO: 49238 - protein, 956 aa, Burkholderia fungorum
HSPDTQRSLYPVKDVRLLPGREFPFDEAARTAFRSRWRETFEGDPSRASIYKDIGNSVPSAGIEYYLPLFFDDTATLFHYLPEGAQLAFVGDLDAAIRRFTNDTKQRYNFLSHDRDRPILEPQRLFLSDEDFFTLAKPFARLALPANAGGGWSTPLPNLAIDRHAEDPVAALRAYLDTTPNRVLFATESAGRRETLLQLLADNHLRPASSDSFQDWLLGDSRFSLGVAPLANGFAVPVDGIAIITETELYGPLARRAGRRRQEQASNVDSMVRDLSELKLGDPVVHSQHGIGRYMGLVTMDLGEGETEFLHLEYAGDSKLYVPVAQLHVISRYSGADPESAPLHSLGSGQWEKAKRKAAQQIRDTAAELLNLYARRAARSGHAFALEPKDYVKFAESFGFEETPDQAAAIAAVIGDMTSGKPMDRLVCGDVGFGKTEVALRAAFIAVMGGKQVALLSPTTLLAEQHTQTFTDRFSDWPVRIAELSRFKSTKEVNAAIHQINEGTVDIVIGTHKLLSSDVQFKRLGLVIIDEEHRFGVRQKEALKALRAEVDVLTLTATPIPRTLGMALEGLRDFSVIATAPQKRLAIKTFVRREEDSVIREAMLRELKRGGQVYFLHNEVETIENRRQMLEALVPEARIAVAHGQMHERELERVMRDFVAQRANVLLCTTIIETGIDVPSANTILIHRADKFGLAQLHQLRGRVGRSHHQAYSYLLVHDPQGLTKQAQRRLEAIQQMEELGSGFYLAMHDLEIRGTGEVLGDKQSGEIHEIGFQLYTDMLNDAVKALKEGKEPDLTAPLAATTEINLHAPAILPADYCGDVQERLSLYKRLANCEHNDSIDSIQEELIDRFGKLPPQAHALVETHRLRLAAKPLGILKIDAGETVIGLQFIPNPPIDAMRIIEMVQKHRHIRLAGQDKLRIETRSPDLAVRVATVKETLRALGTPSRGTAAGVAAR

SEQ ID NO: 49239 - protein, 662 aa, Burkholderia fungorum
MFGKLTLDAIPYHEPIIVGAGIFMALVGLAVLGTVTYLGKWRYLWTEWLTSVDHKRLGIMYIIVALIMLLRGFSDAIMMRLQLALAYINPGYLPPHHYDQVFTAHGVIMIFFMAMTFMIGLMNIIVPLQIGARDVAFPFINSLSFWMTAVSAILINVSLVIGEFAQTGWLAYPPLSELQFSPGVGVDYYLWSLQLSGIGTLLTGVNFFVTIVKMRAPGMTFMKMPVFTWTTLCTNVLIMASFPILTVTLALLGLDRYLGMHFFTNDAGGNAMLYLNLIWAWGHPEVYILILPAFGIFSEVVATFAKKPLFGYKTMVWATCAIMVLSFLVWLHHFFTMGSGADVNAFFGIATMVIAIPTGVKVFNWLFTIYKGRLEFTTPILWTIGFMITFTIGGMTGVMMAIPGADFVLHNSLFLIAHFHNVIIGGVLFGYLAGFNYWFPKVFGFKLNEKLGKAAFWFWQIGFYVAFVPLYVLGFMGMTRRLNHYDNPAWHPWLVFAAVGAVLIAIGIACQLAQLYVSIRDRNLPQNRDLTGDPWNANTLEWATSSPPPVYNFAIIPTVRKLDAFGDMKSRKDKPAQPVYRDIHMPSNTSAGLLVGLFSLVLGFAGVWHIWWLAIVGLVGAIGTVIVYSFMKNEGYYIPADTVALIEEKHSGTGAQVALEVD

SEQ ID NO: 49240 - protein, 279 aa, Burkholderia fungorum
MLLSGCGNLDILNPKGSVGLAERELIATSTWAMLIVVVPVIALTLLFAWRYRASNKSAEYRPGWVHSTGIEIAIWTIPTLIILFLAVLTWKTTHELDPYKPLESQVKPINVEVVALDWKWLFIYPDLGIASVNQLAFPVGTPVNFVITSDTVMNSFFIPQLGGQIYAMAGMQTRLHLIADEAGDYAGTAANFSGKGFSDMKFRALATSPAEFNAWVAKVRASSDNLSMDRYHTVSAPTEKEPVRYFSTVDPKLFHNIIARYNNGNVLDNMKDANCGPKG

SEQ ID NO: 49241 - protein, 250 aa, Burkholderia fungorum
MAVTMRQMLEAGVHFGHQTRFWNPKMAPFIFGHRNKIHIINLEKTLPMYNDALKYARQLAANRGTILFVGTKRQSRDTIAEEAQRAGMPYVNARWLGGMLTNFKTLKVSIKRLKDMEAALEAGETERMSKKEALLFEREMAKLQKSIGGVKDMGGIPDAIFVVDVGYHKIAVTEANKLGIPVIAVVDTNHSPEGIDYVIPGNDDASKAVALYTAGVADAIVEGRANAVNEVVQAARGGDGDEFVEVNAEA

SEQ ID NO: 49242 - protein, 607 aa, Burkholderia fungorum
MIAGRRQDIMVFDLQTPVAESFGYKPTATKRASEQLMRRYYWSAKAVTQLATILIQNIEAQLFPSTSGITRVLSDRFVEKQGMLEIASDDVFQREPNAILEAFLLYEQTPGVKGLSARTLRAIYNARDIMDQHWRRDPENRRLFMDILKQPAGITHALRLMNQTSVLGRYLLNFRRIVGQMQHDLYHVYTVDQHILMVLRNLRRFAVAEHAHEYPFCSQLIANFDRPWVLYVAALFHDIAKGRGGDHSTLGMADARRFCRNHGILGEDGELVVWLVQQHLTMSQVAQKQDTSDPEVIKRFAELVGTERRLTALYLLTVADIRGTSPKVWNTWKGKLLEDLYRATLAVLGGARPDAHSELKSRQEEALALLRLETVPEGAQKALWDKLDIGYFLRHDAADIAWQTRVLYRHVETPTPIVRARPSPIGEALQVLVYVKDQPDLFAGICAYFDRNGLSVLDARVSTTRHGYALDNFLVAHTEEDVHYRDIANLVEQELTARLTGDGTLLPGPSKGRLSRLSRTFPVTPRVDLRADERGQYYILSVSANDRPGLLYSIARVLAEHRVGVASARINTLGERVEDVFLLDGHGLSDSRLQIQVETELLRAIAV

SEQ ID NO: 49243 - protein, 688 aa, Burkholderia fungorum
MARTPVSPPATSAPAERAAWLRAELERANYAYYVLDQPDLPDAEYDRLFKELESIETEHPDLIVPDSPTQRVGGEAASGFEPVVHEQPMLSLNNGFADEDIVAFDKRVGDALGKNASEPPVPVEYAAELKFDGLAISLRYVDGVFVQASTRGDGTTGENVTENVRTIRSIPLRLKGKRVPHVLDVRGEVLMFKRDFERLNERQRAAEQKEFANPRNAAAGSLRQLDSKITAQRPLSFFSYGIGVLEGMDMPATHSELLDWYKELGLPVNGERAVVHGAEGLLGFFHAVGEKREKLPYDIDGVVYKVNRRDEQEALGFVSRAPRFALAHKFPAQEALTRLVAIDVQVGRTGAVTPVARLEPVFVGGATVTNATLHNEDEVRRKDIRIGDTVIVRRAGDVIPEVVSALLDRRPDDAREFVMPTHCPVCGSNIERLPDEAIARCTGGLFCPAQRKQALWHFAQRRALDIDGLGEKIIDQLVEQNLVRTPADLFNLGFATLAELDRFAEKSAQNLLDSLEKAKHTTLARFIYALGIRHVGESTAKDLAKHFGSLDPIMDASVEALLEVNDVGPVVAESIHQFFAEEHNRTVIEQLRAPGRVTWPEGPPAPKAPQGVLAGKTVVLTGTLPSLAREEAKEMLEAAGAKVAGSVSKKTDYVVAGAEAGSKLAKAEELGIPVLDEDGMRKLLEGQL

SEQ ID NO: 49244 - protein, 321 aa, Burkholderia fungorum
MRIFITGATGVLGFAVVRELIAAGHAVTGLVRSAHAVAPLEAVGARACRGTIEDTDILRQEAALADGVIHTAFFHALSHASLGIRARILFGGPPVRIVERFAAAAVAVDQRAIETFGEALGARKVSLVIAFPTMAMAAGRHALETDDADRAAVGGARARSEQAAVDLVRAGVNASIVRLPPTVHDETKLGLVTRLIEIARKKRMSACPGDGFNRWAAVHRLDASRLFRLALENGEPGDRYHGAAEEGMPFRDIANAIGRYLDVPVVPLPAKDCARHFGWLAPFVAADNPVSSQMTRERLGWTPQHPSLMNDLAAALRDRGR

SEQ ID NO: 49245 - protein, 408 aa, Burkholderia fungorum
MDAFRCGSQSDRQVGNRVFPKESPVLPSFSPALLALADGTVFRGYSIGAPGHTIGEVVFNTAITGYQEILTDPSYARQIVTLTYPHIGNVGVNAEDVEAAKVHAAGLIIRDLPVLASNFRMERTLQQYLQDEGVVAIAGLDTRMLTRVLRDKGAQNGAILAGSDDEARAIELARSFPGLSGMDLAKVVSTKESYEWTQTEWRLGSGYGTQNAPKYRVVAFDYGVKYNILRMLAERGCHVTVLPAEASAADALALNPDGVFLSNGPGDPEPCDYAIRATKELIDRGIPTFGICLGHQIMGLAVGAKTMKMKTGHHGANHPVKDLDDGRVVITSQNHGFAVDADTLPANARVTHVSLFDGTLQGFTLTDKPAFCFQGHPEASPGPHDIAYLFDRFTALMDTKKAGKTAAA

SEQ ID NO: 49246 - protein, 122 aa, Burkholderia fungorum
MHIIKAREIYRDCKEAFSMYIAMNRFKVTPGSEAAFEHLWTTRDTHLKEVPGFVEFHLLKGPQKEDHVLYSSHTVWKDYTSFEGWTKSEAFRAAHRNAGGDNRVLYLGHPEFEGFEVIQTVK

SEQ ID NO: 49247 - protein, 389 aa, Burkholderia fungorum
MSEADNSTPNTGAFKPKKSVALSGVTAGNTALCTVGKTGNDLHYRGYDILDIASACEFEEIAYLLVHEKLPTQAELTAYKTKLKALRGLPANVKAALEWIPAAAHPMDVMRTGVSVLGTVLPEKDDHNLPGARDIADRLMASLGSMLLYWYHYSHNGKRIEVETDDDSIGGHFLHLLHGVEPSNAWVDAMHVSLNLYAEHEFNASTFTGRVIAGTGSDIYSALTGAIGALRGPKHGGANEVAFEIQSRYQTPDEAEADIRRRVENKEVVIGFGHPVYTISDPRNKVIKEVAKKLSKEAGNTRLFSIAERLESVMWDAKKMFPNLDWFSAVSYHMMGVPTAMFTPLFVIARTAGWSAHIIEQRIDNKIIRPSANYTGPDDLPFVPLAKRV

SEQ ID NO: 49248 - protein, 205 aa, Burkholderia fungorum
MRVSRAQAEENRRTVIEAAGRLFRERGFEGVGLNDLMGAAGLTQGGFYKQFRSKDDLAAQACDRVLADSTERLTQLVKSSGENALATIISRYLSFEHRDQIADGCIFPALGPDAARHSPELIRSFETGIRSYLDVIERAAQASSDQRAESDPAVVLSTMVGALVLSRVAEDQTLSARILDSAINSLLNRNRSDRPEVDTVDQGRS

SEQ ID NO: 49249 - protein, 420 aa, Burkholderia fungorum
MSDVSKAWNIDDLRRMASHNVPKHFLDYLQGGANSETTMQSNRLDFAQWALIQKVLAGIQENSTDLGTTYLGERHELPVLLGPVGFAGMYHRNGEIAAGRAAGKAGIAQVLSTFSIASLEEVAQSHRCSLYFQLYVFRKRELTEHMLERCRKAKIGTIFLTVDTPFAPVRERDARNGFRARTTLSPGMLLSMLRHPLWCMGAIANGIPSVGNCKPYPELGSSLMEQSVNLGRMIDPTLAWSDIKWLRDRWEGKIVIKGILDADDARRAVDAGANGIVVSNHGGRQLDPAPSTISVLPEIAKAVGKRTEVLMDGGIRRGADVLKALALGATAVLLGRAYIYGLGAGGEKGVTRCLDLLREEMRPALNMMGFRTIDQLKAAGSDALRLSASFPSTSHLAENDAAVREKPNAHVVEIRGSSVA

SEQ ID NO: 49250 - protein, 789 aa, Burkholderia fungorum
MHESGIMQREAYDDWASQWVASTEDYSVFLITSEGDVASWNPGGTRIEGYQLEEIIGRNFSTLYTDEDRGNGVPDAVLESVLQRGRHESEGWRRQKDGTHFWASVVTTGLRDPRGEFRGAVQIVRDVGEKRRAHEAAIESERRFRLLVQGVTDYAIFMLSPEGYVTNWNSGARRIKGYSEQEIIGSHFSRFYKPEDVAAGKPQRGLETAAREGRFEAEGWRVRRDGTTFWAHVVIHAIRDDEGTLIGFAKVTRDVTERRQASEMLEQTRAALFQAQKMEAIGKLTGGVAHDFNNVLQVLRGNLELLENRHRRDNWSVERLAHAIDAVERGAKLASQLLAFGRRQALRPVVVNLAAMVRAMDSMLARTLGETVSVETVVAAGLWNTLVDPHQLENVLLNLAINARDAMPTGGRLTLELANAMLDDRYVGALSDVPAGQYVMLAVTDTGVGMPPDVVERAFDPFFTTKPEGLGTGLGLSMAYGLVKQSGGHIRIYSELGHGTTVRIYLPRSMANAVELPSRQSKGGITGGGETVLVVEDDAKVQSTVVEMLAGLGYSVLKADDAEQALAVIRSGVHIDLLFTDVVMPGALRSPEMARQAVQLLPHLKVLFTSGYTQNAIVHGGRLDAGVELLSKPYSQEELARKLRHVLGTPGDEISGTADGPSAAQTGDGPVSQVVLHVLVVEDDVASLDAVCELLEMLGHHTAKAANAKQAMEQIGTESFDVLLTDLNLPDVFGIDLAQQAVAAHPDLHVIFASGDNLPTDVQLGFTWKGLRKPYTVDQLDVALRTIGQ

SEQ ID NO: 49251 - protein, 348 aa, Burkholderia fungorum
MTIRNHSPSRIAYYEQIAKLGMAPLWESLHTLVPKEPRPQAVPAIWKYAQLRKFVLESGKVISAAEAIRRVLILENPGLPGKASITSNLYAGLQLILPGEIAPSHRHTQSALRFIVEGTSAWTAVDGERTTMHPGDFIITPSWTWHDHGNPSIQASGEPVVWLDGLDIPLLLQLDAGFAETYPEDTQPVKRPEGDSFARYGQNMLPVRHDVKNGNSPIFNYPYVRSREALYTLSRTNEADAWDGFKLRYVNPATGGYPMPTMATFMQLLPRGFRGKAYRTTDSTVFSVVEGQGNVRIGEQLFEFAPHDVFVAPSWQPVRFDTDEDAVLFSYSNRPVLAALSLLREERQ

SEQ ID NO: 49252 - protein, 301 aa, Burkholderia fungorum
METSPGSIMQPVAGKRNAGEPLRSSVTAGDGVQLPLYRWPAAAPTRATVALIHGLAEHAGRYAALAGRLNAAGIELVAIDLRGHGHAPGKRAYVRRFDDYLLDAQALLDAAAQSCAPLFLMGHSMGGAVAALYAIERLEASGRRLNGLILSSPALAPGRDVPRWMLKLSQVISRLYPSFPAMKIDAALLSRLQPVVNANRADPLVHHGAIPARTGAELLLAMARIERGRAGLRVPLLVYHGTADKLTEPEGSRDFGQHAGSPDKTLTLHEGSYHETMNDMDRDRVIGALIEWIEKRLVVRT

SEQ ID NO: 49253 - protein, 259 aa, Burkholderia fungorum
MERAMQFDVVTLFPDMFRALTDWGITSRAAKQERYSLRTWNPRDFTTDNYRTIDDRPYGGGPGMVMLARPLEDAIGAAKAAQAEQGIGAPRVVMMSPQGVTLNHDRVMRFAAEPGLILLCGRYEAIDQRLLDRVVDEEVSLGDFVLSGGELPAMALMDAVVRQLPGVLNDSQSAVQDSFVDVLLDCPHYTRPEEYNGVRVPDVLLGGHHAEIETWRRREALRNTLNKRPDLIVKARKNKMLSRADEAWLASLAKEESKA

SEQ ID NO: 49254 - protein, 228 aa, Burkholderia fungorum
MNRVWWWRSSRMLSEMLDMFVQSFWETLVMVGISGLVGALVGLPLGVLLYLTDRQGVLQNIAVNRVMGVVVNAVRSTPFIILLVAVIPFTRLVVGSSIGTAAAVVPLTIAAAPFIARLVETALREVDRGLIEAAQAMGATTSQIVFKVLLPESLPGVVAGLTITFVSLVGYSAMAGAIGGGGLGDLGIRYGYQRFLPEVMLTVVVILIVFVQLVQSFGDWLVRRLSHK

SEQ ID NO: 49255 - protein, 129 aa, Burkholderia fungorum
MMNLIAKLEQEEIARALGEKTIPEFAPGDTVIVSVNVVEGTRKRVQAYEGVVIAKRNRGLNSSFIVRKISSGEGVERTFQTYSPLLASIVVKRRGDVRRAKLYYLRDRSGKSARIKEKLVSKGRAASQA

SEQ ID NO: 49256 - protein, 268 aa, Burkholderia fungorum
MSNMQRRLILKLAAALGAASLFATGMAHAEDTIKVGVTGGPHAQIMEVVKTVAAKNGLNIKVVEFSDYVQPNAALAGGDLDANSYQHDPYLQAQVKDRGYKLIRVADTVTYPMGIYSKKVKSLAELQSGAKIAVPNDPTNGGRALLLLQKQGLLKLRADAGLKATPLDIVDNPKKLKIVELDAAQIPRSLNDVDAAAINTNFAMEAGLKPKQDAIAIEDPKGPYVNVIAIREADRNKPWVAKLVAAYHSPEVKQFVESKFGGSVITAW

SEQ ID NO: 49257 - protein, 238 aa, Burkholderia fungorum
MIRPVFEPETLPVEATGADLPPVAGDRLTPDGLRARFEQPLAWTPEPFVEAPWRDTHADPRVAAVLVPLVIRERGLTVLLTQRADHLNDHAGQVSFPGGRHEPFDADATATALREAQEEVGLAPSRVEILGALPDYLTGTGFRVTPVIGLVHPPFTVKADALEVAEVFEVPLAFLMNPAHHEERVFRYEGGERRFFAMPYPRGTSAEAGQSGSELGGHYFIWGATAAMLRNFYRFLAA

SEQ ID NO: 49258 - protein, 823 aa, Burkholderia fungorum
MTETNNSQPDNSYGASSIQILEGLEAVRKRPGMYIGDTSDGTGLHHLVFEVLDNSIDEALAGHCNDIQVIIHADNSISITDNGRGVPTGLKMDDKHDPKRSAAEIVMTELHAGGKFDQNSYKVSGGLHGVGVSCVNALSAWLRLTIRRDGKKHFMEFHRGVPQNRIIEEIDGVAVSPIQVTGETENRGTEVHFLADETIFGNIEYHYDILAKRIRELSFLNNGVRIKLTDQRTGKEEDFAFVGGVKGFVEYINKNKSVLHPNIFHISGEKDGVGVEVAMQWNDSYNENVLCFTNNIPQRDGGTHLTGLRAAMTRVLNKYINDHEVAKKAKVETSGDDMREGLSCVLSVKVPEPKFSAQTKDKLVSSEVRAPVEDVVAKALEEFLLETPNDAKIICSKIVDAARARDAARKAREMTRRKGVLDGVGLPGKLADCQEKDPAKSEIYIVEGDSAGGSAKQGRDRKFQAILPLRGKVLNVEKARYDKLLSSEQIVTLITALGCGIGKEDYNLDKLRYHRIIIMTDADVDGAHIRTLLLTFFYRQMPEMIERGYIYIAQPPLFKIKAGKDERYLKDEAEVNAHILKLALQGSELLASEGATPITGDALGELARAYLLAQAVVNRLSRLYDAGALEAVMDGVVVDLSSEEAAEVSAAALEAKLRDDALKPEVKVTTMYDPVRELRSLRVARTHHGNQKISVLDQDFQLTADYQQLINTANTFKGLIGTGAVIKRGERSMAVTDFKSAMKWLLADAERNISKQRYKGLGEMNPGQLWETTMDPTVRRLLRVQIEDAIAADGIFTTLMGDDVEPRRAFIESNALRAGNIDV

SEQ ID NO: 49259 - protein, 242 aa, Burkholderia fungorum
ITYIHRYRRRATFSMKPTRPFHQTPVITIDGPSASGKGTVAALVAASLGFHLLDSGALYRLAALASLRYTIEAHDVDALVKLIDDLHITFREGLAQLDGVDVSAEIRAEEVGSRASAIAVHAPVRAALVARQRAFRKEPGLVADGRDMGTVIFQDAVLKVFMTASVEARAARRHKQLIQKGFSANIDDLLRDLRERDERDSQRVAAPLKPAADAKLLDTSALSVDQAVEQVVQWYEALVPHA

SEQ ID NO: 49260 - protein, 577 aa, Burkholderia fungorum
MQILIFMSDLQTSTPNTESFAALFEESLTKQDMRAGEVISAEVVRVDHNFVVVNAGLKSEAYIPLEEFLNDAGEVEVQAGDFVSVAIDALENGYGDTILSRDKAKRLASWLSLEKALDNNELVTGTITGKVKGGMTVMVNGIRAFLPGSLVDTRPVKDTTPYEGKTLEFRVIKLDRKRNNVVLSRRAVIEATQGEERAKLLETLKEGAIVEGVVKNITDYGAFVDLGGIDGLLHITDIAWRRVRHPSEVLSVGQEVTAKILKFDQEKNRVSLGIKQLGDDPWEGISRRYPSGTRLFGKVTNITDYGAFVEVESGIEGLVHVSEMDWTNKNVAPSKVVQLGDEVEVMVLEIDEDRRRISLGMKQCKPNPWDDFSRNFKKGDKLQGAIKSITDFGVFIGLPGGIDGLVHLSDLSWSETGEEAVRKYKKGDEVEAIVLGIDVEKERISLGIKQLEGDPFSNFVAMNDKGSIVDGVVKTVDAKGAVVQLSAEVEGYLRASEIAQDRVEDARNVLKDGDKVNAMIINIDRKSRGINLSIKAKDSAEQQEAIRGLASSDSSSAATGTTNLGALLKAKLDGQNQ

SEQ ID NO: 49261 - protein, 467 aa, Burkholderia fungorum
MKITIIGTGYVGLVTGACLAEIGHDVFCLDVDPRKIEILNNGGVPIHEPGLQEMIARTRAARRITFSTDVEAGVAHGDVQFIAVGTPPDEDGSADLQYVLEAARNIGRTMNGFKVIVDKSTVPVGTAQRVRAVVEEELAKRGLAGSAQHGFSVVSNPEFLKEGAAVDDFMRPDRIVIGLDEDEAGSRARELMKRLYAPFNRNHERTLYMDVRSAEFTKYAANAMLATRISFMNEMSNLADRVGADIEAVRRGIGSDPRIGYHFLYAGCGYGGSCFPKDVQALIRTASESGHNLRILEAVEEVNDRQKDVLVHKITSKLGNDLSGRTFAVWGLAFKPNTDDMREAPSRRLIAELLARGAHVRAYDPVAVTEARRVFAIDLHDAPEQFARLTFATTQDETLTGADALVIVTEWKEFKSPDFVHLKSVLKSPLIFDGRNLYEPDAMTELGIDYHSIGRPYAQPSELPADV

SEQ ID NO: 49262 - protein, 409 aa, Burkholderia fungorum
MTVKLALSARNRLRTRSLAAALSVASCMFMATSPAIAQSVGKKPPVLLAQSQPQPAVPQGQTFEEEIIPQRYANNPNVDAFINDMTARYDFDEAALHALFAGVSYSATAVKLVTPSPSPSVKNWRVYQSRFLDQVRINAGVRFWRANQATLQRAYEEFGVPPEVIVGIIGVETIYGRFMGNFRVLDALTTLSFDYPNTANRADRQATFRKNLEDYLVWTRDSQIDPTSVLGSYTGAIGIPQFLPSSIVQYAVSYDGNRQIDLRTSQADAIGSVANYLRQNGWESGRPVVWKIGSDAGSLGVAQAAADGQPEPHWPLDQLLRAGLLLNEPGVDIASEAGTPVTVVDLPSPGRGTEFVLGLKNFYVLTRYNRSFFYALAVYQLGQRVKAQMEASDAANAGNGAAAPAGASQ

SEQ ID NO: 49263 - protein, 308 aa, Burkholderia fungorum
MIIRPHLHWFRMLLAWRGSVLPQLLPRLFLIFCISIVAVAAHDHLLPISLNLNTTAPFSLIGIALAVFLGFRNNASYDRWWEARKLWGQLLNESRSLTRQVLTLPVRPLPEEDVKEFFTVLGALPHALRHQLRRSDPREDLAARLPQALFERVMASRYKPAALMLYLGEWVQRHARAGEIDPMAVIAFDRNLNGISDVIGGCERIASTPLPFAYSVMIHRTVYFFCASLPFGLVDSIGIFTPVFAVFVAYTFMAHEAIASQIEEPFGTDDNDLALHMMSVVIEDAMRDLLGEPALPLPSPEAEGYILN

SEQ ID NO: 49264 - protein, 593 aa, Burkholderia fungorum
MSAATHSGGYGGPPLVVGVWRGRYLRFTGQQFVLLAAPARSGKGVGIVVPNLLSYPDSVVVLDIKQENFNLTAGFRRAHGHDVYLFNPFAEDGRTHRYNPLSAISDGVFRVGDILAIGYALYPVGGHDDFWKDQARNLFLGIVLLLCEWRDACRTGNTDVPDYPVTMGEVLRQSSGNGMPVKAYLQQALLQNRRLLSGACVDALNRFLANDDKVLASILATFNAPLTIWANPIVDAATSANDFDLRDVRKRRMSVYVGITPDHLSEAALLVNLVFSQLVNLNTRQLPQDSPELKVQCLLLMDEFTSVGKIHIIARAVAYMAGYNLRLLSIVQSVSQLESVYGRADARTFVTNHAMQIIYAPREQKDANEYSEMLGTFTDRSRSVSRSNAVFGGRGGSSESFSEQRRPLLLPQELKELGREKEIILLENTKPILAERICYWRDPVFTSRLVAAPAIPAMDLVRFIAQVERRVRDVQPDDVDEAGVMHIPPEYLEVLQAWDPRDLPRHLNDVTDEEAAAYVERHFMLLGVPAARVAVAARRLSPSDLDVAELRPADRAPKRKSARSTGASRKQHGPATSRPTDGSNVVPLHGERR

SEQ ID NO: 49265 - protein, 464 aa, Burkholderia fungorum
MGRGLHAGRGRRLMTRSLLQRALPRTLLARNIALLIVLVMLSQVCVLGVLLHYVQRPRVERAAAVFATYVSTLDNLLAATPLNARSQLTARLDARAQVPAEAFETPPRTFMRGYRLYQRSMFLDSLRAHLPADMPALWQAVDGQRLWIRMHAPADAPNAPYWIALPVPEDAQGSGLDAAILLSLGLGALAALTGYLIQRHLNQPLQELTRAARRVSAGEMPAPLPTDGPTEIAAVSGAFNQMTQALQQAEASRALMLAGISHDIRTPLTKLRLSMAMAMPDGSDSSFVVAAESYLDQIETILQQFMDYAGSGEREQREPGDLNALIERLAGDFAGLGHEFELSLASLPAVPYRPISMMRLLMNLMQNAIVYGGTGLAVRSWATPDSVIVAVGDRGKGLSAQELEQLKAPFQRGRNARSHSGGTGLGLAIVERIARLHGGGLQFHAREGGGLEVWVVLPLNGSMR

SEQ ID NO: 49266 - protein, 192 aa, Burkholderia fungorum
MKKNILLAAGALAAVLSFNASAADTYQLDPTHTYPSFETDHFGGISIWRGKFKKSSGTVVLDRAAKTGTVDVTIDMSSVDIGNDKLDAELVTDKFFDAAKYPSATYKGTQIRFDGDKPVEVIGTLTMHGITKPVNLKIESFKCFVNPMLKREVCGTESTATFNRDDFGIDFGKTYGFKMQTTLHIQAEGIKQ

SEQ ID NO: 49267 - protein, 556 aa, Burkholderia fungorum
MSFVTRAHDIAPGVPPARSQRRPQEAHHARRIVMPRMPASLQTNPDCCVESAAAIVRWSCGSASTSAFSLAVQDFRRTRFNHPGESVANDAPAVSDAPSPHSQSLADPFAPPADSSLWRKNFLLGAATASYQIEGAVNEDGRLPSIWDTFSAIPGKVLAGDTGAVACDHYHRWEADVDMLAGLGFEGYRLSIAWPRVMDTAGVPNRKGLEFYKRLLARLKEKGIATFVTLYHWDLPQHLEDRGGWLNRDTAYRFADYADLMSRELAGSVDGWMTLNEPWCSAYLGYGNGHHAPGLADARYATQAMHHLLLAHGLAMPVLRANDPASQKGVVANIGRGTANSGSAADQRAAHLFEVQHNAWILDPLLEGRYPRDLFELWPGTEPLVLDGDMQTVAAPLDFLGINYYFRTNVASDGAHGFREVPLQGVERTQMGWEVYPDGLRDLLIGFKATYRNLPPIYITENGMASDDKVIDGRVDDMQRISFLKRHLAAVDEAIKAGVEIRGYFLWSLMDNFEWAFGYERRFGVVHVDYATQKRTVKRSAELVSKFLKERKARRE

SEQ ID NO: 49268 - protein, 444 aa, Burkholderia fungorum
MWPIHNQPRECQSSTVLLRFREYQREADLERSPHTFARRKIDLPAQHAAQFLDDRETETRAGNILARGALEFVEHAVRVRRRNTHAGIGDANRPVRLVGHREVEFDAAGPGVLGRVGKQIDSNLFEFETIGRDRRQCRIKSCMQREPFRLDRRTRRGDQFVVEFPQFDLFECERSAVAEYDGVFDDLIDELFHIRGLAVRQRQRGIGFAGRARDQLQRDGKCIQKVAQIMHHAARDLHARLVQVAHQALFQREFVIGAFEPAGVFVDLAVAFAHHFLDRRESDHTERFGNQAPCPTLVAARERLIETGEFFKHVGERLMKEIELTHQFLDTIALAPAHLAMFSRIELDARLDPFEIFDIQCQTQAFKNFRQMIGELLIGKFVRFDQIDVAEYGIHPLPGESGAFRANEIGKIAQGASTYIGHGVALGSVRDIITAIARYGTPLA

SEQ ID NO: 49269 - protein, 316 aa, Burkholderia fungorum
MSELFIPTDHQHVQIKPGQRTGLPVMIGVHSTLLGPAIGGLRIKPYARGADAVADVLRLSQAMTVKAAAIDNGTGGGKAVVPLPVGSNLSASLKDAILLDVADQVHALGGIYHVGPDVGSGESDMDAIRRRTPYVGGFSKRAGGAGGTTYGTYIGLDAAIRTAVRQVLNADSLQGLHVSVVGLGGIGTLIARAYAAEGARLTVSDIDETRRPLADEIGAAWVSPEEAMTVRCDVLAPCALGGVLTREIVPRLTARVICGAANNQLATEDIADALRSRETVYVPDFIANAGGLMYASGIELHHARPTHPTPIPVQPW

SEQ ID NO: 49270 - protein, 303 aa, Burkholderia fungorum
MIKPNKTLSNSVLTFGFLFLYIPIISLVVYSFNESKLVTVWSGFSLKWYGALLHDGELLNAAWLSLKIGLLTACASVVIGTWAGFVLARFGRFRGFTLFAGMINAPLVIPEVIQGISLLLLFVALEQMLGWPKGRGLFTIWIGHVMLCVSYVAIVVQSRVKELNKSLEEAALDLGATPFKVFFLITLPLISQALMSGWLLSFTLSFDDLVLSAFLSGPGSTTLPLVVFSRVRLGLNPEMNALATIFITTVTIGVIAVNRWMQLRERKRNRDMQMAFALAEAADPLPSAPQQAAVRKSLDTARA

SEQ ID NO: 49271 - protein, 322 aa, Burkholderia fungorum
MTELVYGDGAIRRASLYGSSIENTYAGVLSFMRRKYTRELDGVDVVVSGVPLDLATTFRSGARLGPAAVRAASVQLSELHPYPWGFNPFDDLAVTDYGDCWFDAHNPLTIKASIVEHARTILRSGAKMLTLGGDHYMTYPLLIAHAEKYGRPVSLIHFDAHCDTWADDSPDSLNHGSMFYKAVKDGLIDPETSVQIGIRTWNDDFMGINILDAAWVHEHGTRATVERIASIVGERPAYLTFDIDCLDPAFAPGTGTPVAGGLSSAQGLAIVRALGALNLVGADVVEVAPAYDQSEITAIAAAHIACDLLCLWRQRKVAQRGA

SEQ ID NO: 49272 - protein, 298 aa, Burkholderia fungorum
MRPCLKASSVSGFRLLVQGVTDYAIFMLSPDGYVTNWNSGARRIKGYSAEEIVGSHFSRFYTPEDAAAGSPQRGLETAAREGRFEAEGRRVRRDGTTFWAHVVLDAIRDDEGKPSGFAKITRDITERREVNELLGKTRAALFQAQKMEAIGKLTGGVAHDFNNVLQVLRGNLELLENRHRRDAWSGERLAHAIDAVERGAKLASQLLAFGRRQVLRPVVVNLSAAVHGIDNMLARALGDTINVETVVAAGLWNALVDIHQLENVLLNLAINARDAMPSGGRLTIDHPGLSAKVNGNGC

SEQ ID NO: 49273 - protein, 295 aa, Burkholderia fungorum
MTRPANVVPLPVTRAQSAGASLATDRVNTTCDRVTGADASIFELRDVSFALPERTLLRSLTLTLPARRVIGLIGHNGSGKSTLIKILARQQSASGGQILFEGKPLEQWPTRAFAQKLAYLPQHTPSAAGILVRELVAFGRYPWRGALGRFTDADRAKVDEAMVLTDVTGFADRLVDTLSGGERQRVWLAMLIAQDADYLLLDEPISALDVAHQVEVLSLVHRLSTERGIGIIVVLHDVNMAARYCDEIVALHSGKLIAQGTPDEILTPAQLQAIYGISMGVMRHPDTGEPVSYVR

SEQ ID NO: 49274 - protein, 214 aa, Burkholderia fungorum
MQNLIVAVVAYLIGSVSFAVIVSAAMGLDDPRSYGSGNPGATNVLRSGSKKAAILTLIGDAFKGWLPVWFVVHFGARYGLDDTSVAIAAVAVFLGHLYPAFFRFKGGKGVATAAGVLLAINPILGVATLLTWLIVAFFTRYSSLAALAAAVFAPIFDGFLFGPHIIALAIVVMSSLLVWRHRGNIAKLMRGQESRIGDRKKADAAAKPTAGSDV

SEQ ID NO: 49275 - protein, 522 aa, Burkholderia fungorum
MLIKPFRSIESAATATHNWRRRQILRAGASTLVLGLVAPRLAWASSVLGVRVWPARDYTRVTIESDQPLQNAQQLLQGPDRLVVDLSGLDLDQALKDLVSKITPNDPQIQSVRVGQYQPHVVRMVFDLKGSVKPQVFTLPPVGAYKYRLVFDLYPAVAPDPLMDLLAQTERKQQTLNEENSAPPPVTLSGPGTTPPTADNSEAFFERYAQNSGSGSAPGVPRPPARVAPTPVPPIPGKPAAPVAPPTAIARNKGNGGNGASTLGADDAGSDDTYAFTNPKSGKSNTVRLLTVAIDPGHGGEDPGAIGGSGTYEKHVALDIAKKLRAKIDAQPNMRAMMTRDADFFVPLNVRVQKARRVGADLFVSIHADAFTTPDAKGSSVFALSEHGASSAAARWMANKENSSDQIGGINIKSADATVNRALFDMSTTAQIRDSMRYGNFVLKEIGGINKLHKGSVEQAGFAVLKAPDIPSILVETAFISNPDEERRLNDDAYREKMADAIMTGIKRYFAANPPLAKSRMT

SEQ ID NO: 49276 - protein, 311 aa, Burkholderia fungorum
MSDTLIDDAPAASPLFVASSASIDAFCDALWLEHGLSRNTLDAYRRDLRLFCEWLAQSRNASLDTASEADLNAYSAARQKDKSTSANRRLSVFRRYYGWAVREHRAKVDPTVRIRSAKQPPRFPSTLTEAQVEALLGAPDVDTPLGLRDRTMLELMYASGLRVTELVTLKTVEVGLNEGVVRVMGKGSKERLIPFGEEAHGWIERYLREARPALLGARATDALFVTGRAEGMTRQQFWNIIKRHAAAAGVNAPLSPHTLRHAFATHLLNHGADLRVVQLLLGHTDISTTQIYTHVARERLKSLHAQHHPRG

SEQ ID NO: 49277 - protein, 369 aa, Burkholderia fungorum
MASVTLRNIRKAYDDNEVMRDINLDIADGEFVVFVGPSGCGKSTLMRMIAGLEDISGGDLTIDGTRMNDVPPAKRGIAMVFQSYALYPHMTLYDNMAFGLKLAGTKKPEIDAAVRNAAKILHIDHLLDRKPKQLSGGQRQRVAIGRAITRKPKVFLFDEPLSNLDAALRVKMRLEFARLHDELKTTMIYVTHDQVEAMTLADKIVVLSAGNLEQVGSPTMLYHAPANRFVAGFIGSPKMNFMEGVVQSVTHDGVTVRYETGETQRVAVEPASVKQGDKVTVGIRPEHLHVGMADDGVSARTMAVESLGDSAYLYAESSVAPDGLIARIPPLERHTKGEMQKLGAAPEHCHLFDSAGKAFQRKIVEVLAA

SEQ ID NO: 49278 - protein, 339 aa, Burkholderia fungorum
MAREAQSKRANRLLSSAHFKRTVTVPKSTEKLDLATRAAWLYYVAGNTQNEIAEKLQVSRPVAQRLVAFAVEKNLIRVRVDHQLADCLALADQLSKRYGLSMCEVVPVDSDTPEEVDRKLAVAGAQVMERYLGEEKPMVVAVSSGRTLKAAVDQIAQLDRPQHRLVSMVGAIAQDGSSNRYDVALHISEKTGGKHFLLPAPLLADSEAERAQWCNHRLYRIVESLSAQADVAFVGIGNIGPNCPLHEDGFITSAEVKELMQNGAVAEMLGLPIDSAGAHVELPIGRRVTSIALDSPPRRPTIGFAGGERKREALIAVLKGGWLSGLVTDESCARAALEA

SEQ ID NO: 49279 - protein, 470 aa, Burkholderia fungorum
MNSGQGSGAAAHVILHIGAGSFHRAHQAWYLHRLNEAKVPGEPHWSLTVGNIRSDMNAVLEALAAQNGVYTLETVTPQGERAYETIRSIERVVPWTGSLDALIEAGADPACRIIAFTVTEGGYYLDEEDELDTANADLAADLNGGHTTIYGALAAILDARMKRGAGPVTLQTCDNLRSNGERFHAGMSEFLERRGADELAQWFDDNTACPSSMVDRITPRPTPDVRERVKAATGVDDACPVMGEAFIQWVIEDRFIAGRPAWEKVGAELVDSVMPYEEAKIRILNAPHSCIAWAGTLIGLNYIHEGTLDADIRKFAFDYVTEDVIPCLTPSPLDLERYRDVVLERFSNPYIQDTNQRVAADGFSKLPGFIAPTLAECFERGVTPAATAMLPALFFRFLERWNAGKLPYTYQDGVMDERVARGFFAAPDPLKAFAADRLLWGSMAQTPELESALEGALARVDVWLARRGVV

SEQ ID NO: 49280 - protein, 316 aa, Burkholderia fungorum
MSDQLQKFMFSAAPVRGEIVSLRNTWQEVLTRRDYPAPVRTVLGEMMAACALLSANLKFDGTLIMQIFGDGPVKMLVVQCGSDLSMRATAKLSGEAASVIGESASMVDLLNASGHGRCVITLDPASKQPGQQPYQSIVPLSGVDGPLNSMAEVLEHYMHHSEQLDTRLWLAANTERAVGMLLQKLPGDGGIVPHPGDLDADTWERVCTLGGTMSQDELLKEEPETIFRRLFWQENVQHFEPAKARFECTCSREKVGGMLKMLGREEVDGVLEERGHVEIHCEFCNQRYEFDPVDVAQLFVAEALSQGVTPAADQRH

SEQ ID NO: 49281 - protein, 781 aa, Burkholderia fungorum
MTETVALKIVQRIAAELSVQPRQVAAAVQLLDEGATVPFIARYRKEVTDNLDDTQLRNLEERLLYLRELEDRRAAIIASIDEQGKLTDELRAAIEGADSKQVLEDLYLPYKPKRRTRAQIAREAGLQPLADALLANPRLDPQTEAAAYVDAEKGVADVKAALDGARDILSEQFGETAELLGKLRDYLFNQGVVSSKVVEGKENAEEEKFRDYYDYSETIRTVPSHRALALFRGRNAGVLMVKLGLGEELDAQVPHPGEALIARHFGIANQNRPADKWLSDVCRWCWRVKVQPHIENELLTNLRDEAEHEAIRVFARNLKDLLLAAPAGPKAVIGLDPGMRTGVKVAVVDRTGKVLATDVIYPHEPRRDWDGSIAKLARICAQTQAELISIGNGTASRETDKLASELIARHPEFKLQKIVVSEAGASVYSASELAAKEFPDMDVSLRGAVSIARRLQDPLAELVKIEPKAIGVGQYQHDVNQRELARSLDAVVEDCVNAVGVDANTASVALLARVSGLNATLARNIVDYRDANGPFPSREHLRKVPRLGDKTFEQAAGFLRINNGENPLDRSSVHPEAYPVVERMLAKISKHVGEVLGNRDALRGLSPAEFVDDRFGLPTVRDILLELEKPGRDPRPEFKTATFREGVEKVSDLTPGMVLEGVVTNVAAFGAFIDIGVHQDGLVHVSAMSTKFIKDPHEVVKAGQIVKVKVLEVDVKRQRIALTMRMDDEVGAASARSGGAQQDRGGAGRSGGGGRGAPQQRSREPEPGGAMAAAFAKLKQK

SEQ ID NO: 49282 - protein, 427 aa, Burkholderia fungorum
MSAIVDIIGREILDSRGNPTVECDVLLESGTMGRAAVPSGASTGSREAIELRDGEAGRYGGKGVLKAVEHINTEISEAIMGLDASEQAFLDKTLLELDGTDNKSRLGANAMLAVSMAVAKAAAEEAGLPLYRYFGGSGAMQLPVPMMNIVNGGAHANNSLDIQEFMIVPVSQPTFREALRCGAEVFHALKKILSDRGMSTAVGDEGGFAPNFGSNDECLSTILQAIEKAGYRAGEDVLLALDCAASEFYHDGKYQLAGEGLQLSSTEFTDYLANLADKFPIVSIEDGMHESDWAGWKTLTDKLGKKVQLVGDDLFVTNTRILKEGIEKGIANSILIKINQIGTLTETFAAIEMAKRAGYTAVISHRSGETEDSTIADIAVGLNAGQIKTGSLSRSDRISKYNQLLRIEEDLGDIASYPGKSAFYNLR

SEQ ID NO: 49283 - protein, 628 aa, Burkholderia fungorum
MTDNNHEHKQPLPSLAIAAIGVVFGDIGTSPLYSLKEAFSPSHGIPLTDQSILGVISLLFWAIVIVVGVKYVLFVMRADNNGEGGVLALMALALRSLDEKSKMAGLLMMLGIFGACMFYGDAVITPAISVISAVEGLEIAAPHLSHLVLPLTIVILILLFWIQRHGTAMVGRLFGPIMVLWFVVLAALGLWHILQSPSVIRALNPCYAYTFMAAHVLQAYVVLGSVVLVLTGAEALYADMGHFGAKPIRMAWYVLVMPSLVLNYFGQGALLMHDPKAIENPFFLLAPDWALLPLVVLSTIATVIASQAVISGAYSLTSQAIQLGYVPRMKILHTSELAIGQIYVPVVNWMLLFIILCIVIAFKSSDNLAAAYGIAVTATMVITTILACVVMVKVWNWNKLLVALIIGVFMTVDLGFFGANLLKVEEGGWLPLGIGALLFFLLMTWYKGRMIVKERTAADGIPLMPFLQGLLAHPPHRVSGTAIYLTGSDSLVPVSLLHNLKHNKVLHERTIFLTFVTRDIPYVNDADRVTVKDIDGGLYLVKAAYGFNETPDVKAVLLEVGRTHDMTFELMDTSFFLARETVVPTQLPGMSVWRERVFAWMHQNAAKPTDFFSIPANRVVELGTKIEI

SEQ ID NO: 49284 - protein, 284 aa, Burkholderia fungorum
MKLGDFEIGLDRPFFLIAGTCVVESEQMTIDTAGRLKEICAKLNIPFIYKSSYDKANRSSGKSFRGLGMDEGLRILSEVKRQLGLPVLTDVHAEHEIEQVASVVDVLQTPAFLCRQTDFIHACARSGKPVNIKKGQFLAPHDMKNVIDKARDAAREAGLSEDRFMACERGVSFGYNNLVSDMRSLAIMRETNAPVVFDATHSVQLPGGQGTSSGGQREFVPVLARAAVAVGVAGLFMETHPNPAQAKSDGPNAVPLHRMADLLETLVTLDRAVKRAPFLESDFN

SEQ ID NO: 49285 - protein, 448 aa, Burkholderia fungorum
MSASAVNVNPGRNVVVVGTQWGDEGKGKIVDWLTDHAQGVVRFQGGHNAGHTLIIGGKKTILRLIPSGIMHPGVACYIGNGVVLSPEALFKEIGELEAAGVDVQNRLFISEATTLILPYHIAIDQGREARRGAGKIGTTGRGIGPAYEDKVARRGLRVQDLFEPEIFAERLRENLDYHNFVLTQYLGVAAVDFQQTLDTMLSYADRLRPMVTDVSRRLYDVNAAGSNLLFEGAQGTLLDIDHGTYPFVTSSNCVAGAATAGAGVGPQKLNYILGITKAYCTRVGSGPFPSELYDADNAARQEAIGLELATVGKEFGSVTGRPRRTGWLDAAALRRSIQINGVSGLCMTKLDVLDGLDEVKLCVGYKVDGKNVDLLPRGASEVARCEPVYETFAGWKESTVGIKEWDKLPANARAYLSRVQEVAGIPIDMVSTGPDRDETILLRHPFKV

SEQ ID NO: 49286 - protein, 557 aa, Burkholderia fungorum
MTKYVFVTGGVVSSLGKGIAAASLAAILESRGLKVTLLKLDPYINVDPGTMSPFQHGEVFVTEDGAETDLDLGHYERFISTKMRKANNFTTGQIYESVIRKERRGDYLGKTVQVIPHITNEIQAFIERGAASATCGEPDVAIVEVGGTVGDIESLPFLEAARQMSLRMGRNSACFVHLTLVPWVATAGELKTKPTQHSVQKLREIGISPHVLLCRADRRIPDDERAKISMFSNVPEDAVISVWDADSIYKIPQMLHDQGLDAIICEELKLEPKAADLSMWSDLVEKLEHPRHEVTIGMVGKYVDLTESYKSLIEALRHASMHTSTKVNIEYIDSEEIETHGVESLKHLDAVLVPGGFGRRGTEGKIAAIRYAREAKVPYLGICLGMQLAVIEFARDVVGLKDANSTEFDQETPNRVVALITEWYDREGRVEKRTEESDLGGTMRLGSQRCPIKPGTMAEEIYGKDVNERHRHRYEVNNRFVPQLEAGGLIISARTPSEDLPEMMELPRSMHPWFVGVQFHPEFTSTPRDGHPLFKSFVEAALAHQQSRTAAEVGEKA

SEQ ID NO: 49287 - protein, 276 aa, Burkholderia fungorum
MNADLHCHSTVSDGQFAPADVARRAHAGGVTLWALTDHDELGGQREAKSTAEALGMAYLSGVEISVTWASRTVHIVGLGIDPTSAVLIDGLARTRNGRAARAEAIGEQLATLGIPDAYQGALRYVSNPDMISRTHFARFMVESGYASSTQDVFTRYLGDGKPGYVSHRWAKLADAVGWIQAAGGEAVIAHPGRYAYSPVEFDAFFAEFIDLGGKAIEVVTGSHTPDQYREYADVARRFGFEASRGSDFHAAGEGRVDLGTLPPLPADLKPVWERWL

SEQ ID NO: 49288 - protein, 325 aa, Burkholderia fungorum
MLASLSLAAPLAHASKDHPEIGFCIDDLRVERWSRDRDYFVAAAEKLGAKVSVQSADASEERQISQIENLISRGVDVIVIVPFNSKTLGNVVAEAKKAGIKVVSYDRLILDADVDAYISFDNEKVGELQAQGVYNAQPKGNYFLLGGAPTDNNAKMLREGQLKILKPAMDKGDIKVVGQQWVPEWSASTALRIVEDALTANNNKIDAIVASNDGTAGGAIQALAAQHLAGKVPVSGQDADLAAVKRVIAGTQTMTVYKPLKLIASEAAKLSVALAKGQKPGYNAQYDNGKKKVDTVLLQPTLLTKTNVDVVVKDGFYTQAQLASQ

SEQ ID NO: 49289 - protein, 440 aa, Burkholderia fungorum
MSYFEHIPEIRYEGPQSDNPLAYRHYDKSKKVLGKTLEEHLRIAVCYWHTFVWPGVDIFGQGTFRRPWQQAGDAMERARQKADSAFEFFSKLGTPYYTFHDTDVSPEGSSLKEYSENFLRITDYLARKQEDTGIKLLWGTANLFSHPRYAAGAATSPDPEVFAFAATQVRHALDATQRLGGDNYVLWGGREGYDTLLNTDLMRERDQLARFLHMVVDHAHKIGFKGSLLIEPKPQEPTKHQYDYDVATVHGFLLQHGLEKEIRVNIEANHATLAGHSFHHEIATAYALGIFGSVDANRGDPQNGWDTDQFPNSVEELTLAFYEILKHGGFTTGGMNFDSKVRRQSVDPEDLFYGHIGAIDNLALAVERAAVLIENDRLDQFKRQRYAGWDADFGRKILSGDYSLSTLATDALARGLNPQHASGHQELMENIVNQAIYSGR

SEQ ID NO: 49290 - protein, 216 aa, Burkholderia fungorum
MPALTDTRSLRILAANNHRCAVVDAPCSVVSIPGGLALPGCAPSDLTLRRFAMSFVVNDSCMESLSAVAAHHEDWIIQQAIALLERRIFKVGPCLSGPAAVRDYLRLKLVAEPNEVFAAVFLDSMHQVLAYEPLFRGTINSTAVYPRVVVQRVLELKAAAVVFAHQHPSGSTEPSNADRALTQRLQAALALIDVRLLDHIVVGLGNPYSFAEHGLL

SEQ ID NO: 49291 - protein, 307 aa, Burkholderia fungorum
MAMADRLPYWNEVVSSTFIPSSVQPPRAGEFRASLHNERLGEAELTVVRASPQRVARTSALIRLSSDECLMFGFAPKARWKVSQHGRTVQVAPMQFVLYDSNYPFELEFDEDFDLHVLQLPHASLAFAGSRLSDVAGRPFDAVSGAGKLLASLIEEVRSGHTSSGVIARTSLGSVAVHLATSMVSELLELRTDEANERELRLLRVKSYIELNLANPRLDPHAIASANGMSVRTLHGLFSAEELGVSTYVTHRRLLRCKEDLGNAMHSSLSVAGIAMRWGFWNNAYFSRAFKRMFGISPRSYRIGRRP

SEQ ID NO: 49292 - protein, 119 aa, Burkholderia fungorum
MPRVKRGVTARARHKKIIKLAKGYRGRRNNVYRIAKQAVMRAGQYAYRDRRNKKRVFRALWITRINAAVRQHDMTYSVFINGLKKASIELDRKVLADMAVFDKAAFAAIVQQVKAAVAA

SEQ ID NO: 49293 - protein, 62 aa, Burkholderia fungorum
MKTKKSAAKRFVVRPGGTVKRGQAFKRHILTKKTTKNKRHLRGSTAVHDSDLNSVRAMLPFA

SEQ ID NO: 49294 - protein, 233 aa, Burkholderia fungorum
MLLAVDIRKTFQSAERRFTLDVAFQATSQRVVLFGPSGAGKSLTLQAIAGLLRPDEGTITLHGNALFDSARGIDLKPQARRVAYLFQDFALFPHLNVRQNIGFGLQHGWLNPRARISHPQIDYWLDALELKSVAGNHPAQLSGGQKQRVALARALVAQPRLLLLDEPFSALDSALRERMRRELSELQTRLDIPMVLITHDPDDVAAFGDQVVQVSNGQVRENQPFAGYARSEP

SEQ ID NO: 49295 - protein, 303 aa, Burkholderia fungorum
MALTFNLNNVITFLAVAETLSFRRAAEHTHTSQSAVSARVSQLEDRLGVRLFHRTTRQVTLTAEGLQLFVVARTAVEDMERVAESLRKKAALQSGELTIAAVPSIGQTVLPTIMGEFHRRYPGVTLKLLDVDSQRCIEMMEAGSVDLAIVSDLEDRHDIVFEPLFRDECFLVVPRTHALGERRSISLREAASFPLMASPRGTTLWQIIERAFAACGATPVAHQETWNMSTLVRLVEEGFGMGIVPEICLGKLDVSRCTVLSLEEHVGRMIGVARMTNRSESPGSKAFRQLLGERTPPLRAVRQ

SEQ ID NO: 49296 - protein, 267 aa, Burkholderia fungorum
MPTFAANLSMLFTDVPFLERIAAARSAGFKAVECQFPYALDKHELASTLNENGLALALFNLPAGDWEAGERGIACHPDRVGEFRDGVWLALEYAQVLGCSRLNCLAGKLPAGVVDDEARSTLLANLKWAASKLEKVGIALLIEPVNTFDVPGFVLTNTDDAVSLIHDAGVFNLFVQYDIYHAQRMKGELANTIQRHLPLIGHMQLADNPGRHEPGTGEINFRWLLPYIDTLGYDGYIGCEYIPASTTINSLDWLKDSIQAEYDHGKQ

SEQ ID NO: 49297 - protein, 446 aa, Burkholderia fungorum
MGDKSMSLKPLIRSLSVAAVLCAGLSQAAHAATEIQFWHGMEAALGERLNDIANAFNASQSDYKIVPVFKGTYDQTLAAGIAAYRSGNAPAILQVYEVGTATMMQAKKAVIPVSEVFRQAGVPLDEKAFVPTIASYYSDAKTGELISMPFNSSTPVLYYNKDAFKKAGLDPNQPPKTWAELQADAQKLKASGMACGYSSGWQSWIQLENYSAWHGAPFASKNNGFDGPDAQLEFNKPLQVAHIQFLQNMQKDGTFTYVGRKDEPVSKFYSGDCGIITNSSGSLATIKKYAKFNFGTGMMPYDASVKGAPQNAIIGGASLWVLSGKDPAVYKGVAKFLAYLSSAPVAAKWHQDTGYLPVTTAAYQLTQQQGFYEKNPGSDTAIKQMLNKPPLPYTKGLRLGNMPQIRTVIDEELEQVWAQKKTPQQALDASVSRGDELLRRFEKAGN

SEQ ID NO: 49298 - protein, 349 aa, Burkholderia fungorum
MKRDDIMSITPQEALQRTIEHREIFHDEMLHLMRLIMRGELSPVMAAAIITGLRVKKETIGEITAAATVMREFARHVEVQDNSNFVDIVGTGGDGSHTFNISTATMFVSAAAGAKVAKHGGRSVSSKSGSADVLEALGVNIDLQPEQVAASIAETGMGFMFAPNHHPAMKNIAPVRRELGVRTIFNILGPLTNPAGAPNQLMGVFHADLVGIQVRVMQRLGAKHVLVVYGMDGMDEVSLGAATQVGELRDGQIHEYEIHPEDFGMQMVSNRTLKVADANESKAMLLEALDNKPGVAREIVTLNAGTALYSANVASSIADGIQLAREAIASGKARAKVDELARFTQQFKQ

SEQ ID NO: 49299 - protein, 261 aa, Burkholderia fungorum
MSDILDRIIAVKREEVRAAEQSAPLEELRLEASSRDLRDFVGALRAKHAAGLAAVIAEVKKASPSKGVLREHFVPAEIARSYEKHGAACLSVLTDVQFFKGSVAYLEQARAACNLPVLRKDFIVDPYQIVEARAMGADAILLIAAALETSQMQDLEALAHSLGLAVLVEVHDRDELMEALTLKTPLIGINNRNLRTFETSIETTIGMLEAIPDDRIVVTESGILSRVDVERLRAMDVHTFLVGEAFMRADEPGVELARMFF

SEQ ID NO: 49300 - protein, 594 aa, Burkholderia fungorum
MQPLNYAPRVGCTCLEWTVAQARASPVSSATSDVTRCRHGFAANLHGAGLGAETPAPADTGEDVKSSIQRNIGPFALMLTGLGSIIGSGWLFGAWKAAKIAGPAAICAWVIGAVVILAIALTYAELGAMFPESGGMVRYARYSHGALVGFISAWANWIAIVSVIPIEAEASIQYMSTWPYPWAHALFVDGSLTTHGLLLSAALVIIYFLLNYWGVKLFARANSAITIFKFLIPGATILGLMLTGFHKENFGEVSTFAPYGWSAVLTAVATSGIVFAFNGFQSPINLAGEARNPARSVPFAVIGSILLALVIYVLLQIAYIGAVNPSDVMKGWSHFNFASPFAELAIALNLNWLAILLYVDAFVSPSGTGTTYMATTSRMIYAMERNNTMPKMFGNVHPFYGVPRPAMWFNLLVSFIFLFFFRGWSSLAAVISVATVISYLTGPISLMSLRRAATDLERPLHIPGMKIIAPFAFVCASLILYWAKWPLTGEIILLMVVALPVYFYFQAKSGFAGWGRDLKAAWWLVAYLPVMAILSLIGSKQFGGHDLIPYGWDMLVVIAFSLVFYYWGVNSGYRSEYLDERQEHDEVLEGIGAH

SEQ ID NO: 49301 - protein, 241 aa, Burkholderia fungorum
MKKTFRIAAAALAIAAVTIGCSAQADQTTDKLKATLQTRLADVTIKSVTKSPIAGLYEVNLGTQIVYSDANGDYLLLGDMVDAKTRKNLTEARLAETNRIDFASLPFGNAVKVVKGNGARKIAVFSDPNCPYCKQLETSLKSIDNVTIYTFLYPVLSPDSTMKSKSIWCSADRAKAWESWMQDHQAPTAAGTCDTAAIDKNLALGHAMNVDGTPTVFLADGRRLPGAVPADRLDKEMSAVR

SEQ ID NO: 49302 - protein, 390 aa, Burkholderia fungorum
MNAHHQTFDAAVIGGGLVGKTAALALTQGGLRVALLAQPCAPLPPGASFDSRVYALSSSSQALLERLRVWQALDLTRLGPVYDMRVYGDAHAELHFSAFQASVPQLAWIVESSVIERALDAALRFQPNLTWIDTRAQALDFTADSASVGLANGNVIEADLVVGADGAHSWVRAQIGSKMDRRDYRQTGVVANFKAGKPHGETAYQWFKDGEIIALLPMPDGHVSLVWSARTEHAAQLVALDPAQLAAEVERVTGGQFGALDCVTPAQGFPLALQTVDRLVAPRVALVGDAAHLIHPLAGQGMNLGLRDVAALADTVAGKESFRDLGDMVLLRRYERARREDIRALMIATDGLQKLFSVPGPFAKALRNTGMAFVGAQPFIKRWLVSAALG

SEQ ID NO: 49303 - protein, 263 aa, Burkholderia fungorum
MSYEAIRLDIDASSHVATITLNRPDKLNSFTRAMHQELSAALDQVEASGARALVLTGAGRGFCAGQDLADLDFTPGAMTDLGELIEQHFNPLIRRLQALPLPVIAAVNGTAAGAGANLALACDLVLAARSASFIQAFVKIGLVPDSGGTWFLPQRVGMARALGLAITGDKLSAEKAESWGLIWQAVEDAELAGTATKLASQLAQQPTRAIAAIKQAMRAGATQTLDQQLDLERDLQRELGASHDYAEGVQAFVEKRAPRFEGR

SEQ ID NO: 49304 - protein, 434 aa, Burkholderia fungorum
MTTALPLDPIETASRDELAALQLERLKWSLNHAYENSPVYRRKFDEAGVHPSDVNSLADLARFPFTTKKDLRDSYPFGMFAVPQDQVSRIHASSGTTGKPTVVGYTARDIDTWANLVARSVRAAGARRGDKVHVSYGYGLFTGGLGAHYGAERAGLTVIPFGGGQTEKQVQLIQDFRPDIIMVTPSYMLSIADELERQGVDPANCSLRIGIFGAEPWTNDMRQAIEKRMGIDAVDIYGLSEVMGPGVASECVETKDGPTIWEDHFYPEIIDPETGEVLPDGELGELVFTSLTKEALPIIRYRTRDLTRLLPGSARTMRRMEKITGRSDDMMIVRGVNVFPTQIEELLLKQPMLAPHYQIVLTREGPLDVLTLNVEPCPETAPDTAALNTARQALAYDIKALIGVSAVVNVLGVNGIERSVGKARRVVDKRKSGL

SEQ ID NO: 49305 - protein, 606 aa, Burkholderia fungorum
MAGARALWRATGMKDGDFGKPIIAVVNSFTQFVPGHVHLRDLGALVAKEIEAAGGVAKEFNTIAVDDGIAMGHGGMLYSLPSRELIADSVEYMVNAHCADAMVCISNCDKITPGMLMAAMRLNIPVVFVSGGPMEAGKVKSPKDGQVIAKIDLIDAMIKAADSKVSDAEVAEIERSACPTCGSCSGMFTANSMNCLTEAIGLALPGNGTIVATHAWRKDLFEQAGRLVVDLCRRYYQEEDTSVLPRSIASKQAFENAMALDVAMGGSTNTVLHLLAAAQEAGVDFTMSDIDRISRKVPCLCKAAPATDKYHIEDVHRAGGILGILGELARADLLDLSCGNVHSGTLGDAIARWDIAGGAGEEAQKFFRAAPGGIPTTVAFSQEATFPSLDTDRKTGCIRSKQDAYSKDGGLAVLYGNLAEKGCIVKTAGVDESQWVFSGRARVFESQDDAVEAILGDKVVAGDVVVIRYEGPKGGPGMQEMLYPTSYLKSKGLGKTCALFTDGRFSGGSSGLVIGHASPEAAEGGTIGLVEEGDVIEIDIPKRKMHLVVSDGELARRREAMEARGDKAWMPAARERVVSQALQAYAALATSADRGAVRDISQLKRK

SEQ ID NO: 49306 - protein, 892 aa, Burkholderia fungorum
MIFLGGKYDMRTMIPVLKTWLRRSPSPTGVHVSATCSETLTEFARVSPDEALQRLHSAASGLSADEVAERLRSTGSNQVAHEVRHTILGELANRSVNPLNLLLLSLAGASYFLGDSRATIMIAVMVVLSVSLGFLQEHRSNKAADALRRMVRTTATVRRRATGAEADHVDIPIEQLVPGDVVLLSAGDMIPADLRLISARDLFVNQSTLTGEAMPLEKVAHACGGAAETHFDLPNICFMGSAVVSGVGCGVVVLTGGRTAFGRVADLIAAQRVETSFDKGIARFTWLMMAFILVMVPLVFVINGLTKGNWFEALLFAVAVAVGLTPEMLPMIVTVNLAKGAIAMSRKKVIVKRINAIQNFGAMDVLCTDKTGTLTQDRIILKRHLDLHGDESDQVLEYAYLNSAHQSGLKNLLDVAVLKHVELHEQLKVHEQYTKIDEMPFDFERRRMSVVLARGDGAHILICKGAVEEIFSVCTRYVINGDMGTLDERNFTAAKEATAALNADGFRVVAVAYKEMPPQQATYTVGDEADLILLGYIAFLDPPKETAAAAIATLKERGVQVKILTGDNDIVTRKICHEVGLTVGRVVLGKELETLSPAQLADLAETASVFAKVSPSQKASIIDALHRKGHVVGFLGDGVNDGPALKVADVGISVDSAVDIAKESADIILLEKSLAVLGEGVLEGRKVFGNITKYIKMGASSNFGNMFSVLGASIILPFLPMAPIQVLTNNLLYDFSQTAIPTDNVDEEYLRVPRRWDIGNIVKFMLLIGPISSIFDYVTYFMMLYVFGAWDKPSLFQTGWFVESLLTQTLIIHIIRTSKVPFLQSRASAALIATSLIIAAVGIAIPYTWLGTFLGFIPLPSAYWPALVLILLSYAVLTHLMKTWFVRRFGLD

SEQ ID NO: 49307 - protein, 139 aa, Burkholderia fungorum
MSSGVQSGNDLPDKQELEAMSVFRYELRKFLRVSEEIANAAGITTLQYQLLLHVRGFAGRRWATVGELAERLQAAPNGTAALVSRCESAGLVTRKADASDRRQVQVHLTPKGERCLLELAAEHKAHYGSFGWVFGDSAK

SEQ ID NO: 49308 - protein, 1531 aa, Burkholderia fungorum
  MISC_FEATURE (611)..(611): X=any amino acid
  MISC_FEATURE (612)..(612): X=any amino acid
  MISC_FEATURE (613)..(613): X=any amino acid
  MISC_FEATURE (614)..(614): X=any amino acid
  MISC_FEATURE (615)..(615): X=any amino acid
  MISC_FEATURE (616)..(616): X=any amino acid
  MISC_FEATURE (617)..(617): X=any amino acid
MGEAFWAAREGDALLHTSLMADIAGGVLDVAINAAIMLAVDLAVGAAIAAAPFTFGASACLAVGLVVGVGVGIGMSASGLSEGISSFCSDVGNAIFPPTVQGHISSGSADTYVNGKRAARAAGILLTQEEIDAQVKAAAEAPPRQQSIIDIAGEALQWGQAFISQMWRPAVAAPEPANPCPDDKVHCEKHPSSITAMAEDVANASAGTVFFNAVSGMGALDAGLKAVSAINGASEYIAEGVKHVTINGQPAARSGARTTCEAKVVDEPASGADVSPDVRIGGPLAVVREIRSGKSPIALMIAVVLAFMGKGSATSKFGCFLFGTGVSVLTQKAGDALRGLYHRASNAVLQPVNAATGAKYLAGEEDLDFSLPGPFALDWQRIYNSRDERHGGMFGTGWSVPFEVAMEATPGAEDTDCWTFIDETGRRVNLQAVRPGQGFRSPGEGLSVRRSAAGHWLVESDEGLYRVFEPDPHNAERQRLLQLSDRNRNALRLHYNDAGRLEAIADSTGHQCVRLHYEEPVHPYRVSRLERLYGEDLQQRDVLVRYRYDADGNLAEVRNRDDTILRQFAYDAGHRMVMHRLPAGMECHYGWGRFDGPDGEEWRVVEHWTDXXXXXXXDYQIEARTLRVRDSLGRSTFRQWDELYQITCFEDELGHVSRFEWSRERQLLAVTDAKGGVWRWDYDEAGRVSAVTDPLGRVEQTQWHPVWALPTLEADTGGNTWRHFYDERGNRIVTIDPLMQRTLYHRDAHGQVMMITDARGGERHLRWNEDGQLSSHTDCSGSVTAFYYDARGALECVTNAEGDCTRYRRDALGRLVTMVHPDGREERFTVDAAGRLLTHTDASGRTTRYQRDRRGLVQARIDGAGHRVGFEYDSYGRLLALVNENGERYGFAYDAKNRLTRQTDLDGRRQETDYDALDQVAAVRYAAGGDAQIEHTFGRDALGRLIGRYTPDAITFHDYDASGNLLTISRKRHDAPRKRDVEVIAFRYDRLGRLLEEATSQGKLRHEYDVLGNRIATTLPDGRTINHLYYGSGHLHQINVDGETVSDFQRDRLHREVLRSQGKLDTRSLYDVNGRLARRQSYRGMNGVVPDRVIDRGYHYDALDRLVSKRHSLQQQTVYRYDDSGRISGCHNEAYWDTLQYDAAANLVEVRERARVKGEPAPVEREGNVVRFNRVLRFRDRRYEYDAHGRTASRLTAAGLQRYRYDAEHRLVEVSIEQTGGPVRRYGYAYDAVGRRVAKFAMDGDGQPFGRTRFLWDGMRMVQEVRADGADSLYLYNGEGSYEPVARIDGRNGLGHSIYYYHTDINGAPEELTSADGRIVWQAMYQLWGNTVRESEPESYAVRQNLRYQGQYLDRETGLHYNTLRYYDPDIGRFTTPDPIGLAGGVNLYRYAPNPMSWIDPMGLSCTSNLKDIENQLSRGKGATVTVSSKAEAEELLRAYTSGPAGRRGAFRNTTGQEFPRDLFDPEKVVGPGSIPHNASDWLPAGRGAFQREGTYHWDAANAGANPGDHALLGDHLQIHNFDGSIIRIFY

SEQ ID NO: 49309 - protein, 149 aa, Burkholderia fungorum
MQQARYYTNEAAFTLPDDSYVDSSFNVIRLPQLNANLVISRGALKDGETLESSLDEQMRRLADQVAELHYSAKQPVTIGPQQDVAGFEMQNRFMRGKEPVYQYQLAWLLPGTRTMMALSYTRATALTDTDAAHWSAIKASIDFRSATRG

SEQ ID NO: 49310 - protein, 676 aa, Burkholderia fungorum
MLNFVTRRTLTVSGAMLPTLPDGEPALQLRAIAGEETLSTIYEYELSLVTPVDSLLPDSTAANFDLKEMIGGELTVTIQLDGMGTFVPGMAGASGAANFGAGMREISGIVTAASLVSQLNRQYLYRLKMQPWIVLAERRTDYRIFQNKTVVEIIDEVLKSNYLYSYVKRLGGRYSNLVYQVQYGESDFAFIQRLMAEHGIYWFFEHSRSFHRMVLVDNLGAHKPVESLAYQTLWYYPPGHKIDREYIEEFQTTDCIQSGVWTTDDFDFTQPGADLAVKNALPQKTAHNRLSVYEWPGDYTDAKDGAQFARVRMEEIRARGERATGRGHLRNVVCGTTFTLAGYPQEAANREYLVIGAKLLAEETGEQTGAGQYRIDTTFELQPATTMFRAPRTVAKPRTTGPQTAIVTGPPGQEIWTDRYGRVKLKFHWDHSPVNDQNSSCWVRVSYPWAGSNFGGVNIPRVGQEVIVDFENGDPDRPIVTGRVFNAASMPPWELPGNATQSGMLSRSMKGHYGTANAIRFEDKEGAEELWLQAERDMRTEVENDALHTVGNDRVRTVARNELVTIGDTRQRCVKADDGTLVGKDRVVEVLNNLLCAAGDSITLSCGDSIIELKSNGEINVTCNNFNITAKQSGKINAQAGNLDLNMGGKQEGVAPHGSGEKASIQSHVDAVFPKK

SEQ ID NO: 49311 - protein, 405 aa, Burkholderia fungorum
MESFDIAVIGAGAAGMMCAAVAGQLGRRVVLIDHSQRLAEKIRISGGGRCNFTNLYAGPANYLSANPHFCRSALARYTPRDFMALLKRHHVTWHEKHKGQLFCDQSSDAVINVLKSECDAGRVAWRTPLSVEQVRQDAAGRFALDTRSGPITARALVIATGGLSIPKIGATDFAYRLARQFGHKLIDTRPALVPLTFAAADWEPFSALSGVSLEVQLATGNKKTGAEFNEDLLLTHRGLSGPGVLQISSYWQPGEPIHINLLPEQDATTALLEAKTGTKRQIGNLLSEWVPQRLAHVWLEAHQVPAEARVADLPDKTLRRVGEALSRWTLTPNGTEGYRKAEVTRGGVDTRELSSSTMMSARAPGLYFIGEAVDVTGWLGGYNFQWAWASGVAAGQAAAEYVQGA

SEQ ID NO: 49312 - protein, 355 aa, Burkholderia fungorum
MSLPVRPPKPTHHMLVLGIESSCDETGLALYDTERGLLAHALHSQIAMHREYGGVVPELASRDHIRRALPLLEEVMERAGTAAGDIDAIAYTQGPGLAGALLVGASVANALAMAWDKPTIGIHHLEGHLLSPLLVDEPPPFPFVALLVSGGHTQLMRVTDVGVYETLGETLDDAAGEAFDKTAKLLGLGYPGGPEVSRMAEFGTPGAVVLPRPMLHSGDLDFSFSGLKTAVLTHAKKLGGANICEQAKADLARGFVDAAVEVLAAKSLAALKKTGLNRLVVAGGVGANRQLREALSAAAKKRNFYVHYPDLSLCTDNGAMIALAGALRLQRWPDQSGKDYAFTVKPRWDLTSLAR

SEQ ID NO: 49313 - protein, 265 aa, Burkholderia fungorum
MNPAFVMPDVQSTPDTRQIPIQRVGVKAVRHPLTVRTQGGEVQPTVGTWNLDVHLPADQKGTHMSRFVALLEENKAPLEPATFRTMLAAMLEKLEAEAGRIEVSFPYFVNKTAPVSGVQSLLDYEVTLTGETRNGATRLFLRVRVPVTSLCPCSKKISQYGAHNQRSHVTINAELAGDVAVEELIRIAEEEASCELWGLLKRPDEKFVTERAYENPKFVEDLVRDVAQRLNADERIVAYVLEAENFESIHNHSAYAVIERDKRAG

SEQ ID NO: 49314 - protein, 293 aa, Burkholderia fungorum
MTFEQWMRSVLERVETALDHYLPGEATEPATLHEAMRYAVLGGGKRVRPLLCHAAGELTGARAECLDAAAAALEMIHVYSLVHDDMPCMDDDALRRGKPTVHVKYDEATALLVGDALQSQAFVALTSDVLAPAQQAALVRELALASGSVGMCGGQAIDLASVGHTLTRTQLETMHRMKTGALLRAAVRMGALAGETPDAAAMRSLDAYSAAVGLAFQVVDDILDVTTDSATLGKTAGKDAKDGKPTYVSIIGLDASRALAAQLRSDAHAALAPFGARAQRLAELADLVVNRVS

SEQ ID NO: 49315 - protein, 680 aa, Burkholderia fungorum
MTKKLNEVPVDDDATQSEENPAAVPAKVEKAKARDRRAKEKALLKDAFASSQPGTVEELEERRSKLRALIKLGKERGFLTYAEINDHLPDNFTETEAIEGIISTFNDMGVAVYEQAPDAETLLLNDNAPAASSDDEVEEEAEVALSTVDSEFGRTTDPVRMYMREMGTVELLTREGEIEIAKRIEDGLKHMVMAISACPTTIADILAMAERVANEEIRIDELVDGLIDANAEDADGFSAQEAEAIESEDEEVEEDSEEDEEEDDGTAQATANAAQMEALKRASLEKFAMISEWFDKMRRAFEKEGYKSKSYLKAQETIQNELMTIRFTARTVERLCDTLRAQVDEVRQVERQILHTVVDKCGMPRAEFIARFPGSETDLEWADKIVGEGHAYSAILTRNIPAIREQQQRLLDLQARVVLPLKDLKETNRQMAAGELKARQAKREMTEANLRLVISIAKKYTNRGLQFLDLIQEGNIGLMKAVDKFEYRRGYKFSTYATWWIRQAITRSIADQARTIRIPVHMIETINKMNRISRQILQETGLEPDPATLAEKMEMPEDKIRKIMKIAKEPISMETPIGDDDDSHLGDFIEDNNTVAPADAALHASMRDVVKDVLDSLTPREAKVLRMRFGIEMSTDHTLEEVGKQFDVTRERIRQIEAKALRKLRHPSRSDKLKSFLEGN

SEQ ID NO: 49316 - protein, 622 aa, Burkholderia fungorum
MIPPSFLQDLLNRVDIVDVVGRYVQLKKGGANFMGLCPFHNEKSPSFTVSPTKQFYHCFGCGAHGTAIGFLMEHVGSSFPEAVNELAQSVGLTVPNEPSPGYGGGGSGGYAPAASKAVTTALSEVMQTACDFYRKQLRSAPVAIQYLKKRGLTGEIAARFGLGYAPDGWQNLEAAFPNYRDDSLVESGLVIVSEKSDAQGQNRRYDRFRERIMFPIRNVKGQVIGFGGRVLDGGEPKYLNSPETPLFNKGSELYGLFEARLAIREQHYVLVVEGYMDVVALAQLGFQNAVATLGTACTPIHVQKLMRQTDTVIFSFDGDSAGRRAARRALDACLPHAADNRTIRFLFLPAEHDPDSYVREYGTEAFAEQVERAMPLSQFMLNEVLTGKELDQPEGKARALFDAKPLLQALPANALRAQIMHMFADRLDVPFDEVAALCEVDSRIAAAARAAPARKDRRSVTGIEEKTLRNLVMHPRTVAVLDEEAEQALLTVTRHGELFEEVTTHARALGDSAEFQLLSDLLRNGANAPTFEEIFRKILDYDENVRDLLLKDPEDATVIEERREQERIVGEELKAAILKMRYDAYCDRLEQLSRQSRHTPEEFAELSELNRKRADMKRRLGL

SEQ ID NO: 49317 - protein, 148 aa, Burkholderia fungorum
MSLKDRINDDMKAAMRARETERLGTVRLLLAAIKQREVDERITLDDTAITAVIDKMIKQRKDSISQFEAAGRTDLADKEKAELAILSAYMPEQMSEAEIVAEVQAAVAQTGAAGPQDMGKVMGVLKPKLAGRADMTAVSAQVKAALAK

SEQ ID NO: 49318 - protein, 70 aa, Burkholderia fungorum
MTTIRVKDNEPFEVAMRRFKRTMEKTGLLTELRAREFYEKPTAERKRKKAAAVKRHFKRLRGQMLPKKFY

SEQ ID NO: 49319 - protein, 277 aa, Burkholderia fungorum
MPKSSLFPNQSFLFVPGNRPERFEKALASGADAVIIDLEDAVPPDAKDDARNAVASWVSPDRPVLVRVNASDTPWFAQDARLGHLRGIAGMVLPKTGSADDVITLIAGSRARIPVYPMIETGKALWNALEIAKAPFVKQLLFGTLDFIADIGMSGHGEELAAFRSQLALVSRVAGLEPPIDGVSPDIGDAGQLIKETLAGKRLGFGGKMCIHPKQVSIVNQCYRPSDAELEWAHTVLEAVGNASGTVITVDGKMVDRPVVLRAERMVALARTRRHAG

SEQ ID NO: 49320 - protein, 509 aa, Burkholderia fungorum
MHEMDNTVATAAALPAANAAKRGKYLSVTSIGLMTAAAVVTSLRGLPLLAKEEMTMFVYLAFTVVFYLIPASLISAELGGAFADRRGGIYTWVAEAFGTRWGFLAIWLQWIQNVVWYPVALTFGAAALAYTIGRPDLAKNGVYVGIFCIVAYWLSTWLVLQGVEVFARIANWTFVIGTIVPGVVLLALLGYWISSGHPLGWQHLNDAALSQGGHARFWPAIHGFGTISFLAGIVLLFAGVEVQAVHVIDMRSPSRGYPAAIGLGALISVLIFALGALPIAAILPYEKISLQSGVFDAFSAVLVDLWHMGWAVSALSLLVGVGAISGVLAWLGSPSRGLLETAHEGELPPILQAKNRKGMPTHILLVQGLIVTVISCFYFVIRDVSVAFFLISAMTIALYLIAYMLMYAAAIRLRYSAPALTRPFTVPGGLAGMWLTAGIGFVGVLFSFVVSFFPPDQLPVGSPWLYTGLVVLGIVVFAGIPLIIHHVRRSGWATAHDAPLTGPAATPLK

SEQ ID NO: 49321 - protein, 396 aa, Burkholderia fungorum
MKYVDEFRDPDRARALTHEIRRLVERIARTRGGLERPLQIMEVCGGHTHSIFRYGIHQMLPPEVEFVHGPGCPVCVLPMGRVDDCVALARRPEVIFTTFGDAMRVPGSSTSLLKAKADGADVRMVYSPVDALAIARANPHREVIFFGLGFETTMPGTAMTVLQAHAGRVENFSLFCNHITIVPTIKAILDSPDLRLDGFLGPGHVSMVIGTRPYRFIAEQYRRPITVAGFEPLDVLHSVFMVLRQIAEGRSEVENQYARIVPENGNAQALSAIGQVFEPREFFEWRGLGSIEHSGVRIRDAFAAFDAERKFPVANLQLADPQACQCGEVLKGVIKPPQCKVFGTACTPDRPLGALMVSSEGACAAHYRYARIDTSALTAAAAVCPGPAPAALRVQA

SEQ ID NO: 49322 - protein, 561 aa, Burkholderia fungorum
MELAMNISPLAGKRLPDAMLVNVPRLVTAYYTDKPDAAIPAHRVAFGTSGHRGSAFARSFNEWHVLAITQAICYYRKQQAIDGPLFIGIDTHALSEPAYASALEVLAANGVEVMIAQNGEYTPTPAVSHAILAYNRGRSAGLADGIVMTPSHNPPESGGFKYNPPNGGPADETVTGWIERAANGLLESRLDGVLRICLSKALRATTTHRHDFLNAYVGDLVNVLDMDVVRGAPIRLGVDPLGGAGVHYWGPIAERYNLNLSVVNDEVDPTFRFVSVDWDGRIRMDPSSPYAMQTLIDQKDRFDVAFACDTDHDRHGIVTRHAGLLPPNHYLAVLVHYLYANRPQWRAHVAVGKTIVSSQMIDRVTEKLGRTLYEVPVGFKWFVDGLLDGSLGFAGEESAGASCLRLDGTAWSTDKDGIVPALLAAEMTTRTGRDPAEIYRDLTQRLGEPVERRVQAAATAPQRALLARLSPAQFPHTELAGEKIEQVLDRAPGNGAAIGGIKVVTKSGWFAARPSGTEDVYKIYAESFRGEAHLTRIVGEAQAMVDSVFEAQVATDDGARP

SEQ ID NO: 49323 - protein, 216 aa, Burkholderia fungorum
MQAMPRVRQVATRHTGAAAFYAKLSGVRYAGFAIRRPSLADRFVSLFKGVIMAKKEASAAVQHVNIGISDKDRKKIAEGLSRLLADTYTLYLKTHNFHWNVTGPMFNTLHLMFETQYNELALAVDSIAERIRALGVHAPGSYKEFARLSSIPEADGVPAAEEMIRQLVEGQEAVVRTARAIFPSTEAANDEPTADLLTQRMQTHEKTAWMLRSMLA

SEQ ID NO: 49324 - protein, 139 aa, Burkholderia fungorum
MNRLMNYGISTEAGAKLRIDKWLWAARFFKTRSLAAAAVEKGHVRIEGASVKPAKDVRVGDLVEIEIERIVWQVAVLGVCDVRGPASVAQTLYAETEESRVKRQVEQERRKTYREPAAALHGRPTKRDRRTIDKLSGGG

SEQ ID NO: 49325 - protein, 232 aa, Burkholderia fungorum
MPDLIHNLEAVRQRIATAAHVAGRDTRSIHLLAVSKTFPAEDVRAAYAAGQRAFGENYVQEAITKIEALADLRATIEWHFIGPLQSNKTRPVAEHFDWVHSVDRLKIAQRLSEQRPDNLPPLNVCLQVNISGEASKSGVGIAEAAQVAQAIAALPKLKLRGLMAIPEPAGSIDEQRVPHRQLRELFERLRDGGLALDTLSMGMSSDLEAAVLEGATIVRVGTAIFGARDYSN

SEQ ID NO: 49326 - protein, 653 aa, Burkholderia fungorum
MGKIIGIDLGTTNSCVAIMEGNSVKVIENSEGARTTPSIIAYMEDGEILVGAPAKRQSVTNPKNTLYAVKRLIGRRFEEKEVQKDIGLMPYKIIKADNGDAWVEVRDQKLAPPQISAEVLRKMKKTAEDYLGEPVTEAVITVPAYFNDSQRQATKDAGRIAGLEVKRIINEPTAAALAFGLDKNEKGDRKIAVYDLGGGTFDVSIIEIADVDGEKQFEVLSTNGDTFLGGEDFDQRIIDYIIGEFKKEQGVDLSKDVLALQRLKESAEKAKIELSSSQQTEINLPYITADASGPKHLNLKITRAKLEALVEELIERTIEPCRVAIKDAGVKVGEIDDVILVGGMTRMPKVQEKVKEFFGKDPRRDVNPDEAVAVGAAIQGQVLSGDRKDVLLLDVTPLSLGIETLGGVMTKMINKNTTIPTKHSQVYSTADDNQGAVTIKVFQGEREMAAGNKLLGEFNLEGIPPAPRGTPQIEVSFDIDANGILHVGAKDKATGKENRITIKANSGLSEAEIEKMVKDAEANAEEDHKLRELADARNQGDALVHSTKKALTEYGDKLEAGEKEKIESALKDLEETLKSGSSDKAAIEAKIEVVATASQKMGEKMYADMQAAQGAEAAAAGAAGAGGAGASAGGASQQQDDVVDAEFKEVKKD

SEQ ID NO: 49327 - protein, 271 aa, Burkholderia fungorum
MTYLQEASRNAVTVPKLQAMRDAGEKIAMLTCYDASFAALLDRAGVDVLLIGDSLGNVLQGQTTTLPVSLADIAYHTASVARARPAALIVADLPFGTYGTPEDAFRSSVELMRAGAQMVKLEGGEWLADTVRFLVERSIPVCAHVGLTPQSVHAFGGFKVQGKTEAGATQLLRDSLAVQAAGAQLIVMEAIPTLLASDATKQLRIPTIGIGAGLDCSGQVLVLHDMLGIFPGKRPRFVKDFMQGQPSILAAVEAYVAAVKDGSFPGPEHTF

SEQ ID NO: 49328 - protein, 182 aa, Burkholderia fungorum
MTVAYLGLGANLGDARQTLKDAVVCLAQQHTITVLAKSSLYRTAPIDAGGDDYFNCVVKVDTTLPVRHLLALCHKIEHQFGRERPFRNAPRTLDLDILLFGDQSIDEADLIVPHPRLIERAFALVPLVEIDSALIIPQHGRAEALLSKVSDQRIEKVKGPCQCPMLNALTVGEDKTGKGRCE

SEQ ID NO: 49329 - protein, 529 aa, Burkholderia fungorum
MIKKFIRKLFGQDTAPADDTLPAEAEADETGNAPARTPSGASKARRKPARSSAPAKTVRDPDVPVIIPHDVHGIDQALISRNAIRVTEGLQQAGHRAFIVGGAVRDLLLGIKPKDFDVATDATPEQVQKLFRRARIIGRRFQIVHVQFGQEIIETSTFRALVDPPAADAPPARRLKRDELDRRTHAVDASGRVLRDNVWGEQHEDATRRDFTINAMYYDPATQTVLDYHNGMADMRARLLRMIGDPATRYREDPVRMLRVVRFAAKLDFEIEDSTREPIAGMADLINNVPAARLFDEMLKLMLSGHALACLKRLRQEGLHHGLLPLLDVVLEQPIGEKFITLALNNTDARVRAGKPVSPGFLFATLLWHDVQQRWQKFEANGEYPVPALHRAMDEVLDMQTEKLAIHKRFSSDMREIWGLQLRLEKRSGRSAVKLLEHQRFRAGYDFLLLRCESGELDESVGAWWTEFIEGDVAARETLLTQGGKDRSPRKRRRRSSGARNRKPGDGLEGGTPAERTADEAGHDGPRED

SEQ ID NO: 49330 - protein, 1416 aa, Burkholderia fungorum
MLHFVVNLQNYHTPTRRSMSERNESADPHETGQVRPVSGSDHIVLRRTFHVVLAIALVLYFVATGLFLALRYVVLPRADSFRPRIEAIVSEKLHAQFSIGKLAPYWSGFQPGLDVTNLVIRDRDGKTALTIPHATATLSWKSLWQFHPALSSLIVDQPDVLVARSSDGVLSVAGVPVPTRHSGNDVLTTWLLRQQAIVVRGGVLRWRDAEHAAPELALRDIRIAILNDGYDHRLALQAPAEGHVLNGPLDFRTHFRHAPLSAIGKPINWTGQVYVSTGPVDLPTLARYVNFPIETFAGRIDNAIWIDFADGRMKSASGQLTGADVAMRVRPTQPKLLVPVASFMWRLEAEAGDYKLQLSQFHAELGQPPLDDGTPLTRTLALTTLNGRYRTASQQHGQLVSVSGDRVDLGILAEFSRALPLSRRLLNNLVRYNPRGLVANYLIEVERAKPESGEAGSDHQPSGAEPIERYRFKGDLQGISVAAQEPPPGLTPLNHPRAGIPGIENLWGSVDADETHGTALLDTSNVAITLPGVFDDPRLKLDRLHGRADWTITPKAPGENHPAFTVKLADFGVSNADVAATATADYSNPGHGRGSLDLKADFQRAQVTRIARYLPTSIGEKLRIYLGHGLQAGMSHGATIEVHGDLTKFPYSRDPSAGLFHIVAPFKGGKFDPTPYPPRKMRNGTPNVWPALDGIDGVFELRQNVMRFDIDRAHYKQVALTGVNGRIDDLGTRASSLVIKGDGHGPLADMLDYVNASSLGIMAKHETDKVRAEGPASLALKLTVPRTPKPHIGVEGAVGFQNNRLSVENVPPLSQLKGKVRFTEHTAQVDRLSGQFLGGDVHANGGLKQDGTYALDLGGHIAVDAARGLDLHGPGAQVLTRMSGSAPYALNVRGAKGRLPEVTANSDLTGLALDFPAPFNKPVGAPMPLRFAVSPSAAPGEAGLERADLTFGPLAAAYLLRYQPKTPPTVVRGAVGVNRPADLPSEGVIAAVDLDTFDADAWRALVTQIRTKDAPAPASVTPAPATPNPTVAQFLPSRFALHVGTLTLLKRHWDSVIVGASHADRTWQANIASNQVSGHVSWLPGPTRESPGTLQARFARVVIPSATDKDLLGEVMSAPAQNMPSIDLVVNELIVRDHNVGRLEVDAHNFDEDGVPVWQLDKLDITNPAATLSATANWRTSTDLGSSADEATARRTVFDFKLDIKDAGALLERFGQPRTLKAGAGSLSGKMVWQGGPTRIDYPTLNGNLAVDLRHGQILKVDPGVAKLLGVLSLQSLARFATLNFRDVIGEGLPFEHVTGTAQIHNGIGRTENFEMVTAPARAEMKGSVDLAQETQDLHVQIVPTVSAGAAVIAATVINPLLGLGALVADLAFSQSVSHAFAREYAITGSWSKPHVERVKGDRGKMDAPASTVEAH

SEQ ID NO: 49331 - protein, 300 aa, Burkholderia fungorum
MQVTSQFKTVALVGRNNTPGIAEPLTALALCIAKRGFEVVFEADTAAEIGVTDYPALRPAEIGARADVAVVLGGDGTMLGIGRQLAPYRTPLIGINHGRLGFITDIPISDMREIVPQMLAGNFEREERVLLEARIMRDGNPIYHALAFNDVVVNRSGFSGMAELHVSVDGRFMYNQRSDGLIVATPTGSTAYALSSQGPILHPQLQGIVLVPIAPHALSNRPIVLPDDSKVSIQIVSGREVNVNFDMQSFTSLELSDTIEVRRSRHTVPMLHPVGYSYFATLRKKLHWNEYPSHEEDPKP

SEQ ID NO: 49332 - protein, 396 aa, Burkholderia fungorum
MTDGHLSQDATHERPENGLKFELLGVDGQARRGRVALNHGVVETPIFMPVGTYGTVKAVQPRELEEMHAQIILGNTFHLWLRPGLETIEAYGGLHGFMGWKKPILTDSGGFQVFSLGDLRKITEDGVTFASPINGDKLFLSPEVSMQIQKVLNSDIVMQFDECTPYATHNVPTSHQEAADSMRMSMRWAQRSIDEFNRLGNPNALFGIVQGGMFEDLRDESLAGLAEKDFHGLAIGGLSVGEPKEDMMRVLNHIGPKLPANKPHYLMGVGTPEDLVAGVAAGVDMFDCVMPTRNARNGWLFTRFGDIKIRNAAHRNSLRPLDEQCGCYTCRNFTRGYLHHLHRVGEILGAQLNTIHNLHYYLELMQEIRDAIDAKMFEPFRKRFHENRARGTAEAP

SEQ ID NO: 49333 - protein, 352 aa, Burkholderia fungorum
MLTLSDFDFDLPPELIAQVALPERSASRLLEVDNPAGATGPARLIDRRFAELPDCIAAGDLLVFNDTKVLKARFLGQKASGGKIEVLVERLTGERTALAQIRASKSPQPGTTIRLADAFDVTVGERVEPFYTLHFPADCLTLIEQFGRLPLPPYIEHDPDATDETRYQTVFAQNPGAVAAPTAGLHFDEALLARLDAAGVERATLTLHVGAGTFQPVRVENLAEHKMHSEWYHLPQSLADKIAATRARGNRVIAVGTTSMRALEAAARDAEAAGRPLAAASTETDIFITPGYRFRVVDRLVTNFHLPKSTLLMLVSAFAGVETIREAYRHAIEARYRFFSYGDAMLLTRRDA

SEQ ID NO: 49334 - protein, 268 aa, Burkholderia fungorum
MNTPLIRPELVTSPEGPFLAAAELTQRESRATASHSHARGQLMGALSGLVSVGVNRQHWVVPAIHAIWIPPHCEHSVRSHGPFSGWSVFIAEQRCAELPGEPRAIRTTSLLRAAVRRAASWDGTQLDTQRSRIAEVILDELAASQAESLGLPAPEDARLLRITDALVRDLSDSRRLEQWAEWAGLSPRTLSRKFSAETGLSFAQWRAQARLLRALELVADGVSVTTIALELGYDNVSAFIDMFRRATGTTPGRYGTAEPGLTGDGRDE

SEQ ID NO: 49335 - protein, 538 aa, Burkholderia fungorum
MINMPVSEVVELSRLQFAITALYHFLFVPLTLGLSWLLVIMESVYVMTGKQIYKDMTQFWGKLFGINFAMGVTTGLTLEFQFGTNWSYYSHYVGDIFGVPLAVEGLMAFFLESTFVGLFFFGWKRLSRVQHVIVTFLVALGSNLSALWILVANGWMNNPVGATFNYQTMRMELDSIFSVLFNPVAQVKFVHTVSAGYVTASMFVLGVSSWYLLKRRDTEFALRSFAIAAGFGLASTLCVIVLGDESGYRTGEVQQVKLAAIESEWETAPAPAPFTIIGIPNQKEERTDYAIRVPYALGLIATRSLDEPVVGLKDLMVRNEARIRNGMLAYAALQKLKQGDVTDEAKAAFDAHKQDLGYGLMLKQFTANVTDATPDQITQAAKKTIPPVAPVFFSFRLMVGLGILFLATFVLAFWFCAQRSLLLEKRRWFLRWALWAIPLPWLAAEFGWIVAEVGRQPWTIAGILPTNLSASSLTAGDLYLSIGGFVVFYTVLFIIEIMLMFKYARLGPSSLHTGRYHHEQPSPDQPLDNRPLPTSTVA

SEQ ID NO: 49336 - protein, 339 aa, Burkholderia fungorum
MSRAVPAMKVAVLGAGAWGTALAGHLAVRHDTVLWARQPALIADLRASHENARYLAGVALPPALRYETDLNAALDHALADNALCVVATPVAGLRGLFRAMRDAGKVPAHVVWLCKGFEADSQLMPHQVVAAELPEHGSNGVLSGPSFAREVGQGLPVALTIASASAACRERTVAAFHHGAMRIYTGDDVVGVEVGGAVKNVLAIATGIADGLGLGLNARAALITRGLAEMSRLGVTLGGRAETFTGLTGLGDLILTATGDLSRNRTVGLQLAAGRTLDDILGGLGHVAEGVRCAQAVLAIARAHAIEMPITQAVCAVLFDGVAPRDAVSALLRRDSKAE

SEQ ID NO: 49337 - protein, 595 aa, Burkholderia fungorum
MDGNPFLKIQRLGRALMLPIAVLPVAGLLLRLGQPDVFNIKMIADAGGAIFDNLPLLFAIGVAVGFAKDNNGVAGLAGAIGYLVEVAVMKDINDKLNMGVLSGIVAGIVAGLLYNRYKDIKLPDYLAFFGGKRFVPIVTGVVCLALGIVFGYVWQPVQAVIDTAGHWLTTAGALGAFVFGVLNRLLLVTGLHHILNSLTWFVFGTFTPPGGAPVTGDLHRFFAGDPTAGTFMTGFFPVMMFGLPAACLAMFHEAPKERRAVVGGLLFSMALTSFLTGVTEPIEFSFMFLAPVLYVIHALLTGLSLAICSALGIHLGFTFSAGAIDYVLNYGLSTRGWWAIPIGLVYMVVYYGLFRFFIRKFNMATPGREPAAADEQVDSFSAGGFVSPVAGAAVPRAQRYIAALGGAANLSVVDACTTRLRLSVVDSNKVSENELKTIGARGVLKRGSTNVQVIIGPEADIIADEIRTVIAQGGGHAVTPAAAATATAAAAVAPVAAAGDQARGGPLDPDPLRWLAVFGGAGNVVSLDAVAATRLRVVVRDPSAVDRQRLATLDTAWVSADTFHIVVGEAAQRYAEKLATRLSPGTGAGAAPQPA

SEQ ID NO: 49338 - protein, 300 aa, Burkholderia fungorum
MIVLGDESGYRTGEVQQVKLAAIESEWETAPAPAPFTIIGIPNQKEERTDYAIRVPYALGLIATRSLDEPVVGLKDLMVRNEARIRNGMLAYAALQKLKQGDVTDEAKAAFDAHKQDLGYGLMLKQFTANVTDATPDQITQAAKKTIPPVAPVFFSFRLMVGLGILFLATFVLAFWFCAQRSLLLEKRRWFLRWALWAIPLPWLAAEFGWIVAEVGRQPWTIAGILPTNLSASSLTAGDLYLSIGGFVVFYTVLFIIEIMLMFKYARLGPSSLHTGRYHHEQPSPDQPLDNRPLPTSTVA

SEQ ID NO: 49339 - protein, 270 aa, Burkholderia fungorum
MQRRNILKALSAVIAGAAIVTSFGAHADDKVIKVGTIGGPDAQIWEVVTKVAKREGLNVKVVEFNDYVQPNAALDAGDLDANSFQHQPYLDSQIKQRGYRIVNVGLTYISPLGIYSKKLKSLKDLPQGAKVAVPNDPSNENRALLLLQTQGVIKLKAGAGTNGNNATPLDVAENPKKIKLIELDAAQLPRSLSDVDAAAINTNFALAAGLQPTRDAIALEDVHSPYANLIAVRTQDKDKPWVRKLVAAYQSEDVRQFIKTQFKGSVVPSF

SEQ ID NO: 49340 - protein, 244 aa, Burkholderia fungorum
METRWSALMPDARNVTPLYLQLARNLATAIHCGVWSAGEALPSERTLSDAIGVSRITARKAIELLVEQGLIRRARGAGSFITPRVEDPLSRLTGFTKKMQQRGFRPDSVWLERDIRAANRDELVHLGLSPGAAVASLRRLRRADGIVMAVEHSALPAAIVPDPQAIGDSLYSYLEHRGAAVVRALQHFRAVNASSEIAALMDIEPRSALLVITRIGYSADQRAIELTDTYCRDDYYDFVAELRT

SEQ ID NO: 49341 - protein, 367 aa, Burkholderia fungorum
MLTGNILTTDGWIHGTLEYENGRITALAGDRVDPSTNDAPYILPGFIDLHVHGGGGADVMEGDRAIETITRTHARYGTTSLLATTMTAPRDELMSVVAGLGHNARIRTPGGARVLGVHLEGPYINPGKLGAQPDAAVSAVMDEVLKYLSIAPIRVVTLAPEIAGHMEIISEMAARGVRVQLGHSLGTYDDAVAALKHGACGFTHLFNAMSPLHHRNPGLVGAALAHAEFAEIIPDLLHVHPGAIRAALRAIPRLYVVTDSTSATGMPDGEYRLGSQHVTKCLGGVRLADGTLAGSTLTMDQALRNLVSIGLPIADVSNRLSRYAADYLGIEDRGRIARGAWADVVVFDRELALSATYVEGEAIVEYA

SEQ ID NO: 49342 - protein, 176 aa, Burkholderia fungorum
MAGILIIAHAPFATALRDCISHIYGGLPARIGVIDVSPDCDPAQQVAFAHAEVERLKEENGALVLTDMFGATPANIAGRLASVPNVRVLCGVNLPMLVRAVCYRATPLDTLVDKALAGATKGVHAIGPATPAPVAPTAESGDCLPALPPDAASGGDCLPALPADADLTQKAGPAGL

SEQ ID NO: 49343 - protein, 89 aa, Burkholderia fungorum
MLQQETTIVNKLGLHARASAKLTQLAGNYQAEIWMSRNGRRINAKSIMGVMMLAAGIGSTVLIETEGADEKEAMDALLKLIADKFGEGQ

SEQ ID NO: 49344 - protein, 601 aa, Burkholderia fungorum
MSESIAAVCRGITQLEEVRVSFTLHGIPVSRGIAIGRAYLIAPAALDVDHYLIEPAQIDGEVERFRAAQQHVHRELDALRADLAADAPSEMGAFINVHSMILNDAMLVQETIDLIRTRRYNVEWALTEQLERLSRHFDDIEDEYLRERKADIEQVVERVLKALAGASVALVDGVHGACDEMIVVAHDIAPADMMQFKTQTFQGFVTDLGGRTSHTAIVARSLGIPAAVGVQHASALIRQDDLIIVDGDHGIVIVDPAPIVLEEYSYRQSEKALEQRKLQRLKFSPTQTLCGTRIELCANIELPEDARAALEAGAMGVGLFRSEFLFMNHKDRLPEEEEQFAAYRRAVELMNGLPVTIRTIDVGADKPLDSMGGGDGYETAANPALGLRAIRWSLSEPQMFLTQLRAILRASAFGTVKILIPMLAHAQEIDQTLDLIREAKRQLDDAGIAYDPNVQVGAMIEIPAAAIALPLFLKRLDFLSIGTNDLIQYTLAIDRADNAVAHLYDPLHPAVLHLIAFTLREAKRAGVPVSVCGEMAGDPALTRLLLGMGLTEFSMHPSQLLVVKQEVLRAHLKTLEKPVADVLASFEPEEVQAALKRVTLA

SEQ ID NO: 49345 - protein, 252 aa, Burkholderia fungorum
MNDDQLLRYSRHILVDEIGIEAQQRFIDAHAIIVGAGGLGSPAAMYLAAAGVGRLTLVDADTVDLTNLQRQILHVTASVGRKKVESGRDAIARINPEVVVNAVAERVDDAWLDAQVPHATVVLDCTDNFATRHAINRACVKHGVPLVSGAALRFDGQISTFDFRDEASPCYACVFPEDQPFEEVACSTMGVFAPTVGIVGSMQAAEALKVIGGIGTPLLGRLMMLDSLRMEWNTMRIARQPDCPVCGQTHAV

SEQ ID NO: 49346 - protein, 141 aa, Burkholderia fungorum
MKFFTDYTNLVLIAIVLISGGLLLWPTISRRGRGGLSAAEATQLINRRNAAVIDLRPSADFAKGHLPAARHLEFAELQAKVAQLVKNKTNPVLLVCQTGQQSNKAARIVQDAGYAEVHVLEGGVDAWQKAGMPVVKQGVAK

SEQ ID NO: 49347 - protein, 87 aa, Burkholderia fungorum
MNKVIMYSTQVCPYCQMAERLLKSRGVEHVEKVLIDKDPARREEMMTRTGRRTVPQVFIGETHVGGYDDLSALDRAGGLMPLLEATA

SEQ ID NO: 49348 - protein, 334 aa, Burkholderia fungorum
MATMLSEFSLIDRFFASRAAARPSGAASGTLGIGDDCALLAPPAGEMLAISTDMLVEGRHFFPDIDPEALGHKALAVNLSDLAAMGAKPLAFTLAFALPKADEAWLAAFSEGLFALAERHGCELIGGDTTGGPLNLCITVFGSVPPHAALRRDAAQPGDDIWISGTLGDARAGLGIQRGEWSADASDAAAFRRALERPEPRVALGLALRGIAHAALDLSDGLAGDLLHILERSNLQATVDVDAVPRSAALRRLPPEIQRRCTLAGGDDYELCFTAPATARASVEAAGHEADVPVTRIGTISALQAARRPAIGWRDAAGAPLTLTLQGFDHFHAD

SEQ ID NO: 49349 - protein, 246 aa, Burkholderia fungorum
MPRFFVGTPLQSDDIMQLPDDVVRHVLVLRLQPGDSIVLFNGEGGEYSAELVEVERRSAKVRIREFRNIEVEAPYRLTLAQGIAGGDKMDWLIEKAVELGASAFVPLTTTRSVVRLTGERAQRRHAHWQGIVRASCEQCGRNRLPEVMPVREIATWLGAMPRTPEEGDLRILLSPRASISFSALPAEPPQGRVTVLVGPEGGFSAAEEAAATDHGFTAVGLGPRVMRTETAGIAVLSALAAGWGGW

SEQ ID NO: 49350 - protein, 506 aa, Burkholderia fungorum
MNHAEMQFLTTEFPYKKQYANFIGGEWVKPVGGEYFDNVSPITGEAFTSIPRSREADVELALDAAHRAKTAWGKTSAADRANILNRIADRMEANLQRLAVAETIDNGKPLRETTAADIPLAIDHFRYFAGAVRAQEGSLSEIDHDTVAYHFHEPLGVVGQIIPWNFPILMAVWKLAPALAAGNCVVLKPAEQTPASILVLVELIQDLLPPGVLNVVNGFGLEAGKPLASSKRIAKIAFTGETTTGRLIMQYASQNIIPVTLELGGKSPNIFFADVMNEDDSFFDKALEGFAMFALNQGEVCTCPSRVLIDEKIYDRFMERALKRVAAITQGHPLDTKTMIGAQASQEQLEKILSYVDLGKQEGAECLIGGERNALGGELSKGYYVKPTVFRGNNKMRIFQEEIFGPVVSVTTFRNEEEALEIANDTLYGLGAGVWTRDGTRAYRFGRQIQAGRVWTNCYHAYPAHAAFGGYKQSGIGRENHKMMLDHYQQTKNLLVSYSDKPLGFF

SEQ ID NO: 49351 - protein, 579 aa, Burkholderia fungorum
MTTSRMCARRWASRPTKRFGWDAGHAVNCRRVFLFRGESARAGSSIKRSAVETDGSHEATGGEVSATLRFDNIGKVFPGVRALDGVSFDVNVGQVHGLMGENGAGKSTLLKILGGEYQPDSGRVMIDGNEVRFTSAASSIAAGIAVIHQELQYVPDLTVAENLLLGQLPNSLGWVNKREAKRFVRERLEAMGVALDPNAKLRKLSIAQRQMVEICKALLRNARVIALDEPTSSLSHRETEVLFKLVRDLRADNRAMIYISHRMDEIYELCDACTIFRDGRKIASHPTLEGVSRDTIVSEMVGREISDIYNYSARPLGEVRFAAKAIEGHALAQPASFEVRRGEIVGFFGLVGAGRSELMHLVYGADRKKGGELTLDGKPIKVRSAGEAIRHGIVLCPEDRKEEGIVAMASVSENINISCRRHYLRAGMFLDRKKEAETADRFIKLLKIKTPSRRQKIRFLSGGNQQKAILSRWLAEPDLKVVILDEPTRGIDVGAKHEIYNVIYQLAERGCAIVMISSELPEVLGVSDRIVVMRQGRISGELARQDATEQSVLSLALPQSSTALPGTDAGTETAAQQAA

SEQ ID NO: 49352 - protein, 883 aa, Burkholderia fungorum
MESRQSMRYSVEIKKFLYSQYFYGGLRIAVGVSLPAVLCLIVFHDRDLGFTIATGALGACVVDMPGPLKYKHNEMLACTVIGFLSALATGLATVNAVALWCTVVPLTFLLSLIVVYGNRWPQISFATLFMMVMTLEDHFTPVQALVNASWILVGGLWYTYWSTFVSRWMMHRIEQQALAESVFACADYLLARAQFYDLDNDLDECYRNLVDKQIAAVERQDAARDIVLRNLPKLKSGKLEPRRAMLFNLFINTVDLHELFVGAHTDYPLVRNTFGGSDLLVFYRDLIRKAAADLEEIGLAVLQNQAPRTRVNVKAELRAIEFEIELMRKQNLPAKNHEAYSAISSTFRRIWSATRLIDKMRKSLSSEPSTTETELRLDQALTRFVSSRRVPFGQIFSNLTMASPSFRHALRVTIAVAVGFWLGRLLPLTNAYWIVMTTVIILKPGYSLTKQRNGQRIVGTLIGCAASIALIVFVKEPHILLIVMFASMVMSYSLLLFNYTASVVFTSSYVLLMFHLLAPGSMRIIGERAIDTVVGCAIAIAASHLFPYWEYRLMGKLVNNMISATRQYLEASWWWSGKPAAAVVATVTEAGARAPAAAMADPAIDFGKPALATAGGGAGAAAGSGVGVGPNGGAGGAVSQGVSAASSGGASGAASQGVSAASSGRASASEGNSANAQAAVDASAAIPPADVGAGTTTVSNPTAKPASGASAAAAAAATALDRDYRYRLARKNVHVAFANLGQAFQRMMLEPKSAQKFVPELNGLLVRSHVLASQITAAAPLLRTTAQQQAEGISLQPLQRALSVVRDNLTEAETGTAPPADQAEQIKQLNRELDAMVVETEKSPDYSADAVHDMKLLAHQCKQMLAAAALIRKDASVIRLPDE

SEQ ID NO: 49353 - protein, 704 aa, Burkholderia fungorum
MSTFEQSASAPPELDDIGVNLPAPADFSTALAEGFARRIGTLARRGGASAEAVKWAARGAFAASRATAEGHVCVPLALLARRFEASGAEVRAALFASGMASDGSQSAAALRPLVVDGQGRLYLARYYDYERRLARALVAHAGAGVGTRAAPGAEAGGNAQTLHERLLRYFGTPKDNEVDWQRVAAVMALSGQLTIVSGGPGTGKTTTVVGVLACLLDARADLRIALGAPTGKAAQRMQEALLARAGDLPPELAARLPQTSYTLHRLLGSGPGGRFRHHRDNPLPYDVVVIDEASMIDVAMAAHLLDALAPQTRLVMLGDKDQLAAVEAGAVFAELSARPAFTQEGVRRLAEALGIDETRLTQALPHASRSLGEEQAGSFPQSNAPHGFEARPDDLFAYADSPEVFNEPLAGELSEGAASSPGPAPHALNPLADCVVWLERNYRFGLESPIGRLSLAIRNGSSSAALDVLRIDPAESCAAALYEDTHATLAERTVARLAAGFAPYADALAAALAADTPDPLPLFDALNRFRILCATRSGPRGVDQVNAAMAAQVRRSAGVTLAVGAQWFAGRPVMVTRNDYALGLFNGDIGIALPGASGALRVHFRTGDGGLRAVSPAALPPHDTAFALTVHKSQGSEFEHAVLMLPSAFSRVLSRELVYTAITRARERVEVVGARAVLAQAIATPTQRDSGLAARIAEAWHGAE

SEQ ID NO: 49354 - protein, 660 aa, Burkholderia fungorum
MSAIESVLQERRVFPPSAETVAAATISGMDAYRALAAEAERDYEGFWGRLARETLSWNTPFTKVLDESKAPFYTWFEDGRLNASYNSIDRHVEAGNGARVAIIFEADDGTVTNVTYQDLLQRVSRFANALKKRGVKKGDRVVIYMPMSIEGIVAMQACARIGATHSVVFGGFSSKSLNERLVDVGAVALITSDEQMRGGKALPLKNIADEALAMGGCEAVRSVIVFQRTGGKIAWNADRDLWMHELTQAEPDQCAPEWVGAEHPLFILYTSGSTGKPKGVQHSTGGYLLWAAQTMKWTFDWKPTDVFWCTADIGWITGHSYITYGPLTLGGTQVVFEGVPTYPNAGRFWDMIARHKVSLFYTAPTAIRSLIKAADADAKVHPKSYDLSTLRIIGTVGEPINPEAWVWYYENVGGSHCPIVDTWWQTETGGHMITPLPGATPLVPGSCTLPLPGIMAAVVDETGQDVPNGQGGILVVKRPWPSMLRNVWGDPDRYRKSYFPEELGGKLYLAGDGAVRDKETGYFTIMGRIDDVLNVSGHRLGTMEIESALVSNPLVAEAAVVGRPDATTGEAVCAFVVLKRSRPEGEEAVKLANELRNWVGKEIGPIAKPKDIRFGENLPKTRSGKIMRRLLRSLAKGEEITQDVSTLENPAILDQLGESL

SEQ ID NO: 49355 - protein, 469 aa, Burkholderia fungorum
MNMPMSRDQRGTLAAAGLGFVVVLLDVSVVNVALDALRARFATDVTGLQWVVNAYTLAFASLLLTTGALGDRFGAKRIFTAGFAVFTLASIGCGIADSLPLLVAARVVQGIGAALLVPNSLAMLRQAFPDMQQRSRAVGWWGAAGGIALAAGPVLGGLLVTHVGWRSIFLINLPIGVAGVALTLRHAAAAVSTHNRSIDLPGQLAAIVALVALTVCLTEAARLGWRHPLVYGALLLSVVATLAFLWLESRSTEPMLPLSLFRTATFSVASVAGVIVNFAYYGLIFVFSLFFQIEQNLSAQWTGLAFLPMTAVLMGVNILAGRLLNRIGAKKLMIAGMVIAASGYLLLLPVSTNGSYWMLVLPMLVAASGIALMVPTMTNVTLSSVDASRSGVASGILNSARQVGGMLGVAVFGFFVRDTSHDGFMQGMHLSIMTAAVLLLCGSVICLYGIRTPRPAHVETNPKVLASDS

SEQ ID NO: 49356 - protein, 248 aa, Burkholderia fungorum
MIKVDAIHKRFHDQHVLKGVSLNVERGQVVCLIGPSGSGKSTLLRCINGLEQHDAGTITVEGHAVDAKSKQIHDLRAQVGMVFQRFNLFPHRTALENVFEGPVFVRKEARTQARERARHLLDKVGLAHRMNAYPAEMSGGQQQRVAIARALAMQPKAILFDEPTSALDPELVGEVLGVMRRLADDGMTMIVVTHEMGFAREVADRVCFLHDGTIHEEGSAADLFERPRNPRTREFLGRMPALTEAPRI

SEQ ID NO: 49357 - protein, 384 aa, Burkholderia fungorum
MKIIHLANHAKCIGNGIVNVMIDLACLQARAGHDVTVASAGGGFEALLARHGVRHVLLPQSPRPSRVVGMVAAFRRLVAQYDPDVVHAHMMTGALIARMSALRRRYVLITTVHNEFQRSATLMGVGDHVVAVSDAVAVAMARRGIARERLSVVRNGTIGTPRLADTPMPAQPQLAHPCVVTVSGMYERKGIGDLLHAFVLLHERVPDAVLYLVGDGPDRVAMEALARQLGVAAQVRFEGFVADPRAYLAQADVFVLASHYEAAGLVLCEARELGRAIVATRVGGIPEMLDGGEAGVLVPVQDPAALAEAIGHLMTARDAHAALTARAPYKLEKFSVQQVSDGYLSIYERTLASCQPRRFASIATRGMTAPGRVVRDSVTQSTTI

SEQ ID NO: 49358 - protein, 330 aa, Burkholderia fungorum
MSDRTGDPQGGGASELDARLISICIPTCNRPALLEQAIASCHAQTYGEFEIVIGDDSTEDSAQQVVERCRSRSDRPIRYERNVPRLGQASNVNRLFARAHGARLVLLHDDDLLEPDALSRLDACWQACPELTAAFGKQRVIADDGTPRPDASERLNRDYRRVPGRAGRLPVPALAGIDQMFPNNGYLVNTVDARRIAYRPAAEVGEACDFDFGLRLSVAATAICFVDEFVSVSRETALSISTHALPAMHAFAQLRESHVPAAAQAAREDALRRVAPRAASAYARAGEPAAAWRVLLSKHYPMRDRLRARFLYHVLLAARSTFALRAPHGN

SEQ ID NO: 49359 - protein, 317 aa, Burkholderia fungorum
MMDWTDRHCRSLHRVISRHTWLYTEMVTTGALLHGDVPRHLAFTPVEAPVALQLGGSEPDDLARSAKLGEQWGYDEINLNCGCPSERVQRGAFGACLMNEPQLVADCVKAMRDAVSVPVTVKHRIGVDAVEEYGFVRDFVGTIADAGCNVFIVHARNAILKGLSPKENREIPPLKYDYAYQLKRDFPHLEIIINGGIKTLDEVETHLQHVDGVMLGREAYHNPYLLAGVDARFYGSADTPLTREQVEAKLIDYCAAEMARGTYLGAITRHALGLYRGEAGARGWRRVLSDSKRLAARDLSIFDEARQHLREPVEIFE

SEQ ID NO: 49360 - protein, 348 aa, Burkholderia fungorum
MRDNSACSELHGLEGTMTIATQEVPADGTIRWGIVGTGRIARRFAQGLAHVPQTRLTALWSRRAEPAGAFAEEFGGEVCASFDALLASGIHALYIATVQDSHAGYAIAALQAGLHVLCEKPATINQPQLQRVLDAARAAQRLFMEAMKPPFYPLYRKLRAHLDADPIGAVGLVRAGCSVPGVPDDHPSLSFGHAGGALLDIGIYEMFLAVDWLGAPREVQTLGRLGATGVDTFASLNSQHEGGIAQLFCGLDLHGKGDALLMATGGHVTIHEPWWNPSRATIRYAGGRVIELDEPFEGGGLNYETAHFCELIRAGQVESPVMPHSKSLQMIAMADAARAALGLKFAGE

SEQ ID NO: 49361 - protein, 461 aa, Burkholderia fungorum
MFRNTARFLDALFVIAGGLLAHWMRFSTPIALADTERLLIAFNCVLVLLLFPGFGVYETWRGKHLSSMLARVAAAWMVVVATALFLAFTLHRMDAVSRLWFGYSTLISGALIIVTKCLVHVALRIVRRRGMNYRTVAIVGAPGFARTLLAHLEHAPQAGFKPVCVFDTSIEAAESYGARLNRLPVLTDLDAFAARVREEHVNEVWLALPLSEERTIYRFTRMFRHDFVNLRFIPDVRSLSLFNHALVDVVGLPTLNLSATPFSSPQMWPKLIFDRLFAAAALLALAPVFVVLAIGIKLSSPGPVFFRQIRKGVDGQPFAIYKFRSMTVHHEAQGQLTQASRNDARVTRLGGFMRRTSLDELPQFLNVLLGQMSVVGPRPHALEHDDLYKDQVYGYMYRYRIKPGITGWAQVNGYRGATSKVEKMEARVKFDLFYIYNWSFWFDMKIVFITIFKGFVGRNAF

SEQ ID NO: 49362 - protein, 715 aa, Burkholderia fungorum
MPAVDSKIPALAFADPQSTYDLNSYTQTAMFPLQFATSGTNLLNAEASGVTYDKDTDSLFVVGDGATSVVQVAKSDGHVIDSMTLNAGDFEDTEGITYVGGGKFVLVEERLRQVDLFTYVPGGTLRRADVQSVKLGTTVANVGIEGITFDTKTGGYIAVRQSQPTSIFQAAINFAAGSATASNGTPILPTTDNPPVLFDAATTGLSAFNDVFSLSNIVPGNAPDYGNVIIIGAPDGKIVKMDRTGKLLGSLYMSATAQNEGVTMGPDGTIYVVGEQAAGPSLPGLTLFKPTTSASNVGMGSNLYLTFDQPVKAGAGNIVLSNGADDTRSIPVTDASQVTFSGNVMKIHPKFYMVAGTTYHITYPVGAIKTTAGNDISAVSDLSTFSFKAVGTVDHTAPTLTSTAPVDGATGIVGNHMTLSFSEVVQAGTGNIVISNGSDTRNVSVDDTTQVKFNGARVSVTLATPLQDSSRYTVKLASGVITDLYGNAYAGTTQSFTTAAAGAPAPTVLISEVNSNADGGQDFFEIYNYGGTAIDLTGWKWGDNHADVNDANNSAAFVAGTMLAPGEHLVVVPGVPGTDENTFRTTWGLAGTVPVVAMLNVNNDAANPIGLGKGDAVIVYDANGNVAAAMNYGTPIAAAQGDGTTKAIPTALGADASLVAAGNHAGAVFVGGSAKVSAVWDTVSTTTPNYVEAVVGVHGGIAEPLKPASIGSPGQ

SEQ ID NO: 49363 - protein, 282 aa, Burkholderia fungorum
MAAVRKPRIMQMTSPQSADALTLYGQTFASRVLLGTSRYPSLQSLSDSIDAARPGMVTVALRRQMNEGGAQAGFFDLLKRHGVPLLPNTAGCLTVGEAVTTAHMAREIFDTEWIKLELIGDDYTLQPDPVGLIEAATQLVKDGFKVLPYCTEDLVIGRRLLDAGCEALMPWGAPIGTGKGVINPYGLRVLRERLPDVPLIVDAGLGVPSHAAQVMEWGFDGVLLNTAVSQATHPEAMARAFALGVEAGRQAFLAGPMAERESAHASTPVVGMPFWHQDGSAA

SEQ ID NO: 49364 - protein, 367 aa, Burkholderia fungorum
MTQTLTLKDRDLFWPPADELTEAAERIRARLGDWPPTHAPWRICLTAPDELNGSDLIVIADAQQHGEQMAHWLVRGAGVIEAAEEKATLHLGGEKYRLEGHLAEDWIAALAAFLDCGFDPHDALVLALAWRDGDETSADDAFPTDLSRFPRLAGLPDAPAQAFARCPERLGLYPVLPTAEWVERVVGFGVKTVQLRRKSAEPADELKREIARCVAVGRQYDAQVFINDHWQAALEAGAYGVHLGQEDVHTADLAALASAGVRLGLSTHGFYEILKALHFRPSYIALGAVFPTTTKIMPTEPQGLRRLARYVRLLDGVVPLVAIGGIDLQVLPDVLATGVGSAAVVRAVTEAADPASAVSALQHAFTQ

SEQ ID NO: 49365 - protein, 407 aa, Burkholderia fungorum
MLRRFWLFFAQAVTVLLALMFIIATLKPQWLQRQGQFGKQLAEPIVALREVAPGIGSGPAQASYADAAQKAMPAVVNVFSSKDGSLPPDPRAKDPLFRYFFGDKNNRKQQEQPASNLGSGVIVSSEGYILTNQHVVDGADQIEIALADGRTTNAKVIGIDPETDLAVLKVNMTNLPTITLGRMDQTRVGDVVLAIGNPFGVGQTVTMGIVSALGRNHLGINTFENFIQTDAAINPGNSGGALVDVNGNLLGINTAIYSRSGGSLGIGFAIPVSTARSVLESIITTGSVTRGWIGVEPQDVTPEIAESFGLDQKSGAIVAGVLKNGPADRAGIKPGDILVNVNGQEITDTTRLLNVIAQIKPGTAAKVHLVRKSREMDLDVTIGKRPPPPKQPVEDNGGGDQQDDDGG

SEQ ID NO: 49366 - protein, 347 aa, Burkholderia fungorum
MQTTRIRAAHAFPIAKLAVVTALLAGCTTVQTPTKGDPLEGLNRTMFTVNDKLDQYALKPVAKGYVWATPQPVRDSVTNFFSNIGDVYIAANNLLQLKITDGVEDIMRIVINTVFGVGGLFDVATLARLPKHDNDLGLTLGHYGVPAGPYLVLPLFGPSTVRDAVGSIGNYYINPLSYVDPAGLSWALYGLNVVNTRANLLGASDVLEGAALDKYSFVRNAYLQRRQYLLSDGRQSQALPNYGDEAPLPKYDDVDGSAAGAPAGAVTGTAGAAGTQGAAAARAAPASGATAATPPQAASGTAAAPEAASGSAETPPLDLNGGPETTQIPAGQLVPPTRFNFPSFKLR

SEQ ID NO: 49367 - protein, 453 aa, Burkholderia fungorum
MRITQEGRDAGSGASNTVKAAPAEVRVNQELTGMDKLVIEGGYPLSGEVVVSGAKNAALPILCAGLLSAQPVHLENVPDLQDVRTMLKLLGQMGVQIESGDGRVSLNASKVDNLVAPYEMVKTMRASILVLGPLVARFGHARVSLPGGCAIGARPVDQHIKGLQAMGAEITIEHGFIEARAKRLKGTRIVTDMITVTGTENLLMAAVLAEGETVIENAAREPEVGDLAHLLVEMGAKIEGIGTDRLVIQGVDKLHGAKHTVIPDRIEAGTFLCAVAAAGGDVTLRKVRPLILEAVTEKLREAGVTVEEGDDWMRVRMNKRPNAVTFRTSEYPAFPTDMQAQFMALNTIATGTSQVVETIFENRFMHVQELNRLGANITIDGNTALVTGVEQLSGAKVMATDLRASASLVIAALRADGETLIDRIYHLDRGYDRMETKLTALGAKVRRVSGSQA

SEQ ID NO: 49368 - protein, 232 aa, Burkholderia fungorum
MSAMPQTSSSPAVSAPLTLALSKGRIFEETLPLLAAAGIEVAEDPETSRKLILPTTDANLRVIIVRATDVPTYVEYGAADFGVAGKDVLLEHGGSGLYQPVDLDIARCRMSVAVAAGFDYANAVRQGARLRVATKYVETAREHFAAKGVHVDLIKLYGSMELAPLVGLADAIVDLVSSGNTLRANNLVEVEEIMQISSRLVVNQAALKLKRAALRPILDAFERASKAGSTTA

SEQ ID NO: 49369 - protein, 475 aa, Burkholderia fungorum
MQFNHALYILGYTVVVGKEWLPFLTTTGPTTPRPVEYEHPTFEPTAGRHVLATTTKMPSLQWFTELTQRERRTLYAGFGGYAVDAFDFMIYSFLIPTLIATWGMTRSEAGMIATSSLISSAVGGWLAGILADRYGRIRVLQWTIATFALFTFLSGFTHSFWQLLATRTLQGIGFGGEWSVVTIMMAETIRSPQHRAKAVGTVQSSWSFGWAAAAIIYWAFFALLPEQYAWRACFWIGLLPAAWIIYIRRNVSDPEIFLETRRARENGFDTSHFLQIFSAAHLKTTLLGSALCTGMLGGYYAITTWLPTYLKTVRHLSVFNTSGYLIVLIVGSFTGYIVGAILCDRIGRRASFVLFAIGSFVLGMFYTMLPITDGMMLALGFPLGIVVQGIFAGVGAYLSELYPNAIRGSGQGFCYNLGRGLGSFFPILVGTLSQTMTLVKAMGVVAGSGYLLVIIAAMCLPETKGKVLGTTRPAA

SEQ ID NO: 49370 - protein, 622 aa, Burkholderia fungorum
MRSSSTTPGHVTQTRRRAARRRACSTGQPQMGQHYFRMLMTPNTSASHALPPDEKVSAWSLIKPYWVSEERNTAWGLLIAIIVMNLLVVWINVRLNRWSADFYNALQTKNVHDFPHLLMVFSALAFGFIILAVYGRYLRQMLGFRWRQWLTTRYLNEWLKDSAFYRIERDRLADNPDQRISDDLQSFATSTLSLTLDLLSTVVTLVSFITILWSLAGALTISLGGMPIEIPGYMVWAAALYAVVGSLIIQKVGHPLVPINYQAQKVEADFRFGLIRLRENAEQIAFYNGMETEKKNAHSLFARIRDNWWQVMKYTKRLTFVLSFYGQIAIIFPLVVAAPRYFAGAFTFGVLMQISSAFGTVSDSFSWFINSYGTLVEWRATVNRLREFKRVVHAPRLKESVSPATAHGGINLHFVDEDKLSTNALKLALPNGNPLSRIRDVAIRPGSRWLVRGPSGSGKSTLMRALAGLWPFGDGSIDAPVNARMMFIPQVSYMPIGTLKAALAYPSSADTYTDDECREALVVCHLSEYADRLQESGHWTRILSPGEQQRLAAARVLLHKPDYLFLDEATSALDAENEARLYRLFTERLPKAAIVSVAHRESLAAFHDETLDVERSDEAVAA

SEQ ID NO: 49371 - protein, 360 aa, Burkholderia fungorum
MDRAAADSLACEGTREASIPQRFRTRITDCFGIRHPILLGGMHHLGESGIVAAVVNAGAMGFITARSFSSTDALRGDLRRCRALTGGRPFGVNLTLSRRAEQNREVADWIRTALEEGVRHFESAGASPEQLVEPIQRGGGLLIHKCPSVRHAVSAQRLGVDALALVGLEEGGHPGANQLSAFVNGAYALEEIHIPLVIGGGIGNGRQIAAALALGADGVVMGSRFMVATEIVAHDALKQRIVAAGAHCSTAILASLGDTWRVMDNEAAREVQRLEAAGARRHSEFGDLILSSRTRQRVYRDGEVEAGIVSLGPAGGFADAIVPAAQIVGQLIGEAAQAAHAFARRVVDADASCPATGAVS

SEQ ID NO: 49372 - protein, 491 aa, Burkholderia fungorum
MKRYQLFIDNEWVDPHSGAWFETDDPFTGEPWAEIPRADPTDADRAVRAAEKALEGPWSTLSASERGMLMYKLGALIERDAEHLATIESRDNGKLFRDVLGQMKYMAKYYYYFGGLADKIQGAVVPIDKPGIFNFIRYEPMGVVLSITPWNSSLPLTTWKMAPALCAGNTIVCKPSEFTSASLFELAKLFVEAGFPRGVFNVVTGFGPEIGASLVSHPGVARIAFTGGDEAGRKIYAAAAQHLKRVSLELGGKSPNIVFDDADLDQAVNGVISGIFSATGQTCVAGSRVLLQESIHDAFVERVAKLTRAAKVGNPLDPASEIGPITTKPQFEKILGYIDIATREGARCVAGGRALSGPGYGAGRFVEPTVFVDVTNDMRIAQEEVFGPVLSIIRFKDEEDAIRIGNDIKFGLAAGVWTNSLHRAMLMSQRLKAGTVWINNYRSSSFTTPFGGFKQSGIGREGGIESVKEFMEAKSVWMSSDLKMPALFAGK

SEQ ID NO: 49373 - protein, 285 aa, Burkholderia fungorum
MNILKLTGTLLLVLCAFLPPGAGAEVPIPALSAHVTDETGTLADDQRASLEQTLQAFETKKGSQISVLMVPTTAPETIEQYSLRVVEQWKLGRKNVDDGVLLIIAKNDRTLRIEVGYGLEGALTDATSSRIINETIVPRFRQGDYYGGVAAGVDSIMRVVDGEPLPAPDQRASGSTRFGRYLPVLFVLTLVAGGVLRVLLGRLPGAVVTGGAVAVVAWMLSGALLIAIAAGVIALAFTLLGSGLGASAGARVIGGQSGRLGGGSGRDIFRGGGGGFGGGGASGRW

SEQ ID NO: 49374 - protein, 961 aa, Burkholderia fungorum
MAEHLCELCGVRPATIRVAVIQGGRRRQLDVCDYHYAQLTRHQRQVSPLESLFRGGLFEGLLDSGMDGSGPEPAATRHDGPVSKGVDLQQHFSDQAKEILQRAAERAVQFGRHEVDTEHVLYELVESEAVQRILSALKISASDLQKHIEANAPKGHATSKAPQGEISVSPRLKSALERAVIASREFGQNYVGPEHILTGLAEVTDSFAGDLLMKYGLSSHQLRQQTLKQAGQEEAAQAPSNTPQLDKYSRDVTRLAREGKLDPVIGRSKETETLVEVLARRKKNNPVLIGEPGVGKTAIVEGLAQRMISGDVPETLREKRLIELNVNSLVAGSKYRGEFEERVRQVMDEIAAHKDQLVLFVDEVHTIVGAGQGGGEGGLDIANVFKPPMARGELNLIGATTLAEYQKYIEKDAALERRFQPVLVGEPSVEQTIGILRGLRDRLEAHHKVTILDEACVAAAELSDRYVTGRFLPDKAVDLIDQAAAREHLSSTSRPAEVLELESEIAQIRREQEYAASHKQFERATALGEQLSGKQTRLDDATQAWKRRVSTSTAEVTRTLVAEIVAKMTGIPVADLTQEEKTRLLQMEDRLHRRVIGQEEAISAVSDAVRRSRAGLQARHQPLAVFLFLGPTGVGKTELAKALAEVVFGDEDAIVRIDMSEYMERHAVARLIGAPPGYVGYDEGGQLTERVRRRPHSVILLDEIEKAHPDVYNVLLQVFDDGRLTDGKGRVIDFANTLIIATSNLASDVIMGTPRKRPGFIAADNDLAADKGARKDRQPDGVREGVMTVLRSHFRPEFLNRIDEIIIFESLNADQIRSIVRLQLDKVAHIAKSQDIDIVFDDSIVDQLAKEAYRPEYGARELRRRIRQVIENPLAKQMLDGAVREGNRVVCRFDPLADDTVFELGEAPQQELAGTTQQQDQKDPEAGNGAADAGPAAKPARKRASPARKRGNTDGGDHAAG

SEQ ID NO: 49375 - protein, 115 aa, Burkholderia fungorum
MLDDLGLAAALEWLTDDFTQRFNVAARLRIDTDDAGFTPLASSALFRIVQEALTNVARHAQARQVKRSSGFLAMRRPARSISTTTAAEPYSKTPADAARSACSACANACVSCAAP

SEQ ID NO: 49376 - protein, 337 aa, Burkholderia fungorum
MKAAVVHEFGAPLRIEEVPVPQVGRGQILVNIKASGVCHTDLHAADGDWPVKPTLPFIPGHEGVGYVAAVGEGVKHVKEGDRVGVPWLYTACGHCEHCLGGWETLCQEQQNTGYSVNGAYAEYVVADPNFVGHLPAAVSFEDIAPILCAGVTVYKGIRMTDARPGQWITISGIGGLGHVAVQYAIAMGLRVVAVDISEDKLALARELGATLAFNASECDPAAAIQKEIGGTHGVLVTAVSRSAFAQALGMVRRGGTVALNGLPPGDFPLPIFSTVLNGITVRGSIVGTRQDLQESLEFAAQGRVRARIHLDRLDNINHVLAELKSGKVDGRIVLNLD

SEQ ID NO: 49377 - protein, 450 aa, Burkholderia fungorum
MHMPVSGKTPTSRSAVLRERAGSLVAQPATAAAAAFVVTLTAMLAARHWFDPAFFICVAAALLLATSVFLLVRARRDGLSARSEEHARHSQSAVNEARMMAIIRSSMEAIITIDEQQRIVIFNPMAEQVFGCSAMDAIGAPLARFIPDRFRAAHAQHVAQFGVTGVSDRQMGKQRVLAGLRANGEEFPLEASISQIRDGNIRLYTVMLRDITERVKAERAQRQAREELRELSANLQNIREDEKTRIARELHDDLGQQLTALKMDISSVEQALDGAASGPVREQLQGMRRLIDVTVASVRRIAADLRPVMLDDLGLIPAIEWLATDFTNRYGIDVERDIETGDARFSPAGATALFRIVQEALTNVARHADATLVTLSLRAGDQTFVLRIADNGQGVHRAAEPGTKSFGLLGVRERAHMLGGAVDIHTAHGQGFALTVTIPAETVQMQEMQT

SEQ ID NO: 49378 - protein, 587 aa, Burkholderia fungorum
MRVAPLRRAGEPRRAALIQLNEPVPPREYGSAIRPRPLPHGEHHMKNSDYPATQAAADPARNEAIASGHFYLVGGGIASLAAAAFLIRDADMPGARITILEALDKPGGSLDGAGSPQEGYVVRGGRMLESKYLCTYDLFDSIPTLDGRSSVTKEIFDWNETIRTSSKARFVRDGHREDTPSYGLAETHLLTLGRLSIEPEAMLGDSRIADHFEPDFFETNFWYMWCTTFAFQPWHSAAEFRRYLLRFAHMTSGFNQLHGIMRTVYNQYDSMVRPLRKWLDERGVRFRTNTRVVDLHYDESGELNRVAGIVCEQENRRVEIAVGAQDKVIVTLGSMTAGSSLGGTDHPAVPNHDDSSGAWALWKTIAEGHSGFGHPSVFADHVDESRWLSFTATLHDRTLFRLVRDLTGNVPGEGGLITFPQSNWLASIVLPHQPHFMGQPKDVEVFWGYGLHIDRPGNFVSKPMAECTGREIMTELLGHLQIQAEAPRILDDAICIPCLMPFITSQFLRRKRGDRPQVVPEGWANLAFVGQFCELPNDVVFTVEYSVRSAQTAVYTLLGLNRSAPAVYKGQHDPRVLYGAVSALHHR

SEQ ID NO: 49379 - protein, 231 aa, Burkholderia fungorum
MTSTHLLTIDAQPGPFSFDPAKTALVVIDMQRDFIEPGGFGESLGNDVSLLAEIVPTVAALLAFARQHQWLVVHTRESHAADLSDCPPAKRLRGAPNARIGDAGPMGRILVRGEPGNAIIEPLAPLAGELVIDKPGKGAFYATRLGEELAMRGITHLVFAGVTTEVCVQTSMREANDRGYDSLLIEDATASYFPAFKQATLDMVRSQGGIVGWTAPLSSLLKIDGTIPAWK

SEQ ID NO: 49380 - protein, 336 aa, Burkholderia fungorum
MPEAPLQSSSVVALRGTPLVHPVRNPGMPFEASWLDGLRVNQSAVERRTATLGTRRSVKKDAQAAWLLKAITCIDLTTLNGDDTEGRVRRLCAKARQPVRTDLLEALGIAPQGITTGAVCVYHRFVAAAVDALHGSGIPVAAVSTGFPAGLIPHPLKLKEIEASVADGAQEIDIVVTREYVLTGNWQALYDEVRDFRAACGPAHLKTILATGDIRTLSNVARASMVCMMAGADFIKTSTGKEGVNATLDVSLVMVRMIREYQERTGVLIGFKPAGGVSSAKSVLSYQILMKEELGRAWLEPELFRIGASSLLADIERQLEHYVSGRYSAFNRHPVA

SEQ ID NO: 49381 - protein, 486 aa, Burkholderia fungorum
MRGRSLAATLALAFGATTLAVFVLVGSFLYLALEKQIKAQDNLDIVLAARHARRLAEELDTAQGIRDHSERLTSIVLGNEAMSMEVFDPDGTRAIEHNIAGVLAAPDAASGAATLAALPPLTRVAATERIAEADIGDWTGRNGAPIRGILTDARLRDGDTASVLVARNMSDRWLLLDRYRDKLNLAGVAGVLLAVLLGYLLIRAALRPLRDIAASASLVTVNRLHTRIAVARVPSELDTLVAALNAMLERVEHGFQRLSRFTADLAHDMRTPLSNMRGAAEVALARPRSVDEYESVLASNLEECDRLSKMIENVLFLARAEHPQFVKHMRAFDAGEELAHIADYFEGIAEEANVRVRVSGAASLTADLELFRRAVSNLLANAIRYTPPGGEIALDASESADAVRVSVENQGQPIPAEHIERIFDRFYRVDPSRSALPSAGLSQGSSGSTGLGLAIVRTIMELHGGSVHAESDARSTRFVLTFPRSA

SEQ ID NO: 49382 - protein, 377 aa, Burkholderia fungorum
MLIRNARIVTRDEVFTGVIRVEDGVIREVERGTTTAREAEDWDGDYLLPGLIELHTDNLEKHLAPRPGVQWNTDAAFVIHDAQVAAAGITTVFDALAIGSRTNVGLRGRDLQTQCAESLTRFSERKLLRAEHFLHLRCEIATADVVDVFDSLCAHPLLRLASVMDHTPGQRQWHDREQWRRFQERNGKLSDEHVATALTELSVEQARYADAHRREIVTRCKRLGIPVASHDDTLIEHVEQAKAEGIVLAEFPTTRIAAEAAREHGISTIMGAPNIVRGGSHSGNVSALELAQADLLDILSSDYVPSSLMTAVFELVDKAGWSLPRAISTVSAEPARTAGLHDRGAIETGLRADFVRVTMLDRLPVPRATYRGGARIV

SEQ ID NO: 49383 - protein, 596 aa, Burkholderia fungorum
MLPAHKHTLETLLADTVKQVALASQGASEAAFVSPTITLERPKVAAHGDVACNVAMQLAKPLRANPRQLAQQIVDALLAQPGARDLVEAAEVAGPGFINLRLTAAAKQAVIAAVFAEKERFGRSQRDAGKHVLIEFVSANPTGPLHVGHGRQAALGDALSNVLASQGWDVHREFYYNDAGVQIQTLALSTQARARGLAPGDEGWPASAYNGEYIADIAKDYLNGATVAASDGEPVTGARDVEDLEAIRRFAVAYLRREQDMDLQAFGVKFDQYYLESSLYKEGRVEKTVAALIAAGKTYEQEGALWLRTTDDGDDKDRVMRKTDGTYTYFVPDVAYHVAKWERGFTKVINIQGSDHHGTIARVRAGLQGLGIGIPKGYPDYILHKMVTVMRNGEEVKISKRAGSYVTVRDLIEWSGGATPGSEVDVDLIDEETIRRGRDAVRFFLISRKADTEFVFDIDLALKQNDENPVHYVQYAHARICSVIAECKARYNMDESTLADVDVTPLTSERAMALLNKLAEFPDMLQHAADELAPHAVAFYLRDLAGEFHSFYNDKAERVLVDDAAERNARVALLAATRQVLANGLATIGVSAPVKM

SEQ ID NO: 49384 - protein, 481 aa, Burkholderia fungorum
MNVRATGAEVAAHRADDEAERIVAPLVARARAAQRDFENAGQQALDTAAAAAAWAIMEPQRNRQLAERAVHDTGLGNADDKFRKNYRKTLGLLRDLHGQKTTGVIAEDKASGIVEIARAVGVVAAVTPSTNPAATPANKIVNALKCGNAVIVAPSPKGHSSCALLIEFIHAQFARAGIDADLVQMLPAPISKAATAALMRQCDLVVATGSQANVRMAYASGTPAFGVGAGNVASIVTASADLHDAARKILRSKTFDNATSCSSENSVVIEEAVYAPMLAELAACGGVLLDAAQKARLQAAMWANGKLSEQCTAKSAEVIARVAGLDDIAARHPAFLMVEEAGAGSDYPFSGEKLAPVLAVYRAADFAAAADVVRDIYAYMGAGHSVGLHSADPAQAVRLGVTLPVARVIVNQAHCLATGGNFDNGLPFSLSMGCGTWGRNNFSGNLGFRHYLNTTRVAYPIEERVPETDELLGDFFARYGR

SEQ ID NO: 49385 - protein, 737 aa, Burkholderia fungorum
MFFAWGVVSIVVMRGGVHIVTRGTNIDSVEMAAKRQSEFTRGLSRQARRRTHALMFGALGACVPAAAHAQAVADAGAQFNGQRDDGANAVESEQATVASEHLVNPGADGPSAALGYAFNTFRTSGQGAADTQNYLGFTAGANIGNWQVRERGALQSMTGRGTSYQNIAAYLQRDIPSLKSQLVLGDQFTDGAVFDSIGLRGVRVESIDSAGSAAVAGYAPVVRGVAMSNALVTVTQNGNLLYEATVAPGPFEINDVAATGYGGNLLVTVTEADGSRHSFTVPYTSVVPLLRQASTRFSVAGGVIRDPRIKRHRALVQGTLQHGFNGMVTGYGGAVAADGYLSGLLGVAVGTPIGALSADISAAQADVPQARSTRGTSLRIGYSKFIEQTDTNVSIAAYGYSSGGFLSLRDAMLGRDAAPADSGANGAGRRRNQLQISLNQRLGAAGGTLYVVGSTSDYWNRSGSDMQFQIGYSGALRVADANLNYTVSVSRQRTGLTGPMSNQVFATVSVPLGKAEHAPVLSAGLMHDSRAGWSEQATLAGSAGAADELGYGLYGTHSDRSATGGGNVQYHGPYANFGGSASGGSGYSQVSANIRGSVFARREGITLAGTPEDGTDTVQPKHSAGASEYPGAGASSPGYTAVPHLLPGNVDPIEVGPQRALPDSKVQPSSLEMAPQVNAAVVTHHSADDSIASNVATANQTEGAERLMLFMNAVPMKVYARNSVVSWSDVERGNGHH

SEQ ID NO: 49386 - protein, 887 aa, Burkholderia fungorum
MAFQSTFPFETSAARADASSLLRLLPAHEGHWDELRDASGALREPWRQFFERLGEVGIARLDDHLASVAQQIRDNDISYNVYADNGEPRPWALDLLPFLISEDEWAHIERGVTQRAHLLNAIVADIYGPQTLLERGQLPPALVFGHPGYLRSVRGFTPPGGQYLQVVAVDLARTPNGDWTVMAHRTEAPSGLGYALENRLIVSTLFADPFRALRVSRLAPTYSQLIATLVQAAQATMRDDSDDVDRSPHIAFLTPGPFSETYFEHVFLARYLGVTLVEGKDLTVRDDKLYLKTLAGLERVHVVLRRLDDAFCDPVELRADSSIGVPGLLQVMRAGNVIVSNVPGSGFVESPALHGFLPGIAEVLLDEDLVLPSVPTWWCGEKAARNHVFARLDEALIVPTWPVAARDAPPGIEHGRQRLSTWRERIEAMPDTYTIQQAQRFSCTPRYEDGTIGRRPSVLRVYAIADVNGGWHVMPGGFTRMAAERQTTVSMQYGGSSVDTWVLSSQPTSTFTLLPSPMQPADLARKHRTVSSRAAENLFWAGRYGERAENNVRLLRLILGSLEGNDADAMFPTLVELAMHCGLVQSGDMFSPHSPQAFERALVANLSESTGAASIGQNLNCQARSNGEVRGRLSNDHWRTILAARNDFRDALQTLMPAPGYSGGASQGNGGGNGNGNGGNGNGRGERYERYDRVTLMNALERLSVQLSAISGAQGDRMTRDEAWRLLFVGRHIERVSAMSSFLRVVADKGQLSTPAGFDLLLQLFDSTLTYRSLYPGRFEVPALLDLLVIEPTNPRGIYGVYERLRKKLDEIAVAAGGSRHRPFAELMVPAASLPSLESLCAVDEDGAYGNLIAVCDQIGGFAGAAAHEISARYFSHASTVASQVWS

SEQ ID NO: 49387 - protein, 267 aa, Burkholderia fungorum
MSLPQNHFKRALAEGKPQFGLWAALADAYVTELLATAGFDWLLIDNEHAPNDVRSTLAQLQAVAAYASHPVVRPVRSDAALIKQLLDIGAQTLLLPMIDTPEQAADAVAATRYPPQGIRGVGSALARASRWNRIADYLGTAADELCVLVQVESVQGMQNLPAIAAVDGVDGVFFGPADLSASMGLLGKPGDASVREAIRNGIRIARSAGKAAGVLAPDSAIAADYLAAGATFVAVGTDTGLLSRAAADLAASYKQSAAMATSPTGGY

SEQ ID NO: 49388 - protein, 730 aa, Burkholderia fungorum
MYLLGYSIDNLSLMALTIGTGFVVDDAVVVLENIVRHLEAGLDPKEAALRGSAEVGFTVISMSLSLIAVFLPILLMPGIVGLLFHEFAVTLSIAILLSLLISLTITPVMCAYLLSRERTMHLQSRWAHWVEAQFERFKQAYARSLAAALDHALAVVLLLIGLLVLNVFLVPLLSGTFFPEQDTGILIGQIIADQSVSFNAMEKKLAQLQAIVKQDPAVASVAGFTGGRALNTANVFIELKPLAQRHLSATEVVNRLRPKLNAVSGARLFLQAQQDLQIGGRQAAAEYQYTLSSDDANALFTWVPKLVTELGKYRGKLEDVNSDLQQNGLQTYVNFNRATATRYGFQPNQIDNVLYDAFGQRTVSTIYNPLNQYFVVMEVAPAYWQYPQALNQIFLSTSAGNPSGTQQTQMSRATVKAVQQAMAVGSASSSSANTNTLNADAEANQQTNSISNSKGGNSSGSADSTAAETMVPLSAMMTFSNSHTATQVNHQSGLVAGTISFNLPAGGSLSEAGQLIAQAERDIGMPASVHGAFAGAAQAYAQSMGAVPLLILAALVVVYIVLGILYENTVHPLTILSTLPSAGIGATLALLIFGTPFSVIAMIGIILLIGIVKKNGIMMVDVAIQLQREEGMNARDAIHQAAVVRLRPIMMTTAAAVLGAVPLAIGIGQGASLRQPLGVTVMGGLLVSQVFTLYTTPVIYLYLDRLRARLARWSARLPWNRRDDAPDTSA

SEQ ID NO: 49389 - protein, 287 aa, Burkholderia fungorum
MGKLALAAKVTHVPSLYLSELDGPHKGCRQPAIDGHHEIGRRCRELGVDTIVVFDVHWLVNSEYHINCAPKFEGIYTSNELPHFIRNMPYAYPGNVELGNLIAEVASEMGVKSRAHSETTLELEYGTLVPMRYMNADQHFKAVSVAGWCVWHDLDTSVRFGLAVRKAIEERYEGTVAILASGSLSHHFANNGTAEQFMHKVWNPFLEQMDRKVVELWEAGDWKTFCEMLPLYNEKCWGEGGMHDTAMLLGALGWDRYEGKVEVVTPYFGSSGTGQINAIFPVTPLPV

SEQ ID NO: 49390 - protein, 251 aa, Burkholderia fungorum
MRGRIAYAGAIHEACPDANGVRLADGRVRGEHEVVWLAPIEVGTIFALGLNYAEHAKELQFGKQEEPLVFLKGPGTVLGHRGVTRRPADVTFMHYECELAVVIGQTARNVTRENAMQHVAGYMIANDYAIRDYLENYYRPNLRVKNRDGGTVLGPWFVDAADIEDVTQLELRTFVNGTRQQHGNTRDLVTDIPALIEYLSSFMTLAPGDVILTGTPEGIVNVNAGDEVVCEIDGLGRLVNTIGSDADFGRA

SEQ ID NO: 49391 - protein, 1586 aa, Burkholderia fungorum
MSALALSLRLALSLTAVCCVATVSPDALAQASKDPLNVLIDQGKYWQSHQRGDLAEQAWQKVLRIDPKQPDALFGMGMVLADRKDGAGAQQYLARLKAVAPNYPNLDELGRRLGESSLRDQSVNDARRLAQSGQSASAVQEYQRALTGKPATPELQLEYYQALSATPQGWDQARRGLEQLARDNPDDPRYALAYAQHLTYRDVTRRDGIARLQKLAGDSTVGASAKKSWRQALLWLDARPSDAALYQAYLQTATDDAAVKARFDSMVQQDSTARARAQENAAVDARGRAIADGFAALDRNDVATARAKFSSVLATSPNDTDALGGMGIAALKQERFAEARNDLERASRNGNPARWKTALDSATYWTYTSDAIGARSNGEFAKAKSLFERAIALNPSDVTAQVLLGEMLLANGDPVGAEQAYRMALRRQADNPDAVRGLVGALAAQGRGDEALQFANQLNAEQQSKAGGINRLRGEAQAAQARAAEARGDLGSARSLFEDALLNTPDDPWLRLDLARIYVRQGAVANARSMMDGLLAAHPDMTDALYASALLSAETQDWSTGLAQLDRIPLAQRTDAMTTLQHRLWVHQQADLATRMARSGQTQQALATLHAAEPVAGNSPELIGVIAAAYQQAGDPNRALGLVRAAMNAAPGNTDLLLQYAGILSATQQEAELGMVMRRLASMQLTPQQRTDFGNLNLGIVIKQCDAVRQRGDLAGAYDVIAPWLAAMPDNPDLQAALGRLYSTAGDDRNAVASYRVALQRKPDDLSLLQATISAAAGAKQFSYAESLATQALNAAPGDPGVLATVGRMYRAEGKLSLASTFLQRSLVAANTPLMANAPRNPASNVPRGWEVAMRRIGATPLPGTNPFEGKTATVTPTDADNAALAGGSYNAARASLPYSQSSLPTQTVPNYPPPTQPAPYVAPYTAPAQPYAPNRAPAALPYNAPRQGADSGGYGQEAYGSSQSGAPLQPYPGQGQPPMQPQAQMPPMQQAPQYNPAYPQQAPYPQAQAPYPQQAQYGAPDGYAATPWPMSPAAREAQTNAGSMQQQPYGAPGASTKRPAGRKQSASKNSRNAPAYAQAPYGQQQGYPQQQQAYYGQPAYAQQQQQGYPQQPYQPYQPYPPQQQGYENQGSYQGYYAQQQPYIPQPPTGYAQPYYPAQPGANGGGNTYAPSNVASAQTLGVAEELAQVNREQSSSISGGIVFRNRSGEDGLSNLTDIEAPIQGRIRAGNGHVVVTATPVTLDAGSAAGNVSTLARFGSGLSNSTSETAAIAGNNTYGSQTASGVGLSVGYEGRQLSGDIGVTPIGFRETNIVGGAQYNGGITDKVSYSLAIARRAVTDSLLSYAGARDAGSGLEWGGVTSNGGLGSLAWDDGTSGLYVNAAFQYFDGTNVPGNTAVKGGGGVYTRLLKDADQTLTVGVNTTLMRYDKNLSYFTYGQGGYFSPQQYVILNLPVEWTGRNGAFTYDVKGSIGVQHYRQDSSNYFPLNDGSNRQSSAAANAGFVGTGVDSGAVYPGQSKTGVSYSLSAVGEYQLAPQLAFGATASLGNAYEYREWLAAVYVRYSFSKQTGLQPFPPAPLTSPYLSLSN

SEQ ID NO: 49392 - protein, 383 aa, Burkholderia fungorum
MALTLGLAASASFGNLVKVAQSTAAPGACGDWSGYRAFVERFVQADGRVIDYSTPTQQTTSEGQSYGLFFALVANDRATFDRLLGWTRTNLAGNQFDARNMRLPSWQWGKKADGSYGVLDPNSASDSDLWIAYDLLQAGRLWHEAGYTQMGEALAAQIARQEMTTLPGIGPMLLPGPQGFKNGGVTRLNPSYLPLPVLRALAHEMPDGPWGKLADSAYKLIRTTAPQGFAPDWAAWQNGQFVVDPKNGDTGSYDAIRVYLWAGLASPADPLAKPWLAALGGMRARVAQTGIPPEKVSSTTGAASGEGPLSYWGALAPYFKALGDEHGLGLARTHLAALDAAVPGREPVYYDRVLGLFGTGFIDGRYRFDEAGRLVPSWRNACD

SEQ ID NO: 49393 - protein, 519 aa, Burkholderia fungorum
MLDDIKKTLWATADKQRANMDAAEYKHIVLGLIFLKYISDTFAGRRAELTRRFADENDEYFLRECDDELLAEELEDRDYYREVNVFWVPETARWESLRSAAKQTDIGKRIDEALAEIEAENPKLKGILDKRYARSQLPDGKLGELVDLISTIGFGEDASHARDVLGQVYEYFLGQFASAEGKKGGQFYTPASIVKTLVAVLAPHHGKVYDPCCGSGGMFVQSEKFIEAHGGKLGDVSIYGQESNPTTWRLAAMNLAIRGIDYNLGREPADTFVRNQHPDLRADFVLANPPFNVSDWWHGSLEGDPRWVYGTPPQGNANYAWLQHMLYHLKPNGRAGIVLANGSMSSSQNSEGDIRRAMVDADVVEVMVALPGQLFFNTQIPACLWFLAKQKTTRKGEVLFIDARKLGSMISRVQTELTDEIIERIANTVAAWRGEAIDGVGEYADVPGYCRSVKLAEIAEHGHVLTPGRYVGAEKVEDDDEAFVEKMQKLTEMLGEQMAKGAELDQLIRQKLGGMGYEF

SEQ ID NO: 49394 - protein, 1028 aa, Burkholderia fungorum
MTEDQLEQETLDWLADVGYRCLFGPDLAPDGANPERADYRHVLLVERLRGAVARLNPGIPPATREDALQQVRDLGIPALLSANRHFHQLLVGGVPVEYQKDGELRGDFVRLVDWADPAANEWLAVNQFAIKGPQHARRPDVMLFVNGVPLVLLELKNPADQNADIWKAYDQIQTYKAQIPDVFQYNEVLVISDGSQARMGSLSADAERFMQWRTIDGATLDPLGQFNELETLIRGVLAPTYLLDYLRFFVLFEDDGTLVKKIAGYHQFHAVCAAIQQVVTASRPGASHKGGVVWHTQGSGKSITMTCFAARVMQEAAMENPTIVVITDRNDLDGQLFGVFSLAQDLLREQPVQAGTRQDLRAKLANRPSGGIVFATIQKFMPGEDEDTYPVLSDRNNIVVIADEAHRTQYGFEAQLRGKPGQEKYQVGYAQHLRDALPNATFVAFTGTPVSSEDRDTRAVFGEYIHVYDMQQAKEDGATVAIYFESRLAKLSLKAEDLPHIDAEVDELAEDEEESQQAKLKSRWAALEKVVGAEPRVAAVAADLVAHFEERNKAQNGKAMVVAMSREICVHLYDEIIKLRPDWHDPDPEKGAVKIVMTGSASDKALLRPHIYSGQVKKRLEKRFKDPADPLRMVIVRDMWLTGFDAPCVHTLYVDKPMKGHNLMQAIARVNRVFKDKQGGLVVDYIGIANELKSALKEYTASNGRGRPTVDAAEAYSVLEEKLDVLRGMLHGYDYSGFLTGGHKCLAGAANHVLGLKDGKKRFADTALAMSKAFTLCCTLDEAKLVREEVAFMQAVKVILTKRELSDKKKTNEERELAIRQIISSAVVSEKVVDVFEAVGLEKPNIGILDEAFLAEVRNLPERNLAVELLERLLEGEIKSRFASNVVQEKKFSEMLANVVTRYQNRAIETAQVIEELIDMAKKFRAAATRGEELGLTEDEIRFYDALANNESAVRELTDETLKKIAHELTENLRQNITVDWSERESVRARLRLMVKRILRKYKYPPDQQDGAVELVLQQAQALGEAWS

SEQ ID NO: 49395 - protein, 410 aa, Burkholderia fungorum
MNIYAVGGAIRDELLGVPVQDRDYVVVGATPEQMVAQGYRPVGKDFPVFLHPQTHEEYALARTERKTAAGYHGFQFFYAPDVTLEEDLARRDLTINAMAREVRPDGELTGPVIDPFNGQGDLQARLFRHVSDAFLEDPVRILRIARFAARFVDFTVAPETLALMRKMVADGEVDALVAERVWQEVSRGLMERKPSRMFGVLRECGALARILPEIDALFGVPQRADYHPEVDTGVHVMMVVDHAAQQGYTLPVRFAALTHDLGKATTPEDVLPRHIGHEGRSVDLLKPLCERLRVPNDCRDLALLVAREHGNIHRVMEMGAAALVRLIERCDAIRKPARFAEALQACEADARGRLGFEMRDYPQAERLRVALVAARGVDAGAVAKRLADAPAGIKDAVHQERVRAVEAVLG

SEQ ID NO: 49396 - protein, 605 aa, Burkholderia fungorum
MCGIVGAVAQRNIVPVLIEGLRRLEYRGYDSCGVAVLGSDGPRRARSVARVADLDEQVRESHLEGITGIAHTRWATHGAPVTDNAHPIFSKDALALVHNGIIENYETLRDMLRGKGYTFVSQTDTEVIAHLIHSLYHGDLFAAVREAVGQLHGAYAIAVLHKDQPHTVVGARQGSPLVVGLGEGENFLASDALALAGSTERFIFLEEGDVCELTLEGVRIADRDGYEAQREVRQVAAYGGAVELGPYRHFMQKEIFEQPRAITDTIPQADSFDPSLFGEGAGKVFAEIDSLLILACGTSYYSGLTAKYWLESIAKIPTQVEIASEYRYRESVPNPKSLVVVISQSGETADTLAALKHAQELGHKHTLAICNVGTSAMVRQTELAFLTHAGREIGVASTKAFTTQLVGLFVLAATLGKLRGRVSEEQEGEYLKQLRHLPAALNSVLALEPQIIAWSEEFSRKEHALFLGRGLHYPIALEGALKLKEISYIHAEAYPAGELKHGPLALVTEAMPVVTVAPNDALLEKLKSNIQEVRARGGQLYVFADADTKIVNDEGLHVIRMPEHYGLLSPILHVVPLQLLAYHTACARGTDVDKPRNLAKSVTVE

SEQ ID NO: 49397 - protein, 205 aa, Burkholderia fungorum
MFLERELNPSIACNPAAESKKALRKMLLEARLQAASEPARNTALARHLLDALKQYGVNSVGFYWPLAGEFDARAAISIWLAANTQREASLPVVKERGVPLEFHAWAPDTPMKIGHHRITVPASGRIVIPELLFVPCVGFDANGYRLGYGGGYYDRTLAAWPGATKPITVGIAYEACRTPALEREAHDIPLDLIVTEAALYPRPVD

SEQ ID NO: 49398 - protein, 453 aa, Burkholderia fungorum
MNIVILAAGTGKRMRSALPKVLHPLAGRPLLAHVIDTARTLKPTHLVVVIGHGAEAVRKAVAAPDVQFAVQEQQLGTGHAVQQALPLLDPSAPTLVLYGDVPLTRAGTLQALTDRAGQGGYGVLTVTLADPSGYGRIVRDAHGKVARIVEQKDATPEQLAIAEINTGIIVAPTERLGDWLAALKNDNAQGEFYLTDAVEMAIEAGLEVVTTQPDHEWETLGVNSKQQLAELERIHQRNVADALLVAGVTLADPARLDVRGTLECGRDVSIDVNCVFEGRVTLADNVTVGPNCVIRNANIGAGTRVDAFTHIEGAEVGANVVLGPYARLRPGASLHDESHVGNFVEVKNAVLGHGSKANHLTYIGDADIGARVNIGAGTITCNYDGANKFRTIIEDDVFVGSDTQLVAPVRVKRGATIAAGTTVWKDVEADALVLNDKTQTSRTGYVRPTKKKS

SEQ ID NO: 49399 - protein, 258 aa, Burkholderia fungorum
MILRQRNIMEIDLNADLGEGCGSDEALLDLVSSANIACGWHAGGANAMRDCVRWAVQKGVSIGAHPSFNDPENFGRKEMDLPANDIYAGVLYQLGALSAIAQAEGGRVAHVKPHGALYNQAARDSRIADAIVSAVHDFDPSVAVFALANSGLVTAARNVGLIAVEEVFADRGYRADGSLVPRKEPGALLDDEDKVLARTLSMIREQRVQAVDGQWVPLNAQTICLHGDGPHALAFARRIRGALQDAGIEVHAAGAARA

SEQ ID NO: 49400 - protein, 534 aa, Burkholderia fungorum
MARPTNGLHVLCSERTERARLAWPMQRPSIRYRWSLSQGGIMAQFSAAPGSPAIPAYADGGAPGDPSMPAGYSERLYNEDLAPLRHQTWGAYNIFAFWMSDVHSVGGYVFAGSLFALGLTSWQVLIALLVGITIVNLLCNLIAKPSQANGVPYPVACRATFGVLGANIPAVIRGLIAVAWYGIQTYLASSALVIVVLKFVPQLLPYADVHHHGFMGLSTLGWAGFMLLWVLQALVFWHGMETIKKFIDFAGPAVYVVMFILAGYMVYRAGWRNIGINLGGVKYHGMQVVPVMITATSLVVSYFSGPMLNFGDFSRYGKSFRSVQRGNFWGLPVNFLAFSLVTVITTAATLPVFGELITDPVETVGRIDYPTAVILGALTFTIATIGINIVANFVSPAFDFSNVAPRLISWRAGGMLAAVASIFITPWNLFNNPAVIHYTLDVLGSFIGPLYGVLIVDYYLVKRQRIVLDDLYTVAPTGSYWYRNGVNYRAVAALLPAAVIAVICVMVPSLDGMANFSWFIGAGLAALFYRVIAR

SEQ ID NO: 49401 - protein, 209 aa, Burkholderia fungorum
MPVSEVVELSRLQFAITALYHFLFVPLTLGLSWLLVIMESVYVMTGKQIYKDMTQFWGKLFGINFAMGVTTGLTLEFQFGTNWSYYSHYVGDIFGVPLAVEGLMAFFLESTFVGLFFFGWKRLSRVQHVIVTFLVALGSNLSALWILVANGWMNNPVGATFNYQTMRMELDSIFSVLFNPVAQVKFVHTVSAGYVTASMFVLGVSSWYL

SEQ ID NO: 49402 - protein, 198 aa, Burkholderia fungorum
MKHLAVVAHPVENSFTMGLTRAYTDELEKLGHTQRTYDLYRMGFNPALNAQELSPANDKHPVCADVAEAQDEIRAADALTVIYPLWWMSMPAMMKGYIDRVFARGFAYESSHGVVRGLLGGKKAVLITCSGAPLPVLVKSGNWNAVQVLQDTHVLRSTGFELIEHLHFDEIAPELPADVAAQHMERVRACARQHFGRG

SEQ ID NO: 49403 - protein, 169 aa, Burkholderia fungorum
MRRLEAACRRRFRRLESRNDRALPDRMLGPQRSGSQMKLLDALVEQRIAAAAARGEFDQLPGAGAPLSLGDDALVPEEVRVANRILKNAGFVPPAVEQLRALRDLRAELNAVSDRAARCRLQARMLALDMALESLRGGPLVLPREYCRRIAERLSERAGSPDTAEAGSP

SEQ ID NO: 49404 - protein, 920 aa, Burkholderia fungorum
MMEIRARLMKRLFGITNRNGLAMRPLCAAMLLAYLPASWAATQDGVSATAARDAMLNDAGKKTVSSAPLLMASAAPLLASVQFDSSFLMSSADRAVDVSRYETGNPVMPGEYRSDVYLNGRLIGRESLVIRADAEGRAQVCFNRALLERLNVDTSKLDSGHVAEFAQPDGCLDLSSIVSGASVTFNQSDLRLDVDIPQASLQRTARGYVDPALWDEGATSARLSYTANLYRNEFEGSGAANSGYLGLNAGFNMGGWTFRHSGTLTWSDGGGHHYESARRHYNTAYNYVQHDVTRWKSRVTLGDSYTNGELFDTFAYRGVQLASDDRMLPDSMRGYAPVVRGVAETNARVTIRQNGYVLYDTAVPAGPFVIDDLYPTGYGGDLDVSIIEADGRVRTFRVPYASVAQALRPGMTRYNLMAGSIRSRQLSYTPAVALATVQRGVTNALTLYGGVLASNNYGSVLAGAAVGTPVGAIALDASGSNASPSGARASRGLSIRAAYSKLITQTDSNVSVAAYRFSSTGYLDLNDALTFINNARTGQSDMSSLQRARNRLSVTASQGLGHDSRWGQLFVSGYIQDYWTRPGRDTQFQIGHVNRIGAVNYGVSVERVRTGGGAMDTRYMVNLSLPLGRTLQAPTLSFNVVNDRSSGTAVQTLVNGVAGEDNQIGYAAGVTRDGGARYAGNLSGQYRAPYTNLQAGFSTGSGYKSVNAGVSGSIVAHPRGVTASAYTADTIGIVSAPGGAGAVVTGYPGVKLDANGNAVVPYLTPYRLNEVTLDPKGTDANIELQTTSRQVAPRLGAVVMLDYPTVTGRPVLIRSHLPDGNALPFGAPVSDGKGNNIGMVTQGGMVYARINGLADELKVTWGASPSAYSCVIRVRLPEHKAGDNAMAFERLEAPCEMTEGSAPSSRQAGKAGKSADGLAS

SEQ ID NO: 49405 - protein, 380 aa, Burkholderia fungorum
MEANEPGRRGRSKPGAVARMRTLWRLGTRVLICVVSGLVAMPNAFAETKPVICSPVAGLPATVTLPNSLGLSPNTPINTVVWRQSFTISGECGKDSGGTYPQTPRVGFLLVGHTSSTAGGGAQKLQLWNGSGLELFVTINGNQYSNATDYALDLGVDVPNIYGSKNVTFSAQVDIELVKTGEMTVGPNNLTSSAIPVLFLATIMPNYGAPYPVTVVSNFLKINGLNSIKLLPQTCEAASPNTTVDLGKVTLGENGFGNSVNSTSVGRSFTIDMNCYTNGTPASYKLALTLDPAGLSVPGQNGVLALDGTSTASGAGIQILDGAGINPVTFGNLQMVGQFGVDIRPPTSFSVPLYARFIQTGQTVSPGRARAQAAFTISYP

SEQ ID NO: 49406 - protein, 166 aa, Burkholderia fungorum
MYVLAAACVLAPPIVAQASDGTITIDGEIVDVTCTVSVNGGGSANIVTLPTVSKSQLPAAGATAGATDLTIGLSACPASYASARPFFEGGANVAPNFNLVNQASSPAANVQIQLTYEDGTQLQVGNAASQQAAAATPINGGTATCTTVPSTTPLALQRVPATCRVR

SEQ ID NO: 49407 - protein, 512 aa, Burkholderia fungorum
MSFVSAVLYDMRQESFSMTGHLPKLSMYIGGEWVEPASGEYFETVDPFTAKPWALIPRGNAEDADRAIRAADKAFRDGPWRAMHPSERGLVLQRFGQLIGQHADELAGIEVRDNGRLLAEMRHQIRGIPKWYYYYGGLADKIEGAVHPVEQPALSFTRHEPLGVCVGIVPWNAPLLLLSLKAAPALAAGNTIVLKPAEFTSASALKLMELVEQAGFPPGVVNVVTGFGKEVGEPLVAHPLTRHLGFTGSTATGSHLYALAAKDVKRASLELGGKSANLVFNDADLNNAVRGVVGGIFGAVGQTCIAGSRLLVQRRIHDEFVDKLAAFTKTARIGDPRKPETQIGPIANRMQYNKILGYIDIAREEGAELVMGGARPDIAECGEGFFIEPTIYTGIRNDMRIAREEVFGPVLATIPFDDPEEAIAIANDSDFGLGAGVWTSDMRLALRMSERLEAGSVWINTYRDISYTTPFGGYKKSGIGRENGIEGIREYLQTKAVWISTAEEIENPFVIG

SEQ ID NO: 49408 - protein, 186 aa, Burkholderia fungorum
MNKKYAMTVLGALAAATMALSSSAQASDGVITFNGKVVDQTCNVAVNGGPATSTVTLPTVATGLLVNSQTAGDTDFTVAVSGCTGAARPAAVRTFFEAGPTLDTANDYTLLNTAGTPAKNVRVQLAYADGSGLKVGDSSQHSATAVATDSGGATMHYIARYYKVGSGAPGAGDVTSSVTYSIEYVL

SEQ ID NO: 49409 - protein, 243 aa, Burkholderia fungorum
MACVCSANPAGANVVITGTRVIYPAAEREVTVKLTNNGDLPSLVQVWVDKGDSKAAPDKIDATFILTPPVARIEPHKGQTLRLTYTGDALPQDKESVFWLNVLDIPPKPAAPADDAANLLQVAIRTRIKIFFRPVGLTDEGAREAVNAVAWKLVSAGSQGAYAIRATNASAYHVNVAGVQIRSGGHEYTIKEGAMIAPGASRSFEFSERLSTLVPDGTEFDFTVVNDAGGFVPVKARIGAYSQ

SEQ ID NO: 49410 - protein, 435 aa, Burkholderia fungorum
MANDRPPRPSRRGFLKAGGAAVAAGASLGAGLAAPQNALGKTQPHAAADPQMAVEPFYGAHQGGIVTPQQSHTYVAALDLTTEKRDDVIALLRAWTEAAARLTQGGTAAPLPTGDAGDNKAAPDSGDVLGLGPCGLTITFGFGPGLFTHEGKDRYGLAARRPAALVDLPRFNGDQLIKEKTGGDLFIQACANDQQVAFHAVRQLSRMAYGTAAMRWGQSGFLSGPRGQTPRNLMGFKDGTNNPSTAKPQLMNQFVWAGASADAPWMEGGTYTVVRRIRITLEHWDNTELDFQEQVFGRHKYSGAPIGKKNEFDAVDLKEEDKDGNPVIPENSHVRLSNQASNNGAQILRRSYSYNDGTNFYIERWPPWRQETEYDAGLIFIAHQGDPRTGFIPINDRLAKFDMMNQFTTHVGSAIFAVPPGAKPGSYIGAGLFET

SEQ ID NO: 49411 - protein, 400 aa, Burkholderia fungorum
MIELDKLTKTFTQKDGQQVKAVDSVSLTVGEGEICVFLGPSGCGKTTTLKMINRLIAPTSGRVLINGEDTSGLNEVELRRHIGYVIQQIGLFPNMTIEENITVVPRLLGWDRKRCRERATELMSMVALEPKQYLKRYPRELSGGQQQRIGVIRALAADPPVLLMDEPFGAVDPINRESIQNEFFQMQRQLNKTVIMVSHDIDEAIKLGDRVAVFRRGRLVQYDHPDTLLAHPRDEFVGAFVGQDSTLKRLLLVKAGDAATQPGTARAAMPVARAFQMMDDSDSRYLTIVDENQQALGYVTRRAARTGEGLCGDHLSTFKATVSADENLRIVLSKMYQFNSSWMPVLDGDGRYVGEVTQDSIADYLSSGRSRRQTGQPAIVSPAVAAAEAAAAQVATADHA

SEQ ID NO: 49412 - protein, 186 aa, Burkholderia fungorum
MKLSLPAIAIAASSLFGLVPLGAHAADGTISITGTVTDSTCSINGNANGTPADKAITLATVPAGSLASAGAVAGTSNPTDLQLSLTGCTGTATKAIARFENGPTVDQTNGYLSNTAGTAQNVEVRLLNAQMQPINVTTGANNDITTNAATISGGAATLQYFAQYYATGVATAGTVSSSVQYSMEYQ

SEQ ID NO: 49413 - protein, 247 aa, Burkholderia fungorum
MKLLKKMPIGIGFACALLAGSAQASVTIGGTRVVYPLEQREVTVKLDNDSKTPSLVQAWIDDGNADAKPGEIKVPFVITPPIFRMDAKKGQTLRVMYTGEPLPQDRESVYWLNVLDIPPKASSATEVNSLSLAYRTRIKVFARPAGLPGKPEDAAAQLSWKIAASADGKSHALSVSNPTPYYVSFSEIDVESNGHTFRNEQGGMVAPRASAVLPIAKMNAVAAGAKVHYIAISDYGGPIDGDAALGE

SEQ ID NO: 49414 - protein, 688 aa, Burkholderia fungorum
MWQTGVNAAFLSYNANAYHSAGSGVESTQSYVGLNAGVNLGAWHFRHQSSVTQQAGAATQFDNIATYLQRDITRIKSQLTVGDGYTTGDVFDSVQFRGAQIATDDRMLPESLRGYAPIVRGTAESNARVTVRQNGQVIYETTVSPGPFEINDLYATGYGGNLDVTVTEANGRTKSFTVPYASVAQSLRPGTTRFSVTAGELRNSTLETNPNFAQFTLQRGLTNLVTVYGGAVAANGYMAADMGAALNTKFGALSADVTGAQTQIPDHGTLRGTSLRIGYSKFIDPTNTNIAIAAYRYSTAGYMNLSDAASVRDLAMHGGNPDSVYRQRNRFQVTLNQNFKEYGTVFLNASAQQYWNRSGSDVFYQAGYTNRFKYGTYSISAGRTRNSNGSMSDQIMLSTTLPLGRDQHSPLLSANLSSSGGNANLQANVSGSLGERNQFSYSGYGAYGDGPGASTASAGASGTYRTPYAQLTGSASGGTGSSQVSAGISGSIVAHPGGVTFSQTVGDTFGVIEAPGAAGASVTSSPGVKLNGRGFAVVPYLTPYGINTVDIDPKGTSTDVEFESTSEQAVPRLGSVVMIRYKTVTGRAALIRAPQLGDKALPFGADVVDATGRTVGVVAQDSRIFARGLEDKGSLFVKWGASASEQCRIEYVLPRQTGKAGAAYTSVEGHCVGGTPTENTNFASGRTR

SEQ ID NO: 49415 - protein, 533 aa, Burkholderia fungorum
MSVSELKRRRTFAVISHPDAGKTTLTEKLLLFSGAIQIAGTVKGRKSNRYATSDWMEIEKQRGISVASSVMQFEYGDAVINLLDTPGHEDFSEDTYRVLTAVDAAVMVIDGANGVEAQTLKLLEVCRSRKTPIVTFINKLDREVREPLELLDEIEQHLGVAAVPFTWPIGMGKDFQGVYDIQRDQVRLFRAGQDKAGGEVETLQALSDEEGERRFGHAWVKAKEEIDLITGASPDFDREQFLAGQQSPVLFGSAINNFGVKEILDALVDLAPPPSMRMTVQRPVMPDEPKFTGVVFKVQANMDLAHRDRVAFIRVCSGHFERGMAVKVTRTSKTFRANNVVTFLSQRRETVSEAYPGDIIGIPNHGTLSLGDTLTEGEQLQFVGLPFFAPEIFQTVEVVDPMRAKQLGEALKQLGEEGAIQVFRPEVGGLMILGAVGQLQFEVVSHRLSTEYKVDVRMAPARYRMSRWVTCDDAAELRRFTDSYAARIALDASDAPTYLASHVSEIEVAQKAWPKIVFNELREHSGAPFKRAM

SEQ ID NO: 49416 - protein, 377 aa, Burkholderia fungorum
MSYPTIDHRGPEFGELGLTVLDGIKKIFRTQQPVVIYPASGTGAWEAALSNTLSPGDHVLMFETGHFATLWKKMADSLGLKPEFLGLPGIEGWRRGVQPQMIEERLRADTQHAIKAVCVVHNETSTGVTSDIAAVRHAIDAAGHPALLLVDTISGLACADYRHDEWGVDVTVSGSQKGLMLPPGISFNAISPKAVAASKQAKLPRSFWDWAEIVEMNKTGYWPYTPNTNLLYGLSEALEMILGEGLDNVFARHERLAEATRRAVRAWGLEIQCADPAVYSPVLTGVMMPDGIDADAVRKLIYERFDMSLGTGLGKMKGRMFRIGHLGDCNDLMLLATLAGCEMGLRLAGVPLEGSGLPAAMEWLSQPTTALGLKVAA

SEQ ID NO: 49417 - protein, 217 aa, Burkholderia fungorum
MTVFDYLSANWPELLQLTAQHVWLVGIAVGCAIFVGVPLGILINWHEWLAAPLLSIATVVLTLPSIALFGLMIPVFSRFGQGIGAVPAITAVFLYSLLPIMRNTYLALRNVDAGIKEAGIGIGMTVWQRLRLVDLPLAVPVILGGVRTAVVMNIGVMTIAAVIGAGGLGTLIIRAIGQSSMMKLLVGAVLVSVLAIVADLLLQALQRLLTPKGVQKT

SEQ ID NO: 49418 - protein, 472 aa, Burkholderia fungorum
MCSDHIRLPAQLAAGDVAIRVENLSKRFAVYHTRLERLKHIVAPRRTKGFAEFWALDHVDLTIGRGEACAIIGRNGSGKSTLLQILCGTLRATSGRVAVNGRVAALLELGAGFNADFTGRENVYLNGAVLGLSHTEINERFVEIEAFAEVGDFIDQPVKTYSSGMYVRLAFAIAIHVDPQILIVDEALAVGDARFQAKCLNRIKKMQADGVTLLFVSHDVSAVRTLCDRALWLDCGKVKMLADAFSVTAQYSQFLFEGEDYAVAGNGSGSPQDSSGALQSAASQDISPSAHPEEANQSRAGACGEELMAMHRPINHWGSHVGSIVQAGIYNARGERASTFVAGEPIEVRVIFRPPLNADRKTMSVAFSLKDLRGTDLIVSTTWDQRRLDFEQAGGEACIRFRLRNQLNRGSYLLAVALEDRAGVAPQYYEYIEGAHYFTSLVEDTLFGSFVVDVEQTIEPGHSLYANARVSV

SEQ ID NO: 49419 - protein, 459 aa, Burkholderia fungorum
MLDSSARLTGLLCGTQPMNDIWAPRATLQRMLDVEAALARASATHHVIPPTAVAAIEAACQADQLDADALARDAALGGNLAIPLVKQLTARVKAADAEASKYVHWGATSQDIIDTATVLQLRDTFDLLDRGLQATCHAVAKLAAAHRATPMIGRTWLQQALPITLGLKFAQWLDALLRHRERLDALRSRVLVLQFGGAAGTLASLREAAPQVTQSLAEELGLAVPTLPWHTQRDRIAETAALFGMLIGTLGKIARDISLQMQTEIDELAEPAAAGKGGSSTMPHKRNPVGCAAVLTAATRAPGLVATVFAGMVQEHERALGGWQAEWDALPDLARLAGGALANIEQIAAGLNVNVARLAANLDITHGLILGEAVMLALGDSIGRLDAHHRVERASKAAIRDGRTLFDVLAEDPAVTEHLPLERLKQLLDPAQYVGQAHAYVDAALALHTTRSQRDHSRE

SEQ ID NO: 49420 - protein, 382 aa, Burkholderia fungorum
MPELSYPQSGTASGKGRNIGLIIFLAVILVGAVYCAVHLLDDLQPVRESSALPYLLLGVALLIALGFEFVNGFHDTANAVATVIYTHSLAPNLAVVWSGGWNFLGVLTSSGAVAFGILQLLPVELILQVGSSAGFAMVFALLIAAIIWNLGTWYFGLPSSSSHTLIGSIIGVGLMNQLIHGSNGTSGVDWNQALGVGKSLLFSPLVGFLAAGLLLLILKAVVRIPALYAEPKGKEPPPFWIRSLLILTCTGVSFAHGSNDGQKGMGLIMLILIGTVPTAYALNKAVTPAETQTFLAVAHQTSATLAKYTQGAAPSANPRADVETYVRTHQLTPATLPALQQLTEIIAGQVGASGSMAAVPQGLVDNVRNNMYELARKKWIPC

SEQ ID NO: 49421 - protein, 345 aa, Burkholderia fungorum
MKAINRIIEQARRSPMRIVLSEAEDPRVLQAAQRASHEGIARILLAGDAARIREAAARFDVDLSGMELVDPAASALAASYADELFALRGNKGMTPEQAQREILNPLCFANLMVRLGHADGSVSGAVNTTAEVVRTALQIIGIAPSFKLVSSFFLMMLCEPFHTLKGGLIFSDCALVVEPDAGQLAEIAIAAADSAKSLLMDEPRVAMLSFSTSGSAHHAAVDKVVNATHMVQERRPHLAIDGDVQLDAAIVSEIALRKVKHSQVEGHANVLVFPSLEAGNIGYKLAERIGGAKAIGPLLQGLRKPANDLSRGCSADDIYYVIAVTAVQAQAALTHPDALLTPSHS

SEQ ID NO: 49422 - protein, 467 aa, Burkholderia fungorum
MKAGLKQRHMTMIALGGVIGAGLFVGSGVVVQQAGPAAVLSFLITGALVVLVMRMLGEMACAMPAVGSFYEYARLAFGGKRACGNLAGFLTGWMYWYFWVIVVAVEAVAGAKLVQFWLPDVPAWAISLVLLVTLTATNLVSVGSYGEFEFWFASIKVAAIMVFLFLGSMYVLGLWPASKHVTEVLPTLFSHGGLMPKGIGPVLSGAVAATGFYFGAEIVTIAAAEAQEPAKAVARATNSVITRVLVFYVGSILLVVALVPWNSPKMATPYVSALDAMGIPAAASVMNAIVLTAVLSALNSGLYAASRMIFALTRHGDAPAALARVNRRGVPVRAILIGTVFGYASVVMSYVSPDTVFAFLVNSYGTVAIFVYVLIAISQLKLRARIERDAPQTLRVRMWCYPYLTWVSIIGMVGILVAMAFIPEQRQPLWFGVASLGVLLLAYPLRGRRSDAMPGEPETVEYRHHHR

SEQ ID NO: 49423 - protein, 286 aa, Burkholderia fungorum
MNARTDFSVLAVAELSFATIASGICVPYVECGEGEPLVFVHGSLCDYRYWSAQTAALSQHFRCISVSLSHYWPANEACIQGEFGWQTHVAELAEFIEAINLGPVHLVGHSRGGCVAFHVAREYPRLVKSLTLADPGGPLQLEGMPDASLPGATNVLRARVADLIESREIDAGLELFVDSVSAPGSWRKSPAAFRTMAIDNADTLPKQFRDPLPAYSHEVARDVKCRTLLIDGQRSPRMFRNNVEKLAEWIGYAERQTIAGASHGMNVSNAGAFNRLVHAFVTFVSF
